United States Patent Application Publication US 2006/0134663 A1 - sequence listing, part 118

SEQ ID NO: 366048 - DNA, 488 bp, Homo Sapiens
ggctacagaataaagaatgaactgcaaatggataagaagagatgtggaaagactagttagggaccagaggtaggctgatagtccagttatgtgtttatatgtgttcataaatatgtacatacattcacaaatatgtatacatgcacgcatgcacatacatatctttttgtatacacatacctttgtatgtatctgacacacccacacacgtatataaaaatacatagataaaagcctggaagcatatacaccaaaagttgacggtagttacttctgcagtggggaatgatatcaaggagacagtaagggtgatatgatactaaggtgataacttcaatttttactctagggatttccatattatctggtttatggaaatgcctagagtaaaaaattgaagatatcacattagtatctcccttattctcctttttaaatgagagaatactcatatatttcttgtaaaattaaaacaaaacaaaatacca

SEQ ID NO: 366049 - DNA, 820 bp, Homo Sapiens
aaaagatttgattccacataaggctgcaccactgtgggaaagtacccaggtgtagccagtacttctgtcggcatgggaggggataggactgtagaatggatgcaaacagaagccacgttggaagagggagcaatatttgaatctcctgggtactgtggtggcagtcgaggtgggaagccctggtacagaacatctccagaggaaagtggaacctcagcagcttgtccaaggttagctggtattcccatggactgaactgctggttgtaggagctgtgggtgaacctgacttggcagctgagtcacaggctgcagaagggttggaagctgactaggaaccacagttgatacccccgggatcgcagctgttgtagcagatgaagccaacgtgagcagaggctgagtaatgccagctgccattgtgatgggaagggatgagaaacctgtctgagccgtagacacatgaggagttgatatgggaatctgagagacagggtactgagggagcaagggagtagggagcggctgtcccactggaaggaaatgagcaccagagtggactggaacaaccgagggttgtgtcgcaactgggatctgaggttcgccttggatagttggtactggctgggaaactggaagctgttttccagctgatacttgaggcaagacttgtggagcttgaggttgactcactggctgtgcagtagtggcctcactggaggttgatgtctgtgaaagtgaatactgcactgtctgtgaggaggggctgtctgctgtattccctgcacacttgagggtggatataccccatggggctgaga

SEQ ID NO: 366050 - DNA, 685 bp, Homo Sapiens
atgacaagatagatcagatccttgagagctggaacgcatcgtggaacgtctgaggcagccaccctctatctctgcagaggttgagaagatcaaggaacagatcagtgaaaataagaatgtgtcagtagacatggaaaagctacagccgttgtatgaaactcttaaacagaggggagaggaaatgattgctagatctggggggactgataaagacatatctgccaaagctgttcaggataagcttgaccaaatggttttcatttgggagaacatacacacactggtggaagagagggaagccaaactactggatgtgatggagctagcagaaaagttctggtgcgatcacatgtcattgatagttaccattaaagatactcaagatttcatccgggacctggaagatcctggaattgatccttcagtagtaaaacaacagcaagaagcagcagagaccataagggaagaaatagatggactacaggaggagctggatatagttattaacctaggttctgaactcattgcggcatgtggggagcctgataaacccattgtcaagaagagtatagatgagttaaattcagcatgggattcctacacagtgcaatgtctagtgataatataaatactaaaagcaacttgttaaatgtataaataaatgtgatttatttttgctccttta

SEQ ID NO: 366051 - DNA, 155 bp, Homo Sapiens
ttttttttagtaattcaaaaataatttttattttaacttacatgactgaaagatcaatgaatacaaatgccacacaactaaaagcacccctcaaccaaacataaaatacagaagtgaatacaaaagatctggaattaattactcatgcaatagtc

SEQ ID NO: 366052 - DNA, 421 bp, Homo Sapiens
acatcttagaggctttattacttcatcactaacaaggtactccaaggaatgtgaaacagatcatgatttgcacaaacagtacatttttaagcttcagaagataaagcattccagacgactctgtcgaaatacatcaataaatttaaagcagctacatctaaattgtgaggataaaatacatctaccaacaggaaatcaatgtcttaagcatacaaatgcaaaccttaaaataatttaaatgtaaaatatacaactgcaaatattaatcacagtaacaaacacaaaatagaagtatatattaagagtattccaggatttctgttattacagatttgatttcataaatgcaggaactctaaccatcaagtaaaggttttgataaatccacatccaaaatttcctaaaatggtcaagtggtatc

SEQ ID NO: 366053 - DNA, 532 bp, Homo Sapiens
ttttagccttggttgaatcctcctggaattcacagggaagtggctttgccctctgccctcgctgctggaaggcaaggggccgttctcgccttggttttctaggttgtgttgcggcaggagctgactgcccctaggcctagatctctgcacaacttcgctcagggacacctgcctctgtgcatgtctcatggtgtgaatgtgtttcctgctcacaggtaccgttttgtgtcatgcagttactggaatgtacaaaagcagctgtgatctttgtgagagctgcacagagcaggagtctgagagctgcacagagcaggagtctttatttggttcacttctggtctgcagcaaccacttgctactaaaagatggaaaagatgtacaaaaatgtcacagccctttagaaagcgacattatcagaaatgtatgaccttcagtcctccctccctctcctatgcccccaccagaccaggcggcgagaaggaacagggagtgaacatgtaacggaaaacaataaaactgaatttaactggaa

SEQ ID NO: 366054 - DNA, 887 bp, Homo Sapiens
gaagtcgcccggcgcgggagcgcgaactctcgcgagaatgccgccagctccggaggcgactgcggcaggagcccgagctctcgcgcgacaggcaccaattcgttagacgcgcgctgcaggagcgcggaacatggcgcggcacgggccaccgtggagtcggttggacgcgcagcaggagcgcgacgtgcgggagctcgtccggggtgtcgccggcctccaggacgaggcagaccccaacttccagctcgccctaaacttcgcctggtccaacttcagatttcatcgtttcttggatgtcaacagccacaaaatagaaaaaacaatcgaaggaatttatgaaaaatttgtcattcattctgatctaagcaaagctgctagttggaagagattaacggaggaatttctaaatgcaccacttcccagtataaaggaaataaagacagatgcacattattccatactgtcacttcttctgtgtctgtcagactctccttcaaacagcagttatgtggagacaccaagaaataaagaagtggaaaagaaagatgatttcgactggggaaaatacttgatggaagatgaagaaatggacattggtccgtacatggacacaccaaattggtctgaagaaagtgaagaggaaaatgatcaacagcccttaagcagagaggactctggaattcaggtagacaggacaccgttagaagaacaagatcaaaacagaaaactggatccttgtatcagttggaaagatgaccgaagctggctggaacatcatgtggtccatcagtactggacagccaggccctcccagtttcctcatagtttacatttgcactctaatttagctgctgtctgggaccaacacttgtacagcagtgatccat

SEQ ID NO: 366055 - DNA, 309 bp, Homo Sapiens
cataattatgaattcagaattttaaaaattgggggaaaagccatttatttagcaagttttttagcttataagttacctgcagtctgagctgttcttaactgatcctggttttgtgattgacaatatttcatgctctgtagtgagaggagatttccgaaactctgttgctagttcattctgcagcaaataattattatgtctgatgttgactcattgcagtttaaacatttcttcttgtttgcatcttagtagaaatggaaaataaccactcctggtcgtcttttcataaattttcatatttttgaaaaa

SEQ ID NO: 366056 - DNA, 426 bp, Homo Sapiens
tatttattggtgtcatatcgccccctaaactgggaccaggatctctaacggactcatctttgtgcccacaacatgtaagcccaataggcaggtgctcacatatttgctgaaggaacagagaaagaactgcggagaaagacaaaagctcctctgaagttttagactatagaagcaaaaattatagtagcaaaagatgaatgagaaattctgttctagtcccagtgaagcaggaaggaaagggttgcaaacttgaggctggtaaggaagaaataattactgtgaatgcatttagccactcccctctactcaaaaatactggtaaactctgatttttatatttgtttagaatttaaattagaattctgtatctttattttttggaattctgttgttttgccttagtttcttaataaaaagttaaacatt

SEQ ID NO: 366057 - DNA, 584 bp, Homo Sapiens
gagccacaactgctgggggtcgtcgcctgggctcgcctccccggcctctctccaaggccggggccgcagcgggctcacctccatgcagacaccctggtggacctggtagcggcacattgtgtccagtttctgccgtctgggccgcagaactggaatgtcccgcgcctcggccatccggagcagctcggcccgcttcccctgcagcccagctttacccgcctggagcaggagccgggccacagagcggcgggcggcctgcagagccaggagacacggggtcatgccaaacagaagctccagccgagaggtcggcaccaggtcatccagcagcaagcggcttagctcctccccaccaggccgctccccatgccgcgctgcatgggagaaatgacgggtgacgaggcgaccccaggtcgcgccccggacggtcgagagcaatgccatggcgcagctcccgccagggactcgatgccccttgctgcgtccccgggagcggtaacccgcgccgcagttcgctcccaggctcccaacaccgaggtgaagggtactcgacagccgtctccgccgagctctctcggacagga

SEQ ID NO: 366058 - DNA, 1030 bp, Homo Sapiens
aattcctgcgatctcggccgcccgagggaccccgggccaggctccggggtcgccccggctgggtctctgcggccccacagctctgggcggggatgggggcgccggcgcctacgcgcgaggccaaccgggggaaaccgaggcagtgaatggcccaggccccgcccggttatcccggagccaggccgggagcgcccagtgtcccgcgaccgcagccgccgcagcctgaactcgtcccctcccagtaggatgcggagcgcggcccttccatcctgtccctgccaccgttgcttccccacgccgggccgccgtcgggatgggcagacggcgcggccggctggggccgggctggcggggccctcccgactgacttccccttgcagaacccagcgggtgccgcttctccacccgaggcttccacctccaacgagccatgttccaggctgcaggagccgcccaggccaccccctctcatgacgccaaaggcggcggcagcagcacggtgcagcgctccaagtccttcagcctgcgggcccaggtgaaggagacctgcgccgcctgccagaagaccgtgtaccccatggagcggctggtggccgacaagctcattttccacaactcttgcttctgctgcaagcactgtcacaccaagctcagcctgggcagctacgccgcgctgcacggggagttctactgcaaaacccacttccagcagctgtttaagagcaaaggcaactacgacgaggggtttggccgcaagcagcacaaggagctctgggcccacaaggaggtggaccccggcaccaagacggcctgaggcctctgtaaccttccaccccctctgcggaaggcctggagccggcagggggaaggtgggcacaggaggtcgagctgggctttgcgtggggccaggtggaaggggatgaggcttgctcggcgtacggggaccaggcagggctctgtccggactcttcttcttctttccgagcgtgaggttggcccagatgggttcccacctgtctgtgtcagcccc

SEQ ID NO: 366059 - DNA, 605 bp, Homo Sapiens
agcgggtcttcccctcgccgccgtccccgcctttgtctgtcccccgccccggctccgcgctcccggctccgcagcgccccgcgggcctcgcgctcgcaggcctcgggtaccggccgcgccgtctgcccatcccgacggcggcccggcgtggggaagcaacggtggcagggacaggatggaagggccgcgctccgcatcctactgggaggggacgagttcaggctgcggcggctgcggtcgcgggacactgggcgctcccggcctggctccgggataaccgggcggggcctgggccattcactgcctcggtttcccccggttggcctcgcgcgtaggcgccggcgcccccatccccgcccagagctgtggggccgcagagacccagccggggcgaccccggagcctggcccggggctccctcgggcggccgagtcctcccgccgccaggggccgcccccgcccctttgcggcccacgaggctggcggcggcgtccgggcacgcggtctccaggcccggccgcgaggctgcggggaggagcctgcacgagggcccggcagccccggcagccccggaagccccccagccctcggcgcctctgcaacct

SEQ ID NO: 366060 - DNA, 859 bp, Homo Sapiens
aatatagtataacaactatttacatagtatttacatgtatcaggtattattaagtaatttagagatgatttaaggtatatgtgagggtgtatgccggttatatgcaaatactataccgtttcatataagagatttaagcatcttcagattttggtatccttggcagggcttttgagggggcaggggcgggagtcctgggatcaatccctgaagatactgagggatgaattatgtatatttcacttcaaggcttgagatctttccttttggcttacacgaaggagagacactgttttgcagtacctgaaaaacttttggaagacaaaggcgaaagagaaatggaattaaaagaggctatacatgttctataaagtttacgtgaagtcagatttgccaagctaggcagaaaaaaagaaggaagccaggatatatatggcatggtatatgtggtggttacaccatgccgctcaccaaacatttctgtttctctccttcttggcacaggggagaactgtgcttcctggcccccttatggttgggtggcactattttacagagttcttggccaatctgtcaggagcagaagtgacagggcatttaaacaccactaagagatcctctgattctccttgcccatcagctcagcacctcagaccagctgtttgaggaggtgctgcagctgcttcatcagcctggttctgagtggctaaaagagcctccctggtgattatgacagatgtgtatagatgtagaaatctttattgttttaagccaccgagagtttggggttgtttgttctgcaacgtaaaatggctattatgatggacacatcatttataaaatttacctccagagaaac

SEQ ID NO: 366061 - DNA, 1440 bp, Homo Sapiens
  misc_feature (72)..(72): n is a, c, g, or t
  misc_feature (79)..(79): n is a, c, g, or t
  misc_feature (109)..(109): n is a, c, g, or t
  misc_feature (132)..(132): n is a, c, g, or t
  misc_feature (172)..(172): n is a, c, g, or t
  misc_feature (176)..(176): n is a, c, g, or t
  misc_feature (191)..(191): n is a, c, g, or t
  misc_feature (301)..(301): n is a, c, g, or t
tgaagggggtgaagctgtatttcccgagattccttgatgacatctaaagcacaatgaaggatgtggtggtcnatgttcntgcccccacggatcgggcaagtaatttggngagagaaggcatcactatgggcntcacctcatagtccaccaacatggaggtgttgaacaaganctgntggtagttgtattcntgggagccacctttgaaggagtcaggcatgagggggtgccagtggtagagatggttgaactccatggcaatgcggttgcggtattggaactggacaccgaacagcagctntgggtcaaatttcagctgcaggaaatagccactcagctgctgcacgtactcctcgatgacaatcttgatggtctcccctatgaggatgaggcgggtcgtctggaaaagctgctcatcgccccaggtggggtgctcagccttcagcaggtcacacacacggttgtgctcacgtagccagagcgtggcatacagcatgagcccaggaagcagcccaaacacctcctggcccacagccatctggctctggggcgggatgcctcgggggtagtgcatcaacacaggcgcctcttctaccgagggcgggtacatttctcccatccagcacctggtacttgagtttcccatccttaaagagccgcagttgatactgacgctccagattgtctccataaatgtgccgagtctaccccatggcccaagcccttggtgaagccaggacccatcttgccagaagttttgaagaactggtggctgaagtcttgtccaaagaaggcaaacatgaggttggtgcccttggggctcaggtatgaacttcctcctgagcaggaagcggcgggccaggagctgggcatctggcaactgcttcttccctttggttcccatgggtctggggcaatctttaggcacagagggcagaatacgagtgtaatagctcacgttggagaaagactcccagctgatgtagtcatgtgctgagttgtaggtggggggactggggataaggttggagcgcactgtgagtaccaggcgcatgagcatctctcggatgaaggtggcattgacaaactcccagaaccagcgcccgtgagtgagcaggaagtgggtgaaagaggggctgggccgcagtgaattccggagccaggtccacaggccagggatggtgcagttggggccggaatagcccgtgcgggtgcagtcacactggtagcggtcaaggccgaagcggacacagatgccctggggctggcatggataggaacaacagggattcactggcgtgggcgccactgggtccgcgagcaggacggggagcggcgggagcaggagcaggaacagcaagaacgcggagcaagagactccggctcatggcgcggctgctggggtgcgggacgcagagtgcaggctcctgtgcgtgcgcc

SEQ ID NO: 366062 - DNA, 985 bp, Homo Sapiens
tcactgcaagcaaaacaacatgcagaaaaagccagacaaatcctcgccaactccattgtgcctccctatagtgagaatacagatgttttcaagttttccattgagcttttccataccatgggcagagctttactctcccttcaaaaatttaaggaatgtgcagagaatttgacaaaagcagagagactttcaaaggagctgctacaatgtggaagaattataaaggaagaatggatagaaattgaagcacggatcagattatcatttgcacaggtgtatcaaggtcagaagaagtcaaaagaagctttgtcccactatcaagcagctttggaatatgttgagatcagtaaaggtgaaacaagtcgtgagtgtgtacccatattgagagaattagcaggtgtagagcaagccctgggactccacgatgtatccatcaaccacttcctccaggcacatctcatcatcctgagtagaagcccctctcaagcggaggcagcagactcggcacacatcgtcgcccatgctgctgtcgcttcagggagacacgagcaccatgatgtagctgagcagtattttcaagagagcatggctcatcttaaggattctgaagggatgggaagaaccaaatttctttcaattcaagatgaattttgccattttctacaaatgactggacaaaaagagagagcaacctcgatcctgagagagtccctggaagccaaagtggaagcattttggcgatttcagtcccgaggtggcagagacataacgggctcctgggaagagcagaactggcgcaggggaaccacagtggggcccgcaagaaactgaagaagtgtctccagatccagaccctcttatatggaccgcaggacaaaaggactctggccacccagcaggccatgggcatgctgtccacggcccccaaggttgcttcgaagccaaggcaggcatcaaaagccaaagtggccttctgcaccagcat

SEQ ID NO: 366063 - DNA, 439 bp, Homo Sapiens
cagtgacaaagcagaggtctagacattgaactttagagggatactatccgtcattcctaacagatgtcttagcacaagcataaaaactaaatctttatttaacactttatggagttaattttttaacatttataaaacaaaaaagggtggagaaggaagggtaaagtacagaggcatggagaggaataaataacagttgttgttacctggagtcttgtattcatttccatagaaataaaaattcttcttagagtccacaaggaactccacggtcccagcagaggaatattttactgctctggcaagagctacagctcgttctcccatcgctctgcgagtctccgcatccaaaaaaatgctacatatacaaaaaaatgtttgtctacatttcggacaaaaatcaagttatcttttgtgtgcattacataaacattttctt

SEQ ID NO: 366064 - DNA, 571 bp, Homo Sapiens
  misc_feature (426)..(426): n is a, c, g, or t
ccacgcccccttcagacacagagtccactggctcaatgtcaggcgcagctgggggccaacttgtgtgtgtgctgggggtgggagggggtgcagaggcagctgaaccagagggtaagagttgcagggctgggagagaagttctcccagctgccacccaaaccaagctgggtgttatgccaggagagaggagacctttctcatctgcccttctgtgcccttttcatcctgagacttgtcccaggaggctccatatgacgcagcaatcctcacccctctggcatcaacatttcttccaaccccaggagaggaaggtgtaacttgagtctctgcctaactcttgaggctgcagagatgtgtcctcccacagaggagatgaaaccaccaaggagctgtggacaagcggactcaggaaagctgtgagaagcnagacgaatgtcggagccagcgcccggggcctccagtctggtgcctaagtctgtgacaagactctgccggccctcgtgggaatgcgcacgtggcatctggccatcgcactgccagccccgcccagcatcgaagtgccccagggatc

SEQ ID NO: 366065 - DNA, 1593 bp, Homo Sapiens
actcgtgggaaaagcaactgcacctcactcctgtgactgcctccccaaagaatcctggcaaatgtagagagccagtgaacagaaaccaacccaacagttaccaaggggaaacaaagttttcattttattcaggtgctcacaatgaatcggtctccagattcatttgatcaaaaataattccagctgaaaatcatcacatcagagacttcttcacatgtactaaaggtgttgttggtcaggctcctaacccagcaacctgaggggggctgctaacgtgttcatgtgtcccactgtagagatgcaacacaggcatagccaagctcctaggcgtcatgagaaggggaaaggaggctccagatgccaccttctcgctgtgcaaacttgccaggccacagggtatcggacatgccctgtgggccacggggatgcttcaggatggagcaatgtgcccaaagccgggttccttgaggctggggatgtcgttcttcctgtagaagtcagcctgcacatggttggcacggccaaagtcccggtttaggggctcaatgggctgattgatgcgcttcccatagacagaagacgtcagcactccaaccggcctctcctgttcctcttcgttaacatgaagtcccaggctttttgcatgttctctgtcatctcggtgcaacttctgatcataatctaggcgcctcttaaaaatacaatcatagagggaaataattcctgtccgcgccgggcggtagtagtagctgtgctctttggggtccaggcgccgcggcgggatgtagctgaaggcggactgcgccgagacgggcggcggcctgggcttgccccgcagcgtggacgcggtggtctcctcctcgtcgtcctccatgccgccaccgtccagcgcccccgccttggccgcggtccgtcccgcccgcccaggggcccagtcggagtctgcaggcctcaggttgctcagcgccagcgtctagcccgcgtctgtgttcggtcgttgcctggaaaccgccgcctggcgacccggagctgccatgcagcattcccgctccagggtggagcgaccctcccctcctccctcccggccccctcgacgtacacctggggtctctccttccgttcctcctcgggaggagcccgactgggagacgccgcggggactacccatttccagcccgctcacctttcccatgcagcagcccctgcttcactcactgatcactccttcgcgagaccattagtgactgagcacctagcgcatggtgtgtcaggagctggagattgagccttgaacggagcaggccttgtccacaggaagcttacagtctggagaagacacatgaaagacgcgaagaagccaaatgacttgccgaggctccagggcagcgctgtccaatagaaacatgatgagagccacgtgtgtcgtttcttatttgactcagaggaactgactgcttccgttttcccagaattctatcaaatatctttcaagtgtccacatgtacccaagcgacgcacattcctcacataggagggaagggcaagggaaaggtgggcaggagatcctttcaatcccagactgttgaaggaagg

SEQ ID NO: 366066 - DNA, 512 bp, Homo Sapiens
  misc_feature (58)..(58): n is a, c, g, or t
aaccacaatgagataacatctcacactagtcagaatggctattatcaaaaagtcaaanaataacagatgctggcaaggagaaaagggaagcttatatgcttctggtgggaatgaaattagttcagccattgtagaaagcagtgtggtgatttctcaaagaacttaaaatagaattaccattgacccagcaatcgcattactaggtatatacccaaagggatataaatcattccgtcataaagacacatgcaggcataagttcactgcagcactattcacaacagcaaagacatggaatcaacctaaatgcccatcagtggtagactggataaagaaaaggtggtacatatacaccatgaaatactatgcagccaaaaaaaaatgagatcatgttctttgtagcaacatggatggagctagagatcattgtcttaagcgaactaacgcaggaacagaaaaccaaataccacatgggctcacttataagtgggagctgaacattgcggacgcgt

SEQ ID NO: 366067 - DNA, 693 bp, Homo Sapiens
  misc_feature (565)..(565): n is a, c, g, or t
  misc_feature (658)..(658): n is a, c, g, or t
aagtacgaggccgggtggttaatcggcacgaggggacggaggaggaccgggcccgggagaaggtgctgatgcaggagcttgtgaccctcattgagcagcgcaacgctatcatcaactgcctggatgagtgaccggcagagggaggaagaggaagacaagatgttgtgaatgccatgatcaagaagaaagagttccagatgggaggctgaacctgagggcaatgaagaaggggaagttcaagaccatgaatgatgtttgaaactgctaggaaacaaactgtgatgccaatgagcaatgtcccccatgagacaatgatgctaacagcactgatgaagccagttgtggtgactgccccctcctggagcagctcctgggctgtgctctgtttgaagggggcgccctgctcccctcagatcagtcaggaggaagatgactaaggggagggatcctctgggtgatggcctcttcctcctcagggacctctgactgctctgggccaaagaatctcttgtttcttctccgagccccaggcagcggtgattcagccctgcccaacctgattctnatgactgcggatgctgtgacggacccaaggggcaaatagggtcccagggtccagggaggggcgcctgctgagcacttccgcccctcaccctgnccagcccctgccatgagctctgggctgggtctccg

SEQ ID NO: 366068 - DNA, 312 bp, Homo Sapiens
  misc_feature (68)..(106): n is a, c, g, or t
ggtcctaaatcttaaatagaaaaaaaactaaagcgatttgcttaagccattgtacattataaagagcnnnnnnnnnnnnnnnnnnnnnnnnnnnnnnnnnnnnnnnaaagctgcattcagagccacaaaggaataggaaagtagggtagtgttggattctggttttatgtaactctaaaataaatgtatctctttaatatctcagttgtagggattttgtcaataccaaagcagactgagttgtggttttgtaaataaagttttttctaaaaatgaccattcttcctttaattttttgttatgcccacatat

SEQ ID NO: 366069 - DNA, 540 bp, Homo Sapiens
ctgaaatatatgcagtgttgtcatcaccttctattctttcacttctagctcttgctctaggaggggaaggaggaaggaggacatatgtatccctaaatccccaaagtcaaaaaccaactctttctccaccacagtgacaaatgactccctgttctgcattctaccaccctcaattatggaggcagcatgaagtattggaaagggcaaggtctttggagtcaggcagacctcatggcccaacctcatcatttactagtgaggggactagaatttagcaggtaggtaaccccattcaacctctttgaacttcagttcccaatcagtctatctcccaaggttggtgagggaatgagacaaagattaagaagctcttggctgggatgaggtttattcaataaatgttagtgtcctttccaagtaaaaattgttttggtgccataggaaagcagacatctgaatcagggccacacaacgctttctaggatcttggaggatatagtcctattaaaaaggtgaacttcagtttcatctttatattcc

SEQ ID NO: 366070 - DNA, 447 bp, Homo Sapiens
  misc_feature (428)..(428): n is a, c, g, or t
cctcattaatttatcattgaatataaatgctgacagaaagcagataaagaccttgtagacattttcatatatttacaatccaaaaggtgaatcacctccttctacttgttaaaataaatcattttatctgcaactcatgggagccttaaacactaattaggagcaacatgaggctgagtcagtttccaaggtaataaaggaaatagcattttaacaaaatgggcatctttgatataaacatgcacacaaataatacaaaattgagaaagatggccctaagtactctcaaaaatcggcaacaagtgggaacatggtacttatttaagacccagagttctgcttgccctaaacatcttcctactactatttctttttttccacccacacttggttttggaaagctgcctaaaaatccggaatattaaacnggttaaaaccagggaaaac

SEQ ID NO: 366071 - DNA, 759 bp, Homo Sapiens
agcgggagccccggccggctgcgcggcgcgctgggtgcatgagggggctgctccggagcgacggcggctgcagctggagccaggcgctcgcccgtccgccggttggctcgccgggacctcgcgcaccggcggcagagtcccttgcgtggattggcaagcgacgccccacctgccccgagctcaccattttctttcgcgctggctgcagctgacccggcgaagggagccgaccgggccctgggctggaggtaaaaccccacggaaagaacatgaggttcccttggaaatcattcaacgaggaacgatggaaggggctgtttagaagagcttacaaagctacaggctgtaagactggggcctgagtgctggcagtggaaaacactgttgggctgtgatctctccctgaaaagttccaggtgccttttcccttcctgcaaaagaaaggaagcgaaagagaagaccatgtccatagccctgaagcaggtattcaacaaggacaagaccttccgaccccaagaggacactttgaacctggcacaccagaggtttgagctgcacaaacggggctcaggcatcccctcaactcggggtgtgaaccttgaaggcgggatagtggcaagttgcccagtgaggaggaccacaaatgactgggtggccagtacatgtggtggacttcttcaatcggatcaacctcatctatagcaccatctgttgaattctgcaccgagcgacctgtcctgtgatgtcagggggccccaa

SEQ ID NO: 366072 - DNA, 527 bp, Homo Sapiens
  misc_feature (40)..(40): n is a, c, g, or t
ggcggaaaggaagatgaacaaaccttgctttgccttggtntcaaactagttcttgatttaagacaccagaaagggagagagggagtctgcttagagtttgaggttgcctctcacaagatgacagttaaaagttgccaccttacttaaaaggcattaaggaggcatttactcacaaaggagagagagtaaatttttttcctaaagagggaaaaaaatactgataatacatagaacaatctgcacatccagtcttggcactttttccaatttgactgatctctaaactggtgacccttgcatatatcttagtctcttttctacaatcttcttcagaaagctacagcagctaacaatcatgtataaagatgcatttcctagatcatcttcagaagaaaatctcttcagcactttccctagaatctgtctcctgaccaccccgccccagacctgctttctcttttgagaattcataaccaggtatgtttagataccagttcaaaagaccactctatgggttgatgagaaaa

SEQ ID NO: 366073 - DNA, 730 bp, Homo Sapiens
catatcgtcgacccacgcgtccggatttcataaaattctccagctgaaaaaatagattcacgtacccaagtcgttccaagcatacttaaaagttttacggtaatcgaattgtgtatatttttaaattttattttaaattaaagttaggattatgaattcagttcctaaattagcctcatttcacttctgcatttcaagtgggacaagttattaccatattggacaatgcagtctagtgaagtagaggatagtggaaagtcagacttaaaaagttgtttagaaccagctctggaaggccttggatgtcagattaaaggactgagattttacccttgagtcaggcagaataatggatggtttttgaactaaggagtgacacaaggttgtgcttatgactagaaggaggccactaggtggccagctggtgagtcaggacacccttcagttgctttgacttcagccctgtggattcaaagtctgatttttgtcagcgctctagagcagtctcaccaaaagtgtggtccacaaggcagtgccagtctgtaagccctttgttacacatccatgtcaaggcatttacagaaagtaagaatttagaaacttatagcagtttaacagactaattttatttctgtgggtctaataaaaaattgagggattgtactttgcatattctttatttcccttataggtagtaaaaagtgttcgagatgggagtcttattctgtcg

SEQ ID NO: 366074 - DNA, 165 bp, Homo Sapiens
taattgtgtctatctgaccactagtgtggaggttccttgaaggataaagactctgccttatttatccttcaaggaacctccacactagtggtcagatagacacaattatgcactaggacaatagaaggtcaatttgttttatctctgcctcacttaggcccccag

SEQ ID NO: 366075 - DNA, 1028 bp, Homo Sapiens
ccagcgcccaggaccgtgtctgggaaaaggtctttgcccggagagtgggaagagagaggggagggtgagcagaggacaggccgggagttttccgggaacggaggaagagcagtggaggagatgagatctcagtcttgcccaggctggcagtccagtggcacaatcatagcttactgcaggctcaaactcctgggctaaagcaatcctcccacctcagcctctcaagtagctgggaccacagctgccaggatgaggctgctgtgtggcctgtggctgtggctctccttgctgaaagtcctgcaggcccagaccccaacccccctgccactcccgcccccgatgcagagcttccaaggaaaccagttccagggggaatggttcgtcctgggcctggcgggcaacagcttcaggccggagcacagggcgctgctgaacgctttcaccgacaactttatgagctaagtgatgatggccgctttgaggtgtggaatgcgatgactcgaggccagcactgtgacacatggtcttatgtgctgataccggcagcccagcctgggcagttcactgtgtgaccacggtgtggagcccggggcggacagcagaggagacccgggtggtggacagcgacatacacccagttcgccctgatgctgtcccgcagacacacgagcaggctggccgtcctcaggatcagcctgctgggcaggagctggttgctgactcccgggacgctaggaacagttcatcatgcctgggcagagctacagggccatctcggatgacaacattgtctgcccagatgttgacatgggttaacgtggttcagcgtgcagtgcatgctgtgcagtaggcacggggtgccagtcagtgaatttaagtattaggtatgaagcccttagaaggacgctgggagccaatatgttattactccacaggtagtcatcagcaccaagccttgctgatcagtggtatatcgagtgactcctggggatcccttgtgagtaagtcagagctcttaagctaactcg

SEQ ID NO: 366076 - DNA, 660 bp, Homo Sapiens
gtccttgcggccagcagctgccaggatgaggctgctgtgtggcctgtggctgtggctctccttgctgaaagtctgcaggcccagaccccaacccccctgccactcccgcccccgatgcagagcttccaaggaaaccagttccaggggaatggttcgtcctgggcctggcgggcaacagcttcaggccggagcacagggcgctgctgaacgctttcaccgcaacttttgagctaagtgatgatggccgctttgaggtgtggaatgcgatgactcgaggccagcactgtgacacatggtcttatgtgctgataccggcagcccagcctgggcagttcactgtggaccacggtgtgggcaggagctggttgctgcctcccgggacgctggaccagttcatctgcctgggcagagctcagggcctctcggatgacaacattgtcttcccagatgtgactggtaacatggttcacctgcaggcatgctgggcagtaggcacggggcccgcaggaatgagtttggttgaccctagaggagctggacccagtgtctacccagggagctcagccccagcctgcgctcaggggtctccaggctcctgggtccctgtgctcaaaccaggctctgagccacctcctgccgccccgggtcccctgtcctggg

SEQ ID NO: 366077 - DNA, 660 bp, Homo Sapiens
acattaccttggttactgtctccatcatgagatgtatttgaacacattctgaccatgtgtaaagaccaccagatttacccaatgccatggatccatgtgccacaccatgaatacaaacactgatgatatgttaccagaagacagcacagagttcatgagctctactttgtgaagaaatttccagaaagcagagtctgcccatctttcctttcctttctcactgcaactgccacatcctgctttcgtcttgcttcgagtagagttgtctggatgaaggaagattctccaaatgtcacacaaggacctttcctttgggagctggtcccttgctgagggtgcaggaggctctgctgttcttccagcatctcaacacaaactttctgcagaggctgacccatccaaatttggagtccagagacagtttgaagcagatgttagaagcaaatttacatgatgtgacatgctttcagagggggcggggagtacttgccagtcaatgggatgcgtgatgattcggtgggatgtgcgtggaattgtcccatgttccacagcacgatacacatttaacacccctcatccaagaccacgcgagggcttccctgctgccccggttccccatgggtcttggtgaatcctcaaatctcatttaaaagcactgcc

SEQ ID NO: 366078 - DNA, 1103 bp, Homo Sapiens
acgcgtccgcccacgcgtccggaataatcaattcatgggttcgcttgctttgggatttagtacaagattattttaagaaataacaaaggagaaaagattgagctggattttgctgattctcaggtatctgtaccccagggtcaaccctgagattggcccaatctgccagaacctaagatgccattttgaccccagtggcagcttccagagccacaagcctgcatttgggaggaggtgcgcagcctccagggctggactccaaactcgagctgaaggaacatgctggcaggtagctctctcagggtccacctggggttccagctgctccaagacacagcacatttagccataaacatggaagggctgggacctacaggaggctcctttgtgtagaggccagggcaggcgtgtgaccttgaaccaggtggacatgaggtcccttgaactcccttctctctctggcttgttcccctgaagcactggccccccagtgctgggcttatttggccatcctgtgccagccccctggtcacccaccgtcacagtggaagctgctccctcctcttacaatggtgttccttgctctggggtctggggacaagaccatctctttccactcctggacgacactgtgcactcagtcagccgcctcctacctgccctcctgcacagggtcagaacctcctgacctggacttcgccctgggcagcttccttggaacttgttgcagcttagcatctttggaagggagcactggactaggagtcagaaggtggagttctgggtgctgttttcccactcttgggccctgggcatgttctgttctgtgcatcagatggttttctgcctgccctccccctgagcttgccaccacgaggcacctgttaaacccccggctttctcctgcccccttctggtccccttggccagacccctccgggacatccagcggctttcccgtggccccaagggaaacccgggtcggtggtggcccccacatattggggaaaacacaggggggcccacctcccaccatccacgaggcctctctgggcccgtggaatatattcggcacctccccccggataacactatattattca

SEQ ID NO: 366079 - DNA, 715 bp, Homo Sapiens
ctaggctaggtagcgaggctgggtggtgaatcggcacgaggcgctccagcagcctgtttgggaagcagcagtctctccttcagatactgtgggactcatgctggagaggagccgcccacttccaggacctgtgaataagggctaatgatgagggttggtggggctctctgtggggcaaaaaggtggtatgggggttagcactggctctcgttctcaccggagaaggaagtgttctagtgtggtttaggaaacatgtggataaagggaaccatgaaaatgagaggaggaaagacatccagatcagctgttttgcctgttgctcagttgactctgattgcatcctgttttcctaattcccagactgttctgggcacggaagggaccctggatgtggagtcttcccctttggccctcctcactggcctctgggctagcccagagtcccttagcttgtacctcgtaacactcctgtgtgtctgtccagccttgcagtcatgtcaaggccagcaagctgatgtgactcttgccccatgcgagatatttatacctcaaacactggcctgtgagccctttccaagtcagtggagagccctgaaaggagcctcacttgaatccagctcagtgctctgggtggcccctgtcggtggccctgacctgcgttgcgcgggccacctgtgagcggccgcctggggcccttctgggtgtgcccctctta

SEQ ID NO: 366080 - DNA, 577 bp, Homo Sapiens
agtaaaggctgtgggcaaacacagtgcagatgccacaaaaccaggcccactggggttggggatttctcctgccatccacacactcctgtctctgcaccctttttgcaggtgagggagggtgcttttgcccttcataggtccttcatctttaagaaatatgtacactcccaccctccatctcccttggtgctctctgataactgctgctgctggtatcgccctcctttgcttctctgcctcctccttgtctcttgtgtgaactggatcttctttggaagtccttgcaactcttttggagtttgtctcccggttttgctgaaaatgaggtttttgttttctcttcttgttttgtttggatggttccaggaggaaaaggggagaatgctgagctcatgcagccgagttcgtactgagagtctcagcatttcttccctgcccctccccgctgctcttcatgtgtgtgactgtgctccctgggtccttctcttctgggtacactcatattttgtcagtttactctaagtgaattacccagattcagaaaaggataattttcttcctccctcaaaaaggtgtt

SEQ ID NO: 366081 - DNA, 544 bp, Homo Sapiens
gcactacaggaggcaactgtggcattgcttccttaaccagctcatggtgtgtgaatgttataaaattgtcactcagatatattttttaaatgtaatgttatataagatgatcatgtgatgtgtaccaaactatggtgaaaagtgccagtggtagtaactgtgtaaagtttctaattcacaacattaattcctttaaaatacacagccttctgcctctgtatttggagttgtcagtacaactcatcaaagaaaactgcctaatataaaaatcatatatatggtaataatttccctcttttgtagtctgcacaagatccataaaagattgtatttttattactatttaaacaagtgattaaatttagtctgcacagtgagcaagggttcacatgcattcttttatactgctggattttgttgtgcatcatttaaaacattttgtatgtttcttcttatctgtgtatacagtatgttcttgaatgatgttcatttgtcaggagaactgtgagaaataaactatgtggatactgtctgtttatattat

SEQ ID NO: 366082 - DNA, 1308 bp, Homo Sapiens
  misc_feature (1287)..(1287): n is a, c, g, or t
gtgttcctgtgaggctggaggcagcccagggccccagtttgcccggcacgtccttgtgagctgtgggctggccctgggagcccaggtggcctccctgagtcgggacctccagttcccctgcctgacgagctcaggggcctactgggaattcaagagggccctcaaggagttcatcttcctgcatgggaagaagtgggcggcctccctgcctttgctgcacctggccttcagggcctcctccactgatgccacaccgttcaaggtcctgaccgggggtgagtcaaggctcacggagcccctgtggtgggagatgagcagcgcaaacattgaagggctcaagatggacgtcttcctgctacagctggtgggggagctgctggagctccactggagggtggctgacaaggcgagtgaaaaggccgagaacaggcgtttcaagcgggagagccaggagaaggagtggaatgtgggtgaccaggtccttttgctgtccctccccaggaatggcagcagtgccaaatgggtgggtcccttctatatcggggaccggctgagcctgtcactctataggatatggggcttcccaaccccagagaagctggggtgcatctatcccagcagtctgatgaaggccttttgccaagagtggcaccccgctgtccttcaaggtcttggagcagtgagcgggagcagcgggggtgccccctgccccagggccgtgggtttctgctgctaggcctccccctgtcccagcagtgctctcagtccactgggggccctcagttgtgccttttgtagagaacttgcttcataaagctttgctgaattgccttgaactagggaccagcatccccatggaaacatccccagtttggggtacttggagaatttgccaaaggctgtcagatatgggtccctggcagttttacactgggaaatagagtgctcctctaggctataccaggctcagtgtcttctccccaagtatcctctttccccttcacatgtaggtgtggtgtggtgtgcacacacactcacgaaagaatctatcttggccatgaaactgtggctgttgaccttggaattggaaccacagtcctttcccatacagaaaccccaaatgtgggctcctccctccaacctgttcttttggggaccctttgcccttagagctgtcacagatgacataagcctgggcaggctgtggggaggccgctgccttctcagcctcacggtcagctttctcaagccaggtgtggcctgcacagctgttcagggtcagggctngccattcctgcccagggcctt

SEQ ID NO: 366083 - DNA, 602 bp, Homo Sapiens
  misc_feature (554)..(554): n is a, c, g, or t
  misc_feature (568)..(568): n is a, c, g, or t
  misc_feature (584)..(584): n is a, c, g, or t
ggcctccaaaataaacaacaggactgctcagtagtcagagtgaattttgggtggggtttgaaagagttccagctttcctctgctaatggtgacataaaatgttcatttcatacccatgcatatacactgatgtatacatgtagttgaggaggcagtggcagaagccagaaggctttctctgccatgagctcctcctaggagccctgggttgcagagggtgaggactgctaggaaagtccgtcagttaaggccgaagggacattagctttgccttaaaccacattggctgtgcttgcctttgtgtcttcacctgatttaatgggttttagctcacactctccgaatctatttacctccaagtcagttaaggcagactgtactgttgacaaagcttaagcagaacagaatttccccatgggcttctagctttcaaggaatcccagctatttatccatcaccaagaaatgaagccccatggtggctgacggttcatttactccagcccagggtgttggatttcaattggtgcattcgcttttcctctaggcagaggnaccctttaaagtgntccttgcctctactgnttaaggtcactttccatt

SEQ ID NO: 366084 - DNA, 679 bp, Homo Sapiens
  misc_feature (179)..(179): n is a, c, g, or t
  misc_feature (436)..(436): n is a, c, g, or t
  misc_feature (449)..(449): n is a, c, g, or t
  misc_feature (462)..(462): n is a, c, g, or t
  misc_feature (470)..(470): n is a, c, g, or t
  misc_feature (479)..(479): n is a, c, g, or t
  misc_feature (495)..(495): n is a, c, g, or t
caggtcctctcggtcttcttgagtcacctcaccaaccagacacatcttgtccagggacaactcgttcttcctggccatggactgcatgatggacgtgaggaacgattgtgggttgaagaagccggccagccacacggtggtgagcagggcaaagtctgtcgtccaggccttgagttccntgatgcggagcagcaggtctgcgtaccaggccgccaggcccatcatggaggggtaggcccgggccacccacgtatcaggcacggtgtcatagaagagagccgtggacagatcttccacgtcggtcgtgatggtcagttctcccttcagccccaggttcagctccttgagcgaacggcgcatttcgttggtcaggatgttcattctttcacatctcttgaaagggcgactaccacatagtgggtgtcttttccgctgncctttgccatgantctcagccatgtntgaaagtnctccggaantcttctccaggatgtncgtccagcactggccttcaccttctcctcgcgggacactcccgtgcctgcccccgagtccgtctcttttggctgcatttccaggacagtgcggaacagcttctctgaggtgaccgtcagaaagccaatctctgcgttggggtgcaggccatacagatagggactctcagggggcaggttctcat

SEQ ID NO: 366085 - DNA, 558 bp, Homo Sapiens
acgcgtgggcagatttaccaggaagctgcagcacttcagccttctcagagggagctccgcttggcactggctcaggttttggccgtgatgggtcagacaaaagaagctgaaaagatgaccaatcacattgtgtcagaggagaccggatgccttgaatgctatcgcctcttgtcagccatctatagcaagcaggagaaccacgacaaggcacttgatgctatagacaaggctctccagctgaaaccaaaggacccaaaagtcatttctgaactttttttcacaaaaggaaaccaattaagagagcagaaccttctcgacaaagcttttgagagctatagagtggctgtgcaactaaacccagaccaagcacaggcctggatgaacatgggtggcatccaacacatcaagggaaaatatgtgtctgcaagagcttattatgagagagccttacagctggttccagacagcaaactgctgaaggaaaatcttgccaaattggatcgcctagaaaaacgattacaagaagttcgagaaaaggatcaaacatagcaccaccgt

SEQ ID NO: 366086 - DNA, 1341 bp, Homo Sapiens
  misc_feature (676)..(676): n is a, c, g, or t
  misc_feature (701)..(701): n is a, c, g, or t
ctgggatcccttcacacccaaacccttgtgtttcactgggctcttaagtactgcccttggagagactgcccaaccccccaacctggctctgttccacatggatcccagtgatactgggataactgcacatcctcatgaaggacatagaggtagaattttcactactgttccaagacctcttcatcgcttcctgttccctcccagaggcagagacaggaaaattatttggatggtcacagcaagtcagtgacgttcaggattgaagcatgcagcgccatagttcataattttaaaaatagaactccctagggattttgatctgagaagagggagaaggggacatggagaatggctcatgacaccacaaaacagcaacagcaataacctggtcctttttgattcagactctttacctctttctgtacccacataagatgattgcatgttcacaaaagtttgagaaatactgggttaaacaaggttaaacagattaagttactgtaggacttcaaagaacttttaatttgctcacgcatactccaaagatttttataaaaaaagtattttcttaaacttagtttataaaaaagaaggatcccataggcacgaggacccccagtgaaccaagttttgggaagtgctgctccaccggtggccccataagagtctggtaaangatagaaaagtaggcccccaaaaancaaactcttttcccacccagccatcagttactatcttcaaaactgcagtgtgggctcaatgttgtcattctgtactctcctgtcttcagcagggtttatggtattttttccacttgctggtcaaatctcctggaagaataccctgcctggaaaaagttcactggagtcagaagatatttgagtgctagacccctgaattcagtagctagaagaggggtgcccttgctgctgtgggacaggggagaaccatggcccatccaggcactctgattccctgtggcttctggacctccatcatcatctcccatgggtaccaagggggaccctaaaccaatttcctccctggttttttgagaaataaactcctcatctgtagaccttaagtgcactgaaaatcccagtggggccgtcaacatagtcaccctcttttgagactcacagaaaggcactgccttgttccattctttgctatagagatctgggaacaactgcttcttgatccgcaaaggatggtgggaaggctgcttttcaaggtccgcaggccagggagaaagtttctctttcttggccttctttgagtctctgtcagcttgagattgatcagcactttcctcaggggattcaaacacaacaccttgcc

SEQ ID NO: 366087 - DNA, 1120 bp, Homo Sapiens
  misc_feature (856)..(856): n is a, c, g, or t
ggtccggaattcccgggattaagaggacgttctggactctcgggcagagctttgtgagagaaacaaggctggcttcaagtgatctgcaaccagagtaattgggatttgacaaggactgtgaaaggctgactctccctgttctctttcatgctggcaccgggcagagtgtgggaactactgcctcaatacgatcatagaagccattgagatcccgcagtttatcggccgcagttacctgacgtatgacaacccagatatcttgaagagggtgtcaggatcaagatcaaatgtgttcatgaggtttaaaacaactgccaaggatggccttttgctgtggaggggagacagccccatgagacccaacagcgacttcatttccttgggccttcgggatggagccctcgtgttcagctataacctgggcagtggtgtggcatccatcatggtgaatggctccttcaacgatggtcggtggcaccgagttaaggccgttagggatggccagtcaggaaagataaccgtggatgactatggagccagaacaggcaaatccccaggcatgatgcggcagcttaacatcaatggagctctgtatgtgggtggaatgaaggaaattgctctgcacactaacaggcaatatatgagagggctcgtgggctgtatctctcacttcaccctgtccaccgattaccacatttccctcgtggaagatgccgtggatgggaaaaacatcaacacttgtggagccaagtaacaccagctggccttgtccaagggacagagccttctattctgagaatcccagggggccctcagaccctgcctgatgctatatgcagaggcccggggacccagntgtgtttcctcttcaccaagagaaagtacaccctggatgaaaaactgaaaaaccagacaggcatcctggggtggccttttcctgctgacacttccacgagctgacccagcagaaattccctggggtaaggaagccttcggatttgtcccctttgaaaatggtaaccggttggccaaaaatcccaccatccatggcaattcccagagcctgtccgggtataaccccccgggacctggggtttgggattcccaagaccctttaaaa

SEQ ID NO: 366088 - DNA, 1116 bp, Homo Sapiens
  misc_feature (51)..(56): n is a, c, g, or t
  misc_feature (68)..(71): n is a, c, g, or t
  misc_feature (76)..(76): n is a, c, g, or t
  misc_feature (83)..(85): n is a, c, g, or t
  misc_feature (246)..(389): n is a, c, g, or t
agtagagagaggagctggggccccggcagcaccgggcattcgttggggccnnnnnncaaacccccccnnnnaaccnccttccnnnaaaacccgctggtaccggtccggaattctcgggcattttaaatacactaataatcttaataatgcatccggtatatttatatgagttactgagaaaggtgtattagaatcaccttcaataattttggttttaaaaatttatccaattaagagacactagannnnnnnnnnnnnnnnnnnnnnnnnnnnnnnnnnnnnnnnnnnnnnnnnnnnnnnnnnnnnnnnnnnnnnnnnnnnnnnnnnnnnnnnnnnnnnnnnnnnnnnnnnnnnnnnnnnnnnnnnnnnnnnnnnnnnnnnnnnnnnnngatcaagtgccaagatgacttactagaagcagctagtatgctccactctcgtgaaaaggaaatagactggccagtaaacactagacacttcaactggatcttccaagaggacatgttgggattcagcaaggaagcaacagaagccatggagaacaaaaacagcaagacacaacagccaaccacccaggattgggtggagtcaggggaggatccttaccacaaagaaatagtgactgagagagagccccatggccccatacttctgtcacggacctttgtaatcataggcacaggtgatccaccctgagtccctccccctggggccttcagactaacaaggagagctgcatagaatctgggcagagctccagatcaggcacatgagaagtcccaggggtcttagacccctaagcaccccagtgctagttgccataggcttcaccaacaagaacgccaaagttctctgcatgccaaaagttagtgggctacaattcatgggttcctgagggagcagaggggacttcatgcccttggcctctgggttaaccctcctccagggcaagggcacacctgaaccctggaaacttccagaaccaagccatgaaaaccccccattttggaccttctttcaaatgggcaacaaagcttcttgcaatgggcctcctggggaaagaaaagcttcccccaaaaggcaattagaacccttttccggcctgggtttttttgg

SEQ ID NO: 366089 - DNA, 1056 bp, Homo Sapiens
  misc_feature (308)..(308): n is a, c, g, or t
agcggggggtggccgcggccgccgagtcggtctgcgcagcctcctgcgtttcctcgcttggatcttggcactgaagaggcggtggccggcggcgatgcgagaaaagtagcgatgcaacctgcaccaaggggccggactacgctcatgcttcgagagaggacgaggtcagtgacacggaatgatttcgagtgtcgactcagtattctgtgtctgtgctgtatggaatgcgggtccagctggagaaactgagagatgagcgtggagctctactataagcttcgttagaatcacgccagtggatcgtaacntcattcagacaacggattatgcacgaatttggctgaaggtcgttctcaactgaaccttggctctggcattggtacaaaggccctcaagccagcattctctggtgaccttatgggaacaacttacgagcaatgaaggcttctgagccgttagaactccgtttggtcagctgaagggacattcggggccagtctgtgatgaagcgagatgtcgtaaactaagaggacagtaacggcaacaagaaaagcatgtgatggtatagcacggcgtgtgatacgagcttgaatcctcgggtcgacttgtgagagaaagttggagcccgactcttcatactctcaatacgttctataagaatacctcgtgggctactaatgcaagtgagccccctttttgactgggcaagagtttgggatgacgaattgccggcatgaatttgtactcagttaccaggtttccatgctgttcaaagcaaaagggcatgccttcttgccggacccaaatgtaaagacgccgggtattaggctggcattaccagccctgttacagcaagtcgcctggggaagggctccctaatttaaaaagggctttcagaaacgttcttgacgtcgagtttaaattacggggcaccgggtggcggacttcagccacgattggcgcaaaaacacgggaaccggcgggcccttatgtgggccggtactcactggagcccccttagacagggggttataaacccgggtgggaattcccccc

SEQ ID NO: 366090 - DNA, 935 bp, Homo Sapiens
  misc_feature (489)..(691): n is a, c, g, or t
ttaggtggagagtgctatcaggtgcctgatgtttgggagttcctgtatctccctaaccctaaaaacctttccagttcacctttccaccagccttacgaagagcagtgactgtggttacaggccacatcttgtccctgattttcatttaggagctagacttgcagtgaccctgggccatctagcacagagattgcctttctattcctgctggaacctccagcctgcaaccacagaaattgccttgcccattcatgccgctgacatctgcagcctcctatgcacccttgacactttaatatcactgaaaccggcatatatatgcagatataataaaataagctcaatttaaaattgggcaaggtacttttttgcatgtctaccagtgacctgtgcacataggaaaacatagcattcctgctaagagaaggaatttaagttagaagaggaatgaaagactattttctgtttaagttagaagaggaatgaaannnnnnnnnnnnnnnnnnnnnnnnnnnnnnnnnnnnnnnnnnnnnnnnnnnnnnnnnnnnnnnnnnnnnnnnnnnnnnnnnnnnnnnnnnnnnnnnnnnnnnnnnnnnnnnnnnnnnnnnnnnnnnnnnnnnnnnnnnnnnnnnnnnnnnnnnnnnnnnnnnnnnnnnnnnnnnnnnnnnnnnnnnnnnnnnnnnnnnnnnnnttctgggaagccaaaggttgcaactgaactcaccaatttgcccccactggaactatcaccccggggtgaaccgaactaagacctccactcttaggattacccaaaaaataaaatgctcggttactctcctcagcaagatagacattcggggggggcccccagcctatatcgctgttccccactaccttgtttatgcgatacacaaaataggatccccctaatcagagggacggaccgatcatct

SEQ ID NO: 366091 - DNA, 1061 bp, Homo Sapiens
  misc_feature (111)..(111): n is a, c, g, or t
tcagtggtggtggagggggtccctgtgtgcccagggacccacgatctctggccagggacacagtttccctgctcgccagaacaggcctctggtttagatccagtgggactntgtagcgtcttcccacaggccacagcagggtgctcggacctcagaccctctgagaatcacagagatgcacaggcatgtgacactggttccaccggagagggaggccccctggtcccagtgaggggctgtgatgcacccgttggtgggggagtgcttgcagagtggggaaagggaaagagggggccatctctcgtccctggaggggagggttgggaaggagttgggtggccattggtccccgtgccttttgaggatgggaaacagcatgttgggttggatcgtccgctctgatgaaggctttggttactcaaggttatgtgagatgaagtcagttaaccaattaggaaaataggtcagtttcatagcactcctttataagcagaatcattgaactcacagtgtattttggggagactggttgagtgggaagctgttaacagacttggatgaggccttgaccctatcccccagtgtgtgagaggtgcgcgggcaccacctgggctccagtgtccaggaggagaaagtcacggcaggaaacagtgccatggggagctcagggacaccaaaggggccaaaacagctgctagagaaaatgaatttttaaaaaagagaagcagcttgccctccagcaacattcccactcaggaatcttcagatacattaagctgtccccaaggggtctgctggcctccaaactgtccaacccttccctccaaaggccctggggactggggtagggaccaagttcccacttcctgctgtgctgagcaggttaaatgatcaaaggatcaaagtttacatctctaaatgcttccgaggtggggaccctggaccaggctcctcaccctcactccgccccgactctctgagggtgaagtgaggtgagtagagctgggaaagccgttttctctccctgaacaaaccaaccgtagaggccccgaagtgtccat

SEQ ID NO: 366092 - DNA, 503 bp, Homo Sapiens
cagcaatgttctagagtctggtctttccctttcctgcagcttcgggtccttggacctttcctgtatcctattcacttgggagtgtctgtcagcttgagcaccagttgttctggtgtgtcatttgattctacttgtagcataatcatttatacgagctattgggaggttccaaaccctacctagatttgtgtaggtgatgtatcaaattgagcaatataccgtctcatctgaaaatagtagcacacagccatatataggatatcacttttgctaaggactgtttcttcacattgagcagagcaggcatataatggtggcttatttagtctaaggtctttcatttctttatacctgattttcaacataacacgcaatgtggatgtcgagtagtgttaagaatggtgctgctcctgacaagtgtatgttaactgtttacattttctatctgcagaattatttctctattactgaacttttcctaagtaaaatgtctttgaagtctc

SEQ ID NO: 366093 - DNA, 512 bp, Homo Sapiens
ccatatttgtggcttgaacgcagctgtctaaaccctgcaaacagttggaatgacactgcaggaattctcggtctcactgaaactgcagaaatggcaggggcctctctcatggcaggcactgaaatacctttaatcacaccagacaaaggccatccaggatgcacggaaaccaaacctctctcctcagccctttgagagtagttgaagtggatattattttaatcaaatccttttaaatcactaaataggatgactccatttaattagctttttacacaaaaagcacatttttgttctgatacaacttgattacatatttttcaatttttaaatgggtatgggtttcactttttaaaaatacactttatacacttaaagcaatgatatctggaactgtaaccctcaagaattctaaaagattctgtggaaaagaaaatatttgctttaatgtttcccttgtgcactactgcgtccccctcttttatctttgaactctctttgcttgcccagat

SEQ ID NO: 366094 - DNA, 470 bp, Homo Sapiens
tccagtaaaaaactctgagaagtctctgggaaggaagtcttccttccttccccctgtaccaggagaggtgctatcccagaaattagtaaagaaacagtttttgatggggagaacaggatcacctttgtcaactgctgctgcgagacttggaaaaataaggactgggaagagagcaatagaaactttgaaagccattggttatcttgataagagttgtttctgtgggggtggtgagaactggagcctgactggatgggttcaagagagaatggggagttctagccaagaaggctgatgaggatgagtcaaattaaaaatgttttctttttatgagtcctctcatatttactgatacaactgatatattgggtctccattctgccacattactttatattgatcatgtattgtatctgctatgcaattgtattgcatgtatctgcatggcaattgtattgccatgcaatgta

SEQ ID NO: 366095 - DNA, 480 bp, Homo Sapiens
  misc_feature (412)..(412): n is a, c, g, or t
  misc_feature (418)..(439): n is a, c, g, or t
ctcctggcctcccggatgccctcctgcgctctcctggcttttctggagctgttctttacagggactcagcctctgtctcgcagttctgggttagaggagaaaagaacacccagtgcactcctcagcctcctcagtacgggaagagaaatgtttccttgccttgcggctacagcggaaaaaagtggagacacatctgaagtcgactgaaaacggaggctccgcattcattatcccccggaggcgctgttatcccaaagctttgaagcaggcccgtgcgtcctcccacacgcggctacagcggggccgcccaagcctctttctccacctcccgtgccagcccgccggggaggatcctccggggtataaaactagcaggtcccgaaggaccgcgtttctgaattggatacaactntcctcnnnnnnnnnnnnnnnnnnnnnnggagacagggtctcgctctgtcgcccaggagtgcagtagcg

SEQ ID NO: 366096 - DNA, 1144 bp, Homo Sapiens
attaaggaggaggcttaatggctgttcccaaactcaaatctcagagtgggtatcctagcatctagcaagactgagtggggagatttctcatccgtgtgaaaatgtagagtgaggcctctgactagctaattgtgtattttgttgggtttagtattttctaaatgtttacaaaatattgggctgcatgttcaggttgcagctagagggagcttgggcagattttcaattacgctttcaagatataaccaaaagctgtttctaaatcctaaaattagaatttcaacagagccccctttagaacagtcatataacgcttgtgtgggccaacagaggggctgtgtactctctctggaaccataaatgtcaaataatttataacctgcagtaattgagcaaacttaaaataagacctgtgttggaatttagtttcttgaagaggtagagggataggttagtaagatgtattgttaaacaacaggttttagtttttgctttataattagccacaggttttcaaatgatcacatttcagaataggtttttagcctgtaattaggcctcatcccctttgacctaaatgtcttacatgttacttgttagcacatcaactgtatcactaatcaccatctgtttttgtgggatgtgctgcagcatttcccaaaaaaactttacgtgtatgttgcaaaatgaatgtactcagacattcttaatttttacttagggcagaccaactctttgagtctctcttggacttatatatacagatatcttaagagtgggaatgtaaagcataacctaattctctttcctatagagattctattttatttaaaatctatttttacactagttagaatcctgctgttttggccaagtacttgtcttgcatgtctgaccttgcagaagctggggtggatcatagcatactaatgaagagaattagaagtagtttacaaagctcgctcactcctcatttctctgtgatcccttctatccagtgggcccaccaccacctgggaaaacagatttttcagtacaggtgggataaatgctcctgaaaggctgtgcccagaaggaatgaaccaattaggcaagtggttttcccaaactaccttgggagttttacgaaaaaaatatggtcccc

SEQ ID NO: 366097 - DNA, 647 bp, Homo Sapiens
cttctgagatcaggaaatcaggtcccaaggttaggagacgccctgaaaaaaagcgaaggccgagggatgtgctaagggtaacaccttcatgatgacaacactgcctcgcgtttcaatagcgctttatacttttttaagtgttttctatccgttatccatttcacccttggcctatccctctcagataggtgggggtaggattttcctggtgaccgagtaaagtgagaggcaggtgagacggttcacccaatcacacgggaaggggcgcgcgctgcccaaccgcgctctccgcctacctccgctgctcgggaagctgctggcctggccctcctggtctctcttcctttcctggtctctcttcctttccttgctctcacccacggataaaaccagaagcgacaggaggccagctcctggggttcctgggagccgggaacagattggctacggaacgccccaggttgtacattcagagggctctttctccatgggagctcctggtgccgcctcggccccagcctgtccccagcccctcaatctggtgcagcagcatcttgtcactgcacaacagtggccctggtcccccacaggcagttagggccccaggtcagacctcaccatgatgatttgttccagtgtggagagag

SEQ ID NO: 366098 - DNA, 159 bp, Homo Sapiens
ccctttaaattatgtttccttcttttggtgatccctttgtataatcttacttttgttggagaggattacccttttgtttctcttttatttttggagttcaatgaactttatctgaacgttaaatatgtgattaaataaaattgccttctttgtttttgg

SEQ ID NO: 366099 - DNA, 247 bp, Homo Sapiens
aaatgacaaactctaaaaatgtaccaatgtgaaaaaacacttctcctgaatgccattactcatgccctcaaagctttcatatctgtagcctactcctgtaaagggtttctcctgtttctagtttctagtttgcaaaggtatgccaacgaatctggcaacctggtatttgttactaaaacagcatgtgttttcaggtttcttttctattgtacctaaagcagtttaaattaaaacttagtagaacccc

SEQ ID NO: 366100 - DNA, 1241 bp, Homo Sapiens
  misc_feature (33)..(33): n is a, c, g, or t
  misc_feature (468)..(478): n is a, c, g, or t
cagcataccgccggtggtttaaaagccgtaaanccccaagacgagcctgggtggcgattcaaagaacgagggtagatgccatctaatcacctccagctgatggctgccatatgaaaataaagatctagtgttgccagaattttgggcaagagttgtcagaaatccacactttatgtggattttcccatttaaaaaaattgaatcagttcaaattttaactcagagcatgcgggccaactcagagttaaagcatatccgagtttgagacttggattgagatgctcaaccaaagctcctcaattagacagccaggctatattctttccactgttctgaagtccagtgctatgctgggtataggtgacataaagatgaataagtgttcaaactatccccagagaactaggataaacttgaactcaagcaaactggtgtgtgataaatgctttaaaaggaatgtggacaacnnnnnnnnnnngaagaaatgtacggagaaagaaatgaatgacaaatgcctgggaggggggggaagtcttcacacctggaattgatggcttccctgggctgtggaatgaatgcagagtgccagagtagatctgtggctaattactgagtaccatggaggcatttgaccagaagttgctgggcagaaggacctaccggagcaaaggacccagatacatgaaacaaggttcggcatggcgaaagtaacggtgcagggataccctggtttgggaaggcaaaatgaagcccctctgcgaacctaaggggactttttcggcaacaatggcggacggtgcttttgacccttgcccccttaataggggaagggacctccgactaacgccacggaagacgaaattcccagaccgccgagaaggaaagggctccgggggttatcaaatattctgggggagtgagggaacacaatgcgaaaagcaaacctggccaacttgtcggccaaaagagcggtttgcgcgcggaccccagggctatttctctggaaccaaactggccatataaatctgggcccgaatgccccgccctataacggggacgccccgccatttacaaaccccccaccgaagtcccgcgagtgttgaagcgggcgccaattcaaaagggaaaatcgggggtggggcagatcaaacccccgggtagagaattgcttgccgccccgccctatgccttttagggtgcgcggggcttatagtaactatgagatgcgagactcccacaaa

SEQ ID NO: 366101 - DNA, 936 bp, Homo Sapiens
  misc_feature (76)..(86): n is a, c, g, or t
  misc_feature (203)..(203): n is a, c, g, or t
  misc_feature (236)..(284): n is a, c, g, or t
  misc_feature (298)..(321): n is a, c, g, or t
acaaaaagggctttgctttaagtccccggggaggaaccccgggaaaattaacggaaaggcttttaagaaaaacggnnnnnnnnnnnaggcccccacccaaaatcctgaaaaggcgaagtagggccgcggggctgatataggaggaagcccaacggaccaaaaaggaaaagcgggtctttttccaccaggcatcaggccgcagnccttttgctctcgctccgcccacatttcccggnnnnnnnnnnnnnnnnnnnnnnnnnnnnnnnnnnnnnnnnnnnnnnnnntcctagggctaagnnnnnnnnnnnnnnnnnnnnnnnnaagaaaaatcaagcaaggggccctaggcagccctccaggaggagaagcctttaagggcaaaacaaaatcagcatattcccatccaagcctccatcatacattatgcatgcgacaaagtttggcaacagtggagctgatgtgatgacacagcgaatcaataagaacccaccgcgtgaaacctttatagtggttacttttttaagggctcaagtgaagaaattgtctttgtcaactttggcttagaatatccttatacagttcaggtactttgtcggggtccactggtctaggtaaaaaatgtgtgaatttctggtgccgtttagtcctagtcccttctctcggggtcccatctttatttaatgcaacatagtatcgccttccagtgtccacgtgcttatataggtttgacgagtacgtattataccagttttcttcgaactgttctctgaatacacactcttgggttagtttttccttccaaacagactcagttgcatttctggccctttttaatccagagaaaagacagctgttcaaatcaaacatggagataaagctggatgaaatccctccagtacttactgatccatacagctcccccttctcattcatccc

SEQ ID NO: 366102 - DNA, 921 bp, Homo Sapiens
  misc_feature (124)..(124): n is a, c, g, or t
gtgatgtggtccgtcctaggcttcccactgccacaagtcttcctggtgccatatgccatgtggacagcgtggacgagcagcaggcagccctcctcatctccatcatcggcttcagcaacatctncctgaggcccctagccgggctgatggcaggacggccggcctttgctagccaccgcaagtacctgttcagcctggcactcctgctcaatgggctcactaacctggtgtgtgcggcatcaggtgacttctggggtgctcgtgggctactgctgggcgtacagcgtgtccatgagtggcatcggcgccctcatcttcaaggttctcatggacatcgtcccccatggatcagttcccaagagccctgggacttcttcactgtcctgggacggccttgcttttcctcatctccccaccaactgggccgggttgctcctgggacgccaccaacaacttttagctatgttttctacatgtccagcttcttcctcatctcagctgccctcttcatgggtggcagcttctacgcccttgcacgaagaaggagcaaggcaaagcaggctgtctgcggcggatgccctggagcgggatcttttcttggaagccaaaagacggtcctgggaagcaacggtcccctgagatcatgtgccagtctttcccgccagccacgtccatgctggcgtcaataagcatctttggggatgtcctgcctcctccaggaccagccatgagtggctcttatggccaaaggcggtactgcaggccaagcaaacggctctgggctggaatagccctacctgagtgccctgtttgactccgccactatctgccatgtgagttgggcaaattgttgaccacctctgagccttgaaaaagtaggaggttactttgttagagcaaaataataaaatttaattttaa

SEQ ID NO: 366103 - DNA, 455 bp, Homo Sapiens
  misc_feature (16)..(16): n is a, c, g, or t
  misc_feature (31)..(31): n is a, c, g, or t
  misc_feature (59)..(59): n is a, c, g, or t
gacatgcctccaattnaaaccccagtaaggnaaaatcgatacatccagaatggacttgnaggccttatcatgcagtttccatttacatcccctatccccactgcccatttacttgagcgtgaatgacacacgagagattcctttgcccttcccatgatcccaactttacacataaataacacaaggctaaagaaaaccagaactcaaattcaccatgcataggagtgataacaaaaatatttaacagtcagtatgggtgattactggccaatcagaatacgtcactgatatatcaaaatggatgcaggccactgtgactaacttgtgggtatcatttctatgatcaccctaaaacagagttgggaaaatatcaattaactggtctctctggtttgaattctcaatatgtatcttaatatgaaatagctcattaaaacttcatgtgtaactatttc

SEQ ID NO: 366104 - DNA, 1843 bp, Homo Sapiens
  misc_feature (65)..(65): n is a, c, g, or t
  misc_feature (85)..(86): n is a, c, g, or t
  misc_feature (99)..(99): n is a, c, g, or t
  misc_feature (170)..(170): n is a, c, g, or t
  misc_feature (723)..(877): n is a, c, g, or t
  misc_feature (1056)..(1065): n is a, c, g, or t
  misc_feature (1142)..(1142): n is a, c, g, or t
  misc_feature (1330)..(1339): n is a, c, g, or t
  misc_feature (1363)..(1363): n is a, c, g, or t
  misc_feature (1447)..(1447): n is a, c, g, or t
  misc_feature (1454)..(1454): n is a, c, g, or t
  misc_feature (1473)..(1473): n is a, c, g, or t
  misc_feature (1484)..(1484): n is a, c, g, or t
  misc_feature (1525)..(1525): n is a, c, g, or t
  misc_feature (1555)..(1555): n is a, c, g, or t
  misc_feature (1762)..(1762): n is a, c, g, or t
  misc_feature (1801)..(1801): n is a, c, g, or t
aatctggtaatcatgttacatccaaatggggatttagaggcagcgtgaaagcagatgagctgtgnactacaaaatagggtttgtnntggttggttggtntgataagcaggtattgggggtcatattgtttcctgtgctggagcaaaagtcattacactttgaaagtatantattgttcttatcctcaattcaatgtggtgatgaaattgccaggttgtctgatatttctttcagacttcgccagacagattgctgataataaattaggtaagataatttgttgggccatattttaggacaggtaaaataacatcaggttccagttgcttgaattgcaaggctaagaagtactgcccttttgtgtgttaccagtcaaatctaatattccactggcgcatcatatgcagtgatatatgcctataatataagccataggttcacaccattttgtttagacaattgtccttttttccaaaaggcttggtttctttcatatgaaaaaaatgcattttataaattcagaaagtcatagatttctgaaggcgtcaacggccatttaattaatggactgggaagtaactgtggtttactagcaggaatatttccaatttctacctttactacatcttttcaacaagtaactttgtagaaatgagccagaagccaaggccctgagttggcagtggcccataagtgtaaaataaaagtttacagaaaccttgnnnnnnnnnnnnnnnnnnnnnnnnnnnnnnnnnnnnnnnnnnnnnnnnnnnnnnnnnnnnnnnnnnnnnnnnnnnnnnnnnnnnnnnnnnnnnnnnnnnnnnnnnnnnnnnnnnnnnnnnnnnnnnnnnnnnnnnnnnnnnnnnnnnnnnnnnnnctttttttcggcccccgaccccgcgcacataatttgaactcaccgcatactagccccgccggcgcgcctgccctcgtagagaaaggggattaagttcagtattctttgacgaaagaaaggggccgggggaacacgcctggggttggtctgcgccagccagaacataaaaagaaaaagannnnnnnnnnccggagggacgccctgattgttctactatataacaagaacgtggcgagggatggggaagtgaaggtcgaggggacanaggggtgtggagactcgctgcgaagggacgagaacaaagtagtaatgaaggatagagacacacacacactggacctcgctacgcgtggtgtcggaggaggggtatggggtggagtgaggttatacgaccttgccaccacactctacctcttaatttaaagaggggaggaataactccccgcggggcgnnnnnnnnnntcagcgcggggcgatgatcaattngagaaatcaagacaaacatacggatcgtttacagaatagccactgcaggcacattaaactgggtgcacacatgtccagaggcancggggcncgggtgtaagctgtgaggnctctgtgaaantactatgtacgtcactgggagacgcacatgatggaaaaaantcgaatgtcgcctgcataacacgaaactgnatccaacaatgagagtcgatacgtgatgcgcggggggctataactatcgtgggactaaggcgatagagccgcctactggccggcgcccgccccgcggtctggcggcgctcgggccgcactgaaagtaattttctttacagcacaacgagcccgcgacacaacaaggatatatagtatacactgtagtctcaacccgagcgagacaanaatatgatatgaacttctctttgatcattcagagtatanacaacacaacacatctagaggcatatacacatcactcactgt

SEQ ID NO: 366105 - DNA, 815 bp, Homo Sapiens
  misc_feature (330)..(330): n is a, c, g, or t
gagggacagggcaacttaggctaggtacgaggccggggtggtgaattcggcacgagggcactgcagagccccgcatggaagacacgccgttggtgatatcgaagcagaagacggaggtggtgtgcggggtccccacccaggtggtgtgtacggccttcagcagtcacatcctggtggtggtgacccagtttgggaagataggcaccctggtctccctggagcccagcagcgtagccagtgacgtcagcaagcctgtgctcaccaacaaaagtccttactggggcagaatgagcctctaatcaatgtctttgcaaagaacctggtagcgtntgtgtctcaagaagctggaaacagagcagtcctcctcgccgtggccgtgaaggacaaaagcatggaggggctgaaggcgctgagggaggtgatccgggtgtgccaggtgtggtgacctggaggcagccgccccgcgctgctcagcaggacacgtgaacacccagacacccactcagggactcaagtctcgcctccctccccggtggagggaggaactttggcactagcccttggagccaggaaaaaagactcgtgtctcaggcagactcttactctggttactaagatcatctgtgcatgacggggagggtggaacaggtcccggaggagtcgtgaatggttctcaccaggacctgaatcgttgcttgtgtttgagaattggaggaatgagtcagcaggcgtggctcatggcccccccgtgtgcaggatcaattgtaggaggaaatttcttttttattaaaagcgaatgtgtatcccaaaaaaaa

SEQ ID NO: 366106 - DNA, 740 bp, Homo Sapiens
catcactgctttagaaataaaaccgccaatttataaatgtatatgacctacattttataggaaaaaatgtttttaaatgctagtcatttatataatgtgctttgaaggatttgctagtccacttctgtcactttttaggacactggtatcttttatatgtaatgtatgctttttattattgtagcaaagcatttcagtagaaagaattttgcaacaatatgggggaaatttttcattgttggatttgaattatactggattttatctgtgtagtcttacttgtctttattttaatgctgtctgaagggaacttggtatccaaataaagcaggtaacctcattttacttcaagggcatactgtgtagtgctgaatttaatctgaaaatctgatgattttgaaaagaaaaacaagtttataaacattgtacagaagaaattaaatgtgtgtgatggaaatcctgatggtggagcacgttgaattttctgatatatagtgttattttcctgggatcccctatgccttctttgtatttcaaccaataaaggaaaaaccctggtcattaaaactggtaagataataagatattctggattataccggtattactatttcctatcccctttttcctgacctttttcctcatcccctgtaaaatttttaattttccaaatttcccaattggataatttaaatattgttcccttaatattggacccctgtttggtttagaaaccaaaa

SEQ ID NO: 366107 - DNA, 746 bp, Homo Sapiens
  misc_feature (197)..(235): n is a, c, g, or t
gatgcatgacttcctcactaagctgctgcacaccagctttgcctgcatgattcaaatttgtgcctcagtaaaattataaattattgcatgtcataccttgaataatggaaacggcaaacattaaacctgtgattacccataatgtactttaataataaaaaacatggcagccaggtgcagtagagtgcacctgtggnnnnnnnnnnnnnnnnnnnnnnnnnnnnnnnnnnnnnnntttgagtcccgcctggtcaacagcgagaccccatgtgtctgtctgtctctctctttttttaaaggacagaggctaagctgtaaggttagcatggttctgcctgggctttgcttctgcgcttctgtgcaggctgagctgtaaggttagcatggttctgcctgggctttgcttctgcgcttctgtgctagcaggtgcccacaaaatgtctttttgaatttcttaatttttgggttctggatgcaattcgtgcacgccaagaaactacttgcttgtcagtattttaattctgtagtacatgtgtgtgaatatcagccagtacttacagtaggaggatgaacagaaaaactgagaagacctgtctttcaaaagatgggtttatccactttttaagggaaaaagtgacagtttggcatgggatttgaaaagtggaaattgtggaaaaattgagctgttgaagtcccacatataaccagatttaataaagcttcacatgtgaattagctccaaaaaa

SEQ ID NO: 366108 - DNA, 441 bp, Homo Sapiens
agagacttcagggtgctccagccaaacgtatttgggcatcaccatgacctgggaggggaagatgcactgagacgtatgaggcttccagcctagcagccagggccctagcacaaacaggaggctcgccccatctgagcaactgcaggagaggttagtacagtcatgcattgcttaacgacagggacgtgtcgttagaaatgtgtcggtaggtgatttttatgaccataggaacattgtagcgtgcacttacaccaacccagatggtacagcccaatacacacccaggatggacgctagagtcgactgctcctaggctacaagcctgcagtgcatgttatggtgtgaatactgcaggcaatcttaacaccacggcaagtatttgtgcatctacacacatctaaacatagaaaaggtacagcataaatacactattgtcatctc

SEQ ID NO: 366109 - DNA, 1196 bp, Homo Sapiens
  misc_feature (1125)..(1133): n is a, c, g, or t
ttctttgggctcacatttcagcgactgatagccttcacctgtcccttaattccctggggggacataagccctttccacagacctggacttgagtatctcttgtacctattttcatttggcacgaaatctcccggtttttgtgggacaaatatctttaatctaatgggatagacccggggtcttgaccgatatgcttcatgtatcaacgttcctcgcgacaggattttcacaaagtgctgcccaaataccaactgcccttctttcctgcaagctttcttctcttacgcagccattcctggtgaacggtgatatgatttatgggcaagattttaacacggtagtacttctggtctatctgttatcttatagattctgggggcactaataatgtcctcgagtcacttacaacgccctaaaggtggattgtgattggctatgaggaatggggtatggggatggcatggaagagatgggttctgactctgagatttcatgaaattgcaaaacaataggacagctgctcttccataaacagattattattatgtagtttctaccatagacagcttgatagcagccattatcttctttctgggtgtcttatcaagttccggctgtgtgcagcactgggtgataaggaaagagacaatgtcacccatgggattgccaaggacttatttctatgcactgctgttcagcaacagccaatctctcagaactgagaagaagtcctattgttcacgctgggcagttgctattctgactatcccaagagagcagaaaagggatgtagttgccattgtgcaaaagattgatatttcattactctcagctaaagttctgaaaagcagaatcatcatgaaatatctttgaagagagaaaagacaagggaagaaaagaagaatgaaatgagttcagagctttttagaactgtgagggagtgcgaaaaaagaaaggtgtaatactttcaaacagtggaagttaaaatgccaggcgtgtaagcctcagtgaaattgagcagcatcacgtcaccacgacttgtggtccagctgtttattgcaaagactccatcctgcgttactcatcagaaaatagttaactttgtatctggcattattttaattnnnnnnnnngttaacttactagatttctgtttgtctgtgtttcatacaaggttctgtacgccatgtcgttga

SEQ ID NO: 366110 - DNA, 948 bp, Homo Sapiens
tagatttttcatttttattttaaacattttacattaaatgaaatttaaccataataattacagaacattaccacaatgatacacacaaataacctttaaaataaaaaagaatacaattcttaactagttaaatgacactttagtgtgtaaacataaataaaataaaaccctgatgctaaaaaggtacatgttcagagggtaaaatacattatacaaaaaacattttaaactaacataatccacaaactagatcacattctttgcaagagagtacaaatattagtactctacagctacaaaatttcagaatcctgttaaaatcaaaaccgttgctggtttataatacacagcacaattcataaggcaaaaatataggcattatcatccagttctttaacttcacttgtattttaaggcaaacttggaactttttgcttagtatttaaaaataaatgggacttacacataacttgacaaaattaacaataagttatctctagtaaagatgtataatataaaagacatatggataacaatttttctctctgcagagatgtaaactggatttttatttgactccatattcacaccagtaggaaaatttgtaaacctattgtattaaaaatgtattgtattcctcactcttttcaaatgtgtatcaacaccaaatcaatgtactgtaagtgaaaatccagtacatatccagccatggaataattgttatctaattaaatcatgtctaattaaagtgctgtttacaaagggaaaaaaggttaagaagtagaactggatgttaacttgacatgtgacatcttataattccttaacttttagactacagaggttatgaggttatcacaagtttactgaactttaagcagtaagtgtttattgtagaatctgattttcctgaaaatgagcacttaggtgacaataccaggaatcccc

SEQ ID NO: 366111 - DNA, 306 bp, Homo Sapiens
  misc_feature (259)..(259): n is a, c, g, or t
  misc_feature (267)..(267): n is a, c, g, or t
  misc_feature (274)..(274): n is a, c, g, or t
  misc_feature (284)..(284): n is a, c, g, or t
accaataacagttatcaactttaatgtaatatcataaaggagaaaaaaatcattaataaatgatagccttaattataaatgagtttctggcaaaatgcagatcatagtaacttatttacattatttttgccataagaaaacttcttaagcaacagtcagctctcaagttaaaaaaatgcacacacatacataacccaataccaaagaaaagaaatgagtttaagcaccaacagccttatccttgggaatgccatttggngggaaaanccccttncttaaaaaanaggtttcggaaaaacccccctt

SEQ ID NO: 366112 - DNA, 563 bp, Homo Sapiens
ggtcagaagtgaagagggggctagaaggactctgagaagttggtagaagaaaactcccacttgtgaatatttttgtgagacataaattcttttattacgatttacctctaatttattacacttagtaaattcttccagatttttctatttgtttgacacttccttaaagtaaggaatacacattgcttgcgagaactggttatgagacattggaatacttcttgctgctacatgtcatcttaattttggatggcatgggttttgtaaaacttattctgccccagccaaacttttttgaaaccttaaatagtctaccttaattcagcctagaagagtacattgatttactgatcttttttcatattcataatactaaatgttttagttttgttcaaatatatgcttaaaatcacgttatttaaaaaacacatcagctctgtctcaagaagtaattttgttgaaactccatgttaaaatatccatcttcaacagtagtgtcttcataataactagtcattttttcagtcataaacagatgcaaataaaaaggaaattacactttt

SEQ ID NO: 366113 - DNA, 558 bp, Homo Sapiens
aagtagcagcaactagattaagactgggaggattttgaccaaactaaaggccttttctccttactgcatctgacgtgtgtcttcttgagacaagatagcacccatgaattacatcatgaggtatgtgtgaattcagtttacatgtaagacctgagagttcgaagagggcacattcccaaagacattcccagtcatgaaatgtagaagactggaaaattaagacattatgtaaaggtagatatggcttttagagttacattaatccttggcatgaataaggtgccagggaaaacagtttaaaattatacatcagcatacagactgcctgttagaaggtatgggatcatattaagataatctgtcagctactactaggcatttattgttaattgagttacagaaagtcattcaagactgagtttatagaaagcatattgcatctatctctgtgtagaacatttgattcacattgtgaagaatgcagtttaaaatatactgaatgcaatctagatgtattgtacacgaaaggtgaaaaataacaggtgctctttactgttt

SEQ ID NO: 366114 - DNA, 1028 bp, Homo Sapiens
  misc_feature (17)..(17): n is a, c, g, or t
  misc_feature (83)..(83): n is a, c, g, or t
  misc_feature (887)..(887): n is a, c, g, or t
aacacagccctaccaancaatgatgaccagtggaaaacaatgaagtcaccaaaccctggacagggctcatgctccaggacaanttgctgtggcgtaaatggtccatcagactggcaaaaatacacatctgccttccggactgagaataatgatgctgactatccctggcctcgtcaatgctgtgttatgaacaatcttaaagaacctctcaacctggaggcttgtaaactaggcgtgcctggtttttatcacaatcagggctgctatgaactgatctctggtccaatgaaccgacacgcctggggggttgcctggtttggatttgccattctctgctggactttttgggttctcctgggtaccatgttctactggagcagaattgaatattaagcataaagtgttgccaccatacctccttccccgagtgactctggatttggtgctggaaccagctctctcctaatattccacgtttgtgccccacactaacgtgtgtgtcttacattgccaagtcagatggtacggacttcctttaggatctcaggcttctgcagttctcatgactcctacttttcatcctagtctagcattctgcaacatttatatagactgttgaaaggagaatttgaaaaatgcataataactacttccatccctgcttatttttaatttgggaaaataaatacattcgaaggaacctgtgttatcacagtaacccagagctgtatttggctagcaatctgcctgtatctctcactattatctaaaagaaaccttccaatgcttctgttgatctcagtattgtcaggggaacagagaagttgggaaaagattactgaaatataccttttgcatttctttctagagtagctcccatatatggnagatgggtgattctcttgatgccaccttcagatccttttattctccagaataattcttaacagtggttcaaatttcctttcataccttgaaagtatgtgtttagtagcctcaattctcccattaattaaagtgtgggcctg

SEQ ID NO: 366115 - DNA, 202 bp, Homo Sapiens
cccccatttaaaaggatagtacctactccctctaaccacctcaccccattcttgaatgacattttatccttcggaaagaacaaggctgtgatgtagtgactattgtctgtgtctcctgtgtgtgtctgttcttgtcacaaatgtatttggggacgttggatgcattcattttctgtaataaagtttcttaatcactcttccc

SEQ ID NO: 366116 - DNA, 692 bp, Homo Sapiens
gggatatcatcttaccagtttatttggtaaaaacaaacagttatttggtatttgtcagaattcttcagtgcctgctattacagctattttccaattactaatttgattatactcactcaaggcagtgcaagatcttgaagtactttttagcagttaagtaatattgaattgtattgaatagtttacatagtttattctagtctttgaaaattactgaacatggacaatgtgcatgtcattgacatctgccttagaacttctgggacaatcctgattcgagagattctatcccattatttacatataccaaaaatactttgttaatttaatgtgttggcttcccaactcctgaacacgacacaattttattattagattttgtatggtgattttaggctatgaaaacatgatcattatatgtatatagatacatttttatttgttacaaatgtttgagcagctcactagcccacccctcctctattttgggtaagagaatttactaccttttttaactatgtagttgagagcaacatgtattttgttatttttagaatggtcagtatattgctataaaattttaaatgagactatgaaagttaaagtattctgattctggttaaattaacgaatatggttccaggccctgttctctgggtttttgagagagaataaaggttatgtttgtctta

SEQ ID NO: 366117 - DNA, 691 bp, Homo Sapiens
atggaaacacaaataactttaatgatttgtggtaaaaaagaaggaagcttgaatctatgattgaaaaataaaaaataattacatgtatatctacacagaaagtacaatcacaagtttcaagagcttaacacaaactaactgctgtcaaatatttaacaaaagcaaagatgaaactgcttaacagtcagggaaaaacaacaaaaagaagggaggggtgataaacccagaaaatgaatgaccaaaactaagagaccctcataggtgtctttacaatcaggaattcagatgcaaggaacagacacaaacctgtctaaaatgtgaccctatgaggcaacagaaagtgaccttaaagtcctgttataaataaaaaatgacaacccaaaaccctagagagtcttaaattatttaatcccagacattatctaacgcctcggatttttgtttggtgctatggtgttcattttctatcagaatgaaatgtgggacaaatgcattactggttgtagagagtgtttcagagctaattcacccagcaaggtcagggtcaaaaggttattattttgttcatatatttcttgatatgaaaaaacaacatgtcaaagaaagaattaaagcaaaatgtgttttcaaatgataaacagaatctcaaactttcaagtaagtgcatcttaagatgttgatgaacttcaga

SEQ ID NO: 366118 - DNA, 704 bp, Homo Sapiens
  misc_feature (44)..(44): n is a, c, g, or t
  misc_feature (51)..(51): n is a, c, g, or t
tctaaccaaagggcattttatcaacaatcagctgaattcaattnatatctnaagctaaaaaactatgtaattgaggttgtatctggagaagatgggaaaacattgtataatttaagcccttaattgtctgttgagcttttagggctgagtaattgccggtcatacaaataaaagactttaactctgttctcaagagtgtaccaccggccttagaatcaggtgttttaaatccagtttcttttaattaaatgggactgtagtgatccctaccctgtagagaaatcaacagtaactagagaagctaagggcttgatcaggtttcccctagaacctgtgttgcctgcctgctgtatcttccatgtctgtcttattcaacttctagaagtagagaaggttgggacttgagtgtagaagaaacatcagaataatttcaaaaaacaggaagttggaactaaaaatttttaaattattgtattgtttttacggattttacatgtatagttaaatattaaaattcatctcttgcagttcaataaaagctatagtatagattttatttttaagaagtttatataattcttttgtgaaccaatatgtaaaactagaatatttattaaactaataatatgtattagtatcaataaaatatgtatttatttttaaattggtatgaaacaaaataaaaatttgtagacactcaaaaa

SEQ ID NO: 366119 - DNA, 655 bp, Homo Sapiens
  misc_feature (89)..(89): n is a, c, g, or t
  misc_feature (347)..(361): n is a, c, g, or t
ttaatgccactaattggtacccataaaaatggttaaaatggtaaattttgttatgtatattttatcataatttaaaaaatatatctagnaatgggcaagaaggattctcctcattcctctcttgacttgagaatgatcagtcaataggccctgaagtctgaatttgtgaaaatttccttgggtgacaaacttgtttgattactctatttagtgtatcccaaagttattaccacataatcttttaaacaataaaacaaataccccttagaaagtcttctgcaaacccatttctgaaaatggtacattatagggtgggtatagatgcatagatatgggattatgtatgnnnnnnnnnnnnnnncacacacacacaaagggatagagagattacctctcttaacccccattttaaatactatgtctagggtttttaaataaaaatcttttccttttaacatgtttcttttcttttccggaatattggaatattctgttcttgatccagatgaaatctgattgagcagtgtacttacaagttgtactgtgtatgtgtttcctatattgttatatttcaataagaagcttaaaatgtttaaaaataaatggttaaaaggttttatgttatgtatattttaccacaataaatgcaaaaaat

SEQ ID NO: 366120 - DNA, 931 bp, Homo Sapiens
  misc_feature (39)..(39): n is a, c, g, or t
  misc_feature (45)..(45): n is a, c, g, or t
  misc_feature (841)..(852): n is a, c, g, or t
cttccctgatgttgggtaacctaaagcttaggcccaaanaatganttacctttggaattgtgcctcccaaatgtctactgaagcttaacccgaagaactaataaatggactacagtagctcacgttacagggaaggagggtaggccagggaggctctgtgtgttaaaatgagggtcctcactgctttaggattgaagtggctggaaagagtgatgccctggggaaggagatggagttatgagggtactgtggctggtactttctgtactaaacatttccgttttctattataccactaattgtgttataaactgtgagccgtccaagtcagaagaagacagcaaaaaaagcaacttttccaacatacaatttacttttaataaagtatgaatatttcattttgagaacattccctggaattgccacataattcattaaaaacatttttttaagcaacacttggaacagtgtttactttaaatccttaatggccttaattaattctcagattcctgccccatcacttacagaaccaattcactttagagtgactaaaaggaaacgatagcctagctttctaaagccacgctgtgtccctcaattacagagggtaggaatgggtatacctctaactgtgcaaagcagagtgaaattcaattcatagaataaccacttctgggaatatcccgtcccagaaaaagaaaaatttctggcaaatattttgtcactgctgtaaagcaaaatatttgtgaaagtgccaaaataaagtctgtcatgccaaaagtaaatcattgtatagactgacatccagttttcttcaactgtacactttctgcttagnnnnnnnnnnnnaagatgcagtaaataatactataaaaagtgttagtaatgattactgagttcaggaaaattttggtaaaatgtaaatatt

SEQ ID NO: 366121 - DNA, 654 bp, Homo Sapiens
  misc_feature (630)..(630): n is a, c, g, or t
ccacaggttcctgtgcaaagactatgaaccatagaagcttcaagatggaggtttaactattacaagatgaatctttcacttctgaatagggacacacattttcaacttaataatttatcttaaaataaattaaaaaatgttccatagcgcaaaacaagcacacaaacaatagacaatatctttttgtcttttgttgcacacactcatttcctaaatcattcaagtaacagcatctctgacttcttggggaaagatgggagttgaaggtttgcaggccaaaatgaattatttccactttgccatgcctggatgcctgagatggtcctgagtatctgtgattctgggagcagctggtagagattcagaatgagtaagacaagtgcaggagtaaaccaaggggtaaaagaaccagccctgcattggtcctttgagcccagtcttcagtaggggcatttctttgttttcatgcccacacagagaacactaaacataatgcagaggtttaaaattctttagatggtgctcagaaagcaaggctaccacttattcctgttagcctgacagtccacttggtgctgctcaactacaataatggaagaaaatggtcttcaaaaagaaatgaaataaacnccagaatgtgaagttggcagacat

SEQ ID NO: 366122 - DNA, 521 bp, Homo Sapiens
agggagagggaggacagggagagaaaataccatgcataaattgtttactgaatttttatatctgagtgttcaaaatatttccaagcctgagtattgtctattggtatagatttttagaaatcaataattgattatttatttgcacttattacaatgcctgaaaaagtgcaccacatggatgttaagtagaaattcaagaaagtaagatgtcttcagcaactcagtaaaaccttacgccaccttttggtttgtaagaggttttttatacatttcaaacaggttgcacaaaagttaaaataatggggtcttttataaatccaaagtactgtgaaaacattttacatattttttaaatcttctgactaatgctaaaacgtaatctaattaaatttcatacagttactgcagtaagcattaggaagtgaatatgatatacaaaatagtttataaagactctatagtttctataatttattttactggcaaatgtcatgcaacaataataaattattgtaaacttt

SEQ ID NO: 366123 - DNA, 848 bp, Homo Sapiens
ctactaagtttaaataccgtgtgctcttccccagctgcaaagacaatgtgctctccgcctacactagtgaattaatctgaaaggcactgtgtcagtggcatggcttgtatgcttgtcctgtggtgacagtttgtgacattctgtcttcatgaggtctcacagtcgacgctcctgtaatcattctttgtattcactccattcccctgtctgtctgcatttgtctcagaacatttccttggctggacagatggggttatgcatttgcaataatttccttctgatttctctgtggaacgtgttcggtcccgagtgaggactgtgtgtctttttaccctgaagttagttgcatattcagaggtaaagttgtgtgctatcttggcagcatcttagagatggagacattaacaagctaatggtaattagaatcatttgaatttattgtttgtgtctaatatgtgaaacacagatttcaagtgttttatctttttctgttttaaatttaaatgggaatataacacagttttcccttccatattcctctctggagtttatgcacatctctataaatcattagttttctattttattacataaaattcttttagaaaatgcaaatagtgaactttgtgaatggatttttccatactcatctacaattcctccattttaaatgactacttttattttttaatttaaaaaatctacttcagtatcatgagtaggtcttacatcagtgatgggttctttttgtagtgagacatacaaatctgatgttaatgtttgctcttagaagtcatactccatggtcttcaaagaccaaaaaatgaggttttgcttttgtaatcagg

SEQ ID NO: 366124 - DNA, 391 bp, Homo Sapiens
  misc_feature (374)..(374): n is a, c, g, or t
aaattttaaaatggggaataataaaccacagttttcccccctccccataatccctctcttgagtttatggcacatcctctataaatcattagttttcctattttattacataaaattcttttagaaaatgcaaatagtgaactttgtgaatggatttttccatactcatctacaattcctccattttaaatgactacttttattttttaatttaaaaaatctacttcagtatcatgagtaggtcttacatcagtgatgggttctttttgtagtgagacatacaaatctgatgttaatgtttgctcttagaagtcatactccatggtcttcaaagaccaaaaaatgaggttttgcttttgtaatcaggaaaaaanaccattaatgaacctta

SEQ ID NO: 366125 - DNA, 481 bp, Homo Sapiens
gtacataatgggaatttcattccagattatattttatttacatattaatttcacagaatattaatatttcttaacttcttaaagcatgctagcgttttatgtatatgtacacatatattcagacagggtaattttatctgctgcctaacattgtactaaaatattgctttatctgtttttaattacaaaatgcctaatgatttcttaaattatagtttaaagacaattggcccaggaagcaaatcccctgcctttagtatgaaccactataagtaaccttacaaatagagttaatccaagacaatattaacaaactgtgctttgtctttaataaaagggataggattaacaaacatattgatggcataacctattcagctatgtccttatttttgcaataatgtaacctcaaatattggattgttgaaccaacaatggctgtgttaaagaagattaaataaaccgaaaaataaaaagcatg

SEQ ID NO: 366126 - DNA, 646 bp, Homo Sapiens
  misc_feature (502)..(510): n is a, c, g, or t
tgaccccactactccacggttggctggtgcatgtttagacttaaatgtcatatctttcatgtctcaaagccaaaatagtaacatctgatctcagaacagagctgtgaccacatgccaatatatgtgtcacaaagtctacatatgttacattccttggaagtctccttaaatgtttcacaaaatgtcaacaagcttgttttgttattgatatttccgagattgggcacatttaagacagtaaacgggaaaggtggtgaagatgctataagaagatgctgtatcttgagaattgaaaaatgagaatctgacatggtttgaaaaatcatgaagggtatatataaaggatgcatgtgtaggagccattaaaattcataacagtatgtgccccttcagcgttttaatcttatgaagtggttaagagataagtcttcggagtgggacaaaaggatttgaatttaggttctgtggattattatgggtccttgataaattctcaaagccnnnnnnnnngttcatctctaaaataggaatataggattacctaccacattgactcgtaaggactatatgagaccatgtatatagaatgtttaacatagtaccaggctttacaaagaactcaataaatgtttaccattattgaaat

SEQ ID NO: 366127 - DNA, 532 bp, Homo Sapiens
taagctaaactaagccttatctgcttaaggatgttgaactgaatcactccctttactcatcctgtgcatatgtgtacaaatggtcatgtggatcatgtgatgatcatccatcttatttgattgtattaatgcatcatgctaaacatgtagtacaggttaacaataccagatttatgtcctgttcaacaactcagtactctaaatgttgttatgcttttaataagaccttcccagataataacccttggagctcttttccccagctgtcctaccatgcatttgcaacaggaggaagatgtaatgaatatgccagtattaagttgatttatgaacagtgctttgatatgccaaagggaaaactgtcccacttaaattagattaagtagggtggctaaaaataaataaaaacactggaaattctttctctcactttctcttgatgcaatgaagggaatatgacactacagtatacagagttgttgttatatgatgcacaaaatattttgatgatttgaataaatgttaactttta

SEQ ID NO: 366128 - DNA, 1419 bp, Homo Sapiens
  misc_feature (41)..(41): n is a, c, g, or t
  misc_feature (47)..(47): n is a, c, g, or t
actgggcggtgtgactggtcatggcacttgctggccttctncaaagngtcctcctggaagcccctcctttcagtgcctggctgcagcggtgctagccaggctggagtccagcacctctcgccggtgtctgtgtgagtgagcgcatgtgcgcatttatgagcatctacttgcggctgcactcagggccatttgaacccagtgcagagttatctctatgaggaggccccgggtctccagccccctccatctcccctggggtttggcatatttgacatggagccccatgccaagggatgcagctgttggtgtctgtccagtccattcaaggctagcctgcccatgcactgtggcaggggttggattggagggagagaacagagttgggaaaaacaacaggtttgagtcctataaagccataatttaactccagtagctgatgtcagacaagcttgtcctatgtcctatttgagtggcagcagcgccagcccagcaagaaggctgggggttgtcaaggttgtccccagaccttgcttgcagtggttggagaacccagggggctgccttgggccctctggccagagggaagcgggcagctctagccctggagattgtggtcacattggggcttgtttaggattggagggccaggtcacctccccagccaccctcccttctctcctctggggtccccactttagggcgactttgcccgaggcccacgcatccatccactcctttagtgccttgaatctcattcacaagcagccccctcccttcccctccccttctcactctgttgatgtaatcctcccacccccagtgtccatcctaagacaggcatcaaaagaggccctaactttacttcccaaatggtgctttttaaaaaacaccatcactacattaggggcaattttttcacacctccctgtcttcagaatgtaaagggtggggattatgtctctgtttaatatgcagccccctgcactgtggggtttggggcatgttcagtaataagaatgaatacaatagacaaagggggtgtgatgagtgttaacttggttgttccagaggtaaaccaggtctcagggaagagcctggagctgctattgcttaggaagttgtacgtgccttgaaatgtccactacctgaggacgcagcatctggtgggcccggggctgctggggccaaggagggaccttgaccttctggtgcctgcccctccccggcctatgtgccatccgcgtgacgctaggtcagcgctgccggttctttaccaaatgtgcttgcttctcctaagttatttataaagagaaatcactaatggactctactggtttgagtgcttctgagctggatgaccgaccgcctgtatgtttgtgtaattaattgccataataaactttgatgagtcaaaaaaaa

SEQ ID NO: 366129 - DNA, 941 bp, Homo Sapiens
aattcagcaacactcagctttgcagcctggaaaagtgtcctctccacataaaacatcagctgtatttcttcactactaattttctatctctgacttgaagttacaaactaactttagcagaaatgtttatggctttttctggagcatgttacacaccaagaactgctatatatgctttccacatttacatgtaaaaacatcttccatgacttactaagcttcccttgtatttacctgaacaatttgactccataaataaatttactttgtcaattataaaaaggtaaaaagaacaataactaaagaatagtaagcctatatagggttccccaattgaaaacaaaatgggagtggtctagccaaaataaaatggtaacttaatatactaattgtggaattacatataaaattattttgtatgcacatttcataaaaattattcttatactcacattccagctcacataatgaatatttcataaactataaaataaatatacaaaataccaaaaagtaggggtctatcatgagtaccaggcaaatataaacagaatttgcatggggagattcagaactataagccacagaatatacagtaataaattcaatacaaagcagagaatacatgtttgcttttagcatttttgaggcttttagttttctagtagtcaccttgttaaaatgatttggtttggttaagaatggttttttcttcggaaacaggtacaaattcatacacacaaactcactctataattttcttacacttaaggtttatctttagactaacatatatttaactatatgtaaatcaaaactaaatgtctgcatgtgtttgcaggcagacaggaaacatgctcaaaaaataaatattagaaaactttaaaaatacttattcaggcctcagaaatgtagggattttattatacttctacataact

SEQ ID NO: 366130 - DNA, 480 bp, Homo Sapiens
  misc_feature (33)..(33): n is a, c, g, or t
  misc_feature (38)..(38): n is a, c, g, or t
  misc_feature (71)..(71): n is a, c, g, or t
  misc_feature (131)..(131): n is a, c, g, or t
  misc_feature (397)..(397): n is a, c, g, or t
  misc_feature (413)..(413): n is a, c, g, or t
  misc_feature (431)..(431): n is a, c, g, or t
  misc_feature (458)..(458): n is a, c, g, or t
cctaagaacctgactggctgggtcccgtgatanatatnaggagccagctgtggtggcgcccgaggcagccnttgatggcagcggccaccagtggccaatgccagaaggtaaaaaaacgacggcggcggaanagcaagctggcatctccccagccatcctatgcagcagacgccaacgacagcaaggccgagtactcagacgtcctggccaagctggcttcctgaaccgccagagccagtgcgctggacggtgctcaccgccccgctgctggacacccagtgagccggagtcggtgcaccaggcccccgacacccagagcatctcccacttcctgcatcgtgtgcagggcttccggcggcgtggggggcaaagcaggcggttttgggtggccggggtngggggccatgcggcanagttcagccccgatgttnctttcaattgatttgttttgaggggcntggggcaagaaaaaagaaggtt

SEQ ID NO: 366131 - DNA, 464 bp, Homo Sapiens
ggaaacctcccggaagttttaatcaaagcagtttaattaaggtatccaaaaaaacctttgccttactatcaagaagtgtcaaataggttcagcttgctgcccaaaatatggatccatttatgaagcaggttcatattttagaggtgttaataaaatcctcatcggaaaagatcccaaagtgcaaggatttgattataaacataatttcctagactgaaagtttttggaaaagatgccagggtcctgagtcaggccttctggttatattgtgcagtttcaaaagaactatttaaaactcttgaaaactcatgtaaataaaaatcatagggtgaaaattgtatttgttaaaataccttaataatttaaaatgacctgatttcctggaaaattttattattcaaaaggtggaggcattgtaaaaaggaaatagtgatgtaaataaacatgttctctttcaaaaaaaa

SEQ ID NO: 366132 - DNA, 485 bp, Homo Sapiens
aaggttggtaggtaagctgtaacagattgctccagttgccttaaactatgcacatagctaagtgaccaaacttcttgttttgatttgaaaaaagtgcattgttttcttgtccctccctttgatgaaacgttaccctttgacgggccttttgatgtgaacagatgttttctaggacaaactataaggactaattttaaacttcaaacattccacttttgtaatttgttttaaattgttttatgtatagtaagcacaactgtaatctagttttaagagaaaccggtgctttccttttagttcatttgtatttcccttgttactgtaaaagactgtttattaattgtttacagtttgttgcaacagccattttcttgggagaaagcttgagtgtaaagccatttgtaaaaggctttgccatactcattttaatatgtgcctgttgctgttaacttttgatgaataaaaacctatcttttcatatttta

SEQ ID NO: 366133 - DNA, 236 bp, Homo Sapiens
ctctagagtatctcccccgtacgcccaagcaaaatctgatcagctaaattagagctcagttaaattagagatcagctaaattagctgcagggataggtgggtgtggatagcatccagggctccacaggctgaccagtgcccctgggactcatcaccacagtacattgttttaagtaagttcttgttgttgaaccaagtccatcaaatgacataaactcaagctgataaaagtctgc

SEQ ID NO: 366134 - DNA, 138 bp, Homo Sapiens
atataagtttacttttcacctgctctattctttgtggggaaaaaatgcatctagaaaaacatagtttaaatactgtatataagataatgaaagttagtaacgtccattatttaataaagtttgtaaagtacaaggtaa

SEQ ID NO: 366135 - DNA, 1047 bp, Homo Sapiens
  misc_feature (417)..(448): n is a, c, g, or t
gctggtaccggtccggaatatacgggatcgcgggagcgcggcccctcctacctccgcccgcggccggggagctgcctggcacccgcggcttccaaaggggaaagaaagttgcgcccgcgccaggcgcagcgcgctcggcggacgcggcctttcgggcgaaagttaggaggggccgggctggcgggcgggcgggttccgggggctcctttccgcaccagcggcggtcgctccccgtgggcgggacctcgggcgtgatcgtcgaggagaccgcggctccctcacctgccggcttgttcctcggggtccgcggagcgagcccagctctcggcgcgtgtcggagtctcccagccccgcggccccgagcgcacgatgcgcggacccgggcaccccctcctcctggggctgctgctggtgctnnnnnnnnnnnnnnnnnnnnnnnnnnnnnnnnagccccgggagccggcggacggacaggcgctgctgcggctggtggtggaactcgtccaggagctgcggaagcaccactcggcggagcacaagggcctgcagctcctcgggcgggactgcgccctgggccgcgcggaggcggcggggctggggccttcgccggagcagcgagtggaaattgttcctcgagatctgaggatgaaggacaagtttctaaaacaccttacaggccctctttattttagtccaaagtgcagcaaacacttccatagactttatcacaacaccagagactgcaccattcctgcatactataaaagatgcgccaggcttcttacccggctggctgtcagtccagtgtgcatggaagaataaccagtgagcagaccgtacaggagcagcacaccaggagccatgagaagtgccttggaaaccaacagggaaacagaactatctttatacacatcccctcatggacaagagatttatttttgcagacagactcttccataagtcctttgagttttgtatgttgttgacagtttgcagatatatattcgataaatcagtgtacttgacagtgttatctgtcacttattt

SEQ ID NO: 366136 - DNA, 1164 bp, Homo Sapiens
ggtagaggagaagccagctgtaggggcaagagggaaatgcaagtcacctgcaggaatccagctagatttggagaagggaatgaaactaacattgaatgactaccatggcacgctaaatagtatcttgggtgccaaattcatgtatccacttagctgcattggtccagggcatgtcagtctggatacagccttacctccaggtagcacttaactggtccattcacctagactgcaagtaagaagacaaaatgactgagaccgtgtgcccacctgaacttattgtctttacttggcctgagctaaaagcttgggtgcaggacctgtgtaactagaaagttgcctacttcagaacctccagggcgtgagtgcaaggtcaaacatgactggcttccaggccgaccatcaatgtaggaggagagctgatgtggagggtgacatgggggctgcccatgttaaacctgagtccagtgctctggcattgggcagtcacggttaaagccaagtcatgtgtgtctcagctgttttggaggtgatgattttgcatcttccaagcctcttcaggtgtgaatctgtggtcaggaaaacacaagtcctaatggaacccttaggggggaaggaaatgaagattccctataacctctgggggtggggagtaggaataaggggccttgggcctccataaatctgcaatctgcaccctcctcctagagacagggagatcgtgttctgctttttacatgaggagcagaactgggccatacacgtgttcaagaactaggggagctacctggtagcaagtgagtgcagacccacctcaccttgggggaatctcaaactcataggcctcagatacacgatcacctgtcatatcaggtgagcactggcctgcttggggagagacctgggcacctccaggtataggaacagcaacactcctggctgacaactaagccaatatggccctaggtcattcttgcttccaatatgcttgccactccttaaatgtcctaatgatgagaaactctctttctgaccaattgctatgtttacataacacgcatgtactcatgcatcccttgccagagcccatatatgtatgcatatataaacatagcactttttactacatagctcagcacattgcaaggtttgcatttaagttaa

SEQ ID NO: 366137 - DNA, 512 bp, Homo Sapiens
gcaatccccagcaataaatgtatctgggtaaacagacaacaatatgacgtcagagtttttcagggttcatttcattttgtaagcaataggatgtaaccagagatacttctattggaatacttcagtttatacactacaaatcataatgttagcacacaacaaactttacatagtttctacaactggcatttgcgattaattcatcctccatcatactacagataggtaacttcaaaataagagatgagtttattttcaaatgtgaaatcatgtcaacattttaatccaaactcaatatatttaacacacatatttaagaggcttactacatcatgcaattggattagaacacctttacaatcctatgaagagagtacagtgcagaaaagtcatatctttacattaaccaacaaaatcttagcaattatattttagtcttacatcactacagggtttaaaagtgatcgctgcaaaatcagattttaaaaatatcttccacaatcatgattttt

SEQ ID NO: 366138 - DNA, 427 bp, Homo Sapiens
tttaacatggcttcagtatgagatctttttcaaaactattttcttaaacatttatttcatgagattatgttcaaccctgtacctggtgtaattttaaaattaattgcttgtaacctcactttactaataatgtttattatctttcctaataatgcattaactgattaatcaggtgtttaaatttttataaaatactcttgcaaaaagtttatttgaaaaatttctagatggtctcatgagtttcaaaataataatttttgtgtatgaacaaagctgttgtttttaccatgcagtattgcatgattttaagttatgtggaattaacataactgattttgttttaattgtaagttgttaactcctgtatatatcattaaaataaatctgaagttgaagtagtgtttttagttaaattatacttagaaat

SEQ ID NO: 366139 - DNA, 626 bp, Homo Sapiens
ggtccctgctattgaacccactacattagaccaccattttgaacatacatttcgtgtggacctaatgatgaaactaaatagaacccaataaggctcatgacatcttctatctgctgtccctcatatacacactactttattgatggtgaacagacgaagcacgtaatggtcatacaatacttactaagagacaccaagtttctcaggagatttccagtatgatgtatgatgaaagtgaagatcacgatgatcctgacaatgctctatgagagccctagaacaagaaggagcagaagggcactttgaccttcattaaattatgaaaatgcaagaatagcaagaaactatatacggtatacacttacgacttcacaacaacctatagcttgaatatagtaaatctaagtaaacatgtattactcaaagtaatatatttagaattatgtattagtataagatcagaattgaattctaagttgttggtgacatctgcatcatttcataggattagaacttactcaaaataatgtaaatctttaaaaatataaattagaatgacaagtgggaatcataaattaaacgttaatggtttcttatgctctttttaaatatagaaatatcatgtt

SEQ ID NO: 366140 - DNA, 1095 bp, Homo Sapiens
  misc_feature (519)..(519): n is a, c, g, or t
  misc_feature (883)..(910): n is a, c, g, or t
ctttgtttataaaacccgaaatatggatatgaaacgtcttatcatggttttggctggagcttctgaatttgatcctcagtataataaagatgccacaagcaggccaacggataatattctaataccacagctaatcagagaaattggcagcattaatttaaagaagaatgagcctccacttacctgcccatatagcctgaaggccagagttcttttactgtctcatcttgctagaatgaaaattcctgagacccttgaagaagatcagcaattcatgctaaaaaagtgtcctgccctacttcaagaaatggttaatgtaatctgccaactaatagtaatggcccggaaccgtgaagaaagggagtttcgtgctccaactttggcatccctagaacactgcatgaagctttctcagatggccgttcagggacttcagcaatttaagtctccccttctgcagctccctcatattgaagaggacaatcttagacgggtttctaatcataagaaagtataaanattaaaactatccaggatttggtgagtttaaaagaatcagatcggtcacactctactgcacttccttgaagatgaaaaatatgaagaggttatggctggccttgggagttttccatatgtgaccatggatataaaatcacaggtgttagatgatgaagatagcaacaacatcacagtaggatccttagttacagtgttggttaagttgacaaggcaaacaatggctgaagtatttgaaaaggagcagtccatctgtgctgcagaggaacagccagcagaagatgggcagggtgaaactaacaagaacaggacaaaaggaggatggcaacagaagagtaaaggacccaagaaaactgctaaatcnnnnnnnnnnnnnnnnnnnnnnnnnnnncctacacctgtgctattaccacagtcaaagcaacagaaacaaaagcaggcaaatggagtcgttgggaatgaagctgcagtaaaggaagatgaagaagaagtttcagataagggcagtgattctgaagaagaagaaaccaatagagattcccaaagtgagaaagatgatggtagtgacagagactc

SEQ ID NO: 366141 - DNA, 1153 bp, Homo Sapiens
  misc_feature (611)..(651): n is a, c, g, or t
  misc_feature (654)..(691): n is a, c, g, or t
gccgcaccaagatgggccgagtgtccaagaaggcctgagtgaagagagtccaggttcgcggagacaccatcgccacggtggccgttcccacctgcacgctctgcggggagaaaaggagggggcttgccgtggtcgtagccctgaaccgtttcagcgtttcgcagtttctgcgccttttctctcacccgggtggcgctggaagttatcagtggctagtgaggtcccagctccctgatcctatgctctatttaaaagataacctttggccttagactccgttagctcctatttcctgccttcagacaaacaggaaacttctgcagtcaggaaggctcctgtacccttcttcttttcctaggccctgtcctgcccgcatcctaccccatccccacctgaagtgaggctatccctgcagctgcagggcactaatgacccttgacttctgctgggtcctaagtcctctcagcagtgggtgactgctgttgccaatacctcagactccagggaaagagaggaggccatcattctcactgtaccactaggcgcagttggatataggtgggaagaaaaggtgacttgttatagaagattaaaactagatttgatactgnnnnnnnnnnnnnnnnnnnnnnnnnnnnnnnnnnnnnnnnngannnnnnnnnnnnnnnnnnnnnnnnnnnnnnnnnnnnnnagtttccgccttccccgttttttgtgtccaaggtgggcccccttattaggggagctcgctttttattaagccatgagccccgtgccgcggtcgtttttaacaccacgttctgcgtgacgctggggacaaaacggtgtctagccggcggccaccttttggggagggacccctttaccctccggggcgggtgtcaccatatttgtgggcaccgaaaaccctcccctcacgagaagttatttttggaaggcccccttagaagggaggaaacaatcatatatacaactttcttgaagaggggtggttttctaacggggtgggttttacaccatatgacccgcgacaatagattgccctggcacgtgccttttggaagaagtcttggggcctcccacgcggagcatttagtgaattcttggtgacaaaaatttttttattaccccgcgggacgctatggtcaaaaaa

SEQ ID NO: 366142 - DNA, 500 bp, Homo Sapiens
tgacgtgccggggttgagctggcaccccgggatgtgatgtaagaacgccctgcgcgtcagcctggaacgggcttgattgctgcccttaactgtgttctgaagtttcacagcttggcttcagcctatcagcgcatacattggcatgaattttgtgaattagggtgttaaaacctggaatttgaatttgcacaaaaagagaatatatttatcactaattattttcttaatgtaggaatgcaccgttaaaaaggaccaaaagtttttggtctgggtcaaaaaatacgaatgtgttctcaggctcgtggtccctcttattttcttctggaaacacgaggttgcatttacatgcattgctccctctttcatgtccactgaaaactcactctctcagggctaattgatttactgttggctttttattatttgcctttgaagtcaaaaggcaccagtatcccaagctttttttccctatcgaatcctgtcttgtcttcaagaaaggt

SEQ ID NO: 366143 - DNA, 1531 bp, Homo Sapiens
ctggaccggtccggaattctcgggatcagcactgtaaagatgaagctggctaactggtactggctgagctcagctgttcttgccacttacggttttttggttgtggcaaacaatgaaacagaggaaattaaagatgaaagagcaaaggatgtctgcccagtgagactagaaagcagagggaaatgcgaagaggcagaggagtgcccctaccaggtaagcctgccccccttgactattcagctcccgaagcaattcagcaggatcgaggaggtgttcaaagaagtccaaaacctcaaggaaatcgtaaatagtctaaagaaatcttgccaagactgcaagctgcaggctgatgacaacggagacccaggcagaaacggactgttgttacccagtacaggagccccgggagaggttggtgataacagagttagagaattagagagtgaggttaacaagctgtcctctgagctaaagaatgccaaagaggagatcaatgtacttcatggtcgcctggagaagctgaatcttgtaaatatgaacaacatagaaaattatgttgacagcaaagtggcaaatctaacatttgttgtcaatagtttggatggcaaatgttcaaagtgtcccagccaagaacaaatacagtcacgtccagttcaacatctaatatataaagattgctctgactactacgcaataggcaaaagaagcagtgagacctacagagttacacctgatcccaaaaatagtagctttgaagtttactgtgacatggagaccatggggggaggctggacagtgctgcaggcacgtctcgatgggagcaccaacttcaccagaacatggcaagactacaaagcaggctttgggaaacctcagaagggaattttgggctggggaacgataaaattcatcttcctgacccaaaagtaagggaaaatgattctgagaatagatcttgaagactttaatggtgtcgaactatatgcatcgtatgatcacgtttcatgtggctaatgagtttctcaaatatcgttatacacgttggtaactataatggcacagctggagatgcattacgtttcaacaaacattacaaccacgatctgaagtttttcaccactccagataaagacaatgatcgatatccttctgggaactgtgggctgtactacagttcaggctggtggtttgatgcatgtctttctgcaaacttaaatggcaaatattatcaccaaaaatacagaggtgtccgtaatgggattttctggggtacctggcctggtgtaagtgaggcacaccctggtggctacaagtcctccttcaaagaggctaagatgatgatcagacccaagcactttaagccataaatcactctgttcattcctccaggtattcgttatctaatagggcaattaattccttcagcactttagaatatgccttgtttcatatttttcatagctaaaaaatgatgtctgacggctaggttcttatgctacacagcatttgaaataaagctgaaaaacaatgc

SEQ ID NO: 366144 - DNA, 396 bp, Homo Sapiens
  misc_feature (235)..(235): n is a, c, g, or t
  misc_feature (333)..(333): n is a, c, g, or t
  misc_feature (347)..(347): n is a, c, g, or t
aatactttatccaaatgcctcgtgacattattatccacctctgtgtaatctgacacgaaaaatgaggttgttccatcatattccacaaaatgctttgggaataatttaacccaggtttcatctccataaaagactattctttttccagctgcttttgcttgtcttatcacactgtcttccagcagtgcaggagaattgaggttcctgatgacgtcgacaaagccaggaaggctcncccgtcatcaatgccttgattcgaagcatagtaacctggtaggtggcttttgcttcagccaaaaactgtgagatgctccttttccaccaggtaaagtntgtgtagggcatanaatttcacaccctttgacccaacacaaaatcatctctcaaggctctatc

SEQ ID NO: 366145 - DNA, 1084 bp, Homo Sapiens
  misc_feature (552)..(565): n is a, c, g, or t
tattcttataatacctttttgtggttgcatgaactaatgagtgaatggacaatgatgaataaatgtgaagctgtattcttaatacccactgcagaagtgtcattaaaataatatacagtggaaccagaaagagggttctgtaagaattagccatagcagaacaaaattatagaattttaaatacctctacccaagtagaggtatttttattcagacacctactttttatttataaaaaaatgcattttctattatcaagttcacttatgaaataaaaattataacacatattttccatttagcgtgcctaacatcctaccttgccttctatgagtctttcttctaatactacacctctgccttattttagttcagggtttcactaagtaacccctacattaataaatgagtatggataatgctaatatttgagcaatacagaggattaagagatcaagatacttcactgcctattagcctaatagggatacctactttctttcaaatgccaaaaattcacattagaaacataatccagatatgtgttatttnnnnnnnnnnnnnncaaaacagtaaatggtttcttaaaattattgctatttttcaacccccttaaactggagaaaaacatttaattagtaaaacattaattaatttactttaatttttcccatctctcagtagtggcggggaagaacacaacagttttcaatctatgtctgcatagttgtgtagaagctgcaaaaattttagttggaatttttaatttggatgatccctgacagccccaaactagtcaggctaataagtatttgaggcaaaatggctttaatctaacaatttactgagtttacctgaagttggctaaataacactgtatgtttaacttctacctctacataagttgaatgctgataaaaggaactagtagataactatgtatattgataagcactgttaagaaaatgcaaaaatatttctaaacacttttccaaatgttttctactttaagttagaaatagtttcaaatctgagaataaacactatataatctgcactttataggttgggtgcagtgtctcat

SEQ ID NO: 366146 - DNA, 359 bp, Homo Sapiens
aatggggcacgcacggtgcatcaagtcttgggcagggcatggagaaacaaatgtcttgttattattctttgccatcatgctttttcatattccaaaacttggagttacaaagatgatcacaaacgtatagaatgagccaaaaggctacatcatgttgagggtgctggagattttacattttgacaattgttttcaaaataaatgttcggaatacagtgcagcccttacgacaggcttacgtaaagcttttgtgagatttttaagttgttatttctgattagaactctgtaaccctcagcaagtttcatttttgtcatgacaatgtaggaattgctgaattaaatgtttagaaggatgcc

SEQ ID NO: 366147 - DNA, 515 bp, Homo Sapiens
  misc_feature (18)..(18): n is a, c, g, or t
agtatgcaaagtccgagnaaaggaaaacagaaatctgtatgtgagatggtcattgtacagaaagaagtggcccctctgcaacatgtcctcacagaaacgaaatggtgtgtagcaatcaacactagaaagtagaccttttgcaaattaatatgtccttgaccttttttgcccttttctgggggtgaggtggggataaaaagactgtcatatcaagaactgtgacttttctttccctcaaacaataaaactcctttattatcttaatgctcccatgttaacatgtttgctgctaaattacaatgtagaattgataatggtttatagtgaactgtgctcttccctcattaaaatcccagggtgccctgtaaagatgcagatgtttcttcctgaaaacttctttttttacaaagaaaattagatgtacatgtataattcagtgtgctttgtctttctccagattaatatcggttacactgctgatgtttgtaaattaaacagatatttacttcaaaaaa

SEQ ID NO: 366148 - DNA, 1389 bp, Homo Sapiens
  misc_feature (112)..(112): n is a, c, g, or t
gaacagaccaacaaataaacggccccacgccacaccaacaaaccacccccacacgcgcccacacccccctctctgctttcttccgctgccccgctgctatcgggtgggtggnaccgggtccggaattttccgggaatttaaggtacatgttccaaaatactttgaaaagctaaatgtttcccatgatcgctcattcttcttttatgattcatacgttattccttataaagtaagaactttgttttcctcctatcaaggcagctattttattaaatttttcacttagtctgagaaatagcagatagtctcatatttaggaaaactttccaaataaaataaatgttattctctgaataaagagctaatacagaaatgttcaagttattttactttctggtaatgtcttcagtaaaatattttctttatctaaatattaacattctaagtctaccaaaaaaagttttaaactcaagcaggccaaaaccaatatgcttataagaaataatgaaaagttcatccatttctgataaagttctctatggcaaagtctttcaaatacgagataactgcaaaatattttccttttatactacagaaatgagaatctcatcaataaattagttcaagcataagatgaaaacagaatattctgtggtgccagtgcacactaccttcccacccatacacatccatgttcactgtaacaaactgaatattcacaataaagcttctgagtaacactttctgattactcatgataaactgacatggctaactgcaagaattaaatcttctatctgagagtaataatttatgatgactcagtggtgccagagtaaagtttctaaaataacattcctctcacttgtaccccactaaaagtattagtctacacattacattgaagttaaacacaaaattatcagtgttttagaaacatgagtccggactgtgtaagtaaaagtacaaacattatttccaccataaagtatgtattgaaatcaagttgtctctgtgtacagaatacatacttattcccatttttaagcatttgcttctgttttccctacctagaatgtcagatgtttttcagttatctccccatttgtcaaagttgacctcaagataacatttttcattaaagcatctgagatctaagaacacaattattattctaacaatgattattagctcattcacttattttgataactaatgatcacagctattatactactttctcgttattttgtgtgcatgcctcatttccctgacttaaacctcactgagagcgcaaaatgcagctttatactttttactttcaattgcctagcacaatagtgagtacatttgaattgaatatataataaatattgcaaaataaaatcc

SEQ ID NO: 366149 - DNA, 1562 bp, Homo Sapiens
  misc_feature (918)..(931): n is a, c, g, or t
  misc_feature (1129)..(1129): n is a, c, g, or t
gggcgcatgagcagtgctgctcccaacccgccagtcgcggtctccggcgccagctacgccgctgccgctgtcactatggcccattacaaagccgccgactcgaagcgtgagcagttccggaggtacttggagaagtcgggggtgctggacacgctgaccaaggtgttggtagccttatatgaagaaccagagaaacctaacagtgctttggattttttaaagcatcacttaggagctgctactccagaaaatccagaaatagagctgcttcgcctagaactggccgaaatgaaagagaagtatgaagctattgtagaagaaaataaaaaactgaaagcaaagcttgctcagtatgaaccacctcaggaggagaagcgtgctgaataggattcttctcagtttgaaagacaatgaaaaatggttttgtatgacttgaatagtttgtatagtatataatcttttctgaacagatgctatagaactcttttaatatgtttaattcacctatcacactctgttaaaaacacatagaatcatcaataaaaactcaatataactttctttgggtcttaaagcaggagaatccaaagtaaatcctgaacaaaacctaaacacagccatctaactcattaccttaaaagacattctgtttattagtctgattaggaatgatggcactggttgtattttagccaagacagtttagcatggagctattccttggttgcagttcaggatatgaaccacaggtacagtcattctttgaagggtgacactgttctgtatattccctataggcagctggagagatctgggtgacacaagatgcttttgtacggggtcccatgaatcttctgctcttgtttgtgtgacatggaacaaaataacttctttgccaccactttgccttagataacnnnnnnnnnnnnnnccgttttgaactctgacaccacattttccttctatgcaatcatgcctgtctgataatcttgcattgctttcctctgagctttagtgggtcctagttgcacactggcctttctgtgctgtttttcaatttgcctaataatagcagttaccctgattgtaatttatgtaactttaaacaggatcacactgtaccccctgnctgccttatttgcttactgagcacaggacagaggcaatatacaactctgggttcacacacaagctgagatgagaagaggaatgagccatatattggggaaaatcatagtttgtaggtataattatatagtgcttttctccctcaaagtatttttctagccttgaattcattttatcttcattatccctgtgaagtaggtgggacaagtataaggggaagaggggtgctgaatttttaggccaaagactgatattaatacaaatcactcactaactgtagagccttgggcattatcagtgaactactctgagatttactgtcttcatctgtttaatgagtagaatgtccgtgatgcctacctcacagggttgttgtgagggtcaaatgagaatgtatgtgaaagatttgtaaatggtaaagccctatattcttg

SEQ ID NO: 366150 - DNA, 510 bp, Homo Sapiens
aggagagagaggctgagatcattcaggagtttgttgggcagcaagcatggagcttcttgcacaaattctgggtccataaacaacccccaaagtccctgctgatccagtagccctggaggttccccaggtagggagagccagaggtgccagccttcctgaagggccagaaaatttagcctggatctcctcttttacctgctaggactggaaagagccagaagtggggtggcctgaagccctctctctgcttgaggtattgcccctgtgtggaattgagtgctcatgggttggcctcatatcagcctgggagttatttttgatatgtagaatgccagatcttccagattaggctaaatgtaatgaaaacctcttaggattatctgtggagcatcagtttgggaagaattattgaattatcttgcaagaaaaaagtatgtctcactttttgttaatgttgctgcctcattgacctggaaagtgctactctggaaagtgctactctggaaagtg

SEQ ID NO: 366151 - DNA, 489 bp, Homo Sapiens; identical to SEQ ID NO: 92969

SEQ ID NO: 366152 - DNA, 1404 bp, Homo Sapiens
  misc_feature (528)..(537): n is a, c, g, or t
  misc_feature (708)..(759): n is a, c, g, or t
  misc_feature (894)..(957): n is a, c, g, or t
  misc_feature (1178)..(1178): n is a, c, g, or t
  misc_feature (1226)..(1226): n is a, c, g, or t
  misc_feature (1270)..(1270): n is a, c, g, or t
agttaatctattaatactgactcagtgtctgcctttaaatataaatgatatgttgaaaacttaaggaagcaaatgctacatatatgcaatataaaatagtaatgtgatgctgatgctgttaaccaaagggcagaataaataagcaaaatgccaaaaggggtcttaattgaaatgaaaatttaattttgtttttaaaatattgtttatctttatttattttgtggtaatatagtaagtttttttagaagacaattttcataacttgataaattatagttttgtttgttagaaaagttgctcttaaaagatgtaaatagatgacaaacgatgtaaataattttgtaagaggcttcaaaatgtttatacgtggaaacacacctacatgaaaagcagaaatcggttgctgttttgcttctttttccctcttatttttgtattgtggtcatttcctatgcaaataatggagcaaacagctgtatagttgtagaattttttgagagaatgagatgtttatatattaacgacaannnnnnnnnnggaaaataaaaagtgcctaccagaacccacccctactatttcagaaccaaaccgccccgaaccgaccctgctcctaactctacaccacacttcttacctcccatcccccgaccataactgtcaacatctcccgacaccaccgtatccgacgcccgttgacaatcgctccannnnnnnnnnnnnnnnnnnnnnnnnnnnnnnnnnnnnnnnnnnnnnnnnnnnttccacttattcgccacatcctccgctgccgctctgtacactcctttccctacctacctccttatcccatcattttcgatccgcccctcgcgccttctctcgctatatcgccctgctatgtctacacttctccgnnnnnnnnnnnnnnnnnnnnnnnnnnnnnnnnnnnnnnnnnnnnnnnnnnnnnnnnnnnnnnnncacctcttctcacactttcgcctacctatgcacaccctcctccgccctatctatttccttcccttccactcccttttctactctatttcacccctcaccacgaatcttccctcccaattaccttgccctttaccgcttctcattagatacgggcacatgtgtgcatctctcccgcctttatcccacccgtctattccactaccctacgcacttataacatnctcacaacgctcgcgattagtactccccccacctctcaattcatctcncactggctacaacagtgcattctgcttcttgtttccaccccatntatcgtgcactatattcgtctgatacacacttccacacatcaccctgatttcgtactctgcgctgccacctctttcactcgctacacctcacgcactcccctcaattttccccacatgccgcgcgacccaccaa

SEQ ID NO: 366153 - DNA, 449 bp, Homo Sapiens
  misc_feature (408)..(408): n is a, c, g, or t
ggattacctcactgagtcatcagtaccctcctattcagctccccaagatgatgtgtttttgcttaccctaagagaggttttcttcttatttttagataattcaagtgcttagataaattatgttttctttaagtgtttatggtaaactcttttaaagaaaatttaatatgttatagctgaatctttttggtaactttaaatctttatcatagactctgtacatatgttcaaattagctgcttgcctgatgtgtgtatcatcggtgggatgacagaacaaacatatttatgatcatgaataatgtgctttgtaaaaagatttcaagttattaggaagcatactctgttttttaatcatgtataatattccatgatacttttatagaacaattctggcttcaggaaagtnctagaagcaatatttcttcaaataaaaggtgtttaaacttt

SEQ ID NO: 366154 - DNA, 514 bp, Homo Sapiens
cagatagaaagggatcaatgtatggtgggaggattggaggttggtgggataggggtctctgtgaagagatccaaaatcatttctaggtacacagtgtgtcagctagatctgtttctatataactttgggagattttcagatcttttctgttaaactttcactactattaatgctgtatacaccaatagactttcatatattttctgttgtttttaaaatagttttcagaattatgcaagtaataagtgcatgtatgctcactgtcaaaaattcccaacactagaaaatcatgtagaataaaaattttaaatctcacttcacttagccgacattccatgccctgaccaatcctactgcttttcctaaaaacagaataatttggtgtgcattctttcagactttttcctatacattttatatgtagaaatgtagcaatgtatttgtatagatgtgatcattcctatattgttattgatttttttcacttaataaaaattcaccttattccttaaaa

SEQ ID NO: 366155 - DNA, 801 bp, Homo Sapiens
ggccaacatgcagagacacctcctgtgtgaatccgcccacagtacaaaatgcttatatagtgtcgagacagatgagtaaatatccatctggtgagagagtacgttatcaatgtaggagcccttatgaaatgtttggggatgaagaagtgatgtgtttaaatggaaactggacggaaccacctcaatgcaaagattctacaggaaaatgtgggccccctccacctattgacaatgaggacattacttcagtcccgtagtcagtaaatgctccagcttcatcagttgagtaacaatgccagaacttgtatcaacttaagggtaacaagcgaataacatgtagaaatggacaatggtcagaaccaccaaaatgcttacatccgtgtgtaatatcccgagaaattatggaaaattataacatagcattaaggtggacagccaaacagaagctttattcgagaacaggtgaatcagttgaatttgtgtgtaaacggggatatcgtctttcatcacgttctcacacattgcgaacaacatgttgggatgggaaactggagtatccaacttgtgcaaaaagatagaatcaatcataaagtgcacacctttattcagaactttagtattaaatcagttctcaatttcattttttatgtattgttttactcctttttattcatacgtaaaattttggattaatttgtgaaaatgtaattataagctgagaccggtggctctcttcttaaaagcaccatattaaatcctggaaaactaacggttgtgtccagttcataaaatgtttgtggc

SEQ ID NO: 366156 - DNA, 1963 bp, Homo Sapiens
taaataaacgtcctctttattttaccaaatataatttatcagttaagttgacatttgtcaattcagttatagtaactataaataattctcttaagacacagttctgtaactttttaaggatacgagagtaaaccaatattgctccttgcagccaggccaaaagtacatgcagttggtacaatcggggaaaagaaatgaaacttccatgaaagtcaccttcattttctttccctctcaccctacagtcctcctctgctcactcagggcctggggcatgcctatctgtctgctttttaggcaaaggaggtcactccagagtcttctgggactgcctggccaaattccagagatgaggaaggggcgagtgactggggtaggggtggctggagaccacagggacacagccttaggggcagaggagttggttttgatgcctgtacaagaagaatctgtgtgtaagtattttttgaggtggaggaaaagatgaaaaaagtccagagggaggaggaaaaacaagcccaggctggtgttaatgaattctgttggacacaactccaactagaaaacctctaaaattccttccaattgtacggttctatgattccagaaggaggcctggaggtctgggtagaaatggagggagagaaaatatggtctctggaggtctagggcaggttcctgggataaggtgcagtgttggtagaaacaggatcattgcctaagccttcccttggaggtgggcccttgaggctacagatggaagggtttctgtagaagcttctgagagagaagttagaaaaagcctacatccaaatccccagatctgtacacgtgtgactgcggatggaggctccagttttctcccaattttgtgctaggcagagaaaagtagaaacaaccagatgatgtccaccctgctagttctaaatcctcttttgggtgcttggtaaggagaggtggagggaagggaatatgaggaagggtcgtttagggaaataaatactggttgagcaatggggcggtggctctagctgtggtcagcactgcacagagtaggggtctggaaaggagaaagaggcagaagaatctggcttgaagtagatgcaaatacttacaacgaggaaactttctctgccagattcaaaggggcacatggcctttgtaacctggagaatgaggtgaggttagagctgtgtttcccttaccactggcttatcagtgcctggcacagtacctaacacatagtaggcactcaataaatattgctcaaagaatgtttcagaccatgcttgtctgcaggagagctcatcttgcggaggctgcatatttgctaaatgaacgaataaatgattggtgaatgtttgtgggtagaagccaagaaagaggaaaactgacctctatggcatgacagaacgagtaattttaggaagtgacagggtccaaggtgaccaagtgattatgtcctcaggagaaatggcagcaatgagacacctgtggttgtcctcaacctccaaaccattctccacatacccatgacctgaccctaatctcaaaacccaacctggcaagctctggggaaggtagtgcttagagacaatttgagatgaaggttgaagagagacaaagaatctgggcccagggagacaaagtcatctgggcccagggagaatgtggattttggggaaccaataggtggacatgggtcaacagggagaagagtgcactgttccatttttttcctggatatgacaatcaactggaaatgatcagagggaggggttgttgatgttgaccaggccattgaacaagaggcatgtgcacaaattgaaaagtcagtccaccttactctttctgcgagtgggaacgcttaggtccagagggcaagagaacagaactgggatcacaggggcctggagcaggtgtctcctgtccagagctttgaagttggtccacttctacaaaa

SEQ ID NO: 366157 - DNA, 518 bp, Homo Sapiens
  misc_feature (56)..(56): n is a, c, g, or t
atttcccggagtgaaggggatgggggtagagcctaatgggaatttttattatccanggactcatccctaagaaagaatgttggccttctcttcaatcccctggcttagcccgtcaggtagaacgcttaactcaacctgacaccgacttctttagagaagcgagtcttttttgaaatggaggagcgatggtaaccccactagggggcgccccatgatcggctcccagtgcacccccttaagggtaagcaggccacatatctagagtctgatagtctgtgtgtacataaggtctagaagtctgtggaaacgccctgaaacctgtagtattatcttaactaccctcttatgttaaggtttacataataggatttttaaacaaatgtgtttaattttttaagatctcttgtattaaaattttcttttggaataagctgtggaaattttgttacaacctggttgagatcaacctctttacaatgacacaaattgtgacattttataaattagatacttcagtg

SEQ ID NO: 366158 - DNA, 510 bp, Homo Sapiens
  misc_feature (18)..(18): n is a, c, g, or t
  misc_feature (35)..(35): n is a, c, g, or t
attttaattacccccggnactcaacccctaagaanaaagttggccctcctccttcaaacccccggccttagcccgtccaggtaagaaacgccttacctcaccctgaacacccgacctccttagaagaaaccgagtccttttttgaaatggaggagccgatggtaaacccccacctagggggcgccccatgaacggctccccagtgcaccccccttaagggtaagcaggcccgcatatcctagagtctgatagtcctgtgtgtacataaggtcctagaagtctgtggaaacgcccctgaaacttgtagtattatccttaactaccctcttatgttaaggtttacataataggatttttaaacaaatgtgtttaattttttaagatctcttgtattaaaattttcttttggaataagctgtggaaattttgttacaacctggttgagatcaacctctttacaatgacacaaattgtgacattttataaattagatacttcagtgaaaaaaaa

SEQ ID NO: 366159 - DNA, 607 bp, Homo Sapiens
tcgccctccagacataatgcatcgagcccagttgcagggaacatcactgtgtgtgtgtgatgtcatggtgttatatgtgttgagtttaatgttgagctgaagcaagttggtgaccttcctctttgctctttgtaaagaagacaccaatgtttgtcagagaaaaatccccagcagtcgtgttgaagaggcagtgtcatccacctacttgtcccctttggaacagttcaactgcagaaaggtcggattgaggttttgtgctttgtcgtcttttcttttttaaacaaaacatgacaaccttggcttttccgatatggaacacttttgttgttgtggagttccctcttgctgtatcttctatgcaattccttttctaaaaaaaccccccggcagaggcagagtgccctccggatatctgtccggcgccttgctgagtggtggaggtgagggataccagctccgggtgtgcctcttttctctccctggctgccaatcctgattttccctgcagtccccttggtttgtaaattgcctgcatttattctgtcagccaacatgtacaaaatgtaagaaagaatttttaaacaggtaataaattatatttataagc

SEQ ID NO: 366160 - DNA, 585 bp, Homo Sapiens
  misc_feature (535)..(535): n is a, c, g, or t
tatggtttgtctttttaatccttatgtcttttttggcaactaagaaggaccagctccaggtaaacaatatccaattgacctgtaaatcttgccagttatgtcactgcattaatcatagcacattgcaaacacataatgtctctactttgataattttgggtcgcatccctgggctatggattcctgttaatctgtccgaggcttgggctgccacacctgctttgcattttgtgaaacttcttctaactgagcttactcatcatgtctgtagagccttagacataataattttagctattgtttccttggtcgcactaataacttctgttgtgatgtcctctgtagctttgcataattctattcaaacagctcagtacatggaaaactggacacacacagccaaccaagcatggctacttcagaataaaattaacactgagttacaaactgaagtggtgttatgggaagtcagggaccccgaagagagggaccagctggagccacagcagaggaacgtaaattgtgaagattacantcttaatacggatatttatcagttctcaaaataatacttttacaatttca

SEQ ID NO: 366161 - DNA, 453 bp, Homo Sapiens
  misc_feature (358)..(395): n is a, c, g, or t
tcatttcattagctctctccttcaccttgtttattaattctacaagcatttattgccatctcctatgtgccaagcactggtccaggctctggggatacactatgaacaaaatacagtgaagtccctgccccatggagcttacattctagtagggggagacagacaaacacataaatacaaaatatcagagggttcaaaacagcttagaggtatcttgcctgaattctgtttactgcatatcctcattcttgggcaatgataaagtgaagagagaggccaacaatgggctgcagcaatgttgctagtcccagctctaccatctacacattgagtggatttaagtgagttctcatctgannnnnnnnnnnnnnnnnnnnnnnnnnnnnnnnnnnnnnattggattaaattacttataaggggaaagggtcccttcaggcctttttcatgagagta

SEQ ID NO: 366162 - DNA, 107 bp, Homo Sapiens
gccttttattcctttaaaatttcgcctggcaaaaaataaataaatggaactatcactttataagaatcattttctagtaatgcaaacaaattattttttacaaaaaa

SEQ ID NO: 366163 - DNA, 469 bp, Homo Sapiens
  misc_feature (104)..(104): n is a, c, g, or t
tggggccaagaaacgggggccactagctgcccttattagcctaatttagtgcccccccgtgttccagccttaagccctttgacccctttccctttgatcccacnaaatacattaaaactctgaattcacatacaatgcctattttaaagtccaatagattttagcctataaagtgcttgaccagtaatgtggttgtaattttgtgtatgttcccccacatcgcccccaacttcggatgtggggtcaggaggttgaggttcactattaacaaatgtcataaatatctcatagaggtacagtgccaatagatattcaaatgttgcatgttgaccagagggattttatatctgaagaacatacactattaataaataccttagagaaagattttgacctggctttagataaaactgtggcaagaaaaatgtaatgagcaatatatggaaataaacacacctttgttaaagat

SEQ ID NO: 366164 - DNA, 204 bp, Homo Sapiens
gtaaataaataaaaatgtctgcatgacccatatggttatgaagtttttttcctagactaaatgattgcagattatttatgggggctagaagatatttagctatcaatgtaaggatttttttccccttaggtcagtctattcactgtttagatctggtaaattacttgtatgaattgaataaattctctgtatcattgtactgtt

SEQ ID NO: 366165 - DNA, 880 bp, Homo Sapiens
gggaaaagttctccaaagaagagctgaaaaaggcccaggatgttttggtgcaggagatggaagtggttaaacaaggaatgagccatggagagctctcaagtgaagcttataaccaggtgtgggaagaatgctacagtcaagttttatatcttcctgggcagagccgctacacacgggccaatctggctagtaaaaaggacagaattgaatcacttgaaaagaggctcgagataaacaggggtcacatgacgacagaagccaagagggctgcaaagatggaaaagaagatgaaaattttgcttgggggttaccagtctcgtgctatggggctcatgaaacagttgaatgacttatgggaccaaagttgaacaggctcacttggagttacgcacttttgaagaactcaagaaacatgaagattctgctattccccggaggctagagtgtctaaaagaagacgttcagcgacaacaagaaagagaaaaggaacttcaacatagatatgctgatttgctgctggagaaagagactttaaagtcaaaattctgaagtacagtttatattctgtcacaggattaattaattgccggttttcatactctagaaggctgaaactgatgtttatcttcattgacaaatttacccaccatctgtggtttttcagttgtttattttaaatgatatcgatcttacacattctgtgtataaagaccttaactccacaggacggacattttagagtttaaattattaaggctatcattcttttagtaatgtcatatttgcaaacttttttagttttggcctttaatttaaaaagcctaattttaaagtgctgcctgtgagtaactcttgaataaaaacaaaatataaaaaatta

SEQ ID NO: 366166 - DNA, 374 bp, Homo Sapiens
  misc_feature (193)..(193): n is a, c, g, or t
agaagcgtaaaaatgacatggtagaaagtaatagaaaacctaaatgtctgtcattaaaggataggttaaggtgtggttcagccatataggaatatctcgtatctgttaaaatgaataaagtacattcattgtgtatggaaaaatggccatgatacattaggtgaaacaagttattaatagaaaagtgtacacngtgggaacccattttaaaatgtgtgtgcttatgtttataaatgcatagaaaggtctattcacagctttctttgaacagtgtagatcacatgaaactttcaactttatacatttctgtattaatattttacactacccacattatttttaaactttattttaaataaagaatttttaaaatt

SEQ ID NO: 366167 - DNA, 294 bp, Homo Sapiens
atacagatgaaccaaaattacaaaaagttatgaaaatttttatactgggaatgatgctcatataagaatacctttttaaactattttttaactttgttttatgcaaaaaagtatcttacgtaaattaatgatataaatcatgattattttatgtatttttataatgccagatttctttttatggaaaatgagttactaaagcattttaaataatacctgccttgtaccattttttaaatagaagttacttcattatattttgcacattatatttaataaaatgtgtcaatttga

SEQ ID NO: 366168 - DNA, 847 bp, Homo Sapiens
tggaagagcagaacaccatagacatatgtcgctcttgggacccaaggtgctgctgtttcttgctgcattcatcatcacctctgacgatgtgactcaagcgactccagaaacattcacagaagatcctaatctggtgaatgatcccgctacagatgaaacagttttggctgttttggctgatattgcaccttccacagatgacttggagtgctgggatgagaaatttacctgcacaaggctctactatgtgcatcggccggttaaacaatgcattcatcagttatgcttcaccagtttacgacgtatgtacatcgtcaacaaggagatctgctctcgtcttgtctgtaaggaacacgaagctatgaaagatgagctttgccgtcagatggctggtctgccccataggagactccgtcgctccaattacttcagacttcctccctgtgaaaatgtggatttgcagagacccaatggtctgtgatcattgaaaaagaggaaagaagaaaaaatgtatgggtgagaggaaggaggatctccttcttctccaaccattgacagctaacccttagacagtatttcttaaaccaatccttttgcaatgcccagcttttaccccaactctctactttttcacccaaactgataacatttatctcattttctagcacttaaaatacaaagtctatattattgcataattttgctgcttctcaatatcatagacacagtgaatagatgatgactatatggcttatatacaaacattctatgtacaatttcaaggggagactaaactttaggctaataatctttactattgaatctgtcctgatatagatcttaaggg

SEQ ID NO: 366169 - DNA, 756 bp, Homo Sapiens
  misc_feature (135)..(232): n is a, c, g, or t
tctatgtgcctatttgtataccagcaccatgctgtttcgatgactaaagctttatagtatagtttaaagtcaggtaatgtgatgcctccagatttgttcttttctcttactcttgcttttgctatgtggaatctnnnnnnnnnnnnnnnnnnnnnnnnnnnnnnnnnnnnnnnnnnnnnnnnnnnnnnnnnnnnnnnnnnnnnnnnnnnnnnnnnnnnnnnnnnnnnnnnnnaaataacatattgttactctcttttacctccctccttgagtaaggtgaaaaaggttaaagttagtggcataatagcgcttcattgaatgcacaatagtcttaacatgttaaagaaatgtttaattataaaattaagcttatacataatctaaaaattttcaaatgtactgcatttatagcataaaagtacaattagtaaaatgattcactagtaatttaattacatttaatttaaagtaaaattaaaaatgcttttctctatgatgcagaatattactccaaacacctacctcatgcatcactcaatatgaaaagtaaactaacagggccctctccactttagattttcatcataaacctttacattttaatgcccatactcttccacagaaaaaaccataaataatgcccatctaataaaaaagaatctctcctatatctgacacagcaacaatttatcacatgctttcacatgtgaatacaataggaatgaaataaagtaatttgagagttgaatttcatca

SEQ ID NO: 366170 - DNA, 106 bp, Homo Sapiens
aaaaaaagagatctttttgagagaaacaaatgaggattgtaaagtttggggacttacctctgtagcattgtgaaaataaactttgattaagctgatttgaaaggaa

SEQ ID NO: 366171 - DNA, 2107 bp, Homo Sapiens
  misc_feature (2075)..(2075): n is a, c, g, or t
  misc_feature (2088)..(2088): n is a, c, g, or t
gggagcactctgggaatatgaagtttataaatttaaagaaattggacagcttaaggctattagtccttatttgccaagaggtgatccagttctgaaaccactcatctatgaaatgatcttacatgaattttcggagagtgattatgagggttttgccacattgatccgagaatggcctggagatctgtataataattcagtcatagttcaagcagttcgggatcatttgaagaaagatagtcagaacaagactttacttaaaaccctggcagaattgtacacctatgataagaactatggcaatgctctggaaatatacttaacattaagacataaagacgtttttcagttgatccacaagcataatcttttcagttctatcaaggataaaattgttttattaatggattttgattcagagaaagctgttgacatgcttttggacaatgaagataaaatttcaattaaaaaggtagtggaagaattggaagacagaccagagctacagcatgtgtatttgcataagcttttcaagagagaccaccataaggggcagcgttaccatgaaaaacagatcagtctttatgctgaatatgatcgaccaaacttacttccctttctccgagacagtacccattgcccacttgaaaaggctcttgagatctgtcaacagagaaactttgtagaagagacagtttatcttctgagccgaatgggtaatagccgaagtgccctgaagatgattatggaggaattacatgatgttgataaagcaatcgaatttgccaaggagcaagatgatggagagctgtggggaagatttgattttatattccattgacaaaccaccatttattactggcttgttaaacaacattggcacacatgttgacccaattctactgattcaccgtattaaggaaggaatggagatccccaatttgagagattccttggttaaaattctgcaagactacaatttgcaaattctgcttcgtgaaggctgcaagaagattctcgtagctgactctttgtccttactgaagaaaatgcaccgaactcaaatgaaaggtgttcttgttgatgaggagaacatctgtgagtcgtgcctttcccctattcttccatcagatgcagctaagcccttcagcgtggtggtcttccattgccggcacatgttccacaaggagtgcctgcccatgcccagcatgaactctgctgcacagttctgcaacatctgcagtgctaagaaccgtggaccaggaagtgcaattttggagatgaaaaaatagctcatttctccttgtcagtctccttgtcaccactctttttgagactgtttttgcaacaacaaaagcatttgttgacactcgtgctgttaagagatttgtttatgtttatattatactcaaaaacaatttcttcatctattcctgtactaatggtttctctttgcagttcacagagaatttggggctctcttcatgccttgaaattttggggtccatagtgaatattttgttatttatttgtttggctcattctttatatagtaatggaaacataagtctaggagttagaaatgaattttttagaccttagtaaaaccatttaaccataaaatggacaactgagaattctcccagctgcctgaaagcgtcgccaactgtggttatcctgcaagctgctacctgcaacttggacgttgtttccacgtgctctgctggctacgattcttgcattctgggtttggcttttttctgtgtcatcaactatggttatcctctaaataggcatttaatgaaacattgtacaaattgtcactcatttgatgacacctgggaataacattagcaggctgatgtcctgcaccattatgtttactaatcacatgttctgtgtgctgtgacgactgtcaaagagtatctggccatggcggacactcagcatttgttgattgaataaatgttagctcttctcattgtggaagggactcacttttactgggataaacaaaggcagttaagaattctgggcaccctgttaagggaggaaaagagagttcaacaccttcnggtctgagcgttntgggctagagttgccgggt

SEQ ID NO: 366172 - DNA, 510 bp, Homo Sapiens
  misc_feature (291)..(320): n is a, c, g, or t
  misc_feature (333)..(397): n is a, c, g, or t
  misc_feature (436)..(436): n is a, c, g, or t
taagaaataggaatcccagcatggactgcaaacaagaaaggtgttatgaaccttctatctcagttatacatacatttattactgggtcacaatgtaaaatgtgtttcttactaaggtggctacagacgaaaaggttagaaatatactaaaccatgaccttgtaatctccaatctccaccaggtttctttcttccctatacagtataagccccaagacaaatcttccactactcttttgtaagaagtctccaatttcccttctgtagggcccttcaacaaacctctatgacnnnnnnnnnnnnnnnnnnnnnnnnnnnnnngagacagagtctnnnnnnnnnnnnnnnnnnnnnnnnnnnnnnnnnnnnnnnnnnnnnnnnnnnnnnnnnnnnnnnnngttcacaccattctcctgcctcaggctcccaagtactgngattacaggcgtgagccatggtgcctggccggattactctttttaaaagctgtacctcccgtagctgtacctca

SEQ ID NO: 366173 - DNA, 521 bp, Homo Sapiens
agctaatagcctaactgcagaggaactgagtggatggggtagctgctgtatagatttttagatgagatgatacagtgtggattacactgtaccctggggcgggagagttggtccctgatatggaaatcatatgcttttgaattgcacctaataactcagcattaacaagtatattactccttaaattatacatgcattttcaatattccctaaccaaatagtttatagcttattgagaagaagtctgttcttggagagatgttgaaattagatgtttattaaactttaaaatataatgccttaagctgtggcactttaaaaacatctttatatataaattgctaaaaggactgttaatgcttttctcagacacattggcattttacaattttgcacatggtttatttgaaatcaaaaaataactatactttgttttataagtctacctaatatctcatttttgattctcatcgttagcacagttttgttgcttttattaaactattttaactgaaaaaaaa

SEQ ID NO: 366174 - DNA, 115 bp, Homo Sapiens
aaagatgaaataaagacccagggggagaatgggtgttgtatggggaggcaagtgtggggggtccttctccacacccactttgtccatttgcaaatatattttggaaaacagctag

SEQ ID NO: 366175 - DNA, 865 bp, Homo Sapiens
  misc_feature (116)..(136): n is a, c, g, or t
aaatcattgaaagggctttattccaatttcctaagcatcataaagagtttagaaaatatttgtatgtctcttgcatttcaagtgaataaaatcactttatctcttactcttgcgtnnnnnnnnnnnnnnnnnnnnnaacatcctttgtagcttagaacagcagaaactggactttggaaacagaaatgatgagcctccatgatgaactggatcaggagaggaaaaagttcacaatgatagaaatacaaaatgcgaaatgccgagcgagcaaaagaagatgccgagataaagaaatgacatgctacagaaagaaatggagcagtttttttccacgtttggagaactgacagtggacacccaggagaacccgagagaggaaacacaatatggattcagtgagcctgctttcgcctgctgtctcgtgatggctctggcagaggatctccagggattctggtgggtatatgacttgagaaccaggtggctggtcacctggatgtacagaagtctaactggtgaaggaatatcatttacagacattaaacatccatatctgcaatgtgtaccaaagttatatcatgccccataatgctactgtcaagtgttaccaactggatatgtgtatatagagtagtttttccaaaagtaaacctaaaaatgagaagccatatttccaagaattattttattgccaagtccttgtatttaaatgttaaatcaatatgttgttgcaatttagcttgctttcaagcttcaccccttgcacttaacataagctatttttggcattgtgttatcatcggcttattttatagatcaatatttttatttcccttttttgctgaggaaatgaagataagcaaaa

SEQ ID NO: 366176 - DNA, 939 bp, Homo Sapiens
gcagttcccaaaccccaaagctgaccctgcgccccatttgaatacggccagagcctgctggttcactttgggtagagccgtgcctcttgggcaggctcccatagtgaccacgtccccacgaatgggaaagcacgttagtgggagggacgtaggacacgtgtggaccgccaggccctctcagtccattttccggggctgctcggtgctgctgttaagacgtgagtgcatttcacttggaagaacccattgtacaaagttcaaggctaagagttctgaattctggcgtcagcttcctcaggattttcttcagttgcaagtacctttccactgaaaatatgagcatgcccgcctggctagtaggcatctgtaagagtgtcgccaggcccgcgccagctgaggcctcagactagccaggcaagagccgtctgaccagttggctggcggtggttctggtggagcacgagggagcccgggtggtgccctgagcctcgagctgctctctgtcactgtcttgaatcagactcagaaatggcttcttcccagccctgcctacaagtttttctctggggtcctctttcaaggatgtccacggtaccttcctcctgaaacttgaggaagtcttttgtcttccagctgctcagggttctctggtccaagaccctgctttaaagagagtctttggcgtgctcagactccagcgctccgttcttcaaggaggttgacttgcctctcgggccccgtaggtaccaagagactgtttacctcccagaatgtttgggcttgaagttacattaaagtgaagttatttgaaagaaagaaaacctcatcatttctaaggatgacttaattactgtgccttttcctttctttttacacatcctactgtcccttagggtaaaattttcagcattaaataaaacatttcaaatataaaaaaaa

SEQ ID NO: 366177 - DNA, 440 bp, Homo Sapiens
  misc_feature (18)..(18): n is a, c, g, or t
tatgcggtcgagtctttnatattcttaagtcatctctggaggataaaagtcagagctcaaagtctatatatactgtcacaaaacaaggatgcagatataatgatgataaaattgaatcagactcagaaatggcttcttcccagccctgcctacaagtttttctctggggtcctctttcaaggatgtccacggtaccttcctcctgaaacttgaggaagtcttttgtcttccagctgctcagggttctctggtccaagaccctgctttaaagagagtctttggcgtgctcagactccagcgctccgttcttcaaggaggttgacttgcctctcgggccccgtaggtaccaatgagactgtttacctcccagaatgtttgggcttgatagttacattaaagtgaagttatgaaagtaaagaaaacctcatcatttctaagta

SEQ ID NO: 366178 - DNA, 1346 bp, Homo Sapiens
cacgtggacgcgttaactggcccccgggttcttagcgccccccctttttttgttgtgtgttgacgtgaacattagtttgggagaaagggcaaattagtgataattttcatcttggacacaagtataatttaagcttgttcacaccatgctgaaatttgcaatttggtaaaaatgaaagacacataattttttccaaaggaattttttcacgccattatatatacacttcatgagaaagtttcaaacactttctcatgatcacgagttaccagaaaataaaagattaaatttgtacagatattgatctatatatcaaatacatacagaaatgatgtaaaaaccttatgcagtttactttgacctctgtcctcaaaagatttgcccagggacagatgcttttcttttgtataaatgactgtggctttatttaaaatatgaaaatcaaaggaagaaacccagtttaatcacagtatttttaaaatcccttcccaatattaaaggatcattaccatatatagcaccataatacaatattgatgggagagggtattcacatcacgcaaattaataataataataaaaacaacaaacactgaaaacccgtgttagtatcgtagaataagaagttgataacagcttttagctttcctcatacacgccaaggaaaaaggttaaagagtttaaactacccaaaagtccccaaaataaatcctaaccaggaaaaagcaaaacaaacaaaaaccaaaccccaaggtcagcagtacatttttgaaccgtaaaagagaatggggcgattgagttgtacaactggagttatggctaagacataaaatctcctctgcattaattatttttcggttcgtcggcagtaggagttagtgtgtgaacaatgaaagagggctttaggttgtgttcagactgtagaaaagtccttaccaaccttcaactgttggtcacgggatcaagacaagaaacacttcatgaattaggaaattctaaaacactcagagcctgggtttgctatagaattggaagcttatgaaacctgggtataaatgagcatttcatagattaccaggactgactagctccaaatcctctctctcctggtttagtcagttccccatggagctcctaaatccaaggtactggcagagtacactacacaacaggcttcttgtgcctgtgctgtggaattagtcctgggtttaattcagtgagcctgagaataaagactgctgtaacccttgctttggaatacttctaggctttaagtttacaagaagatttttcaaagttaaagataggaaagtgtgaggagtccacctcatcgaagaatccggacc

SEQ ID NO: 366179 - DNA, 642 bp, Homo Sapiens
  misc_feature (180)..(188): n is a, c, g, or t
  misc_feature (329)..(333): n is a, c, g, or t
  misc_feature (336)..(339): n is a, c, g, or t
  misc_feature (342)..(342): n is a, c, g, or t
  misc_feature (344)..(345): n is a, c, g, or t
  misc_feature (347)..(347): n is a, c, g, or t
  misc_feature (383)..(434): n is a, c, g, or t
  misc_feature (458)..(458): n is a, c, g, or t
  misc_feature (469)..(469): n is a, c, g, or t
  misc_feature (474)..(483): n is a, c, g, or t
  misc_feature (563)..(563): n is a, c, g, or t
gggagattgggatgtggattatgcttaacagtgagagctgaaatgagaccatttactttgtttaaaatgctgtactgtgcaagtttggaaatgtaaattaatttactgtatataatatcttgagtttgtttatacctccaagtttttacactgaagataaactagctttaattcaaaacnnnnnnnnnctttataagggaataagctgttgagctaaacctgtatacttgtgctttttattttctggatgcacaatgaaagtttatacttgtatctcactgcatcatatctgattgcagaaattaaagcacaatttacaagcaaaaaannnnnacnnnncanannanaaaccaccaaaaacacacaacaccccaaaaacacannnnnnnnnnnnnnnnnnnnnnnnnnnnnnnnnnnnnnnnnnnnnnnnnnnnaccaaaacacccggcgaccccaanacaccccccanacacnnnnnnnnnnttttggggggcccgcccctcgggccctttaaaaaaattctttctaaaacccttctttgtgggggggcccgcggccccccncggggaggagggcaaccggggccaaaaagtggttgttcccaagaagaaaccccggggacaagaaaaaaggggggttggt

SEQ ID NO: 366180 - DNA, 419 bp, Homo Sapiens
taaacttaaaaatcagtttatcttaaaatttttttgaattagaagaaattgatttcacatgaaaatataacattctgaaggtaagtattttaaacattacaactgttggctgaaatatttacaaagttataataagcttataactggatgaaagcatctataaaaataaataggcaccctagatgtaaaacttttacatgaaataaaatgattagtatatatgtatcaatctgtatctggagtgttgaatcaacaaaaataaatgggcattttctagtttgtgtagtagtacatgagtcaggaggtttcaactggacagtacttaaaagaggcaaaactggacatttctatttgatatctacaactcaactgagttgaaaagacaaatgtctgagactgctgttagatacaaaaattag

SEQ ID NO: 366181 - DNA, 942 bp, Homo Sapiens
  misc_feature (15)..(15): n is a, c, g, or t
  misc_feature (32)..(32): n is a, c, g, or t
  misc_feature (37)..(37): n is a, c, g, or t
  misc_feature (93)..(93): n is a, c, g, or t
ccccgggctgaaggnactgaaaaccccccggnaaaanggcagtccgaccccagccccctgccctaggagggagggtgtggggatctccccccngaggagatgaaagtgccttgtgtcctggtgaggattcccccttatttagtgttcctcaacaaatccaaatttaaacaatatttggtcccccaggacccataatcccattattcccataaatatgcagctgggttaaagacatttgaggatgttggaaatggacacttatataactaatcccaacataagaaggtttaaatttttatgtttgctcaatgaatgagtactcttaaaattgtgtgattgtgaaaccaagagcgttaatactgacatagatttgccatcaaacaaaacaccacctgatctgactaaagaataaaagactagaaaggatctcatatgaatctggtgacaaggccaggaagagatttccttgctctaattatgtctatatttgtttcatttcatgggcacctatctgggtcctgagcagaatgaggaagattgtgctgaatggacccaaagtagtttcttgttttctcctaaagcagggagctttgggaagcaatggaaaagcttaaaagagatgattctgtccttggtaaatgtgagtgagaatagcgttttgtttttcaagtaaaacttaattcaaaggctacaaagttttaaaaactatttaccaagccaactacattatatgtattcatattaataacatgtgtagaggtagctatacattacttgaatttacactttacacaaatgatttaaaaaataggttgcaagtgcagcttaaagttttttttcaatgaaaagttaattgtttagaggagaagacttttatagtcttcagaggaatgtgtatttatgattgtatatagtcaccaaataaaacttttcaagaaacag

SEQ ID NO: 366182 - DNA, 1009 bp, Homo Sapiens
  misc_feature (487)..(501): n is a, c, g, or t
  misc_feature (834)..(874): n is a, c, g, or t
aaaagccaaatagagctgtatttttatactgtacaaaaaaattgacactcttaatgtaactagatacatctaagggtaaattacacatctctcaaacacagtattttaacatctaagatatgtttctgcattgcagactgatactgaattttatacatctttatttacaataacttaaaatattttttcatctctggcagatatttacaaggtcaacagtgactacatttcacatttcaacaatcaacagcattaatcggttcattaagacaggataatggcttacatgcaccaataaatatgatcttaaattcacggttttttcttcagctctgaaaaaatgaaggttgtcactagtcctaggttgaaaggacatcactcaatacaagtcataatttctatatgcctatcctatttaaattttcaccagcactattctctaaatacttgggaagtttataccaagttataggttgatgctagtttnnnnnnnnnnnnnnngctgatgtgtacattccatatccttttatgaagcaaacatatgaaagtgagatagttcttatttaatatcattgtgacagagatcagattacataatgccaaagtagtaaaaatccttcagaaattatagctcaggagactcaaattatcatgagaaaaacagtgggaaaataatttttgcaccctaaaaactgtttcacttaaccacttaaactgaatgtaaagccagaataattttagagtaagaataaaaaagattcagtgtcaagtagatgaacttattacaaatatttttaaacatggagcatatctctcaattcagtatggatgatnnnnnnnnnnnnnnnnnnnnnnnnnnnnnnnnnnnnnnnnnctgtatcagtgattgtttagaaagccaatcctctccttccaagacagctaatcaatatactcattacctttcaactactcctgctaaacaacatacatagcctcctgagtagctgggagatcctctagatcaccc

SEQ ID NO: 366183 - DNA, 681 bp, Homo Sapiens
tgggcaagcaggtctcaattctgaatgagccagtcggggcacactgactgtcctccccaggggaactgcagcgccctcctccccatgtgccccctgcaagcccctgagatatgtgttggcgtcacatatccctccccacttgcgttccctgatactgtgtctctgagctatccctgaaccaggatctgcctaattacatgctgtgccccatggggggctccttccctgcctgacccactgttgcagaatgaagtcacctcgcctcccctcttcgcttataatctttgcaggcctcactaggccgtagtccatgctacagcttgggcacagtgacaatctgacaaggctgaacaacagcccctggaggattgaggcccctgtggctcctggtcaggctgcccgttgtggggaggggcagtgttagagcagggctggtcataccctctggagttcagaggaagaggtaggaccagtgcctttttgtttcatctattgttatttttggttgggtgggtgggaaggtctctttaaaatggggcaggccacacccccattccgtgcctcaatttccccatctgtaaactgtagatatgactactgacctacctcgcagggggctgtggggaggcataagctgatgtttgtaaagcgctttgtaaataaacgtgctctctgaatgcc

SEQ ID NO: 366184 - DNA, 1572 bp, Homo Sapiens
  misc_feature (23)..(23): n is a, c, g, or t
  misc_feature (29)..(29): n is a, c, g, or t
  misc_feature (47)..(47): n is a, c, g, or t
  misc_feature (125)..(125): n is a, c, g, or t
  misc_feature (138)..(138): n is a, c, g, or t
  misc_feature (277)..(277): n is a, c, g, or t
ccaaaggaagcaaaaaaggcccntggtcntaccttttcctttggaantcccagaggggtatgaccagcccttgtttttaacaatggcccctcccccacaaacgggcagcctgaccagggagccancagggggctcaancccccagggggctgtgtttcagcctggcagattgtcactgggcccaggctgagcaggacaggccagtgagggcctgaagattaaaaggaagaggggggcgaggtgacttcattctgcaacagtgggtcaggcagggaanggagcccccccatgggggcacagcagtaataggcagatcctggttcagggaagctcagagcacatatcaggggaagcaagtggggagggatagtgagcaaaatatctcaggggctgcagggggcagtggggaggagggcgctgcagttcccctggggaggacagtcagtgtgccccactggctattcagaattgagacctgcttccccaggaccttcaggggctgggccagatggaatcctaaatgccaagtcccagtacatcctctacccacatgcagagggggcaggctgagtgggaaccttgccttgggatgctctctgcagggcctcactcatcctgccaaaagccaggatggtgccaggggcttggcctgagtcccccaagagccagccgtcctgagcctttgtcactctgccaggcagcaccaggcctctcagcacaggcctgcaggaccctatggaggtggggctgggctgcagacttgctaagctcctccttggcccaccacccgcccatgggacaagcgaaaggccctgcccacagtggaagggggagcaagatagcccagcatccactccagtgcttgccccatgggagtgtgtttgggcagagcaggaggcactgatcttcctcgccagtccaggatggtgggtctggccctgagtgtgcagtgggtgccccaggccagggccccgctatcttgactccagcccctccaagtactccagggccacatcgtagcaaaagtggtactgatccatggtctccaccatgttgggtttgtagttccgtagggttttggcagcaaagaaaacgtccaccaagttgtggcagcggatcatctccaggaccgtggcgcaggcgcagaaggtgccgctgcgtcctcccccgtttaggcagtgcacgatggtgcgcccatccccactctcggcctgccacttgtccacctcagccagcaggtgcaagaaggccttcttggagtcaggtgtgtcccggtatgcagaccagcgcaggaactggaagtgccgcaccagcaggtgcccctcctgcaaccgagagatgttctgcacccggaagactcgagccactaagtcttcatcagctgtgcccgacataaactccacctccatgaggccatattgctgccggcctggcttctggccagtactgcaggcagggccaggcggagttggactggttcagctggttgagcatgacgatggaggtacacccgtaatcgtagaccagccgccagaagtcgggcgtggtctctgcagcgggtgcagggtcacg

SEQ ID NO: 366185 - DNA, 697 bp, Homo Sapiens
  misc_feature (653)..(653): n is a, c, g, or t
  misc_feature (676)..(676): n is a, c, g, or t
cttcataatggaggacaatgttttgcaatatataaatcattctatttttgtaaattgtatatcactttaattgaaaatgttctctactaattaatactgtgaaacaaaattgatgttgtttaactagaagttatgagtatcttaactgcctttattccttttcaaaaaggaaaaagctgtagaacattttgtagatgaaactactgtttaagattaatgaattaatattgtgaatgaaaatcaaaatccatactttaaaggtaatcatgttactaacaacctatttttgaattcataaaaatttctttataaatgatgttttgtgaacatagtaaaatagaccattatactatgtgtatgtttgatacagcgtcgccaaaactagtgttctttattagtgcctctcacaaaagatcctggatggaggagtaagatgaaatattatgctattatatgatgctgtttgtaaaggtattaatgtactagtaaggtgttaatgacaaggaattagtactattcctgttgtaaagttagattttgcatattgtatctatcaaaatatgtttgggtttagattttaagttgtctactgagcagatttctgcattggttttccagtcctgttaaaagtttagaaacttcatatgtgtcancacagcttttgtaaagaaagtanccttaatattttatgacattc

SEQ ID NO: 366186 - DNA, 793 bp, Homo Sapiens
gaggccatttctataatgagaaggctgttaagaagaaatcctgaacggcgccttggggctagcgagaaagatgcagaggatgtaaaaagcacccatttttccggctaattgattggagcgctctgatggacaaaaaagtaaagccaccatttatacctaccataagaggacgagaagatgttagtaattttgatgatgaatttacctcagaagcacctattctgactccacctcgagaaccaaggatactttcggaagaggagcaggaaatgttcagagattttgactacattgctgattggtgttaagttgctagacactgcgaaaccaagctgactcacaagaagacctcttaaaaatagcaacccttcatttgctctctgtgccaccaatagcttctgagttttttgttgttgttgtttttattgaaacacgtgaagatttgtttaaaagtaccattctaatacttcttcaaaagtggctcctcattgtacttcagcgtaaatatgagcactggaaacagtttcatggagtttaagttgagtgaacatcggccatgaaaatccatcacgaatacttttggatcaatagtctatggtttaagaaaagaagagaaaagaaaccactttctgatagtccctagctttgccatatgcccgccttaagtggaaggaaacgttaatcactgaactatgttctataaacaagacacagagggcttgcgaatggctattactgttcacacaagagtatgattcctgtttgacataacggcaaatgctcccttagtgtt

SEQ ID NO: 366187 - DNA, 367 bp, Homo Sapiens
  misc_feature (19)..(19): n is a, c, g, or t
  misc_feature (45)..(45): n is a, c, g, or t
  misc_feature (173)..(173): n is a, c, g, or t
tgggtccaatgaaagtaangccatgtaaaagccctagaatagtgncctagcatgtaacccttgtggacatatagaaagtgtcattgttttgccacagtaatcctattttcctgtggattcaaataatatgaaatgagtataaaatcatgtattggaacgatgtgtgcaagtcnccattcctgccttcctaaggcaggagacctgatggatttggggagggtacatggggccttcagttgtgttttctttgtttttctaaaaattgatgcagaggcatcacaatgttaagattttaacagggtagtgtggtgggtactttttaactgtttgcttaaagtgtttcaaagtaaaaatatttcttaagcat

SEQ ID NO: 366188 - DNA, 813 bp, Homo Sapiens
  misc_feature (150)..(150): n is a, c, g, or t
  misc_feature (175)..(175): n is a, c, g, or t
  misc_feature (198)..(198): n is a, c, g, or t
  misc_feature (242)..(242): n is a, c, g, or t
tcaaagctttgatttcagtgtttcgttaccagaagtgcagaggagaacgctcgacgttgccgtgaagaacagtggcggcttcctgtccaaagacaaagggctccttggcaaagtattggttgctctggcatctgaagaacttgccaaagntgcgacccagtggtatgacctcacnggaagatgggacgaggcctcagngatgacatagccgcagcaggcaggaggcgtcctcttcagcgtantcttccacctctacccggaacacaccctctcacagacgtaccaatgttatttttataatttcatggatttagttatacataccttaatagttttataaaattgttgacatttcaggcaaatttggccaatattatcattgaattttctgtgttggatttcctctaggatttcgccagttcctacaacgtgcagtagggcggcggtagctcttgtgtctgtggactctgctcagctgtgtccgtaggagtcggatgtgtctgtgctttattatggccttgtttatatatcactgaggtatactatgccatgtaaatagactattttttataatctttacatgctggtttaaattcagaaggaaatagatcaaggaaatatatatattttcttctaaaacttattaaattcgtgtgacaaataatcattttcatcttggcagcaaaaagttctcagtgacctattttgtggtgtttctttttgaaaagaaaagctgaaatattattaaatgctagtatgtttctgcccattatgaaagatgaaataaagtattcaaaatattaacattttcat

SEQ ID NO: 366189 - DNA, 251 bp, Homo Sapiens
ctgtcaaggtttttacaaatgggctagtgacgaggggttagaggagggatgtcttgtcctcccagggcccagggttttagctgggacaaggtgtgctatttgtatagagagtttctatcagactcagtctgtgctgctctgtgacacttttctgcgagggtctctgggtctgctcccagacatcttcttggggttacaggcacccctcagtctgcttttagcttcccttagtgcacctaaggggacgggcc

SEQ ID NO: 366190 - DNA, 844 bp, Homo Sapiens
ttcagaggctcagattgtaatatgtaaatggtatgtcattcgctactatgatttaatttgagatatggtcttttggttataaatactttgcagcacagctgagaggctgtctgttgtattcattgtggtcatagcacctaacaacattgtagcctccatcgagtgagacagacctagaagttcctagtgatggcttatgatagcaaatggcctcatgtcaaatatttagatgtaattttgtgtaagaaatacagactggatgtaccaccaactactacctgtaatgacaggcctgtccaacacatctcccttttccatgactgtggtagccagcatcggaaagaacgctgatttaaagaggtcgcttgggaattttattgacacagtaccatttaatggggaggacaaaatggggcaggggagggagaagtttctgtcgttaaaaacagatttggaaagactggactctaaattctgttgattaaagatgagctttgtctacttcaaaagtttgtttgcttaccccttcagcctccaattttttaagtgaaaatataactaataacatgtgaaaagaatagaagctaaggtttagataaatattgagcagatctataggaagattgaacctgatatattgccattatgcttgacatggtttccaaaaaaatggtactccacatacttcagtgagggtaagtattttgcctgttgtcaagaatagcagtgtaataagcattttgtaataataaagaatagctttaatgatatgcttgtaactaaaataattttgtaatgtatcaaatacatttaaaacattaaaatataatctctataataattt

SEQ ID NO: 366191 - DNA, 661 bp, Homo Sapiens
aacatttatacatttatttccatccaaatgtctcaaaaacagtctaaaaatcacaatttcagtgttttgcactgagctaaaacagctgcatgcaatggatgtcttatcaaatcatgataagctttaaataaattctaatgacttgatgttacccaagaacttgaactgacagattttcatttttgtctccaggaatgaacaggcagtccaaatactgttagtagttacattatataaagcacacaattaaatgtccaaatacaggcttggtagccttctaatcacattttgggagatactgtttataaaaagacaaatatagtaaacagtaaaatgcttactagtcccatgtcctgtgaccccaccttgcccaacaacaggaaaaccccaccaaaatgaaaatatgaaaatcaactcatgtaataaacctcttcagaggcaaaagactttagaggcaaaagacttaatgattaacggttgacttttaagactttactgcacattcagatatgttggaatcaattgagtttttatactctgaacagcaattaaatccagtctttacccgtcctattgctaaagaatatgacaaaagagtcttggtctcagaagtaggagcagcaagtgattactcatgatggcaatgatgcaccacattctg

SEQ ID NO: 366192 - DNA, 1385 bp, Homo Sapiens
atcgagctcgtaccctactttcacacagggagctgttggaatgagaatggggatacccccaaaataagattctggtgaagaaaaagtcttgtactaagttcccctttaggtgtagccaagtctataatataattatgatcatgaatagactccagaatccacaaagagaagagggcttggatgtcaaaaattcttccattgtggggtaggtggtcggggatgggagaaagggaaaagtcagggaaaggggagaagaaagaaaaacacatttggccttaaaatagcatgcattctcccagaagcccatagtaaagaaaatgacagatcgtggtcagcagactcttatcaaattggtatgtaaaagatttcttcaagctccattttgcagagaccaccacttagagaatcaaaaaattcctgttttgatacttctaagttaaaatatatgttacagtttatctggtacttcatttttcttaactaaaattactttttactttaagcttgaataaaaatcttcattggtaactgtatgtaattaagtggcaacttctctttacctcagtatagttaaaaaccattcatattttaagtgattcatgtataccctgaagccgttaatacaccccagtctctatggtaacatcactaaatgtgggcatagaaactccacagctgtttacaaatttggttacagtgtgctatggtgcatttgtaacactcagatttgtgcccattcaggggcaatatggcactcagattctactctacttcacctaaccacccctagatctgagttttcagagtgcttctgaagtacagtttaaaaacactttttaaaaagtggagtaaaagtgaggcacattttacaagaacataactcctattaaaacggagtaacaactatgcaaaggtttctatagcagctaggtgagtttgttttccgggtctgtcttaactggcagcttcctgtacatactggtacttatttgctgtaaacgtctgtttcatacatttgccatgcagtgactgtgctcgaaaggtgaaatcaatggtaaaagaagcctaggattttatggtatgagaaactgatcgcaggattttctgatccatagctattaattgaaaacttctgatagtgctgtaggctctatagtaggcttaagagtgagtcttatactatgaagccagccacaagatactaacaaatgtataaattgaaaagtaccaatactttttgcacatagatcaaaatagagtggagaatttgggctccaaaaatcaggttagtaggctcatttccatgtgcttaaaaatgtttttgttgttatgcattgattaagggctagagcaaatataaaattaaatgtctttttcctccaaat

SEQ ID NO: 366193 - DNA, 1477 bp, Homo Sapiens
  misc_feature (804)..(824): n is a, c, g, or t
  misc_feature (1222)..(1310): n is a, c, g, or t
  misc_feature (1328)..(1358): n is a, c, g, or t
aattagattgcattttatttagataaatgaaaatttgccccaaacagaactaggaatcaaatattgtcttggactagaggtaattgctaagctggaagcttatattgaaaactaaaatttccagcccttgactatctgtagttccaaacatcaaaggaaaatattggaacaatttatctatgtacagagagaggcaactcatgggtaccataagcaaaataacctgagggggaacatttgatattacaagaagtggtgagagtttacaagtcttgcattgctttctattgtacatggctctgtagtaatgccaaaaataacaaaatgtaggcacttgctctgacttctgcagtttacattagattattatgtacttcataaattaacagcagctttagaattataaaacagtattatatttcatgctactgttggtgttcttcttgttaaaataatgttctcaacggacatagatacagagcttgtacagaagtaactctgggcacatccagatagtacaaaaagcagtcataaagcagctactcatggaatcgcaactgtgatggccagcgagcacctggccacaggtggtaggaaaagacaaacgcgggtggaatttaaacaaaaacgtcaatttcccacaaactacacaaatctttaatctgttcaaaacagcacagaatgtcttcctgccatagagaggaagtcaatatgaacttgttataaattgctgtcatttccaaaactctttagttgatgttcagaactagaaaccagcacttggatttcaatctcagttggccnnnnnnnnnnnnnnnnnnnnnttatatatatatatcagaggttttttgaatttggggattttaataatgatgcatgggtagctattatatatatttgagaataactcctaaaagatgacttccaactacaaacaagactatatatacactgctatcatgaggtgttttactaatatggccaattatgtatgaagttagatttgttagcaaaaagaaactactttcagttttaaaagcaaactttctttccattaaaactaggctttccagctaatcagcagtcaaaatttaaattttcaaactggagtaccaagtttgagtaaaatctggaaagctatatgccaggccagttctgtgtgtcaagagcagataagtgacactattcttcgtgtgacaattgtctgacaaaacccttaatnnnnnnnnnnnnnnnnnnnnnnnnnnnnnnnnnnnnnnnnnnnnnnnnnnnnnnnnnnnnnnnnnnnnnnnnnnnnnnnnnnnnnnnnnagagcgaaactctgtctnnnnnnnnnnnnnnnnnnnnnnnnnnnnnnncctcaatgtattagcatgactcatcattttgacatttaaaaaattttccaagattatttcaggaaaggcatttttactattaattaagctttcttaaaatttctttctagagacatttg

SEQ ID NO: 366194 - DNA, 590 bp, Homo Sapiens
ttgatacagcaggttatagacccctggtgcacttctctgagatacatcagagacaatgagaaaaaggattcagcattccgtggaatatgtaccatgatcagtgtgaatcccagtggcgtaatccaagattttatatttttttgtgatgccgttgcatcatggattaacccaaaagatgatctcagagacatgttctgtaagatccttcatggatttaaaaatcaagttggcgatgaaaattggaggcgtttctctgaccagtttcctcttcccttaaaagagcgtcttgcagctttttatggtgtttaatctaatacacttaagctgcagtcccaaaattaggggtccttcagtcttggagactataagggagcctctgcacccagggaaaatgttaccctttacaggggggaagggtaaaccagtagggaatacagtacaatcccaaccctactgggaggggcgggagggaggtgttgccgtcactgtattaagtcgatgttgggaaacgttttaacatctggagcctttgtgggtggaaatatgtctccagttacaactccgcagtggatgtgaagaagcaaaaaaaa

SEQ ID NO: 366195 - DNA, 828 bp, Homo Sapiens
gctcgtcccacagtgatttctcactattctctacatgcttgtgcccctataaggttttgcccttcatgtcctgtgccctcaacctctggttcccatgctcagaatatcagtgtccttactgcaggggttgtataagctcagatctcacctcctccatgaagcccctatagacacccagagaggattaataatgaccctcctccgtgtttccataacactgctaggctttctcctgaatttttgtttttagggtaatgaattaggctttaatctcttttaactctaaggtataattagatgtactatattcacagaatcaagggaatttgagttggaaagggccctagagatcagctagaaccacctcctcatttcaccagaaataattgaaattttaggggacttgtccaatttactatttttggctagttgtaggactcaaactagaactgcttcctggatctgtgctttttcattagaatatgttgtagccatgtggtagacagaaaaatctgctcccctcccctcttcagatgtccatattctattccatggaacttgtgaatatgttaggttacatagcaaagagagattaaggttgtagatgatattaaagtggctaattagctaaatttaaaatagggagattttcctgggttatctaggtgggtcctgtgtaatcacaaggtccctttaaatgttgaagggagaaacagaagagtgtcagagcaatatgctatggaaaagtttggctgccatcactggctttgaagatagaaggggccatgaaccagggaatgtggacctcttttggaagatgaaaaagac

SEQ ID NO: 366196 - DNA, 1157 bp, Homo Sapiens
ctggtaccggtccggaattcccgggatttcggcttcagcgccgcgggtgagtcccgcggcctcgccgcattccctgtagccgggtctgggcccggagggcttcccttcccaaagcactggcccgggaaaagcccgcggcgagggctgttgcccaggaagacacggagagccggggaaatgtctgatgaggagataaaaaagacgacactagcctcagctgtagcctgtttagaaggcaagtcaccaggagagaaagtagcgattatccatcagcatctcggccgtcgagaaatgacagatgtgatcattgagaccatgaagtccaacccagatgaactaaaaactacagtggaagaaaggaagtcttcagaagcctcccccactgcgcaaagaagtaaagatcacagtaaggaatgcataaacgctgccccagattctccgtccaaacagcttccagaccagatttcattcttcagtggaaatccatcagttgaaatagttcatggtattatgcacctatataagacaaataagatgacctccttaaaagaagatgtgcggcgcagtgccatgctgtgtattctcacagtccctgctgcaatgaccagtcatgaccttatgaagtttgttgccccatttaacgaagtaattgaacaaatgaaaattatcagagactctactcccaaccaatatatggtgctgataaagtttcgtgcacaggctgatgcggatagtttttatatgacatgcaatggccgccagttcaactcaatagaagatgacgtttgccagctagtgtatgtggaaagagctgaaatgctcaaatctgaagatgtaagtgtgaattgttcctatatttaattaaaatatatcagattggtgtaaaattgaatgctaaggtatctgtgaaatacccagaataggccagtccatagacacagaaagtagactggtggttatcagggcaggaagagacgaatggggagtgcctgctaacaggatacaggctttctttttggaagtgatggacgtgttctagaattagatagtgatgacagttgcacaaccttgtgaatatactacaagccaatgaactgtatactttaaaatagagaattttattgaatatctcattttctaaaatttcaaaaaacgta

SEQ ID NO: 366197 - DNA, 908 bp, Homo Sapiens
agcggagggggaagtggaggttgttgtggctccgagggctgttcgaggagctgctgctgctgaggcggcggcaactgcattgaggtggtggcggcgctgccggccccgggccgctcggcctctcggctcgccttccagcctcgcctgagcccgccggggcccgcgccggccagcgcctgccctatgagtgtgtcactggttgttatccgattggagctcgcggaacactcgcctgtccccgccggcttcggcttcagcgccgcggccggggaaatgtctgatgaggagataaaaaagacgacactagcctcagctgtagcctgtttagaaggcaagtcaccaggagagaaagtagcgattatccatcagcatctcggccgtcgagaaatgacagatgtgatcattgagaccatgaagtccaacccagatgaactaaaaactacagtggaagaaaggaagtcttcagaagcctcccccactgcgcaaagaagtaaagatcacagtaaggaatgcataaacgctgccccagattctccgtccaaacagcttccagaccagatttcattcttcagtggaaatccatcagttgaaatagttcatggtattatgcacctatataagacaaataagatgacctccttaaaagaagatgtgcggcgcagtgccatgctgtgtattctcacagtccctgctgcaatgaccagtcatgaccttatgaagtttgttgccccatttaacgaaggtaattgaacaaatgaaacattatcagaagactctactcccaaccaatatatggtgctgataaagtttcgtgcaccggctgatgccgataggtttactatgacatgcaatgggcgcagttcaactcatagaagatgacgtttgcccagctagtgtatgtgaaacgc

SEQ ID NO: 366198 - DNA, 534 bp, Homo Sapiens
  misc_feature (391)..(415): n is a, c, g, or t
cagttttctcttcatatattatgattatgaataataggaaagttgtattaattcagtatttgtcattatgcagtattttaatacctacataagtctattccattattatattttgcgcttggcatatttattcctttatgcttttaatcactaacatattttacttaagagtataaaactatgctaaataaattgtattgtatatggaatatgcttgccattatgaagaacagctgggtataccattatttcaagtaataaatctgaattctattagtttaaaaattgtaaaattcaagttaaatgacgtgtatgatatataagctgaacatattttctatagcccttaatttagttgtgttaatttttcaaggtgatgtatcaacagccnnnnnnnnnnnnnnnnnnnnnnnnncaatgtgtttacattgtatgaattgagctttttgcccacagattcttgatttgtagttgtttggcaggatttttctttgtgatataatcacttctataaaaaatatgatgtacaaaaaa

SEQ ID NO: 366199 - DNA, 588 bp, Homo Sapiens
  misc_feature (211)..(211): n is a, c, g, or t
aatactatccagactatataaatttataaaataaattgaaaaattcattcccctgtattcaagaccaaagcacataaatgctaatgtagggctcagaggggaaatacagttctcctgcatatttgagaaaatgtgaagtcctttcaagaaaatctaataaacataaataatccatagcctgctgaccactaaggaaaaaggacctcattcnactctttcttttatgccagtgatttactggtccctactgatttccaaattggatcacggatagtaaattatccatgctggtacctgtgaaagtaagccctgggatccatatttgttttgtgttctgcttaaatcagcaagaatgataaatttgatggtgtgaaattggaaagtatcaagggctttctttggtgattgagggaaataatgtctctacttgtaatttattgtgaccctttttcactgtatatgctttgtatgtctaatatttatttcaatgcaaattaaattgttccttcatctgtattgttatatctaagattttattgatgttaaaatctaattgtggaataaaaatctctctggaatttagcagat

SEQ ID NO: 366200 - DNA, 392 bp, Homo Sapiens
caaactatttagctggtcagccacagctggaacaccaattgtgaagtttttgctgataaaggaatactccctgacttcacaagatatttctgtaaaaacaaatgacatagagtagcatcagaacacttctactcccgttgtccccacctaaagcattcttttcatttcattatgctttatgtgaccattttcaacctcttctccctctccccatttcttaaggttgaatggtcactggttagtattcatttttttcttccgacagacccatgggccatgctaaaataggttctttatatcaagatactagctgtcacataggtgttcactgtcattgtccattccaagtaggtctgtgtgtcacttcaaaatcctcgcctaatcatttactt

SEQ ID NO: 366201 - DNA, 2089 bp, Homo Sapiens
  misc_feature (1225)..(1294): n is a, c, g, or t
gcgaaaagagagagctctattggaaaccaaatcaaaaataacacatcctgtgtatagcctttactttcctgaggaaaaacaagaatggtggtggctttacattgcagataggaaggagcagacattaatatccatgccatattgaagttggaagttcatgaggctaagcctgtgccagaaaatcacccacagtgggatacagcaatagagggggatgaagaccaggaggacagtgagggctttgaagatagctttgaggaagaagaggaggaagaagaagatgatgactaagcagtactctgaatggaccacagtgtttgcacatatttgcaattttttgctgttttggaagtgtatcataaaccagaaacagtacagaactgatgttgagggaggtgtagtttttttactctagaaatgggtgcataatataactaggcagtggcggtgccttggtacaacctgaaaaatgttaaggcttattgaaacctttcaagtaggggatggtacatttatttcatctgcaaatgataataaatcctttgttattataactgtccagaagtgtgggctatgtattatctgatcagtctatggtcccagtaaaagtaaagatgcaggaaacacagtctgtaaatgagcgacttttctttgttcagctttagttttagcaaacaccacaaatatgttttaagtaacatcgctcaagtttaagtaacatcgctcaagttgataatctcttgataagctctgttgttgacattttgcagtgatacaacagctccactcatagatttaaacttttatttttacttatcttggtcataagttggcattctctcacattccacatgatatagagggctacgttttggaattttcccttttcttaattgcccagagttatcagacagattataaaaatggcttttaatggcttaaaccatttctaaacctctatcttagcagatcaatgcaggatctaattcttttgataagttctagctctaaaagtgatagtgggactgtatgttttctgatactggtggcttatgttattaaaccttttttaaaaaaggttcactctaaaagctgaactacatccttagttttcagtctacttgactctatcaggagctttttaaggaaagtaagtataacatgcaaaggaagctttttttgtattcattttggactcctgtcaataaaaatagaagtttgttgnnnnnnnnnnnnnnnnnnnnnnnnnnnnnnnnnnnnnnnnnnnnnnnnnnnnnnnnnnnnnnnnnnnnnnggcactaacacatacggagaaagaaaggagaacgaggacgcaaacacggcgcagagggtaccgatcagtggcgccggggcgcacccccggagtacgcgcggccgctcgccgcggaaggagagtggttctgggtgcgcggccccccccggcgcccgcccaggaaagttcttccccgccaccgccttctggttcgcggcgggcgcggccccgccctcgtgcgggcggtgaggagagaggaagcgggggacggtgaagcgcgtgtgcgccagaggaggagacagcacgtggcgccggagctcccaaacacagacaacggcgcctcgtgctctctccgccgccgcccacgaacaaaaagaggcgcgcgtcgcccgcggcaggagaaacaaacaccacgcacatatgcgcggcgtgcgccagcagaacacactctgaatgtcggggcttcgccgcgtctccgaaggccccactgataatgagcgccggccgccacctgaggaggcgtgtgaatgctgccgcgggcccggcccacgcagccaggtatatttaggacaggcggggttgggcgacgcgcaccgcggtgtgtggtcatgtgagtggcgcggcgcgcgaggggcgggcatggtcttatgtctcacagacagaaatttgggttgcgcgccgcgagaggggggagatggcgcaccatcgtgttgagagcgtcgcggtcggaagcaatgagcacggtggtggcacgcgcgggccgacagggttacagtgcgcagcgcggctgtaggacacacctgagaacacatagaa

SEQ ID NO: 366202 - DNA, 497 bp, Homo Sapiens
gtttttttcctttttcccaaagccaattcattttacaacgaaggacaactgagcagtcggttaagttatgcctttgttttcagagtggagtttatagcctcactagaagatttacaatccataaggccataagatgatgctgtgcttagatgaacaattttatagcgtgaagatactaagacatcccccaagagagtttgggtgctagatcagttatttattggtaattttttttctcttacaaaaccaaacaaaaaattctgctatggttcccaagcaacttataaatacttatctgtattttctcttagtgccttagtatttatatcagcaagtgccatcttacaatacaaaacaagccaccaaagaaactgcaacaacagaaacaaaaacaagaaatcaaaaaccttcagcactaaaatgatttgacaaattctacatattccacggtatacaaaatttaaataaggcttagcaaaagtaaaaaggatggtccc

SEQ ID NO: 366203 - DNA, 741 bp, Homo Sapiens
  misc_feature (432)..(475): n is a, c, g, or t
  misc_feature (711)..(711): n is a, c, g, or t
ttttttctgagagaacctggatttttatttccaaagacaaaccacacaagctgtaacttgcagataaaaacttatatggaatttcaaattgcatgaagtttaaaacttcatgaagtttcacattaaggagcggaggcttctctctctcgtctcatagaaacaaatcctgaaaatactcatcaaattcttcttcctgtgatttttcatctgtctctggtagtggacccttccaaagttcagattctgaagcactttcttcctcatcagagtttcaaagtagttacattagcagacaactcctctccaataatgattattagttaagtagagaatcttcagatttctttgaagatgaatgtcctttatcttttttctgggaggcctcttctgcagaaggtaatctggattttttatgtgatgactcttcacagnnnnnnnnnnnnnnnnnnnnnnnnnnnnnnnnnnnnnnnnnnnnctcctgtgatggaaatttaatttaatggaacattctgggcataaccttaatttaacaagtgcatttctcttctcaccatgctcaatataaccaaaattaacttcccaactctttaagccttcttttttatcacaatatttatttccacagaagaatggaccttttcctgaaattacttctttttctactcgccacctaaatccaaacttattttctttatatttactgagatctgntatgcagtattccttaaataatgtatcata

SEQ ID NO: 366204 - DNA, 386 bp, Homo Sapiens
accttccataggcccaggcttgaagttcctgaacactttgaagtctcccaattatgagagatcccagtcctaaacctctggcctgcctaattagcaataagtgctttatttggaaggagggagtcatccactcttgagccactgcagtgaagtcacttgatctcagtctgggggaaaacacttcaatagctaaacattcctagctttgatttttctgaagggaatacacttgttttcaattttggggtttttctttggggcacttgcttgactctgtatgaacttgtgatccaaggaaaaaggagaaagaacagtgttggcttttaaaatcaggatggttttatgtttgctacgaaataaggcaagaataaaaaattcttattttt

SEQ ID NO: 366205 - DNA, 523 bp, Homo Sapiens
cgaaaagtgttagatgcaaataactgtgattatgagcaaaaagagagatttttgcttttctgtgtccatggagacgctagacaggatagcctcgtgcagtgggagatggaagtctgcaagttgccacgactgtcacttaatggggttccgcttcaagcgaatatcctgggacatcctattgccctttaagaacattgccatcaaaaatagccaaatgagcttaagctgtaaagaagtccaaatttacaggttcagggaagatacatacatatatgaggtacagtttttgaatgtactggtaatgcctaatgtggtctgcctgtgaatctccccatgtagaatttgcccttaatgcaataaggttatacatagttatgaactgtaaaattaaagtcagtatgaactataataaatatctgtagcttaaaaagtaggttcacatgtacaggtaagtatattgtgtatttctgttcattttctgttcatagagttgtataataaaacatgattgcttaaaaacttg

SEQ ID NO: 366206 - DNA, 571 bp, Homo Sapiens
taaaatactatttcttattgaggtttaacctctatttcccctagccctgtccttccactaagcttggtagatgtaataataaagtgaaaatattaacatttgaatatcgctttccaggtgtggagtgtttgcacatcatttaattctcgtttcacctttgtgaaacatgcacaagtctttacagctgtcattctagagtttaggtgagtaacacaattacaaagtgaaagatacagctagaaaatactacaaatcccatagtttttccattgcccaaggaagcatcaaatacgtatgtttgttcacctactcttatagtcaatgcgttcatcgtttcagcctaaaaataatagtctgtccctttagccagttttcatgtctgcacaagacctttcaataggcctttcaaatgataattcctccagaaaaccagtctaagggtgaggaccccaactctagcctcctcttgtcttgctgtcctctgtttctctctttctgctttaaattcaataaaagtgacactgagcaaataacctcatcaggttatatttgcccacataccctaagcaca

SEQ ID NO: 366207 - DNA, 469 bp, Homo Sapiens
tagtgggcatgattgtgagtgtgtgtggggtgctcacacgcgtgccagtctttttgtactgtaactacctcatggtttgaatgatgattgtactgctggttgtgttaacagagccacattttgttgggtgaagtcactaggtgatttttttccatgtttgttttatctgggggttgttcatgaaactgacagatgtttttctaaaaaggactattatcagtttccaaatacaatacttctctcttctggtttttcctgaatgagcctgattttgttgctggttttcatcatctatgagggtaaaacgagtacccttaaaatccctgtggccagtttgaacacccctgttgtattcttttctctgttcagtgtgtcagctattttgtgaagatgcttagatgtatagttttgataaccacagttttaaatcttttatctgtgcataataaaaagatatatatcagttatt

SEQ ID NO: 366208 - DNA, 465 bp, Homo Sapiens
ctctgtgactcatagaagggctggctgaatcctgaagtagcatagtgggacctggtctacaatttatgcacatgcactggacagccttgctgtgccacgtgtctcaccaagacccagttgggaaagagcgtcatattgccaacaggttgggtttctctggcctacacctgattaatgggccctttatctttggtgtcccctaggagtgtccagttgttttattgctgtattttgttattgcagtacttaataaaaattgttgatagggcccaaaaccctacagaaattctatgtctgtaaaaaccaacaaaggcattggacttgtgtgaatgtacagggtttttttagtagtaattttaaatttaaatgttttaagtgatcatcagtgttcctttttacttataaagttggattcttttttagaatttgtaataaataaaaactgctgctttaccactgtaaaaa

SEQ ID NO: 366209 - DNA, 606 bp, Homo Sapiens
ttcgcgaacgtgttatccccccggggctggtgttgtcagccggggggaggtgcctgagggtccccacggttcctttctgcttttctgaatgcatcaaggtgacgagaacttcccaatgggaaattcatccgagtggcactggcagagaaggataggagtggaatgcccacacagtgaccaacagaactggtctgcgtgcataaccagctgccaccctcaggcctggcccccagagctcagggcacccagtgtcttaaggaaccatttggaggacagtctgagagcaggaacttcaagctgtgattctatctcggctcagacttttggttggaaaaagatcttcatggccccaaatcccctgagacatgccttgtagaatgattttgtgatgttgtgatgcttgtggagcatcgcgtaaggcttcttgcttatttaaactgtgcaaggtaaaaatcaagcctttggagccacagaaccagctcaagtacatgccaatgttgtttaagaaacagttatgatcctaaactttttggataatcttttatatttctgacctttgaatttaatcattgttcttagattaaaataaaatatgctattgaaact

SEQ ID NO: 366210 - DNA, 464 bp, Homo Sapiens
ggggttagaaacaataatatattagggtttctgtttaaccctttcaggactgaactgtatctccttttgttaattttcccctgtgttgtgataaatgtttgccagcattcagtactgtgttggtccagatgtaggtttatatgctcatttttagcttatttcttgtaccttgcagcatgctctacgcattcagtccttaaggggtttattttacaaactgtgcgcctgtaaggtttattagcaataagatagaaaattgagcaagtttataccataattttgtagaaaaaaagaatctgctcagttccatatttcatccgtgaaaaacttgcaatacgagcagtttcaaggaataaataaaaaggaaatgtaaaccattgtaaaagtcttctgtcgaatgtgcctgatgcatgtattatcgtcttttatttcagaatacttcataaagataaaattaaattcta

SEQ ID NO: 366211 - DNA, 616 bp, Homo Sapiens
agcttcgttgactatattcatttttcccccagagagactagctcgcacaattttcctcatattgagctggtccgcataccacaggagaccagatcactgctcgggcacacgtgtaaggcatgtcacatttattatgcagatacgccagcagaagaaacagacaaccaattggcttcttgctcaagacaccgattccgctacattccacccaacacaccagagaatttttgggaagttggttttccttccactcagacttgtatggaaagaggttatattaaggaagatcttgatccttgtcctcgtccaaaaagacgtcagccttacaacgcaatattttctccaaaaggcaaggagcagaagacatagacgttgaaacagaaacagaaggatgaaggacagttttttccttcttagttatttatagttaaagttggtactaaacattgatttttttgatcttctgtaaatggatttataaatcagttttctattgaaaatgtttgtgatattttgcttttgcacctttaaaacaataaggcgctttcattttgcactctaacttaagagtttttactttatgtagtgatacctaatacaattttgaaaatacaat

SEQ ID NO: 366212 - DNA, 470 bp, Homo Sapiens
  misc_feature (152)..(165): n is a, c, g, or t
ttgactgaaattaaagtgtatttatttgcagcaatcctttaacaatgatcaaattttgacaacaagcaacagcaattactgcttaagtgttgcctctagataggagcggcagatagcaggaaactgtattatctccaaaacaaactgcaagnnnnnnnnnnnnnngaacgtctgtaatcaaatcgccatctccccaaagtccgattggcagggcagatcaccctaagataatgaatttattacatttcctgggttatttacaaaagggggagggccaatccggattgtcccctaggtttaactgtaaattaacaagaaaaaatggtttaaaaagaaaccaccctagaccaaaatgttctgctcctctcgccttccttcttgttattgctttaaatctttttcaaaaataattgttctacaaacatattttctaaaatagtttcccaaagattaaatatccctttccaccc

SEQ ID NO: 366213 - DNA, 764 bp, Homo Sapiens
ggaaagccattttatttttctgttctgtcgtggttttatctacgtgttatttacaatctgctgtgtaacaaattactacaaacttagtaccttaacacatatttatttcacagtttctgtgggtcaggagatcagaaatggttctatttcaaggtctctcacagggctgcaatcaagatgttggcatggctggggtctcatctgaaggctggactggagaagaatctacttccaaacttatgtggtagttggaagaatttagttcctcaaggctgctaaactgatggcctgtgttccttgcctctgggatggtagcttgcttcaacaaagtgtgcaagcagagaagacagagagagtccgctagcaagatagaagccacaatctcttgtaatctatcatttttgctgtattctactggttaaaaataactcattaggttagcctactggctctcagggggaagagattatacaaaggcatgaatttctggaggagggaatgagggcaaagaactctgaaaagtttctcttccacaatctgaagaacttctagaaagtagaaggaagcaatattgcttagggatggacaacttggcactggttatgtgttccaagtgaggtaaccttgttcccaggaataaagagaaccagatgactgtaaacatttccctaaactgaaatgcactgttgtatgttcacctgaaatgaatggtgtaagctgaatatgagatttttgacaaaataaaaattttgctgtgttctcag

SEQ ID NO: 366214 - DNA, 842 bp, Homo Sapiens
  misc_feature (595)..(608): n is a, c, g, or t
agtgggtgtaaataactccccccccatggtttgattttcaagccccccagtggttttaataaccagctcataaattctcctaaatattttacagttgactctcatgagcggattggagtcagctggaacataccactgcctctagactaaggccagcagatttagcaaatacagactgccccagttcattgaattttagataaatgaaataaatctataaggttaagtatgtccccagaactgcatggaacatgcttaatctaaacaatgatttgttgttcacctgaaattcaaatttagctgggtgtcctgtatttcatctggcaaccctacttcagacccaggtgtaaggtacatggatgtgctttggtcaaggaataggccaaggcagagatccatgcctgcatgactcagtgggtttggtgcacaggcacacacctccacttgttatataacctgtttgtgtaagttcatacttggtctgagccactgttgtctgtaaaaggtaattgtcctgctaatgctgtacaggggctcttggggttcggctcagctcaacatggcttgacatggtgggcacactggcgcccagtannnnnnnnnnnnnnccaaagctgtccgttttgcagatggacaggaaggagccaggacacagctcagcttgctcacgcccagagagagaaaaagttaagctgctgaccctgaaggcaagggagagcaggctgcacagctgtgtgtggaagccacgggctcaagcagccaaggcagggcggacagtgtgagagagctagtgtaagctgttgatgagagctgttgctgaataaaaccatattcacctgcct

SEQ ID NO: 366215 - DNA, 434 bp, Homo Sapiens
tgagcatcccgcagtgtacaggacagcccccaaacaaggaattatccagccccaaatgccaatagggctcaaactgagaaacattgagttatatggctattagaaatccacattcttacacaagaaagaccatattagaatctaaggaaaacatgcatattcacattaattaatcgatcagatttttccagaattccgtatcagtcaccattttaatatggggacaatgaagacaagcacaccaggaggtagaatatccagagtggggctggatcaagggcaaaaactggtcattaagtcatctgacattaaatcatttagccactaagttatttgtctactctcactttaaactcaccaaagaagattctcttaaagaaattatgaaaaatgtacaatttaacattttaaataaatagtgacagaagttgttt

SEQ ID NO: 366216 - DNA, 590 bp, Homo Sapiens
  misc_feature (445)..(453): n is a, c, g, or t
ccaagtgtgcgggagcgagaagctaaacagcagaaggaagggaccacactggtggtaagaaaaattaagctgctcagcaaggaactgcgaagcttcctgacagctcttgtatcactgctctctgtctatgtgaccggtgtgtgcgtggccttcatactcctctccaaatcaaaatccaaccctctaagaaacaaagaaataaaagaagactcacaaaagaagaagagtgctcggcgtatttttcaggaaattgctcaagaactataccataagagacatgtggaaacaaatcagcaatctgagaaagataacaacacttatgaaaacagaagagtactttccaactatgaaaggccatagaaacgttttaattttcaatgaagtcactgaaaatccaactccaggagctatggcagtgttaatgaacatatatcatcaggtcttnnnnnnnnntaaaggtaaactgaaaagacaactggctacaaagaaagatgccagaatgtaaggaaactataactaatagtcattaccaaaatactaaaaccccaacaaaatggcaactgaaaaatacccttccaaatttgccaaag

SEQ ID NO: 366217 - DNA, 790 bp, Homo Sapiens
cggagcgcgaggcgcggcggcgcggcaaggcggaggagcaggccgtccggcagcgggagctggctgaacaagagctggagaagcagcggcagctggcggaaggcaccgcgcagcagcgcctggccgcggagcaggcgttgatccggctgcgggccgagacggagcagggggagcagcagcggcagctgctggacggaggagctggcccggctgcagcgtgaggcggctgcaggcacgcagaaacggcaggagctggaagccgagctggccaaggtgcggggccgagatggaggtgctgctggccagcaaggcgagggctgaggaggagtcgcgctccaccagcgagaagtccaagcagaggctggaggccgaggccggccggttccgcgagctggccgaggaggccgcccgcctgcgtgccctggcggaagaggccaagcggcagcggcagctggccgaggaagacgcggcgcggcagcgggccgaggcggagcgggtgcttgcggagaagctggccgccatcggcgaggccacgcggctcaagacggaggcggagatcgcgctcaaggagaaggaggcggagaacgagcgcctgcggcggctggcggaggacgaggccttccagcggcggcggctggaggagcaggccgcgcaacacaaggctgacatcgaggagcgcctggcccagctgcgcaaggcatcggacagcgagctggagcggcagaaggggctggtggaggacacgctgaggcagcggcggcaggtggaggaggagatcctggcgctgaag

SEQ ID NO: 366218 - DNA, 114 bp, Homo Sapiens
tttttaagcactgcggtagttactaggttatcatcctctccagaatcttaaaaccagagaagccagctgtgtgaatgaacttataaagcctctttaaggcaaagtagccactag

SEQ ID NO: 366219 - DNA, 1301 bp, Homo Sapiens
  misc_feature (492)..(492): n is a, c, g, or t
gttcctcttaaagtggatctcatcacctttaataccccctttgctggcaggtttggcatcttcacatgctttgatatattgttctttgaccctgccatcagagtcctcagagactacaaggtgaagcatgttgtgtacccaactgcctggatgaaccagctcccactcttggcagcaattgagattcagaaagcttttgctgttgcctttggattcaacgttctggcagctaatgtccaccacccagttctggggatgacaggaagtggcatacacacccctctggagtccttttggtaccatgacatggaaaatcccaaaagtcaccttataattgcccaggtggccaaaaatccagtgggtctcattggtgcagagaatgcaacaggtgaaacggacccatcccatagtaagtttttaaaaattttgtcaggcgatccgtactgtgagaaggatgctcaggaagtccactgtgatggaggccaccaagtnggaacgtgaatggttcctcccacattttcactctgagattgatgtattgacattttcaccctggtccctgtctggggaaaggaaggctatctccacgtctgttccaatggcctctgctgttatttactttacgagaggcccaccttatccaaagagctgtatgccctgggggtctttcatgggcttcacacagtacatggcacttactacatccaagtgtgtgccctggtcaggtgtgggggtcttggcttcgacacctgtggacaggaaatcacagaggccacggggatatttgagtttcacctgtggggcaacttcagtacttcctatatctttcctttgtttctgacctcagggatgaccctagaagtccctgaccagcttggctgggagaatgaccactatttcctgaggaaaagtaggctgtcctctgggctggtgacggcggctctctatgggcgcttgtatgagagggactaggaaaagtgtgtggtctgtggggcggactctggccatcatgttgacagccttgcacttccacaggctacaagccctgggaccatctttctgccttaagggcaggagcccacttctgtggcaccagattccaccctgggaactgtggaaaaagtaggagaggcagattccctcagtgtcttcctcttaaacctcaatcatcgagacattagggggtattttctgttcacatttatctttttcaagccacatcttcctctaacaaatctctcagtatgcgattggtctcaagctaaaacaaaaataaatgtcagtttatattttacacatcc

SEQ ID NO: 366220 - DNA, 756 bp, Homo Sapiens
ttgctcccatcagtagactactttctaaaaatatggcttgtctgagtgactcctttctcgaggccccagcctgtttctcctcagaccccaaatggtctaggaaacatcctacctcctacctgcccacgcactgttaccactgttatatctatggttccgcgcctcggggtatatcccgaacctcagctaagagtccttaccagtgctgtcttgcacctgcagccttgagcactctcactctgaaatctcctgcaccagtgcttcatttcctctgcctgtggcagccctctcattagggttgcagctgtctcctaattttgtcagatacagagattacacttctgctttttctcccgtagcttttgggttatgactgagatgaaaagaagaaaggctgaatttactcccatatttaaaccacaagtcaaaatatacttttaaaatgtgagtaaaattgacacaactttctttcagtgtccataatagatactgctgattagctctctaatgtgccatgaactttgacttccgagtgtggcctcttccatgggctttctttcctgcatgggttcgctgatgtacataaggtttgatttttgggtaaaggctttcccacattctgtacatttatagggtttctctccagtatgagttctttgatgtacagtgaatgttgacttttctcggaaggctttgccacactcagtgcatgcatagggtttctctcccgtgtgcgttctctgatgtattatgagc

SEQ ID NO: 366221 - DNA, 1254 bp, Homo Sapiens
caccagcctagtcgccagaccttctgtgggatcatcggacccacctggaaccccacctgctggccctcacggaagaacaacagctgatgtttgagaaactgactctgtattgcgacagctacatccagctcatccccatttccttcgtgctgggcttctacgtgacgctggtcgtgacccgctggtggaaccagtacgagaacctgccgtggcccgaccgcctcatgagcctggtgtcgggcttcgtcgaaggcaaggacgagcaaggccggctgctgcggcgcacgctcatccgctacgccaacctgggcaacgtgctcatcctgcgcagcgtcagcaccgcagtctacaagcgcttccccagcgcccagcacctggtgcaagcaggctttatgactccggcagaacacaagcagttggagaaactgagcctaccacacaacatgttctgggtgccctgggtgtggtttgccaacctgtcaatgaaggcgtggcttggaggtcgaatccgggaccctatcctgctccagagcctgctgaacgagatgaacaccttgcgtactcagtgtggacacctgtatgcctacgactggattagtatcccactggtgtatacacaggtggtgactgtggcggtgtacagcttctccctgacttgtctagcttgggcggcagtttctgaagcccagccaaggcctaccctggccatgagctggacctcgttgtgcccgtcttcacgttcctgcagttcttcttctatgttggctggctgaaggtggcagagcagctcatcaacccctttggagaggatgatgatgattttgagaccaactggattgtcgacaggaatttgcaggtgtccctgttggctgtggatgagatgcaccaggacctgcctcggatggagccggacatgtactggaataagcccgagccacagcccccctacacagctgcttccgcccagttccgtcgagcctcctttatgggctccaccttcaacatcagcctgaacaaagaggagatggagttccagcccaatcaggaggacgaggaggatgctcacgctggcatcattggccgcttcctaggcctgcagtcccatgatcaccatcctcccaggggcaaactccagggaccaaactactgtggccccaagagggaattccctttctccacgaggggcctgcccaaaaaacccccaaggcagcccaaaccgaaacgttttagggggcccaggaaagaccaaccaag

SEQ ID NO: 366222 - DNA, 483 bp, Homo Sapiens
cggatcctgcagggagagagcactgagcctaccacacaacatgttctgggtgccctgggtgtggtttgcaacctgtcaatgaaggcgtggcttggaggtcgaatcctgggaccctatcctgctccagagcctgctgaacgagatgaacaccttgcgtaactcagtgtggacacctgtatgcctacgactggattagtatcccaatggtgtatacacaggtggtgactgtggcggctgtacagcttctccctgacttgtctagttgggcggcagttactgaaaccagccaaggcctaacctggccatgagctggacctcgttgtgcccgtcttcacgttcctgcagttcttcttctatgttggctggctgaaggtgggcctctccagggccctgctgggctggaggcatggccagaggggtcatggccagcagctgcctgagacgaggatgcaagtgtcagggaaaggacggtctcacgggtcg

SEQ ID NO: 366223 - DNA, 538 bp, Homo Sapiens
  misc_feature (246)..(275): n is a, c, g, or t
tgcggccagagcccagggcccagcgcccggcgatgcctcggctcctccagctttctgctgcgagcgggcctagcccccagccctcctggaaggcgctcgggagcgagaggcaggcagagcctcgcatggaggcgcgagagccccaagggttctgtcacccgggggtccccctgctggtcccagaaatccgccagaccccctcccctcccgcgcaggggctccagggaccatgatgtcagcgcttcnnnnnnnnnnnnnnnnnnnnnnnnnnnnnngcaggacgtcttacctaacgtctaacttcagtttctctggctgcagtccgcacctttccctacagagaggcgccgaacctgccgctggcgttcccccgccccctccccagccccttgccgcagctcctcgtgatcctcccctggcctgtctggaacctgggcggccacagggacccggaacagccagaagggggaactcacccagcacgaaggaaatggggatgagctggatgctagctgtcgcaatacagagtcagtttctc

SEQ ID NO: 366224 - DNA, 460 bp, Homo Sapiens
  misc_feature (25)..(25): n is a, c, g, or t
  misc_feature (42)..(42): n is a, c, g, or t
  misc_feature (75)..(75): n is a, c, g, or t
cctgaccccactgtgacccacaggncctgggtggtgtacctncctgggacttctcccccaggcttcactcagtgncgcacttagggggtggactcagctctgtctggctcaccctcacgggctacccccacctcaccctgtgctccttgtgccactgctcccagtgctgctgctgaccttcactgacagctcctagtggaagcccaagggcctctgaaagcctcctgctgcccactgtttccctgggctgagaggggaagtgcatatgtgtagcgggtactggttcctgtgtcttagggcacaagccttagcaaatgattgattctccctggacaaagcaggaaagcagatagagcagggaaaaggaagaacagagtttatttttacagaaaagagggtgggagggtgtggtacttggcccttataggaccctgtgccaataaacagacatgcatccgtg

SEQ ID NO: 366225 - DNA, 1041 bp, Homo Sapiens
ggatattcgaataatatacatatgagaggtatgcctgtccagtaaagagattgatttgtttgtatggctctggaataactcattcgtttatgaacacatctcatgtattacttgacacagtacctttggtatgtctgcttttctttcaatcctcattatctttagccctcagctggccagtacttattgctaaagaaagggagatcaatggagttgcctaccagcacccattctcttttagttcagctggctaatagtattggaatacattgggaaaagagtgggttaaagtcctaggtggggttctctttgttgcctaccaggagaaagcagtaggcttcctttctaagatacggactcagctggtctattttaccctgtgacatttaaatatacttttgaataagctactatcctgaggctgagggttttgctgccacttttcctgtgtttccacttctgcttccaaagattttcctcttagttgtttgaaaattccaagtaactgggagagtgggcaagtcctcagctgaacaatcttggatgtagtctagcagcaacccacctacaatggcgttatgtttggagttatgaggggaagtgaaagataagaattacctacagctttgtactcagataatttatatccaaaatttgtgttttaaatttcatactccagaactttcatgtttatgagtattagccttttaagttactgggacggtgatatacttagtccattgatgttgtcacttgtcatctaaacttatgagaccttgtcttagagaatctaaaatatattgtcatatgttttctgtgctgagtttggtttgttacactgtgaagcttttggtgaaacaaaataagacttatgaagtaaaaagaccaatcatgtcgttgacaagctggctctgaaaataattcttgcagaagagttcctgaaaggcttcaccaaggggaagtattgtgaggagtgtttgtaaaaccaaggtacccaatatcagttttatgtttaaatcaataattgtttctttaaaaaaa

SEQ ID NO: 366226 - DNA, 840 bp, Homo Sapiens
agtaagaatttgtttttgtatttatcatttaactccctagtgctattaacttctgatgtgaactatagcttttgacaaagagtcttgatacataatctattttttatattatttttcattatggaatctttcattatggatacattagagtataacagtatgtattacagaagtttttttgtcttatctttacagtgacatgtgattcaaatatacccaactgctgagaatttttttattggccttggtaaataagattttatactaactatttattagtagccaaattagccaagtgatttatgccatctgagggaacacagcagtattactgtcgtactgtgtaacacatcctattcttgtaatactgaaccactataattagctttatataaaactttagaaagcttatatggagtaaaattatatctttaaccaaatttctcttaattctttccttggaattatttttaatatgacctgtgtaacatgaccgtgtatgaaattcaacttgcaaatttattataacatggaagtgctatttatggtttttatacagatcatataatttctgcacatttcagaacacctttctctgctgttccaaacaatgattaggatattgttcatacagaaattgatagaccattttttagttcatgtgatatcactgagcttacaattctcactagagaagaacaaggttacgatatggaacctctatgtctaagtgtttgtgtgtgtgtatgcttgtgttgaagctgttttcagatcctactgattttagaggacaagcagctttgtatcccagtcccgacgattgccaaacgtacgtccgct

SEQ ID NO: 366227 - DNA, 1247 bp, Homo Sapiens
  misc_feature (743)..(876): n is a, c, g, or t
  misc_feature (885)..(898): n is a, c, g, or t
  misc_feature (936)..(1105): n is a, c, g, or t
  misc_feature (1117)..(1135): n is a, c, g, or t
tttaaagatttaaactaatatgctggcttttatgtatgatacctaatcagagcattgaccagaaaaattgaaagtgttctgaggcacatagcagaggagctgcagatttcctgcttgtattggcgtatatcgttcctcctgagcagcaacccacagtaggtaggaaaatgggctgtttcacaggcctggccacgctctcacggaaccactggcatcagatggtgaagtgactgctacccggttgccatctgttgaacagacttttggatgaagtgtgttggggaagaggataaggttatatctaggacaactctttgagttggtccttcatataagaatcgtgacggtaagagaataaacacttgtactgggatcagaatacatgatggatgaaattctttacatgttttagcagaatgaatttgtttaatataataaagtttgctacttatctgtatgtaggttgctaaaaaggattttcttaactcagattttaagccaaataaccatttaacactagtatttgttaaatggggtatttttctgtatttgtatgtttcactataataagggaattaaggataatgtgcattgagaatattttgaaaaataattgactcaaattttatttcttggtcttttgctgtttaaatgatgattttgaaagattaaacctgtactgttggtattgtgttagtgtatggaccaatactgcctgtaataaagattttatatatagatgnnnnnnnnnnnnnnnnnnnnnnnnnnnnnnnnnnnnnnnnnnnnnnnnnnnnnnnnnnnnnnnnnnnnnnnnnnnnnnnnnnnnnnnnnnnnnnnnnnnnnnnnnnnnnnnnnnnnnnnnnnnnnnnnnnnnnntttgggggnnnnnnnnnnnnnnaaaaaatttttaaaacctttttttgggggcggggcccnnnnnnnnnnnnnnnnnnnnnnnnnnnnnnnnnnnnnnnnnnnnnnnnnnnnnnnnnnnnnnnnnnnnnnnnnnnnnnnnnnnnnnnnnnnnnnnnnnnnnnnnnnnnnnnnnnnnnnnnnnnnnnnnnnnnnnnnnnnnnnnnnnnnnnnnnnnnnnnnnnnnnnnnnnaaatttaatttnnnnnnnnnnnnnnnnnnntccgaaaaatgggggaaattttttaaacttttggcccgagggggaaccccccccaaaggggttgtaaaacccgaattcccccgggggtttccccccctttggccccctttgg

SEQ ID NO: 366228 - DNA, 387 bp, Homo Sapiens
tgggtccccacaagcctgcccgtgcagctgaagtggcaggttagagttgtggtactcaaacttaagtccaagcaaacaggaggagcaccggcgcgggttcagtctttccaaacccagttcagccgtaatctctggagtcagacttcgccgcccaattcatggatttgtgcttttgactccgctctgatgtttttgaatgaataaagttgcctaggatacttaagtatagttgcagagcgtcttttcggccctgaaaagagggaaagtttccattgaaaaagttctttatcacatattggcaaacccaaagtatgccaatttgcaacgtgttgacattttcattgaaatatctacaataaaggcaaagattccttgtttcagtgaaaa

SEQ ID NO: 366229 - DNA, 936 bp, Homo Sapiens
aaagttcatcaccatcctctccttaagctacctgggccggcataccactcaggccgctgccctgctcctggcaggaggggccatcttggctctcacctttgtgcccttggacttgcagaccgtgagacagtattggctgtgtttgggaagggatgcctatccagctccttcagctgcctcttcctctacacaagtgaattataccccacagtcatcaggcaaacaggtatgggcgtaagtaacctgtggacccgcgtgggaagcatggtgtccccgctggtgaaaatcacgggtgaggtacagcccttcatccccaatatcatctacgggatcaccgccctccttcgggggcagtgctgccctcttcctgcctgagaccctgaatcagcccttgccagagactatcgaagacctggaaaactggtccctgcgggcaaagaagccaaagcaggagccagaggtggaaaaggcctcacagaggatccctctacagcctcacggaccaggcctgggctccagctgaggacaacggaaccccctttccctgccctccagagactgatcctagccaggcaccttaggagtatagggaggccccatataggtccatcctcctaggatgaagccttctgagagcttggtgaaggtgtctccatcaccaccaccagagcctcctgcccagccctggccagttcaaaggttcagccatccctgcccttgttctccctgcaacccaggccctgccattcttctgtctagcccttccccactggccaccttcccccactgtcccggtcctcttcccctgaggtcccctgatatcccctggctcagtcctaacaagactgagtcttaacaagatgagaagtcctccccttcttgcctcccacacttttctttgatgggaggtttcaataaacagcgataagaactcta

SEQ ID NO: 366230 - DNA, 1442 bp, Homo Sapiens
  misc_feature (96)..(96): n is a, c, g, or t
  misc_feature (106)..(106): n is a, c, g, or t
  misc_feature (249)..(257): n is a, c, g, or t
  misc_feature (353)..(363): n is a, c, g, or t
gccgcggcaattgatgtggagtggccaaaagcgaaccgtgtgtataactgtattttgtcaagaaagatgaagtgtctcgtctgcgggcggggtgancatctaggcngcgcggcaaaatatggtgctagcagaagagatggtggataggcggataataacgaagcagtaggcggtgtggtggtggacgtggcacatatcgtcttatttgtgcgttgagggtcctaacgcgggcgggatgggataaaagcnnnnnnnnncgggataggggaaagaacccaaacgctggtgccggaggtttgcggtagggcaaaataaagtggggggtgttagtaaaaaataggcggggcggcggnnnnnnnnnnngcggtgtaggggtgtggtggaaagaaaggacgcaaaagtgtggtaaataagaaataaactgtgccagtatttttgcaattctctgtatccctcatgagtactgttcaagaggtaaaaaatagggaggtcagacctggaggggattccggggtacccttgcccaacctgtggacgggcgagtacacccgaatgctggaggggattccttcggaatatcatggggaggtattctcccataaggaactggccatccggaagataagaatcatcactcaaatgctgcagtatcacaacaaggcccatctgctaaacatcccgagctggaattggaaagaaggtgatgacgcaatctgcctcgcagagttgaagttgggcttcatagcccagagctgcctggctcaaggcctctccaccatgcttgccaacctcttctccatgaggtcattcataaagattgaggaagacacatggcagaaatactacttggaaggagtctcaaatgaaatgtacacagaatatctctccagtgccttcgtgggtctgtccttccctactgtttgtgagctgtgttttgtgaagctcaagctcctaatgatagccattgagtacaagtctgccaaccgagagagccgtatattaattaatcctggaaaccatcttaagatccaagaaggtactttaggatttttcatcgcaagtgatgccaaagaagttaaaagacctcctcaactctgtctccctttggctgcccagaaaaggtgctttcagagtgacaagcttgatatttttatttgactgagaaacgacatacttctgccccctcaaatatatatttgaccagactgtgggaattttggtgttgtatttaacttccccaccaagggcccagggctcattgcccacatgtccccacgagtagcatcaaaggctgttctcaaaaatgaaagacgaatgagcagacacagtgtgtcacatcagcaacttttttcccagtttctttgtaaatggaagtttatgaaaaggagcactaactcaaatcacagaatcctgtgtttgaaataaatggtcttgcaacaaac

SEQ ID NO: 366231 - DNA, 520 bp, Homo Sapiens
tccatggccagggataatccggtcacctcccctccaccagagtgctccatggccagggataatccgtcacctcccctccaccagagtgctccatggccaggggtaatcctcaccctctcctccgcctagagtgttcccatggcccaggcagtgtttccctgggtccagagcacctcaaacaatttcagtgttgtggtgactcagggccttcaccatacagacttgacagcatagtctagaggctggaggggctctgtgactcccattaatgacagtcactgccacggtttccccaggcaggatgtgcccaggagaactgctcccatgttggctcagcagaatgttattataggtagctcaaaaagagagggaacagggcttctctagattatttcagggaacgagctattatttgaatgttaatttaagactattttatcaattaaaaatgtaaggcccaagaaacttcagtgaggaagaatgaacaaattgaataaatactgttaaactttaaaaaaaa

SEQ ID NO: 366232 - DNA, 508 bp, Homo Sapiens
gggaaaaaacctagtttgttacactatactcggaaggtttcacaaacaacactgttacagtggatgatgctcacaggagaggcacagaatagcaaactgaaatgaaatccatctagaagggacgatttgctaaaataatccactttcattttcaacctaatttttaatgactagtttaaacaaagaaaccacttatatttatagatttctaatataattagcatagaaaagcatattaaagatgtgaaaacttaaaataatgcaaagtacaacatgaaacaaattctttcacttcagctcaaatgcacagcatttcaagagtgtcttttgcataataagtttctttaaaaagctgaatgattttgaaacattttgccattatagtaaaagtgtacacaacaaggaaccctgaaacactatggtaggactacaactttgaatgagttcttataaaatgtgtagaagttacagaagcatacgattaggctgaacaacaaagtctgaagtt

SEQ ID NO: 366233 - DNA, 283 bp, Homo Sapiens
tacttctatatataattatgagtttaatgaagtgagataatttaagatgatcacacaataaaactttacagccaaaatacaaagtcttcatcttattttcctacttcatttgttttcatgttcttagtaagtgcatttttctactttattttttgaaaagaacattcatttttgaaaagtttatttcaccaaggaccaatcttttgttgatgttcaaatttaaattgttctttcatatctgtctcataggagaaaaacatgaaaaattgcttctgtggtagcc

SEQ ID NO: 366234 - DNA, 946 bp, Homo Sapiens
  misc_feature (146)..(146): n is a, c, g, or t
  misc_feature (860)..(860): n is a, c, g, or t
  misc_feature (890)..(890): n is a, c, g, or t
  misc_feature (895)..(895): n is a, c, g, or t
  misc_feature (917)..(917): n is a, c, g, or t
caagcaatgtcctggaaaaagccatccatagtgagattgtttgatgatcttgcagaaaagattcatagccagtatgaaacaattggctgactttcacaattccaaagtcatgtgttgaaatagcggaattacttcaacagtcaaanaacccctctatcaaccagatattgcttagcccagaaaaaattaaggaaggaattaaacgccaacaggaaaagaatgccgatgccctaaggaactatgaaaatttggtagacaccttgctagatggtgtggagcaaagaaacctgccctggaaatttgaacatataggcattgggcttctgtctctactgctgagagatgaccgagtgttgcctcttcgtgccatacggttttttgttgagaatctcaaccatgatgcaattgtagttcgaaagatggctatctcagctgttgctggtatccttaaacagctaaaaagaacccacaaaaagctgaccattaacccctgtgaaatcagtggatgccctaaacccacccaaattattgctggtgataggcctgataatcattggttgcattatgacagcaaaactataccaagaactaaaaaagaatgggagtcaagttgctttgtggaaaaaactcactggggatactacacctggccaaagaatatggttgtttatgctggtgtggaagagcagcctaagcttggcagaagcagggaggatatgacagaggcagaacagattatatttgatcatttttctgatcctaaatttgttgagcagttaattacttttctatcattaggaagacagaaaagggaaaagataagttttaatccacgacgttttttgtcctcttttaagggntatatttcagggatttttggatggatgccnttccntgccagtttctggaaggccccnttttaggaaccatttgggtttgccggtta

SEQ ID NO: 366235 - DNA, 787 bp, Homo Sapiens
gctcctctctgggcctggaaccacagctcagctttctgtcctgctgagaggccaggttcccttaattgcgaccaacctggaaccacagctcagctttctgtcctgctgagaggccaggttcccttaattcgaccaaccttggacatggcttagatgctgcccacagtgggtttgtctgtctccatcagtcccattcccccaggaaatcaagaacaaacaaacaaatgtaggaaatgggtaacagagcaatgcacctagctcagagcccaggattttaaggatctggtaacagtgaccatggcaggtactcacctccctgaaaaagggtggcaggtgagaggcaggttgatgtggagtgggtgacattcagtgatgccacagaaacccttaggattccccattccttgctctggttctgggaaacaggacatgggaggatcctgcttacttcctcctatccctgggggcttgcccaactctcttgtgatgtggggcataggggctgggtgtcctctgagccatggttgagcgctttgagacagattctggggaatttctccagattaacgacgagacagcaaagcttgcaaaggactccaaaagtctacaaaggcagccagagagcatgaataagttccaagatgcaaaactttgtcttgggacaagaaaacatcaaaaggagagggagggaaaggctgcttgtttcaatgtagtgcaaggaggtgggatctccttttccatgtagcttcagagtcgtatttttatggcataaaaattctcatcggtg

SEQ ID NO: 366236 - DNA, 982 bp, Homo Sapiens
gttgaattttcaaatttttggagatctcctttactattgagacgcagaatggtatcccagactaaacaaaggtcgattgaaatctgccaacaccgatacacatagacttgaagggtaattttatacagcagtgttaataattttgggcatgaaaacaaaagtccttattgttttgactatgaccagtcacatgaggtcaggcgtggaatgttccacttgcaagcatgatggtcagcaattcagaaagttttgaactttggagcattttatatgtcagattttgtgggattaggggattgccaacctgtagtaaaaattggggggcttgcaggacctaaggtctcaccactcaattctgccactgcaggagaaagcaggcatagacaacatataaatgggtatgcttgtgagctgtagtttgcttgatgctgaacaatacataaattctggacaacagacttattatttcaggtgtcatatttgaaggtaggagcaacaatacagatgggcagacattaataaatgaaataccacaaattaaaattttcacacttattacccagtcataattggatgttatgtgtatatatgtatacatacaagttataaagctagctcatttcaattccatattctttttggtgtgttaacagtatcaaaccaacatcagataagcagcaaaaggattatgattgattgagtactcagaagttaatcaaggatcacgaaatctggcttttgacatctaagtatttctacacaatgaaaaaacttatttactgctgctctatatagaaaatatgcagactgtatcgttttcaggtgtcatattaaaattcaattgaattgttacaatttgaagctaaatgtgatttgctttgttttagttacaccataatagctccacgcaaggtctacatcattgctcattaagaatgacttacaagaccatgaggcaataagatcaaaatacaggtacaac

SEQ ID NO: 366237 - DNA, 834 bp, Homo Sapiens
  misc_feature (105)..(113): n is a, c, g, or t
  misc_feature (159)..(272): n is a, c, g, or t
  misc_feature (654)..(667): n is a, c, g, or t
  misc_feature (799)..(799): n is a, c, g, or t
  misc_feature (809)..(809): n is a, c, g, or t
gtgggggggaatcccagcccccttttttatgtccccggggttttctctgggggaaacagcctttggccccagtttccctttcccccaggggcggccccccgcccnnnnnnnnngggtttataaaaaatttttttggggggcgaggggggcccccccaannnnnnnnnnnnnnnnnnnnnnnnnnnnnnnnnnnnnnnnnnnnnnnnnnnnnnnnnnnnnnnnnnnnnnnnnnnnnnnnnnnnnnnnnnnnnnnnnnnnnnnnnnnnnnnnnntagatattaaaattagtttatttttctacttaacttttaataaatgagaagaaacacagtagtctgtctcatatagaacatttataatacataacaatccataaagcctcatggtgaggtaggaacagctttggaaaataacacacagtcatgaaaacatacaaaaagttaggtaaaatgttgcagcactaaagatattttatctgcatctgtatttaatgagatgataactgcatttaactggcccacatctggcccaaaggacaggcaacagaagacacaaaacaacacaacatataagtttcataatcacagaatatactgatacacttcattgtgctgtttcaaggcagaaccataacatggcaatttgtgtcttttnnnnnnnnnnnnnnaccacatattaattgtatgttacattccctccagcatctttttgccaaagacactggaccataaaatttttggtttaaaagtttaaattgaataacatacaaaaggctcctgtgccagtgaaaatgactgcnaaatattccngagcctggtagtaaaaccaaatagc

SEQ ID NO: 366238 - DNA, 474 bp, Homo Sapiens
caattggctataaaggtaggtctgttaactttctttgtgtgttcctgatggaattcaccatagccttacagcttttctcagaaggtaacttgttataagagaaatggcatttgcatgttccagagtcagaacctgtacagtatataaagcataaacaccttgaatttgattttagttcaccacattcaaggatccaggatgccaaaaatatgtgtgaacatttgaaacatttttatttgctgctttttccctttgatatagttgaaagaatgtattgtaaattggcatacaatactgcctttaatagaaaacctaaatgctggggcacatttcacatatcgactacctgagaaattgctttgtgtcccactgttattaaagcaaaaagtataatgttcttcacttgaactaatcaaatacaatagattataaattgtgtattgtaaataaaagttcactctgtgagtgcaaaaa

SEQ ID NO: 366239 - DNA, 493 bp, Homo Sapiens
caggcaccctcatttatagatgtcaggaaaccattcagtgaaaaacttgtagaatgggatgtgataacgaggttccagtaatctgagcagtctaacggaggccccacctcctccaccacagaacgtggctatgttccaagtgctactctcactcagcctgttgcggatcttcatggcctcaggagacttgtttctccatgggctcttctggactgcacacttccaccatagcttgctgggttgatctagatgtctgtttgttgtatggaaattttgggggaaaaaatccaaaacacaaactgtgggttgaaatattaaccgtctccttggttccttggtattcaccgtgcctgatctgcacatttcatcgtggctgtttctgtatagcctatactgcattagcccaagagattgttgctttgtaactttttgcactattgttttggctggatttgtattacacacagttttaaaaaaaacaattccacactaa

SEQ ID NO: 366240 - DNA, 462 bp, Homo Sapiens
  misc_feature (300)..(308): n is a, c, g, or t
  misc_feature (346)..(392): n is a, c, g, or t
agcctgcattaaaatgcaaaaaaactattcgaatgtggctttgcaagaggagacacaaacctcgcattgatggtctggttaaggtgggcacactgaaaaaacgacttgataaatttaatgaggtagtcagtgtgttgaaaaacggaaaacccgagatgaataaacagatcaagaatctggaaatttctattgatactttgatggccaaaattaagtccactatgatgacgcaggaacaaatccagaaagaatatgatgcactggttaaaagctcagaggaactccccagtgcattacagnnnnnnnnncagcaggaagaggaagcagaaaggctgaggcgtattcnnnnnnnnnnnnnnnnnnnnnnnnnnnnnnnnnnnnnnnnnnnnnnncgtcgaagaaaggaagaggaggaaaggcggatgaaacttgagatggaagcaaagagaaaacaagaagaag

SEQ ID NO: 366241 - DNA, 897 bp, Homo Sapiens
  misc_feature (28)..(28): n is a, c, g, or t
  misc_feature (36)..(36): n is a, c, g, or t
  misc_feature (265)..(265): n is a, c, g, or t
  misc_feature (270)..(330): n is a, c, g, or t
  misc_feature (477)..(544): n is a, c, g, or t
aggccagattcagtgcccttcccaacangatgcctntccatcccccacacctcccgactccaccaaaatgaagtggaagcacgtcttgagttgcccatttcttctgtgtctggtcaggcacacatcaagaatgttggctggtgatgggctcaaggcaggcacagcccgcttcactgtgcatgtgtgcaggcttgattgacactggcaaaatctgcaaggatatttctagacattccaagtgattggttcctctgaggaaatgaancattnnnnnnnnnnnnnnnnnnnnnnnnnnnnnnnnnnnnnnnnnnnnnnnnnnnnnnnnnnnnncatgtatatttaattatttttttaaagccacaattgaaaaaattctttgccactgggtagaattaaatctgacaggaaaccctaggagtttttattagtaccattattgttttctttggctccatgtattatgtcggtaaaatgacnnnnnnnnnnnnnnnnnnnnnnnnnnnnnnnnnnnnnnnnnnnnnnnnnnnnnnnnnnnnnnnnnnnntctttaagtatatttcatattattactaatagttggcctatatatctgtatgtctgcatatttttcctacacttgggattttagaaatgtatggcactgtttacacagtatatgcttaagttcttcccataactcaacgaccaatgataacctttttctgattggagtgttccatactttggaagacataatttgtataatcgcacggttactgacggaggagaatctatgtgattcagtccatgtgcacaatgaaaatcagcatatcaccctggggaacattttagttcccaagtccttgggtaatgaccggatggtaaaaaacactagctgtcaatttttttacagtaatt

SEQ ID NO: 366242 - DNA, 515 bp, Homo Sapiens
ccttcggtaacagtttattttcatttttgggaaaggcaaaaccactacctggaactcggtgcctccgtggttaactttcctattttgcttgtgatttaaaggctgttctgggtcaggggggaaaaggtgtctccttcggtagggaatatataacgtggtgataacctgtcactaggcagaagcatccactctgcagggacagtggcccctcgggaaagcccgccgctcctggccaaggcctctctgcagactccacgggggctcaccctctgccgtcaggcgactctgaaattccgacatttctcccttaaagtctcaacagacacaagagaagtttccatcaagcaagcactgacatatttatattaaaaaatagtgcaaaatctcaacatttatataaataactctaaacccctgctttgtaatttttttctttacaaggtaatacacactttctgacatggcactcaaaaattgccatttttttcctcttctaggcaaagaatcggggtacc

SEQ ID NO: 366243 - DNA, 1044 bp, Homo Sapiens
  misc_feature (447)..(670): n is a, c, g, or t
  misc_feature (730)..(739): n is a, c, g, or t
  misc_feature (899)..(908): n is a, c, g, or t
gctcttactaccaagctcaggattcttgattttaaaggtacaaggatagttgtgggagttttatttttggttatatttgaactgtatgaatggtaggtctgaatattgagaatttccatggtcttatgtgaaggtaaaatatacagataactgatcagtttgagtgactgcaacatgttctggttgcacaacagttaggcatgctatggtttatatttgtgaagtttggatgcctgtgaagaatgattaaatacatgtttctaatattttagtgttttgtatttaggttatttattctttgtatctaaaactgaacagctactgtgctatattgattttattggtagtattgagcagaccttgtttctgcatgaaactagttgcaaaacccactattttggaaataaaaatgtattttgacatatacaaataaaatgaataaaactnnnnnnnnnnnnnnnnnnnnnnnnnnnnnnnnnnnnnnnnnnnnnnnnnnnnnnnnnnnnnnnnnnnnnnnnnnnnnnnnnnnnnnnnnnnnnnnnnnnnnnnnnnnnnnnnnnnnnnnnnnnnnnnnnnnnnnnnnnnnnnnnnnnnnnnnnnnnnnnnnnnnnnnnnnnnnnnnnnnnnnnnnnnnnnnnnnnnnnnnnnnnnnnnnnnnnnnnnnnnnnnngggaagggcccccgagccacacaacacccacaaaggaccccggcggaaaccggccccccnnnnnnnnnnccgccccaggaacgaaccgccaacgcgccgagccaagagaacaaaaacccccgagccaccgacacaaccgggcccgaaacacgacccacaacaagagacgcccgcccgacgccgcacccagcacgaggggcccggccccacaacacccaaaacgagacgnnnnnnnnnnacccggcagacacccacccgacaaacaaagcagcaaagcaccacccacccaggagaacccccaacaagagaaacaccgggccccaccgccccggcggcgcccaaaaaaagccaaacgccccagacgcgggagggcc

SEQ ID NO: 366244 - DNA, 1242 bp, Homo Sapiens
  misc_feature (417)..(439): n is a, c, g, or t
aactagtaaacatcatttagcagcaatgaacctgtcaacacatggaaataaggtttacagtcatgcaaatgtccatttaactttgtttgagccaaacaaatataacagtaaactaattagactggcttacatccccgtagacagtgaaaccaattatttcttaaagaagggtttgcttgtttttactctagggcaaaggtgcataacttcttgtaatactcctgaatagttcttcaaatcaggacagataaagttggcaactgatggaatagctaccttgatgtgcaaatggttgggtctttaattaggttcatttatataattgagaaagaagccagggaatgcatttgtgcaaggatgattttaaaagaagagggatggtctgccttttaattctgtatgggaggaaaattcatnnnnnnnnnnnnnnnnnnnnnnnggcaaaactgttttttctaacaatctacttaccactagccatggattgcctttgttacagtttggatggctgatacatattcggaagccatctctctgttttaatatgtttgatgtctattactaatgggtcatttttgtctcgaatttagtacctgaaagattcaaggttttttaaagtattcaaaacctctaactattccctaaagctttaatctctgaaacagagaaacttcctgattagaaaaacaggcgcctagtttggcctcctgtagcactgaactatgagagatattgtccaacatttttggtggtttttctctgtgtatattggataaattttggatgagtggggctaaaattttattttagatttttaaaaaattcatgtaataggattctaccataagtcttactttatttttatatatacatgtgggttctgattataagtctctataaactacatgttgaaaattgtgaatattcatttctatgtttgcatagtatgtacacgctagaaaatttctcagagtgactgtggctcacatgaatcttatgctaaatggggatatggttaatttgccctggcatgtacagagtcctaacttcagaaacacttgtctttctggtatggccatattaagatagctaccaatctctgcacacatcttagtctagcacattttgaacctccttgtgtctaccactttgaaggtatgaaaataaaccaaaggttaccccttctttctggtgttatccagaaatggatgtaaaaatataactttttggcctgggggcggt

SEQ ID NO: 366245 - DNA, 409 bp, Homo Sapiens
catgaaatacagcacttctggccaagaagtctaaatcacagccgatctacacgaggcggatggtccacaacgccaagttcctacccgggcactgagctcaacgctcgcacaactccaaacgagggcgcaaccatattcccactgacatcctccttggggcagcaagacaagctccgaacagcctgtcctgggccaacaagagaagctggcgggcgcccgctgagcactgtgagccatcttgtgcatccagcggtcaccatggtgaacaagaagccaggaaggaaggaagcaatgtcggcaaaagggctcagatgacaaccaaacagaacggtttcccaccctgggcctcctttccacacacacagcatcgtgggtattttaaaataaacaagatcaacgtccaaacctg

SEQ ID NO: 366246 - DNA, 479 bp, Homo Sapiens
caggagacgggggccactgatgcccggcctcggaggcggaagccagccaggctgctggaggctacagcgaagccggagccagaggagaagtccagagccaagcggcagaaggactttgacatagcagaacaaaacgagtccagcgacgaggagagcctgagaaaagagagagctcggtctgcagaggagccgtggactcaaaatcaacagaaacttctggaactggcgttgcagcagtacccaaggggatcctctgaccgctgggacaaaatagccagatgtgtcccgtccaagagcaaggaagactgtatcgctaggtacaagttgctggttgaactggtccaaaagaaaaaacaagctaaaagctgaatattctgggagatgatgttcaccttcattttccaaaatgaatatcttaaaaatcttatgcagaaatttgcattttgtacctcaatatttctacgtcatgtgccttagta

SEQ ID NO: 366247 - DNA, 1365 bp, Homo Sapiens
  misc_feature (694)..(776): n is a, c, g, or t
ccgaggcccgccgctggagagcgccgagccgctggggcccgccgccgatctgtgggccggacgtggacctcaccgagttcgaccagtacctcaactgcagccggactcggcccgacgcccccgggctcccgtaccacgtggcactggccaaactgggcccgcgcgccatgtcctgcccagaggagagcagcctgatctccgcgctgtcggacgccagcagcgcggtctattacagcgcgtgcatctccggctaggccgccggcgccgcccgggtccctgcagcgcttcctcccgcagcccccgcgaccgatccgaccgcgtcgctgccgctctgctctctcatacgcgtgtatgtttggttccatgtcacagccccctaggagccagtgatgctcggccttgcgcccgttccacctcccaggccacccttcctgggcttctgggccacctgccctcgggggggcccctgcgagggtgcctggagttcccacgtgtcccggggcttttccaggaagcccgagcccaggacctgttggcagagttgccagggttacatttttgaagcacctgctccttttcttgcagtgtattttctacaaccagattgtattaatattttttactttgcccttttaaaaaatatacctaatacaatatatttaatttttaattaaactcttaaacttttcttccnnnnnnnnnnnnnnnnnnnnnnnnnnnnnnnnnnnnnnnnnnnnnnnnnnnnnnnnnnnnnnnnnnnnnnnnnnnnnnnnnnngagaagaggaggcggcgcagcggaaaaaatctttcccctgcggggggccgcactattatcgcagcaccaccccgttagtttagatagaaagagggggccccacaaggaggagcgggtaatatattatatcacacagcgccgcagcggcgccggcgtgatgttatacaacaataactgctgtcgtgtgacaggtagagcacaactatgcgccgatctcaggtggactccctttttgttcaatagaaccacaaccctacttctttatgggcgggggaggtgcaaatcacgaatcgttgggagaacaaaacaaccccctactaacacacaaggagagatattaattaaagccgcctcccacctctggagagctggagacatcaaacaataacaaatcctatctagcataataggatgagtcataatctatgaggtgaatgacagacacacaaacccaaccccttgaatactattatacgcgattgcgagctagcgtgaactagcagaatatgaatatacttcgcccacgacacccgcggtgcgttatctgtatatcctaggaccaccaaccactttatcatctacaccgggg

SEQ ID NO: 366248 - DNA, 329 bp, Homo Sapiens
cctttagtttttcagccagtgctaacacaggtaatcaaagcagcaaatcgaacctgaaagggataaaagagcaaagaaataaaaagtagtgttactgtatttattatcttaagagctgtactgacttgagacaagctctaactttttaaacattagttcacacgcgtttattcacttcattatgttcattaagctttcatcttagaataccagtttcaccatttgggagctgtttgtaatatgtgcaaccttataaatagtgttttccaaactgtgtcccaggactgcaaatctttaatgtgaaatgtctttttataatctcttccttt

SEQ ID NO: 366249 - DNA, 580 bp, Homo Sapiens
tgaaaattgtatcagttatgataattagtatgtctttgtgaagccaaaaaagtttcatttgtaagctatatcgaaatacatcatttttctacattattcctaaattttgcatattatcaccaaaacacaggtagaaaatgacacagtagccccaatcgtctacttttgtgattgctaagaatttgtgtaattataccttcagaagtttgtttagaatttacatgatttaaaaaaaattacgtgtgagagtaattattttaaaatgcacattttaggcttgaagtagaacatgtgatgatgagaaaaattattaaaaaacaggatgaccaaattgagcggcttgagaaaatcctgcagcattcaagtttgatgctgcaggtgtttgagagctagatgaagatatggacatttctggaattaagagccccctctacattgagcacaagacagtgacgaatccacattcttcagccagaaagtcacctctgagagccaaatgtctgactatagaaaggagagtcaaagaatgataacgacatctcaggaaaattgtgaaaataatcagcaaccggatgtggat

SEQ ID NO: 366250 - DNA, 487 bp, Homo Sapiens
  misc_feature (47)..(47): n is a, c, g, or t
  misc_feature (104)..(113): n is a, c, g, or t
  misc_feature (173)..(194): n is a, c, g, or t
  misc_feature (247)..(255): n is a, c, g, or t
ttcctcagccatgtgtagcctagacatgagtaaggttaaccgcatgngaaactgttagtacgcataccctcagttcaaacctttagggaatgattaaaatttannnnnnnnnncatttcactccagttgcacttagtcgtatgtcttgcatgcttagtctaaagactgtagcnnnnnnnnnnnnnnnnnnnnnnttagattttacatatctttgcaggtatcacagccttgcagaagaaccaactgnnnnnnnnnttctcagctttacagcaagcaaacttcactatgatttttacaattctgattctgtatcccctgggggttatcccgagttgcttctttaggatggggtttattacgttgtacatatatcccgatgtgtctgtgtgaatctttgtcttttttgggggagggcagagggcggttctttttttagatattgttcctaaaaaggaataaatgcatacacctgtttgtcaaaacaaaa

SEQ ID NO: 366251 - DNA, 1199 bp, Homo Sapiens
  misc_feature (22)..(22): n is a, c, g, or t
  misc_feature (29)..(29): n is a, c, g, or t
  misc_feature (554)..(610): n is a, c, g, or t
  misc_feature (861)..(861): n is a, c, g, or t
  misc_feature (891)..(891): n is a, c, g, or t
  misc_feature (1141)..(1141): n is a, c, g, or t
  misc_feature (1170)..(1170): n is a, c, g, or t
atttccccaccctaaccgcccnattaccncatcccccggtagatgagtccgggttacctggcctttccaatgtgagggagaagattaccgttatgaagggaaatactgcttgtttgccctctgcctattaataaatgttgtgtttccttcacaggagtcctatgggtaaaacatcagggaagctgtttgatagcagtgatgatgacgaatctgattctgaagatgacagtaataggttcaaaattaaacctcagtttgagggcagagctggacagaagctcatggattaacagtcgcactttggcaccgatgacagattccgcatggactctcgatttctagaaactgacagtgaagaggaacaggaagaggtaaatgaaaagaaaactgctgaggaagaagagcttgctgaagaaaaaaagaaagccctgaatgttgtacaaagtgttttgcaaatcaacttaagcaattctacaaacagaggatcagtagctgctaagaaatttaaggacatcatacattatgatccaacgaagcaagaccatgccacttannnnnnnnnnnnnnnnnnnnnnnnnnnnnnnnnnnnnnnnnnnnnnnnnnnnnnnnnggaggaagctgagaaactacctgaggtgtctaaagaaatgtattataatattgctatggatctgaaagaaatattccaaactacaaaatataccagtgaaaaggaagagggcacaccctggaatgaggactgtggtaaagagaaacctgaggaaatccaggaccctgcagctctgaccagtgacgctgagcagcccagcgggttcacgttctctttttttgattcagacactaaagacataaaggaagagnacctacagagttgaaacagtgaaacctggnaaagattgtctggcaggaagaccctcgtttacaagacagcagttcagaagaggaagatgtttactgagaaacagatcacagaaactccagtcctggagaagcatcattacttgagaaagagaccactagatttttcttttttctctaagaatgatgaacgacttcaagggttctgaacttattctgggagaggaagtaggggaagtaatatggagcaagggaactccttggggagggccagaacaaaccnaaccttggcggtaaggggatttggtccgnaaggaaaacctttaaaaggaccgccaaaa

SEQ ID NO: 366252 - DNA, 263 bp, Homo Sapiens
  misc_feature (235)..(235): n is a, c, g, or t
actctaaacctgcgtgtgtggctgtgcaccgctcgtttgtagcgtcacctcaggtctggggaagtctgtgctggcatctcctcattgtgccttcatcagagctggtgccttcgggccagaaagactctcgttctttctagatggtgggatcaggggcctttgctgtgtttcccttggtggatttttgtgttttgtaagttgtctattttgataatgtattatttttataactgtnaaaaaagtaaatagcatattttaaagtg

SEQ ID NO: 366253 - DNA, 503 bp, Homo Sapiens
  misc_feature (11)..(11): n is a, c, g, or t
  misc_feature (72)..(72): n is a, c, g, or t
  misc_feature (82)..(82): n is a, c, g, or t
ttggtcatttnatttccagccactggaaggaagtatgcccgggaaaggaatattatgggggaaaatatttangcccaatccnggctaataaaattccctttagttttaagcctggcctttgcaaagctcagtgaaatgttgaaaggaataaattaatcatgtttctgtgacttttgattgacacttgttccttttcccccctaagtggtagaagaagttatttgttatttttctaaaaggcacaattttgaagccttaactacttcattaagtcaactgttgcctataacatctcttagcactcgtcaaaacgtatttaaatcaattttccaatggatgagaacatgtcttctgtggataaattatattatgtcatttaacaacattgagcattttgatatgtgttcactgaattaaaaaacctgaatttcattattgttgacttttcccctctttagttactagtaatcacatcctttttaggattaaaaatatttcatagt

SEQ ID NO: 366254 - DNA, 1003 bp, Homo Sapiens
cgacatgtcactatgtctttgctctgtcttactgctattttcagtgacggaaaacgcgacagacataggcgattcagacccatgtctcgccctatatagtttatatatacggaaacacttcagactcattctgaaacctgataacactgcctgcaacgttagacattccttatacatgaattatttgatgttccacaggattccaatgggtccaaaattagctgatttcgtttcttggcccaccttattgttgagcttgctgcttgcggtaattgggaacttggccttcgaggaccatcccagcagattctcaacccgaataagattagaagctggccatcagtaaaaggatgtttgtctttttttcacacagtaaaaattctttatcattcaaggatattggaaccacaggactatttggataaaaaacattatttgcaaattaatgcgcatagtacttttattgcaaaatggcatgtgctgccatcttgattattcatttttaaatggtcatttcttattcagtgagtgctttagtgttttaaactatatggataagaatgcaggtagataatattctaggcataaaacatttaatgtaccttacctcatgcaatattctttggattctttgttgatttatgatattgctaatataatattttcttaaaatatataacaatatcttttatgcattttgagttccagctggtgcttctttatatttagaaattataatgggaaggtcatttaatttacagatggttttaaaattgaggtaatatctgaggtggcataatttaaaaatatttagcaaatttgtttcatatatactgtcttatttctagatttgtttaaaattggaatatgaaaaactaatggataaagctagcataaaattgatattttagtttgtattattaatatatcatgttaccttatatattaatctactcttgattctgctaattattaccaacaaaaaacgtcttcgtgacattta

SEQ ID NO: 366255 - DNA, 436 bp, Homo Sapiens
tcaaaaacagattctaacaagtacaaagaaataattaacaaaagctcatgtgtgcccaaaataaagatagagatgtaggcataaactctataccatggacaccttctatgagtcacgaaaatatcagtcatatatatactggcacttagtctggtacatgcaaatttcaaggcaattcctctccatctgagaacgaggaattgtgtcattttaaggccaaattgcagtccaattgccacaagtgcaaaaccaccccacataaccacctatttgtaatcatggaatgatagcctcaaccaaccaattgtgccatacatcattgttaagacttctttgggctcattttagtatagatttaaaagtaaaaattgcaaaagatggataaacatctattattttggtaaaagttacaagctcccattccaggtgtcagccc

SEQ ID NO: 366256 - DNA, 441 bp, Homo Sapiens
  misc_feature (29)..(29): n is a, c, g, or t
  misc_feature (41)..(41): n is a, c, g, or t
  misc_feature (52)..(52): n is a, c, g, or t
  misc_feature (69)..(69): n is a, c, g, or t
  misc_feature (90)..(90): n is a, c, g, or t
  misc_feature (129)..(157): n is a, c, g, or t
ccaaccccttaatttggggttaaaccccngactcactgganacccccctgangcccgaagagaaccccngtttggggatttaataccccngggctgtgtttaccagtaaaaaaagccaggcagtccccnnnnnnnnnnnnnnnnnnnnnnnnnnnnngagattccttcatttccaggatttaaaactatagcagtccatcttaaggaaagtgtaaactgccatggcccacaagtctgctagttgcacttgaatgctctatcagggttgtttattaccctttctacgttctggactccttgccgagactgtttaacttgaagattaaagaaactattgcaaatgccagtgcatcagaacctaagagtggtcaaatattatgtgcaatttttttgtaaagaaattttaatttataataaagtttaacagtttaaagaacagtt

SEQ ID NO: 366257 - DNA, 778 bp, Homo Sapiens
  misc_feature (47)..(47): n is a, c, g, or t
  misc_feature (438)..(456): n is a, c, g, or t
  misc_feature (528)..(550): n is a, c, g, or t
cagtggccagatttggcccatagaccatagtttgctgacttctgccntaaatcatcctccatttctttccttctgtgtccttgttactgacaaagccactttccctaaaatggggtctttccctgtttggtgccatgaagccaatatgcaaaaccgaaagtgagcctcaagcagtgcaggctttatttggtggccatggaattgagaagtgagagcttggctcacaaatcaacttttctgctcgtgagacccaggaagtcacagatacagggcatctttagtgaaggggctgagcattaaaagcaaggggaggagtggccgggtgcaatggctcactcccataaacccagaactttgggaggccaaaatgagaggattgctgagaccaggagttcgagaccatcctggtcaacatagtgatacacccccatctctacnnnnnnnnnnnnnnnnnnngcaaggggaggaatcatgtgttttctgggtctgggtggagaaattttcaaaaccagagtgccaccttcctannnnnnnnnnnnnnnnnnnnnnncccatcattgtcatgttggttgttgactgttacggtgttagtgggactgtcatttaacatggaaattagattataatgaagttagaggtcaaatgagctgccatcttggattccatcagtcttagctggtttgatcaccagggagaagtttggacctcaggcatcctgcttcctaaagataaacagtgttaaggcagggtagatattcacggaggtcatgtgggtatt

SEQ ID NO: 366258 - DNA, 1089 bp, Homo Sapiens; identical to SEQ ID NO: 98880

SEQ ID NO: 366259 - DNA, 1493 bp, Homo Sapiens
ttctccagatggggaagttgctactgtgatgtatcctgccatgtggcaccagactgccacccagaccacagtgtcctctgcaaccctggtaactcacatacaggcccgattccaccgacagcaaagctggatgctatggctggcagaggcaaaccctttgcctgcacttcaggccaaagccgggatgtggcctagatggttcctaaggtccctgacaatcctgagatcttgcatcttgtctatttcaggtcaaaggtgcctacatgctccttctagctttgtttccctgatgttccttgccacctgctactcctctctgagctacttttccaggttccacagggagaggttcagctgtccgtggtagacatgagggtagagagtgaggtggttgggttccacttacctttctatcatcttgcagtatggatgtctcttgactggtaccgtgtagacttttgagggcacacaggagtctgcagagagatactggggacattgagcagcagcaggggggttgggagacagaaatgaggacaggaacatttaccttgtgtttctctcaacttctcacatgaccaagatggtgctgcagatggtgctgaggatggagaacccaccaagccccgctaggagccacctagactggatgcagagcatggtgagctccctgcaggttctctaagaaggggtggatggcagcctgctcctagcctttgtgccctccaggccccaaagtcagggaaccaaaagaagaaagggaccgtagctagggcagagctccactgcaatgattgttttaggggtaggagcccaggattgccgtcctgtggacactggaaatttcgaatctcatataccttttgtggacaaaacattcttcctcttttgttcttctcctaccatctaaaaatgtagaaaacattcttagcctatgagttgcacaaaaacagccagtggccagatttggcccatagaccatagtttgctgacttctgccctaaatcatcctccatttctttccttcgtgtgtccttgttactgacaaagccactttccctaaaatggggtctttccctgtggaaaagctcaagttagaatgagcaatagaaaaccagacagccctgtatctatgggaatgttgcttgcatcagagccaccacaccttgctgtgaggttgatcggtttctcgcagctggaaatagttgcttcccgccccccatcttcctcactcttttaaactctcaaaaatcccccagcctcccaaatttgttttaatttttaagagaattcttttctacaaaagagggaaaccttctttcaaatggcccttcataaatttccctaaagaggtttttatctctgatagaaatatgaaaaacagataaccagataattgccctctatctaggctttaaacacttattcatacattgaatttctgcaagttacagatgattgttgctgtgtgattactggccctgtgaaaagta

SEQ ID NO: 366260 - DNA, 544 bp, Homo Sapiens
tactttccacagggattgttgacccattgaaagcaaactggacaggagaagggatgaggtgggggaaggggctaggttaaatggatccaagttcacacctattttcagtgtcaaagccacaaatcacacttgagcgtctcctcaagttagaatgagcaatagaaaaccagacagccctgtatctatgggaatgttgcttgcatcagagccaccacaccttgctgtgaggttgatcggtttctcgcagctggaaatagttgcttcccgccccccatcttcctcactcttttaaactctcaaaaatcccccagcctcccaaatttgttttaatttttaagagaattcttttctacaaaagagggaaaccttctttcaaatggcccttcataaatttccctaaagaggttttcatctctgatagaaatatgaaaaacagataaccagataattgccctctatctaggctttaaacacttattcatacattgaatttctgcaagttacagataattgttgctgtgtgattactggctctgtctatttc

SEQ ID NO: 366261 - DNA, 450 bp, Homo Sapiens
ggaaaaaggaaggggggaataaaggtatggggaattttatagcccaggttaaaaaccaataaggtatccatcctaatttgggtgtttattttgccagatgagaaaacagaccctagaacccgtggcatgttttgccctgaaacatgccagtgagttagagacagggccctaagatagcttcctagcatcagatcaatccccaagaatccatcagcaacctcagaccaacccaagaagataatttaaatctatactgcttattggtcaatatatttggttctagtattaataaagaaaaatgttattaaaatagcatacatagtagtaaaataaaatacaaaaagtgtgttgatttatagctgtttgagatgataaaagtgaagcaaagcctgttaaatcattggaagacttggaaaattattttaaataaacaattacatgtaattaagc

SEQ ID NO: 366262 - DNA, 574 bp, Homo Sapiens
caggctgaagagattctgcagacatacttgaaatccaaggagtctatgactgatgcaattctcaagacagacaaaactctcacagaaaaagaaaaggatgattgaagtggaacgtgtgaaagctgagtctgcacaggcttcagcaaaaatgttgcaggaaatgcaaagaaagaatgagcagatgatggaacagaaggagaggagttatcaggaacacttgaaacaactgactgagaagatggagaacgacagggtccagttgctgaaagagcaagagaggaccctcgctcttaaacttcaggaacaggagcaactactaaaagagggatttcaaaaagaaagcagaataatgaaaaatgagatacaggatctccagacgaaaatgagacgacgaaaggcatgtaccataagctaaagaccagagccttcctgtcacccctaaccaaggcataattgaaacaattttagaatttggaacaagcgtcactacatttgataataattagatcttgcatcataacaccaaaagtttataaaggcatgtggtacaatgatcaaaatcatgttttttctt

SEQ ID NO: 366263 - DNA, 313 bp, Homo Sapiens
gctcttagaccataacccccgaacttactatgttcatatatttgtattgaacaatcttttaaaagcaaaaatgtaaatgatgtgtagtttatttgtgcttttattgttttccctgcgtctcagacatgttgagaatcatggacaaaacctgctggaattttggaatttttgaagatgtaaataatgtgtatttatgttataagtaacatatgtaaacatgtatatttgttttatatttatttttgtaacaccagtgtctgatgaaacatttttgcaaatgcattttataaaaaaataaatatagtgataagtt

SEQ ID NO: 366264 - DNA, 774 bp, Homo Sapiens
  misc_feature (194)..(194): n is a, c, g, or t
aagtaactagttaaaagttcattttagaatgtatggtttttggggatgaactaagaattagttattagttccaaaggactgagaaccaattttaatattttcacatttataggaaagaaattccatatgtcccctgaaacttcctaggacaaaacccaaacaagtaaggagggaactgttgcaaagcccatttncatcgagaaggggacagaaggagaaatacacacatgtatacacaaacagaatggttgagaaaacgttttaataaaatgtgagggttgtatgtgtgcgtgtatatatttacacttaacctctaaaattctcttctacagtatctctgttatgaatatgatggaaaagcaacattttggtggtgagactattgttaaaataaatttgagaaagacgaaaattttgtgagtcttgataattacaagtcaacagctatcgaaagttagcacagcttgtctgtggtgctgtttttttccccactgcagtggacttatgctgttttcatgtttagaaacaaaaaggtttcatgtgattcatgtgtaagatgcacagtatttgacatcctgattatgtaatccctattccatctatccagtcttacacttatggttggcctcaaatctattgcatttatgataatgtattatatctagttgagtttaatatttttttattagcctgtaaataaagatggcatcttctacattaaaatgatattgatctcatttttttaaataaacattttgtttccttgacgttaaa

SEQ ID NO: 366265 - DNA, 1037 bp, Homo Sapiens
  misc_feature (445)..(454): n is a, c, g, or t
ctggtacggtccggaattacgggatatcgtcgaccacgcgtccgggcaagaagcctgattcatacccatcagaacccatctttgtttctcacccagatgccttggaagaagatgatggtgtagttctgagtgtggtggtgagcccaggagcaggacaaaagcctgcttatctcctgattctgaatgccaaggacttaagtgaagttgcccgggctgaagtggagattaacatccctgtcacctttcatggactgttcaaaaaatcttgagcatactccagcaagatatgtttttggtagcaaaactgagaaaatcagcttcaggtctgcaatcaaattctgttcaattttagcctgctatatgtcatggttttaacttgcagatgcgcacaattttgcaatgttttacagaaagcactgagttgagcaagcaattcctttatttnnnnnnnnnngtacgtatttagataatcatacttcctctgtgagacaggccataactgaaaaactcttaaatatttagcaatcaaataggaaatgactgtggacttactaaatggcttttaattcctattataagagcatattttaggtacctatctgctccaattatatttttaacatttaaaaaccaaagtcctctacacttgatttatatatatgtggcttgctgagtcaagggaagtatcatgcaataaggcttaattactaaagtgtcaaaccaactttttctccaaaccagggactatcacctaagattaatcacccgactatttcgcgtatccgtaactgtccaagattatggctcttatgagtgtaaccttccggtataacagcacgtacatcatcctggttaatactagaaaacgggttacaacgggcgcttacgcaatactccgagataggtatttttacgcttgtaatcagagcttatggagagcattaaaacgaaggtcagtttcacacgtggagagcgacaagctgaataggccgaaaacacgacaccctcgagagattaaagagccctctgggattgtt

SEQ ID NO: 366266 - DNA, 548 bp, Homo Sapiens
agataatatgttccgctcttcctcaaaaaatgaaacctgctcctgggccaataaagccttcttcttcatcactttcatagcatagatgtccccggttgctttctctcttaccacctgcacttcagcaaagtgaccacaacctacaagacttctgacttcgaagtcctttgccgaaggctggagctcctgtaactcagctatggtgtcggaatacttccggacaaagttgctcacgtgcttaatcttcatcagagcaggctgactgcattcttcaaagagaacaaagagggcatctaatatcccttctcgggaaagaggagacatctgctgttgagtcataaagggtggtttcccctggaagaacagattcagcctggaggcccggctggcaatgggttcagcagcaccagcatccaaaggattccgcgctccatatttgaacttcaacatctccccactggcggctctgcgaacccccaggtctgcgatctgttccgccccgccggacgcgtggtcgacgatatcccgaaattccgggccgtacagcc

SEQ ID NO: 366267 - DNA, 903 bp, Homo Sapiens
  misc_feature (854)..(854): n is a, c, g, or t
agcggctggaaggtgtataccggaaagggggcgctcgtgcccgcagcctgagactcctggctgagttccgtcgggatgcccagtcggtgaagctccgaccaggggagcactttgtggaggatgtcactgacacactcaaacgcttctttcagctgccccagaagaatcagcgcctggagaaatataaagatgtgattggctgcctgccgcgggtcaaccgccgcacactggtcaccctcattgggcatctctatcgggtgcagaaatgtgcggctctaaaccagatgtgcacgcggaacttggctctgctgtttgcacccagcgtgttccagacggatgggcgaggggagcacgaggtgcgagtgcttcaagagctcattgatggctacatctctgtctttgatatcgattctgaccaggtagctcagattgacttggaggtcagtcttatcaccacctggaaggacgtgcagctgtctcaggctggagacctcatcatggaagtttatatagagcagcagctcccagacaactgtgtcaccctgaaggtgtccccaaccctgactgctgaggagctgactaaccaggtactggagatgcgggggacagcagctgggatggacttgtgggtgacttttgagattcgcgagcatggggagctggagcgtccactgcatcccaaggacaaaggtcttagagcaggctttacaatggtgccagctcccagagccctgctcagcctccctgctcttgaaaaaagtccccctgggcccaagctggcttgccttcttcacaggtattccgacgtgagagcccacgggtggggctgtttgcggtgttcgtgaggagccacntcgtttgttggggaagccgtttccagggagaggttctttcttgttgcgt

SEQ ID NO: 366268 - DNA, 411 bp, Homo Sapiens
  misc_feature (212)..(212): n is a, c, g, or t
gcaggcggtacggcccggaattacgggatatcgtcgaccacgcgtccgcaagaacgtatttagatctcataatgcttgttaaggtgtacaagtaaatagttgaattcagtaaatattatggtgtgtatgatcaatgcatgttacccattcaaccattttatagactacccaaattcttttatgttaactagaatgcttttgttaaaagttanttgttcattattggtgctacccctttgattatgcagacaacctcatcagctgcctaacttatccatctttgaacttctgactacttgttgtatctgctggatatttagttcaactgtatagttttatttacttctgtatgtgtatttttgtgaagtattcacaaaggttaagttaaaataaaaccaagggatatcttgc

SEQ ID NO: 366269 - DNA, 1713 bp, Homo Sapiens
  misc_feature (1305)..(1398): n is a, c, g, or t
cacttgccagttctcgtccatgtcatcttttcccttcgtcctgcctcccttctgacattccatttgggctttctcacctggcgcgctggtccctgccggctattttgtggtgggccggtattctcctaactcctacaggacaggacagccccgcactacagaattactcagcccgagaatccccattggcaaggctgagaccgcctggtcggcagccccatttgcagggttgtgtaatgtgtctgctaagagttggagggggaattccacattcagaatccaccacaccctgtttatccagcccaagacaccagaatctgttcccgacagccagattgaccatcaccacacccgtctcggccctccctactggggagagctaagcacacagccttccttgtcggtttagcaaaatgccagtggacactgagcggcctacccagcttcagtcttctattctagttctttcatccacccccaggtttcaggtgggctttgaaaggctgggtgctagaggcacaattaccacactcagaagcggtcctttttcactctggcacacagaaaaaatatgaaaatacttccacagtacacagagtaaaccgaggaagccactcaacagtatcagccctgaggttctggtctcacccaggggtagagatcagcatttcctgttccctcttccagggcactcaggctgggtgaaggtaccagaatgccaggaaataactttaaaagtcaatcaagaatttttgttgtagtcacggttagtaccaattccttgcaacaactgcctgggaaattctgatgtttcccccctccttggtacccctttaaatccattcagttaatttgaagactcaatataaattcaattcattaaaaaataatcgataatttaatgggctgaagactgcacgtggttcttagagcctacagtggctgacagagtattgggtattaacgttaacggatcctgtgatgtggcggtgagctgcagctgtgatccacgaagtctctgaacagggcttagaatctgactgcactttgtttttaacaggagcctacgtgaagaagagagcacacaattttaaaagttgattttatattctctgagtttttcttcttgcttcaacaaaactctaggaaatgccataagctgaaagaacatgaccttcctcagacatctcttctctccctttccaaacacaactaggagtcatttttttattggtgctatgccattaagaggtcttcctgcttacgctttcctcagagcggattgttggctgggcgcagtggctnnnnnnnnnnnnnnnnnnnnnnnnnnnnnnnnnnnnnnnnnnnnnnnnnnnnnnnnnnnnnnnnnnnnnnnnnnnnnnnnnnnnnnnnnnnnnntttgctgcagatttctttccccattctccagctatgaagtacaggaaacaaaatttctgcagacacagaacccctatcagtgaggacagaattctgaatgctctgaggcagccaactttctggggttatccactaagtgaggcgtccacttcagctgccgtagcccatccagggttagttctggctgacgtaaatcaagctgctcagaaggtcgatcctggaacactggtggagcgcctgggccagcttccccaccgtggctccctttatgccttccctcatcacccacttttggagcatctggtaaaccccgct

SEQ ID NO: 366270 - DNA, 857 bp, Homo Sapiens
cccctaggatatcgtcgacccacgcgtccgcttgttggaattttaagggaaaaatgaactaaacttcatatttgttgattttaatcacctaatagtactgaaggttggaaagttgcatgtggctggatgctgttaatttctttaatagccatgactataatttaagcctatgagaagatagactgtttcgtagggatatattcacatgtgtgtgcacactcatgagttttgtctcagcaggatagaataagcaaatccatgaactggtcttctattaatactttgattctaaaaattatttgtttacttgctatggtctgttcattctgggcctaaccttaaaggctcaataacaaatacaacaaatgtaaatatgtttacattttaagacatatgcagtggttcttacagatcagttaattaactccagaaagcaaatgttagactacacatttatttttctccttgatcaagtgtaaaattctgaaacagaggctttaaaatttaaaacctcagcaaaataatccatgaatttactgattctcctgtatcgtgtgtagttaccattatgtaactatacacacatacagctacggatatagttgtataatgaaaattatctgcaaacacctaaattaacagagaaaacaacagtagttcgtgaactcattgtgatctactggaacagaagtcatattaaggcaattacaactatttactctctgtcctctgaacgacggcggtgaacacctaggtccccatagggggtggaaggccatttaataaatggaccccagaggggctatgtttaacacggggcaacggagatcccgaaacaggctgcatataagagaaat

SEQ ID NO: 366271 - DNA, 806 bp, Homo Sapiens
gcaggcgtacggtccggaattccgggatatcgtcgaccacgcgtccgaaaaagaataggaatacagttttcttttccacattatgatcaaataaaaatctgtgagatgtttatgttttgaagcaggaggatttcttgagatttgatggaagtgggagtgggaaggattcaccatacttgtgttctcctccctttataaattttattcataggacttttaaaaggcttgtgctatctttccagtgaaaactgaaagtgcattattatggaagaatgtatttgcaggtagtaatagcattaaaaaatatactcgtgtgtaaacacatactaattttgaccttgaaaggaatgaacacttccttcaagaaaaaataacaataactgcttacagataatgctgtacgcaaatctcacaatcaccacgcgactctttattatacagtacttactataacggttagccaacactcgtctgaactcgcacgtctttcgacaagggttatcccaccttttaattgtctgtctatcaatctgccaattggttggggctcttcgtctttaagggcacccttacttgatacatggacgaaacaaacgaagggcgacacaacgtaacgtttggcacccggccctttcgtgccacctctcccgcgtcaaacacactactggccacaaacagggcattctaaccacgctcttcaacaccgagcccaaaatcatagatgtccgtccaaccactccagaaacacatagtgttgtggcgcgccacacactcgtctggggccttcttcacaccgtttttcacat

SEQ ID NO: 366272 - DNA, 1319 bp, Homo Sapiens
  misc_feature (112)..(140): n is a, c, g, or t
  misc_feature (513)..(567): n is a, c, g, or t
  misc_feature (1271)..(1271): n is a, c, g, or t
ccatagtgcactatgacaggttataaaaagcaggctggtacggccggtatcccgggatatcgtcgaccacgcgtcgatgcctgctcctcctacccttttctacctccttttnnnnnnnnnnnnnnnnnnnnnnnnnnnnngttaggagagaaacattaggattgtctgtgatagacatgctgcagcttccactagacatgaattcccaacacaagcatagaaagaggtattctcgttctaaagagacatgtaaatgttttctgggttgaatatttgattttcaatcacataggcactgtccaagttctggcatattatagttcagttatgattttcatggtagagttacaatactgtttttgccctaaagaagtcattcacatggtttacaaatgttaaggcaatgagataggacagtgagtaggaaatccagggatagcagattctagtccttaattctcagctaacatttgggtaatactcacagaaaagttacttttctgtgaagtgtgnnnnnnnnnnnnnnnnnnnnnnnnnnnnnnnnnnnnnnnnnnnnnnnnnnnnnnngtagagttggaggcagggatgggaaggaagaaggggaaaggtatgagtgttcaattaggtcagtttctggttgtggaagaacaactcaaatgtatgacctactgatgacatacagtgagtgtagtcatccttgggtaggaacaccagtacattttccagtaagtagctagtacaaatgattgtataataatattgattgtaaattgccatactcttggttgctaaaggtagattaaaattcaatttgtgtatatgtaaaataatcttatatataattcttaaatagaaagtaattgattttacatagttcttcctgaactttttggaactgaaattctgccaaacattatcaaaataagcttccttagcttaccaagtattcacaaggaaattctcttgtacctctttttggttggctaggggaagcatgctgtgaagcagctattcctacttatagttgtctttggcttggctttgacttctgccatggtttggacaggatgccatggtaggtgtgggaagtatcagggccctcccatcttcccatactcacccttccagaactgttgatggaaatgagctcttgggggagcctagagattcttttttcagtggtcctgtaagcattcaaggttgagcttcagaaagatgagggaggagtcatagctacagtaaagaaaagaatagattttattctgttgccngtatacagtctcatagaattcttattttttcataattgtgcatttatt

SEQ ID NO: 366273 - DNA, 1412 bp, Homo Sapiens
tgcttggtacggcccggaattaccgggatatcgtcgaccacgcgtgcgcagcactctgtcccaatccgagaagttccgaggcttcccagggcagtctgtgtcacgctggccatttgacataaaggagacagcccctggtcccagcttgtcagctctgctgccgacttgctgacttatcaacttcctctaggtgtttccactccaccctggcctgctcagagcctcagtttacccctgcattaaaatggtggggggactggtcaaaggactcttatgtcactgcagtgtcccattctaggattgtctgaaggccagagtaggggtcggggggagtgtggacaaaccccgcaaatcagagtggggaaggtgagtggtagagagggggtctctgaaggcccttggggctgacagggccaggcagcctccccagctgaggcatcattcctgggccagagtcgtgtacaccaagggacagtagccagagctcctcttcctttaccaggcaaggtgcatcccctcagccctcctggcccttcagtcttggtgccacctgggcacaggggcaagcttggtggtagtgagtccattcatctatcagagctggaacctcatccctgcacagatgaggaaaccaaggcatggagcagttcccagagtcgaatctagatctcatctgtcatccgggtcttatcctttgctctgtttttctcttcaggctctggaaaatcagatctgtgacttaatcttcctctccctggccctcacccacttagtttctttttcattcctgctccctgccttaactcctcctcccactgcccctgatcccaggcccaggcttttacaacctggtgctcagcttccccatcagtgaaaaggggtggctagagtaactaacctcagcaggccgtccagtcctgatagtctgtggatttcggatccttctcaggaagcttcatgtctaatggagactataattataactcctgttctgcatagagcatttgcatcaaaggctttccatacccctccctcccctggtcctcataagatccttgaagcaggttcctattcctcattggcaacatggcaaacagatcacaggagtcaaagggccttgctcaaggtccccagcttcagccccaggccctaagccagcgtcagaacagtcaatctgcatttttcatcagtcattctatagtgacatcatcccagactgccttctgtattcccctgtgtacagtctccttctgtttctaggtttagaagttcagaggtgactgtgtttctccatttccacagccaaatgggggaaagagtgaaggctagggagtgctgtgctgattctccagccatggtcagacaggtcacccaggagcctcgaggaaaagcccctggaagggaatcacatg

SEQ ID NO: 366274 - DNA, 923 bp, Homo Sapiens
tgggtacggccggaattccgggatatcgtcgacccacgcgtccgataatgttccacttacccttcaaataattgttgtaagttaattcaattcttaatacttaagtttgctccaacaagggctttatgttgctggtaccgagaatttatttactaaatgcactatgtataaagtgaaagatagtttacttatctgactttgatattagatggctgacattagtgcacataatgcagagtttaacctgtgattcttcaacagagtccagatttaaatgtctacttagttaattagttagctgatattcttccacaattaatatattcaatttcccatcagtatatcactttaaattttaatgtttttctaaggaaactttccacagaattttaaacaactgatgcatccatactcagggtgtagggagaatacttgcatttaaaaaccctgtccacctgtcaccagcacaagagaattagagcttcagtgagaatttacgaaaaccattatactaaagtgagatgcatttatctcatcttcagcaagactcctctaagcattactcattatactgtattcctgctctgaagatgtggataccgaattagtacactcttgtcactttattataattggatacatattaaaaaccaatctgtgtacattccttatcctaggggtagaagttctagtactatgaagttcttaatacggtgacgtctgttaactgttggaatactaattcaatatgcccgggtttacatattgccggatttgctaccctttggctcaactggtgccgtggccacagtacatccacgtttctgtataatcaaccaaattaatagcaaagcgttgaataatcaaagcgaattgacgggcacgaacatttaaaacttgatgtcaacaaaacacgcatacaa

SEQ ID NO: 366275 - DNA, 1189 bp, Homo Sapiens
gctggtacggccggaatacgggatatcgtcgacccacgcgtcgccacgcgtcgggcagggcggcgggtgaacgtgaacgtgggcgtgctgggccacatcgacagcggcaagacggcgctggcgcgggcgctaagcaccacagcctccaccgccgcctttgacaagcagccgcagagccgcgagcgcggcatcacgctcgatctgggcttctcgtgcttctcggtgcctgctgctctcgcgcgcctgcggtcgtctttgcccgagttccaggcagcgcccgaggccgagcccgagcccggcgagccactgcttcaggtcacgctggtcgactgccccgggcacgcctccctcatccggaccatcatcggcggggcccagatcattgatctgatgatgctggtcatcgatgtgaccaaggggatgcagacccagtcagcggaatgccttgtgatcggccagattgcctgccagaagctggtcgtggtgctgaacaaaatagacctcttacctgaaggaaagagacaggcagcaattgataaaatgaccaagaaaatgcagaagaccctagagaacaccaagttccgaggtgcaccgattatacccgtggcggcaagccggggggaccagaggcccccgaaactgaagctccacagggcattccagagctcattgagctcctgacgtcccagatttccatcccaacgagagacccctcggggaccgttcctcatggtctgggggaccactgtttcatccatcaaaggccaaggcacatgtgatgacagggaccatcctttcaggctccatcagcctcggtgacagatgtggagatccctgcccatcaaggtggtgaagaaggtgaagtccatgcagatgtaccacaatgcccatcacttcagccatgcaaggagaccggcatgggcatctgcgtacacccagtttgaccctaagctgctggagcgcgggttggtgtgtgcccccgaagtccctgcacactgtccatgcggccctcatctctgtggaaaagataccgtatatccgggggcccctgcaaaaccaaggccaagttccacattacagtgggccatgcaacacagtcatgggccggttgcatcgtcttcagtcctgctccagcatcactttgaccaggagcctatactggactcttcacactttctctcaagcacat

SEQ ID NO: 366276 - DNA, 945 bp, Homo Sapiens
ggcctgggtggcgaattcggcacgaaggcaaaatgcccagtccagagacaaaacctcagactttgtgcacctaggtttccttctcagcagcggagactgttctttgagttgccttgaagtggaggccgagcggctgcgggcccttcgcctccctgcggctgaccttgatgtagctttaagtcacactagactgcagaggggtccgaggccagaaacccctgtcctgcatcagactttcattcccaagttcttaggctttgttactgatacctcaaatcggaagttgtagttctgagaaaggcaagtcagcgttcttgaaatgcctgactggtagatatgcaactctggcctccagtcttccatgaaaataaatgctgcctggacccccacccagaccacacactgacggccggctccggcggtgcccacccctcaggctggcccggcacccaagactggccacagccagctctgtcagcatgttgtgctcggacaagctgtttccttcttctgaccaacccaggtgtgacctggggatgcagagctttctgttttgggtgttgggagaagcagcaggaaggagtcgccagatgatcaagctccccctttgctgtcatctgtgaatgagcttcgccaggtggtgggcacctgggagccatgcagaggctgtggtgctgagttagactccaggtactttgtggtcaaaggaatcgcctagctccaggctgtgttaggacagtattagcatgaaggctgtgcggacatcatgcctgctgatccttgaggcaggcctggtccagaaaactctgggtcagtgactgcgcagggccagccgctaccaagacggccctgaaaacagacacctctggtttttgtcccctcaccctgggcaaggccccgtcccaatcacagttcctcctcctccccaacccggaggtctggaag

SEQ ID NO: 366277 - DNA, 1245 bp, Homo Sapiens
  misc_feature (1166)..(1166): n is a, c, g, or t
gctgggtggcgaattccgcacgagggagcagcaggaggggggcttcgcgtcccccaggacgggcaagggcaagtggaagcggaagtcggcaggaggtggcccgagcagggccgggtccccgcgccggacatccaagaaaaccaaggtggagccctacagtctcacggcccagcagagcagcctcatcagagaggacaagagcaacgccaagctgtggaatgaggtcctggcgtcactcaaggaccggccggcgagcggcagcccgttccagttgttcctgagtaaagtggaggagacgttccagtgtatctgctgtcaggagctggtgttccggcccatcacgaccgtgtgccagcacaacgtgtgcaaggactgcctggacagatcctttcgggcacaggtgttcagctgccctgcctgccgctacgacctgggccgcagctatgccatgcaggtgaaccagcctctgcagaccgtcctcaaccagctcttccccggctacggcaatggccggtgatctccaagcacttctcgacaggcgttttgctgaaaacgtgtcggagggctcgttcatcggcactgattttgttcttagtgggcttaacttaaacaggtagtgtttcctcccgttccccaaatagcatagtctaccatcttacaatacctataacattcgaaactatccgcttttacggcacttctggaaaccgagacacgcggcccgccctcgccctcaatgcgcattagctccccgcccccgctgtgtcgtccccccatagtgtcggacctccccagtagataagcttgtcataaatatggtagtgcatcggcaccacgaggagagggacactcaccgtttgacatgtcgcacgcacacaaacctccggcatctcgacgcgtcaacaccgtccatccatgctgcgaccaatatcagcgaatgccaatatcacaacacaatcatgacacgtaccacaaatataacggacaataactgccctccatacacacataatcttacacagaccaagtacaagcacgtgtagtgcgggcaggagatgctcttgatgtacgcataaacagtgccaccaacgctgatgagatcaggcgcagctagcagagcacagacactcatggagtaccacgccacaaaatgatacactacacgncatcaatcacgcgctacagtgacagcggcctagcagcatcgcgaataggtcatagagtctgcttgctagttagacttct

SEQ ID NO: 366278 - DNA, 1011 bp, Homo Sapiens
  misc_feature (926)..(926): n is a, c, g, or t
  misc_feature (996)..(996): n is a, c, g, or t
gggagattatgatatagaaccgtggttataaagcaggctgtaccggccggaatttcgggatatcgtcgacccacgcgtcggttgcctgtctgaacctctgccagtcctggagactggtgcgctgagctccaaccagcgggcctcatcctacaccctcaccaccgcaacttctcacccgagcaagaagcagctcccagagagaaagaacgttcccacctgcctagccatgggagaggacgctgcacaggccgaaaagttccagcaccctgggtctgacatgcggcaggaaaagccctcgagccccagcccgatgccttcctccacaccaagccccagcctgaacctagggaacacagaggaggccatccgggacaactcacaggtgaacgcagtcacggtgctcacgctcctggacaagctggtgaacatgctagacgctgtgcaggagaaccagcacaagatggagcagcgacagatcagtttggagggctccgtgaagggcatccagaatgacctcaccaagctctccaagtaccaggcctccaccagcaaacacggtgagcaagctgctggagaagtcccgcaaggtcagcgcccacacgcgcgcggatcaaagagcgcatggataggcagtgcgcacaggtgaagcggctggagaacaaccacgcccagctcctccgacgcaaccatttcaaagtgctcatcttccaggaggaaaatgagatccctgccagcgtgtttgtgaaacagcccgtttccggtgccgtggaagggaaggaggagcttccggatgaaaacaaatccctgggagggaaaccctggcacaccgtgggacctcttccttcagatgatgattttgccccacgatgagggaggccctggggaaggacagttgccgagggaaaaggttggaaggaaagttaggnggcagagaaaattaaaaaagattcccagcctttaaggaaagtgggataggccttcaaggaagcttttttntttggcccagaacct

SEQ ID NO: 366279 - DNA, 1837 bp, Homo Sapiens
gggatttggatataaaacttgcttaaaagcaggtggtacggtccggaattttgggatatcgtcgaccacgcgtcgtccgacccacgcgtcgctctggagagcaaggcatccctggagcaccgggtccccaggtcatcagggtgctacccaggcatggcagggcccaagggagagacgggccctcatggatataaaggcatggtgggcgctatcggtgccactgggccaccgggtgaggaaggtcctaggggaccgccaggccgagctggggagaagggtgacgagggcagcccaggtattcgtggaccccagggatcacaggcccgaaaggagcaactgggccccccaggcatcaacggcaaggatgggaccccaggcacgcctggcatgaagggcagtgcaggacaggcgggacggccggaagtccaggcagcagggcctagcgggtgtgccaggcagcctggggacaaaaggaggccctggagaccaggtgagccgggccctgcagggccttcctggattctctggtccccctgggaaagagggagagccagggcctcgaggacgaaattggtccccagggcatcatgggacagaagggtgaccaaggcgagaggggtccagtggggcaaccaggccctcagggaaggcagggccctaacgggggagcagtggcccccccggaattccaaggccccaaggcttgccaggcgtcaacaggagacaagggctccccagggaagaccgggccccgcggcaaagtgggtgacccaggggtggccggcctccccggagagaaaggcgagaagggcgagtccggcgagccggggcccaagggacagcaaggagtacgtggagaacccggctaccctggccccagcggggatgcgggcgcaccaggggttcagggctaccctggtccccccggccctcgaggactggccgggaaccgaggcgtgccaggacagccagggagacagggcgtggagggccgggatgccactgaccagcacatcgtggatgtggcgctgaagatgctgcaagagcaactggcagaggtcgccgtgagtgccaagcgggaagccctgggtgcggtgggcatgatgggtcctccaggacctcctgggccccctgggtacccaggcaagcagggcccccatgggcaccctggccctcggggcgttcctggcatcgtgggagccgtgggtcagatcggcaacacggggcccaagggaaaacgtggagagaagggtgatccaggagaagtgggacgggggcaccccgggatgcctgggcccccagggatcccaggactccctggccggcctggccaggcaatcaacggcaaggatggagatcgagggtccccaggggctccaggagaggcaggtcgacctggcctgccaggccccgtggggctgccgggcttctgtgaacctgccgcctgccttggagcttcggcctatgcctctgcccgccttacagagcctggatccatcaaaggggccttgagcatcaggcccagacagagcctggcaggcatcctggcgggaaagacccagtcccctctgggtggacatgcacccatccccagtccaggaaaccatctcccccaggacttctgtctggactcaggagtcctaaggaacaggaattcttaaaacacgggggaaggggcacgtcagaggcactgatggggtgaacaacgttgaggccaaacaacaggcaagtggtggtccaatggagtccgaaagggctgaggactagggcgggtttccttcccgcgagccttcatcggtggttacgaaaacaacgtcttatcttggccctttctccc

SEQ ID NO: 366280 - DNA, 1675 bp, Homo Sapiens
ggggcacacagctccactaaagagctggaagaggccgatggagtattcatgagacggctgatccaggaaggactgtggcatattaatatggaaaaggcctgtttgtttgtgcttggagaggaaggagccagaggagaggggagcaaggtgggcgggagctggggagagcctgcagcaagatctgcagagcccgaggtgctctcggcctgggccctggagaggacgtagggagccccagcccaccctgcccgcgaacagccagcgctggaggagcgccgggagactctgccgtcggtgcgtgcgcggacacgcacccgtcccccttggtctcgccgccagccatggccgccgctacggcctccccccgcagcctccttgttctcctccaggtggtagtgctcgctctggcgcagattagaggtccaccggggagagcggggccccccgggtcccccgggaccgccgggagtgcctggatccgacggcatcgacgcggcgccggcccgcaccacaaggacgcccgtttgttctgcaaaaacctcaaaccagccctgacatgcggagcccgttatagccgccgacagacaaggagctgctgttcagaccgccggccgcagctcacagcgaggactcatcccccctcctctcctttcccctccttgtggggcaagaggcgactcaacccctcacccctgcctctggcacatctggacgcttcttcagggtgacaatgggccccctggaaaagctggccctccgggacccaagggcgagcctggcaaagctgggccagatgggccagacgggaagcccgggattgatggtttaactggagccaagggggagcctggccccatggggatccctggcagtcaagggccagcccgggcttcctggtcctcctggccttccgggccctggttttgctggacctcctgggcctcctggacctgttggcctccctggtgagattggaatccgaggccccaagggggaccctggaccagatggaccatcggggcccccaggaccccctgggaaacctggtcgcccgggaaccatccagggtctggaaggcagtgcggatttcctgtgtccaaccaactgtccacccggaatgaaaaggtcccccagggctgcagggagtgaaggggcatgcgggcaaacgcgggattctgggtgatcctggccaccaggggaagccgggtcccaagggagatgtgggtgcctctggagagcaaggcatccctggaccaccgggtccccagggcatcaggggctacccaggcatggcagggcccaagggagagacgggccctcatggatataaaggcatggtgggcgctatcggtgccactgggccaccgggtgaggaaggtcctaggggaccgccaggccgagctggggagaagggtgacgagggcagcccaggtattcgtggaccccaggggatcacaggcccgaaaggagcaacgggccccccaggcatcaacggcaaggatgggaccccaggcacgcctggcatgaagggcagtgcaggacaggcgggacggcccggaagtccaggccaccagggcctagcgggtgtgccaggccagcctgggacaaaaggaggccctggagaccagggtgagccgggcccgcagggccttcctggattctctggtccccctgg

SEQ ID NO: 366281 - DNA, 1598 bp, Homo Sapiens
aaggggccaaataattaaggtgaactatagcaaccccccttgtggcgtataaaaaagatgcagtggctggtacggtccggaatctagggatatcgtcgaccacgcgtcggtgcactgtctggtcaagagcagtgtccatgtgcgtttctgtggcagcagtgcacgtggggtgggtggggggtgcgtacggtggggcttgtaggttaagatgtctctgcggtggtgttgtggggctggaggccgagccaggcacggcagctggccctctccaggcgcatggaggaattctccctttgccgttccaaggatgccgccgcctcctaccggggctcccgggggggtcagccaacactacaaagggcagcgagtcctcagggcgcccgggagccaccagtctgctctcgggctctactcagactagcgccaacagtctccgcggacagactcgcatcagccgccctggggctcggcctcctcccataggctcctcttcctctctttcattcaagtcttcaaactttgaaaaaaatatgagcttttgccaaataagacgggatagtttatggagttttctgaggcgcattgaactctggtcagcccctcgagcgtgggctcggccatcagcaggcccggtgggttggccgggctggccctcccaggctgcctttctctctggtcgcggcctggcccgccccggcctccaccgccgcaattcatgctggtgccgcgcccgcagccccactcctggtatgcctgagattctccaggggccaagccggtcctccttcccggcccactcttccagggccaggacgctcccgcggagccagcccatcgtggctgggggtcccaggggctggaggcctgcctggttagcctctgtttcccagacattgactcgaggcgcctccagtcctctcaaccccctgactttcaagtcctttcaagtccttgtgccctgaccaagttatgaggaaaagagggctgagggcctggaggtgggctcgcaccccctcgaacccacctagatgtctcctcctccccagcctatgagttcagacttggggggctccatctgtccctccctgaggtccctcatcttgtccctgctctgattctgtcagcagatcctgaacactccttggtggggacccatgcctccaaggctgcccccaatgccagctgtcctggggaaactccccagaactctcggggaaaggcccgagaaccttcggaggaagcctccgggactcctcgccacctgctctgtttctctcccggccccactgccttcaggtatcaggaagagggcaggcccctgtgccccctctccccttcccaggcggcaacaatactccaccatggggcgcttcctttcttctctggaaacttaagacattggacctgaaggaactggcctgagggggggcctgaccggggggccccgtgctgctgggagctctacgcaccaagaggccgccggggtcacggaacaggaacctcagccaagctgctggccttttctccttcgcaggagtccccaaaatccacaacagcgactcgagcagcttccactcagcagaggagggtcgggtccc

SEQ ID NO: 366282 - DNA, 770 bp, Homo Sapiens
tgggtggcgaattcggcacgagggcccccaggggagcagaggaggcgttccctgctgagaccctgggccacactggaagtgatgccccttcaccttggcctctggggtcagaggaagctgaggaggatgtaccaccagtgctggtctcccccagcccaacgtacaccccgatcctggaagatgcccctgggcctcagcctcaggctgaagggagtcaggaggctagctggggggtgcaggggagggctgaagccctggggacaagtagagagcgagcaggaggcagttgggttctggggagatccccgagggcccccaggaggaaggggaggagagcagagcaagagagcgaggacgatgagctcggggagacccttccagactccactcccctgggcttctacctcaggtcccccacctcccccaggtgggaccccactggagagcagaggccaccccctcaaggggagactggaaaggagggctgggatcctgctgtcctggcttccgagggccttgaggccccaccctcagaaaaggaggagggggaggagggagaagaggagtgtggccgtgactctgacctgtcagaagaatttgaggacctggggactgaggcaccttttcttcctggggtcccctggggaggtggcagaacctctgggccaggtgccccagctgctactggatcctgcagcctgggatcgagatggggagtctgatgggtttgcagatgaggaagaaagtggggaaggagggaaaaggagatc

SEQ ID NO: 366283 - DNA, 971 bp, Homo Sapiens
gatatacgtggttaaaaagcaggtggtccggtcggaattccgggatatcgtcgaccacgcgtcgctgtcctccatggtctgtgtcccactcttcgtcgtcaccctcctgaagactcggggtcctttcaggaagcgtctgcgtcagctcatcacccctgactccagtctgccacagcccaagcaacatccctgcttggatggcagtgctggcggaactttgggccctccccaacaagggaaggactgatagccggggagaaggagacccatttgtagggtgtggccagaggccaggcggctcctaagccgggaacctaggtcagggccaccctccattctcagcggacagcctctgcctctgtctcctgccacaatcctgctgggaacctctggagagccacaggcacccccagctggaggccagactcctctcttgtgctagctggagcagctccttcccctttgctgataacaccaccactgggacgtgccatgttgggacgccactccctgtgggaaggcaccatcgtttttataaaggggggtctttttggaggccgcctatctgattgcaacacctcgagttatgaggattccactgtgggatgcctcttgttagagcatactgcattggtacacgggagaggagctataattggaacgcacactgcgtccaatgtggagagcctgatgggacaactaccctgctggaagtgacaaactgaacacacgtgtgttggatcggagggtccgtttaggggatccttccttaggcttaacgacagaggcaagctttcgcatgccgtacagtcgggagttcctcccggagtctccatggatcttcagtcctggcctaattcgcactgtctgcgtgttcatcaatctgggattggaggacgggtggaatagtccaatctgaaacgcgtccccctgatgttgaccctgccagcggaatgtagggacagtttccc

SEQ ID NO: 366284 - DNA, 1323 bp, Homo Sapiens
ggaggaggtggctccagagatggcagtgagcgagaggagggggctcggccgcgggagccccgcggagtgggggcagcggctacttctggtgctgctgttgggtggctgctccgggcgcatccaccggctggcgctgacgggggagaagcgagcggacatccagctgaacagcttcggtttctacaccaatggctctctggaggtggagttgagcgtcctgcggctgggcctccgggaggcagaagagaagtccctgctggtggggttcagtctcagccgggttcggtctggcagagttcgctcctattcaacccgggatttccaggactgccctctccagaaaaacagtagcagtttcctggtcctgttcctcatcaacaccaaggatctgcaggtccaggtgcggaagtatggagagcagaagacgttgtttatctttcccgggctcctcccggaagcaccctccaaaccagggctcccgaagccacaggccacagtcccccgcaaggtggatggcggagggacctctgcagccagcaagcccaagtcaacacccgcagtgattcagggtcctagtgggaaggacaaggacctggtgttgggcctgagccacctcaacaactcctacaacttcagtttccacgtggtgatcggctctcaggcggaagaaggccagtacagcctgaacttccacaactgcaacaattcagtgccaggaaaggagcatccattcgacatcacggtgatgatccgggagaagaaccccgatggcttcctgtcggcagcggagatgcccctttttcaagctctacatggtcatgtccgcctgcttcctggccgctggcatcttctgggtgtccatccctctgcaggaacacgtacagcgtcttcaagatccactggctcatggccggccttggcctttcaccaagagcatctctctcctcttccacaagcatcaacttactacttcaatcaacaagccagggccaccccatcgaaggccttgccgtcatgtactacatcgcacacctgctgaagggcgccctcctcttcatcaccatcgccctgattggctcaggctgggccttcatcaagtacgtcctgtcggataaggagaagaaggtcttttgggatcgtgatccccatgcaggtcccttggccaacgtgggccttacatcaatccttcgagtcccccgccagggaaaggcgcccaaccgaacttaccttgccctgttgggaaaaggagaattttttgggtttcccttgggtggggaacacctccattcttggccctggttggggtgggccccattccccctt

SEQ ID NO: 366285 - DNA, 1022 bp, Homo Sapiens
tgtacggcccggaattaccgggatatcgtcgaccacgcgtccgagattctcacgtgaaggtttagtaagtgggtcccagctctgcctgtgtggagatagtcaccatgtacctctgacaacaagttttagtgtgaaagtcactaaacttttacacactcccaaacgtctttttaaaaatgcttgggaaattattaaatgaatgtgcctgatgatttgaaatagacaaggggcacgagataaaaaagaaaaggatgagaagatcctcagtgaatgacgtgcagggtcttcatgcaattttccacctcgcagtagttagtatttacttgccttaaactaactttgaagcaagtaatgtcaactttgagcactttgttgagttttgaaaaatcttatttgtggctgcacaggttaataaattatcaatgtgtaattcagcatgttggtcagagacacggtcactgattcacacccagtccctgccacagaccgtctcagacacgcacagtgggcctgctgcatgattcacacccagtccctgccacagaccgtctcagacacgcacagtgggcctgctgcatgcgtgttacctggcttttggctccacgctcactcatagccatgtccacatggggggcttgcacacaggatcactcacatatgtacatgtacccaccaaaagtgcaagctcctgcaaatgcatgcaaacaaagtgtacacaagtgtggagcactaacagccatacacacacgcaacgtgtaacatgcaccaaagcatgggggacgctaagacttccgaaatgccgtgtacacataaccaagaaacggcggggctgcctacaaaaataggcatatcaggaacaggaagtctaccaccggggggaacagatgcaggaaccacggacaggccaagtggccaacgtttcaaaaaatgagtcagacaacacacgagactcaagccaccacgactgacaagacgaacgcaagggacaaggcccaaacaaacaagtataggaccacgccgag

SEQ ID NO: 366286 - DNA, 1281 bp, Homo Sapiens
ggagtgattagttgaacagtacattaaggcacgataatttgctacactttttctttacaatttgttgcaatttcatctgctttctatgtttcattgttaattgccatccttcagccttaaaaatagaagattctcacgtgaaggtttagtaagttgggtcccagctctgcctgtgtggagatagtcaccatgtacctctgacaacaagttttagtgtgaaagtcactaaacttttacacactcccaaacgtctttttaaaaattgcttgggaaattattaaatgaatgtgcctgatgatttgaaatagacaaggggcacgagataaaaaagaaaaggatgagaagatcctcagtgaatgacgttgcagggtcttcatgcaattttccacctcgcagtagttagtatttacttgccttaaactaactttgaagcaagtaatgtcaactttgagcactttgttgagttttgaaaaatcttatttgttgctgcacaggttaataaattatcaatttgtaattcagcatgttggtcagagacacggtcactgattcacacccagtccctgccacagaccgtctcagacacgcacagtgggcctgctgcatgattcacacccagtccctgccacagaccgtctcagacacgcacagtgggcctgctgcatgattcacacccagtccctgccacagaccgtctcagacacgcacagtgggcctgctgcatgcgtgttacctggcttttggctccacgctcactcatagccatgtccacatggggggcttgcacacaggatcactcacatatgtacatgtaccccaccacacaacgtgcaagctcctgcacacatgcatgcacacaaacgtgtacacaagtgtgaagctccctacacgcatacacaaacacacgtgtacatgcacccaaagcatgtggtgaacctacagacattgcagaacatgcccgggtacccataccaccggacccccggggggatgctcctacacaatacttatggcccctaatcttgaccgccataagttcccaacccccggaccggggaaaccccccttggcaggtacgggtaaacccccctggttacaacttccctacagggtttgctctccccacaccgtggtttgccaccgccaaaaaaacgtatggaacttctaactggcccaatgtgacacacacaaagggaacccgtacattctccctaaaaaacgggggaagcctctctggcaaccgggggcaaatttttgggggtgtacccccccaaggggggt

SEQ ID NO: 366287 - DNA, 1005 bp, Homo Sapiens
ggtaccggtccggaattcccgggatatcgcgggtccccgcgcgtcctgcagcacttcccgcgccgcgcccccagcccagtgcgccggctctgtgccggggtgcccgggcggtcgggagaatgagccgcatctaccacgacggcgcgctccggaacaaggcggtgcagagcgtccggctgccaggggcctgggaccccgccgcccaccaggggggaaatggtgtcctgctggagggagaactgatcgatgtatctcggcacagcatcttggacactcatggcaggaaggagcgctactacgtgctgtatatccggcccagtcacatccatcgccgtaaattcgacgccaagggaaatgaaatcgagcccaacttcagcgccaccaggaaggtgaacacgggcttcctcatgtcgtcctacaaggtggaagccaagggggacactgacaggctcacgcccgaggcgctgaaggggctggtcaacaagccagagctgctcgcgctgacagagagcctcacccccgaccacacagtggcgttctggatgcccgagtcagagatggaggtgatggaactcgagctgggggccggggtacggctgaagactcggggcgatggtcccttcctggattcattggccaaacttgaggctggaacagtgaccaagtgtaatttcactggtgatggaaagacaggggcatcctggacagacaacatcatggcccaaaagtgttcgaagggggctgcagcggagatccgagagcagggggatggggcagaggacgaggagtgggatgactgagggacgtggctgcctctgggggcaccagcaccttctgtaacattggtggaacatttcttccatggaaccttctactctgggagctggaggagaccagtcctggccaagtccttacctgggggtctttccccaattacccaccctttgggaaatacttcttttggaaacaagcctcttgccttaaaaaccccaaacccccgtggat

SEQ ID NO: 366288 - DNA, 762 bp, Homo Sapiens
cctcttgccctttgctccctgctgtgtcctcgtcgttcgttcgcgcggtgatttctgtgcctcctaagggttgcgcacctcatctctaggctcggttcgccctagctccgtgggcttctgtccctttctgagggccatgcctgatcctggtctcccgtggccgagtcccttcctggctggatgtgcccctgaggtttttgggggccctcatcttccacctggggtgactgggccgagggcatcagacctttcttggtagccgaggcctgggtgagggccgtgtcctgggctggctgccttgaagacctcatctctggtgaggtttccgggggccattggggcctcagggcctacctggccccccgcttcattagctcgttctgacccctggcctcgggaggttctggctgggggtgcaggagcactcacaggggctgggctggtatcctcagcattagaagggctggcaactgcctgctggggtcgtccttggccttcctcctcctcctcacaaagcgtcttcagctctcgagagggatctggctgggggactcgagcccgggcctccggggctcctgggccatgagcctcatcttcatcactctcagcaaagtcatccaagttgcccacatcactaggcttcacactcatgaggcttgcgagactctgcatgtcatcgtccgtggcacggccctcccgcagcagcaccccggaaagagtgaggaacagctcagcctgcaccaccttcactgactttggctt

SEQ ID NO: 366289 - DNA, 910 bp, Homo Sapiens
atcaggccaaatcggccgagctcgaattcgtcgaagagcgggcggtcggcttccactccttcaggcgtcggcagccactagtcgtggcgagaggggcggggtggccggggctggcgctccacttggcccccgctcccagcccgcccgccgcgcggcccccggatgagggtatatattcggagcgagcgcgggacgccagatgagtggccgcgcggaaggagctggagacggtcgtagctgcggtcgcgccgagaaaggtttacaggtacatacattacacccctatttctacaaagcttggctattagagcattatgaacattaatgacctcaaactcacgttgtccaaagctgggcaagagcacctactacgtttctggaatgagcttgaagaagcccaacaggtagaactttatgcagagctccaggccatgaactttgaggagctgaacttctttttccaaaaggccattgaaggttttaaccagtcttctcaccaaaagaatgtggatgcacgaatggaacctgtgcctcgagaggtattaggcagtgctacaagggatcaagatcagctccaggcctgggaaagtgaaggacttttccagatttctcagaataaagtagcagtatcttcttctagctggtgggcaggggacaagactcggcgttgcatatcctaaggggatgtatggatgtggtttgccctcccgtaagaacctttttcccaattcagcagaacggatcctggaacttccgcaggttgctgaaaaaaattatggcaaccaatgcgttatttcctgggatataatgaccaggggcagaacaatgggatcttccaaggggttcttctccccagcccaagactttggggttaaaaaaaagaaagggatcttttttccccaaggaaagg

SEQ ID NO: 366290 - DNA, 1050 bp, Homo Sapiens
  misc_feature (55)..(87): n is a, c, g, or t
aatgtatagatcactatagggcgaactcggagttcatcgcggtggcggccgcatnnnnnnnnnnnnnnnnnnnnnnnnnnnnnnnnnatcaggccaaatcggccgagctcgaattcgtcgagagcgggtttcccgatgaaggggcggccatggcagctgcgcagaggcaacgcaggctgctacggagcgcgcgcccggctttgaatgagcggggctgggagtgagcgggcggagcgcgagctcgaggaagagacaggcagcgcgcgtgagcgcgccttgtgtgcgcgcgcggcccgcggcagctcggagcctccgccgggcgggcggggagggggaggggcaggttttgattcccaccatggccatcacccagtttcggttatttaaattttgtacctgcctagcaacagtattctcattcctaaagagattaatatgcagatctggcagaggacggaaattaagtggagaccaaataactttgccaactacagttgattattcatcagttcctaagcagacagatgttgaagagtggacttcctgggatgaagatgcacccaccagtgtaaagatcgaaggagggaatgggaatgtggcaacacaacaaaattctttggaacaactggaacctgactattttaaggacatgacaccaactattaggaaaactcagaaaattgttattaagaagagagaaccattgaattttggcatcccagatgggagcacaggtttctctagtagattagcagctacacaagatctgccttttattcatcagtcttctgaattaggtgacttagatacctggcaggaaacataccaatgcatgggaagaagaagaagatgcagcctggcaagcagaagaagttctgagacagcagaaactagcagacagagaaaagagagcagccgaacaacaaaggaagacaatgggaaaaaggaagcacaacggctaatgaagaaggaacaaaacaaaattggtgtgaaactttcataacacatgttcaaaattttatcatgccagtaggagaaatctcagctcca

SEQ ID NO: 366291 - DNA, 877 bp, Homo Sapiens
  misc_feature (658)..(658): n is a, c, g, or t
aggctggtacggcccggaattacgggatatcgtcgacccacgcgtccgctaaatcaataaaaaccaggactcagacactacagttttcatcagtgtaattttatgtcttgtttctttctatatgaacttgtttatttagtctttttttcataatattctcatagagtttctgctagatctagagctctgctcagtgcctcttataaaaacaatatataagtctcatatgctgtcttgagaatccaagagaatcacatgcagctctgcaacagtttttgctcaaaaatgttactgactaaagcaactgtccttcctgtttccttattgctaccaaggaccagcagggagaaatgtcttctcccagcagtgaattctgttatgcaatttattcttgatgctcaggcctggttaagctgaggcttacctttaataacagcctccaagggaatgaattattcagttaatgtaatagcacacattaaagagtgtaaaatcaattgaggcattttattaatatcttggttcttttatacaaacaatgtatcattatcttcattctataaggtcattgttactacttctctcaaattgcactttctggtaaaaaagttaaaaatttttaaggaaaaaataatttcaatggttaaagttttttttncctcattgtattcatagacaaatttttttcaatatattttgcaagaaaaatctttgaataagactaactgcatttaaaaggaataacctccttctccctttccccaactacaaaaatgtttggcaactttgtgtttacatttaaagatcatttgcacctttttcaaggaaaaaaagtattggagtaaacaagttgttacatatatcatccacgtggttt

SEQ ID NO: 366292 - DNA, 1431 bp, Homo Sapiens
  misc_feature (1050)..(1132): n is a, c, g, or t
ccatttcccttcttacacccagagaagagggggacaactgggagaacagttaaaaaactggggtgcaggaataaatatgacttttcctttccccaaatgggatgttgacagaaaagcagagtatgtgcttagaggaactggtgggtgggaacagctgttatctttgacatgatgtgtaaaaatcagggaacaagtggacatcacagtcagctgcctgcaagtttaaaaacctcagactaaacagacagttcaagggaggaacagacaaattactaatcacattgatgctgtcacatgcacaatgatgctgactgcaggccagcctgtcaccatctcagggctaagccaacagagtaggaggggtggcttcaaccccaagtcccactgcagtaagaaaatgaatattccacacatgaagcactcactacacacagataaaccccctgctcacccccaccttcttagacttaacccaatttagaaaataatagcaaaacccactggggagattggaagaatggcagagaggattctcctcaaagccacgggggctatggatgtgaatcttagcagacttgagactcccagctccaggccccttaaaaccagatcaggctcttgaggggaaggagagagaagcctaggatggggattcaagtcccatgaagccttttgtagcctctggagctgcacctggatggtgagtctgatgttttaggggtgtggctactggctaagccagatgtgagggtgggaaggggaagtgacacccaacttccccacacgggggacacacaggtgggaagacaggtagggctggatcactttgcagtcctggcatgggaggccccaggaagcctacaatctaactaaaaagattttcccagtggtaatttcttttcctttctgtttttacttcctattatcagtgttgttagacttaaaaaacaagatacagactagtcccaaagctggactctgtgaataaagttgtttcttttataaatattttaattacaagtaatcctcactcccaggtaatttcagtgnnnnnnnnnnnnnnnnnnnnnnnnnnnnnnnnnnnnnnnnnnnnnnnnnnnnnnnnnnnnnnnnnnnnnnnnnnnnnnnnnnnctcccaaactttcacagaaagtctgagagcaaccatgtaattataaaggagccctacctctcaagagtgaagtaagggtgagctatgtcatttcagcctgaagaagccagagacaggagaatgtgtgtcacttaaagaaaaatagggattagcaacaatgtttggttgaaaagccagaaataataaaagatagtaaaattttgattaccaaaggggaaaacaaaaagcaaaacaactttcagatttctgtacagagcttcttcctattaagtgcctaaactataggcaaactttggtcc

SEQ ID NO: 366293 - DNA, 1266 bp, Homo Sapiens
  misc_feature (684)..(704): n is a, c, g, or t
  misc_feature (797)..(806): n is a, c, g, or t
  misc_feature (1128)..(1137): n is a, c, g, or t
acttataggggaggataaaacgacccaaatgcgagggttgttccgtatagctatcgtgtatgttatttgtgcccaaatggggaagtcacacatatttttgcgtaacactgtagaggggagcgaagttatttaaaaaagttgttgagaaatataatatgcgtagtgagaacgctccacatttgcgcaagatattgtgaaaagaagagaattaagttttggcgctcccatgtggtatatcgccaggcgagaattttgccgtgccacctgtgggggtagcagaaaagtgtatccccaattccccgcgatcgttgaagggtagtgagtaaggttagagtaagtctgtccgtatccgctttcggaaagtatggctcgttagtagttccaaaaaaagagagacatagcgcaacatttgacaattggcgaggggggccgccgaaatcccaagagagggggggaacgttttgttgggtaagtgcgcaattttggaacccctaggggccccataggtggaaaaaacgtatgttaggtcccagggctctccaagaccttagaagttaatcaaagtggtcaaagtatgaggagaactgattttgcccatattaggggccccagggtaaaagatagcaggaaataccccagggtggtccccaagaggtgtggaagtttctttgaaccagaaagggnnnnnnnnnnnnnnnnnnnnntaggaaaattctcctaacccatgggttgaaaggcaatattcatttattgctcaaaggatgcttttaagggagggcagtggaataaaataaacnnnnnnnnnnctccctacaatacatagaagggttatcaaaccactcaagtttcaaaatctttccacgggtccaatatcactttttttctttcggttcaatgaaaagctaaatgtaataatactaattatagataaaattttattttactttttaaaaatttgtccagctgtttgtcacctttaacatgctacaacaagggctaaattcatgaatcccagagaaaaaaatcccccaaacactggatttctaaatcagtaccatgaaccacatgaagaactaatagggaagattcaaacccactaaaccagaggtaaacaagatcagataaatnnnnnnnnnngtcttaaaacagactcaccatatttacaattcccattaaattacacataaataaatcgacgcgtggtcgacgatatcccggaattccgaccgtaccagccgctatctgaacacgtatatatccaaaatc

SEQ ID NO: 366294 - DNA, 506 bp, Homo Sapiens
  misc_feature (106)..(128): n is a, c, g, or t
tgacggtcggaattcccgggatatcgtcgaccacgcgtccgccacgcgtcgcgatactccaaccatatggatattagtcatagaagaactagaggttttatgatannnnnnnnnnnnnnnnnnnnnnnggtctaggtagtcagtctgcacttaaatatcaatcattttcctttttggcttcttcccttaaaatttatatgtatccagtacatttaattgagaagcgtatgtttttaataatgctgtatttcttttaatttttaaattatggtttatattttcaattcaaaaatggtacaaaataaagttacatggctgggtctggtaagagctatacagttttcctaaatgtatacctgtaactggcagcagttcacctatttcaaaaattgggaattctggtccattggttattcttaagaccacctcaaatttaaaggctaccttatggtacgtttaaagtgtattataacagttggggtagttaataaaacactatttttttt

SEQ ID NO: 366295 - DNA, 1116 bp, Homo Sapiens
tcgtgtgtgtctgctttgtcttcttctttcttcttctctggtctcctctgccttttgttcgtcttactgtttaccttatttgctgtctcctccttccgttcgttgcgtgtcctccctggtttcttctctccctgtggtccccggtttctgcatgcctgtattcccttttatgtcgccttctagcgtcttcagctggcagtgcgggttccatgcgtctctgcggagtgatgggaagtgatatcgtacggtgatggttctccgctgcttttaatcactgcgatagattcgggaattcaagctgctgcctgaagcaagatctaagcattgctctacctagcggggcactccaatgccacagacagggcagtaccgactgttaccccctccttcttgcagcatgatttttaagagacaaacttataagtctgtttaaatggtaaatcatcgttagagacgttctttttctttccttggctctgtgaagagatgagtagttaccccgcctcacacctgaagcgtactggcttctgtgggtagcagtcttacttgtctactattcgttctgaggagtcttgtctttctggatgaagcttttaatctggtgatcacatacatgattggaactggctgtgcaaatgaactgataggaattttgcatacatgagcgaaaaatgtatcctcacgaggcaactttaacatcagtattggcacccctggagctgtgaagtgtgcttccctcgtcatgctgagtttgtttagatcctaaatctcagaaaataatcagctatcactttacctcaacaacgctcttaaactattctgaacattaagaagagattcttgaaggacttgagaaaacatcttcaattattttcccaacccaggtggcagcaatgagcagacaaggaagcctttccttccattactctgtagacatttacaagtcatcccagaatgtggagatgtttccaatggcttcttgaaagttatccacactactgtattgtggattctcagtatctaattcaaagaagtcagtggagactttttgttgtttcctactatatgtgagttagaattcttggtacttaccaatgtcaaacaaaaaagctgtct

SEQ ID NO: 366296 - DNA, 332 bp, Homo Sapiens
  misc_feature (19)..(19): n is a, c, g, or t
ctatccactttacccctcnaacaacgctccttaaaactaatcctgaaacattaaagaaagagattccttgaaggacttgaagaaaacatccttcaattattttccccaaccccaggtggcagcaatgagcagacaaggaagcctttcctggccattactctgtagacatttacaagtcatcccagaatgtggagatgtttccaatggcttcttgaaagttatccacactactgtattgtggattctcagtatctaattcaaagaagtcagtggagactttttgttgtttcctactatatgtgagttagaattcttggtacttaccaatgtca

SEQ ID NO: 366297 - DNA, 1036 bp, Homo Sapiens
  misc_feature (22)..(22): n is a, c, g, or t
ttgtactataaaacctgattangaaagcagggctggtacggtccggaattccgggatatcgtcgacccacgcgtccgatcttgttaaagaaaaggtagccaggattccctaggaaataagctgtggagaaaccactcagcaactgcagacaggggtctgtagccagttcagggtctgagggccagtgaaggtgggtgcaggcaggctgaaaggacaccagcacagccctcggggtgggggcttgtcactggtgtctggtctccctgcttttcccatgtggcctgggctccatgatacgttctccaggcctgggcctggaaaacaggtctttcctgttctctggacctgctagaaagcttcagtcagtttggtccctgggagagaaaacgctcttcccatgacggctctgtggaggccaggaatggggtaggtgggttgactgggagtactccttcctgccgccctggtcaagggactagtgtgagtcgggagtgcattttggaatgggggcaggggtgtttttcatgaccatttatttgagtggttctgatcggttatgcatactctttaaatttgaatccacaatttttgcaaaattacttcccaatcacatcttgacccttagcctgggacaccacaaactgaggtgaattctctgctttgctcgtcacaaaatgccaaactgactgcctttcacggtgtcatcttgctgtcttttgcttctgttgattggtctgcatatcttttaatgtgtctgttgcgtggggatttattttcagttaacgccacgcacagactacatgtcacgagtgcgctttagacttcctgtgttacgtgcttgagttaacctgtgaccctctccttacatggggtggcggctggagccggacaaactcaggttcaagcttgttcttccccggactggccagggccggtggggccccttgaaagaagcgaggggccacggggttcaaccggggactagaggaccaggaaggaaaaccgagagaaaaagacgtcggggagagccaagaat

SEQ ID NO: 366298 - DNA, 908 bp, Homo Sapiens
ggctggaccggtccggattcccgggatgttgatctgacctgactggaagcgtccaaagagggacggctgtcagccctgcttgactgagaacccaccagctcatcccagacacctcatagcaacctatttatacaaagggggaaagaaacacctgagcagaatggaatcattatttttttcccaaggagaaaaccggggtaaagggagggaagcaattcaatttgaagtccctgtgaatgggctttcagaaggcaattaaagaaatccactcagagaggacttggggtgaaacttgggtcctgtggttttctgattgtaagtggaagcaggtcttgcacacgctgttggcaaatgtcaggaccaggttaagtgactggcagaaaaacttccaggtggaacaagcaacccaggttctgctgcaagcttgaaggagcctggagcgggagaaagctaacttgaacatgacctgttgcatttggcaagttctagcaacatgctcctaaggaagcgatacaggcacagaccatgcagactccagttcctcctgctgctcctgatgctgggatgcgtcctgatgatggtggcgatgttgcaccctccccaacaaaccctgcaccagactgtcacagcccaagccagcaagcacagccctgaagccaggtaccgcatggactttggggaatcccaggattgggtactggaaagctgaggatgagggtgaagaagtacaaccctctggagggcctgcccaccctttatctcactgccggaagatcacctgcttggtggcccgtgggctttacccccagccagaaaggaaccagagcccggggcagggaaaaggtgggaacttaccggcctcattcagacagcccaagaaggccaggaataagggagcccccaaagaa

SEQ ID NO: 366299 - DNA, 982 bp, Homo Sapiens
ggccggaattacgggatatcgtcgacccacgcgtccgaatctgtaaacctaggttaaacacttgctggctcacagagaataaccacaagtaaacatctatgtaaatatgattttagagttaagtatttagtacataattcattcattcttcactcagtattagaaaaactgtattaaagaagccctttgctgggaaggaatagagccttggacagaggagtgagcttattcatctcgaaaaagctagatagggcaaaagtcatacgcacctactgaaaatggtacacatgtcagtcatgatcatgtgcttcctatatatggcagaatcctcatggaagagaattcctgtgaataaggtgaaagtgaaaaagcctctagtcaccacttactcccttttcaacaggcagaaaatcaacctggtgagcactccctggagtgtaaccattgtgggaaattcagaaagaacactcgctttatttgtacaagatattgcaagggagagaaatgctataaatatataaagtatagcaaagtcttcaaccatccctcaactcttaggagtcatgtgagcattcacattggagagaaaactcttgaatttactgattgtagaaaagctttcaatcaagagtcatccctcaggaaacacttaagaactcccacaggacagaagtttcaggagtatgagccaatgtgatatgtccttcagcctacactcttccgggtcatacgtgagcaaatactaatgggcaaaggggtgaaggcggactaaggcaattttgcctaatgtcaccaaactggtagtgaagaggtgtatgttagacctgaacttccgacctggcctaaatggtaacctggaagccataatggcacgtgaactcttacgtctaaaaagatcctgggaaactaagtagggaatccccttgtaaaacagaccgaaggggggaccataaagaacgtgacacattgtattcttatactc

SEQ ID NO: 366300 - DNA, 1034 bp, Homo Sapiens
ctgaatgctgagattgtttctggcttgaaagcccgggcttcagagttcctgttagcaacaagtctgagccacatactttgccatcccattggatcttcgtgtaggagagctgacccgcccggagtttaacatataaaccccatccttggaaaggatggacttcaagtgtttgtgttccatttgcttaaaatctatgagcacgttgcccagtatcttgggccttttactgtaatctgctttaaaagatggagttctggaagaagggtaggagccatcaattcttctttggtttgttcataccactgagtgcccttgtaggtaacttctaagagggcatagcagggcgtgtttgtgtccacatccacaggcactagaagcctgggctccgcggccagcacatagaggtgccggagagcctggagatgataccggttgtcagtgctgtgagctgggaagtgcggataaagggcacagagaagagcggcaatggaagaatttgatgtgctcaaagagtaccttcctcctcccaaaaatagaagtccaagggccatgtggtgggctaagtgaaaaccatagttcatttcaccacccgttttcatgtgtaagaagcgacaaagctgcaaaacctttaggttttatgagccagccatgaccatggcgagagacagcagcaccacgctcagacaagtttctaggttatgaggacctgtaacagaagcattaggtgcagacaaataagtcataaaatctttggcaaatttatgcaaacagttaaatgctgataagttttctgagccagcaaatcgaaaacccagagacaagcaggctcctgcaattatgtagacatgtgcttgggacaaagtttccaaattcaaatcctctgagcacggcaattcgatttcactgagagagatactattttctcttataatttgaggaacattgctgtcaacccacttggaatttggtaaaatatcatcccacaaaatcaggcatcgagcaagtgtcctaagcaagagaaattctggcttccc

SEQ ID NO: 366301 - DNA, 618 bp, Homo Sapiens
  misc_feature (428)..(428): n is a, c, g, or t
  misc_feature (477)..(477): n is a, c, g, or t
  misc_feature (485)..(485): n is a, c, g, or t
  misc_feature (517)..(517): n is a, c, g, or t
  misc_feature (523)..(523): n is a, c, g, or t
  misc_feature (553)..(553): n is a, c, g, or t
  misc_feature (567)..(567): n is a, c, g, or t
  misc_feature (582)..(582): n is a, c, g, or t
  misc_feature (597)..(597): n is a, c, g, or t
tcgatttgctggctcagaaaacttatcagcatttaactgtttgcataaatttgccaaagattttatgacttatttgtccgcacctaatgcttctgttacaggtcctcataacctagaaacttgtctgagcgtggtgctgctgtctctcgccatggtcatggctggctcaggaaacctaaaggttttgcagctttgtcgcttcttacacatgaaaacgggtggtgaaatgaactatggttttcacttagcccaccacatggcccttggacttctatttttgggaggaggaaggtactctttgagcacatcaaattcttccattgccgctcttctctgtgccctttatccgcacttcccagctcacagcactgacaaccggtatcatctccagggctctccgggcacctctatgtgctgggccgcggganccagggctttcttagtgcctgtgggatgtgggacacaaacacggccctngctatgcncctctttaggaagtttaccttacaaggggcantcagtnggtattgaacaaaccaaagaaggatttgangggctcctaccttntttccaggaattccnttttttaaaggcagnttaaagtaaaaggcccagata

SEQ ID NO: 366302 - DNA, 1167 bp, Homo Sapiens
ggcctgggtggcgaattcggcacgagggcccagcctggagcctcagaagtctctgggtgacgagggcctgaaccgaggcccctatgttcttggacctgctgaccgtgaggatgaggaggaagatgaggaagaggaggaacagacagaccccaaaaagccaactacagatgagggcacagccagcagcgaggtgaatgccactgaggagatgtccacgcttgtcaactacatcgaacctgtcaagttcaagtcctttgaggctgctcgaaagaggaacaaatgcttcgagatgtcgtcctttgtggagaccaaggccatggagcaactgaccaagagccccatggagtttgtggaatacaacaagcagcagctcagccgcatctaccccaagggcacccgcgtggactcctccaactacatgccccagctcttctggaacgtagggtgccagcttgttgcgctcaacttccagaccctcgatgtggcgatgcagctcaacgcgggcgtttttgagtacaacgggcgcagcgggtacctgctcaagccggagttcatgcggcggccggacaagtccttcgaccccttcactgaggtcatcgtggatggcatcgtggccaatgccttgcgggtcaaggtgatctcagggcagttcctgtccgacaggaaggtgggcatctacgtggaggtggacatgtttggcctccctgttgatacgcggcgcaagtaccgcacccggacctctcaggggaactcgttcaaccccgtgtgggacgaagagcccttcgacttccccaaggtggtgctgcccacgctggcttcacttcgcattgcagcctttgaggaggggggtaaattcgtagggcaccggatcctgcctgtctctgccatccgctccggataccactacgtctgcctgcggaacgaggccaaccaaccgctgtgcctgccggccctgctcatctacaccgaagcctcggactacattcctgacgaccaccaggactatgcggaggccctgatcaaccccattaagcacgtcagcctgatggaccagagggcccggcagctggccgccctcataggggagagtgaggctcaggctggccaagagacgagccaggacaccacagatcatcagacagctggggtctcagccgtcctcaaagc

SEQ ID NO: 366303 - DNA, 915 bp, Homo Sapiens
acatgatgagttaaatgtgggctgcatcgtattccaggggtgttttctgactgtcacaaaagccaggacgtcttgggtaattcaaataatttgaaagtgtgttttatagataggcacaaaaattcaggccacaataaaagtgcgaataaagcaatatatcaattgtaggatatatatctattggttgatcttaaaactaagcacacaggatagtacacaattttattagaataccatttatagtcagcagttgaattcagatatattttccagttaatccgattcatacgttttgcctagtaagtacaggacaacattttccataaagaatacagagtattatcacagcattcagtttacaacctatcttcattcatgtttaattactggcaatatcttcccccagatctcctgtgtcagagatctgaccatcttgcaaattgcgagccttccaaattctcacagttcgatcatcagctgcagtaaaaatgtgggtggaattaacacatatggcattgataggactatcatgacccttcatctctcccactggcataaaagtatccatgttccagactttcaaaatgccccctctgcagccactgagcaaaactgggtggtctggcaccactcccagggcacagacccaatccttatgtgcatttggaacttgctgaagaaggtctttttgagttaagtcccatttcttgattccattatctctagacccactaaataggttatccccttgaatggttagtgcttctatgccatcataatgagggggttcaaaattgtgggtgggactcacagtcccaagagctccttctgtaacatcaaacattttgatgtaatgatccttggagccagtgatgattagatcttgtccactggaaatctgatccacagtaaggc

SEQ ID NO: 366304 - DNA, 636 bp, Homo Sapiens
  misc_feature (143)..(160): n is a, c, g, or t
  misc_feature (575)..(575): n is a, c, g, or t
  misc_feature (593)..(593): n is a, c, g, or t
gagaaaatggtggaataaggaatcccaaaagttcacccttctataaaagctagaaaaaaagtggcaataaccatcagaatgtgctttttcagaactctggaatgtaaccaaatacttgaagtactctgggaagcatttatttnnnnnnnnnnnnnnnnnnccttagtcaattcttaatgaaaaaagcaaaactgtggtgtcttaacttatctgaatcccatactccaatccccagctcagcagcagccttgaaataacaacccacattcccagtgcaggcatatgagggagcagaatggaccttatttacagaaaattctaatttgatctatctggtggctgccttgaagacatgctactagacacatgtttttatctctcctgactgagaacttgctttatactaagctgctcccaagggagcacggtctaaacattcttctctactgtctaaggcaatggataacaattgggggaaacaatagactagccaaaaaacttggaagcaaagtctagggaatgacatgctgtagggaataaggtctttgaaaaggtcctacatgttcttaagattntagaagacattcacatgntcaggggctgtgcacacactcaggaaaaatgcaggcaggcccc

SEQ ID NO: 366305 - DNA, 1729 bp, Homo Sapiens
ggctggtactggcccggagtctttgggatgcttggcgatgcatccatagcagccttggtgctgtggacactccctggggcccagcgaaggggagagtttgctcccaaaggcgcaccaatgaccaacatttgccccccggaggaaagaactggaaccagcctctgacctgtccaggtgccctgtccagctgactgcaaggacagagaggagtcctgcccagctcttggatcagtctgctggccgaggagcccggtggagccagggtgaccctggagcccagcctgccccgatggaggccccggtctcagagccatgccaggtgtctgtgatagggcccctgacttcctctccccgtctgaagaccaggtgctgaggcctgccttgggcagctcagtggctctgaactgcacggcttgggtagtctctgggccccactgctccctgccttcagtccagtggctgaaagacgggcttccattgggaattgggggccactacagcctccacgagtactcctgtggtcaaggccaacctgtcagaggtgcttgtgtccagtgtcctgggggtcaacgtgaccagcactgaagtctatggggccttcacctgctccatccagaacatcagcttctcctccttcactcttcagagagctggccctacaagccacgtggctgcggtgctggcctccctcctggtcctgctggccctgctgctggccgccctgctctatgtcaagtgccgtctcaacgtgctgctctggtaccaggacgcgtatggggaggtggagataaacgacgggaagctctacgacgcctacgtctcctacagcgactgccccgaggaccgcaagttcgtgaacttcatcctaaagccgcagctggagcggacgtcggggctacaaagctcttcctggacgaacgcgacctcctgccgcgcgctgagccctccgccgacctcttggtgaacctgagccgctgccgacgcctcatcgtggtgctttcggacgccttcctgagccgggcctggtgcagccacagcttccgggagggcctgtgccggctgctggagctcacccgcagacccatcttcatcaccttcgagggccagaggcgcgaccccgcgcacccggcgctccgcctgctgcgccagcaccgccacctggtgaccttgctgctctggaggcccggctccgtgactccttcctccgatttttggaaagaagtgcagctggctgctgccgcggaaggtgcggtacaggccggtggaaggagacccccagacgcagctgcaggacgacaaggaccccatgctgattcttcgaggccgagtccctgagggccgggccctggactcaaaggtggacccggaccctgagggcgacctgggtgtccgggggcctgtattgggagagccatcagctccaccgcacaccagtggggtctcgctgggagagagccggagcagcgaagtggacgtctcggatctcggctcgcgaaactacagtgcccgcacagacttctactgcctggtgtccaaggatgatatgtagctcccaccccagagtgcaggatcatagggacagcgggggccagggcagcggcgtcgctcctctgctcaacaggaccacaacccctgccagcagccctgggaccctgccagcagccctgggaaaaggctgtggcctcagggcgcctcccagtgccaaaaaataaagtccttttggattttg

SEQ ID NO: 366306 - DNA, 543 bp, Homo Sapiens
  misc_feature (80)..(158): n is a, c, g, or t
cccaagtagctggcactacagacacgcgccaccatgcccggctaatttttgtatttttagtagagacggagtttcaccannnnnnnnnnnnnnnnnnnnnnnnnnnnnnnnnnnnnnnnnnnnnnnnnnnnnnnnnnnnnnnnnnnnnnnnnnnnnnntgacacctgttgcctggcttccatcctcttctatcattttgtgtaaatctcttctcctatcataaaattaatttctcattttttggtcaggtagaattgggaaagtcccacactgtcctcctattaccttaacatcccaagcttcctttccttttttggtctttatgaatatatttatatggacagaattaagataaacaaaattgattgcccccattctctcacttccccatcttgtcttcctagaccccacagagttaaaacttgggattccccctggcccccccagaacacttgtatattgtttgtttgaggttcgtgccgcagtaacagacacagtatttaattgcacatacagatgtttgctgggtatattcactgtaaa

SEQ ID NO: 366307 - DNA, 343 bp, Homo Sapiens
  misc_feature (37)..(37): n is a, c, g, or t
gtcctggcttacgtgcaggcgtcccccgtgaggaccntgagccccccaaagtgagacaggccgggaggacccgggcgcagtaggagtgcatcaggcggcgcccgagatggaccaggggctgcgtcccgcccgcgccgcctctttgagacccgggtcgtctgttccacgcggcggttgcggcgactgttggtggtgtcgcggctgcgggggaaccccgtgggaggcgcctgggaagggctccctaccggccccttcttcccggtcgacgccacgtgggagcacaccgggaaggggtcccgcgggcgcgtctccccctcgccttttgcgatgtcaccgtgaacgc

SEQ ID NO: 366308 - DNA, 315 bp, Homo Sapiens
ttttaagaaaccaatctgactcccaaccaatggtttgcgatattaacaaaggccacaaacagtacacctgggccagcaaacagtgtgaaactgacaaaactccaagggggaaacatctagcaaataaatcaaaaagccaaagatcattgctggtgatattagcatactagaaacccttaatatgctgctactatgatttgttttaaattattgtttagtcatatattaaagagccagctgatgctcttacagttaaaaaaactgtgtagccacattactgttttcaacgtcctgtgtggaaagttgctatcactg

SEQ ID NO: 366309 - DNA, 416 bp, Homo Sapiens
  misc_feature (144)..(252): n is a, c, g, or t
ggggagagaacttgtaagatacaatgacccaaatgcaatgtttgaatctttattgtattctggatatttaaaaagacaaaagctggacgcagtagctaatgcctgttatcccagcatttttgggaggtcaaaaggggaggattnnnnnnnnnnnnnnnnnnnnnnnnnnnnnnnnnnnnnnnnnnnnnnnnnnnnnnnnnnnnnnnnnnnnnnnnnnnnnnnnnnnnnnnnnnnnnnnnnnnnnnnnnnnnnaaagatggaaaaaccacccccaaattttctttttatactattaatgaatcaatcaattcatatctatttattaaatttctaccgcttttaggccaaaaaaatgtaagatcgttctctgcctcacatagcttacaagccagctggagaaatatggtactcattaa

SEQ ID NO: 366310 - DNA, 609 bp, Homo Sapiens
tcgtctggatccaggacatgatggagcgcgccatcatcgacacttttgtggggcacgacgtggtggagccaggcagctacgtgcagatgttcccctacccctgctacacacgcgatgacttcctgtttgtcattgagcacatgatgccgctgtgcatggtgatctcctgggtctactccgtggccatgaccatccagcacatcgtggcggagaaggagcaccggctcaaggaggtgatgaagaccatgggcctgaacaacgcggtgcactgggtggcctggttcatcaccggctttgtgcagctgtccatctccgtgacagcactcaccgccatcctgaagtacggccaggtgcttatgcacagccacgtggtcatcatctggctcttcctggcagtctacgcggtggccaccatcatgttctgcttcctggtgtctgtgctgtactccaaggccaagctggcctcggcctgcggtggcatcatctacttcctgagctacgtgccctacatgtacgtggcgatccgagaggaggtggcgcatgataagatcacggccttcgagaagtgcatcgcgtccttcatgtccacgacggccttgtgtctgtgct

SEQ ID NO: 366311 - DNA, 1037 bp, Homo Sapiens
  misc_feature (44)..(94): n is a, c, g, or t
  misc_feature (329)..(338): n is a, c, g, or t
  misc_feature (340)..(363): n is a, c, g, or t
ttacttatgttgatggatagccacaaagcataatcatcttattnnnnnnnnnnnnnnnnnnnnnnnnnnnnnnnnnnnnnnnnnnnnnnnnnnnatcttctgtaaatatagttttaaaatgatgagtaaaggtactgtgccatttggccccccatttgggttatgtgcatcatgttagtcagcagtagccatttccacgaattccttcatggggtagtgcaaccagttaaaaagtgtataaaacattatacatagaaaaactctcacatccctttggatgtttgcagttcatcataactttgtggttacctttccgcaacataaatttnnnnnnnnnntnnnnnnnnnnnnnnnnnnnnnnnngacccatatatagaaacccattcatccagtcatacaccatccagagtgtagtgcatgggactgaattccatgaggcacgaagggggtgatcccatcctcagggtagtccatcatcttcaaggcttaatgccactcgcttggatttgacgacaggcagctcggaaagagggttcttcgggagttggtgcagctgtgaccttggttcccccggcaagacaaaaagctccttgagggcaggggctgggtcttccggttctctggtctccccaagacagggctctgcccacagtgggcgatcaaagctgctgattgctgcaggatagacatggccaatctgagcagttctccctatatggagctcatcttcgtcttcttcttctgttgttttcctgtagactgggttgtcaaaattcatgcttttggtgttcttccgcttccagtttctccagatcaggtatccactcatgcacaggagggctatcaccactatgggcacgatgatcccgataacagcggcagtgactgttgagcccatcttactgtcttcatttgcatctcggtagcacctcttcatgtctggacccagccacattgtgtcaggacaggcacatgtgtacttgggagagggcggaatcgagagcaggaagcacagtatccatcccggaatccggacc

SEQ ID NO: 366312 - DNA, 464 bp, Homo Sapiens
  misc_feature (20)..(20): n is a, c, g, or t
  misc_feature (51)..(51): n is a, c, g, or t
ggcaaaaccccaacatgccnacttcttttggcaacatgggggtcacagttntgcccccaggctgtcgtctcgtcgaggagcccctcccttcaggtgcccacctggggctgctggaccctcgggctgcaaagcactgctgctgggatgcagcctccccaggaagtcaatgtgaggcccgagacccctcaaagcggtgagggcccctgttgaacatggagggttcctaaccccaaactcgtgccagaagaaccccaaccccacccaggagctgaggctgatggagccctagggtgggggctgggcttgaccaggaacagcagagccaggccccaaggcatagggcagggcacatggtggtgacgagcaggcagtactcttgtaaagggggctcttgggcaaacagtcccaaaggctcccccaggtatcatcaagttggtaaataaacaggaacatggccctcgccc

SEQ ID NO: 366313 - DNA, 271 bp, Homo Sapiens
tgtagctcaaaaaagaaataagatggagtggaaaggaaagaaaggaagaagcaggaattcaaggtgggtgggctgagcttggggccacctagcccacctgctccaatcaagggctggaacaaacctgaggccacttggagaggcagggctgggcagggacagggggtgggggccgaaatcacagcttccccatcagagccagatgtgtgaaggaaatgtcccagatggcagtagtttctcggcaaggaggggaatcctggagatggttcat

SEQ ID NO: 366314 - DNA, 245 bp, Homo Sapiens
cgcgcgcagccccgcacctccgcccctgcctctgcctcctgggccatgccctgctgtttacatgccggtgaggtccccggccgctccgaacccctccgagccccggctccccgagggtgaagcccgccggcccgcgaactggactggtggatctctcagacctggggccccggactccgatctccgccgtctccgccaccatcagggcgggagccggctctggtgttttgaggagggggtgtggt

SEQ ID NO: 366315 - DNA, 416 bp, Homo Sapiens
taagcagtttaaattttatttggtaggttaccacagaaatgaagaacttttggtaggtgtgttcagatgtgtattacaacattaatgatcgtataaactaatagcagctaacattatttacccagaaactgtttcaagagctttacatgtactcagtcacttaactctacatcaaccttataaaattggtactaacatgttcattcccactgagaattctgaagcaccaaaaagaaaaatgatttgccctcaattcaaactctggcaacgtaagctccagatgctacgctctctcttcacctaggaaaattctggaaaaattactctggtaagcattgcagaagttgtgtttgtcagtgttgagcctggaagatagttttgaagccactggaactgtcaacgaaggactgaatcaa

SEQ ID NO: 366316 - DNA, 677 bp, Homo Sapiens
gctagtgctccctggacgcagtctttctgcacccgcatccggcgttctgcggacagtggccagagcagcttcaccacagagctttccacccagaccgtcgacttcgggacagtgggggagacggtcacccttcacatctgcccagacagggatggggatgaggcggcacagccctgatgctgctgccatggtggcttggggcagcggggagaaaggagtgtccttgaggcctaggacgctgcccggcctcagcagcagtccctgggagcctcctgagggccctccctgtccctgggccacgggcccttcttacctcactcaacttcagccaggaggactgggtggtgcttgcaatgttggaatgaccggctcaaagacctcagctctgggctgtttcctgtcagcctggacaggagcctcaggactgtggacgaacggatgtggccttgggcatttgtcctgttcccacatgggcctggtccctccctcctggccccagccacagctgccaggcctgacatggccttgcctctcctgcagtcttggtgactgagacccttgggtggcgcttcccagctctgcaggccctcctggccttttctgcagggtggacacagggtctgtgtgtgggcagcagcccctgtctctcagcaagaataaagcagcttcctgtgcaa

SEQ ID NO: 366317 - DNA, 549 bp, Homo Sapiens
  misc_feature (39)..(39): n is a, c, g, or t
  misc_feature (52)..(52): n is a, c, g, or t
  misc_feature (118)..(118): n is a, c, g, or t
  misc_feature (397)..(423): n is a, c, g, or t
aatggcataatgggggcatttttggttgggggtcccccncatcttattcccngaaggagctggcaaatagttttactttcctggcactggaagggtagttctggaaagctactttgtngggagtctcattcttccctggagttaatagagtgattcacaatctttggggttttctcctcatcaaaagcatttcttaagtgcctatctaaaagcaattaaagactgtgtctgccctttagaagctaagaatttgattcatgatgcaaattaactagataatttgcaaagtacccttgagattgaattttctctattatatatttcccatatttcaggtgaataatttaatttaaatgacaaaaccctatctagtcaactgggcataatgacattttcnnnnnnnnnnnnnnnnnnnnnnnnnnnaagagttttattataaaccgtgtgtttttggtttttctaagtatatagaaagcttgtataattcagatttatcaatttcctgatttaatgtagactttgacttttttattaaaaacctttgtatta

SEQ ID NO: 366318 - DNA, 167 bp, Homo Sapiens
agcgtgaacatcttaagaaccagtcttgatctggcaaaaaagtagtagaatactacctttctttatttgtccctaaaaataaagtatgtacatctgttcacaaggaagaaaggtaagtttgaagttgtttttcccaaactttaatgtgaccccaaatcatctgaggt

SEQ ID NO: 366319 - DNA, 987 bp, Homo Sapiens
  misc_feature (159)..(208): n is a, c, g, or t
ggcctgggtggcgaattcggcacgaggggcttcagccctgcagggaaagaaaagtgaatgattctggactgagacgcgcttgggcagaggctatgtaatcgtgtctgtgttgaggacttcgcttcgaggagggaagaggagggatcggctcgctcctcnnnnnnnnnnnnnnnnnnnnnnnnnnnnnnnnnnnnnnnnnnnnnnnnnnaccagggttacgccagccccgcggggaggtctctccatccagcttctgcagcggcgaaagccccagcgcccgagcgcctgagccggcggggagcaagtaaagctagaccgatctccggggagccccggagtaggcgagcggcggccgccagctagttgagcgcaccccccgcccgccccagcggcgccgcggcgggcggcgtccaggcggcatggagaaggacggcctgtgccgcgctgaccagcagtacgaatgcgtggcggagatcggggagggcgcctatgggaaggtgttcaaggcccgcgacttgaagaacggaggccgtttcgtggcgttgaagcgcgtgcgggtgcagaccggcgaggagggcatgccgctctccaccatccgcgaggtggcggtgctgaggcacctggagaccttcgagcaccccaacgtggtcaggttgtttgatgtgtgcacagtgtcacgaacagacagagaaaccaaactaactttagtgtttgaacatgtcgatcaagacttgaccacttacttggataaagttccagagcctggagtgcccactggaaaccataaaggatatgatgtttcagcttcttccgaggtctggactttccttcattcccccgagtagggcatcccgatctaaaaccacgaaccattctggtgaaccgccaggcgacaaataaaaatcgctgacttccggcttggcccgcctctataagttcccgaaggggttctaacctccggggcgcgccacgctttgggcaacaaaa

SEQ ID NO: 366320 - DNA, 308 bp, Homo Sapiens
ctttgtgtgtccggggtagtgaccttagcgtggagtggggagagggcagttgggtgtgctggctgttctcattcctctttcccttcttttagcaataagtctggggtgaggtggggagggaggctgcagggggggaggtgggcagaggggccttacagcagcagaggctggaagagaagctctgtcttcaggggccagctgggaaatgctaaggagctgagggtgcccaccaagcccaccttccagaaacttggagaaatgggggttgggaacttatgcagacatggatttatttttcaacatttttt

SEQ ID NO: 366321 - DNA, 617 bp, Homo Sapiens
tgagtgcactgtgtgtgaggcctgtgggaaggcaactgaccccaggaagactcctgctgtgtgatgactgtgacataagttatcacacctactgcctagaccctccattgcagacagttcccaaaggaggctggaagtgcaaatggtactctagggtttgtttgccttgttagtctttcaagttcagagctttctcataccactttggtttttaaaaattagccacagcctatttaattgaataatacacatattctatgatagataccagtaatcagaaaaattttcacatacacattaaatcatttcccccattatgttcgtatgtagcttcctgaattacagtaactgagtaactaagaaaataaaattgagacttttcggggggatttggatttcaggtgtgtttggtgcagacactgtggagcaacatctgcaggtttaagatgtgaatggcagaacaattacacacagtgcgctccttgtgcaagcttatcttcctgtccagtctgctatcgaaactatagagaagaagatcttattctgcaatgtagacaatgtgataggtattgtgctattttttcatctttttaaagcttttctctttgaaatgtagc

SEQ ID NO: 366322 - DNA, 1205 bp, Homo Sapiens
catatagacatatctctgcaaggtaactgctcggaaatagagcctgaggaatcttttctgatcacagatcttttggttttcccttgcccagttcgacttctttgccgcaccataaatccaccaatacctggtctgtatggtttcctttttctctttttgacaccatctgttccttccactcccttagtttcatcatccacagcttcccgctcaggactagattctgattttccatcacaatccataagttctccttctcgactatcatccatttcaccatcccttgaatgctctgattggatgtctggaggggtctgaaggacggccacgctattctgagttataatcttcaatttcaattttggttttgaccgttttcttcttggaactgtaactgtgaggctctgtaactgagtcatccctgattcagtcaaacacacaccatcctgggtataggtcttgggtgggtctagctcttttacttttgtgacaatttgtgctacaagtgaagattcacagcaagtctgaggaaggcacattagacgcaggcatatagggtctgcacatgctacaatcaaaaccaatgtctgctacatgtttccacttcttcctcagcatttaagttctgacaaacagcatgcatccatctatcacattgtctacattgcagaataagatcttcttctctatagtttcgatagcagactggacaggaagataagcttgcacaaggagcgcactgtgtgtaattgttctgccattcacatcttagacctgcagatgttgctccacagtgtctgcaccaaacacaccatttgcacttccagcctcctttgggaactgtctgcaatggagggtctaggcagtaggtgtgataacttatgtcacagtcatcacacagcaggagtcttcctgggtcagttgccttcccacaggcctcacacacagtgcactcaagacacctccaacctttgctaagaaccactttagtgatcttaatactgacacagtatggatggtaacactgaccacactgagaacaggcaagtaatcttccttctgctccttggccaaaactgccacaaactacacacatatcctgattcaaagtgaacttgtcactgctagaaaacaacacaactgtattgtgcatagagttttcttcatcatccttatttgatgaaatatctgcagtagacacccca

SEQ ID NO: 366323 - DNA, 510 bp, Homo Sapiens
gcagccctgtttgatctgtggatgaaatgaatcatgattttcaagctcttgcattagaatctcggggaatgggagagcttttgcctaccaaaaagttttgggaacctgatgattcaacaaaagatggacaaaaaggcatatttctgggggatgatgaatggagagagactgcatggggagcttctcaccattcaatgtcccagcctattatggtacagagaagatctggacagggttttcatggaaacagtgaagtaaatgcaatactgtctccgcgatcagaaagtggaggccttggtgtgagcatggtagaatatgtattaagttcttctcctgctgataaattggattctcgatttaggaagggaaattttggcactagagatgctgaaacagatggacctgagaaaggagatcaaaaaggcaaggcttctccatttgaggaggaccaaaacagagatcttaaacaaggagatgatgatgattctaaaataaatggcagaggtttgc

SEQ ID NO: 366324 - DNA, 481 bp, Homo Sapiens
  misc_feature (394)..(430): n is a, c, g, or t
gaggcgctggaacatggtggggggcgaagcgcctcacgggggcgccctatggcagtgcaaaaacctctctgtgatccaaacagctgggaggcagcgattttattggactctaggacttcaaggtacagtgaggacagaaggggtcaggaccacaaaaggtgaaccaatctccagagattccctgggggcgggaggggggcggcacggcgttgaggtagttgtgcggcggggcgtcccagggtcgccgcgccgctcacaggtccgggccgcagtcgccgggactcgcgggggagccggcgggcccgcggtcgctccgggctgctgagctcgcccgcggggctttgagtctgcgcccgctctcgacgaattcgagctcggccgatttggcctgatnnnnnnnnnnnnnnnnnnnnnnnnnnnnnnnnnnnnncgccgccacccgataaccccagttccctattatgtaattctatacggtgtt

SEQ ID NO: 366325 - DNA, 635 bp, Homo Sapiens
tcgcgtgtacggcccgacgtctgggatatcagtgaacaaggcgctcgagaaaatcggagtcgctaacaagtatccagctgatgctggtgctactggactggaacaacacattaagaaccatacataggtagtattttttaaaacatcgttgtgttgtgcttaacatagattgataaaggaatgtgcttttaacatctccttaaaaggtcccttagatttcctctagataaaagaattagtaatttcatctgcaacacatacaattttttttaattttataaaatttagttaaatgtatgttttacactgactatggaaacagcactattttagatacagaaagaaatcaataaacatagcctgtgttcacaattcactcatccttttgttataaaaagacttgaaattagggttatgttttaacatgaaaacgaaaatttagccttagcttttatccatcttaactttagaaattatatttatgcattgtttatagatcattgtcattcgttgttgcttaacgtgttcatctgattttatatttatgatgttaaaacatagactgctgaccaataaataataaacatatttacactccattctatttccctgtattcacatcctattaatgacaa

SEQ ID NO: 366326 - DNA, 754 bp, Homo Sapiens
aacagctggtccggccgggattatgggatcctctgccagctgtggcgggccatcatcctgcgggacgacgccgccatgagggcgcagcgcagccgcactgggggtgcaagactacctcctgttcgccgagatgctcatgcagcgccccgtgcgcctggggcagctgtggggctcgcacctactgagccgcgaagaggcggcctacatggtggacatggcccgcgagcgcttcgaggccgtcatggcggtgctcagggagcttgccgcggcccatgctgctggtgctgcgcaacatcaacaccgtgcgcgctatcaacgtggccctcggcgcccccgtggaccgctacttccttatggctaaaagggctgtccggggctggagccgcctggcgggcgccacgtatcggggtgtctacggcaccagcctcatgcgccacgccaaggtcgtctgggagatgctcaagtttgaagtggcgctcaggctggagaccttggccatgcggctgaccgccctcctggctcgtgctctggtccacctgagcctcgtgcccccagcggaggagctctaccagtacctggagacctagggtgcagccgcccagtggccggcggggcccttttcaccttgggctgacggaggtggcggggctagaggtgtagacaccccgagccccgtgggcactcgcactgggggggcttgtgacagcagcttgggccagaaagccgtgtaatgaccacacactcctctcaagca

SEQ ID NO: 366327 - DNA, 435 bp, Homo Sapiens
  misc_feature (33)..(33): n is a, c, g, or t
atctctgcaatgtgcttcaccccattattcccnccaaccccctgtcagccctaataaaatcatcccagtagtttcccctataaggttctgaagccagagaaagaaagcccagttatactattgcctacaagtcccaggacactgtgccctctcccatggctgcctgcccctggtcctttaattccttgcctagcctaacctagttcacttgtacagtaacacactacctttgcctggaaagttagcatgggtctccaggctcagtaatggccaactctactgatgcagaagtatttagggatgttttttccattcattgcactaaagactaaaccaggtcaaatttatctaggaaaaaaaaggtgtgtaagatttgttttgtttttgtctgttaaaaataagctactaaataaaatggatgactctttggtaaaa

SEQ ID NO: 366328 - DNA, 462 bp, Homo Sapiens
ctcaaaggttgaagaggtcagctgtcctcctgtcatcttccccaccctgtccccagcccctaaacaagatacttcttggttaaaggccctccggaaagggaaaggctaacggggcatgtgcctcatcacaccatccatcctggaagcacaaaggcctggctggctgcgagctcaggaggccgcctgaggactgcacaccgggcccacacctctcctgcccctccctcctgagtcctgggggtgggaggatttgagggagctcactgcctacctggcctggggctgtctgcccacacagcatgtgcgctctccctgagtgcctgtgtagctggggatggggattcctaggggcagatgaaggacaagccccactggagtggggttctttgagtgggggaggcagggacgagggaaggaaagtaactccatgactctccaataaaaacctgtccaacctgtgaa

SEQ ID NO: 366329 - DNA, 438 bp, Homo Sapiens
ggccatgctttgcctgtcctctgtcgtgatgtttcttccgcagccaggtgcagcctcagatcccctgttcatctgggaagcctcctgccacagcttaggacaaaactgggccccagggcaaaggcctctccccagaggatggactagaaggcccgggccaaactcgggcatggacctttggggctggggagccggggctgcgcctgttgaatgtaagaggactgctgaccagagggccttcaagagggtctctctgtcctttgctgtggtcagatcaggctctgcacttatcagccggtcctttgtggcaacgcagccctgttctgtttttgcttttcctcttcttgaccaaagcatgtgccactagctgtccttgaggacctcgtctttatgaaacacacacctggaataaaaccacttcttacatgtcaaaaaaaa

SEQ ID NO: 366330 - DNA, 549 bp, Homo Sapiens
  misc_feature (314)..(314): n is a, c, g, or t
  misc_feature (432)..(432): n is a, c, g, or t
  misc_feature (455)..(455): n is a, c, g, or t
  misc_feature (459)..(479): n is a, c, g, or t
  misc_feature (488)..(488): n is a, c, g, or t
attcggcactagggggaagcctcctgccacagcttaggacagaactgggcccagggcaaaggcctctccccagaggatggactagaaggcctgggcacactcgggcatggacctttggggctggggagcaggggctgcgctgtttgaatgtaagagccaagtgtctgtggtccgcagcacctgctctggagggctctccagcagtttcgcctcctgactctcaccagcgtcctctcggcagcactcccgtgcccaagcgcacccctctggacttgccagcgcaggccccttcgctcccaggggccatgctttcncctgtcctctgttcgtgatgtttctttccgcagccaggtgcagcctcagatcccctgttcatctggggaagcctttggtgtgggtcagatcagggtctgcaattattcagccggttcnttttgggcaaggaggccttgttnttgnnnnnnnnnnnnnnnnnnnnngaacaaagnatgttgccataagttgtcttgaggacttgtttttatgaaacaataattggattaaaaccat

SEQ ID NO: 366331 - DNA, 1225 bp, Homo Sapiens
  misc_feature (727)..(742): n is a, c, g, or t
  misc_feature (971)..(980): n is a, c, g, or t
gcttttttccttttaatctgctatgaatcagtacccagatgtttaattactgtacttattaaatcatgagggcaaaagagtgtagaatggaaaaaagtctcttgtatctagatactttaaatatgggaggccctttaacttaattgcctttagtcaaccactggatttgaatttgcatcaagtattttaaataatattgaatttaaaaaaatgtattgcagtagtgtgtcagtaccttattgttaaagtgagtcagataaatcttcaattcctggctatttgggcaattgaatcatcatggactgtataatgcaatcagattattttgtttctagacatccttgaattacaccaaagaacatgaaatttagttgtggttaaattatttatttatttcatgcattcattttatttcccttaaggtctggatgagacttctttggggagcctctaaaaaaatttttcactgggggccacgtgggtcattagaagccagagctctcctccaggctccttcccagtgcctagaggtgctataggaaacatagatccagccaggggcttccctaaagcagtgcagcaccggcccagggcatcactagacaggccctaattaagttttttttaaaaagcctgtgtatttattttagaatcatgtttttctgtatattaacttgggggatatcgttaatatttaggatataagatttgaggtcagccatcttcnnnnnnnnnnnnnnnnttgactcaagaaagtacaagtaaactatacacctttttttcataagttttaggaactgtagtaatgtggcttagaaagtataatggcctaaatgttttcaaaatgtaagttcctgtggagaagaattgtttatattgcaaacggggggactgaggggaacctgtaggtttaaaacagtatgtttgtcagccaactgatttaaaaggcctttaactgttttggttgttgnnnnnnnnnnaagccactctccccttcctatgaggaagaattgagaggggcacctatttctgtaaaatccccaaattggtgttgatgattttgagcttgaatgttttcatacctgattaaaacttggtttattctaatttctgtatcatatcatctgaggtttacgtggtaactagtcttataacatggatgtatcttttttttgttgttcatctaaagctttttaatccaaataaatacagagtttgcaaagtg

SEQ ID NO: 366332 - DNA, 268 bp, Homo Sapiens
acctgtaaccccagtctaaatagcagaaagacattgcacaaacccagagtgagggactctcaagaatgcctgaccagtactcctcaaaatgtccaggtcatcacaagcaaggacagtctgagaaacgtcacatccagaggaacctaagaatgaggactcaatgtaaaagggatcctggaacagaaaaaagacattgggaaaaactaatgaaatctgcccaaagtgtagagtttagtttagttaataacaatttttaaagaggtattaa

SEQ ID NO: 366333 - DNA, 323 bp, Homo Sapiens
gagtgagccaccgggcccagcctgttttctcttttctcctttccctggggaagagggttggccggacagaccctggtgtggctgggatgggggactgctgcagagaggtaacgggcccctgagatagacatgggacagcccgaaaaggtgggactgagaggggacacttgtggccagcagtgtatctctgacacagtctcaccccgcagggctcctgcagtctcgattcagggtgcttggtgttcccagatggtgtttgagggtcctgacccgacctcattctgctatagccatcagtcccctgctgtggctttggggatcag

SEQ ID NO: 366334 - DNA, 403 bp, Homo Sapiens
  misc_feature (68)..(68): n is a, c, g, or t
ggaattccacccctacccagcagtactgaagcatcccccaaccctttctccttgggtagtgtcagagnaggcttagtggagcgtcagggctttaactgtcacccagttgtaacaaagccctcctatcatgatgttagtaggacggactatttgggaagcaagaactcccaccctgcccaatagatacaaggacccctctgcctattctgggtgtcaacggaggccatgtggcaggggctggatttccaccttcacctggcagtggcaaggtgaagtgtctccttcctctgctggagtggtatccagaaagccagctaaaacgatacttaaaatccagggtctcataattcagaaatgtccaagtgttcattaagaatcattgtttgctgggcacggtggctca

SEQ ID NO: 366335 - DNA, 512 bp, Homo Sapiens
  misc_feature (400)..(412): n is a, c, g, or t
ggaaacagggaagcattggggacccctcccaacttttcttcccagtaacgcctgctgtttactgccacctggcactggtgactacagacgttctcaggctggccagaagagacatcttgggttccttggcctcactctctgtaagcatataaaccacaggcgaaagaggatgctgcattgcgaggacccagaaattcatactggtgccacgtttccttcccttatttctaacgtgtatgtttctggtggaaaccaagttcaccctggctgggagcatctctgatgaggcatgctggcgactggatggataatcctgtgcatcaccattgtgtcctgtgctccctcctagcgcagtggccaagccgggaaagcctctaacttgcctttgctgctgctgccnnnnnnnnnnnnngtctctgcctttccatttgttagatgggggcccactcttccttagctctgtctctgagttactgggtggaaataagcttataaatgaaatactcttcttc

SEQ ID NO: 366336 - DNA, 237 bp, Homo Sapiens
  misc_feature (205)..(205): n is a, c, g, or t
  misc_feature (220)..(220): n is a, c, g, or t
agtggagctcctgggtgcgtgtccagatgggaaaggcagggtcgtatctgtggggacctgacaagggcaggggaagcggagaccagggtgcaggcaccgcccccacccaaggccgggcccagccagagaaagggcaggccagggcagcaggtttctgtatgtttgataggtttggctaggctctcttttgttttgttcataattnaaaacaccttaatcncccgtcttacaaaaaaa

SEQ ID NO: 366337 - DNA, 499 bp, Homo Sapiens
  misc_feature (383)..(383): n is a, c, g, or t
gctatgcattgaagagttttccactgtatacatttttatccagatgaaggtatttttatattttgacaataggaaacagtgaccattttcagagtaatcaaatctggaacaaatgaaacatcttttagccaccaccaccctgttgcaattaagacaaccgtgggggaacacaccactttttactgttgaaaccaacacaacgttgaaatccaggcttatacgcagactccgattcctagagaactaaatttggctttagtgtgacgggatttgattaagcacttagtatagtcttttgaacacggaaatcctgttgtacttaaagctagcggacccgtgaacaactttgtcaggttcacgtcctataacggttaaaaaacacnacacacacatacacaaccgtttctatgagagattgatgaactttgtttaaaattttaaaaaaaggaacacgttctgtaaacgagtcgctaaatacagaattgtataataaaaaaaa

SEQ ID NO: 366338 - DNA, 350 bp, Homo Sapiens
caccaccaccgcctcctccaccccctgccctgccaggcccaggcccggtctcagtcccagagttgaagccggaatcttcccagaccccagtggtctctacccgcaaaggcaagtgccggggcgtgcggcgcatggtggtgaagatggccaagatccccgtatcgctggggcggcggaacaagaccacatacaaagtgtcttccttgagcagcagcctgagcgtggagggcaaggagctgggcctgcgcgtgtcggctgagcccaccccgctgctgaagatgaagaacaatgggcggaacgtggtagtggtcttcccacccggtgagatgcccattattctcaaacgtaag

SEQ ID NO: 366339 - DNA, 1429 bp, Homo Sapiens
  misc_feature (1155)..(1155): n is a, c, g, or t
  misc_feature (1297)..(1297): n is a, c, g, or t
  misc_feature (1309)..(1309): n is a, c, g, or t
  misc_feature (1317)..(1317): n is a, c, g, or t
  misc_feature (1319)..(1319): n is a, c, g, or t
  misc_feature (1326)..(1326): n is a, c, g, or t
  misc_feature (1328)..(1330): n is a, c, g, or t
  misc_feature (1333)..(1334): n is a, c, g, or t
atcgttatttggttgtgttgaatgtgcaagaggggtttcctcacaaagagctttagggccctttaattaagaataaaggggggtttttggggtaaccccttcaaaaaggttttttcaggggacttggggggctaggggttttaagggaaagggctttaatttaaaatattgggggaaattaaaaattccaagaagggggcccaccacccggaatgcaaaaaggacttttggctgggcttttctgggtcaggacaaagccctaggagaaggggtatttttcttaggggcagtaaaaaccaaaacgtttttcaaaagggggggctaaattttctattcatgaaagttcataaaacatgtggcgctcggttaatggtaaaaattagacaatgtgtaaggcgggaccgctcctcctcatcctcccaagctcctctcctacccacctcccttccccccaaggaaacgcaaagttgccccgaggaggtgggcctgcctccacatcgcccccaggggaaggtatgttctcagcgtcccctaaaacacttgcccaagatcctgctccttcagggccttgatctctgcagtcagaacagaggggtgtgcacaggggagtttcaggggaggacaggggtggggggttccccaaagaattccagaggaagacattcggcccacccccaatccacaaactaataagcagccgttgtacaaacagggagtattccccaccttcaggggctatgctatatgaaagcagccttctcttttaatataaaatcatatcaaccaaataaaacctgccaaagctacatcatttaaaatatgtacagtttcacacacaatattacaactttaaggaaaataaaacatacttttcaatatgatacaaagcatgcatctcaaagtcattactttaaaagagagcaacacaggtaaaattcaatgataaacttcacttcttggcagtactatagctggaatgagatctgtggcatgatcagcccaagatggatgcattgagtcttcatagactcattcgacaaaaacacccagaaagaaaggcttttgctaagaacactttcaaaagggttttagaaccatttgcaatgtaacttgcaccccttggcagcacctgtcaccagactgtcagtgcaaaanctgaaagaaaaacattaaaaggagatcgtgaaatgatacagtgggagcggggcagtttatgctaaaacaatcacacagaattctagatgagaaggaacatgaataggcttgaccaatttcgtgatcactgagcacagtaaanatcaaatttccnggtggagntngtagacngnnngcnncaagtgccgaaatgtggacctctggaagacgaagtcataagcagagctctgcccgcggaggccagagagcagcttctctggctgcggagttggag

SEQ ID NO: 366340 - DNA, 408 bp, Homo Sapiens
  misc_feature (26)..(26): n is a, c, g, or t
  misc_feature (35)..(35): n is a, c, g, or t
  misc_feature (46)..(46): n is a, c, g, or t
  misc_feature (111)..(292): n is a, c, g, or t
ccccatttttaaaaaccttgacaggnccggggcanggtggcctcanaacctgtaatccccagcactttgggaaggctgaggcaggcgcatcaccctgaggtcaggagatcnnnnnnnnnnnnnnnnnnnnnnnnnnnnnnnnnnnnnnnnnnnnnnnnnnnnnnnnnnnnnnnnnnnnnnnnnnnnnnnnnnnnnnnnnnnnnnnnnnnnnnnnnnnnnnnnnnnnnnnnnnnnnnnnnnnnnnnnnnnnnnnnnnnnnnnnnnnnnnnnnnnnnnnnnnnnnnnnnnnnnncgacagaaaaaaaagaaaccttgacatctttactacaacttagcaacccgctcaggccccctctgcaacggagagctcttcttcctttttgcttattaaacttctgctccaaactc

SEQ ID NO: 366341 - DNA, 468 bp, Homo Sapiens
  misc_feature (58)..(100): n is a, c, g, or t
  misc_feature (204)..(241): n is a, c, g, or t
cagaagctaattttaaaaaacggtgccaggtaccacaacagtaacagaactttgcaannnnnnnnnnnnnnnnnnnnnnnnnnnnnnnnnnnnnnnnnnnaaatggagtgtgctggatgtctctataattttattcagatgactgcagaacctggaaaagctgttgctgctattgatgcataacatactgctattggtcttttnnnnnnnnnnnnnnnnnnnnnnnnnnnnnnnnnnnnnnatttgaatttttggaaactttagctgtgctgtcaactttggaaaaagtatcccggtttactgtgttgagttggcattgtacagaaattaacagccatattggtctagaaacgttaaacttaatttttttccatttgtacaggggtaacgcactgtattaaatatgtaaggtcttatctacatgggtttgattacagaaactaataaagtattctctaaataatgaaa

SEQ ID NO: 366342 - DNA, 638 bp, Homo Sapiens
agcggggtcggcacacaggctttgagacaaccaggatgcggagacaatcacaaagagtgtgtaggccagccccggtcacagagtgcaccgtatcctgtcacttctggatgtgagggagaagtgagtcatctcattccactccgtggatcagaggacttggactagatagaagcatgtggtgtctcctacgaggcctgggccggcctggagccctggcacggggagccctggggcagcagcaatccctgggtgcccgggccctggccagcgcaggctctgagagccgggacgagtacagctatgtggtggtgggcgcgggctcggcgggctgcgtgctggctgggaggctcacggaggaccccgccgagcgcgtgctgctgctggaggccgggcccaaggacgtgcgcgcggggagcaagcggctctcgtggaagatccacatgcccgcggacctggtggccaacctgtgcgacgacaggtacaactggtgctaccacacagaggtgcagcggggcctggacggccgcgtgctgtactggccacgcggccgcgtctggggtggctcctcatccctcaatgccatggtctacgtccgtgggcacgccgaggactacgagcgctggcagcgccagggcgcc

SEQ ID NO: 366343 - DNA, 483 bp, Homo Sapiens
agggagcagctgggcaaggaagtggcttcagaggacgtccagcctcagctggccccacggagagctccaggcagagcccacagtaccacagtgtgcccacaccaccggttactggctcctggatgagggggccagagaggagtgaataacttcccagacacttacctccagggcagggtgccttccagtagccaagggaagcctccagagagcacagatgtgaaccctcagcagcaggcatcaccccccagtggactcgggtgggccaccagtagcatcttctagatggcagaggggtgaatggcagggccaggaaccaggctgcccgggttcccattctgcttctgccacttccagctgtgtggctttaggtgagccttcaccttttggtgccttcgtttcctcatttagcacctacctcctagagctgttttgggagtcaaatgcgctgacgtatataaagtgctttgtcaagaaaaaaaa

SEQ ID NO: 366344 - DNA, 458 bp, Homo Sapiens
  misc_feature (349)..(349): n is a, c, g, or t
  misc_feature (359)..(359): n is a, c, g, or t
  misc_feature (365)..(365): n is a, c, g, or t
  misc_feature (384)..(385): n is a, c, g, or t
  misc_feature (398)..(398): n is a, c, g, or t
  misc_feature (415)..(415): n is a, c, g, or t
cggtattttcgatttttctccaatctttttaaaggaaccagattgtgacatttgcagagaggaggggtcccatagtttctcatcatggttaactttctgttggaactcctcttctgccctcctactcttcttcctgctctgagttgtagtaatcctagtgctggctccaatccaaactcatagatttataaagcagagtctaatttagattcatatgtggttggaaaattgtacccataaggctagggttattgttcctgaagagaaatatatggttttgtgctgaagtgtgcaggagggttggtgtgggaggagggaggacacacaagcagcccctggtgagaaaagncactggcggncatggnatgtccacgtgaacttatnngttcttttagctngccacaaaacagcattntgccctgtggctacattaataaagatatgggctttagaataga

SEQ ID NO: 366345 - DNA, 494 bp, Homo Sapiens
agatagttgcccacttgggcaaaaacgcatgcagaaggtggagtttttaaatttaaaacatttttaaaatagcaaatgttaatattccagtttccattggtaggaaattttttagataagttcaggcatatgtatgcaatggaaagccactagaaatcttcaggcacacagataatgacaatgcaggttgctcatgaagtatttagtgaaccaggagagttttagaacaacaattatagcatgaccccattttgttagtatgtttttctgtgtgtatgtttagagcaacagagaaaaaaagatgtgggagaggacatataactacttatctctagtggtgggattctgaatgtataatacatatgttgtacttttatgtattttactttgtaacaaagtatctttcagttttataataacagtagagctattttttataaattagcctgatggaacaatcccttatgattaaagattcatgttgtaacctctaa

SEQ ID NO: 366346 - DNA, 283 bp, Homo Sapiens
ttgatcccccataggtggctgagcatcggagtggagttcgtggggaactgcgtggtgctctttgctgcactatttgccgtcatcgggaggagcagcctgaacccggggctggtgggcctttctgtgtcctactccttgcaggtatgaagggcctggaccccagggcagggccaccactgggacagaaaccacacaggtgttccaggcatctcccgagtgcccctccctgctcagtatgggcaccagccacagggtctgttctcaaggactgtgagaaaaaaaa

SEQ ID NO: 366347 - DNA, 176 bp, Homo Sapiens
tttcctggtttctaaacagtttaatcaattagcgaggtggaagccctcagtgtcagctgcagtgctaatgaggggccccacccccacccgtgggacctgcagccggactctggcccctcagcagggcctcccagtgcggtggggtggggacaaggaggggggctgggaacccagct

SEQ ID NO: 366348 - DNA, 358 bp, Homo Sapiens
gactgcatcaacgccgctgactgcatcaacgccgctgactgcatcaacgccgctgactgcatccaacgccgctgcaagtgggaaccttcaccctgaggccaggcccttcccatgctacccaacagtagacaggacaccctgtgttgttggctgcaccggggtgctgggatctgtggatccctggggcctggaagccactctcagcacatacagccactgtgttccgaggtccagtcagctggccgggaaggaattcaacacagccaaagacagaggtccatatgatgacgggtggatgctcgtgtgactttgctgaccttttatgttttctatgggcaataaaggccaagagagctca

SEQ ID NO: 366349 - DNA, 542 bp, Homo Sapiens
agtgtgagccaccgcgcctggcccaagccctccacattttcaatccaggagccttgagtctgtgttgtgtcctgacacctccaagttctagggccgtcaggacacgggagggtttggggacagagtgtccttcctctgtcctctcatcccagtcctgatggccgcttggtgagtgtctggtgccctggtggcctgccccagctctcttctggctttctgagcaggaagcgagcagaggctccacaggcttacgctgctctcctgacagccacacgcgaccctcggtgcagagtgcagaggcggctctggttcctccagccacctcagtccctctttgggaggtgatgttcccattgtttttcaaaggcctcaccttcaactgtctgtcttagaattcccctctggagggctatggcctccctatgctttcacttcccacctctctacctaagttccttcccagcacatcgccaagccctgggcctggggatgtccccaatgctgtacctggctgaccccggattaaaagcctcatccacgaa

SEQ ID NO: 366350 - DNA, 459 bp, Homo Sapiens
ggccacccgctcctgccagcacacagcctggggtccctccctcaggggctgtaagggaaggcccaccccaactcttaccaggagctgctacaggcagagcccagcactgatagggccccgcccaccgggccccgcccaccccaggccacatccccacccatctggaagtgaaggcccagggactcctccaacagacaacggacggacggatgccgctggtgctcaggaagagctagtgccttaggtgggggaaggcaggactcacgactgagagagagaggagggggatatgaccaccctgccccatctgcaggagcctgaagatccagctcaagtgccatcctgccagtggcccccagactgtggggttgggacgcctggcctctgtgtcctagaagggaccctcctgtggtctttgtcttgatttttcttaataaacggtgctatcccccccaaaaa

SEQ ID NO: 366351 - DNA, 455 bp, Homo Sapiens
taccacagctgcagtaggagcaaactaatgaagaacatgaattaaatcctataagcaaataagactactggaggacaaaaacatccactgatttacatatttttccataacttattttcttcaaggatcatacaaaatttagttcttattctaacagcaatacagtaacagaaatttttaaagtagtattttaattttatatcaaaaacttcataaggccgcagtatcactccttaacaaatcccatgatagctagtaacaaaagtagatttaagaatgacactagtgttttgtagaagtcacaaacactaaaacaacacccaaatgtgaaggtgactatgtaaggtttcatctcaaccagaatgttttggaagtgaatggagatgctattagtaattacaactagacaataaatatagctaaaactatcctaggcaaatcaaaacattctatgg

SEQ ID NO: 366352 - DNA, 829 bp, Homo Sapiens
ttttttcttgcagaatgcagtgggccagccggctcgcggacttgaaaccaggctgttgcgagcccagagctccggctgggcagcagcgctctgcgcagcctcgcgctcatctggctccggggtgagtgcagagcagggtgagggtagaagaagtaggatcctcaatacaagctcattaaagagagggaaggagggaggaggcaagaaccccctatactggaaaacaaacaacccaaggaaattgacgtggtccgagcccattttcaaagtaaggaagtataatggagatttcgctactcttctgtatgggaaggactgatggcagctagaactttagtttgtggtatgaagtgctttaaaagaaacacttggatgaaaaggaaattccttgaatgttaattgtgactgtaaacgtgttaaaactagccaaagaggacgcactggtgtcggtctctgcctttcttacctctttgataaaacccataggcaccaaaatcctggctgtttacatttctgcagatttgggaattacccatctgctaaatcatttgtcttttattttctttcaaaggctaaactgtatcgaagtctaaccctgtatttcctcctagtaaacacaatagatgttaaaagggaattcttttcccaaaataaccttttattattacaaaagccaaacataatcatttgagatataaaatcctggcaaacataatcgtggttaaaatttaatctgggccctttgggatctgtcccttcaaaggcaggtgaagttgccctttaattcctattgccaccttcattgacctcaaccactggttattttcag

SEQ ID NO: 366353 - DNA, 581 bp, Homo Sapiens
cgcgatctaactgaatagctgagttcaccaccaacctcacagaagaggaggagaaatctaagagcctcgccaagctcaagaacaagcatgaggcaatgatcactgacttggaagagcgcctccgcagggaggagaagcagcgacaggagctggagaagacccgccggaagctggagggagactccacagacctcagcgaccagatcgccgagctccaggcccagatcgcggagctcaagatgcagctggccaagaaagaggaggagctccaggccgccctggccagagtggaagaggaagctgcccagaagaacatggccctcaagaagatccgggagctggaatctcagatctctgaactccaggaagacctggagtctgagcgtgcttccaggaataaagctgagaagcagaaacgggaccttggggaagagctagaggcgctgaaaacagagttggaggacacgctggattccacagctgcccagcaggagctcaggtcaaaacgtgagcaggaggtgaacatcctgaagaagaccctggaggaggaggccaagacccacgaggcccagatccaggag

SEQ ID NO: 366354 - DNA, 422 bp, Homo Sapiens
tatagaagaggaggagaaatctaagagcctcgccaagctcaagaacaagcatgaggcaatgatcactgacttggaagagcgcctccgcagggaggagaagcagcgacaggagctggagaagacccgccggaagctggagggagactccacagacctcagcgaccagatcgccgagctccaggcccagatcgcggagctcaagatgcagctggccaagaaagaggaggagctccaggccgccctggccagagtggaagaggaagctgcccagaagaacatggccctcaagaagatccgggagctggaatctcagatctctgaactccaggaagacctggagtctgagcgtgcttccaggaataaagctgagaagcagaaacgggacctggggataggctagggcgctggggtgcgagctgaag

SEQ ID NO: 366355 - DNA, 377 bp, Homo Sapiens
aagagcagtagacagccttggacattctgaagcagaggcaagacaaacacaggcgctttgcagtctgctctgagggtatcagcccatcccccaggaggactgggatttggtatgatcaaatcctcaagccagctgggggcccaggctgaagacctggggacaggtcgattgctggaccagggcaaagaagaagccctgccatctgtgccctgtgggccttttccctggggcagcaccttgccctccccaggggatcactcacttgtcttctatgaagacggactcttcatgaggttgaatttcatgccagtttgtatttttataagtatctagaccaaaccttcaataaaccactcatctttttgttgccctcccca

SEQ ID NO: 366356 - DNA, 448 bp, Homo Sapiens
  misc_feature (28)..(28): n is a, c, g, or t
  misc_feature (303)..(303): n is a, c, g, or t
aggccctcaaaccgtaaaacccaccccnccccacaacacgtacctaaaatcaagaaaaatgtgcaagaaaggtaactgggaaaccctacttgttaaatatgtgctcccaaatgaatcctgatgtaggtaattagcccagcccacactttgaagaaccactgccttatctaatctttacaaaaatgtacattgcccaggtctttctttcctgtggatgctaactataggatatttaggttcctctgttctttgtctcccatagtggccccctttgcaaactccaaatacattatatttatttantcttgtgtcttttttcccccactagactgtgagctccttgagggccaggacttatctctgttcgcagtgccaaggacatggcctggaccatagaagatactcagttttttgttgaataaataggtaatatggatttcaaaaaaaa

SEQ ID NO: 366357 - DNA, 428 bp, Homo Sapiens
  misc_feature (14)..(14): n is a, c, g, or t
cagtgcctactacntagcagccattcaaactactatcaatgccttttacaaaatgaggtcattggattgcagagttggctttcgagaagattttgtggcctttctcagctgtctaggtgctgtaggtgctgtgtttctatggctgcaaggatgaagagaaacagaagatcaaacttaaagtcacagcaagtaggtggcagagtgaagagcagatccagcagattctctgaactctcgggtgagcatgctttcagcaccacaacacaccacaatggaacagcttatgaacttcttggaaactatttaaataacaaagagaatgacctttgtcttgagtcattcattatctgtcacaggagacatgagatatcatctttgggcaaggttcttcgccccgttttgtaatttaagtaaaactttaatgctga

SEQ ID NO: 366358 - DNA, 571 bp, Homo Sapiens
ggtggggaagagagcaaacttactcccctagtgtacaaccccacaagcacagcagagctagcattaacaaatcacaagtgggcaaaagcagtaaattctcatcttctgggaaatgttggcattaacaatcaaaaaaagattccatcaacagttgaattctgcagcaccccagctgagaaaatggctgaaacggttctaagaattttagatccagttacctgcaaagagagttcacctgataatccattttttgagtcttcaccaaccaccttacttgctacaaagaaaaatattggacgatttcatccctatactagatatgaaaatataactttcaattgctgcaatcactgccggggagaactgattgccctttaacagtcaatatgttggaggcatgctaaggtacttccttattacccaagagtcattattatttgggagctggggttcttacaatgctaggaaataatatcacttcctatttacataatgtatacacccaaaggatattttatgtactaggactccaggattaccctttctttaataaatatctcagggtaaggaa

SEQ ID NO: 366359 - DNA, 518 bp, Homo Sapiens
  misc_feature (26)..(26): n is a, c, g, or t
aaaaactccaaaaaaaggaatatccnggtgaaactctctttgccaggtaaacgggaacctaaaaatccttaaaaaccgtttccaagcccattttccccaagctggggtgcctgcaagaaattccaactgttgaatggaacctttttttgaattgttaatgcccaacatttccccagaagatgaagaatttactgcttttgcccaacttgtgatttgttaatgcctagctctgctgtgctgtggggttgtacactaggggagtaagtttgctctcttccccattgcaaggaaactaagagctcctccaataatttctgggtagctatcatttcttgacgaaactgttcccgttcacttaggagatcttgtatagccccgtgtgcatcacggttttgacgctgtaaagctgctcttgagttggttaactcatctgccattaccctgcttgcaaggaatttacttcgccatacatcacactgtattgacatacgttctaactgttcagaaagctgagctgt

SEQ ID NO: 366360 - DNA, 578 bp, Homo Sapiens
  misc_feature (24)..(24): n is a, c, g, or t
  misc_feature (45)..(45): n is a, c, g, or t
  misc_feature (56)..(56): n is a, c, g, or t
  misc_feature (181)..(181): n is a, c, g, or t
  misc_feature (294)..(324): n is a, c, g, or t
cccctccaaaaaaattgattggtncctcccccgtggttcagggtnaaaagaccccnaaagggtagcttttaaatgggaagaattgaaataatcagcatatgtaaagcgcaactaagaacccctgtgttgaaaaactccccccagtgtggggtataagaaaaaggcccgaagaggatcaccnaccctccctccttaccccctacccccacacccccataaaccaagacatgtctccccccagaagcaggtgtcccctggagacagaggatgacagggctcctacaatctgtgtannnnnnnnnnnnnnnnnnnnnnnnnnnnnnnggggcccaagaaaggggccaggagagggtacaccccagctggggagagcaaagcagatggatccagttttctgtgtgttcttacctctgtacttcctcgtagctctgctgacaaagcaagcaggcctcccgtgtccaagaccccattcctcccacttgtgtacacctaggctggcaaatcttggagcctctgggctctgaaaactagacaatgatcattaaacctggcttgagtctctgttctggcaaaaaaaa

SEQ ID NO: 366361 - DNA, 123 bp, Homo Sapiens
ttgtagagacagggtctcattatattgcctaggctagtctcaaacttactggcctcaagtaatcctccagcttcaactcccaaaagccctggaattacagggataacccattatgcctggcct

SEQ ID NO: 366362 - DNA, 428 bp, Homo Sapiens
caggcagagaacactgtcctcagaaatgggatttctgataatgaaacaggttgtccaacattttctaatacgcattatacagaacacaggttccaggaggcatcaggttggtgtgatgcagactaagggttttgtggtcaaatatccttaagaaacaaagttaagtcagtttcctttctgcaaggacttttcagccttcaatgtgtgctgtgcatggtgaatccccaaaaataatccttgagtctgtagcatttcctgaacttacatgaccaggatactctattttgcagatcaccccacagagctagggttccaccgagtatactttgcttaggttgacttagcatatctgaggtcttcaaggataaaaactgccaccccaacacccttccaaagagtctgatcaaaagcaaacgacctgccgtgtc

SEQ ID NO: 366363 - DNA, 792 bp, Homo Sapiens
  misc_feature (21)..(21): n is a, c, g, or t
  misc_feature (78)..(78): n is a, c, g, or t
  misc_feature (97)..(97): n is a, c, g, or t
  misc_feature (99)..(99): n is a, c, g, or t
  misc_feature (245)..(245): n is a, c, g, or t
ggatccctgaggttaccaagncacaggctttgctcttagcagccgccactccagtgatgaagccgttagcagactggncctctgcagagctctgcgngngaggtgcctgggcttctccggcctccaccctgggcccagagctgcctcctgagcagcgatcccaacctgcctgcccctggggctgggtctccagcagttcaggactgagttgttgctagctgctgacaggtgtggggcgaaggggngcatttgccgcatgtccccattggcagcatctccacggcttcccttgtgacacctccaaccagaatagagcaggtatgtgggagcccgcacctgctcccccagcgccccggggtcgtcttctgcctgctccttctgtcctccacactgaagagtgtgctccagctggggatgggcatgtgtgacgctggggaatggatacctgtgaaatggtggagtgtgcatcaagtctaaatagccgctcgcaggatctgggggctttttgttttcagaaacctgatctgatctttataaaaagtgctcccccactcagtcagcctgggtgtccctcccgtccaggccagcagcgctgtctggctcggcaaggaggggctgaaactggagagcccctgggaaggctcttgtgggccaggtggcagcggggagggtggctcttgttccccgccctcatcctagcgttcagcagactggccccacaccacaggtttccattttcacccttgggttaagagaaaagcagaaataaaaagtttactaatgttaaaaaaa

SEQ ID NO: 366364 - DNA, 1120 bp, Homo Sapiens
  misc_feature (975)..(986): n is a, c, g, or t
ggtccggaattctccggatcagaatttgaacagaacttaaatttgacagttaatgccgatctataattaacaaaaatgtcaacttgtggatatgctgatgattttatccagttttcaaaatatgattcctacagttcaggatatcacttattagattgtagacaaggaaaatgtacattgggacattatgtacttaagagtttttccttaagttttgcagaggaagtggttgaaaattgagctaacactagatttcgaggttactaaagaattccagttttccagtctcccacttcaattaccaggtaactataaggcaaaaatatcccaatgctgtgaacttaaggcaatattcatttcctttctacactacttggcatggtaaccatgacaaacttttattttctctttctgatttcctaatgaaatctcattatttgcaaagctttaaaatgactagatgaaggaaaaacattgttatgacccatgaccctcggagcccaaacagcaccatgaagagcatcattaaaactaagagaaagtggctatcagaaaatgaaacagctttaaaggggttccttttaagtcttgttttctattcagaatgttctgtgttttttctcaagtgtgggaatgacatttatcttagcaggttactcaactacactggatgatgtcactctaaccagtgtacggcactgacccaagtcctggggggctccttggaccaatggactattttacaaacctgggaggtgggagggatggtatatttttgataatcagacattccaatgtaatgttttccttagaggtcacacccttccccccattaatgtcatccgtgagatacatcaagtgtgttcttttctattttcgtataataaatgggctttgcttatcaacatcacaatggcaaagaagaaatatactgtacaaaactgcaggaagataaaacatgaaaactttctatgnnnnnnnnnnnncacccttgagtttcctgtcgtcttcttttgaaactgtagtgcatatgttaaaacatgtatatcatttacagtattgagtcgtgtgccactgctgtacctgatgtatccaatctggattaaacaaattatgtgcc

SEQ ID NO: 366365 - DNA, 557 bp, Homo Sapiens
agaatttacacaccaaattccctgaaagctaaagtattgttccataacttacacttgaggcaatctgctcagtgtgtaaccactttataaaaaataacttaccattgataacctggaaggtggactacttgtaagtagctggtgtttattgattaaaccatggaagttttcatgatacccaagcatgttgctgaaactgatgcatttgaaagagctgttgaaataatgcaaaactttggttttataagaatctactcatgttttaaaagtatttaactctgtagaccacaattatagaaagctcagtaatgctgctaatgacatttgtaaactatatctgtaatgtagtgcaatatttttatatttcactgggagaggcagtagagacatcatagttgtactttagtgcaagtgggggaacactccaaatagcctagagtatagtaaggtacaaagcttcaatgaaaaaagctgtattatattacattactgatgtaatcttgctgccatgctatgtatcaatagctaaaaaataataataaagactaccacagaaa

SEQ ID NO: 366366 - DNA, 468 bp, Homo Sapiens
gatttttctttttagagctaaattattcataccaatgaataagtgagtctgttctaagatataggggccattatctatttttgcttaatggactcatgtggcattgttcactatcatgcctttccatacttgtaatatttctgagtcacttattaatgtgaccaacagataaactgttcaagctaatacagcatttcctaacttcatagttgtcgcagatgtttgttctagtagcgattatttaataaacatacattgtactgaaccttactagcaactaactattttcaggtaatctcagtctgcttattcactttttccatttgatttgctaatgccacaatcatttttctagaaaatagtaggataatgtattttttcctgtctgctataatggagactatatttctgcattcattacctctcataggtgaaaatattaaattaaataatattgttttgaataag

SEQ ID NO: 366367 - DNA, 478 bp, Homo Sapiens
agatgggcctgtatgagacaggaaaaaccaacaggtttatctgaaggaccccaggtaagatgttaatctcccagcccacctcaacccagaggctactcttgacttagacctatactgaaagatctctgtcacatccaactggaaattccaggaaccaaaaagagcatccctatgggcttggaccacttacagtgtgataaggcctactatacattaggaagtggcagttctttactcgtcccctttcatcggtgcctggtactctggcaaatgatgatggggtgggagactttccattaaatcaatcaggaatgagtcaatcagcctttaggtctttagtccgggggacttggggcccacagagtataaataaccctggcctgtccagccttaatagacttctcttacattttcgtcctgtagcacgctgcctgccaaagtaagtcctggcagctggaccatctctgtaggatcgtaa

SEQ ID NO: 366368 - DNA, 302 bp, Homo Sapiens
ctccaggactgtgggaggagtgtgtccctcagactggcctgtgtcctggctcctcttaccacctcttccagaggttgtcacctgcagctgccccaggataaaggcaaggccagagaggactcctgaactcctgtgtgcctggggtggcaggggcaaacatagccaactggtggcctgagcggggccatggtgaggacacccttggtggcttgtcccacatcaagctgggaggtgacactgaggatgcattagtctgcagcgtatgataaaaacggcatttcaggccaggcgtggtggctcat

SEQ ID NO: 366369 - DNA, 1769 bp, Homo Sapiens
gagcatttctgctggctccaggactttggccatctataaagcttggcaatgagaaataagaaaattctcaaggaggacgagctcttgagtgagacccaacaagctgcttttcaccaaattgcaatggagcctttcgaaatcaatgttccaaagcccaagaggagaaatggggtgaacttctccctagctgtggtggtcatctacctgatcctgctcaccgctggcgctgggctgctggtggtccaagttctgaatctgcaggcgcggctccgggtcctggagatgtatttcctcaatgacactctggcggctgaggacagcccgtccttctccttgctgcagtcagcacaccctggagaacacctggctcagggtgcatcgaggctgcaagtcctgcaggcccaactcacctgggtccgcgtcagccatgagcacttgctgcagcgggtagacaacttcactcagaacccagggatgttcagaatcaaaggtgaacaaggcgccccaggtcttcaaggtcacaagggggccatgggcatgcctggtgcccctggcccgccgggaccacctgctgagaagggagccaagggggctatgggacgagatggagcaacaggcccctcgggaccccaaggcccaccgggagtcaagggagaggcgggcctccaaggaccccagggtgctccagggaagcaaggagccactggcaccccaggaccccaaggagagaagggcagcaaaggcgatgggggtctcattggcccaaaaggggaaactggaactaagggagagaaaggagacctgggtctcccaggaagcaaaggggacaggggcatgaaaggagatgcaggggtcatggggcctcctggagcccaggggagtaaaggtgacttcgggaggccaggcccaccaggtttggctggttttcctggagctaaaggagatcaaggacaacctggactgcagggtgttccgggccctcctggtgcagtgggacaccccaggtgccaagggtgagcctggcagtgctgggctcccctgggcgagcaggacttccagggagcccacgggagtccaggagccacaggcctgaaaggaaggcaaaggggacacaggacttcaaggacagcaaggaagaaaaggagaatcaggagttccaggcccatgcaggtgtgaagggagaacaggggagcccagggctggcaggtgcccaaggaagcctctggacaagctggccagaagggagaccagggagtgaaaggatcttctcggggagcaaggagtaaagggagaaaaaggtgaaagaggtgaaaactcagtgtccgtacaggattgtcggcagtagtaaccgaggccgggctgaagtttactacagtggtacctgggggacaatttgcgatgacgagtggcaaaattctgatgccattgtcttctgccgcatgctgggttactccaaaggaagggccctgtacaaagtgggagctggcactgggcagattctggctggataatgttcagtgtcggggcacggaagagtaccccggtggagctgcaccaagaatagctggggccatcatgactgcagccacgagggaggacgcaggcgtggagtgcagcgtctgacccggaaacccctgtcacttctctgctcccgaggtgtcctcgggctcatatgtgggaaggcagaggatctctgaggagttccctggggacaactgagcagcctctggagaggggccattaataaagctcaacatcattggcaaaaa

SEQ ID NO: 366370 - DNA, 617 bp, Homo Sapiens
tcccttcactgtacatctaattcttttgacccacttcaattttcatcatagtaggtagagccacatcttgagaaaccttaaaactatagatttactacaaaaaagatgagctaatacaaagtctaaagtaaactaaaagaggggttgatttacatctggcacaacttagtctttgttccaatcattttagaagtctcaatttaactccaggctagactccagtttgttctgggcctctcaggaattatgttttgtcatttacattgtatcagacagactacctctcaaaaaatgtatatcctaaatcttacggatgtgaaacaggtagggaagaaataagtatagactgtattagctcacaggattcacactataaagtacactgactcaaattttctctaatcattcatactcacacattcactcaagcatacatactagacataaaaattgtgcaagatcaagcatcagctttctattttaaaagccttaatttaaaaaaacttagataggctcactgcagttcctttaaaggaatattcagtactacagtactgctttaagaaaaaattcacactcagtgttaagacacagtaggtaactgctgctcgaccgct

SEQ ID NO: 366371 - DNA, 442 bp, Homo Sapiens
tgttttttgtttctttaacaaaaagttatagagacttctatgagtattgtaccgaatctaaatcacaattgggtatataatcattgagcgatattcatttttccaatcagtatgggatttatatctatttatacatgtttttaatcattttgatcaatgtttatagatttcaaggtacaaacctcactttttatgtttattcctaaatatttcttactttaagttctttagcaaatggaattggtttttaattttcttttaaaattatttattgttaatgtatggaaattcaactaatttttggtgctgttattctattctgcaaataaactgaatgtgtttgttagttccagttgcattttggctgactctttgtgattttcttcacagaaggtcatgtcatctacaaacaaataaaatttgacttctttctttctgaaaa

SEQ ID NO: 366372 - DNA, 782 bp, Homo Sapiens
  misc_feature (98)..(160): n is a, c, g, or t
tgtggctggccaccacctggggcccccagaggggctgccgcaggccgccatgcacgggcatcacacccagtactgccacatgcagaaccctcccccgnnnnnnnnnnnnnnnnnnnnnnnnnnnnnnnnnnnnnnnnnnnnnnnnnnnnnnnnnnnnnnnggcccccatgggggccacccagcctacggggcccatgcccacggccacccgccgctgccctcggcccacgtggggcacacagtgcaccaccatgggcagccccctgccccgccgccccccaccagcagcaaggccaaacccagcggcatcagcacaattgtgtagacagcctgggtaggggtcccaggctccctgaaacacctgcacaccacacagggcacgcccgggggtcgccagccgcacaccaaacccggggcacttctgttgccatctctcccctatgcccctcacggcccaaccggagccccaggagcccacagggctggtgttgtgtggaacaaaggcccagatttcatttcttgttggcaccctgggctctgctcacctcagtctgagggatgggtgggcctcagacaccatcagcccttgaaacggtgagccagccaagtagtgttgaactgcctcccccactccagctctcagctccctgtgccctaatgtacatgcatatgaaaaacccaaccctagaaaacggaagaaatgagattacaaaaacggaccaaaacaaacccccaaaactttgcttgcattaattggctctttttatttgaaacaaggggcc

SEQ ID NO: 366373 - DNA, 306 bp, Homo Sapiens
gtgcgagccaccaggcccggccagtttagaaactattaatcagatgtttaagtcactgtatttgggggaggtttgtaacagagcttagcctatacctttactaacaaacataccttcaaaactttgagagaagtttatttcccatccaggattctagtcttcggcaaattaccatcaagtttaagttgaatagagacagtttcaaatatgcaagatgtcaaaaaatgtacctcttaaacactccttctcagaaaatgactggaacaaagactaatgccacgtgcatgtgtgtgtacgctaggtgca

SEQ ID NO: 366374 - DNA, 476 bp, Homo Sapiens
taactgttctcatagggattaagtattcccacccatccctttaccgtatgtttctgatttatggccctgatgtgagttcagtatttttacatatatcagtgatgttaagagtttgtcttttagatagaatttctaccacgtaataagccttgtgtctgtagttattgaaaatatctattgaacaagttataaaaagaggaagaatccaatagtaatacgtatcctcaagctgctttaaagtataattttctgactttttattatgtagatctgtcaatcatttccttgtttttataagttcagctttagtctttgcctaaatcaatggcaactggaattaatgccaatttgatttagttatctgatgcttactattacagcttgctttaattttgcatgagcagcttcggtgtcagtatggcccagattagaatcgtctcttccgagatggtatctgttaactaaagctgaactta

SEQ ID NO: 366375 - DNA, 769 bp, Homo Sapiens
  misc_feature (695)..(724): n is a, c, g, or t
ccattcattggagtcctgcccagttgactcctgctgtagccgctcttccagggcaatgcgctcctcagggctgcctagccactgctccttgcgtgtaggcctggatctctgggagcagtgtgcccaataactgctccagcaccaagagctccagcatctgctccttggagcaggcctcaggcatcagccactggcaacacagctcacgcagctgagccagggcccctcggggccctgctgccttctcatagcagaacccccagaagcactggccagggctcttggagctgggctcacccaccatcagttccagtggactcgggaagacctggggggccagggctgatgcctcactcatctgggcagccatcctgcccctttcctgggaggggagtgcagctgcatggcccagggtactttctctgcagctggaaacacaaaggtgagcctgtgagcacagcaaggccacgaaggtcccctccttgggaccacctgagactgagtaaaaatggaagaatgggggtatcggcgtttctggcccccagtgtcagcatctttgcccacctgtgtgtccaggtgcctgagggacacactgaggtgccatggctgcttgtaccatcccttccccccgcctccccgcttttcttgagggtccctgccctgccctgtctccttggcacccttcatcccacacnnnnnnnnnnnnnnnnnnnnnnnnnnnnnncgacgcgtgggtcgacgatatcccgggaattccggaccgtaccag

SEQ ID NO: 366376 - DNA, 1114 bp, Homo Sapiens
gtgtggggcaaggcacgtgagtgaatgagttgggatgagtgagttagggcccacggattactcaatgacaggacttcaagttgattcaggcgtgttagggagctgtgattggattttgagcagggcagggatgggacagaagagtttggggaaggttcctcaggcatccgtcacggaagggacaagaagggagagagagtggatgccagggacacccagaagctgttattgtagtcaggatacgacaggggtgaggctacagacaggggacttgcaagcagggagggcagggtgacgacattcagaggaaacgacgacgaggaaatggtgacagatagggaacgaggatgaagggaagggagagccagtgacgactggcagtggagtggggagcaccgacacctctcctcctccacttgcccctcctgtggcactggacaagctagtgggcttttcgttgtaccatgggctttttcaggtggggatgtgaccagctttgaacccgtccccttaaacatgctcctcctgcactggaagagacaggcgcaggggagagactctctcccaagcaccagctcaggccccagcacagcccggaatctggctcactggccgtctgtgcccaggtgacgcaggcatgtgagctcctggcaaattagcaattgcaggctgtgctctctcctcctgctctgattgcagctgggagtgtgcaagagactggaggggatgaaaatcagctactgataaaatgtggtggctcagaaaactggagagaagactggaagtgcaaaccgccatggaaagcaagaggagatgggctcccaaggagaaagtgcaacgggccacgtgctgattgcacgcaggggattaagggagaaaacaaggtacggggacgataggaggacgaagaagaagaaaaggcactaagaaggacgaagagagacaggatatgcacccaaaaagagagcaaagaatcaagaagggcaacgagctacagaccacgcaagaggaaaaaacagatagcgagccaaacatgggacacaggcagagaagaagacaacaacgggggggaaaaatggcgtaggaacagaagaagagacaagaggaaagagag

SEQ ID NO: 366377 - DNA, 549 bp, Homo Sapiens
cggtcgattcttgatgatcccaatgcagcggactcggaggggtgagacattcagaggaaacgacgacaggaaatggtgacagatagggaacgaggatgaagggaagggagagccagtgatgactggcagtggagtggggagcaccgccacctctcctcctccacttgccccctcctgtggcactggacaagcgagtgggcttttcgttgtccatgggcttttttggtggggatgtgaccagctttgaacccttccccttaaacatgctcctcctgcacggaagagacaggggcaggggagagactctctccccagcacccagctcaggccccagcacagcccgggctctggcctcactggcgtctgtgcccagtgacgcaggcaggtgagctcctggcaaattagcattccatgctgtgttctctcctcctgctctgttgcagccgggagtgtgcagagactggaggggatgacaatcacctcccaggatgtcttcacacgtgccctccagcccctccctgcccctctttctgccgattccgctgcatt

SEQ ID NO: 366378 - DNA, 715 bp, Homo Sapiens
aacacaagagaatccggggaaggttctgggatatcgtcgacccacgcgtcagactgccggctgccaaatggttgccctgaactaccagtcagaggggcggatgctgcagctgaaccgagccaagttcacgcgccaacggtggctgcggctacgtactcaagcctgggtgcatgtgccagggcgtgttcaaccccaactcggaggaccccctgcccgggcagctcaagaagcagctggtgctccggatcatcagtggccagcatgcttcccaagccgcgcgactccatgctgggggaccgtggggagatcatcgacccctttgtggaggtggagatcattgggctccctgtggactgcagcagggagcagacccgcgtggtggacgacaacgggttcaaccccacctgggaggagaccctggttttcatggtgcacatgccggagatcgcgctggtccgcttcctcgtctgggaccacgatcccatcgggcgtgacttcattggccagaggacgctggccttcagcagcatgatgccaggctacagacacgtgtacctagaagggatggaagaggcctccatcttcgtgcactgtggctgtcagtgacaatcagcgagtaaggtcaagcaggctctgggcctaaaaggcctcttcctccgaggaccaaagaccaggctcgcatggacagtcatgctgctgggcggaccccggaccg

SEQ ID NO: 366379 - DNA, 782 bp, Homo Sapiens
  misc_feature (56)..(56): n is a, c, g, or t
  misc_feature (771)..(771): n is a, c, g, or t
atgaggtggtgattagaggatctcgggagctgaggtagcctggcaccagtgcaggntgactctgcatatctgggtccgtccccaggacccgaccaggcctggctaatcagagccctgggatgataaggtaagcaggagccacctcgggaaggggtggacaggcaggagccggtcacagctccaagggcagtgagtacggtaccacctgccaatttaaggcaactccattcagactgatgagctgggcgggggctggctgaggtggcaggcgtgcaactggcggtcccaggccacctctggacacagctgggcatccaagcatgccggcaaagcgtatgccggcactgctcagccatggttcaagccagagggtgtcggggaatgagggtagggtagggctgatggaaagagtggggactactattccttctgttgctgtgggacacctgccaggtggggtaggctttggcacacatgtgggtacctaggattccagggtcccagagaacatgccatgtctcttcttgctctcagaggggaaaaagatgaaacgtgtgtgggctccaaggggccagaaagggggactaccaaactggcactaggcaggtcctgggggaggagggtagagcctgtatccagggcagagtgcccatcctggcgccttgattctgtcatccgtgtgcatcccacgcaggtgcccaaacaccagggtgggagagggtacgaggaccgcccccccctcatgtcctctcagggaagcagcttatgccngcccaacgtgg

SEQ ID NO: 366380 - DNA, 843 bp, Homo Sapiens
ataaccggagatcccgcggaatgttttggatatcgtcgacccacgcgtacggcaggagctggcagcatgggctccccaggggctacgacaggctgggggcttctggattataagacggagaagtatgtgatgaccaggaactggcgggtgggcgccctgcagaggctgctgcagtttgggatcgtggtctatgtggtagggtgggcgctcctcgccaaaaaaggctaccaggagcgggacctggaaccccagttttccatcatcaccaaactcaaaggggtttccgtcactcagatcaaggagcttggaaaccggctgtgggatgtggccgacttcgtgaagccacctcaggtgtaaaaacaggccagtgtgtggtgttcaatgggacccacaggacctgtgagatctggagttggtgcccagtggacgagtggcgttgtgccctcgaggcccctgctggcccaggcccagaacttcacactgttcatcaaaaacacagtcaccttcagcaagttcaacttctctaagtccaatgccttggagacctgggaccccaacctattataagcactgccgctatgaaccagaattcagacccgtactgtcccgtgttccacattgggggacctcgtggccaaggctggcagggaccttcgaggcacctggcgtagctgggtggctctgtaggcatccagagttccactgggatagtgactggacaccggggactctggctgctggcctcactactccttccagctgcagggagaagaagctacaatatcaggacagaccactcactggtgggaacaaacagggtgtggcaggccgcaacctggatca

SEQ ID NO: 366381 - DNA, 750 bp, Homo Sapiens
ctagcaggagctggcagcatgggctccccaggggctacgacaggctgggggcttctggattataagacggagaagtatgtgatgaccaggaactggcgggtgggcgccctgcagaggctgctgcagtatgggatcgtggtctatgtggtagggtgggctctcctcgccaaaaaaggctaccaggagcgggacctggaaccccagttttccatcatcaccaaactcaaaggggtttccgtcactcagatcaaggagcttggaaaccggctgtgggatgtggccgacttcgtgaagccacctcagggagagaacgtgttcttcttgagtgaccaacttccttgtgacgccagcccaagttcagggcagatgcccagagcacccgtccgtcccactggctaactgctgggtcgacgaggactgccccgaaggggagggaggcacacacagccacggtgtaaaaacaggccagtgtgtggtgttcaatgggacccacaggacctgtgagatctggagttggtgcccagtggagagtggcgttgtgccctcgaggcccctgcttggcccaggtccagaacttcacactgttcatcaaaaacacagtcaccttcagcaagttcaaacttctctaagtccaatgcctttggagacctggggaccccaactattttaaagcactggcgctatgaaccacaattcagcccctactgtcccgtgttccgcattggggacctcgtggccaaggctggaggg

SEQ ID NO: 366382 - DNA, 524 bp, Homo Sapiens
ggcatatgaagcgtggagtaaaaagcaggctggtccggtccggaattctcgggatatcgtcgaccacgcgtccggtgcgcgggtctcgggatcacttcccagtgcggtgcacgaccccgcctgcagcagtgggtgtgggggcgctgctgggctcatcccgaagctcagagagcgtggggctgcccctaggctcggaatgagtctcccactgagtccgcagctcccctcctgccctggggcggggcttccctgacctgaaggcgtcgggggtgtcctggctcccagctcccaggcactcgtggggccaccgcccaggccagctggtgctaagtccgcagcctgtgcagcagcgcccggcttaggactgggagtgtgacttgaagggccgtcccgctcatccaagggacaaggaggagctcatggccacagggcctcggagggcatgaccccagcccagggaggagcaaccttcaggtggcctccaggaggcagctgggaaaagggcaagctcaccagctctcaac

SEQ ID NO: 366383 - DNA, 889 bp, Homo Sapiens
gcagatatggatatcgtgaccaggcctcgcgcgtcagctgcgtacacagagacaccagtggtggcctgcatcgtgtcggggttcctggcagcgctcctcgcactgttggtcagcttgagagacctgatagagatgatgtctatcggcacgctcctggcctacaccttggtctctgtctgtgtcttgctccttcgataccaacctgagagtgacattgatggttgtgtcaagttcttgtctgaggagcacaccaagaagaaggagggcattctggctgactgtgagaaggaagcttgttctcctgtgagtgagggggatgagttttctggcccagccaccaacacatgtggggccaagaacttaccatccttgggagacaatgagatgctcatagggaaatcagacaagtcaacctacaacgtcaaccaccccaattacggcaccgtggacatgaccacaggcatagaagctgatgaatccgaaaatatttatctcatcaagttaaagaaagctgattgggcctcattattacaccatgagaatccggctgggccttccaggcaaacatggaccggcccacagcagacgacggggcacaacggtgaccatctgcgtgctcctgctcttcatcctcatgttcatcttactgctccttcatcatacttagggttctgactagcatctcagagcagagctggtgggccatccttcctggttgttctgatcggtgcttgtggatcatgcacctctggtgtatgtcgctcctggctgttttctgcagttcctcttgatgttgtccttctgtggcgccttgcgttccctttgtgcctgccttttgccgtgtcggtgacactcgtattcatgctccagctctccacatcgatggatc

SEQ ID NO: 366384 - DNA, 941 bp, Homo Sapiens
cgggcaacagcaaggtggaggacgccacgccgtccagctcgtcggagaactacgtgcaggagacaccgcttgtgctgagccgctgcagctctgtgagctcgctgggcagcttcgagagcccgtccatcgccagctccatccccagtgaaccttgcagcgggcagggcagcggcaccatcagccctagcgagctgcccgacagccccggacagaccatgcctcccagccggagcaagacgccaccgctggcgcccgcgccacagggtccccccgaggccacccagttcagcctgcagtgggagagctacgtgaagcgcttcctggacatcgccgactgccgggagcgctgccggctgccatctgagctggacgcaggcagcgtgcgctttaccgtggagaagccagacgagaacttctcgtgcgcctccagcctcagcgcgctggccttgcacgagcactacgtgcagcaggacgtggagctgcggctgctgccctcggcctgccccgagcgcggcgggggcgccgggggcgccggcctccactttgcagggcaccggcggcgggaggaggggccggcgcccacgggttctcgccctcgcggcgccgcggaccaggagctggaactgctgcgggagtgcctgggagccgccgtgcctgcccggctgcgcaaggtggcctccgcgctggtgccaggtcgccgcgcactccccgtgcccggtctacatgtttggtgcccgccccggccccggcccaaggagggacgactcctgcactgactccgcggagggcaacgccggggtcaacttctctagcgccggcctcggttcagcgaagagacgctgcagggaccccccaggacccagccggggaccagcggcaggcaagacccatcggcggccaattctgccagaatgccctggggacccgggcacaagggggag

SEQ ID NO: 366385 - DNA, 263 bp, Homo Sapiens
cttaatccgggatatcgtcgacccaccgcgtcggcgaatgcacaggaagatacgatggaaacacacctagagactgagctggacctgagcacaatcacaacagctggccgaatcagtgaccataaacagcagctagcttaactgagatcattggtagccaggggttgctaccaaactttgtaacctcaaggacaaaatgaggaagatgtgttttgttttgtttagagtccacaatgaacacatcttcctcatttttggactct

SEQ ID NO: 366386 - DNA, 790 bp, Homo Sapiens
  misc_feature (249)..(278): n is a, c, g, or t
ctggtacggtcggaattccgggatatcgtcgacccacgcgtcgacgcgtcccatgcagccctggcagtgcctccgtgcgctttgccctggcctggtgggagaggacggcggagggcagagcccgctctcccagggaggaggctggaccgagggaccctgggggccgaggggagccagatcctggagcggagcagcccccccatgctgtctgcggacgatgcggagtacccgcgggagtaccggaccctnnnnnnnnnnnnnnnnnnnnnnnnnnnnnnccggcgcttctccaacgtggggctggtgcacacgtccgagcggcggcacacggtgatcgcggcccagagtctggaggcgctcagcgggctccagaaggcggacgccgaccgcaagcgtgatgccttcatggaccacctgaagagcaagtacccacagcacgccctggccctgcgaggccagcaggacaggatgcgagagcaggttggcggctggaccgtggaaccccgtatgcctcctcagctccctctgctcccaactccatggcgactccgacccctccggggcttggccagccgtgccagacccgcagctcaacgccagaatcagggagcccagcccgggcttggcagaccaggcggcaaaggttgtcctacgcttccgccgagtcgctggagaccatgtcggaaggccgagcttgccccttgggcttcagcgaggaatgaaccggttccgaacagagccttgcctctctcccgcttcggccagccagaaccaaagcttgcgctcccca

SEQ ID NO: 366387 - DNA, 1079 bp, Homo Sapiens
aatgactaaaccttggttagcaagcaggctgggtacggcccggaattccgggatatcgtcgacccacgcgtccgggagcaggctgtgcggtccgtgagcgtgcgccagagggtacctggctctgtggaggggccctctggtatgtgtgtccctgtccttctggggcgtggatggtgcctgggacccagctggcaaccagttgaagacgttctccttggaagctcttgggccctgaggactttgcctggggcattggccctgccatggcgttccggagggccgagggcacgtctatgatccaggccctggccatgacggtggccgagatccccgtgttcctgtacacgacgtttgggcagtctgcattctcccagctaccggtttgacagccaggcctgcggaaagtcctctttgccacggcccgggggactgtggccctggccctgactgcccaccagctgaagaggcgacggaggaggaagaagcaggttggtcccgagatgggaggggagccagctgggcacggtgcccctccctatcctcttggccaggaaggtcccttcagcgaagaaaggatactccagccggagagtccagagccccagcagcaagagcaacgacaccctgagtggcatctcttccattgagcccagcaagcactcgggctcctcccacagtgtggcctcgatgatggcagtgaactcatccagccccacagccgcgtgctcgggactatgggatgccagagggatggaggagtctctgaccaccagcgacggcaatgcagagagcctgtacatgcaaggcatggagctgtttgaggaagctctgcagaagtgggagcaggcactaagcgtgggccagcggggggacagcggcagcacccccaatgcccagggacggccttccggaacccagagactgcatcagagccactgtctgagccagagttcacagcggaaggagtttgcagagaagctggagtccctgctgcaccgtgcctaccacctgcaggaggagttcggctccaccttccccgcagacagcatgctgctagacctcgagaggaccccatgccg

SEQ ID NO: 366388 - DNA, 1588 bp, Homo Sapiens
  misc_feature (647)..(691): n is a, c, g, or t
  misc_feature (780)..(788): n is a, c, g, or t
  misc_feature (1126)..(1126): n is a, c, g, or t
  misc_feature (1282)..(1282): n is a, c, g, or t
  misc_feature (1404)..(1415): n is a, c, g, or t
  misc_feature (1439)..(1439): n is a, c, g, or t
  misc_feature (1456)..(1509): n is a, c, g, or t
gccacaaaaaaataaccgcctggcaccggatccggaattcccgggatcgggtgggcccacgcgggacagggcccgggcgaaattacggagggggctgggctggggcgcaatggaggccgagccaatcccggactcctcaatgccagcaaagcttctggcgccgccctgtctgaacctggagcggctgggaggatccccctcccaggagaagccgaggaccccaggatgctgcagaatcagtgagaggtgcgtaaggccaaaccccattccccggaccccgctagcacttcaccacctgcctcagagatcaaggggccatgacctctctttgctggggctatccagaagtggcaatcttataataattactgaaacttacaaagaggttctggcgcccagagacacttggggtcatccacggatcacaggccatgcaattccatgtctctggggctgatgtacgcactccccagggatcatccaccggctatggagggcaactcaataaccacgacccatgataagactcgtaatcatattataggcaagccagaaccggcggtgagacaccgctccgtaagctccaacctacatccggaaggctaagtacaaacgaatcaagtcaaccccaaggagctcccaagctnnnnnnnnnnnnnnnnnnnnnnnnnnnnnnnnnnnnnnnnnnnnnggtcgggttaccggcaaaagcaacgcatctcgatcgtcctttaaacagaaaaacacccacaaagcgaaccccaaaaactctcccccccnnnnnnnnnccgtctcgaatccaccctgacataaagctccaccatgggctctttgtttaactccactccctttcagaccctttcaacacccgtcccccactttaaacagggggcgccgcgtgtttcacccgttgcaccccccctccgccgcggcccacccatgacaatactcttttaaaacgcccggcctccttcctgccctaatccacccccatgtaataaagcgcggcggaacgccaccccttttgccgccacatcctctttattacaaaaagggcgtaagccgtaccgatgtgggcgggcacccctttggagtcaacacctccgccgcactcccccactcctcngttcgaacggagaaaaaaacaacccttttcaccccacccacttatccctgtattcctcagccaaacaacaccccgacctgtcccgcacattcccccctctccgcccccccaccctattctccacgtctgcctcaccacaaacacaacaccctattntattcctccccccctctttaccttttttccaccccacccctccgtatatttatgcgtcttatctaacacaacccagagggaaaataatgggcccaaaaaaactaacaaccagacccggtggnnnnnnnnnnnnaaaacaaagtgtgtccaagaacanactaacccgattgcctnnnnnnnnnnnnnnnnnnnnnnnnnnnnnnnnnnnnnnnnnnnnnnnnnnnnnncagtaagacccccttatcactaatgaacatcaatccatttcgaacccactaacccacctattccaatactacacccccc

SEQ ID NO: 366389 - DNA, 1002 bp, Homo Sapiens
  misc_feature (834)..(922): n is a, c, g, or t
cgctggtaccggtccggaatcctcgggatatcgtcgacccacgcgtcgggcctgctgctgctcccacctcttcgatgctgcagctggtacaccggccctccgtccgctcgttgtgctgcaaggactcctcaagaagcgcctcctgcccgcacagacactgcatcacgaaaatcaagcggaatttcagcagcgtggctgcctcctcgggcaacacgaccctcaacggggaggatggcgtggagcagacggccatcaaggggtctctgaagcgccccatacacattccgacgcatccagctgcctgctcgaggacacaattgcaagcatgtgcagggctttgacctggagtcatacctgcagctgaaatgcgagagagggacctggagctgtcctgtgtgcaataaaaccgctctgctggagggcctggaggtggatcagtacatgtggggaatcctgaatgccaatccaacactccgagtttgaagaggtcaccatcgatacccacgtgcagctggcggccggtgcccatcaagtcggacttacacatcaaggacgaccctgatggcatcccctaccaagcggttcaagacccatgagtcccagccagatgatcatgcccaatgtcatgggagatgatcgcagccctgggacacgaagacgataccatataccaaccggccgcacaagagggagcaaacaaagaagaacgagaaggaaaagaaaaagggaacaaaaacaggaaagccgcaaggaagcgagaggacaagcacacagaaaccggacccgaagggagcaacgagccaccacacgcacagcggcaggaagaggggagannnnnnnnnnnnnnnnnnnnnnnnnnnnnnnnnnnnnnnnnnnnnnnnnnnnnnnnnnnnnnnnnnnnnnnnnnnnnnnnnnnnnnnnnctaggaggacggcggaggcacgaagcaagcgcccgaaaggaacggcgcggggcgaccggggacggcaagacgcgggcaca

SEQ ID NO: 366390 - DNA, 1061 bp, Homo Sapiens
ggtaccggcccggaatttcgggatatcgtcgacccacgctgtcgcccacgcgtccgcagacatcatcctgacagacgacaatttcagcagcatcgtcaacggcagtgatgtggggcctgcaacgtctatgacagcatctccaaattcttgacagttccagcttcaccgtcaacgtggtggccgtgattgtggccttcacaggcgcctgcatcacgcaggactcccctctgaaggccgtgcagatgctctgggtgaacctcatcatggacacgtttgcctcgctggcactggccactgagccgcccacggagaccctgctgctgaggaagccgtacggccgcaacaagccgctcatctccaggaccatgatgaagaacatcctgggccatgctgtctaccagcttgccctcatcttcaccctgctctttgttggcgagaagatgttccagatcgacagcgggaggaacgcgccccatgcatacgccaccctacagaacatatacacatcatcttcaaacaccttcgtcatgatgcagcatcttcaaaccgagatcaacgcccgcaagatccacggcgagcgcaattgtcatatgacaggcatcttccggaaacccatcttctgcaccatcgtgctgggcacctttgccaatccagatagtgatcgtgcacgttggcagggacaccaatcaagctgctctccactgcagctggaccatggatgtgtgatatacctaggatcagagacccgatgaggacaagtacatcgtaacaaaccgaccagagactcagctcctcaggagcagcaggcaccacgaaggaggatccgcagaagaccacagagccggaaaaatacgaacgacgacgcgaggccaaccgcgctcgcacacaaaacccaataaaactgataaacgactcctaccacccaaacgacctacacacaccaccccaacagaagctcaccttgcaaaacacccacaatcctcataaagtaaccagactacacaaggatcttgaccactctcacaatacttcaattttttcctcttatcaccttctctaaa

SEQ ID NO: 366391 - DNA, 735 bp, Homo Sapiens
gccgccgggaagcgggactatattggcccaaggcctgaggaaggaggtgcctctgaaggaaacacctacccgtgcccgggctctgatgcccccatcacctccaatcaccaccataacgacaaccatcaccacacccaccagtccggcaacggcaagaggagcaagagcaaggaccgcaagggggatgcgcggcaccaggccaagtccacaggctggtgagttccgatgacaacttggacagtgatagcggcttcctggcgagtgggaggccccctggggagcctggtggtcccttctgcctggaggttccagatgggtcctaccgggacttgagcttcaaggggcgctcgggcgggtcggaaggccgctgccttgcctgcactggcatgtccatgtcactggatggacagtcggtcaagcgaagtgcctggcataccatgatggtcagccagggccgggatggatacccgggggccgggccaggcaaggggctcctgggtccggagaccaaggccaaagccaggacttatcactatctgcaggtgccgcaagatgactggggggttaccccaccggtggcaaggatggggagatcccctgccgcaggatgcggagcggcagctacatcaaagccatgggggatgaggagagcggagactcagacggcagccccaagacatctcccaaagcagtcgcccgacgcttcaccacccgtcgctcctccagcgtggaccc

SEQ ID NO: 366392 - DNA, 483 bp, Homo Sapiens
gcaggctgtacggccggaatttcgggatatcgtcgacccacgcgtcgacgtaggccgtgaaggcgggcgtggagtggccccgagcttcacgagcagctgctgtataccgagaaggacgacaccgcgctacagagaccccatactcgggacagcaccatctccctcttccaggccatgcagaagggcctggttctccggcagcacggcatccgcctgctggaggcccagatcgccacgggcggcatcatcgaccccgtgcacagccaccgcgtgcctgtggacgtggcctaccagcgcggctacttcagatgaggagatgaaccgcgtcctggcggaccccagcgacgacaccaagggcttctttgaccccaacacgcacgagaacctcacgtacctgcagctactggagcgctgcgtggaggaccccgagacgggcctgtgccattctgccactcacggataaggctgccaaggcggggcctt

SEQ ID NO: 366393 - DNA, 970 bp, Homo Sapiens
atccaggctatggctatagacagtggtgaaaaacaggtggtaccggccggaattcccgggatatcgtcgaccacgcgtcgcttagcaggaattctacggttatatgaggttcattcattgtgtggcctgtatcagtgcttcattcctgtttatggctgaataatgttccactgtatgtacatatgtatgtataccacacttgtatatccatttatttactggaggatatctgggttatgacagtatatttcaggagtccccaagatcatcctcccccttgatctactgctctttgtatcttatatgacctgtgcagaactatttatctggaaattaggtgatggttaactaaatatagttcttctaaagactcattttccgttggtattacatcctgaggagactttaactcaatctcccaatacatttgatcatcaatatcagtattaccacatgacttatttgcatgaggtaatcaaatctaaccagccatgccagtgttacccatattgcatgttgtggtagtagatgcagccccccaaaataaaagtcaaaagatgctggcacattcctgaggttcttctcagccactaacaattggtgtagttcatcatcacctggaatgaccaaaatgtctcccatggaaatgcggctcagctgtgtaggctacccattttaaactttgtcaggttccgaggcaagtgctggcttgagtggtctcgctctccaccttggctatgatgaatactgctgctgtgaaccattccggtatacgttcctcgctgtggttcattcccttaagtatatacttggagtggtatttactggtctccttgattactcgtttaactttgccgaactcccactggttccaaccgcatcagtgtaaatgcctcaacgttgatgacagtctcaccacatccgtctgggacaacacttgttgtcttgactaaacccaacggcgacaggt

SEQ ID NO: 366394 - DNA, 1334 bp, Homo Sapiens
atggtctcgttcttttttctgcctgtttcgctgtgtcttcctcttcttgcttcgttgtgtctcgtctgctctcggcttttgttctgctcggtgtctcctttgtgtttttttctgcttcttttttctgctttgtggttcggctcgtttgcttgtcgcttccttcctctgtgtgtgcccctgtgttcctgggcgctgtgtgtccctttctttcgtcttttaaatgtgcgaggtcgtttgcccttcttcttctgttttttccatcagctttggtactcctgctcatccctcagggtgccatccctgtctttggggctactctgtcatgatcgccaaggtgaaagattcgctcttgtattccctattctgtaccgttgatattcagaggtttcaaccggtactcttcactgggcttggtcacctgggttccatttcaacaagttatgcctggtcaggtatcccggctcagccactctcactggtacaggaagcagccagcgagtgtattaggttccagtgcccacagggttctgcgcagtccatgggggcctgggccacaggcccgtgcccagtccatgcagggtgctggtgctggcaaaggtgcccaggtctcggggcgctgctcccaggggcaacagccccgaggaggctctgctcatcccctgcctccttctccttgggtttcgcatcctcctcagcaaatttgattttgcacacaatctcgatcggcatctgtccccaggctgctgggactggccagagcctccctgccctgtccctccctagccagcagccctggtgccctcccgagtggcagtggtggcagcggctgctcttctaaactcagggcaagcgggaagaggacagggacagggtgggggcccgaggtgggggagtcactcccactcccagcagctccgcagccctggtgctgcctctgccgctgctgcctctgctgccgcttgtctctctcctcgatcgtctccttgtggcttcccttatcagcaccagcacagctgtcagcccctgcgtgtgtccctgcgagcgagcgagtgagcgagggagcgagcgctgctccgccacgccgcgcagccccagccgctccgctcagcatgtgctccggagccctccccacgcttaataattcaggacatgtcaacagcgtttcaccggcagcacgggcgtcaggagccaggccaggggagggggcagtccccagcccaggacagagatcccaagactggggctatcccccaaactcctgctgcaccctagccgcatcactgggtcgtacgcgtgggtcgacgatatcccgaaacgtccggaccgtaccagca

SEQ ID NO: 366395 - DNA, 805 bp, Homo Sapiens
  misc_feature (777)..(778): n is a, c, g, or t
gggcgggctacctcagttctcgggcgtacggcgcggcctgtcctactgctgccggcgccgcggccgtcatggggttcctgaaactgattgagattgagaactttaagtcgtacaagggtcgacagattatcggaccatttcagaggttcaccgccatcattggacccaatggctctggtaagtcaaatctcatggatgccatcagctttgtgctaggtgaaaaaaccagcaacctgcgggtaaagaccctgcgggacctgatccatggagctcctgtgggcaagccagctgccaaccgggcctttgtcagcatggtctactctgaggagggtgctgaggaccgtacctttgcccgtgtcattgtaggaggttcttctgagtacaagatcaacaacaaagtggtccaactacatgagtacagtgaggaattagagaagttgggcattctcatcaaagctcgtaacttcctcgttttccagggtgctgtggaatctattgccatgaagaaccccaaagagaggacagctctatttgaagagattagtcgttctggggagctggcgcaggagtatgacaagcgaaagaaggaaatggtgaaggctgaagaggacacacagtttaattaccatcgccagaaaaatattgcggctgaacgcaaggaagcaaagcagggagaaggaagagaggctgaccggtaccagcgccctgaagggatgaagtagtacgggcctcagggtacaagctgcagcttcttttaagcttttacccataatgaanngtgggaaattgaaggaaagctcaacca

SEQ ID NO: 366396 - DNA, 918 bp, Homo Sapiens
  misc_feature (812)..(812): n is a, c, g, or t
  misc_feature (832)..(832): n is a, c, g, or t
  misc_feature (900)..(900): n is a, c, g, or t
taagcagggctggtacggctccggaattcccgggatatcgtcgacccacgcgtcgggaaggtgggtcttaaaacagaccaaaccccgccccgcccccaacaactctgcttttagggaggcctccgaaatgcagataggcggttgagtggggtcctgggaagagcgctgaatccctctgcttgctgcctggtgtgggcctttggaaagcatcttgccttgggacaggatttctaaaattctgtgattcagatttgtcagggaatgcacagtgaagcttgcttaaaggcactggccagcagtgtgtgactttggcttttgggatcacaccctgtaatcgggcccgtggaagcagcgtcaaagaggggtcttggagctcctatggagcagactgccccccgagcagtgtccccagcctagccctgtgagaccccatggggacacgggtgcctatgtattttcactaaaatatacatggtagctccatttactgatgcggttgtaatgagctcacatcgtgtctgaagagatggcaccagggaaaggtgtgccataagctgctccagagcttttggtatgctgagtgttgacagagctgcactcttaacatcaagagaactgtcaggagcccagaaccaaccccaggtcttggtctccattggcgagaacacaggacgtggtggttcctgagcagagagggatctgcagatacaggcttggcgctcggggtggtctcgtggccaactcttcatgcccctgccgttgtagtgggaacctcttacatgttttagttttgctttcacctaaaataatgntgatctaggagatagagaantaggggtggttattttttccagattgggagatttgaaagtccctgacttgatttcagccatttttccntagttgcttgttcggatg

SEQ ID NO: 366397 - DNA, 960 bp, Homo Sapiens
agcgggcagtgcgtggccgcccggggccatggcgacactcagcttcgtcttcctgctgctgggggcagtgtcctggcctccggcttctgcctccggccaggagttctggcccggacaatcggcggccgatattctgtcgggggcggcttcccgcagacggtatcttctgtatgacgtcaaccccccggaaggcttcaacctgcgcagggatgtctatatccgaatcgcctctctcctgaagactctgctgaagacggaggagtgggtgcttgtcctgcctccatggggccgcctctatcactggcagagtcctgacatccaccaggtccggattccctggtctgagttttttgatcttccaagtctcaataaaaacatccccgtcatcgagtatgagcagttcatcgcagaatctggtgggccctttattgaccaggtttacgtcctgcaaagttacgcagaggggtggaaagaagggacctgggaagagaaggtggacgagcggccgtgtattgatcagctcctgtactcccaggacaagcacgagtactacagaggatggctttggggttatgaggagaccaggggtctaaacgtctcctgtctgtccgtccagggctcagcctccatcgtggcgcccctgctgctgagaaacacatcagccccggtccgtgatgttagacagagccgaaaacctacttcacgaccactatggagggaaagaatactggggataccgttcgcagcatggtgtttgccaggcacctgcgggaggtgggagacgagtttcaggagcagcacattctcaagctccacggacgaacgcagacaggatctctcttccagggaggatggatgaagaatgaaggtcacagctggggactccggctaggagggcccctaactgggaagtcaccttgagcacacaacgcattcatctggggcacaaacggagtccca

SEQ ID NO: 366398 - DNA, 962 bp, Homo Sapiens
  misc_feature (420)..(431): n is a, c, g, or t
  misc_feature (593)..(602): n is a, c, g, or t
gttagaacctcgttaaaagcggctggtacggcccggaattcccgggatatcgtcgacccacgcgtccggttatctgtcagccccagacaacctattgataccacagctgaactttcttctaagtgccacagtgaaagagcagatcgtaaaacaatctacagaattagtctgcagagcctatggtgaagtgtatgcagccgtgatgaatccaatcaatgaatacaaagatccagagaacattcttcaccgatcgccgcagcaagtgcagacgcttctttcctgattatcttatttcattgtgttagcaaaatatgacctccctaaaacactgaaggttattttttattctttgaatttttactttataatttgatagttacagttttctttgtatcataaggattgtaaggtcccgataannnnnnnnnnnngggtctcagtaacagggaagtaagtaacatgttgacctgagctagtatggctgtgtatctactctaaatgagatgatctattttttggctagccatctctccagctctgcagttttcacggtattcaggaagcataaagtagtatgaaccggttggaagaannnnnnnnnnacaagactagttctaaattaacagcttataaaaaattggtctaaatttaataatccgtataaggaatatgaccctaaataaagtgtctcctttacctaaagaatcattggcttcctttactatgaggtaggcctaccttagtaagcttttctgaacctaacctaagttttgtggcccccaaaatgtctgcccttaaaaagttgtacgccgagagaaaaatacacgcgaatggggcccggggttactggcacgggaacccccttcggcaactagcaaacataattttctggcgggcactcctcaggcattcattcaccccgctcttgaaacgggatcacaacgtacacggagtcccggact

SEQ ID NO: 366399 - DNA, 546 bp, Homo Sapiens
caacaaattacattaatagattttcactgttattgtttatcctgggagaaagcatacttgtgaacttttttaggtactgtgctttggaaccaaatttggaagtgagatgaaatgtcagctgtactctcctggttaggtatgatttcagggtcaggtatgcctgataaatgaagtgagatgctttaactttgttctagaatagtttctactgcatgggaatgatctgttccttgaggatttgtcacagtctgcccacagtggactggatttggcatgtaggatgttaatttctatttactttgcaagaaaaatacagtttagcaagcaacagaaacatactgaacatgaacctcaccgtccctctctcagctgtagctccttctgcgtctgcaacctggcttgttcccacgacaaaggaacatcatattttttcaaatcgtttttaaaaaaatacacacatatctgaccatcttcactcagcgcctctgagaaaacaatacaaaaacagataaagaggccagcctggccaaccctgtctcaaaaaaa

SEQ ID NO: 366400 - DNA, 830 bp, Homo Sapiens
gagaccccacaacgggggaccccccggggggacccgcacatcgggacggtgggcccccaccgtttccggcccccaaggcaacactttcggagtagtcggggatcaacagcatcataagctgttcgcaaacctgttagctggccagaaatcacagctatgtcctgagtcttaaatgtctcctcaatatcggcgctcaacgtgctccacttatctgcttcctgaagagattcggcagcaagttgcattctggacttcacttggtcaatttctaccaacacctgcatggattgagatgtgtcctgttcaaattttttaatgtcctccttgacaagaatcatctgttctttcaggaaagatgcctcctgttttagggcttcaacatcacggagcactttgggcatgttctggagagcttggtgacttgtttcctccacggcgtggttcacctcttggatgaacagctgcagcttcatcaccagggtggctgcgtggccatccgccttcccggacgccgcctccttggagccggccctgaaggccgcattgatccactccttcacgtcgaagtcgtctgccaggaacttggagaagtccatggcggaactgcctcaggcctggcgtccagaacttaagagttggctccgggcggcaacggggatgcagaagcgagcgagcctgcgagagcaccgaggctagcctccgaggcgaaccccagaaacgccaggacgggtaacttgcccctttgcgccctcgtgccgaattcgacacccagcctcgtaccttatgccgttatggtactgcctcgtttataccccgtgttacaactagcg

SEQ ID NO: 366401 - DNA, 897 bp, Homo Sapiens
ccagtaatatggaacgatgggtttgctcagcttggaagagactgggaaagcaggacctgatgctgagctcacgcatgttgcctgcaaacactccacggcagagactgtccatggctagagacgccacctcaggtccaaggcggcgctgggcaaaactgtgcacagtctcatcaggctctttgccccggggcttggtcagctccctcagcccagcccaaaacagaggtttggagaaggggggtgaagggcggagtagccccctgaggccagtgggtagggcatgcagggcaccgcccacgtagaggaacctgttctgggcagctgggtggtctccccggacaggcagcacttctgaatccaagccaagctcagaaaccaggagcaaggtccgggcccctagggctcccgctggcctaattccccgaggtccaagctcaaagatagcaccattagggcctcgaacggagcgaatccagcctcccagacgctcactgctctccactaggaccaccttaggggggcagggggcccggctcaggtggtaactggcggccaagccgctgatgcctccgcccagcacgaccacggtccggcccatgcggaaacccacaataggtagggatgagagaaaatgagggagaaggagatcgaggtcctaagaccgtaccccgccggcgctctgctgggtgcagataagggccacaccctcgctatcggccctcgcagggctcgggcggcgggcagtacgcctgagttctgaggtgctctgcttgccacacctctgtaggccaacaagtgcttcaaatccgctactcccacccccagccttttcggtctctcctacgctccgtccagtcaatctcgcggcacgcgcctaccatcggaagaatccggacc

SEQ ID NO: 366402 - DNA, 1099 bp, Homo Sapiens
  misc_feature (275)..(378): n is a, c, g, or t
cagcgaggcagggccccagtaattatggacccgatgggtttgcttcagcctggaaagagaactgggaaagcaggggccttatgctgagctcaacggctgttgcctgcaaaccattcccggggcagagactgtccatggctacaggtccaaggggggcgctgggcaaaacctgtgcacagtctcatcaggctctttgccccggggcttgggtcagctccctcagcccagcccaaaaacagaggttggagaaggggggtgaagggcggagtagcccnnnnnnnnnnnnnnnnnnnnnnnnnnnnnnnnnnnnnnnnnnnnnnnnnnnnnnnnnnnnnnnnnnnnnnnnnnnnnnnnnnnnnnnnnnnnnnnnnnnnnnnngccagtgggtagggcatgcagggcaccgcccacgtagaggaacctgttctgggcagctgggtggtctccccggacaggcagcacttctgaatccaagccaagctcagaaacctgctctccacatgccctcagaagaggagaaactaagggaagatctgacccaccaaacatacttcctcccctaaactctattccccaatggaagccccctccacaacctctcctagacatcccacaagcctctcaccaggagcaaggtccgggcccctagggctcccgctggcctaattccccgaggtccaagctcaaagatagcaccattagggcctcgaacggagcgaatccagcctcccagacgctcactgctctccactaggaccaccttaggggggcagggggcccggctcaggtggtaactggcggccaagccgctgatgcctccgcccagcacgaccacggtccggcccatgcggaaacccacaataggtagggatgagagaaaatgagggagaaggagatcgaggtcctaagaccgtaccccgccggcgctctgctgggtgcagataagggccacaccctcgctatcggccctcgcagggctcgggcggcgggcagtacgcctgagttctgaggtgctctgcttgccacacctctgtaggccaacaagtgcttcaaatccgctactcccacccccagccttttcggtctctcctacgctccg

SEQ ID NO: 366403 - DNA, 922 bp, Homo Sapiens
  misc_feature (122)..(163): n is a, c, g, or t
ggagcgaggcctgggtggcgattcaaagacgaggccaccgcgaccgcattgcggctgccgccgcggccgggctgagcccttagggagcgagagtgggaggcggcccctgactccgcgctgannnnnnnnnnnnnnnnnnnnnnnnnnnnnnnnnnnnnnnnnnagcggctggccggccgcatgctgcagatggtgaagaccctggcccagttcaccatcgcgctggaagacatgcgcgatatgggcccagccgccgcctccggggagcctgccgggggcagcagcactgacgccgaggagcctggggaggcccaggacatgcggaagcacgtggccatgaccctgctggacacagagcagtcgtatgtggagtcgctgcgcaccctgatgcagggctacatgcagccgctgaagcagccagagaactccgtgctctgtgacccttcactggtggacgagatcttcgaccagatccccgagctcctggagcaccacgagcaattcctggagcaggttcggcactgcatgcagacctggcatgcccagcagaaggtgggagccctgctcgtccagtcggtgagtggccccgctgctgccaattcccacaagcacaggccctccctggaaggggctggatgtggccacggaccccacccccacccatcccacctggatactgactctgtttccagaactggacctagaacttggctagacatggggacttaccccagcccccgggttggacctgaacttgggaacctccccccaacccaaaagtttgccccgaattcggggacgggactcccgacccccggccagaaaactggacttctgagacccgggaacccataccccgctttcctgggctggggccctggaacgggaaccttaaatccctggaacccaaaggctggggggc

SEQ ID NO: 366404 - DNA, 881 bp, Homo Sapiens
  misc_feature (860)..(860): n is a, c, g, or t
catggacatagacaactgttcagtgatggctgtggactgtgaagacagacgatattgttttcagatcacctctttcgatggaaaaaaatcttcaattttgcaagcagagagtaaaaaagatcatgaagagtggatctgtacaataaacaacatatctaaacaaatatacttaagtgaaaatccagaggaaactgctgcacgagtaaatcaatcagctctggaagctgtcactccttccccatctttccagcagaggcacgagagcctgcggccagcagcaggacaatctcggccaccgacagctcgaaccagcagttcaggatccttaggatctgagtctacaaatttggctgccctctctctagattctcttgttgccccagacaccccaatacagtttgacataatttctcctgtgtgtgaagatcagcctggccaggcaaaagcctttggccagggaggcaggcgtacaaatccatttggagaatctggaggaagtacaaaatctgaaactgaagattctattcttcatcagttatttattgtccgattccttggttcaatggaggtgaaatcagatgaccatccagatgttgtttatgaaactatgcgccaaatcttagctgcccgggccatccataacatctttcgtatgacagaatcgcatttattaggtcacttgtgactgtttaaagttaattgattccacagacacaaggttacaaggctcacgtttccattaccttggtgtagctttgtatgctacacacccaggaaaaataagcgccctttttgggatttttgttcttcgggacatcaaggcggggaagaaaagtggaaaagtaatcttggtcattccnagtctggctattaataatttt

SEQ ID NO: 366405 - DNA, 784 bp, Homo Sapiens
tgcaccggtatccgcactttagtgagtgccttatggttgtgattgcttgtgtctatgagttggagatcattcctggacgtctttgcatagtctagtctcttctagtttatgccttttaattatgcccggcttgttgttcattgcacctgtagacccagctacttggaatggctgatgccggagttatcccttgaggtcctgtggagtttgatggttacaagtgagctattgtgtgcaccactactctgtcagcctgggtgacagagtgagacctcatctctgataccttcacaaaaaatgtttgttttaaagagtacatgaactatataagtggaccaaaggaatccgtatctgatgactgggtataattcttgagcctgaattccccatctgaatgattgttaaactaaaaaaaagagatgctaaaattaggagattcactgttagaaaagtgtgctctgtagataagcccaagggtgtgtcttgacaacctttggctagtgctgaagaggttaggcattaacttgtggatttatttgactgtttcaacagaagccaagaatagagatggggttgttcaggaaaaatctgtgaggaccctcttttctgaatgtgtgaatcaatgtgacatacgtagaagacccacaagatttttgagaatgttctaccatcagaaacacttccaactgggcctaaaagggacagagacagaaaaaaatgaaagaagattgtgagactgcccgacgcgtggttcgacgatatccctaaattccgaccggtaccg

SEQ ID NO: 366406 - DNA, 1079 bp, Homo Sapiens
  misc_feature (972)..(1022): n is a, c, g, or t
cgcggtataaggtagcgaggcctgggtggcgaaatcgggcacgaggggcagccccaagttccaacttgcaagccctgtaactaagctgtctataaaccccagcagggaaggccaagggatggtctcacccatgcccttccctttggccaacatgagtcctgcagtggggagcttagcccctgctcccacctaacactctacagttagcacccaggggttgattcaggaagttcttcctttttctagcctgcatccttcctggccaccccctttatttctcagtctgacctggtgcactcttggcaagtgagtccattgcagtcccaggtggatatttaatgagcactcggactgtttcctccaagtcagctagtggcctgccctcctccttttcaagaagtctggggcacagagcctcctctggctgcctcttctcttctctgagcctctgggagccttcaggcaaaacctggcagttctcaggaacccagacctgaggctccagctccgcggccaccagagattcagtgtgcagtgccgaaggcagtcacccccaggcagttcctgctgtcaggccgcaagcctagagcgcaggatcccagcagcccagggaacagggccggcgtgtgagctgctgccgtggggtctgtggtagggctccccatctcccaaccctcagcaagaagagtcctgaaccctgacccacctgcccagagaggagctggggcctccagacagaccccactgcagccagatgaaggcccctgtcaaaagaaggggcaggctggggggaaaagcagaaagaatggcccccagtccaaactcctggatcccctccatgagagaggggctcctcctggaacagaagctctcatacccaggcccagtgcacaagaccaccagcagagacccaccgcccttcctggcagagcaccacttcctggcagtgcagctccgaggcaccactactgnnnnnnnnnnnnnnnnnnnnnnnnnnnnnnnnnnnnnnnnnnnnnnnnnnnggacgcgtgggcgcacgcgtgggtcgacgatatccctaacattccggaccggtacca

SEQ ID NO: 366407 - DNA, 1062 bp, Homo Sapiens
  misc_feature (916)..(971): n is a, c, g, or t
acagggtcaacccagcaacctctcattatcaccagagaggaagcatttcaaccctcaggtgacgccactgccccctgcccaatccctgtcacttgggcccctaccaggatcagcactccactggccccggccaaattctcctcagagatccctgacccccgcgggataggtcaaagctggtgaccgactggggccttcagtgctgtcttctgctggcctcatcctgcagcagggacactggagagcaatggtccctgccagcacatctgcgggaccaggggtgctccttcacctccctccctaacaccttaacacccggggagcctccgggggtggcaggaagtccccagcacccaatgcacaatcttccctcaattctctttgtacatagccatgttgcgggggcggccattcccccactcttaaagggctacacgcccctcccccagcccctagggcgagggtggggggggcctcttcttcctcccctgggccgtccccctccctcttatgtctccccgcaaacactggcacctcacactccttcttgtcaggagcttggggcagacaactggcccttggttcccaccacactgaggaaatgggggttacccaaatccacctgggccctggtgccagttttttcaaccccacggcttctagctgctctgaggggctcctcccatcccttccagggccctccccagccccgcactgctcaggccaactgggacttccccagaaaggaaccagcttgaacaccaacccccctccaggcccctcccctttgctcaaaaacctccggggaaacattaggcttcctcaacgtggcgggaaatttgtgggtcctcgccccctaaagggtttttcagccccttttttttagtcttaatctcaacccgggataacagcggannnnnnnnnnnnnnnnnnnnnnnnnnnnnnnnnnnnnnnnnnnnnnnnnnnnnnnngagttccctagccttgggggccactaaacatccttttctccccgtgagaaatttctaaagggcttgtaatccacctcgcacacaccccgcg

SEQ ID NO: 366408 - DNA, 1020 bp, Homo Sapiens
  misc_feature (944)..(980): n is a, c, g, or t
gggcaacactgctgtgaaattgacccacagaggtgcttctgacctggtgacagtgtccccaaataggggcccatcagctggcacaaacctggatgatgttagggggcaaggccagccctcccgaaggatccgctagacagcatagctggccagcatggcagtgtcactgggcttccataggaccacgttgcccatcagggccggtgcccccgccaggttgccgccgattgcagtgaagttaaagggcgagatggccgccacgaaagccctccagaccccggtacaccgtgctgttggtgctcgggggcacgctgatgggctgctgcccctccagctccaccgcatacttggcattgaaccggaagaagtcgatgagttccgctgcagcgtcaatctccgcttggatcacggtcttaccctgtcccaccatggtcttggcgaggatctcagccctgcgcggcccactcagcatgtctgccgccttcaggaagatctgggcccggtctgcaataggcttcaggtcccactctttccgggcagccagggcagcctcaatggctttgttgagcaggctcttgtctgcataacagaacttggccaccttatgtccatggttaaaaggcgacacttggtactgcacgtccgacgtccacacctcctcatcccccaccacgcatgggatggcttccatccggcccttcaggtccttcaaggccttttgcagggcatctcgctcagggctgccctgcgtgaaggctaagacgggctcgttggccaccttcagggaggaggtgtgcttccaccgcaggccggccccggtccaggggcgggacagcagggcgcggcggagcgcgggcgccggcagcagcatctcgggttagaagcggggctgttcgctggatcccgctctcgacgaattcgagctcggccgatttggcctgatnnnnnnnnnnnnnnnnnnnnnnnnnnnnnnnnnnnnncggccgccaccgcgtaagctccagttcgccctatatatca

SEQ ID NO: 366409 - DNA, 993 bp, Homo Sapiens
attccgggatatcgtcgacccacgcgtccggcctcctgcttttcattgggctaggcatcttcttctgtggtcaggtgccggcaccgaaggcgccaagcagagcggatgtctcagatcaagagactcctcagtgagaagaagacctgccagtgccctcaccggtttcagaagacatgtagccccatttgaggcacgaggccaggcagatcccacttgcagcctccccaggtgtctgccccgcgtttcctgcctgcggaccagatgaatgtagcagatcccaggcctctggcctcctgttcgcctcctctacaatttgccattgtttctcctgggttaggccccggcttcactggttgagtgttgctctctagtttccagaggcttaatcacaccgtcctccacgccatttccttttccttcaagcctagcccttctctcattatttctctctgaccctctccccactgctcatttggatcccagggagtgttcagggccagccctggctggaatggagggtgaggctgggtgtctggaagcatggagcatgggactgttcttttacaagacaggaccctgggaccacagagggcaggaacttgcacaaaatcacacagccaagccagatcaaggatggatgcagatccagaggttcctggcagccagtaactcctgcccccatgcatgcccgcatctcaccctatgtgggtgggaccacagactcacatcctgacttggcccaaagccgccctctggacaaggcccagtgtacccggaccagggagcgccaatcactgtcaagagagactaaaaactacaagtggacgggacagcacgagacatccgtaagacaaacagcaagggaagctgccaagcgaccccgcgggcgcacaccaacaggcaacagcagctgagagaagcgagccacggagggcaaggaagcaacgaggagacaagagggaactcgcgagaagagaggacgcccccccatcc

SEQ ID NO: 366410 - DNA, 1081 bp, Homo Sapiens
  misc_feature (140)..(140): n is a, c, g, or t
  misc_feature (149)..(149): n is a, c, g, or t
  misc_feature (255)..(255): n is a, c, g, or t
  misc_feature (296)..(296): n is a, c, g, or t
  misc_feature (328)..(328): n is a, c, g, or t
  misc_feature (801)..(832): n is a, c, g, or t
ggggaattggatatgaaacgtgttatcaagcaggctgttaccggtccggaattcccgggatatcgtcgaaccacgcgtccgtgataacacatgactcctttagttcaattcagtgcataagtagttgaacacccactagntccctgggnacccacacagggcgtgtggttcattgcttttaaggagttcatagtctaagttgatgagataccttatattttcacaaagcactttgatttgataaagcactacagnaatgtgtcttgagaaatatattgggagaatatgtccatggnctctaacttctgagagttcagcccgtggcagncaagatgcatacctagaagcttcctgcagattgtggaaagcataggggttgtaaatgaaactctctaatgaagaaaaaaaattaaatgaaactgggcaaacagctttccccctttgttctaggaaaatttctaggtgtcttcctaccactagattattataccagtctagtgcctattacatgtggaagttccctaaaaacatagtatatatagggaggagagtccttgtgattgaaaaacatgttcacctctcctccctattaaaataaatgcatacagaggaatcaatcattcctagacagggaaaaaactcttctttcaaacaccactgatcagctattagatccaaggaattgccagcaggtggcagtgtgagcccaatggacggaggaaaaggcgaggtacgtggtggaggatggaagggggagggcatttatataattgcctggcagccaatttgttaacttatttnnnnnnnnnnnnnnnnnnnnnnnnnnnnnnnncttccttacaattacattaaccggcaggaagtttaagagcgacgggatctctaatcaggtgaaatttcctggagaggtggacccatgggggttataccagcggtggacacaggggtattgccatatgccccgtcaggcaagaagcctacaataccacatatgcgacatccacactacggagcacacgcataaactcgaggaagaataaggaaatagaaatacaatcaaagacaagtgaagagaaaaaaa

SEQ ID NO: 366411 - DNA, 707 bp, Homo Sapiens
gcaggctggtactgcctggagttatgggatgggtttgctgtgggaagatggagtatccctgctgccggccacgtgtgcatgtgcctgctggacggcggagctggccgggccttacagcatgctcttgagttgctggagtgtgccagtgagcctggactggggtgcgctttgacctgctagatgtggctgcgccgccgtgtgggaagccgtgtcctggtgcccagccggtgggtagagaggaagtggagcacatgatccagaagaaccaatgtctcttcaccaacacccagtgtaaggtttgctgcgccattgccttatttctgagtcccaggaagctggcacattaccagagcaaaaaacatgccaacaaagtaaagagatacctagcaatccatggaatggagacattaaagggggaaacgaagaagctagactcagatcagaagagcagcagaaggcaaagacaagaaccagtgctgccccatcttgtaacatgaccttttcctcccctgtcgtggcccagtcgcactacctggggaagaccccactgcaaagaacttaagagctgaagcagcagtccactaaggtggaagccttgcacctagaatagagagatgatagacccagacaagtttctgcagcctctgccatgcaactttcaacgatcctgtcatggctcaacaacattatgtggcacacattatgga

SEQ ID NO: 366412 - DNA, 1038 bp, Homo Sapiens
ggcaagcaatatgactatagaacccttgtttacaagcaggctggtacggctccggaattacgggatatcgtcgacccacgcgatcgccctggggagcagtccctgcatgtcatcagatggacgtgcaaacagattccccaagcctttcggtaactgcaggaaaggaccacatggaggagctgctctgcagcgctgaagccacgttagcgctccacacccagtcctccgcagacagcatgggagcccgtctgggccagactcttctgaggatgcttgtgaggatgacagtcgcttgcagctggctcaaacagaggcctgccaggatgtggccagaatagagggcattgctgaagaccctaaggtgtttctttccagcaagtcaaagacagagccgttgatttcaccaggctgtgaccgtatacctcctgcattgatttctgagggtaaatattcacaggctcagaggaaagaactccgtttgccacttcgggatgcttctgaggcgttgcccacagaccaacttgagaacaatgaattaaatgagctgcagcagcctgatcttacagacagtgatggaaaatcaccacaggcgcaggctgactcagacggttctgagaatgtgctctgtggaaataatcaaatatctgacttaggcatactgcttccagaggtgtgtatggccccagaggaaaagggagataaagacgaccaactcaacaaagaaacagaagactatttgaacagccttttagaaggatgtttaaaagatactgaagattccctttcctatgaagataaccaagacgacgactccgatctccttcaagatctctctcctgaagaagcatcctatagtctccaggagaatctgccttctgatgagagctgtctttctcttgatgatcttgccaaaaaggatagagattgcagaggattgttcctactgaaggattggtctccatattacagaagaggaatgatactgtaggagatcatcctgcccaaatgcaacacaaaccatctaagcgaagagtgaga

SEQ ID NO: 366413 - DNA, 1501 bp, Homo Sapiens
  misc_feature (532)..(611): n is a, c, g, or t
  misc_feature (655)..(755): n is a, c, g, or t
  misc_feature (837)..(846): n is a, c, g, or t
  misc_feature (865)..(874): n is a, c, g, or t
  misc_feature (931)..(958): n is a, c, g, or t
  misc_feature (1021)..(1032): n is a, c, g, or t
  misc_feature (1082)..(1097): n is a, c, g, or t
  misc_feature (1379)..(1379): n is a, c, g, or t
  misc_feature (1414)..(1422): n is a, c, g, or t
tgggctggtacggtccggaatttcgggatatgtcgaccacgcgtcgccacgcgtacgccgtgcggaccctacgccgagtccagcccggggctgctgggccagcgggagcgggaaccggacggcgctcgcgttctgccagagcggagaacgactcggggacggtgcggaggaccaggggaggagatccgcgcccgcacgcaccatcagccgagaggacggcccgcatcgcgccagtgacctaggagcgactcggggacggcttcgggctcccaggccctcctgggccaccgggcactgaggagagcggcggctggaaactgtgggacccgaagggcgggagcccaggggccggccccggccggagcgcccccgccatggccacgcccaccgccacggggatgggcagggcaagcaccggaagtgcgtcacgcgggagcgtctgcgtcgcctaccctgcgcggcgcagctaggttccgacgcggcttagcctccgggcgcctgcgcagtggcggtctcccgatacgcagtctcnnnnnnnnnnnnnnnnnnnnnnnnnnnnnnnnnnnnnnnnnnnnnnnnnnnnnnnnnnnnnnnnnnnnnnnnnnnnnnnnattgttttgtccagcgttcctccccatgccgtccgttccgcttnnnnnnnnnnnnnnnnnnnnnnnnnnnnnnnnnnnnnnnnnnnnnnnnnnnnnnnnnnnnnnnnnnnnnnnnnnnnnnnnnnnnnnnnnnnnnnnnnnnnnttcgtttcccttactccttttttttccacccccgtcccatactattcccccggcctaatcgcatagcccatacccttgtttnnnnnnnnnnacatatccgcggtggccgnnnnnnnnnntcatgatgcccaatttttttcccgcgtccaaatacccgggtgccatctgcccttttnnnnnnnnnnnnnnnnnnnnnnnnnnnngattttacctcaccgcctctcagtatatcctgtttttattgccccaacgaccatctatttcgnnnnnnnnnnnnggcagccctacctactcactcgacccgaactttgaactaccccacctttnnnnnnnnnnnnnnnnggtggcgccgcccccgatcatcccgacagccctccgctacaccgccgcgcgcgtttttcaccgcaccggtttacggtgacccgagattccccgcgcccggcacggcggttaaaattattgcggccccgggtgcgtgcctgctgttgttttgaccgcgaacgaacggcgacgcgttacggccgtgtaatatacctttccccgcacccgccggccggctaaatatatatttcaaccgcgcttcccgttttatctcgccacccgcgccgccgtcagagctgtgtnatccctttcaacgctacccccctcctcctattaannnnnnnnngcccccccctcgtgttacgacaagcgtgcctcccccatccaggtttactacctcccaccagtataatttggcggcctcg

SEQ ID NO: 366414 - DNA, 772 bp, Homo Sapiens
atagggatggctcccgcccttcggggtccacagtttccagccgccgctctccttagtgcccggtggcccagtgagggcctgggagcccgaagccgtccccgagtcgctcctaggtcactggcgcgatgcgggccgtcctctcggctgagtgggttggaagcccagcgaggctagagtgccagtcccaaagtttccaggcatcagggctgcagcccaggagcctcaaggcggcccggcgggcgactggacggccggacaggtcccgagcagccccgaccaacatggacccagacccccaggcgggcgtgcaggtgggcatgcgggtggtgcgcggcgtggactggaagtggggccagcaggacggcggcgagggcggcgtgggcacggtggtggagcttggccgccacggcagcccctcgacacccgaccgcacagtggtcgtgcagtgggaccagggcacgcgcaccaactaccgcgccggctaccagggcgcgcacgacctgctgctgtacgacaacgcccagatcggcgtccggcaccccaacatcatctgtgactgctgcaagaagcacgggctgcgggggatgcgctggaagtgccgtgtgtgcctggactacgacctctgcacgcagtgctacatgcacaacaagcatgagctcgccccacgccttcgaccgctacgagaaccgcgtcactcgcgccctgtcacacttgagtcccgccagggcctcccgaggatccactaaggggcatcttccagggagcgaaggtg

SEQ ID NO: 366415 - DNA, 1247 bp, Homo Sapiens
agcggggtgtgcgcgagggtgtaggaaggaaagcccaggacctccggagcagagcacagcagctgcagaggcaaggccagcatgtcgcccaacttcaaacttcagtgtcacttcattctcagtcttcctgacggctctaagaggggaaagccggtacctagagctgagggaagcggcggactacgatcctttcctgctcttcagcgccaacctgaagcgggagctggctggggagcagccgtaccgccgcgctctgcggtgcctggacatgctgagcctccagggccagttcaccttcaccgccgaccggccgcagctgcactgcgcagccttcttcatcagcgagcccgaggagttcattaccatccactacgaccaggtctccatcgactgtcagggcggcgacttcctgaaggtatttgatggttggattctcaagggggagaagttccccagttcccaggatcatcctctcccctcagctgagcggtacatagatttctgtgagagtggtcttagcaggaggagcatcagatcttcccagaatgtggccatgatcttcttccgagtccatgaaccaggaaatggattcacattaaccataaagacagaccccaacctctttccttgcaatgtcatttctcagactccaaatggaaagtttaccctggtagttccacaccagcatcgaaactgcagcttctccataatttatcctgtggtgatcaaaatatctgatcttaccctgggacacgtaaatggtcttcagttaaagaaatcctcagcaggttgcgagggaataggagactttgtggagctgctgggaggaactggattggacccttccaagatgacgcctttagctgatctctgctacccctttcatggcccggttttgtttaggaccagcccagaatgcaatctatcctgtgtggaatggatgggatgagagatggatgggcccagccttagaagcaagatctagacctataagtatagtcaacagaatggagagggaagaacccagacttcaggaacccaatgtagagtcctgcatgaccccttgttcactatcaaactgacttccacatacaggagcacgaaaggcacaggaatggatgccaatagactcattagcacctcctcaatatcacctcagtccacttaactgagaaacagctgttgaagatggcgagatccaaaataaaacccagttctcaaccaaataaaatatctctaaaaagagg

SEQ ID NO: 366416 - DNA, 546 bp, Homo Sapiens
  misc_feature (25)..(25): n is a, c, g, or t
  misc_feature (75)..(75): n is a, c, g, or t
  misc_feature (350)..(350): n is a, c, g, or t
  misc_feature (488)..(488): n is a, c, g, or t
  misc_feature (501)..(501): n is a, c, g, or t
gcagccgtaccgccgcactctggtngcctggacatgctgagcctccagggccagttcaccttcaccgccgaccgncgcagctgcactgcgcagctttcttcatcagcgagcccgaggagttcattaccatccactacgaccaggtctccatcgactgtcagggcggcgacttcctgaaggtatttgatggttggattctcaagggggagaagttccccagttcccagggatcatcctctcccctcagctgagcggtacatagatttctgtgagagtggtcttagcaggaggagcatcagatcttcccagaatgtgggccatgatcttcttccgagtccatgaaccagggnaatgggatttcacatttaaccataaagacagaccccaacctcttttcctttgcaatgttcatttcttcagaattccaaatgggaaagtttaacctgggggagtttccacaccagcatcggaaattgcagtttcttccntaattttattccngttggtgatccaaattttctgatctttacctggggacaagtaaat

SEQ ID NO: 366417 - DNA, 1268 bp, Homo Sapiens
ctgcgttgtcggtctgttgtctcgccgcgtgttgcctcgggtgtgccgtgtgggctgctgggtcgcctggctgggttcttgtcgctctgccttgggtgtcgcgggcgctgggggttgtggtgccgtcctctgtgcttctcccctgatgggcgtccgggggtcaactagctaggcgtggcacggtgtcatgatgttgtcgtctcctttgtgcctcctcacgactttgttcgttgtttaaattgtattccgagtggcaggtgccttgctattgcttctatttctttgcgatgcgtatttcccacgtctatccgtatgtttgtacgtacatttgtagacagtattcgccatctgttttggtttccgctcattgggatagttcaatctctgtcaccatggatgtgccagtccatgtggtgcatgtactcttgaaggaagtattaaaaatgtgtgtgtgttggtcccatgtgatatggattggcatgtgctctatgatccaagaagcgggaaatgaagctgtccccgtgaattccaaatgctcgctgtggattgcgtacatcgtgttacggatgttgatctatgggttgtgtattgtcagtgggtcttatatgccttccctctctgtgcaggactcactgcttgtgccaaaagggaaagggtcattggttctgatgacctatcccgttggcacgttccctgcttgggggtattaatagaccaagcattatgtgtatcatggggctttgcaagtctggaatctttgggggcattgccatcgtgcgtccctaaagaatactcagagaagaccagctgcagaccatggaggggcaggcgatgtgtccagttcctgccagtgggagctgggctgtgggggagggcctgggagacagctgcgtcctggcagcaggtatggtgttgttcttctgcctgagctctagggtccaccatggaacgccagaatgccaaagctgttggtcagggccccagactgtgctctctgcttggggctgggcagaccccacaccctcctcaggccagagagccttggggacctctatcagtgctcagagggaaggccaagacctggttcttaggatggtcagcggcgcaggtcacaaaactggcccataggcatgaaagtggcaggcacaattttcatgagtttggcaaagacgctcttcgtagaaatcagtttctgcttggcctgctaaatccgagccatcggagaggttaccatggcccctcagggcacacgcaggaccactgtggat

SEQ ID NO: 366418 - DNA, 990 bp, Homo Sapiens
  misc_feature (808)..(808): n is a, c, g, or t
cgatcacccttcgcggtatcataaactccgaccccctcaccagggaaggggagcttgacagacggaaggattaaacctgatcaggatgatgatactgaaataaaaataaacatcaaacaagaaagtgcagatgtaaatgtgattggaaacaaggatgtcgttactgaagaggatttggatgtttttaagcaggcccaggaactttcttgggagaaaatagagtgtgagagtggggtggaagactgtggccggtacccttctgtgattgaatttggtaaatatgaaatccaaacctggtactcctcgccttacccacaggaatatgcaagattaccaaagctttacctgtgtgaattctgtcttaaatatatgaaaagtaaaaatattttgctaagacactccaagaagtgtggatggtttcatcctccagcaaatgaaatttaccgaaggaaagacctttcagtatttgaggttgatgggaatatgagcaaaatttattgcacaaaagctttgcttgtgagccaagctcttcctggaccacaaaacgtggtattatgatgtcgagccattcctttgttatgtccttacaaaaatgatgaaagggctgtcatctggttggatacttctctaaggaaaagctttgcagcagaagtataatgtctcctgcataatgatcatgcgccagcacgaaaggcaggattggacggtttctcatgattccagcgtatggcattcctagaaagagacaaggccaagcaaggacctccctgaaaagactctctcagaatctgggcggctctcctactgncaatatggaagagcgtccaatgaagtacatcaccaccgcaagagaggccaatagggatcaggcactaccaaagaaggatggcccatgaatggcacacggagacccatgataacaaaatgaatgccacacactggaaatgtacacatgaacaacagcagaaagagccaagaggacaaaagaag

SEQ ID NO: 366419 - DNA, 1075 bp, Homo Sapiens
  misc_feature (510)..(510): n is a, c, g, or t
aggtagcgaggcctgggtggcgaattcggcacgaggaattgatctggggctcagccatcaaggggctggtgttgctcctgtcccagacaaggaagcccctctttacatcagccatattaggggaacggttgtcagctccccaaatgcctactggatcctacagccatacaggaaaacagacggacacagccctttccttaaagagccctggggtcctgtcctgcaggatgctgcataggaatgggcagagatgtcctggatgggaacatggtcctggaggtgccctacctgcatcctgctgcacccccacccacgacactcgagtgcaagatcgcctcactccgtaaccctgactttattcccaggccccacaccgaggcaggtgcaggattcgccatggtgcagcctccgggtacaaacatctgaggcactggcgatcccagtccttgcagcaccctgaacacagctcagaccagtgaggggtgattcaaaaggtggggatggggcaanaagagggctggccactctgcctcaggacttgacctcaagtgttctgtctccccacccggtgtgtccagaagaccagcctctttcttgccagaagcaggtgctaagatggactgcacagggtcccggcactccctcgggacccattcaggatctcagctgggggcaggggtgccacccaacagggaagatgtgatctgagcaatagtgtggccttgtttctccgcttctggttgtgggctgtgtgtacagggctacctattttgacttctgacaggtggcactgattttctttcccccttttaaaaaagtcattttatcaaagaacaatgctaaaagtttaagggtggtatggggtgggtccatccccacaataagaaaccccttgttaaggttatcacatcttttggtggatggtttccatatacaattcggggcccaatttttttcccaggcttaaaatctaaaggcgggggcctgaaggggttttttgaaatcaggaattacccccaggaaaaaaacccgggccccattaacaaaaatttttcccggaattcttgagggtttt

SEQ ID NO: 366420 - DNA, 612 bp, Homo Sapiens
aggaagacacttctttagttaacatgtctactccagatccagatgcaaatggcttggaatcttacacaactctccctgaagctactgaaaagtcacattttttcttagctactgcattagtaactgaatctataccagctgaacatgtagtcacagattcaccaatcaaaaaggaagaaagtacaaaacattttccgaaaggcatgaggccaacaattcaagagtcagatactgagctcttattctctggactgggatcaggagaagaagttttacctactctaccaacagagtcagtgaattttactgaagtggaacaaaccaataacacattatatccccacacttctcaagtggaaagtacctcaagtgacaaaatcgaagactataacagaatggaaaatgtggcaaaagaagttggaccactcgtatctcaaacagacatctttgaaggtagtgggtcagtaaccagcacaacattaatagaaattttaagtgacactggagcagaaggacccacggtggcaacctctccctttctccacggacatcggacatcctcaaaatcagactgtcaggtgggcagaagaaatccagactagtagaccacaa

SEQ ID NO: 366421 - DNA, 1063 bp, Homo Sapiens
cggccattatgatatagaacgttgataaaaagcggctgtactggccggaattcccgggatatcgtcgaccacgcgtccgcatcctgctcccaacaagactccttctcacgggtggtcttgcacagctggagcccatagtgcagcaggtgctggctgaagagcccctggctccacactgccccactcctgaccagggtgatgcactggaggagggcttggacctcagctcctccctcagtgctcccgaccacttccagggactatccccaagctggccagcactcctgcgccccaagaggagtgtttggggtgcttcctcttggctgcagtgggacacaggtgtgccttcctaggaactgggccctgactacttccagcccaacactcccgggcctgtgaactgtgacctgtgtgccgggatgggttttgtgggtctgccccatccccgcactgctggatctggccaagtgggtgaaggctaaggccggtcagagttgagtttactgccttgtcccctctcctgggctagatgccacaccaggcccagtgactcatagggcaggcagttgggaaataccaggcagagggcaggtcctggtctcagctggccagcctctgctgtctgccatcccaggggaggtggccaaagtcccaactgtgagccaggccccacattcactgtggcctcctccagggtctgtatgccatggaaccctggaccatggggctatgaaggaaggtgggtgtagctaagcccaggagcatgggcccctaaccttggccctgtgccccacgtgaggctggtgcccagttcattgaggtatctaaagaggccccggaagcggttcctggggccccctgcacccctccttttaaactggtaaaaataatcccccagtttccttgcttaaaagaccctggcctgcttgataacccttgaccatgcccactggggcgccctggggaatcttcccttaaaccgcggggtttataaagggggaagaaaaggtccatttataatttccaccctttttaaattccccagaggacgggaggcgttcca

SEQ ID NO: 366422 - DNA, 817 bp, Homo Sapiens
cttaggttcacccccagggtacccatggccttggtgaccacggtcacctggctttgcgatctcctccagccccacaccagcctcagccagagcacctgccaccttgtgtataagcacggtgccgcacagcccccgccggcctgccttcttcaggacagtgaaggcgctgtcgtccccaatcaccaccatctccaccgggatgccttcagcccgggcctgctcccgggccaggccgaagttgagccgatccccagtgtagttcttcacgataaggagcgtccccactgtgccggcctgggccacggccctgatggctgccaggatgctgcccactgccggggaggtgaacacagctcccgcgatgaccccagtcagcatccccttccctatgaaaccagcatgggcaggctcatggccagagcccccacccgacagcagtgccacccggcccttgaggctgtccaggtcagaacggagggccacgcggtggccctgcaggagctgcaggttggggttgcaggccaccaggccagcaagagcgtcatcagcacagccagccaccgagttcaccagcttcttggaggtcatggtgtggaggctctgaaacaggctgagttcacaccgttgcactgagctgctggaggatggacaatcctgtgctacctgggtctgagtacagtggaggcagcagcagcacctcccccgccggctcacggccgcatccgccacatccgaaggcgccgcgacttcccggagaccccgaagcgtgcgctctcatccgggtcctgcgggcgctggcggaaagaggcgaggcggt

SEQ ID NO: 366423 - DNA, 978 bp, Homo Sapiens
  misc_feature (279)..(279): n is a, c, g, or t
  misc_feature (447)..(447): n is a, c, g, or t
gggcggtacggtcggaggtacgggatatcgtcgacccacgcgtcgatcctctctccttcctcaagcttaataaggctctggcagggcatccaagataacacagctctgattcctcagacacactcagccccctctgataacttcataaaacagctccttattgtctgggccatgaagccaggctaatgctaaagttccagttgcaaaaacgattgtaactgctacttatccgttatgtaggccagcgtctcctgaggtactggacactctactcactgngcaccatgcgattcaggctcaggtggtgtcaacagtcttcccgtgagaagcaagccagtacacccagacagggtctcagaacacgctagagtcacaaggaaagggcttggcagtccgagatgcacatgtgcagtacagtgaacacagaggacgaagaactgcatgaanctgtgtatgtttcttcgccatcacgtggttttagcagcacccgtagggaagaccctgatggtagcgtctttaatgattgctgacatggacgcactaatatgctcaacaatgcctccaacaggcaaatgtcggaaatacactttcagagctggatgggactcaagatcatctaatataatcgctctcatttgatttcctctcaaggaaaccaagggcaagaaaagtctaggcaatatcgctcacattcacacaggcagattagtaacagagctgagttcgggtctggtataggctttttaatttgattctccacaaatgaacactaagataaatagcatttattgcatacccactatttaccagatactgtgcaaagggctttacatatattactttactaaatcctcaccataaactttaagtcaggtttaaccattttatagaagagggaagggagggccaggaaggttaagtaacatgctcaaagtcacacagctactacatagagccataatctgaacctttgtctaa

SEQ ID NO: 366424 - DNA, 1154 bp, Homo Sapiens
aggctgtacggtccggacgtttgggatatcgtcgaccacgcgtcgggcaaggcatcctgcccccgagccagccatgggccacggaggttgaggagccacagctacccagagcgaggctgggagcctgcctgccttcaccgtgccccaggcagctgccccgggcagcaccacccccagtgccaccagcagcagcagcagctgctccacgcccaatagccctgaagactattacacatctttggataacgacctgaagattgaagtgattgagaagctcttcgccatggacacagaggccaaggaccaatgcagtacccagacggatttcaatgagctggacttggagacactggcaccctatatccccatggacggggaagacttccagctaagccccatctgccccgaggagcggctcttggcggagaacccacagtccaccccccagcactgcttcagtgccatgacaaacatcttccagccactggcccctgtagccccgcacagtcccttcctcctggacaagtttcagcagcagctggagagcaagaagacagagcccgagcaccggcccatgtcctccatcttctttgatgccggaagcaaagcatccctgccaccgtgctgtggccaggccagcacccctctctcttccatggggggcagatccaatacccagtggcccccagatccaccattacattttgggcccacaaagtggggccgtcggggatcagcgcacagagttcttgggagcagcgccgttggggccccctgtctctccaccccatgtctccaccttcaagacaaggtctgcaaagggtattggggctcgaggcccagacgtgctgagtccggccatggtagccctctccaacaagctgaagctgaagcgacagctggagtatgaagagcaagccttccaggacctgagcgggggggacccactggtggcagccctcacatttgatgtggaacggatgaagaacctcaagggtgggagcctgcctttgatgccggaccagccactgaagcgcaaatgttcccaaggataggtcacccaaaacccatgaagggcctgtgcatccctgagacatctgccgtgcacagactcaattgcacacagcccggggagacacggcagacaggtcccc

SEQ ID NO: 366425 - DNA, 1148 bp, Homo Sapiens
  misc_feature (373)..(373): n is a, c, g, or t
tgcaggctgtacggtcggaccgtacctttgatatgtcgaccacgcgtcgccacgcgtcggtccaatcagggataaatgggcttcaaaagtgttaattgtctccttacttacagatgagtttctagagatagccctgtctttcagaaattctctgacatctgctgtgcgcaatgttataaccactttcccacactactcccctccagaaatctcattgatatgtggcgaggacacgccttagctatcaccccaatggatgcttctttcattgacccaaatccagaatgtaaatggggaactgaatacaagttggatgtctccacccttggaaagcacatcttttggttcttactgaagtagtttaaaaccacangatgatcaagggatcagggtatctttctggtatctttttaatcactgaaggactttgacagcagtaatggttggcattgtcgactcttaaatttcttgaacgtttcaccttaatggcaagttgacgcagcatctaggaattccccaaaagaagtgtcacagaatggctaagcttccaaccctacatttatgtacttgaagcaggctccaagtgtctcaactgaactctaagcatttatgggtccagagtacctcgaccacttggatggcggtacattaattaacattaaagcctagagcgagtcaacaagcattacacaataacccagaatgtaccacattaaacataacacattcaggcacaatcttgggcagcggaacggttagacacgaccgaaggcatctagcaccacgactaaggaacaacgacaacgagacgtgtacacggcacccagcaagactcaccgccaacaggatcacccaaaagtggcacaggctggcacagcaacaatcatacgggacatacaaacgcgcagggcgacaccaggacatcacgagagagggatacacacggacccaaattccactacaccattggcacgtcacaagaatagcccagaagatagggcaatcggggcaacctgacgcaagggagcagccacgacaacagcataccgagacaccgcggcaaacaaatagcaaagagacacctataaaaacgcaagcagaggaagggcggggacaaacagagaagtggaagaaccagagacacagga

SEQ ID NO: 366426 - DNA, 1007 bp, Homo Sapiens
  misc_feature (272)..(272): n is a, c, g, or t
  misc_feature (615)..(652): n is a, c, g, or t
aattcctcgggatatcgtcgaaccccacggcgttccgataaaaaataataagacaacaaatcttctttgggcaagagccaggcaaagggttttgcaaagtctcaggatagggttatggcttgaaagccgcctaatccttactttgagtaaatagcttaaagtagatacaaaggaatgtagagtagtttatctgaatagcttgtttactcatgtggtcttaagaccaatctttgatcaaccgggtgcacaaccgcagggggtgggggcggggnttgttggcaaccaggtcaattaccctctagcagtgtttactcaaaacctttgtcatttaatctatactgaataaatgcaagcttcgcctggctgatggagccggctgctactctttacagcaccttccttggtgtcctgtgaggggcccagacccttagctggagtgacaggcagaatatctgtgttagtgtacgttatacaaccgtcgttgggtcaaggtctgtgggacagaccccggaagcaaggactgataaactaattactgttaggtactatgctcactacctaggttcaatcataccccaaactcaggatcacacaatataagctttatcacaaatnnnnnnnnnnnnnnnnnnnnnnnnnnnnnnnnnnnnnncaaataaactccaaaattatagtcttgccaacccattgcctatccctttacttatttattcttcttcttgtcccactggacctattgtctaattaacatactatataaattcataatgtgttgatggctacgttcctcaatatagtgtgagcaccaccaaaggcggcaatggggggagtctatttaatctactgatcattgagtggctcgaagagtccgccacttaaggtgttgataaatttggtgaatgaataatgagtgatcgacatttaattccaccttaacgtaagggataaggaccagacaaaggatagcactgaaaaatccagaccggagaacaaacgtgagacacgat

SEQ ID NO: 366427 - DNA, 1029 bp, Homo Sapiens
ggtgtacggtcggaattccgggatatcgtcgaccacgcgtcgggcccaggtcacgcccaagcccctctttgtggcatgctcatctcagtgcagccccaactgcttctctgcaccaggccccgtgccctcccctggccctggacacacagcacctccttggccaccttgcatggatgcatgtcctccctctgtccctcttgtggtgctgtggctggccacgtgtcagggttttctgtgagcctctcaccttacagcctttgggcccctgggccctgccctgcctgagccctgcgctggccagacgcaggtaggtgccaggggaggccttgcctctgggcactatagggggcagccccctgccttgtgacctccctccatgccccatgacctccttcaactcgtcttgagggtctggtcaccacggaggggagaagggagacacagaggcccaagtggctgttctggggaccatgggaagcctggggtcacagaggcaggtaccagcagtcctgcccccaacacccgtccctgctggacctccagccagatgacacttggagtcccctgacaccgtgccaatttccatccccacacatatgcctgatcctcccatggggctatagccgtccccatgaccatctgctcatgtagcctctgactggggcgcacagtggtgcaggaggaaggacgggaaaccctgtgtggcatatgggcaagctgaccaaacccgtatggacaactccaagatcaccaagccgtgaaaaggggcgcagcccccatgacaccaggatgtacatcctcaacaggaactggtagacaaggctcagcagggaggaagaggtgaaccccaatctcaacgggaagcagagaatagaaggaaagatcgcacaacaacacacagaccaacagaagaccaacaaagacacacgacagaagcccagaagacaccaaacctgacacggacaataagacgaccagtcaacagagacactaaggaataaaccaggaacaaagacaacacgacactac

SEQ ID NO: 366428 - DNA, 1049 bp, Homo Sapiens
  misc_feature (881)..(889): n is a, c, g, or t
gggattcccgggatcaggtcccagccgccgcactaaacccggcccgtgcggtgattggacgcaggccccgggccgcggcggaggcgggcgatccgaaagaggctggtgctggctgcatggggaggcggcggcagcgggtggaccccgcggctggggcccgggccggggccctgcctgaggccatcgccgcgttgagtcggtcgctgccctcgggacccagccccgagatcttccgccgcgccaagttcgaccgtccggaggcgacctccgcgctctggcagctcctcttccgtgtgctctcgccactccctgcgggcaacgccttggcatcgctcgccctggaggtccaagcccgcttggtgaagtcagcactatgctcccagggctacccgaggctggcactggcacaactacctgaggatggctcgcagggcagtcgggagctgctgctggctctgtcctggctcttggcccgaggacctgtgcccgagcagatgctggcccaggcccgagtgcctctgggtgacgagatgactgtgtgccagtgtgaggccctggccaagccctggcccacctgcaccccacatggaagcagagggtcctgtggatgtccgccatgtgcagtggctgatgggaaagctgcggttccggtggcgccagctggtgtccagtcagcaggagcagtgcgccctcctgagcaagatccacctgtacacacgcggctgccacagcgaccagagccttagccatctgtctgtcactgaagcagagatgctcagggaaccacagagggaggccagcagctgctgcggactctggagcgtgagaaccaccgccgtggaggctgtcctggcgtgggggcgctctgaactgggcttccnnnnnnnnnatggacccgggtccttgggcaccgggggccccggaaggggcctggcttcaacccttcaagacccaacttttctgggccgggggaacccccagccccggggggtgttccctatttgtacatggtgagatcgagcggcagaacgggcgggctccccccgaac

SEQ ID NO: 366429 - DNA, 1028 bp, Homo Sapiens
taggtagcgaggcctgggtggcgaattcggcacgagggtccagggaggactgagtttccctctcccgccgtcctcgcagccccgggaggtgcaggggcatcgcgggaacagccccggtgacacgctgcccggggtcttcacgaatgcccggaggcgccgctggccagaagccagcccgaccttccatccccgcagacagccccacgttcctcccggcccgcgtctttcggggccgcccgtgcaggcgggcccggctcagcggcgcccgggcagcagctgcttccatgcgccggcttcctccggggctgctccgtggcggcggcagagggaagcgctgccgcgggcgggcgaggatcgggagcgcctgaggaggctgccgcgggctccggctgcgcgttcggggcgggggagctgcccgggacttcgcgccaggggccaggggccggccgcgctggggtctgcgctgtgcggcgcggcgggctctgggcgcctcctggcggcccagcctggaaggcggcgcgatggggcgaggctcgtccgctccgactgcccctgccaggagcccggaagtgggtccgcacgagacagaatagactacactcaaactccaggggaaccgttcattgggcttggacacgaaggcgggaccctgccgacgcagtgattggatgcatgtccggccagcgcggtgattggaactccgcgctctggcagctcctcttccgtgggctctcgccactccctgcgggcaacgccttggcatcgctcgccccggagggccaagcccgcttgggtgaagtcagcactatgctcccagggctaccccgagctggcactggcacaactaccctgagatggctcgcagggcagtcgggaacctgctgcctggctctgtccctggctcttgggcccgagggacctgtgccccgaacagatgctggcccccaggcccgaaggccctcctggggggacccaaaattgactgggtggcccaggggtgaaggcccctgggcccagcccctgggccc

SEQ ID NO: 366430 - DNA, 856 bp, Homo Sapiens
  misc_feature (41)..(62): n is a, c, g, or t
gatcggcccggaatccgggatatgtgaccacgcgtttcggnnnnnnnnnnnnnnnnnnnnnntgagtctatcttcctgattcatctgattcatcaatcagcagaccctggccatcacccatcttttcagagacaagatgggcaccaatttgggagaactggccttttcaaacacacaggcagggtttatggtcagttctacctacatgtgttattagactccctccaagaggtaacattcaattaagttctcatgcgagtggttagggagtccccagtagctccaaagaggtccttcccatatccacatctgtgaatggctagatatgtaaccacaggcaggacagctcccagctgtctcgctcagtgaagactccagtgtctgtggaatgggggctcattttcggtgctactgtcttaactctggctctgtccatgctggacatgtcctgcacatgtgtgtgtagagcttaatgcagggtcctctttgaaccatgcctggcccttgcaggtagatgtggcagccacctctacctcctaatttcggcaggcagcatggggaagccctttccagggagtagcctggcagctctgcagtctttccaggctagtctcccctgatgtcagtgtccccaacccaggtccccaaggcaagcctgcacggtccttctgtcacaaccttattctcaaagccaggagccagggggccaggcttccccaagagaacgacagaaaattcgtgggcgaaaagccaaaggcaagtcgtttctgccccctgggatggccttgtccaaagcctcccttttgctggccggacaatgtgacacccacccaattttggaaacgcgtcttgatca

SEQ ID NO: 366431 - DNA, 1153 bp, Homo Sapiens
tgagtagacttcagtgaccacactgtggaaaatacctttgcagacgtggcacccgagtgcacacaccgaccgccacatgtgcttttctgccgggaatccctggggtgaacgcatgttttatgggcgtttccaggagcgcgcgtgcacctccagacggggagctggcgggcgggggtggcagcagcagctctagccttggggggacaagcctctctcagctacgccaggggaaaagagagttaaggacactcacccccacccacgcacacacacaaggcagcgtcgggtgggagagagaaggccgtttctccttctgtagcctgggtctcccacgggccttccccgctgctgagcgagacaccagtagccaggtgaagggccacagcgggccaggccccgaccctgttgtgacccacctgggcaccttcccggaccagctccgcctcccctgccctcctctctccaggaaggagccagaaccctcacccctctcccaccctccccaggggtaaccccaggccaagcacagatagctcagctgcgacctctggcctctggggacataaacggggcggctggggccagggcggaaggtgctcctgtttccctccttctgcgtggtccctttgacgggccggccaccgtgtccgaggcgcaacgctaggcctccaggccacgcatccatctccaagttaacagcccgtcctgcccaagttctggggcaggtaggagagggccgtcacacacctgtccgcccgtgagtgacccgggggggcttccgggtggaggtggagccaccacgcccttcctcaaggggtcacttattaaaaagtccacggcctgaggccaggccctctgcacagaagccatatgccggccagccgcgcctcctcctctgtccacggaaccgctgcccatctaaccttcgtaaagacctgtctcctgtttccagccgccgcctgtggttctagcaggttctatgccatctgcattgggatgtctggttgtttttatttctgacttttttaaaattccaggtgtgccgcacccactttctcgcagtgttttaatattgtgtggagttgtcgataccacgtgaattcatacacaataaaaagcctcactctcccttttaaaaacacaaaacaaaccc

SEQ ID NO: 366432 - DNA, 589 bp, Homo Sapiens
  misc_feature (435)..(486): n is a, c, g, or t
caggctggtacggtccggaattacgggatatcgtcgaccacgcgtcgcatggattgaagatgttttaaaaacacagaaaactcatggcttcaatggcagacttactaggtctccatttcaaatgccaactctgagctgctgtacagcacaatctattccctattctctctttgaaaacagttaacccacctcacaggtgaatgaggagagaagatgtgctttctgcttcagtctcttactctgtgtgtgaccacatgcaagagtaaacttgcacctcagtgcttcagttcaaatggggtttccaaccccagtataattaggggtgtttcagagcatccccagttatttagcacaacactgaaggagcacatcccctctccattttgacttctctccccacttttacagccactgccttcatcagttatgtagagnnnnnnnnnnnnnnnnnnnnnnnnnnnnnnnnnnnnnnnnnnnnnnnnnnnnattgatattgtttgctttcattgctaaaactcatatacgacttactatgagccaagcactgttctcagtattacataggtatgaattcatttaagtcctgaag

SEQ ID NO: 366433 - DNA, 2011 bp, Homo Sapiens
catagcttagataccctcagagacagggaatagcccttagtcctgggcactcatcccacccccaccactttttaaataaaaagaaattaaagtttaatacaaaatgtggggagggaaaagggaggaggtcagggaagagacaagagagctgccctcacctccagggcatagggggcttaaaggcagcaaaagaagcatggggggttcggggcacacaggtccccttgcccaacagccctcaggagtctcggtgcctccagggagatgctggcccgtggcatgctggaggtcagagctcacccgccttggggtgaggggccccccagcctccccaggcccctccccacgcaccttcttgtcctcaccctcatcctcaaagcccccagcggggcccccacccccttcgaggcgacagtcttcactccagcgccagcttaaagcgtagcttgaggggcatgcactgggatgccccgggttgcctcgccgggctcaggcttagggggtgcaggtggggcacggggcgtcttgaacacctccccgtcttcctcatcctcatcactgatgtcagtcacctctacctcctccgactcgccttccgagatgggctccaccttgatctgtggtggcggggcaggtggggctagcgcccctgccccctcagccagcccgcctgcacatgccaccgctcttgtcagcaccggctacggccttctccccagctgcccgctgccggcgtccgagtggggcggctggagcttaaacttgaatggggaggaagaagaagaagaggatgacgaggccgaggaggggaccggtggggtctcgggtgccatgggcggcagcgggcacttgtcagggcgctggggctaggggcaccaccagcccagggtagtgcaggaaggcgcgggggctgaggtggtagttgtagacgctttgggtgtgggcctgcaggtaccgtttcatgtcctcagggctgaaggagaagtgggagcctccccctgagccgctgggccccccgccaccactggggtacatcgggctcagcgtgggcgagggagtgtaggccaggtgggtgggcgtcatgggcagagccggggagagctgagggggcagcagggatccaggaccggccagaggcgacacagggaaggggctgaggggttcagggccaccccgaggccggggatagactcggaagacaccagggtcatggggcaggcggccaccgggggcccctcggaaggcacccagattccggagggccgggtgttcgggcgcggggatcctctcccagcggttccctccagctctgacgtgccatcactacagtcactgactgagcctcggcccagcggcgggccaccacagccgagaagagggaagatgaagatgaagagcaggctggtggtgagcgggggtcctcggtgggggacagcacctcggagggcgttgagggagggaagcggaagtggctaccacccgacggcactggcggggcactctggggcactgcacccccagccaaccccacatcaatgaatgggtaattgaccagcaccagtttgttgaaattgaacttgtaggtgaaccgtttccccttggtcttgtgcagaatgcgcttgttatagtaatagcgcagggcccggctcagcttgtcgtaattcatctggggcttgcacttgcgaacgccccacagccgggccacctcatcagggtctttgatgacgaattccccgtagtccccctgccaggcaatgacgcactggtactcctccttccgcagcagctccaggataaagtgccacagctggatctgccttgagccaggggacgactctggcttgtaggcccaatccgggaaggcaaaccctgtgtccgccggggtcttcatgctggggggcccggggcgaagcgccccgattccgggccgcggctcccggcgccctcgctgccccgtcccgtcccgcgcccgtcggccgccctcgccgcctcacccggcctcgcctctcag

SEQ ID NO: 366434 - DNA, 676 bp, Homo Sapiens; identical to SEQ ID NO: 264810

SEQ ID NO: 366435 - DNA, 1005 bp, Homo Sapiens
  misc_feature (536)..(536): n is a, c, g, or t
  misc_feature (547)..(547): n is a, c, g, or t
  misc_feature (549)..(549): n is a, c, g, or t
  misc_feature (553)..(553): n is a, c, g, or t
gcctgggtggcgaattcggcacgagggggaattcgtcatcaaagaccctgatgaggtggcccggctgtggggcgttcgcaagtgcaagccccagatgaattacgacaagctgagcctggccctgcgctattactataacaagcgcattctgcacaagaccaaggggaaacggttcacctacaagttcaatttcaacaaactggtgctggtcaattacccattcattgatgtggggttggctgggggtgcagtgccccagagtgccccgccagtgccgtcgggtggtagccacttccgcttccctccctcaacgccctccgaggtgctgtcccccaccgaggacccccgctcaccaccagcctgctcttcatcttcatcttccctcttctcggctgtggtggcccgccgcctgggccgaggctcagtcagtgactgtagtgatggcacgtcagagctggaggaaccgctgggagaggatccccgcgcccgaccacccggccctccggatctgggtgccttccgagggctggctgaangggggcagggncnctanccccaccgcccccgccaccacagatcaaggtggagcccatctcggaaggcgagtcggaggaggtagaggtgactgacatcattgatgaggatgaggaagacggggaggtgttcaagacgccccgtggcccacctgcaccccctaagcctgagcccggcgaggcacccgggggctcccaatgcatgcccctcaagctaccctttaaccggccctggaatgaaaactgtcgcctcgaaaggggtgggggcccccacgggggacttttgaggacaaaggtgaagacaaaaagggcctgggggaaggccctcgagatgacaagtagaacacacaacacagggcgagagaaatcactaactaggggcagtatacgaacacagattctaccctgggacgaccaaacaacctatgaggcatgaacagaacaaggacacatagatacacacatctcccca

SEQ ID NO: 366436 - DNA, 832 bp, Homo Sapiens
gccggagcgcagggagcgtccgacatgccggagccttcgctggatctccttcccgaactcacaaatcctgacgagctcctgtcttatctggacccccccgacctgccgagcaatagtaacgatgacctcctgtctctatttgagaacaactgagggccacccggtcggggccatccctccacactctgcatcctaccccacctacccaacacacttttccacctgggagcctgtgccctcagaccgccccgcaccagagccacgggctgtggggcggggagccctcccccgctgcagccctctcagaacagaggggtagggagggtgcaccagtgcaccaggaaggctgtgtgggtctggagcccacgtcccacctccacacccttggcttgggcccatgcccagcgcaggcctgaagaccaccctcccgagaggaaccagcccggtaagagggcacacgctgatgcggcttcctggtccctccgcgtgtgccgattccagatgaccttccagtgtccccaaggttcttccatcttctagactgtaaccctgcctccctgcttcctggtccagagcctccctccagtgactgtggagcctgagaaggcccccgggccccagcatgggccccgagccttggaggagcactggcagttggtggcacgtgagaaccagcccaccaccacagaaaaagcacaaacctctgggaacagacaacgtctctcggggggccaaggggtcatcggtttgaccccctgacctataagccaagataccccataaacacaccccagaaagcagagaaacaaggacaagagtctgggtgagaggg

SEQ ID NO: 366437 - DNA, 847 bp, Homo Sapiens
gggcggtacaggtccggaagtttccgggatatcgtcgacccacgcgtcgcccacgcgtccgccacattattctacctttgcctacttcccaactgaggtaacacctcatgcttttaccccatcctccagacaacaggattcggtctccacggtcaacgtggtatactcgcagacaacccaaccggtatacaatggtgagacacctcttcaaccttcctacagtagtgaagtctttcctctagtcacccctttgttgcttgacaatcagatcctcaacactacccctgctgcttcaagtagtgattcggccttgcatgctacgcctgtatttcccagtgtcgatgtgtcatttgaatccatcctgtcttcctatgatggtgcacctttgcttccattttcctctgcttccttcagtagtgaattgtttcgccatctgcatacagtttctcaaatccttccacaagttacttcagctaccgagagtgataaggtgcccttgcatgcttctctgccagtggctgggggtgatttgctattagagcccagccttgctcagtattctgatgtgctgtccactactcatgctgcttcagagacgctggaattcggtagtgacatctggtgtactttagtaaaagcgcttatgttttctcaagttgaaccacccagcagtgatgccatgatgcatgcacgttcttcagggcctgaaccttcttatgccttgtctgataatgagggctcccaagacatcttcactgtttcttacagttctgcaataactgtgcatgattctgtgggtgtacttatccagggtaccttattgaggcggcctagccatataccaatc

SEQ ID NO: 366438 - DNA, 1268 bp, Homo Sapiens
gctggtaccggtccggaagtttcgggatatcgtcgacccacgcgtcccggtctttaccgctgtgacgtcatgtacgggattgaagacacacaagacacggtgtcactgactgtggatggggttgtgtttcactacagggcggcaaccagcaggtacacactgaattttgaggctagctcagaaggcttgtttggacgttggggcagtcatagcaactccagagcagctctttgctgcctatgaagatggatttgagcagtgtgacgcaggctggctggctgatcagactgtcagatatcccatccgggctcccagagtgggctgttatggagataagatgggaaaggcaggagtcaggacttatggattccgttactccccaggaaacttacgatgtgtactcgttatgtggatcatctggatggtgatgtgttccaactcactgtccccagtaaattcaccttcgaggaggctgcaaaagagtgtgaaaaccaggatgccaggctggcaacaagtgggggaactccaggcggcatggaggaacggcttagaccagtgcgattacgggtggctgtacggatgccagcgtgcagccaccctgtgactgtggccagggcccagtgtggaggtggatctactaggggtagagaacccatgtatcgtattgaggaaccagacaggcttccctccacctgatacgcagatcagaaagcctacatgctttacaacctaaagacgcctacaaaccatcggatacgagctatacatacgcagcagacctggcatcaacacagatttactccagacgaagccaaagaatggggtcctgagtacgaaaactaacagcgaagtcaatcccagtttcatatgatcgaacttaacgccgccatcgtcaagaggcaagatcgcacccgtagggcaccacatggcaacgcaatgaaccgcgcagcacaaggagaaaacagcaggggacggacgacgaaactggctccgcgccgcaaagactaacccagccgccagaaagggacaggctcgcaagacagccacagggtaatcgtggcagacactgcaccagccacgaccacagggaccgaccgcacacacacggcaccgccagagacgagcggggccacgcgcccacagacgcaacccgccgactatcagtcaccacagcgagcgccggcagacggacgcaggaagcagcccaaccacccacgagcgagcaccgaggggaaaccaacagagaacgagccagaagcgcaaacaaa

SEQ ID NO: 366439 - DNA, 1199 bp, Homo Sapiens
  misc_feature (81)..(121): n is a, c, g, or t
  misc_feature (332)..(344): n is a, c, g, or t
  misc_feature (592)..(678): n is a, c, g, or t
cccgggatgcgaggacttccggcgccgggagctcgcggcggaagtgggatctcctgggccgtagtgggcgttgtgtgtttnnnnnnnnnnnnnnnnnnnnnnnnnnnnnnnnnnnnnnnnncctctggccgcctggctccaacatcaagcaccgggctccgagtggccgggatcagcgccccgaggcagaggccggagggcgcgcgcactgctaggaagtgctggtcccccgcgccgctctgccagctcggccccccggcagacgcccctgtacaacagcccacacccccagaggcgaggcagtaaagaacctccagcccgcccacgccgannnnnnnnnnnnntctccccgcgaggtcaccgtatatcacaaccccccaacccgaccacacccagacgccccctgacgatacaaccctcccgccggattaagcgcggacgccgacgggagtcccgcgcgccacgcgcgcacggaacccgcgtgacgaagcttacaccgccaccacaccgcccccacaacccacgagccccgggcgcgaccgcaccggcccgcacgaaccgcgccaagacaccccgcgcgcaattaccgatnnnnnnnnnnnnnnnnnnnnnnnnnnnnnnnnnnnnnnnnnnnnnnnnnnnnnnnnnnnnnnnnnnnnnnnnnnnnnnnnnnnnnnntccgccgcacatacctccctgacaaatacacacactatactccacctgacccccgcacgcccaccccgacgtcggacaaacacgcactgctccaaccccgccgaattctgcgacgtcctcaactcccctaccgccgttagtcccccgaggcgacccacctctcgcgtgtcgccccgaccgcttcgcccatccgcgttccatcccacgcccactcctcacagaccataaccgcatgacccaacggcgcgccagccgccgagtgttcgccgagagcgaggcgcgcgccgcggaaaggcgccttggccgaagacgcacgagccaatgagtgcagccacgacgccagcaacgggcacgcaccgacgagagcaaaacggacaagaggaggaacggagacagcacggacacgccgagtagaacgctacaacttgacacacagccaacgcgcccgccgccgctccgtctacaatctggcgaacaggacgagacgccagagtattcaacgtcgcatgtgaccacgcgca

SEQ ID NO: 366440 - DNA, 658 bp, Homo Sapiens
gcaggctcgtacggtccggaattccgggatatcgtcgaccacgcgtcgagacttttgcattttttctcaaagcccttatgttctaacccatgagaaccattttacctgccctctaagggccaccagcttcgacctgcctcaggggacagcagcacagaccagtggctccctgtccaaggccgcagagcagacgccatcccactgtacaatcgaatttgcctggacaaacttgaatagatttcctcctgccttagcaacgagccctatagttagttggcacatcctgccgttttggcatcctgaggctcccatctgagtggaggagaaagtgttgtgtttattagcaggaagtcttgtgaaaacagctcgctgctgtgtatgtttatggatttttctgatataacagccagcatggttaccgagtggtagagattctcgaacattctcaaactctctttttgggtaaatgattgtgctaaaaataaaatttattaataaagaaggggaaaaaggagtaactctacctgactaaatgttactcgtaatttatttagtttgctttactaattaaggtaaaaccgaggaagtatgacttttacattcaaccagaggaatttctggaatttatagggcaaacactatgtccccataatgattc

SEQ ID NO: 366441 - DNA, 836 bp, Homo Sapiens
  misc_feature (503)..(518): n is a, c, g, or t
  misc_feature (531)..(775): n is a, c, g, or t
gggagccctcggcagacggccaatggcggcggtgctcggggcgctcggggcgacgcggcgcttgttggcggcgctgcgaggccagagcctagggctagcggccatgtcatcaggtactcacaggttgactgcagaggagaggaaccaagctatacttgaccttaaagcagcaggatggtcggaattaagtgagagagatgccatctacaaagaattctccttccacaattttaatcaggcatttggctttatgtcccgagttgccctacaagcagagaagatgaatcatcacccagaatggttcaatgtatacaacaaggtccagataactctcacctcacatgactgtggtgaactgaccaaaaaagatgtgaagctggccaagtttattgaaaaagcagctgcttctgtgtgatttcttccaaaatacatgtaaaatcttgtacacatcttagctgcaatgtatgttgaaggaaatttatgtgaacaaatagagttgttcnnnnnnnnnnnnnnnnaagacagagtgtnnnnnnnnnnnnnnnnnnnnnnnnnnnnnnnnnnnnnnnnnnnnnnnnnnnnnnnnnnnnnnnnnnnnnnnnnnnnnnnnnnnnnnnnnnnnnnnnnnnnnnnnnnnnnnnnnnnnnnnnnnnnnnnnnnnnnnnnnnnnnnnnnnnnnnnnnnnnnnnnnnnnnnnnnnnnnnnnnnnnnnnnnnnnnnnnnnnnnnnnnnnnnnnnnnnnnnnnnnnnnnnnnnnnnnnnnnnnnnnnnnnnnatgagcaacatggctgggtgttgaattgtcttaaggcatcatatctagaaggcaaagaaaa

SEQ ID NO: 366442 - DNA, 1269 bp, Homo Sapiens
  misc_feature (909)..(985): n is a, c, g, or t
  misc_feature (989)..(989): n is a, c, g, or t
  misc_feature (998)..(1006): n is a, c, g, or t
  misc_feature (1016)..(1046): n is a, c, g, or t
  misc_feature (1049)..(1049): n is a, c, g, or t
  misc_feature (1134)..(1219): n is a, c, g, or t
tacagctagggctgctcagtaactgcccctaaccactaccacgtccccaagtgcaacgggacccacggaactacaggtgtggggcagtggtgagcgtggaagaagggacgcggatgggggtgcgctttgcagacgatctggagactgctgtgtgttgagggaagatacgaagtcgcgggagcagttggggactcaatgtgtgggcaacaagggtcctgctgagctcaggagctgcacggaatggtggcagtcaccttgccagtgcagcaggcatggatcagactgcaagctaggggcacgaggcatcagttgggaagaggggacgcacagctaggcttgaggcctcttcatcgggatgtccccaggccccccagcccaggcccagcataaaggccgtgttggggggcccccctgacccaaggggggcttcatgcgccacgtgcaggcggagccgtctccatcctcagagccggaggctggcccttcacagcctccagtcaggcagggggccctccagggtggcctgctcatgggctacagcccagcagggggggcgacatcccccggggtctaccaggtatccatcttttcccctccggctggtacctctgagcctcatagggccctgaaacgacaagccccatccactgagggtccccgggagctgaagagaggccctgggctgggggccagagagggactaccccctgaagaaccatctactgtggggctcttaggcccagagggaccggggctgggactaggtgtggccagccagcatttctccccaccgggcctctgtgctgtggaacagacaagcagtgtcacctcatcttggacttcaggggcctggcagtccccccgcccctcctcaaatgctgcgccgcacaccccggccccccagagacnnnnnnnnnnnnnnnnnnnnnnnnnnnnnnnnnnnnnnnnnnnnnnnnnnnnnnnnnnnnnnnnnnnnnnnnnnnnnaagngcgggcgcnnnnnnnnncggatgccgnnnnnnnnnnnnnnnnnnnnnnnnnnnnnnnggngcccgcggcgcaccgcggacacgcgccacgcgggcgcgcgtataagcggccggcggggcccgccgtcttcggcggttcccccttnnnnnnnnnnnnnnnnnnnnnnnnnnnnnnnnnnnnnnnnnnnnnnnnnnnnnnnnnnnnnnnnnnnnnnnnnnnnnnnnnnnnnnatgatcccgccgagatgaagcggcgtcggacccccgcggggttgcggagc

SEQ ID NO: 366443 - DNA, 930 bp, Homo Sapiens
  misc_feature (874)..(874): n is a, c, g, or t
  misc_feature (896)..(896): n is a, c, g, or t
  misc_feature (908)..(908): n is a, c, g, or t
ccttcccatcattgtcggtgggttcagggtctatttactttctgtgagtttgagggtgtgttgttttttgctttcaacatggatgatatgaaaagtactataaatagaatggttggggtccagttactgtttcatgctcgtcaaaacttttacgtccacctcaccacttcttggaattagaaaaatgcttctaatgtgggcaaattcctcccagaacaactcctcttccagaatacactcgttctcttggggtcctcccctcattctctacccccatttccaccgggctttcgaacctagaaacagacagcacgtggcaagtagtgtatgtgctcaaatggacaagtgtctctaaattgtgctacttttatattttgtcaccatggatttcagtttcaagttaggaggaaaagaaaactcagccccacggtttgggcatgtgagttggccatcttgggcctgaagtggaaagagtgtccctcattttcccctttgctgtattgctgaatgtccacgcttcggtctttctcagctgcccgccgacacgttacaggcatgacctaggaaaagcgcgactctgtgtccccagtaggtttagagttggttcttgttgagatgattgtgacgcatgtattaggggaggatggggaggtgtggccggggttgttttttgcctctctcagttgagtgtggtctccagggtgctccctgtggtgaaagctcagacagtcacttctgttttgctgttggtgatgaaggtatggctgtgggggtgggtagtgctgggggcgagttcccaagggtcgctggagcctgtctcgcgacgcgtggtcgacgaatcccgaaattccgaccgtacagcctgcctatgtantaaaagcgcaggcgttgtttcntattagttgtcncccaaaatgctctgtttttctt

SEQ ID NO: 366444 - DNA, 962 bp, Homo Sapiens
gcagagggagggtgaacccaggcccatctgtgggtatgggctccaatttcctaaattgtgtgtggttataaccatggcttccaccttgtctggcaccgggtccacatcttttctgagacctgctagaaggtcagagccctagagaataagagaagcttgctgctggtgagggggtatggccaggattcctggagtcggaagagcttcagcttcaccatcttgggagaagaaggaagaaagtgaaagcgatgtggtccttcttagtcccaaggaccctgacagaggacacgcagaggagcagctggcttgcccggagtcctcccaccttgacccaagcatgcagggcccaccccgcagcctccgcgctgggctcagcctggacgacttcatccctggccacctccagtcccacatagggtcttcctcccgggggacacgggtgcccgtgatccggaatggtggctccaacacccttaatttccagttccacgaccccgcgcccaggactgtgtgcaatgggggctacacaccaagacgagatgcttcccagcacccggaccctgcgtggtatcagacctggccaggccctgggagcaagccctctgcaagcacaaagatccctgcctcccagcacacccagaactgggtcagccacgtggaccaaggacagcaagcgtcgggacaagcgctgggtcaagtacgagggaatcgggcccgtggacagagagcggcatgcccattgccccccgatccagcgttgaacagacccagagactggtaccggagaatgttccagcagattcaccggaaaatgccagacttgcagcatggactggaccttcgaggagccacccagagaccccaggcatctaggagcccagcaaagacctgcccacaggcccgagccggcaaaatcttccagtggaagaacgctgggaccactctgaagagttactagaagg

SEQ ID NO: 366445 - DNA, 857 bp, Homo Sapiens
ggctggtacggtccggaagtttcgggatatcgtcgacccacgcgtcgacactttcaagaaccagactgctcactagaagctcagcccaaatatgttagaggtgggaagcgttacggacgaaggtccttgcccgagttccaagagtccgtggaggagtttcctgaagtgacggtgatagagccactggatgaagaagcgcggccttcacacatcccagccggtgactgcagtgagcactggaagacgcaacgcagtgaggagtatgaagcggaaggccagttaaggttttggaacccagatgacttgaatgcttcacagagtggatcttcccctccccaagactggatagaagagaaactgcaagaagtttgtgaagatttggggatcacccgtgatggtcacctgaaccggaagaagctggtctccatctgtgagcagtatggtttacagaatgtggatggagagatgctcgaggaagtattccataatcttgatcctgacggtacaatgagtgtagaagattttttctatggtttgtttaacaaatggaaaatctcttacaccatcagcatctactccatatagacaactaaaaaggcacctttccatgcagtctttcgatgagagtggacgacgtaccacaactcatcagcaatgacaagtaccattggctttcgggtcttctcctgcctggatgatgggatgggccatgcatctgtggagagaatactcgacacctggcaggaagagggcattgagaacagcaggagatcctgaaggcttggattcagctcgatggaaacatcaatttgacagaattacactgggccttgtaaaatgaactttggttaccagaa

SEQ ID NO: 366446 - DNA, 987 bp, Homo Sapiens
  misc_feature (160)..(175): n is a, c, g, or t
  misc_feature (959)..(959): n is a, c, g, or t
ctatcgtcgaccacgccgtcgtgtgaatgtaccaacactgaatcttacagcagttatctttctatggccattaggtacctagcagatgtgcacaatataaacaaaaagatatctggcctaccttactactaaaagcatttaacacgtgcattttggtacnnnnnnnnnnnnnnnnctaaaagctacataaaggccttatttgacattttcactgataactgatcgcaccctcatgttgcagtgttcgtcccctattcattaacagtgtgtgcaaatgcaaccccaggacacattattgttctgatagatgctcacagggaatcaagcttctcgcccactccacggctctgagccccatccaagggcaagacttggtgcccagctggaaggacgaaagcacactttgtgaccgccatcctcaccagctgcatgcctgggctgcacactgctgaacgtgctcctctctccttctctgtacaatgattcagcatctcggcggaagaggaaaatggagctttttgaggctcgccaggtcccttttgttttcaccattaaaattccaaacccaaagcctttgtttgactgaaggagaagagagggaagtaagcttctgttcagcacctgaaccctagaaaaagagccagtttgctacgatgaaggtgacatttctctggtcatttatttgagagttcgaagtcaaagtcgaggggcaccggctttggttcatgtctaggagccctctgtcagaatccttgaagccctttaatggtctaactggcatctcttgtatcaagaagtacctttaaggtagaccttttcagggtgccctcaggaaagggccctgctcatgtttttttcctgtccccttagaccaaccccagggtgtccactgcaggggttctgcctgttcccaaactttttccattccagggacaaaggagaagccactttccccaggncggcaagacttttccccttcaatgttcc

SEQ ID NO: 366447 - DNA, 1507 bp, Homo Sapiens
tgctggtactgccccgggattaacgggcatcgcagtgctcttggccgggaggaggctgtgactgcaccagaacctactatgctccacatctccagaagagcccagggaccctgtggccgagtgtgtccagccaagtgtcatggggagctatccatatctcatggctccttgctgggccaagccctccagaaccccaaacccccaaagactgatgaatgccagagtggccaccttgcttatcttgtgtgccccggccctggtgatcacctatggcatgctggaaagggatgacccgattgagcccatcggctgaaaacagatggcgacttagcgaacatgagctgggccggggctgcaagccagtgctgctcgagaagacgaaccgcctgggccctgaggctgctgtgggcagggcgggccgggatgtgggcagtgcggagctggcactgttggtagccccaggcaagccccgacctggcaagccgctgcccccgaagacacgtggagagcagaggcagagcgccttcacggagctgccgaggatgaaggaccggcaggtggatgctcaggcccaggagagggagcacgatgaccccacaggccaacctggtgccccacaagctgacccagaacatccccagaggcccagctgggcagcaaagtcttctctgtgtggcccagcggagcaccgaagtgagcaaagaagcgcctttagcaaaccaaccaagcgaccagcagagaggcctgagctaacctcagtcttccctgcaggggaatctgcagatgccctggggggagctgtctggactcctcaagcactacagacctcgcttggtggggtcgactttcaactcccaagcttttggttggtgatttgtggaacttgcaagcattgccacagaatgctccactctgtagcacttttctgggtgcccctacactgtggctggagcatacccaggcccaggtgcccccaccctcatcatcctccaccacttcgtgggccctcctgccacccaccctcacctccctgggcttgtccacccagaactggtgtgcaaagtgcaacctgtcctttcgcctaacgtccgacctggtctttcacatgcgatcccaccacaaaaaggagcatgcggggcctgacccacattctcagaaacggagagaagaagcccttgcctgcccctgtgtgccaggagcacttcccgggagcgcccacaacctctcccggcacatgaacttctcacagctagcaggggaccgcaaaaatgaccctgctggggtgcagcaaccagcctttgggcaaagggggggctccctggggccctcccttggagggggctggccaggggcccttttgcaaaaattgcctggcttttgggatttcataaaataacccgccttaaggaatcaatttggaagaagacccccccctggcatgaaggggttcttgacagggacacatgacgcttcttaaaaatcacagcggagggggaccgtcgacaaa

SEQ ID NO: 366448 - DNA, 766 bp, Homo Sapiens
cctggtacggtcggaagttccgggatatgtcgaccacgcgtcgcggacgcgtggggcacatcatttatcgaatggatgatgtgtacaaagagcctctgagatgtggagtttccagacgaaggatatagagaaagaaactgcaaaggatgaagaggaagagcctcccagcatgactcagctacttcgaagaagaagagctgtcttgccagcagacccggtatgtggagctgttcattgtcgtagacaaggaaaggtatgacatgatgggaagaaagtcagactgcgtgtgagagaagagatgataccactggcaaactacttggatagtatgtatattatgttaaatattcgaattgtgctagattggactggagatttggaccaatggaaacctgatcaacatagttgggggtgctggtgatgtgctggggaacttcgatgcagttggctgggaaaagttgcttatcacacgtcggagacatgacagtgcaaagctagtactaaagaaaggtttgggtggaacctgcaggaatgagatcgtgggaacagtgtgttcaaggagccacgcaggcgggattaatgtgtttggaaaaatcactgtggagaaatttgcttccatagtagctcatgaattgggtcataatcttcggaatgaatcacgatggatgggagacgatgtacctgtggagcaaagaagctgcatcatgaatacaggagcatcgggtccagaaaccttaagcagatgcagtcacgcaggatctgagaa

SEQ ID NO: 366449 - DNA, 1014 bp, Homo Sapiens
cagcgctggtacggtccggagtatcgggatatcgtcgacccacgctgtcgcacttctgaagccagcctgaaaaatctctgccagatgtcccaggccgtactggatgaggatctcttcaacttcctgcaggcccactggttcacctgtgaactgctgtggtacatgcatgttaggaagggcctgcttgcgtgtaacacctacatggacagcctagacattgtcaccagcaaggtgtcaagcctctttcgggaacagcagtcgctgctggactgcatcctctgctttgtggattacatagacttctttaataccaaaggcttgaagaacttgcccacacctcctcccaaattaaagagagctcggccggcaagcatgccactgaagtccaagaaggcttttggaatctgtggagagagccttaccagcctccctgcagaagagaccaagccagacgcacagcaggtacaggtacagcatgcagtcacaagtgccgccctcgcaggttggcatgctggacaccttgcaaccagagtggctctgaactagcctacaagctgtgccacaatgagtgggaggtggtacagaactccagccactggtggacatggctggctcttcagtggacgttcagctgctagaggactctcaccaggttagcaaagatggctgtagctgcagctgttcctttcaacaatggtaccacctgccatgccgacacattttggctctgctgcacaccagccagtagccggttggtgaagccatggtgtgccgccggtggcagaagaagtaccagtacctccttgggcccaatggggagctccaggatcgtggtatggtcccaaacacaggccagcctgagaagcaaggacggaacgacatgattcaggacctaagcagggagttagcaaacctgctcatgcagaccgaggggccagagctggaggaacgctactccaccctgcgcaagattgtggatatctgggctgccctcccagccaaccgtggactagt

SEQ ID NO: 366450 - DNA, 1024 bp, Homo Sapiens
  misc_feature (427)..(480): n is a, c, g, or t
tggtggcgattacggctggtgtgggccggctagaggaagaggcgttgcggcgaaaggaacggctgaaggccctacgggagaaaaccgggcgcaaggacaaggaagatggggagccaaagaccaagcatctcaaagaagaggaggaagaaggcgagaagcacagggaacttacgctgcggaactatgtcccggaggatgaggacctgaagaatgaggagggtgccccaggccaaaccggttgcactggaggagaaggtgaaggagcagctggaggccgccaagcgccgagcccgtcatcgaggacgtggtgagtgcctggaccaccctggcatcctcgctgcttctgtgagtcctgtttctcttcgccacttgctctccctctgccccgcattccttctcgtcacttctttattcccttcccaccagnnnnnnnnnnnnnnnnnnnnnnnnnnnnnnnnnnnnnnnnnnnnnnnnnnnnnntctcgagcctgccctcccccttgtcctggggtggcccctccaccctgatgtgtgtctcctcccttcccaggacctggccaacctcgctcctcggaagcctgactgggacctctagagagatgtggccaacaagctggagaaactaaaaaagcggactcagagggccattgccgagctgatccgagaaagggtgacaggccaggaagacagcctagcctctgccgaggatgctgccaccgaacaaaagacctgtgactcccattgaggcatgccctgccccaccactcgcccatcaggtctgtcctgcaggggaaggtcttgggccagggatgggggctaggcttgtcatcacttccagtttgggttctgagcaaaaacttcctgcccttaaggtctgaaaccccatggatgaggtcagctcctggcctgcgggggggccccgccattctgaaggagggaaaacccccaacatctctgggggggcctgggtcttgccatggggatgacacaggggcgggaagaatgaaacattttggaattttcc

SEQ ID NO: 366451 - DNA, 809 bp, Homo Sapiens
ggggtacgcgggcaagatggaggcgactacggctggtgtgggccggctagaggaagaggcgttgcggcgaaaggaacggctgaaggccctacgggagaaaaccgggcgcaaggacaaggaagatggggagccaaagaccaagcatctcagagaagaggaggaagaaggcgagaagcacagggaacttaggctgcggaactatgtcccggaggatgaggacctgaagaagaggagggtgccccaggccaaaccggttgcagtggaggagaaggtgaaggagcagctggaggccgccaagcccgagcccgtcatcgaggaggtggacctggccaacctcgctcctcggaagcctgactgggacctcaagagagatgtggccaagaagctggagaaactaaaaaagcggactcagagggccattgccgagctgatccgtgaaaggctgaaaggccaggaagacagcctagcctctgcagtggatgctgccaccgaacaaaagacctgtgactccgactgaggcatgccctgccccaccactcgcccatcaggcctgtcctgcaggggatggtcttgggcagggatgggggctaggcttgccatcacctccagtttggcttctgagcagagactccctgcccatcaagtctgaaacccccatggatgacggtcagctccttgtctgctgggtggcccctgccattctgaatggaggcagaaacagcaacaactctgggcgtgcctgtgtctgcacatgtgggatgtacacatgtctgaatatatgtatatatttttgaacttttcccaaaaac

SEQ ID NO: 366452 - DNA, 351 bp, Homo Sapiens; identical to SEQ ID NO: 173074

SEQ ID NO: 366453 - DNA, 1090 bp, Homo Sapiens
  misc_feature (701)..(701): n is a, c, g, or t
  misc_feature (834)..(843): n is a, c, g, or t
caggctgtacggtccggagtttcgggatatcgtcgaccacgcgtcgggacgcgtgggcggacgcgtggggcagaattacattgctgtgctgagcatacgtagacttcaggagtcaaaggggaaggaaggaggtagcgggctgttgacttcctctggttgctggaggcctggaccaaggtggagttagtgggatggaggaagtggaagaaggcatgggatttgggaggctagagcctgcattggtggtgaactggatgtcatagaggagggaaggaccaggaaccaggaagagaagaactctctgaattgggcacgcacatctctgatgggcaccgatgaggatcgttaccaggaacgaggagactgggatcaggaaagtggcttgggagggaggaaccaaggcttctcttttggatgtgtcaagatagatctgccttcgagaaatccgagttgtggtatcaaatagccagttggatatgtgagactggagtttgggggaaagagaggccgtggtcaaaaacgtaagtttggaaacgtcaacataaagccacaggattgggtgagtggctagcaggggggtggggacagagaagcgaccctggccagagccttggggacatctacatctgggggagaaggggatgtagcaaaaagagcttaggagtgatctcgaggtaggctgaaaccaggagggttacagnagggcaatgcacctttgtgtttcaagaaggagaggagacagccagctgtgccaagggctgctgagacttggacagggagccaaaagccaaatgaccctttggtctgatgacctggacagggtggggatcttgnnnnnnnnnntggtcgttcctggcaggggggggaacaaaccccctccggaatggagggaaaaaaaatttggggggaaaacaaagggaaaggaatttccgccaatgggttgtgtggtggtgggggtgggtggaaaacaaaacaaaggcggggggggagggccccggtggttatccccccctttttggaggcccggggggggtgactctttggggcggagttttcaaaccaccccgcccaatgggaaacacccccctcc

SEQ ID NO: 366454 - DNA, 809 bp, Homo Sapiens
tggaacctatcaggtataaagttggctgaactttttccagtccaaaattgtgtaaggtgaaccaactgagatgtctatggtgttgcctgttgttttctgctgttaattgttggttttcttcaattacgccatgaactaacttttttctcacaaactgatgtggatgatctgccactgtgggcttcttcttcaacattaccttatgccttcttaaaacgagttatccatttgtaaactgatttctttggagcactgtccctatcaacttttcataaagcatcaattagttcaccattcttccacccaagtgtcaacatatatttgatgtttgttcttgcttcaattttagcagaattcgtgttgttctgatagagcctcttttcaaactgatgtcttattcttcttagtgcttcaaactagatccttatttccttcattgtggcaaagtgtttcagaaaagggttccttgaattaaaagtcggcgtatcctatttgactcctgctcctccggtatcacatacctacagccaaccatgccaagagcttccccattatctccgcatcggagagcctttcctcccgatatcctccagtttcagagaccgcacccggagacccattggcaggttcctggattcgcctcaattttggtcctgcctctctgcttcgcattttcaggcttggcctcacaagaaggacgatggcgccagattgtgccagaatgggtgaaaacagaaggaaaataaaccggttgcagcaaaacccactattccgcctccaacgcggagggaggagcggtcaaatgcccc

SEQ ID NO: 366455 - DNA, 1065 bp, Homo Sapiens
agcggggccccgccccacgccacgccacggcccgccgggccccgcagggagttcgaaggcttcgaggctgctcccatacgcactggtggaaggagaggccgcgctcccggctgagcacggtgtcacgggtgctgcagcccactgcggagcaacttcgggtcatcttcttgttacgtggggccacaccttcggggttcccgcgacagcatgaatcacgaccactttagctccgcccgttgactctgcggctacgacctttatttgtcacgaaaggcgggctttagaggcgcgggacttccacacttcctctccgaaggccctgcgccggtgccgtagccaatgacaggccacgttgtgtcccagcagccaatcggaagggcctgagcctgaagacgtgcatttgaccgctcctccctccgcgttggaggcggaatagtgggttttgctgcaaccggtttattttccttctgttttcacccattctggcacaatctggcgccatcgtccttcttgtgaggccaagcctgaaaatgcgaagcagagaggcaggaccaaaattgaggcgaatccaggaacctgccaatgggtctccgggtgcggtctctgaaactggaggatatcgggaggaaaggctctccgatgcggagataatggggaagctcttggcatggttggctgtaggtatgtgataccggaggagcaggagtcaaataggatacgccgacttttaattcaaggaacccttttctgacaacactttgccacaatgaaggacaataaggaattgttactctcagagatgttgagaaaagatacatgggtcttggaagataattactcaaaatatgcagggaaggaataaaattgaagggtgtttttcttagagaacatcatttgtcatattcatttgatcaagaagttgaagatttatataataaggatctagtttgaagcactaagaagaataagacatcagtttgaaacagaggctctatcagaacaacacgaattctgctaaaattgaagcaagaacaaacatcaaatatatgttgacactgggttgga

SEQ ID NO: 366456 - DNA, 2092 bp, Homo Sapiens
  misc_feature (58)..(145): n is a, c, g, or t
ggtgtaattatcgaattcaaagggaggttttgcgattataagtattgattatggcaannnnnnnnnnnnnnnnnnnnnnnnnnnnnnnnnnnnnnnnnnnnnnnnnnnnnnnnnnnnnnnnnnnnnnnnnnnnnnnnnnnnnnnnagtggtaagaggcaagcgagaattggggaaccctcggcgtagaggaggcgacggcgggaatggggtttaaggataatattattcgggcagggggggtgatataaaaataggtggggggttatggcggggaatgagaaacatgttgtagagggggggaagtgtgtagccggtattgtgaattagaggtgggataaagggatctcgtgtaggggaaaatgcaatgagtgggtatcgggtggccgcccgctatgggggaaaaagaatatatacccgtgcccgaggagttctgaaagtgcgggaagtgattttctggggttgtctcagggcgggtcgggcgaggggctcgcagtggtggaggaacgaggggtaggcagcaagttcaccccgtagaaagtttttgtcgcgttggccaggagattttgggaacaccccatgttatttcgacaaaaacgcccggaacggccggagcccggcaactggtggggacaaggaaagaagggcgggaagaagacgcaagaggtttgaaagggagagaggtgggccatgcacctgcgtagtgcgtgctcgttgcataggtacttgagtaaggtagtgagcgggcctcaggcgtggcagcacgcgacattgaaaagtgaagtggtcagggagcagtcatatctatgcaggagtctcacgcgccaagagggcgacatacatgatagacatgtatcacatatgcatgcctggcaagaggactaggcccagaatgtcctgaaggcagggaaaaggtcaggtcagaagggacatcaagaatacggcctgaaagcaaataaccaatgaaatcaagaactcccataaccctggtaattaaaaatcaagggggtagcgtctggagacatggaaggcaagggtggagccccccgttatgcctctcccagggccactgagtgctgtggcacaggattaggaagaggctgggcttggggcaaggaccacaggtcagagaacgcagccagacctggatgaaagtctataccgtgggaaaaagggaacgaggagggggaagcgacgggatgtaagtttcttggatctaagtttctagatgcatgggatgtttcgcacagtctctgatccacgtgagctcttctggaagagaagctctcttcccctgggagccctgtcatggggcggtgacttccatcccgaagctggctagcaggcagaggtggtctgaagagcagaaggggcttgggtaagccattggcagcccagagtatctcttcagagagaagggagagacgacccaggagcttgagagttccatctcgatacagcctgtgatcagttctgttcccattctcacaggactcagctgagaagaagatgtaatctactgtcattccaagacccaatggcattgtagtgacctctgggcggccacgctggggcaggaagtgggtatatactgacgtcaggtggaggcagtgctggatggtacctacagtcctggagaaggcaggctcaagctccgatgcatcttcctcaaggacagactcagcccaacccgcaggtcgctctggcttagtatctgtcactccttccataaggaccagtcctactggtcgctgacaagcgatgctgcagaagcggaaacgtagcaggaagtctcggccatacttgcgtctctctgatctcttggggtgacaggaggtgacatactgacagcaatcagtgatgcccagggagctgggccacagtggggcctgcagcttcctctggtaaagctgatgggagaagtcttcctgtccagataccttccaggctggcatcccatggtacatggagctctccatccctgatgaagttgtagagaggtgaataagggacagaatttaggtccccgcacaagatgatggggcagtggctgccatctgacagtctggccaccttgtccacttccgccaggag

SEQ ID NO: 366457 - DNA, 713 bp, Homo Sapiens
  misc_feature (99)..(99): n is a, c, g, or t
tggtaaccggtccgggaatttcgggatatcgtcgaccacgcgtcgggggtggggagccccacatctgagtagcctgggatgtctcatgctggccctggnctcggtggaagcccttccggaaaggaagggggtgagaatcgggggaccccctttgcctttcaggcaaggccaagaattttctatctggagggacagacactctaaacaaattccccaagctgcattttcagatctattgaggagctttataagaacagagtagcccagccctctctgcatcaaacaatccagctcctgggcaggcagatggtgggagcctccccacgtgattctggcatgtggcagctgagagcggcacattgggcctccctgccaggcatgctaggctgtgggtttggacagccagaccctccctgggatcagaagggcgaggaacactgactctcccccactgggggctttgtcaccttgccttccccttaaccctgtgagggcacattgtcacccccattttgcagatgagtaaactgaggctcggagctgtcaggttctctgtcagggtcaccgagctgggaagcgagggtgcgggattcatgtaactggttggccacagaaccctcccactgtcctcggctgctggaaatcacatccagctgccttcgatctcctgccctgcccccaatagccgtgcctctgagcccacaccaggggcc

SEQ ID NO: 366458 - DNA, 1107 bp, Homo Sapiens
gcggctggaccggtccggattccctgggatcggaagttgaccggggtgcggagctcctgggctgcagctcctggagtttccgaggttcgtgcgcgtctggtggcggcggcgtgatgttctcggcaggagcggagagtttgctccaccaggccagggagatccaggacgaggagctgaagaagttctgttcccggatctgtaaactgctgcaggcggaggacttggggccggacaccctcgactccctgcagaggctcttcctcatcatctcagccacgaagtacagccggaggctggagaagacatgcgtagacctgctgcaggccaccctcggcctgcctgcatgccccgagcagctccaggtgctttgcgccgccatcctgcgagagatgtccccctctgacagcctcagcctggcctgggaccacacgcagaacagccggcagctgagcctggtggcctccgttctcttggcccagggtgacagaaacgaggaggtcagagccgtgggccagggcgtgctacgagcgctggagagccggcagcctgagggacccagcctcagacacctcctccccgtcatggccaaggtcgtggtcctcagcccgggcaccctccaggaggaccaggccaccctgctcagcaagcggctggtcgactggctgcgctacgccagcctccagcaagggctcccacactccggcggcttcttctccacgcccagggccccggcagccggggccccgtcaccgaggtggacggggcggtagccacagacttcttcacggtgctctccagcggccaccggcttcacagacgacccagatggctgaacgtgcaggccttctctatgctgcggccgtggctgctgcacagcggcccccgagggcccgggcaccctggacccaaatgacagggccagaacaggagggctccccctctgtcgggggatgtccgcccaactcctttgaccggcccctggttgccgccccggggaatctgatttcggaaggggggccccctcctggtaaacctcacagggtctcatgggaccatatattcccaacgaacctctgcacgacagggggacacccccacgctggttta

SEQ ID NO: 366459 - DNA, 788 bp, Homo Sapiens
gggctgtacggtccggaattacgggatatcgtcgaccacgcgatcgcatgagacccaagggctacaagggagagaagggcaagcgtggcatcgacggggatggacggcgtgaatggggagatggggtacccaggcctgccaggctgcaagggctcgcccgggtttgacggacattcaaggaccccctggccccaagggagaccccggcgcctttggactgaaaggagaaaagggcgagcctggagctgacggggaggcggggagaccagggagctcgtggaccatctggagacgagggccagccgggagatgcctgggccccccggagagaaaggagaggcgggcgacgaggggaacccaggacctgacggtgcccccgtgggagcggggtggccctggagagagaggaccacgggggaccccaggcacgcgggggaccaagcaggagaaccctggtgaagctggcccgcagggtgatcagggaagagaaggccccgttggtgtcctggagacccgggcgaggctggccctatcggacctaaaggctaccgaggcgatgagggtccccagggtccgagggtgccagaggagccccaaggaccttgccggaccccctgggaaacccggggctgatgggtgaacaggggacgaagacggccccgcttggaaattggcaccgagggcttccgcgagttcccggggtatccagggcaacaggggcgctcccgcgataaacggcacgaaggggtaccacggcctcacggcggacgagggagaagccgggaccc

SEQ ID NO: 366460 - DNA, 808 bp, Homo Sapiens
ggctggtactggtccggaattccgggatatcgtcgaaccacgcgtcggtaggattgggcagctgtgctggctagccgttgctggcaccgctcctgttgctgcgacctgccaggggtccagtcctgccggccccatccgggccttcgtggtgccccacaagccacatggacgtgggctgggtctacactgtgcagtgaaagcatgctgggcgtacgccgccaatgtctacacctcagtggtggaagagctggcccgcggacagcaggcgccggttcatcgctgtggagcaggagtttttccggctgtggtgggatggcgtcgcctcggaccagcagaaataccaggtccgccagctcctggaggaaggacgcctggaatttgtcatcggaggccaggtcatgcatgacgaggctgtgacgcaccttgatgaccagatcctgccagctcacagaaggacacgggtttctctatgaaacatttgggatccggccaaagttctcctggcacgtttgacccgttatggcgcctctgccacagaagcccaccctatttgcgctggcgggcttcaatgcccacctcggctcccggatcgactacgacctgaaggcagcatgcaggaggccggggggctgcagttcgtgtggcgagggtccccatccctctcagagcggaaggaaatcttcacagcacatcatggaccagtacagctactgcaccccgtcccacatccctttctcaagcaggtcaggattttactgcaatggcgtggactgtcttccccaagcatcccccagaatggggtgtacct

SEQ ID NO: 366461 - DNA, 2097 bp, Homo Sapiens
  misc_feature (1853)..(1901): n is a, c, g, or t
  misc_feature (2013)..(2013): n is a, c, g, or t
gatcaggctgacaggcggtggggcggctcgtgccctggcggagtcggcggcgggcggggacgcggcgctgggaggacgcggcggcgctgggaacggacgcctgggcgccccgaggcgccgggatgtggagcggccaccccagccagaccaggtcctcccgccgccccttgcagcgtgtccctggtcccctggaagagcacggacccgctgccaaggccacagggagtccccaggagccctggtggagacctctgcaggggaggaggcccaaggccaggagggccccgcagccgcccagctggacgtgttgcgcctgcgcagctcttccatggagatccgagagaagggctccgagttcctgaaggaggagctgcacagagcgcagaaggagctgaagctaaaggacgaggaatgtgagcggctgtccaaggtgcgggagcagctagaacaggagctggaagagctgacgggccagcctgtttgaggaagctcacaagatggttcgagaagccaacatgaagcaggcggcatcagaaaagcagctgaaggaggctcggggcaagatcgacatgctgcaggcagaggtgacagccttgaagacgctggtcatcacgtccacaccagcctctcccaaccgcgagcttcacccccagctgctgagccccaccaaggccgggccccgaaagggccactctcgccacaagagcaccagcagcaccctctgcccccgccgtgtgtcccgctgcgggacacaccctcaccccagacagaaagggcaaggagggggacacaaccctgtttgcagagttccaggcctggagggaatcccccaccctggacaagacctgccccttcctggaaagggtgtaccgggaggacgtgggcccctgcctggacttcacgatgcaggagctctcggtgctggtacgggccgccgtggaggacaacacgctcaccattgagccggtggcttcgcagacgctgcccacagtgaaggtggccgaggttgactgtagcagcaccaacacatgtgccctgagcgggctgacccgcacctgccgccaccgaatccggctcggggactccaaaagccattactacatctcgccatcttcccgggccaggatcaccgcagtgtgcaacttcttcacctacatccgctacatccagcaaggcctggtgcggcaggacgcagagcccatgttctgggagatcatgaggttgcggaaggagatgtcactggccaagctcggcttcttcccccaggaggcttagggcgcggcccaggcctgaaggggagctctgagacagagcaaacacccaccccagaacaagccgacacacagggagacgggggcctggagccagccctgagccagaggcagaatggatggacagacaggccatggaggcagcactgagccagcaccacacgtccatcctgggacagacgggcctggacttcacggcaagacccccctctcttccccactgggttctgccaccaccaggaggatttcaagaaagcaccaaagaccagggagctcggatccatactcggggggcctcagcccttgggaggggacacctgaggcagccagcgccccctccccagtccccagaactgcctgcaggtgccttgttgctggcttgtcttcagaaagggactgttctgggtggctggatctccagggtaccctccaccccagctgccaagccctgggccagcagcacccccttgtggccatcctgtgccttgttcccggtggcctccctattggactactaggaggggctggcagggcctccatagcacagaattgccccaaagccttgttaagatgagtcaagannnnnnnnnnnnnnnnnnnnnnnnnnnnnnnnnnnnnnnnnnnnnnnnnacaagggcctcccttggcactttccctcccaccccgtctcagccctgtgtctcctggaggcccctgctcccaaaaccgcctgaaaggactgggggcacttttctgccccagnagaaacccagacaggggctttcagaatcgccccacgcccgttttttccagctgtggggttgggccatggcagaaccacccgccc

SEQ ID NO: 366462 - DNA, 858 bp, Homo Sapiens
ggctggtacggtccggaattctcgggatatcgtcgaccacgcgtcgcaccacgtgcagccgctctcgtgcaggcgtttgcagtgtgcagctgagttcggcagctcacacagcacccctttcaagttgttttgcagtgggtgcctcttgtgagacactgtttctgagagcagcttttgtggcatcttacagggcagatttctggtcccacccacctctgcctccgccatggctgcaagaaccgttatcattgaccacgggtctggctttttgaaggctggcacggccggctggaatgagcctcagatggtcttcccgaacatcgtgaactacctaccgtgcaaggagaaccctggccccagctatgcccgtaggcgtgtgagcctgggcatcgacatttgccatcctgacacctttagctaccccatcgagcggggccgcatcctcaactgggagggtgtgcagtacctctggtcatttgtgttggagaaccacagacgggagcaagaggtcccccctgtgatcatcacggagacacccttgagggagcctgcggaccgaaagaagatgctggagatcctgtttgagttgctgcatgtcccatcggtcctcctggccgaccagctgcagatgtccctgtatgcctctggcctcctgaccggagtggtggttgattctggctatggcctgacccgcgtgcagcctttccaccaggggccgccccttgcccgccagcggccaagacgctggagttcgccggccaggatctctccggctatctcctcaagagtctcttttaaggaaagattgcgatagacgctgctgtttcagctggagacagtcgccgtgactcagatgaa

SEQ ID NO: 366463 - DNA, 699 bp, Homo Sapiens
aggctggtacggcccggagttcgggatatgtcgacccacgcgtcggcttcagcggctccacgtgtcagctggacgtggacgaatgcgccagcacgccctgcaggaatggcgccaaatgcgtggaccagcccgatggctacgagtgccgctgtgccgagggctttgagggcacgctgtgtgatcgcaacgtggacgactgctcccctgacccatgccaccatggtcgctgcgtggatggcatcgccagcttctcatgtgcctgtgctcctggctacacgggcacacgctgcgagagccaggtggacgaatgccgcagccagccctgccgccatggcggcaaatgcctagacctggtggacaagtacctctgccgctgcccttctgggaccacaggtgtgaactgcgaagtgaacattgacgactgtgccagcaacccctgcacctttggagtctgccgtgatggcatcaaccgctacgactgtgtctgccaacctggcttcacagggcccctttgtaacgtggagatcaatgagtgtgcttccagcccatgcggcgagggaggttcctgtgtggatggggaaaatggcttccgctgcctctgcccgccgtggctccgttgcccccacatctgactcccacccgagccatccctgtgcccatgagccctgcagtcacggcatctgctatgatgcaccatgg

SEQ ID NO: 366464 - DNA, 1274 bp, Homo Sapiens; identical to SEQ ID NO: 178623
  misc_feature (395)..(395): n is a, c, g, or t

SEQ ID NO: 366465 - DNA, 953 bp, Homo Sapiens
tatggcaggctggtaccggccctggattataggattgcgtccggaggcggtggggagctgaagactgaccctggggccgtgacgcggggtgcaggccctgtgggcggtgtgcgggtcctggggactgggtgctgggcggccgaggcccggaagcggactgaggcggcctggagtcttagttggctactcgccatggacgaagcggatcggcgtgctcctgcggctggtgccggctgcggctggtggaagagctgcaggtggaccagctctgtggacgccctgctgagccgcgagctgttcaggccccatatgatcgaggacatccagcgggcaggctctggatctcggcgggatcaggccaggcagctgatcatagatctggagactcgagggagtcaggctcttcctttgttcatctcctgcttagaggacacaggccaggacatgctggcttcgtttctgcgaactaacaggcaagcagcaaagttgtctgaagccaaccctagaaaaccttaccccagtggtgctcagaccagagattcgcaaaccagaggttctcagaccggaaacacccagaccagtggacattggttctggaggatttggtgattgtcggtgctcttgagagtttgacggggaaatgcagattttggcttacatcctgagcatggagccctgtggccactgcctcattatcaacaattgtgaacttctgccgtgagtccgggctccgacccgcactggctccaacatcgactgtgagaagtagcgaacgacgacatatcctcgctgcaatttacatggtgggcaaggtcaagtggcgaacatgactggccgagaaaaatgtgagctggcttatgtggaagcatggcgcaaccaaggacacaggaacccggaactgtagagatagtagataatacctctcaacgctgtaaggccaacaactcattcca

SEQ ID NO: 366466 - DNA, 1198 bp, Homo Sapiens
ggtccggaattcttcgatttccatcagtttagaaaaagaataacagaaaaacaggaagaatctgagctgtaccaatgtgctccagagcaattctacgaaaaaatgtggaattgatacaatcgatttaaaaagaaatgaaactccaccagttcctcctccaagaagcacctctcgaaattttcccagctcggattctgaacaagcctatgaaagatggaaggaaaggttagaccacaacagctgggtgccccatgagggtcgaagtaaaaggaattacaaccctcacttccctttgagacaacaagagatgtctatgttgtatccaaatgaagggaaaacttcgaaagatggtatcatcttttcctctttgggtaccagaagtcaaaataggataggcaagcctccaagtaatggaagatgttggacttagcatgtggtcatgtgacattgggataggtgcaaaaaggagcccctctacttcgtggtttcagaaaacctgctctacccccagtaatccaaaatatgaaatggtgatcccagatcaccctgtctaagatctcatcctgatcttcatgtaagtaatgactgtagctcctcagtagcagagagcagtagcccacttagaaatttcagttgtggctttgaaaggactacaaggaatgagaagctggcagcaaagactgatgaatttaacagaactgtattttagaacagatagaaattgtcaggcaatacagcaaaatcacagctgctcaaaatcatcgggaggatctcaaggccctgggatacctcatctactcacacaggtagcatatcacaaagtaacgatgtgtccggtatttggaaaaccaatgcccacatgcctgtgcccatggaaaatgtgcctgataatcccaccaagaaatccacaacaggcctagtaagacaaatgcagggacacctaagtcctcgcagttatcgaaatatgctccacgagcatgactggagaccgagtaatttgtctggccgtccgaggtcagctgatcccaggtcaaattatggtgtaagtggaaaagctgctgaaaagctatgagacagcaacagagtctgcattgcaaaattctaagcgcttccaggataattggaccaaatgtaattctgatgtcagtggtggtgccacattaagtcagaatttagaaatgctccaaaatggaacaac

SEQ ID NO: 366467 - DNA, 722 bp, Homo Sapiens
cctggtactggtcccggcgttattgggatatcgtcgaccacgcgtcgcccacgcgtcgccagtgcctcccaagcccaagctcaagtccccgctggggaaggggccggtgaccttcagggacccgctgctgaagcagtcctcggacagcgagctcagtggcccagacagcaccacgcctgcctctgtccgggctggccatctgccgcctgggcctgcccgccctacgactacctctatccagagaagtgtccaatgctatgtgggggaccccgtggagagccgggggctccctggacctgaagacgacaaaccaactgtgatcagtgagctcatgctcccgcctgcagcagctgaacaaggacacgcgttccctgggggacggaaccagttggtggcctgggcagactgctggaccctgcaagaagtcgcccatcgcagcagctcggcatcttcagcagcctcggtgagctgagctccatttcagcgacaggcgcagccccgggggccctgggcggcggggcctcgtactcgtcgtccagcctctccatcccgacacgagcccaaggaggtgcagcttcgatgggtgcggcagacgtgaagcagcgacgcaagatccgctcccacctcgccgaacggccagcatgcccctcagccccagaaatccaggcccccggccccccgggagccaccgagcaccaggaacgaacccataccagacagaa

SEQ ID NO: 366468 - DNA, 1247 bp, Homo Sapiens
  misc_feature (790)..(810): n is a, c, g, or t
tggacggtcggaagttcccgggatatcgtcgacccacgcgtcggttatagaggaagatgtgtggagtgtatttccattttgaacgagctctatcagaacaaagattcgtttattcttaagattttacgtcagtgttcgatttgttgagtattgtagtcgcaagggtatttaatgttcgctgtaaggtgaactcggaggtttgagaaggtttacgtatctgccccagcggaggtcgaagttaacctcggtcccttccccagtgcttcccgtatccggattaacaaagcgcaaggcccgcctcgctcttcctgcagcaatttgcaaacgggtacgctctcggaagctgctacgggttcggtcaccttcctcttcggcgtctggcccggcgctcgcggacaggcgcccgagttgggggccgggggattgaggtgtccggtcctcccgggacacattacacacacaagcgcagccgccagaaagctgccgaggaccaggccggcgcccagggtcgtgggcagccagtgcggattatcgattctgagattcaccctttcttccccgccctaacgctgtgctatctctggcgccctcccggagcccgggctgcttagggccgctaggcactcagattacagccggggttcgtcggactcagggcggaaagagatggccacagccgcgcgcccgcagcctggtacctgtccttccagtcccgcgcctcggggtttggccgtccagaggccgggggcttgggggcttggggctttggaccttcgtgcggcctgtgttnnnnnnnnnnnnnnnnnnnnncgccgctcagcttttatccctgcctgctctctgcagggagtcctgagctggggccaggagccccgggccgcggcgagctcactttcagcagcagggctggcacctggagaagaacagcctctccccgctgccgtccggagtgtaggcgggcttttggcgggcgggtggggttggcttaacagggtgtcctggggaagccgaattgccggcccaccgccagcgagccagacacagacgccccgaggatcgcggaaccggcacactgcagccagtgcaccccggcacacatctcatccggcgacccacgcccggctagtgcgcctatctcagtacagaaccacctcatccatcgcgcccaggtctacaggacgtccaagcgtgccccatcaccacgcagcagcgaccaaaggtgcatccccaggcttacccggaaaact

SEQ ID NO: 366469 - DNA, 787 bp, Homo Sapiens
ccaagaatgaggtagatatagaacacgcggttattttagcaggctggtacggtccggaatttccgggatatcgtcgaccacgcgtgcgcagatagctctggctttcttgctgcccacaggggcctggggcaggaaggagacttgctgagatgccatggagtgcccatctggtcactggcagtctgggcaggttgccccatttctgggtttgtggtgacggaggggaggccgagaggcacagacgcaagtccccgggtggctgcaggcagctccagcccggtcctgaggatcctcctcaccatggtcactgtgccttagtaactgtgcccaggaagtggcctgctgcttgctgtgctgctgcttttcctacttctgcccttccctgccacccctcgcatgtcacagctgacaagcaattccttgtcttccctggccccctgggggaagggctgagaaacagtccatgtgcaccccaaccttaatggcctgaggtgggcagaggggtgtggagcagcctggagtacagggccctgggggaggagcccactgatgaggggcgctctcccatagccatgtgttgaatgctaactaggctggggtggacgaactctgccaactgctgtcatcttagaagatagatgcagcagtaaggaatgttggtatggcttttgttctgaaagttttctgaagcactgtggctgggaaacttcgaagcggaccctgtgctgcatgtctgctcctcccctgagcctgtctgcttgggggtggtaaaaataaaaatcccagt

SEQ ID NO: 366470 - DNA, 596 bp, Homo Sapiens
  misc_feature (13)..(13): n is a, c, g, or t
  misc_feature (32)..(32): n is a, c, g, or t
  misc_feature (62)..(70): n is a, c, g, or t
  misc_feature (72)..(72): n is a, c, g, or t
  misc_feature (92)..(92): n is a, c, g, or t
  misc_feature (146)..(146): n is a, c, g, or t
  misc_feature (519)..(534): n is a, c, g, or t
tattaaggaaaangaccaacaaaaagaagaangtgcaacgaaagcctcgtgtgctaatcttnnnnnnnnncncccctccggggtaacgaaanaaacccccaaaccaaaaaacatctcaatgccggaaaacctaagctgctcaacgnctaacgcccaagtgttggtgcaaaatttgcctctcaaatgctgccctctcaacctaccccagggacaccccacggctcctccctgcccctgcccctcccccagccttgaggtgccctgcccgcggggcctgtgaatatgcaatgggagtcccaggctgtacagtggtgagtgtgtgtgtggcgtggcgtgcccgtccccagggctggctgggtccccacgcggggcctgtcatgtgaagctcgtgtcctgactttgtcttaagtgcattcacgcacttactcttggccttatgtacacaccttgcccggccgccggggcacataggggttttatcgggcgtgaatgtaaataaattatatataaatattgctnnnnnnnnnnnnnnnncgggcgccgctccgatcgacgcgtggtcgacatatcccggtaattccgaccgtaccagcctt

SEQ ID NO: 366471 - DNA, 792 bp, Homo Sapiens
cgcaccagtgtactggcaggcccgtacagcaagttcctggaggatgtgtggagcgatatagtctggcgtgccacagaatgtgcgcgtggggacaccatgtgcagatcccctccttgcacattccgaagtctgccagtgtacagtgaccctccgtggtccaaacaggacattgtccagtttcagatctctatagatgagtccggttatcatggaggaacatgagagccggaaatgatttcggcagcatagaagcgagctcgtgcttcatcaaaaacgacgagacttctgaatgtggaacatcaagtgcaccgcccattcgacgaactgccatcacaggagacagacgatcgggggtctgaaagcagcagaacaactgagtgaggaaggggtgattgcgggccagagacaggatcctggttctcggtcatggtgcattccacatcatcatcctgcagaatcacgtccttcttcagcaccttcacagcatagaggtctcctgtttcttttactcttgcaagcatcaccttcccaaaactccccttccccaacactcggatgaactcaaagttgtcgataccaagtcggttggaagaattaaccccaatcccatttccttctttgctgctctcctttccctgtcgtcttagggtcgatctggaaacgagtttcgaggttggagaaatatttccgggttggagacccatccctgccagggtcttggcaagttccaccgcatttacacccacagttagggcccacgttcgcttgacatcgaatatgcacattcatttt

SEQ ID NO: 366472 - DNA, 815 bp, Homo Sapiens
agcggggaacctaccggtaccggccgcgcgctggtagtcgccggtgtggctgcacctcaccaatcccgtgcgccgcggctgggccgtcggagagtgcgtgtgcttctctcctgcacgcggtgcttgggctcggccaggcggggtccgccgccaggatttgaggatgggggagtagctacaggaagcgaccccgcgatggcaaggtatatttttgtggaatgaaaaggaagtattagaaatgagctgaagaccattcacagattaatatttttggggacagatttgtgatgcttgattcacccttgaagtaatgtagacagaagttctcaaatttgcatattacatcaactggaaccagcagtgaatcttaatgttcacttaaatcagaacttgcataagaaagagaatgggagtctggttaaataaagatgactatatcagagacttgaaaaggatcattctctgttttctgatagtgtatatggccattttagtgggcacagatcaggatttttacagtttacttggagtgtccaaaactgcaagcagtagagaaataagacaagctttcaagaaattggcattgaagttacatcctgataaaaacccgaataacccaaatgcacatggcaattttttaaaaataaatagagcatatgaagtactcaaagatgaagatctacggaaaaagtatgacaaatatggagaaaagggacttgaggataatcaaggtggccagtatgaaagctggaactattatcgtatgatttggtatttatgatgatgatcctgaaatcataacattggaagaagag

SEQ ID NO: 366473 - DNA, 1027 bp, Homo Sapiens
  misc_feature (619)..(647): n is a, c, g, or t
  misc_feature (892)..(952): n is a, c, g, or t
aggctgtaccggtccggagtacgggatatcgtcgaccacgcgtcgagaggtggggcagcctttcgactctgtccatgacggctggcagggtcaggtagtttctgggcctgcttcccggcaagccgagctagggtgaaaactgggggcgcaccaggatgtgagacagaaaagcagaagatgagactctgttcattcacttttcctaggcccatcctgtggtcatctttccccctcccatcatacctcctccttcctggagcctctgccggcttggctgtaatggtggcacttacctggatatttcagtgggaggatgaaaggcgagactcaccctacgcggtgggacagatggggagaggaaaaaggcagagatggccaggagaggggtgcaggacaaaccagagaggttgggtcaggggaaaagggtggggagaaagaggggtgcaggccctgcaggccggttagccagcagctgcggcctccccgggcccttggcatccaacttcgcagacagggtaccagcctcctggtgtgtatcataggatttgttcacatagtgttatgcatgatcttcgtaaggttaagaagccgtggtggtgcaccatgacatccaacccgnnnnnnnnnnnnnnnnnnnnnnnnnnnnngtatgtaaattatagcactgagggccctgctgccctgctggaccaagcaaaactaagccttttggtttgggtattatgtttcgttttgttatttgtttgtttttgtggcttgtcttatgtcgtgatagcacaagtgccagtcggattgctctgtattacagaatagtgtttttaattcatcaatgttctagttaatgtctacctcagcacctcctcttagcctaattttaggaggttgccccaannnnnnnnnnnnnnnnnnnnnnnnnnnnnnnnnnnnnnnnnnnnnnnnnnnnnnnnnnnnncttctctccctcccccaacctcttaacccctttggcccttcctccaatacttcccttctttccgggccctttcct

SEQ ID NO: 366474 - DNA, 757 bp, Homo Sapiens
  misc_feature (81)..(81): n is a, c, g, or t
caggctggtacggtctggaattacgggatatcgtcgaccacgcgtcgatactgtaccacattccttgctcagaaactgctncacttccttaaattgtcttttttcccccagcgtgaaatgtatcccatttataactgcctattgcctggtctattagcatcccaaaaatgtggaaggcctcccaaccaccattttctgctgtgtccttaggatgtgcagtaaaaaatatagacctaacagtttatgttatagaatggctttatttactttggtgactgtttatagtttttaaataaaagactgaacattttcttgagtccttcatttctgagtatgcttaagacatcttaaaaatatagagagaattctaaattcagctgaaggcaaggtataacggtcacctacctatttgattatatgttgattgataacatattaaatagagaacaaataagagaggtcctttacatgacaaatttgcatgaaataagcagattaaccaagtatttatttttcatcttgttataatgcagagcaaatgtagagaacagcaaatgattgatgcagttaaagctcaatatgcctttttttactggatactgtacatttggctaaaagcttttattgtttgatgtcgtgtttcttgactgtttattcagaatcacagtgtatccaaatcttcagcttgaatttggaggcagattcttagagtgaaaaagctcagtttccatattaaacaatgttttaatatttgatg

SEQ ID NO: 366475 - DNA, 513 bp, Homo Sapiens
  misc_feature (75)..(152): n is a, c, g, or t
gcctggagccttcttgtgcttgcatttactgttgaagatcattgttttgaagggccagaatgcccctttataccnnnnnnnnnnnnnnnnnnnnnnnnnnnnnnnnnnnnnnnnnnnnnnnnnnnnnnnnnnnnnnnnnnnnnnnnnnnnnncattctaactaacctggtagtcttcccatggaagcactttcttttgcacatttccttttcttctgcacatttccttttcttcctctggcatccttccactccagccttgtttcctcttttctctttctgttccatgaagtgagttcctacaaaactctacagtccagtcccgctacttcctcctcttcctcctttcttcatctccattatttccatttaccttggatagggccccagtgagcccatgcacccctgcccatattgcttgctattgtggctgtccagatccaccgcttcctctttccctcttggccacactactataaccaccctaaccctactcctaatcacataacctatt

SEQ ID NO: 366476 - DNA, 500 bp, Homo Sapiens
ctttcagggcagagaggaggaaaggcagaacaggatggatggcaggacctgtgtaagaagaaggttcttaaattctaaacaagggtatagtaaaggtagtgtggccaagagggaaagaagaaatggtggatccagatagcttcaatgagtactgcaagatcaggtgtgatgggcaggggtgcatgggctcactgggaccctatccaaggtaaatggaaataatggagatgaagaaaggaggaagaggaggaagtggcgggactggctgtagagttttgtaggaactcacttcatggaacagaaagagaaaagaggaaacaaggctggagtggaagaggggaaggaaaaggcagcctaagggaaggcactggcctcaatcagtggaagatctggaggagcaacagaaaacagttcttgaagagaaggtgggatagagagaggatggaaaagtttgagcggtgaaagcaggtcaaagtagtgagcacatccctgtggaaaag

SEQ ID NO: 366477 - DNA, 692 bp, Homo Sapiens
atgatagaatcgagctggtacccagacgtcattcttgcatagggtagtgtggctaagaggaaatggatccagatgggcttgatggggagcagatgggcaggcacgatggcagggtgtgcatcggctcactggggctgcatctgaggtaaatggaaataaaggaggtgaggaaatgaggaagagaaggaagtggcgggactggctgtggagttttgtgggacgccttcttgatggaacagaaagaacagacagaggagaaaaggcttgagtggaagaagggaacggaaaaggcagcctaagggaaggcgctagcctgaatcagtggaagatctggaggagcaacagaaaacagttcttgaagagaaggtgggatagagagaggatggaaaagtttgagcggtgaaagcaggtcaaagtagtgagcacatccctatggagaagagatgactgagtcagatgaagcgacaggccctgggtggctgagagaaatattggccacagacaggcaggtaccttcccttggccaaggaagcaaagagaagaaatgtggatgcaaggggaaaggcttcaagaaagaatgtggaagtgggacaatgaggcagcgccgacaggggagtcacctacagaagacagacagggtggaggggcctccagggaaggatggagggcagaaagcgtggcatcgataaaca

SEQ ID NO: 366478 - DNA, 1576 bp, Homo Sapiens
cgctggtacggtccggaagtatcgggactatcgtcgacccacgcgtcgatcaggaaggagtttcgacccgcgctggcgagtcatgagcgccaagtttcccactggcgcgcaaacttgagttacttttgagcgtggatactggcgaagaggctgcgggcggtattagcgtttgcagcgacttggctcgggcagctgacccaagtgtcctgtcttccttcctctgcttgtctctaggctctgaaactgcggagcggccaccggacgccttctggagcaggtagcagcatgcagccgcctccaagtctgtgcggacgcgccctggttgcgctggttcttgcctgcggcctgtcgcggatctggggagaggagagaggcttcccgcctgacagggccactccgcttttgcaaaccgcagagataatgacgccacccactaagaccttatggcccaagggttccaacgccagtctggcgcggtcgttggcacctgcggaggtgcctaaaggagacaggacggcaggatctccgccacgcaccatctcccctcccccgtgccaaggacccatcgagatcaaggagactttcaaatacatcaacacggttgtgtcctgccttgtgttcgtgctggggatcatcgggaactccacacttctgagaattatctacaagaacaagtgcatgcgaaacggtcccaatatcttgatcgccagcttggctctgggagacctgctgcacatcgtcattgacatccctatcaatgtctacaagctgctggcagaggactggccatttggagctgagatgtgtaagctggtgcctttcatacagaaagcctccgtgggaatcactgtgctgagtctatgtgctctgagtattgacagatatcgagctgttgcttcttggagtagaattaaaggaattggggttccaaaatggacagcagtagaaattgttttgatttgggtggtctctgtggttctggctgtccctgaagccataggttttgatataattacgatggactacaaaggaagttatctgcgaatctgcttgcttcatcccgttcagaagacagctttcatgcagttttacaagacagcaaaagattggtggctgttcagtttctatttctgcttgccattggccatcactggcatttgttttatacactaatgacctgggaaaatgttgaagaaagaaaagtggcatgcagattgctttaaatgatcacctaaagcagagacgggaagtggccaaaaccgtcttttgcctggtccttgtctttgccctctgctggcttccccttcacctcagcaggattctgaagctcactctttataatcagaatgatcccaatagatgtgaacttttgagctttctgttggtattggactatattggtatcaacatggcttcactgaattcctgcattaacccaattgctctgtatttggtgagcaaaagattcaacaactgctttaagtcatgcttatgctggctggtgccagtcatttgaagaaaaacagtccttggaggaaaagcagtcgtgcttaaagtttacagctaaggtcacgga

SEQ ID NO: 366479 - DNA, 526 bp, Homo Sapiens
  misc_feature (26)..(26): n is a, c, g, or t
  misc_feature (44)..(44): n is a, c, g, or t
  misc_feature (49)..(49): n is a, c, g, or t
  misc_feature (55)..(55): n is a, c, g, or t
  misc_feature (65)..(65): n is a, c, g, or t
tcccaacggctgccccaattgggaancccccaaaccccttaaanccaancccaanaaggcaaacnctcggaaatctgtcaaaatactcaagaaccacaataagactcaagccacagtgaattcccccacggaaggctttctgtatgaaaaggcacccagcttaacacacctcaagctcccaaatggcccagtccctctgcccagcagcttgtagacattgatagggatgtcaatgacgatgtgcagcaggtctcccagaagccaagctggcgatcaagatattgggaccgtttcgcatgcacttgttcttgtagataattctcagaagtgtggagttcccgatgatccccagcacgaacacaaggcaggacacaaccgtgttgatgtatttgaaagtctccttgatctcgatgggtccttggcacgggggaggggagatggtgcgtggcggagatcctgccgtcctgtctcctctctcagacctccgcaggtgccaacgcactcggccagactggcgttggaaccc

SEQ ID NO: 366480 - DNA, 904 bp, Homo Sapiens
  misc_feature (318)..(690): n is a, c, g, or t
  misc_feature (695)..(695): n is a, c, g, or t
  misc_feature (698)..(723): n is a, c, g, or t
  misc_feature (740)..(740): n is a, c, g, or t
ggctggtaccggtccggaagttccgggatatcgtcgacccacgcgtccgaaagaaaggaagaaaggcaggcaaaagccccagacaggccaaaaccttcatccttcatgcacccaacctgtaccaaacaccagcatggcctggctgtgagtgcacagcagatggaggtttgctgggcagagacactgggctggcctagacactgcctttggtgataccctaaaccaaaggggccagtcccacagtaagaaggagaccactactactcctgctgccctcctccccccaccttgcctagtttacaagacaggaggaaagannnnnnnnnnnnnnnnnnnnnnnnnnnnnnnnnnnnnnnnnnnnnnnnnnnnnnnnnnnnnnnnnnnnnnnnnnnnnnnnnnnnnnnnnnnnnnnnnnnnnnnnnnnnnnnnnnnnnnnnnnnnnnnnnnnnnnnnnnnnnnnnnnnnnnnnnnnnnnnnnnnnnnnnnnnnnnnnnnnnnnnnnnnnnnnnnnnnnnnnnnnnnnnnnnnnnnnnnnnnnnnnnnnnnnnnnnnnnnnnnnnnnnnnnnnnnnnnnnnnnnnnnnnnnnnnnnnnnnnnnnnnnnnnnnnnnnnnnnnnnnnnnnnnnnnnnnnnnnnnnnnnnnnnnnnnnnnnnnnnnnnnnnnnnnnnnnnnnnnnnnnnnnnnnnnnntttanccnnnnnnnnnnnnnnnnnnnnnnnnnnaaacatggtcggccgcnctcggcccctcgaagaagctttcctagaaccattcgttttggccgccgcgggcccaggtaagttaaagtgaaacattgggtcattagcctgtttttccttaggaagaatccctggggcccatgaacctaaatgggcttttgggaatttccctccaccccaaatt

SEQ ID NO: 366481 - DNA, 570 bp, Homo Sapiens
tatcgatgccacgggctcaggctaccgtgtgtgagatggagcccgtggcacactttggcctggggaaggatgaagccagcagtgtggaggtgacgtggccaaatggcaaaatggtgaaccggaacgtggccagcggggagatgaactcagtgctggagatcctcctacccccgggatgaggacacacttcaggacccagccccactggagtgtggccaaggattctcccagcaggaaaatggccattgcatggacaccaatgaatgcatccagttcccattcgtgtgccctcgagacaagcccgtatgtgtcaacacctatggaagctacaggtgccggaccaacaagaagtgcagtcggggctacgagcccaacgaggatggcacagcctgcgtggctcaagtggcctttttaggtgggtattcttcagccgcctctagaatctctgagcctctctctcgggcctcatatctttctctaggccttggactttgccttcagttatatgcactttaaatcccatcaataaaggaaaaaacaaaacaaaactaacagcctttgtggaaaact

SEQ ID NO: 366482 - DNA, 727 bp, Homo Sapiens
ggctgtacggtccggaatgtcgggatatcgtcgaccacgcgtcgcaggatatttttggaagttagcatgaaaatagttagttacataaattcattttattgtagaataattataagaccgataggctgaaccatacacaaataaggttgatcttgttttcctttttggagaaagagaatacaaattaacattaaaattgaaatgtagaaagtaaaatatgaataattttttacaaccactccaaattagttgaaacaaaatcttgaacggtcacgcacttaaatttaagctagccaaatatgttgcactgaattttgaaaagaatgagtgagataactgtaagatacgctcgttcccttttaaaaatagttatttttctttaacatgggtgccaaatcaaatatccatgggctatacttcttaagataataacagctcaaaataatattttttaattcagtagaactaatagcattatggaaaagattctattaaatgttccacaggcccactggtcctcttatataagccaaattttggccatggagcttgtgatacacttgccttacattgtagggtttcttaatttgagtcaagtacactgaaagcaattaaaaactggtaaatattaatttactatgtaaagtgaacttacgaattaacttactaaatacatatatgtagaccttccccgaaatgccattctcaattttattttatgggctcc

SEQ ID NO: 366483 - DNA, 1214 bp, Homo Sapiens
  misc_feature (138)..(138): n is a, c, g, or t
caacgggggcgcagataaatgaggtgggctgatagcgagacggggcaatacgtgacagggggcggctcgcgaaccgacggggcgcggggataccgaagaggcgggcgcgcaaaaacggggaacggggcggggcaggantaacaattcaccggtaattaataacaaggaggggcagcccccatggaggggggaaccagggaccaaggaggcacggagaaggatgcatccccccgaggaggcccaaggggatgtggcccgcgggattctccaaccaagggcgcgtgaaatgggggccccggggaaaggaaaccgcgggcccgaatgcacccaagcaaacttggtaatgcccaggggagttttggcccagtttctcgggggggcccggggaaggccccaagcacccactcagggtccaccaccagtctgcagaaactcgggccatgtggaaccctaccaggtaagaccactgatggcgggcggcagccatgatggcaatgtagtggcgccaggagctggccaagggaccatccgtgtgcagcagcaggtagtgcaggcgccagaagctggtaaagtagtcagggtgcaggcccatcaccactgccaggttgtctactcgcccagaggacatcagtgcctccagccccaggtgctgctcgaggctctcagccccctcccgaaggacctcctccacggggatgaaggcgctgggccctcgagggcctcgccgagcccggctctccctctgctcctctccggggcccgagtcgccgacgccgcccggggcgaaccgcaggtagtccttgagctctgcgcggcactcggagtccgccacgatcatggtgcgcgccaggacccggtcgcggctcgccgacgacccgtgcacccgagtgggtttcggagggacgcccgaatgaagccgggactgggcgccgccggggagcttctagaaccccggggcgtctctcggggctccagaacgctccggaatccgagaacggccgctttggtgctggactcttcccccagtcgggcttcgggaacggcgaaacggcctcgggggcctgggaagggccgcagcgcaggggttttcacggcctcggaagtccgcaggggccagggctgctcccggacccagcgctcctcagcatccccgccgcggaactgccagcgctcgccgggctctgacaccagcagttcagcccgctgcgtccccg

SEQ ID NO: 366484 - DNA, 854 bp, Homo Sapiens
agggctggtacggcccggagttacgggatatcgtcgacccaggcgtcggactagttctaggaggagaagactgacatgagtcctctgcacggatccgtctctccctccccatcaccccttccttctgacacccagtcccagctgtccactgtcccaggtgcagtcactgttgtgcccttccttggggcaggctggctgggggccagaaaggggccatgaggctgtcttgggcccaaaaagggacaataaggccagttgtatgcttcctgttcctcatagcttgccttggtggggatgtctttgttggagttgattctgagctgctgtgattaggagaccatgaaatacagtggtttaagcaagatggaagcttgtttctaattagtctagattgagatggcccagagctggtagggcagctctgcgtttcttcatacgcaccttccaattctgggtacacagcggctgctccagcgcccaccctcctgtgtgcatccaagcctgggggaagcagaaatagacaagagggcacacccactttttgctaaaggcatgagccagaattggcaggctcacctctgctggcctctcattggctgggactcagtcacatggccacaagcagctgctagggaacctgggaagtgtagtcttcagcggggccgcatgtgcctggctcaccttgggagttatcttattgatggaggacgacagagaatggatatggggggaccagtagcatctcttgggagagggggagggagcagcaataactcaagtcgtcggatccagctctcattgtcagagtttccggaacacgttgatccctgtttccctcacttgtgcagcccaag

SEQ ID NO: 366485 - DNA, 1015 bp, Homo Sapiens
tagcgaggcctgggtggcgaatccggcacgaggcctttgggaagctgcccgccgagtctccgagatttgtccctggtggtcccgcggacccctcgtccctccgcagtctccggctggcagcgatggagggcgctggggagaacgccccggagtccagctcctctgcccctgggtccgaagagtctgccagggatccacaggtgccgcctccggaggaagaatcgggggactgcgcccggtccctggaggcggtccccaagaaactctgtgggtatttaagtaagttcggcggcaaagggcccatccggggctggaaatcccgctggttcttctacgacgaaaggaaatgtcagctgtattactcgcggaccgctcaggatgccaatcccttggacagcatcgacctctcctttgcgccccgacgctgccaacagggacttcctgagccagcaggggaagatagagcacctgaaggatgacatggaagcttaccggacccagaactgcttcctcaactccgagatccaccaggtcacaaagatctggagaaaggtggctgagaaggagaaggcccttctgacgaagtgcgcctacctccaagccagaaactgccaggtggaaagcaagtacctggccggtctgagaaggctgcaggaggccctgggggacgaagccagcgagtgctcagagctgctgaggcagcttgtccaggaggcactgcagtgggaagctggggaggcctcatctgacagcatcgagctgagccccatcagtaagtatgatgagtacggcttcctgacggtgcccgaatatgaggtggaagacctgaagctgctggccaagatccaggcgttggagtcacgatcccaacacctgctgggcctccaaggcttggggatcggccgcttgaaggaaaccctgggctgccctggggcgatcttggggccctcagccgaacttcaaacaagctacctgcgggggaggggagaaaccccgtggaaacccggccctccga

SEQ ID NO: 366486 - DNA, 974 bp, Homo Sapiens
gctgggtggcgttcaaaacgaggcgcgtctgcgtggagaccggctggccgcgcgcgggaagccgcggaactgcgccggaaagtcccccggctctggggccccggtgacccagagtaagcctccaagaaggaggaggaggagagaaaggcggctcttcccgtgcccctaccagaggcttcggtgggcccaccttgtgacctccgcggccggcccctcagtggaactgcgtcccacgcggggggcgtcccgaccgtgggggccgcggcccgcgctgaccctggacgtcgccgcgcagcccctggttccccaaggcagaggaaataccctggtggagccctccttccatagaaccagagatggcatctgtggatttcaagacctatgtggatcaggcctgcagagctgctgaggagtttgtcaatgtctactacaccaccatggataagcggcggcgtttgctgtcccgcctgtacatgggcacagccaccctggtctggaatggcaatgctgtttcaggacaagaatccttgagtgagttttttgaaatgttgccttccagcgagttccaaatcagcgtggtagactgccagcctgttcatgatgaagccacaccaagccagaccacggtccttgttgtcatctgtggatcagtgaagtttgaggggaacaaacaacgggacttcaaccagaacttcatcctgaccgcccaggcctcacccagcaacacagtgtggaagatcgcaagtgactgcttccgcttccaggactgggccagctagtgggggtggcagaagtctctgcttcattcagccctagctctgtagagaaatgcaaacctcgactcttcaggatgtggaggaacacaaagttcattttctggtggttgccggagacactgccagactccccctgtggccaaggggttgaactccttttttgttgcctcaaggttctaggaagtcccctttccctga

SEQ ID NO: 366487 - DNA, 1335 bp, Homo Sapiens
  misc_feature (398)..(398): n is a, c, g, or t
cgggttctccggctccaggttaactggtgagaagatgacagtgagctatccctgcatgacagggtttagtgcgtgggttctgagctccccgcggcaccacctgcaaggcccgcatcagcactgggtagagctccctgtaaaggtaaccgccctgtccataggaggcagccacagcccacagacggaggcctcggtgctcagcatctcagcttcctctgggggcaaggccagttcttggggagcctcagctatgatgcggcacaggcggctccggagatcaaagctgctcaacagccgggcagcaatattcctcccagctgaggccaggacacgaagtagtttccatggcagtagcaccagggtacttggtatagactaggggtaggccctgcccccancagggagaccaaactggtggggcaagaactctcgaactatagtctctatcagccgaggggcactccaggacccctgtggctgattccagggaatgccgggccaggcggatgagcacagccaggatgtcaaggaccaccgcaggtcctgggtatgtcacctccagcacgtagcgcagccgaggcagcaggctggtagccaggagccccttgatgacatcatgtcgggccaggtcaggtggaggccggctttcttcttcagggcttttcctttttgcttttcccgctgggcattcttcatcctcgtcctcatcctccttgtcctcctggctgggcatcagagggaacgtcaaagctccatggtaccaagagaaggtgctgtcgaggagctcctcatctccaggagccaccagcagagcccgaagagcacggatggcggttgcaatgaccccatccactctgtcatccaaggagaagcgcagtaggaagaggaaaccagcatccaaaaggaggcttaagacactgcctgctagctggtccccaaactcaccagcctgggccctgctgatgacctgggctaacacatgcagtgccagtgctctctgctgggaaacctggctgcgggtcaggtggaacagctcctgtagggaataccccgctctctctgcctcctctccatggtggtgcagacccaggtgggtgggcaggtccacgtcaggggccagtagttctccctgaagactgaatcgagcctgcatcctctcctgtgtctgctgccgccggacagggggcaagtcctgggtccagtggagcttctccagctcgacagtgtccatgtgcagccattctttctgaggggtcacgggcaatgccagagctggggcttctggctccagctttctccctcgtgccgaattcgccacccaggcctcgctacctt

SEQ ID NO: 366488 - DNA, 1260 bp, Homo Sapiens
  misc_feature (873)..(908): n is a, c, g, or t
  misc_feature (1159)..(1167): n is a, c, g, or t
agttactgggatatgtcgacccagcgcgtcggtaggaacagcgagcggttgctggaccagcttgaccccggagcttggttgctttcttgagatctcacagccacacgcaagagcaaacaggagagacagcctctgaggatgcagaggccaggaggaccctctgctaatgtcagcaaagtgaggaacccctcatgtcagcgttttgccagtgagcccaggtaagatgagacaagctggagctcagaagccccagctctggcattgcccgtgacccctcagaaagaatggctgcacatggacactgtcgagctggagaagctccactggacccagtgacttgcctccactgtctcggcgtgcagcatgacaccaggacatggatgcatggctcgattcacgtcttcagggagaactactggaccctgacgtggacctgaccacccaactgggtactgcaccaccatggagaggaggcagagagagcggggtattcctcgtatcaggagctgttccaccgtgatcccgcaaccaggtttcccaggcagagagcactggcgactgcatgtgttagcccagtgtcattcacgtcatcgggcccaggctggtgagtccaggggaccagcatagcaagcagtgtcttaagcctccttttggatgctggtttcctcttcctactgcacttctccttggatgacagagtggatggggtcattgcaaccgccatccgtgctcttcgggctctgctggtggctcctggagatgaggagctcctcgacagcaccttctcttggtaccatggagctttgacgttccctctgatgcccagccaggaggacaaggaggatgaagaccaggatgaagaatgcccagcgnnnnnnnnnnnnnnnnnnnnnnnnnnnnnnnnnnnngccggcctccacctgacctggcccgacatgatgtcatcaagggggctcctggctaccagcctgctgccttcgctgcgcctcgggctggaggggacatccccaggacctgcggtgggccttgacatcctggctgtgctcaatccgcctggcccggcatttccctggaattccccaccaggggtctgggagtgcccttcggttggtaaaaaatatagtttccagagttcttggcccccccattgggcctcccnnnnnnnnncaagggcctacccccttagtctattaccaaggaaccctggggctacgtgccatgaaaactaccttccggggcccggggcccccacctgggaag

SEQ ID NO: 366489 - DNA, 1108 bp, Homo Sapiens
  misc_feature (211)..(244): n is a, c, g, or t
aacggggtctggtaccggtccggaattacgggatatcgtcgaccacgcgtcggaaagggtctgtgtttttctctcctgtttctcgctccctctctgctgatcacaaagctgctgaccgggtcagaaagtcctgatggaaatccaccagcgctgggcaggcccctcctcctccagggagcttgtccttgcctaatttttcttcgtcctgatnnnnnnnnnnnnnnnnnnnnnnnnnnnnnnnnnnccacaaacttcctttgaaaaccagcttgtagtcagggcccggagcgcatgccatagactcggcgactcaggaatcctgaagactctctgagcgacctggagcaccttggctgtgtccctgcctgccttcaccctcctccagtgcccccagtactgggcgtgagtccggaagtggccacaaccagcctggaccgtcgcttataaagctgtgtaaacctgtataagctcaggcgttgacagctggaaggcagctggcactggcagcccccttcattgcacctatctcccccatctcattgccacggctgaaccctccttctcaatcttggaacagcacccccttctttaaggagcttcctcagtcccccaggacccgacagcctgagccagatttctactgtgtcaagtggatcccttggaaaggagaacagacacccatcatcacccagagcactaacggccttgccctctccttgccatcatgaacatcctctttcttcagtggaaggtgaagctccccccgcagaaggaagtgatcacatcggatgagctcatggcccatcttggaaactgcctcctgtcccatcaagccccaggagaagtcagagggacttcagcttaattttcagcagaatgtggatgatgcaatgacagtgctgcctaaactggccacaggtctggatgtcaatgtgcgattcacaggcgtctctgattatgagtatacacccgagtgcagtgactttgacccgctaggcatacctctgtaccatggctggcttgttgatccacagagtcctgaggctgtgcgtgcagttgggaaactgagttacaaccagctggtggagaggatcatcacctgcaaaca

SEQ ID NO: 366490 - DNA, 1354 bp, Homo Sapiens
  misc_feature (222)..(255): n is a, c, g, or t
ggccaagggggcgtggcgtgcggcgacgtgggaaacgtagtcccgcaactccgcaatgtccctagcaaccgagggaaggattgttttctgagggatcagtcgttcggtaaacaaatgtctgctgaccgggtcagaaagtcctgatggaaatccaccagcgctgggcaggcccctcctcctccagggagcttgtccttgcctaatttttcttctgtcctgatnnnnnnnnnnnnnnnnnnnnnnnnnnnnnnnnnnccacaaacttcctttgaaaaccagcttgtagtcagggcccggagcgcatgccatagactcggcgactcaggaatcctgaagactctctgagcgacctggagcaccttggctgtgtccctgcctgccttcaccctcctccagtgcccccagtactgggcgtgagtccggaagtggccacaacccagcctggaccgtcgcttataaagctgtgtaaacctgtataagctcaggcgttgacagctggaaggcagctggcactggcagcccccttcattgcacctatctcccccatctcattgccacggctgaaccctccttctcaatcttggaacagcacccccttctttaagggaagctgactccacccatgtgttcaatcccaccagtcttccctcccaagtctggaagccccacgacctcttggtctcatctggtcacagcaagttagaggtggaaagagctcagcacggggcccttctgtttacacatatactgcccatagccaggagttactgcacaaacactagccagccttctacactacattccttttccaagacttttctggggttagtttgctttccagcccactgatttcccttcttattggacaggtcactcttttgcatcccaagcctgccttaagcaagctccctgaggttagtaaacaccttcagtgccccctcagccgagtcccttttgaccatggaataccatcagcctgaggatccagcccctggtaaggccgggactgcagaagcagtcatccctgaaaaccatgaggttctggcaggcccagatgagcaccctcaggacacagatgcaagagatgctgatggggaggctagagaacgggagccagcagaccaagctttgctgcctagccagtgtggggacaaccttgagtcccctctgcctgaagctagctcagctccaccggggccaacccttgggacaccgcactgaagtagagacaataagggcatgctccatgccccaggagcttcctcagtcccccaggacccgacagcctgagccagatttctactgtgtcaagtggatcccttggaaaggagaacagacacccatcatcacccag

SEQ ID NO: 366491 - DNA, 585 bp, Homo Sapiens
  misc_feature (107)..(140): n is a, c, g, or t
aaagctgctgaccgggtcagaaagtcctgatggaaatccaccagcgctgggcaggcccctcctcctccagggagcttgtccttgcctaatttttcttcgtcctgatnnnnnnnnnnnnnnnnnnnnnnnnnnnnnnnnnnccacaaacttcctttgaaaaccagcttgtagtcagggcccggagcgcatgccatagactcggcgactcaggaatcctgaagactctctgagcgacctgggagcaccttggctgtgtccctgcctgccttcaccctcctccagtgcccccagtactggggcgtgagtccggaagtgggccacaacccagcctggaccgtcgcttataaagctgtgtaaacctgtataagctcaggcgttgacagctggaaggcagctggcactggcagcccccctcattgcacctatctcccccatctcattgccacggctgaaccctccttctcaatcttggaacagcacccccttctttaaggtcactcttttgcatcccaagcctggcttaggcaagtcccttgagttagtaaacaccttcagtgcccctcagccgagtcccttttgaccatg

SEQ ID NO: 366492 - DNA, 723 bp, Homo Sapiens
gcagcgggcctcggggctaagagcgcgacgcggcctagagcggcagacggcgcagtgggccgagaaggaggcgcagcagccgccctggcccgtcatggagatggaaaaggagttcgagcagatcgacaagtccgggagctgggcggccattgactcagaggatcccagttcgacggagcactctccagacttcccatgtagagtggccaagcttcctaagaacaaaaaccgaaataggtacagagacgtcagtccctttgaccatagtcggattaaactacatcaagaagataatgactatatcaacgctagtttgataaaaatggaagaagcccaaaggagttacattcttacccagggccctttgcctaacacatgcggtcacttttgggagatggtgtgggagcagaaaagcaggggtgtcgtcatgctcaacagagtgatggagaaaggttcgttaaaatgcgcacaatactggccacaaaaagaagaaaaagagatgatctttgaagacacaaatttgaaattaacattgatctctgaagatatcaagtcatattatacagtgcgacagctagaatgggaaaaccttacaacccaagaaactcgagagatcttacatttccactataccacatggcctgactttggagtccctgaatcaccaccctcattcttgaactttcttttcaaagtccgagagtcaggctcactcagcccgga

SEQ ID NO: 366493 - DNA, 1289 bp, Homo Sapiens
  misc_feature (30)..(30): n is a, c, g, or t
  misc_feature (32)..(32): n is a, c, g, or t
  misc_feature (1063)..(1063): n is a, c, g, or t
cccctctccgtccccgggccggcccccgcncnccccccggtggtacgggccggaattcttcaaaaagcggggttccggctgccggttcacaagaacaagcagcagcggctagggcggcggcagctgcaggggtcggggattgcagcgcgcctcggggctaagagcgcgacgcggcctagagcggcagacggcgcagtgggccgagaaggaggcgcagcagccgccctggcccgtcatggagatggaaaaggagttcgagcagatcgacaagcccgggagctgggcggccatttaccaggatatccgacatgaagccagtgacttcccatgtagagtggccaagcttcctaagaaacaaaaaccgaaatagatacagagacgtcagtccctttgaccatagtcggattaaactacatcaagaagataatgactatatcaacgctagcttgataaaaatggaagaagcccaaaggacttacattcctacccagggccctttgcctaacacatgcggtcacttttgggagatggcgcgggagcagaaaagcaggcgtgtcgtcatgctcaacagagtgatggacaaaggctcgttaaaatgccgcacaatactggccaccaaaagaacaaaaagacatggatctttgaacacaccaattcgaaattaacattggatccctgaagacatccagccatattatacagcgccgacgctaacaaccggaaaaaccttacaaccccaagaaacctccagagaaccttacatttcccccaatacccccatggccctggcttcggcagccccctgaaatcaccacccctcagttcttgagacctttcctcttcaataccccctacaatccaggggtcacctctatgcccgggacgcacggcgtccgcgttgttggcggcacccgcccagggccatgttcctcggggcggggcctggggaaaccttccgggcccgggggtgataccccgggcctttcttggctgtatgggccccacgaagggaaatgcccccctcctctcccggggggataaccctagaaaacgcggccgggtnccccacatggcggcgaaggtcttcctggaaggcggggcgcttaatacccaaaaccgcgcccgacaacaaaggcgcgcgcgtttcttcccatacccccggggatggggggagccagacccggggggcccacaaaatcccgattaccggcgggggggaaaccccttttcccggggggcgcgcgtacctttctggttccaaagtgagagcctctctcccccccagagcg

SEQ ID NO: 366494 - DNA, 607 bp, Homo Sapiens
cgagaaggcatcgcctactggagcctttccaccttacatccgctgttttccattgactacaggtacatccagatgatgacccgggagcacctggccaaggctcagcgagggctgcctggggaggggctctcggaggtcatccagacactggtggagatctctcaggacgggaccagctacagtggggacctgctgtccaccatcgatggtcctgaggaacatgacagagattttccggagagcgtactacagccccacccctggggacgtacagaactttgtccagatccttagcaacctgttggcagaggagaatcgggacaagtgggaggaggcccagctggcgggccccaacgccaaggagctgttccggctggtggaggactttgtggacgtcatcggcttccgcatgaaggacctgagggatgcataccaggtgacagacaacctggttctcagcatccataagctcccagccagcggagccactgacatcagcttccccatgaagggctggcgggccacgggtgactgggccaaggtgccagaggacagggtcactgtgtccaagagtgtcttctccacggggccttgtacggggtaccga

SEQ ID NO: 366495 - DNA, 894 bp, Homo Sapiens
  misc_feature (541)..(541): n is a, c, g, or t
gtttctccgaatcatgtgtctcaattgcgaaactcaggaggtgtttgcattcacagaactgttcgtgtcccagctgtaacataaggaagcctctcccggtgcctactcttcgtcttcttaccccgattctgtgcagcttgcagaagcccttctgggcttccactccatgccccacagggctggtgctgctgtccctatggaggaaggagacttgctataaaacccttggcgaaatgccaggggccgcatgccatctttctgcagtctacgttaagaccacagctgtgagccttctcaagaagccataggtatgaatcgggggcaggagggtgcccagggcagaaacgtctccaccaaaaaagtccaccttcctttggaggcaccaaccaggggctgtcctttcctcaactgcccagctctgcaaacattctgtggagagaaggtggagaagagatgggcagtgcctctaccccagctaggctcaaagacgcctgctatcaggagctcctgatcttgcttggtcaatctccatagcccaggncacccaggttccaagcatctgtctccctcctcaaacgatatcagctgcactgatgcccagctgcctgtcaagcttcctgataggagtcccagggcacagactgttctcgcccttttctcccattggggttggatttaaagatcacataggtggctgctcagaggagctgaggagaagctccatcctccccatgcaccttcaccaggtggcctaaagagcttccctgaaccccacactcagtagcaagatgaggcttcattcttggaatgcatctccacacacaaggtgagggcaacttgcaagaacccagaggttggaaagaatggtcttgactgcaaaaaaacaccccagct

SEQ ID NO: 366496 - DNA, 925 bp, Homo Sapiens
  misc_feature (155)..(163): n is a, c, g, or t
ggctggtactggtccggacggttttgggatatcgtcgacccacgcgtccggagagtattaggaaacatgagcagcatatggcttttgatcagtttttcagtggcagcatccaatgaacaagatcctacaagctgtgcaggcaaaacctagcaggnnnnnnnnncaacgcataaagaaaaatggccgggccaggtcataggctgggaagtctcagccatgcacggactcgtttccagaggtaattatgagcgcccaccagccaggccacccagccgtgggaggaagggggcgtggcaaggggtgggcacattggtgtctgtgcgaaaggaaaattgacccggaagttcctgtaataaatgtcacaataaaacgaatgaatgaaaatggttaggacgttacagatatattttcctaaacaatttatccccattatctcggtttatcctgatgcgtaaacagaagctgtgtcaagtggagggcggggaggtccctctccattccctacagttttcatcctgaggcttgcaagaggcccagtgtttaccgaggtttgcccaaatccaagatctagtgggaggggaaagagcaaatgtctgctccgaggagggcggtgtgtagatctttggaggaaaaatatgttctgttgttcagctggatttgacgtggcagaaatgaaactaggtgtgtgaaatacccgcagacattcgggattgggcttatacacatcgccccagaggtagtcaatccatgtgacattgccagaggggacaaggaacagcaaagtaggcaaggaaactggcaaatcaacccatggtggttcaagaagcagccattgcggacggggcaacagaagctcccacctggtaagcccaggcacatcgagcagctagagtggacgatacttagaggtcaagagtacgaaaac

SEQ ID NO: 366497 - DNA, 701 bp, Homo Sapiens
gagccccctctcgatacttgcaggcaatgaatccgtttttctatagagcccttccatgtttaacgcaaggaaagctcctaggggtgtccctgtaggggatagcagagaggggccgacagccccccaagtgcacagacttttcataacctcaatacgagagcccgggggtatccctgtaggggacagcagagaggggccgacagccccccaactgcgcagacttttcataacctcagtacgagagcccaggtgtccctgtaggggacagcagagaggggccgacagccccccaactgcacagacttttcataacctcagtacgagagcccgggatatccctgtaggggacagcagagaggggcgacagccccccaatgcgcagacttttcataacctcagtacgagagcccgggtgtccctgtaggggacagcagagaggggccgacagcccccaatgcaacagacttttcataacctcagtacgagagcccgggatgtccctgtaagggtatgacagagaggggccgacatctcccccagtgcacagtcaaggggtttccaagttgcctggttgtgacgtctggacctgtaccctgtggttgtagggcatggccaacctcattttgacctggggcagtctccggcaatgaacctggctgtcttcacagtttgccatgacgatcctgggatgtgtaagggac

SEQ ID NO: 366498 - DNA, 521 bp, Homo Sapiens
atatcgtcggaccggcgtcgggaggaggatggagggtggtcctgatgtgatctttcaggaggacacctctcaacacctctgcccagaaggcccctgagctccggggcccagaatcacccagtcccaagcctgagtactctgttattgtggaggtccgctcggatgatgacaaggacgaggacacccactcccggaagtcaacagtcactgacgagtcggagatgcaggacatgatgacccggggaaacctgggcctcctggagcaggccatcgccctcaaggctgaacagatccttcaagagctgagaagcgtgagatcaagtgtccaacaccaggctgtgatggcactggccacgttaccgggttgtaccctcaccaccgcagcctttctggctgtccccacaaggataggatccccccagagatcttagccatgcatgagaacgtgctgaagtgccccactcctggctgcacaggccagggtcacgtgaacagcaaccgcaactggaacggcggggacc

SEQ ID NO: 366499 - DNA, 614 bp, Homo Sapiens
  misc_feature (75)..(123): n is a, c, g, or t
tatagcggaacccaggcgctgcgaggtagatagataggagactccgatcgtcataacaagtaactaacacagggnnnnnnnnnnnnnnnnnnnnnnnnnnnnnnnnnnnnnnnnnnnnnnnnnaagtcagtggtatgttcggtatcatggctgagtgtaggagcattttagggaatagaagttaaatcctagacgacaagcgagtggggtaacaacactttacctgtcatggtaactacttcattgaataggaaaacagaaaaagaagaaaccttatagagggtgatggtaaagcaaccccaactgatatggaaggcagtgttggcaatcactgaaggtcaggattttgaaagcaaacaattaacaatgtaaaatttgcaagtgtgggggttggacataggttactatgtgtttaatgtgggctccaacaaaattagcagagcccaaatgagaaggaagtattactctgtttaacaagattgaaattaaggggacagtatacagtttaaaccactttgggatttaggaatgtcagagttggtagggtgggtattgttgccccttgatccacgtatgcaaaatgacgtctggtaccggctcgattcgtatctgct

SEQ ID NO: 366500 - DNA, 304 bp, Homo Sapiens
  misc_feature (22)..(22): n is a, c, g, or t
caggctgtacgccccggagtantggatatcgtcgaccacgccgtccgggcccccactgcgtgaattgcttacagtttctgagctgtaaactaacatttgctttactatgtagttacagagaaatgtgcaacttgtttgtgaaacattcaaataaagcttatctgggatttttaacttgtgtgtttagtcttagaccatctttagtacagtctggtctaaacactgtgacagagcaaagggacctttttttccaatggtgcacagtgtcatgggtgcaactggctggtgccggtgttgtggatgg

SEQ ID NO: 366501 - DNA, 770 bp, Homo Sapiens
  misc_feature (25)..(25): n is a, c, g, or t
ccaggctggtacggcccgacggtantggatatgtcgaccaggccgtcgcccacgcgtcggaccacgcgttcgggcctccaccaagctcgagcatggtggggcctgggtctggggcagagactgccccccagcaagaaagcaggctcacagaagccaaccccagagggccgagagtccagccggaaggttcctccgcagaagcccaggcgaagccctaacacccagctctctgtctccttcgatgagtcctgccccccaggcccctctcctcgaggggggaacctgcctcttcagcgcctcactagggggtcccgagtagctggggaccctgatgtgggtgcccaggaagagcctgtgtacattgagatggtgggggacgtctttaggggaggaggacgaagtggaggaggcctggctgggccccctcttgggggtgggggcccgaaccctccagcgggcgccgactcggactctgaagagagtgaggccatctatgaagagatgaagtacccgctgccggaagaggctggggaaggccgggccaatggccctccaccattgacggcaacatacccgccacaacagcctcacgcccttccgccccatgcgcaaacgccgcccagcttcagccactcccgagccggagggacgggacgcccaacgaagacactccttgtgaaaatcgccacgagccttccacaaacatcgcttcagacaccgggctcaactcatgggcttcacacaagcaaagtctgattcccgaacccctg

SEQ ID NO: 366502 - DNA, 748 bp, Homo Sapiens
taggggctatgtcgaccaggcgtcggtgctccttaggctcctcgttggtgtctgtaccatggcgctggctgtcttgcgtggtctggatgccctttccgaccgagacacccccgttggcagtgctgctgccacccgggggcccgtggccggcggcggagctgggcctggtgctggccctgaggcctgcacggggagatgccctggcatgggcctggcgctgctggtgtgcagccctggatggggccggacgcgggcaccgaagagcagggtcccgggccgcgcagctactggttagccgctgcgctgctgcggctcctggcactgggctccggggcctgggtgcgggcgcgggcggtgcggctggcccccggcgctaggttgggcactgcttggcacctcgctggggcctgggctcggaccgcgagtcgggccgctgctggtgaggcgcggagagacccctcccagttcccggaccgcgggtgctggagacgcggccggccgttgcaatgggctgctgggcccagggactcggctggctgtgactgatgctccgctgggcgggccagactgtgtccagagtctggggacagcagtcggccccaccccgcccgtggtgtctccttttgcggtttctggcacagtgcggcgactccaggcagttctgggagggactggagattcactaggggtgagccggagctgtctccgtggccttggctcttccagggcgaatgggtgtggctggcca

SEQ ID NO: 366503 - DNA, 1024 bp, Homo Sapiens
ttcgtgtcggtcggctcggtgtgtggtgtgctcggccgttccctcggtcggcggtggtgctggcttcggtgcgttgcgtgttctgtgggcggcgtggcgtgcccgtggttctgccttggtgcttctctgctctctccccggtggtgttggcgaggctgtctggcgccctgggtgaggtttgaggtggtcagcccgggggactgcgtgagtgggctggtggaaaggcctgaggaggcaccgctgatggaccgagacctggaggtcacaaggtacagggccactggtcagccagggggcagtggagcatcaggtgctgggctctgctccccccaggtaaaccctccaggaggccgtggagcccggggcaagagcctcgaggccctgggtcctgctgcacaccctgtcaattcaggagggcccagggcgcctggctgtggcccagccccactggggcccccatcagaggcccacgtaatgggggccaccccatgccagcagcccaggcacagcacaggatacggcatcagacagccgcggcaaaggaccatccagcgtgggggtggacggaaggacgaggggacagacgggagcttcctgtatgcagccccttctgctccaggcctcgtgctggctccagcctcccacctggccaagccccccctggctgagctctcacagggcctgcagcctggtcctccatgtccctagatgcccgtgagggatgcctgggtcagcggccggcccttcccttgtccacaaccaggagggcctgggcagggccaggctggggcagctgctggcagggacggtggggccttgtcccaccactgccctactcagcctgagacctgcacacagcaggagggaggcctggcccggcgtgcccggctgagactccggtgtgtggccgccacccccgtgcagggaccaggacggctgtgcgtcgttccaccacactgcacggacgagccggcgcccacgtgcccagacagtggcagctgccatccttggaggaaggaaatgc

SEQ ID NO: 366504 - DNA, 755 bp, Homo Sapiens
ggctggtacggtcggaagtcccgggatatcgtcgaccacgcgtcggtccttccagaaggagcttgtgatggccctactgaagatggactgccaggcctggtggtcagactcatccaggacttgtgctcctgaccacggctgtagaggtggcccagcgctggcgggagctggctgagaagctggccaaggtctccaagcagcagatggacgcctacgagtctccccaccgggacaggaacggggttgtggacagcgaggccatgtggaagcctgcgtatgacttcttactcacctggagccatcagatcggggacagctaccgggatgtcatccaggagctgcacctgggcctggacaagatgaaaaaccccatcaccaagcgctggaagcacctcactgggactctgatcttggtgaactccctggacgttctgagagcagccgccttcagccctgcggaccaggacgacttcgtgatttgaatgggtcccctcccctcctgctgctctggaagtgcaagccctcttctgccctgcgtgccctgctgtcaccgcggagctgaagagggaggaaggggcggctgctcagacagatttagggcccgccagctaggctacacccatcatgcgccgccctcctccatcgagggagaggcctgaagggactgcctactgcagctcgttgccaatcacatagctttctatctgttaagtatcaaatttaaattttaaaatcacttttttaacgaatggggg

SEQ ID NO: 366505 - DNA, 810 bp, Homo Sapiens
  misc_feature (524)..(715): n is a, c, g, or t
  misc_feature (717)..(719): n is a, c, g, or t
  misc_feature (721)..(726): n is a, c, g, or t
  misc_feature (728)..(748): n is a, c, g, or t
gggggaagtagagtgtctaatcctgcagtcatggcgcaggaagaggaagatgttagagattacaatttgactgaagaacagaaggcgatcaaggccaagtatccgccagtcaataggaagtacgaggatttggatcacacagagcatgaatatacttctttaggttacacgcatggggagatactctggaggaagcatttgagcaatgtgcaatggccatgtttggttacatgacagatactgggacagtggagcccctccaaacagtagaagtagaaacccaaggagatgacttacagtctcttctgtttcactttttggatgaatggctttataagttcagtgctgatgaattcttcataccccgggtggggagaagaattttcattgtccaagcaccctcagggaacagaagtcaaagcaataacatattcagcaatgcaggtctataatgaagagaacccggaagtttttgtgatcattgacatttaagacaccaaaaaataaaagactcctacgaagannnnnnnnnnnnnnnnnnnnnnnnnnnnnnnnnnnnnnnnnnnnnnnnnnnnnnnnnnnnnnnnnnnnnnnnnnnnnnnnnnnnnnnnnnnnnnnnnnnnnnnnnnnnnnnnnnnnnnnnnnnnnnnnnnnnnnnnnnnnnnnnnnnnnnnnnnnnnnnnnnnnnnnnnnnnnnnnnnnnnnnnnnnnnnnnannntnnnnnncnnnnnnnnnnnnnnnnnnnnnaaaaaaatttttaacaaacttttctctttgcggcgcgggcggggccacccctacgaaaaaaa

SEQ ID NO: 366506 - DNA, 1036 bp, Homo Sapiens
gggagagtgtctaatcctgcagtcatggcgcaggaagaggaagatgttagagattacaatttgactgaagaacagaaggcgatcaaggccaagtatccgccagtcaataggaagtacgagtatttggatcatacagcagatgtccagttacacgcatggggagatactctggaggaagcatttgagcaatgtgcaatggccatgtttggttacatgacagatactgggacagtggagcccctccaaacagtagaagtagaaacccaaggagatgacttacagtctcttctgtttcactttttggatgaatggctttataagttcagtgctgatgaattcttcataccccgggaagtgaaagtacttagcattgatcaaagaaatttcaaattacgatcaattgggtggggagaagaattttcattgtccaagcaccctcagggaacagaagtcaaagcaataacatattcagcaatgcaggtctataatgaagagaacccggaagtttttgtgatcattgacatttaagacaccaaaaaataaaagactcctgcgtccgacagcgagcgagcgcaggaggaaaacttgtcggcccgcctccggccctcgaagaaagttttctaaaacccattccgtttggccgccgcggggcccccagttagggtaaagtggcaacagtggcgccctaagccgtggttctccctaaagggaaaacatcctggggcgccattgggacgtaagggggccttgggaaatttcctcccccccacattaaaaacacacccccccggggcgggcccaacgccgaaaacgcgtttgcctggaaaccaaatctcccgacgaatgggggaggtgtcctcgcaagggtccattttaacggtgggaatccttaatccgaacgaggggggatctccccaggcgccggagagctcccggaatatttccaatattttacgcggcccccgccagccctctgggccaaaatattcaattcggcgcaaagacaaccccggaggggggtaaaaatttcagagtc

SEQ ID NO: 366507 - DNA, 1153 bp, Homo Sapiens
  misc_feature (492)..(502): n is a, c, g, or t
tggaacgagtgctggctaatgagaggttaatttttgtttcgaagggaaggctgcactggtttcctgagataaatggacaggaagcgcattacctccgcgcgctggcaacggctccccaatgctttttgcacctgccgttttgacggtgagacaccggcggagcccgcagggattgcgggggcccgttgtctacgagcgggtgatgagccccccgcaagccccgggctctctccctccgcgagtgcattgctcacgccaagctttgggactcttctctcacacccaggtcctgcgtgttccgaagttcaggggccccctgatcccgctgagccccctccaggagcgaaagggttaagaatgatgtaagtacaggcacttgatttctcaagtcgcccgcttggccctcttccaagttgtactttccgttattttctctccttgccgttccttactgttctaacgctttttaataaactttcactcttgctctgnnnnnnnnnnntgatgtaagtacaaaccacgagctgcttgacgctgagctgttggactccgggctatttcagccgctgctttgggtacacagtggccggggagcagccggggagcccttactctagaaaggattgcacaaatcgcaagcttaggtgatctgttaagcagtcagagattctcctgttagatttctggaaatggagacatattaactggagaacagttaaaaacatcacgtataggctcaggaaatgaaactgcatcttgtttagaatccattagtgtttctggcatgtgttttaattctgtccacttgcacgttcatgccgtagtatgctttgctggattctccggatgtactgttcaggtctcctccttcctttcgataacaaattggaatctatcatcagtctcataactgcttttctgtctccacttggcagcctctttctttgtagaccattgtctttttcctcactttcggacccatccgatcataaaaggagaaagtgagctgccattgaattaatccgtagaaatttgtggaaaatttaaataatctgagcctcgcacagctgccagcgaattccggcggcagttcccgggtaccttcccagcccatcctatctgctccggaccgcgggtgacattcagatttcca

SEQ ID NO: 366508 - DNA, 995 bp, Homo Sapiens
  misc_feature (49)..(85): n is a, c, g, or t
ggatgatcactcactatagggcgacctggagctcacgcggtggcggcgnnnnnnnnnnnnnnnnnnnnnnnnnnnnnnnnnnnnnatcaggccaaatcggccgagctcgaattcgtcgagagcggaagacggaagtaacagcggaaaggaagttccaaggcccgcgctgggaaaaaggtggggggaccaggggaagactcggagtgcgatggcggcgcaaattccaattgtggccaccacttccactcccggaatagtccggaacagcaagaagaggccggccagcccttcccacaatggcagcagcggcgggggctatggcgccagtaagaagaaaaaagcgtccgcttccagctttgcgcagggtatcagcatggaagccatgagtgagaataaaatggtgccctctgagtttagcacaggacctgtggaaaaagctgccaaacctttgccatttaaggatcccaactttgtgcactctggccacggtggcgcagtagctggcaagaagaacagaacctggaagaacctgaaacaaatcctcgcttctgaaagggcattgccgtggcaactgaacgatcctaactacttcagtattgatgctcctccatcctttaagccagctaagaagtattctgatgtttcaggtctgcttgccaactacacagacccccagagcaaactgcggttcagcaccattgaagagttttcctacattcggaggctgccctctgacgtcgtcaccggctacctggccctgaggaaggccacgagcatcgttccctgagccccagaaagggagatgaaagtggaaaagctgtttcaaagaacagactctggaactcatgattttggtttcacgagaaacaaaactcgttctgcttgtcaatctgaaaatgccagtgctgtgccttggaaagaatggttgggtttattttacgggttttttattagggtgttttcccctccaggtgtgcatattccctgctgaattc

SEQ ID NO: 366509 - DNA, 1077 bp, Homo Sapiens
  misc_feature (932)..(932): n is a, c, g, or t
ctggtacggtcggcgcttatgggatatcgtcgaccacgcgtcgagcctccgccgctgcacactgcagcctctgctgaaccccgtgccgcgccgccgccttcgccagcccggaccggaccggcccgccttcccttcctccgctccacgccggcctccggccccgcaacctcctcctcggcgaagtctccctggccgccccatgtcggccgcccccgcctacagcgaagacaagggcggctccgctggccccggggagcccgagtacggccacgaccccgcgagcggcggcatcttctcctccgactacaagcggcatgatgacctgaaggagatgctggacaccaacaaggattctctcaagctggaggccatgaagaggattgtggcgatgattgcccgaggaaagaatgcttcagacctgtttcccgcggtggtgaagaacgtggcctgtaagaacatagaggtgaagaagcttgtctatgtgtacctggtacgctacgctgaggagcagcaagacctggccctgctgtccatctccaccttccaacgtggcctaaaggatcccaaccagctgattcgtgccagtgccctccgtgtcctctctagcatccgtgtgcccatcatagtgcccatcatgatgctagctatcaaggaagccgcctcggacatgtcaccctatgtgcggaaaaacagctgcccacgccatccctaaactctacagtttggactctgaccagaaggatcagctgatagaagtcattgagaagcttctggctgacaagaccacgctggtggcgggcaagtgtggtgatggcctttgaggaggtctgcccggagcgcatcgacctgattcacaaaaactaccggaaactctgtaacctgctgatcgacgtggaggagtggggccaggtggtcatcatcagcatgctcancccctacgcccgcacgcagttcctgagccccacccagaacgtaaagtggcccagcccaggcagagcgggccgaagtgtgtcccggggaggcgcccacagacccgtcggtctccccgtccaggaatccctactagaggagaacgcg

SEQ ID NO: 366510 - DNA, 741 bp, Homo Sapiens
  misc_feature (23)..(23): n is a, c, g, or t
ccaggctggtacgccccgagtantgggatatcgtcgaccgcgcgtcgacgacttgggctgctcctctcctgccccaggaactggcgacgccaaccccgctgctgtctgaagatgccttattcaggcacaagctgaaacacatgggaaagtccacccggaggaaactgtttgaacttgcccgagccttctcagagaagaccaaaatgacggaagtcaaagaggaaacacttgtcgaagcatcagtcgctgggggctgccgcgctcaacagccaacctcctggactgatgtggagggccacgcgtgtgatgaagacttccggggcaggcgctcaggaggcacccaacggctggacggaaggcctgcgagaaggacagtaagcagatgccagcagctcttccttgcccagagactgatctgacccggatggcgggcagctggacaagcaacactggccccacagcctgaagggcccagctgcagccagacagatggtgcttgagaaccgaggcccggtgatcctccagccacagtccagcccaaccactgccacttaccatgggacttagaaacttcggagttgctgccttgcaatcggcacgcgaaggaccctggggcccctataggccagcaggccaatttacagaccctttcgtagccaggcgtccctatggtcaaagagtggaaatgcaggaaccaacctacctttaacaacaaaaacaaaatcccgaaaagccgcatca

SEQ ID NO: 366511 - DNA, 442 bp, Homo Sapiens
  misc_feature (19)..(19): n is a, c, g, or t
cgaggccctgcagggttanaggatgaggcagcttccctctcccttttcagatgaaaacttccggggcaggcgtccaggaggcacccaaggtggaggaaggcctgcgagaaggacagtaagagatgccagcagctcttccttgcccagagatgatctgaacccggtgggggcagctggaaagcaacactggcccccagctgaagggcccagctgcagccagacagatggtgcttgagaaccgaggcccggtgatcctccagccacagtccagcccaaccactgccactttccatgggacttagaacttcggagttgctgccttgcaattggaggaaggacctggggcccctataggcagcagccaattacagccccttttgtagccaggcgttcctatggtcaaagagtggaaatgcaggaaccaacctccctttaaaaaaaa

SEQ ID NO: 366512 - DNA, 1038 bp, Homo Sapiens
gaggtcggcgcaggggcacgaaggcagtcggagggggtggctagggcctatccggataaagcgggaacaagtgccaggcgtgaacagagaacgcagggcggcttcccgcgcaggaagccaatggggaaggccatttcgaccggccaggaatctcgtagcggtaggcgggaactcctggaagagcgatccggttgggaagcccggcggcagatgcgaagccctgcgcagcagccccagggcaccgcagctgctccaggcaccaggaacgcatgccagcttgccggacctgcttctcgtggttggggatgatgcagcgcacgaagttgggcgtggtgttgcgtagcgtggtcatcagcttgcccagctgctgcctggtacagctgccccactgtgcggaacatgcccttcttggtcttggaggcgctgggcagcgagctctccgtcatcttggccatctggtccaggcccacgatgcggtccacgtccttccacaggtcggccacaaacttgtcggaggaggcattgagcagggaagtcacgttgtcattcagcgggtccatattcttggtcagccaggcactcgcattatagtccaccttcccggcataatggatgatggagaactcagtcttgtccttgagctgcttgggcttctggaacttggggtggctgccctgctccgtgcacagcttctccacgaaagacttgtccgtggctttggggaaccagcattcctcgtccagcagggccagcacacctggagggttgttcgctcgctcaatgagctcgatgcagggctgcaggtccagcccaaagtcgatgaagttccactcgatgccctcgcgctggtactcctcctgctccaggatgaacatggtgtggttgaagagctgctgcagcttctcattggtgtaattgatgcacagctgctcaaacgagttcacatcaaagatctcgaagccgccatgtccaggatcccgatgaaggagcgcctgcccgacgcgcggtcgacatatcccaaaaccggggtaaccactg

SEQ ID NO: 366513 - DNA, 1328 bp, Homo Sapiens
agcctttaagggttgaccaccaaattaggaaacccccccgggggtgtttaaatttaaaagacaggtggtacggtcggaattcccgggatatcgtcgacccacgcgtcggggtgaggtatgtccactctccacacccgtgggtgtttactgcccttgtggcctggtcagaggctgcagggtggctcctggacccagatgttgtgagagacccttagtgcactcgtttgatttagttaatatttatgagcagctcctgtatgacaggcccattctgggtgtgagggtgggggctgtgatatgtccagatgctctcacttaaagaaggttctagactcagaggcaagacgttagagaaggttctagactcagaggcaagaggttagagatgggtgagtccatctctttttcagatgagggggcagctcagaggaggagaggggcttcccaaaggtgcacagcaaggtggcatcacagccaggatcgggacctaggaatcttggaacccttccctgcactggccctgggacagccctgggcacccaaggccctgcctccctactggctcccaggagaatttctcaaaaagcagccctccagccccccgcagcctctccacagctcccacctgcctcctcatggcccccagacaccctgcgaagccccaactccagatctttttcctgacactgccagggatgagttccccttgtcctgtccgggctggaccctccctgggtgcccagcagagcagctgacactgacagagctttcgctggggccaggcatgcgcattatctcatctcacactcaccacactgaggaaggtctattacccccatgtgacgggggcggaaactgaggcttaatccaaggccacacggctagcaagtggggggcaggacacaagtccagactgcctccctccccaccacaaagtgcttcagcctctccagcagccccttccctcagctctaatgatgttgcactgtttcccacacctaggtccctccctccccaagagccccagctcctccgctgtggtgtcagcctcatgactttatggcccagactccaacccatctccggggttgcctgggtctccaggtgacatcgagatgggcctctttttcaccaacaacacccacgacatagcctcaagacaaccacaggataaagaacatagcgaagacaacaccaacacaacacaggaagcaagaacaacaggggatgcaggcgagacaccataacggaaaacacctagagagaaacagcaaccaacacacagacacacaaccaaaccagtgagaaaacccacataaagcgaacac

SEQ ID NO: 366514 - DNA, 556 bp, Homo Sapiens
ccaggacctaggagaccaggttcctctcctctcagatccaagattctggaagcaaactgcacctattttaaattcttcaccacgggggagaatgcacgcatctttcagagaaccacaaagaaaggcctgctgctcttggtgagcctggaggtgttccggcattccgtgatgggccctgctgcagagagtcagcccggagcctcccccggccccacgcctcacctacgagtactcctggtccctgggctgcggcgtgggggccggcctgatcctgctgttgggggccggctgctttctgctgctcacactgccttcctggccctgggggtccctctgtcccaatgcgggggcaccgggccacctagagccacgcgtgagacttctctaagcaaccaccgagccctttgaccttctccattgtacccccaagatctttttgccccatctcctagagaaactgtgttctccctgctcgggggcccatgtttttttacacgcctgcctcctgtccccttatcctttctccctctgtaaatacgtttttctctgtggctgt

SEQ ID NO: 366515 - DNA, 1098 bp, Homo Sapiens
gctgtaccggccggaagtacgggatatgtcgaccacgcgtcggagccgggcgcggctgtgtcagctgagtgacagtcacgggaccgcgacaactctgtctggcttcctagaggagcaggagggatgagcaagggtctcccagcgcgacaggacatggagaaagagcgagagactctgcaggcctggaaggagcgcgtggggcaggagctggaccgcgtggtggctttctggatggagcactcccacgaccaggagcacgggggcttcttcacgtgccttggccgcgaggggcgggtgtatgatgacctcaagtatgtgtggctgcaggggaggcaggtatggatgtattgtcgcctgtaccgcactttcgagcgcttccgccatgctcagcttctggacgcagcaaaagcaggtggtgagttcttgctgcggtatgcccgggtggcacctcctggcaagaagtgtgcctttgtgctgactcgggacggccgcccggtcaaggtgcagcgaaccatcttcagtgagtgtttctacaccatggccatgaacgagctgtggagagccacaggggaagtgcggtaccagacggaagcggtggagatgatggatcagatcgtccactgggtgcaggaggacgcgtcgggactgggccggccccagctccaggggcccccggctgcggagcccatggcggtgcccatgatgctactgaacctggtggagcagcctcggggaggccagatgagggagctggcgggcaaatacgcagagctgggggactggtgcgcccggaggattctgcgcacgtgccgcacgggactggacaagccgtgctggagcaatgtgtccgagggtggccaggcacctccctggctgcctgggggagacagcggaacccagggcacacgctggaagcccggctgggtttctgctccgtccactggcaatccggcacaggcgacccccgaaatttcgagccccagctgactgcccacgttcctcattgttgcccttccactccgcgatgcgaccctgtacgacggaaggcctcctttacctcccaagatggctgataactttcgcccacccagctggcgt

SEQ ID NO: 366516 - DNA, 573 bp, Homo Sapiens
aacgcgctggtaccgcccggagttacgggatatcgtcgacccacgcgtccggtgtgagcacaggcaggtggagggatgaagagagccaacaagcctgcttatactttcttttccaagtagtttcgccaaccgtaaaaatggatggttccagaaggaagaccttgaaatggtttgatttgagataaatctgggcttgaggcctgtccatatgtgctaggtttgatctgatgggagaacagagccagtgagtgcccaccttggggcccagactcctgtgccagcatgagttccagtgtctttcacttcctcaccatatccactggaaaaaggcgagcaagacttcttacctccaactctcctatctcatcttttgtgacctttcatctttcctcttgaggaccgtcctttctttccctcccatgacatacaccccacctgtttggctttccctttcccattcctcttgttccccaaccctcaatccgaacagttggtagcaccctctctcatctgcacaggaggacaggtggacagacacaagagtacagaagcatgggttgtttaatagaaatt

SEQ ID NO: 366517 - DNA, 700 bp, Homo Sapiens
cagggtggtaccggtccggtaaatcccgggatatcgtcgaccacgcgtcgcggcgcgtttggcaatgataaccaactgcagatcatctcaatccctggagagcacagacgtggggaaagcgcatgtacgagcagctgtagtgaccggcagcgggagctgaaggagctgcaaaggaaaggcgggcccaccaggctaacactgccctccaagtccacagacgctgaccgttggctcgtttgctgagctccggctccttcggaaacctggagaacctcagtttggcacttcaccaatgtaaccagtgcctgcgccgagcacctcatcaaactgccttcgctcaagcagctgaacctgtggtccactcagtttggagacgctggccttcggctcctgtcggaacacctcaccatgctccaggtgctgaacctgtgcgagaccccggtcacagacgctggcctgctggccctgagctccatgaagagtctctgcagtttaaacatgaacagcaccaagctctcagctgacacctacgaagatctgaaggccaagcttcccaatttgaaggaagtggacgtccgctacaccgaagcctggtgaagctcccagctcaaggcaggaagacgtttgcaaaccgcgacaaaataactcttgactaacagccgcagagcagccggtcctggggtcccccctggtgccctgg

SEQ ID NO: 366518 - DNA, 324 bp, Homo Sapiens
gttggcctgcacatacggagctgtcgccagcatgggttgcacatctcatggctcctgttacaagaccaaataaaattcctgctctccctggcagaaaacaagctgggtccctgcatgctcctggcactgagggggaaccagaccatgcagcagagcctgtgcttgatgctggaatacaacatcatcgacaacaacgacacccaactgcagatcacctcaaccatggagagcacagacgtgggcaagcgcatgtacgagcagctgtgtgaccggcagcgggagctgaaggagctgcaaaggaaaggcgggcccacaaggctaaca

SEQ ID NO: 366519 - DNA, 916 bp, Homo Sapiens
ggctggtacggtccggaattacgggatatcgtcgacccacgcgtcggtaagtgacgcgggcgcggaggtccaggtgtgccaggtgcgcggggtaggggcggcgggaggctccggggccggccctgggttgaagttggtaattgagcggcaagtccggcgggcgcggagtgacagctcgtgacggcctccgagacgccagctgccccttctcggctgtgtggcttcgacttcctgattctcccacgacgtccctggccgggagacccgctggactctgcggctggccaaaaggggagggggagccccgcgtcctgggggcccctagcggaaggggcgggggttgcgccgggcatcctgtctggggcatctgtctgggactctgtcggtgcctctcacctggcgaggggcctgtggtgggggtaggggggaagtccctggcgccaggcttggccaagccctgctctgctgggctgcaggctggtggcgctcacccagctcctcacctgtcccgcatcttcctgtattttcttccctttctggttgggcagcgagagttgagaggaggcagatggcttccatcccagaaatcgctctcctctttccatccctacagagagggacagagaggcaaaagttccttccgatcccccggggcgctgtccctgtgagctcccggtgtctgcacacgtgggccctgagtcaccgggctgtgtgtgtgggatggggctgcgtagccaggctggcctcctggggttcactttgtggctttcctacgcctactcttcctgtgtggcttagctggcctttccactggtggaggcacatggggtctgggcagggccaatgcaggacccacttggagagccggaaccccgtcagtgaggctgccaccttgatggagttcggatggataatg

SEQ ID NO: 366520 - DNA, 1103 bp, Homo Sapiens
  misc_feature (1009)..(1009): n is a, c, g, or t
  misc_feature (1049)..(1049): n is a, c, g, or t
  misc_feature (1059)..(1059): n is a, c, g, or t
  misc_feature (1077)..(1077): n is a, c, g, or t
gaattctcgggatctaaaccgagaatcgaaactaagctggggtccatggagcctgcacccgcccgatctccgaggccccagcaggaccccgcccggccccaggagcccaccatgcctccccccgagaccccctctgaaggccgccagcccagccccagccccagccctacagagcgagcccccgcttcggaggaggagttccagtttctgcgctgccagcaatgccaggcggaagccaagtgcccgaagctgctgccttgtctgcacacgctgtgctcaggatgcctggaggcgtcgggcatgcagtgccccatctgccaggcgccctggcccctaggtgcagacacacccgccctggataacgtctttttcgagagtctgcagcggcgcctgtcggtgtaccggcagattgtggatgcgcaggctgtgtgcacccgctgcaaagagtcggccgacttctggtgctttgagtgcgagcagctcctctgcgccaagtgcttcgaggcacaccagtggttcctcaagcacgaggcccggcccctagcagagctgcgcaaccagtcggtgcgtgagttcctggacggcacccgcaagaccaacaacatcttctgctccaaccccaaccaccgcacccctacgctgaccagcatctactgccgaggatgttccaagccgctgtgctgctcgtgcgcgctccttgacagcagccacagtgagctcaagtgcgacatcagcgcagagatccagcagcgacaggaggagctggacgccatgacgcaggcgctgcaggagcaggatagtgcctttggcgcggttcacgcgcagatgcacgcggccgtcggccagctgggccgcgcgcgtgccgagaccgaggagctgatccgcgagcgcgtgcgccaggtggtagctcacgtgcgggctcaggagcgcgagctgctggaagctgtggacgcgcggtaccagcgcaactacaaggagatggccagtggctgggcgcctggatgtgttntgcacgatccgaacggcagcggctggtgagagatgaattntagctccgancagagtgtgacatgacgnttctggcagctctgcgctggcagaga

SEQ ID NO: 366521 - DNA, 693 bp, Homo Sapiens
ggctgtaccggtccggaatttcgggatatcgtcgacccacgcgtcggcaacgtcatcggcgtgctgcgggatcagcaacgctaccacgaagacattctcggggctcacgactgcagcacccaggaggtgacaagccgcatacgcaacccagagcttttccttgcaggagcgtcagttgcggggcgcagtgccctgggcgcttcgaccctcccggctcagacaccaacagcccctgagagccgcctggctttcccttccagttccgggagagcggctgcccgactcaggtccgcccgaccaggatcagccccgctcctcccctcttgaggtggtgccttctcacatctgtccagaggctgcaaggattcagcattattcctccaggaaggagcaaaacgcctcttttccctctctaggcctgttgcctcgggcctgggtccgccttaatctggaaggcccctcccagcagcggtaccccagggcctactgccacccgcttcctgtttcttagtcgaatgttagattcctcttgcctctctcaggagtatcttacctgtaaagtctaatctctaaatcaagtatttattacttgaagatttaccataagggactgtgccagatgttaggagaactactaaagtgcctaccccagctcatgtggattacagtttttttctcggttccctttggaac

SEQ ID NO: 366522 - DNA, 1537 bp, Homo Sapiens
  misc_feature (1421)..(1421): n is a, c, g, or t
  misc_feature (1431)..(1431): n is a, c, g, or t
tctggtacggtcccccgcggtttggatatcgtcgaccagcgcgctcgggtgacggaaatgagaatggcgccgctggagattcctttcctgcttttggtttccctggcaggcgttgaactgtggagtgtgtgggctcttatcacgcgatggcatccactgtggcaacggaggcgacacagctctgctcccagaattccccagggggcccctcgatgcctaccgagcaagagcgtccttcagctggaaggagctggcgctgttcacggaaggggagggcatgctccgctttaagaaaaccatcttctcagctcttgagaatgaccctcttttcgctcgttcccctggagccgatctgtccttggagaagtatcgcgagctgaacttccttcgatgcaagcggatcttcgagtatgacttcctcagtgtcgaagacatgtacaagagccctctgaaggtccccgacttgattcagtgcctgggcatgtatgactcttctctggctgccaagtacctcctccatagcttggtacacggatcagcagtttacagttctggttctgaaagacatctcacatatattcaaaagatcttcaggatggagattttcggatgttttgctctgaccgaattaagccacggcagtaataccaaggccattcgcacaactgcccactacgatcctgccactgaggaattcatcatacattcccctgatttcgaagctgccaagttttgggttggcaacatgggcaagacagccactcacgcggtggtgtttgctaagctgtgtgtgccaggggaccagtgccatgggctgcatccctttatcgtgcagatccgggacccgaagacccttcttcccatgcctggagtgatggttggcgacataggaaaaaaactcgggcagaacggtctggataatggtttcgccatgttccacaaggtcagagttcctcgccagagccttctgaaccggatgggagacgtcacccccgagggcacctatgtcagcccctttaaggacgtcaggcagcgctttggagcgtccctggggagcctgtcctcgggccgggtctccatcgtgagcctggccatccttaacctaaagctggccgtggccatcgctcttcgcttctcagccactcggcgtcagtttggacccacagaggaggaggaaataccagtgcttgagtatccaatgcagcaatggcgcttgcttccatatctggcagctgtctacgccttagaccatttctccaagtcgctcttcctggacctggtggagctccagcgaggacttgcatcgggagaacgcagcgccagacaggcagagcttggacgtgagatccacgcccctggcatcggccagcaaagccctgggcctcgtgggaccacccagcaagggaattcaggaaaatgcnggggaaggcntgtgggaaggacacggcctatctgggccatggaaacccggtttgggggggtcccttttaaaaatggacaaccggatcccccaaactggcccacataaccgaaaggg

SEQ ID NO: 366523 - DNA, 407 bp, Homo Sapiens
cagtttttaaaagctaatcttcaatactttttcgcacagaatgctacattctgaacactagtcaggtatgaattttgcttattcctgttataagttcacaaacaaaattgtggatgggcaaggactgactcatccccaaacctggaaaaataatacacaaactctaattatgccctagtagagtcatgtctatacacaaacataggacataaatattgttttaaaaggagtatggactttgcctaaaataattttttgaagatgaacataaatagctaaagttctttggatcctactggttatttttacaaaatcaaatatcacttgacaacacctatgtgagaagatgagtcactggtttcaggccagcacagagatttgccagaagcatgtgagggcaattcact

SEQ ID NO: 366524 - DNA, 1949 bp, Homo Sapiens
  misc_feature (1863)..(1863): n is a, c, g, or t
  misc_feature (1895)..(1895): n is a, c, g, or t
  misc_feature (1906)..(1906): n is a, c, g, or t
  misc_feature (1926)..(1926): n is a, c, g, or t
  misc_feature (1936)..(1936): n is a, c, g, or t
tggcaaccaggagaagccaaacttggtcccccggctcgcggagtgcctgcgagcgctgctcatggcgctctatgagctcttctctcacccggtcgagcgcagttaccgcgcggggctctgctccaaagccgcgctgttcctgctgctggccgctgcgctcacgtacatcccgccgctgctggtggccttccggagccacgggttttggctgaagcggagcagctacgaggagcagccgaccgtgcgcttccaacaccaggtgctgctcgtggccctgctcggacccgaaagcgacgggttcctcgcctggagcacgttccccgccttcaaccggctgcaaggggatcgcctgcgcgtcccgctcgtttcgactagagaagaagacaggaaccaggatgggaagacggacatgttacattttaagctggagcttcccctgcagtccacggagcacgttctcggtgtgcagctcatcctgactttctcctatcgattacacaggatggcgaccctcgtgatgcagagcatggcgtttctccagtcctcctttcctgtcccgggatcccagttatacgtgaacggagacctgaggctgcagcagaagcagccgctgagctgtggtggcctagatgcccgatacaacatatccgtgatcaacgggaccagcccctttgcctatgactacgacctcacccatattgttgctgcctaccaggagaggaacgttaccaccgtcctgaaattgatcccaacccatctgggctggtgggcagaggccggcagatgctccatttgtgattatgctatcatccgatacccgtgtcccaagtatctgtgatcaacgggaccagcccctttgcctatgactacgacctcacccatattgttgctgcctaccaggagaggaacgttaccaccgtcctgaatgatcccaaccccatctggctggtgggcagggcgcagatgctccatttgtgattaatgctatcatccgataccctgtggaagtcatttcttatcagccaggattctgggagatggtaaagttcgccatgcttgcagtatgtcagcatcctgcttatcttcctctgggtgtttgaaagaatcaagatcttcgtgtttcagaatcaggtggtgaccaccattcctgtgacagtgacgccccggggagacttgtgtaaggagcacttatcctagaaaggccatttctgaagactcagcaggaccgtggctgcctcattgtcatcttctgggaacatcttaggaccttttgaaagagcccagcggacacctgcgggcttgtgtgcttttccctcagagacaacggttctttccggttttgctctacacagttccgtatcttcagagctcctgcagaattgtcagggactagtttgtggaaaggtctgagagttcctggaggctataattagctttttgggttttccttctttgccttagcgttgaatttcaggagaaaattgcagtcagttcagacatcttgggaaagagtcccatctctggtcaagcagagacttttcctctgtttgaactgagggaacacactgtggcatttctaccttctgttgtgagccactctttactcttttcaggggctctcttgttgacaaacatgccaatcactagcactttgcacccctgggcttctccatttcccattcacagctttgatttccagagctgaggcctttaactggagacctgggaggggcagggccaagggcaagggccgcattagcacaggcaatcagggagggccgctgaaggacacttggaccgtccacctgccccagcccaacagtcagtcatctgttcatcagctcagctgagcagccctggggntttttgccgtactgtgaattgggtttttgccntatttttcctntggtctgtggccctgggatnggcaagggtnaaagtcaaaaggg

SEQ ID NO: 366525 - DNA, 887 bp, Homo Sapiens
agcgggcgagcgctgctcatggcgctctatgagctcttctctcacccggtcgagcgcagttaccgcgcggggctctgctccaaagccgcgctgttcctgctgctggccgctgcgctcacgtacatcccgccgctgctggtggccttccggagccacgggttttggctgaagcggagcagctacgaggagcagccgaccgtgcgcttccaacaccaggtgctgctcgtggccctgctcggacccgaaagcgacgggttcctcgcctggagcacgttccccgccttcaaccggctgcaaggggatcgcctgcgcgtcccgctcgtttcgtggaggagataatgcctgttgtgtacagcaagacagtgggtcattgtgtatgtacagaagtgatgtggattcctcccagactcattagtgaccagggctgctgggcctgtaagggtttcctagactagacgaagaagacaggaaccaggatgggaacgacggacatgttacattcttaagcctggagcttcccctgcagtccacggagcacgttctcggtgtgcagctcatcctgactttctcctatcgacttacacaggatggcgaccctcgtgaatgcagagcatggcgtctctccagtcctcctttcctgtcccgggatcacagttatacgtgaacggagacctgaggctgcagcagaagcagccgctgagctgttggtgggctaaatgcccgatacaaacatatccgtgatcaacgggaccaagcccctttgcctatgactacacgtcaccatatagaggcagcctaccagagaagaagttaccacgctctgaatgatccaaccatctgttgtggcaggctgaaagtaccaatgggatcaagcaagacacgatccc

SEQ ID NO: 366526 - DNA, 751 bp, Homo Sapiens
agcgggggcgcgctcggccaggccggcctccctaaccgcctccctaccgccctctttaactcagtggtttggctgaagcggagcagctacgaggagcagccgaccgtgcgcttccaagcaccaggtgctgctcgtggccctgctcggacccgaaagcgacgggttcctcgcctggagcacgttccccgccttcaaccggctgcaaggggatcgcctgcgcgtcccgctcgtttcgtggaggagataatgcctgttgtgtacagcaagacagtgggtcattgtgtatgtacagaagtgatgtggattcctcccagactcattagtgaccagggctgctgggcctgtttgggtttcctagactagagaagaagacaggaaccaggatgggaagacggacatgttacattttaagctggagcttcccgtgcagtccacggagcacgttctcggtgtgcagctcatcctgactttctcctatcgattacacaggatggcgaccctcgtgatgcagagcatggcgtttctccagtcctcctttcctgtcccgggatcccagttatacgtgaacggagacctgaggctgcagcagaagcagccgctgagctgtggtggcctagatgcccgatacaacaaagaaagactgagagtaaatggggcttaaattgttgcaagagagtctattcatctttgaaggagaagattattgatactgcagtaggcaccaagaacaagagggtgctctgtgggacca

SEQ ID NO: 366527 - DNA, 1174 bp, Homo Sapiens
  misc_feature (69)..(69): n is a, c, g, or t
  misc_feature (1049)..(1049): n is a, c, g, or t
gggcctatatggaggtgacactactagcacaccccccgcaggcgtgtttttaatcaaaagccaaggcgntacggtcggagtccgggatatgtcgaccacgcgtcgattgaagaaatgaaatattggaacttatgatgttagtgatcacaaaacgtataagaagcatcgctcttctcatgcacataccaacaacttgcaaagtccgggtcaacctgtggattctatttacaaggagcagctcaacaccaggtagtcctggatggctgtagagacctggactgagaaggatcagatgacatcaccaccaaccctgtgcagatgctccatgagttctcaaaataccggcagcgcattaagcagcatgctgatgctgtgcacctcatctcgcgggtgacatttcactataagagaagcagtctgagttactttggaggtgtctgttctcgcacaagaggagttggtgtgaatgagtatggtcttccaatggcagtggcacaagtattatcgcagagcctggctcaaaaccttggaatccaatgggaaccttctagcagaaagccaaaatgtgactgcacagaatcctggggtggctgcatcatggaggaaacaggggtgtcccattctcgaaaattttcaaagtgcagcattttggagtatagagactttttacagagaggaggtggagcctgccttttcaacaggccaacaaagctatttgagcccacggaatgtggaaatggatacgtggaagctggggaggagtgtgattgtggttttcatgtggaatgctatggattatgctgtaagaaatgttccctctccaacggggctcactgcagcgacgggccctgctgtaacaatacctcatgtctttttcagccacgagggtatgaatgccgggatgctgtgaacgagtgtgatattactgaatattgtactggagactctggtcagtgcccaccaaatcttcataagcaagacggatatgcatgcaatcaaaatcagggccgctgctacaatggcgagtgcaaagaccagagacaaccagntgtcagtacatctggggaaacaaagggctgcagggtcctgacaagtttctggctatgaaaaaggctgaaatacacgaaggccactggagaaaggggaaaacctgcggggaaaaggatgggaaaac

SEQ ID NO: 366528 - DNA, 408 bp, Homo Sapiens
  misc_feature (12)..(12): n is a, c, g, or t
  misc_feature (31)..(31): n is a, c, g, or t
  misc_feature (37)..(37): n is a, c, g, or t
  misc_feature (61)..(61): n is a, c, g, or t
  misc_feature (76)..(76): n is a, c, g, or t
tttgttcccccnagatgtactgacactgggntgtccnctggtcttgcaactcgccattgtnagcagcggcccctgnattttgattgccatgccatatcccgtcttgccttaatgaaagaatttggtgggcactgaccagagtctcccagtacaaatattcaagtaatataacactcgttcacagcatcccggcattcataccctcgtggctgaaaaagacatgaggtattgttacagcagggcccgtcgctgcagtgagccccgttggagagggaacatttcttacagcataatccatagcattccacatgaaaaccacaatcacactcctccccagcttccacgtatccatttccacattccgtgggctcaaatagctttgttggcctgttgaaaaggcaggctcca

SEQ ID NO: 366529 - DNA, 837 bp, Homo Sapiens
ggggtagtggggcctgcggtgggagtgggaaggaaggcggagggaaccatgcgaggttctgagaattgcggcgagggtcgcctcgagagacggtttctgagcaggaattctgaaatccccaccacttcctccctccgggggatttgatcccctatggccaccgctaacagcatcatcgtgctggatgatgatgacgaagatgaagcagctgctcagccagggccctcccacccactccccaatgcggcctcacctggggcagaagcccctagctcctctgagcctcatggggccagaggaagcagtagttcgggcggcaagaaatgctacaagctggagaatgagaagctgttcgaagagttccttgaactttgtaagatgcagacagcagaccaccctgaggtggtcccattcctctataaccggcagcaacgtgcccactctctgtttttggcctcggcggagttctgcaacatcctctctagggtcctgtctcgggcccggagccggccagccaagctctatgtctacatcaatgagctctgcactgttctcaagggcccactcagccaaaaagaacctgaacttgggcccctgccgccaccacctccaatgaaccctctgggaaataccccttccacaaacctcctctttgggaccccccaaatggcggaaaaacctggcctctcagtcttccaaagacaccctcggtttcccgccagacaaactccacggatctggacgaccattgcctggtgcccccttttgcggccaaagaatccagcggggcttgcacggaaaaaggggttgtggcacctcatccgcaattggccatgc

SEQ ID NO: 366530 - DNA, 736 bp, Homo Sapiens
tggatatcgtgaccaggcgtcgggacgcgtgggcgcgacgcgttttgagaggaaaggagaggaagagctggagggggtgaggaaggtaaggggagggaggcagagggttctgcttggtctccaggctaggaggcggtgcctggaggatacaggaacggggatcctctgatcaacggctggtctatactcgctatgggaagtgttacaccttcaactgcggaccctgctggagctcgcttgcccagcctgggcagggggcatgggcagtggcctggagatcatgctggacatccagcaggaggagtaacctgccccatctggagggagacaaatgagacgtcgtttgaggcaggtattcgggtgcagatccacagccaggaggagccgccctacatccaccatgctggggttcggggtgtccccatggcttccagacctttgtgtcctgccaggaacatgcggctgaccgtacctgccccagccctggggcaacttgccgtgcagagagtgagctcagggagcctgagcttcagggctactcggcctacagtgtgtctgcctgccgggctggcttgtgaacaaggaggccgtgcattcagcgctagcactgccggatggtgccacatgccaggcaatgagaccatcttgccaccaaatatctacattcgagttgtgcagaacacacactggacatccctgggtgggaggccttgaggggccgtgctttctgcccaac

SEQ ID NO: 366531 - DNA, 877 bp, Homo Sapiens
cgaggtccgtgaggtgtgtgcttaaccacagggcggctcacaaccgtgacagactgccattcctgagtctcttctggccatgggcccccggagccgtgagcgtcgggcaggcgcggtacagaacaccaacgacagcagcgccctcagcaagcgttccctggccgcgcgcgggtacgtgcaggacccctttgccgcgttgctggttccgggcgcggcgcgccggcaccgctcattcaccgaggctactacgtccgcgcacgcgccgtgaggcactgcgtgcgcgcttttttggagcagattggcgcgccccaggccgcgcttcgcgcgcagatcttgtctctcggcgctggcttcgactcgctctattttcgcttaaaaaccgcgggccgcctggcccgggctgcagtctgggaggtggattctccggacgtggcgcggcgcaaagcagaaaggattggagagacgccagagctgtgcgcgttaaccgggcctttcgagaggggggagcccgcgtccgcgctgtgctttgagagcgcagactactgcatcctgggtctggacttgcggcagctccagcgagtggaggaggccctgggcgccgcggggctcgacgcagcctcacccacttctgctcctggccgaggcggtgctgacctacctcgagccggagagtgccgcggcctcatcgcctgggcagccagcgttttcctaatgcccttttcgtggtctatgagcagatgaggcctcaagacgccttgggccagttcattgctgcaagcattttcggcagctaaactcccccctgcatggcctggcagtcgtttcccctgacgtggacggcgcagcggcgcctgttccttcagagctagggtggacc

SEQ ID NO: 366532 - DNA, 755 bp, Homo Sapiens
cgcgctggtacggtccggaagttccgggatatgtcgaccacgcgtcgccactctgtgccctcagggtctctgcttggagagtccatggcatctgagaggatgggccaggtgaggtgggggtggctcctgagagcagggaggacaagggcggagctggaggcgtcaggcccagaagacccccccagtgacttggggcagctgtgggcaaggcttggacccaagaggcctgagcaccccgcctggcagcacaccagagcacaggccagacctgaaggggcagcgccagggggcccatggtccacgggtcactctgctggccctgcggccacactgctcaggtcccagggcctgatgatggctgagccagacatcataacaccaagcaatggagaaagttagaactattgctagggatactgacttgtattttcgaatcttaaaatatatgttttaatctgacatctataagcagtgcatgttacatgcccagtcagagcatgagcatccccaagaggtgtgcactctgtgtaatctatggataatgaaacagcacggctttcacacagcaagttatcctcacttcctgtgatcaactctgatatcttctactttacttcgaaacgagtatcgattgtgtcccactcgactgatttttacaccctctatgtacatggtccccagtttatgggcagggcggttattccgtgtcacatctaggtctctgagacggagtcttgcttccgtccgcccagtct

SEQ ID NO: 366533 - DNA, 1142 bp, Homo Sapiens
  misc_feature (844)..(856): n is a, c, g, or t
  misc_feature (858)..(868): n is a, c, g, or t
  misc_feature (870)..(879): n is a, c, g, or t
  misc_feature (881)..(898): n is a, c, g, or t
  misc_feature (901)..(901): n is a, c, g, or t
ttgtgtttctcgttgttgtctgttgtttttgtggttcgtgttggttgtccttctcgttttctgtagtcttccatttgtgttttgtctgtctcctgtgtgtctttgtttcctgtggtttctttcgttgcctctttgtcttgttggtggttgttctcccgtctttgtgtgttctgatggtcgtgttgctcttgtggtggggtctggtatgtgttgtcccgtgcttgtgtttctttctcctctttctgtttcccgcttggtctgtgccccctgttctcatgttctatgtgctcggtcgtgggtcttctgtgtctctgtgtgtggtttccgttgtctatgtgatcttcctgtttcctcgtccgtgagcattatgtgtcatggtctcgggtctggcctgcttctcccgagcttgtgtctcgttgcgtctcgatgggagccatgacgtgatgcttgtgcttttggcatcaatggggttcaagcttgtcctatctggtgtaaccagggtctggtcgtctggttgtgtacaatgtggcctctcatgagtgttgagggaacgagtggtgagatgtgtgacaaagcaagacgggcaatgtgccttgcctgagactgagtgaaggaaatggggtttgtactcactccctgaggctgccatgcggtgggaccaccctgctgtccgtctcctgtggctgcccctgctgcccgctcctgatggctcgccttgtctctccagcaagactgtgcactccttgcaggcaggggctgggcgtggatgctgctcttgtgtcccacgtggtacttagttcaaggctgccccagcagatgcttaataaacagctcttcactttcnnnnnnnnnnnnngnnnnnnnnnnncnnnnnnnnnnannnnnnnnnnnnnnnnnnccnaaaagggcggccggctctagagtatcccctccaggggccccaagcttaccccgtacccagcttttcttggaacaaagggggtccctaaaagtgaagtcctaattataaactaggcaacttgcccgtcccttttacaaccgtccggaacggggaaaactggctaaccttgggaaatctttgggaagggaacctaaccttctgggggggtggacataaatggggaaaaacttccttacaggaa

SEQ ID NO: 366534 - DNA, 624 bp, Homo Sapiens
  misc_feature (48)..(176): n is a, c, g, or t
gctggtaccggtccggaattcccgggatatcgtcgacccacgcgtccnnnnnnnnnnnnnnnnnnnnnnnnnnnnnnnnnnnnnnnnnnnnnnnnnnnnnnnnnnnnnnnnnnnnnnnnnnnnnnnnnnnnnnnnnnnnnnnnnnnnnnnnnnnnnnnnnnnnnnnnnnnnnnnnngtgcttggatgggcttggcaaactttagccattagctcacgtaccactttggaagggcataccttcagtcacttcaccctttaatccctttgctcaagactaaagttctgagaggaagactaatcggctgagttgtgtccatgtgggcagtgcaggaaaggatgcagcgggacgctgctccagggacgtctttggcttccatcatgggggagcaggcgcctggattacccaccctaacaaatctgggcaaaggaaaacgaggttctccgaggaaggagacatagagcccaaggagctaaccaagagacaaatagtcatcctgtcttgtcattttcttttacacatgtgtgtacattattttacacttatcactttgttttctttctctcctttaattgcaccctgctgccaaaagttaacaataaaatgaaagtacttgagatagctc

SEQ ID NO: 366535 - DNA, 1550 bp, Homo Sapiens
ttctggagcctctgaggccagagcctcggagaccacagggcggggggaggagtgagctggtccgctgggggacccaagcccaggcctcccggtcacccccagcagggccaagcactggatggcagcagggtggtggcttccctcgccgggcaggcagctccgggggcaggccccctcctgcaggcagcttccccgaggagggggttggctggcttgggccccaggctggagggcgcccaggggtgagtctcccaggatgtccgggctttcttctggccctgggtctgcagggcgagctgcaacagcgccgtggacatgggctggcccattgagcagcggcatggctgggggggcacccaggaggcccatgcttcccaccccgcactgccatggagcagggggttgagcagcagctggagggacagcggatgggcccaggttgttgagcagctgcaggatgttgggctcggggaggagtcccttcccccgattgagggccgtggcctgggcagcgatgagagcggccagcatactgcaggccggggggccacaggggcgcagaaggagactcgcaggtggctgccccccagggacaggccgtccgcctgctgctgtgcctcctccgcaatctcagccgtctcatactccagcaccgcgaagcccttcagctgcccattcctggccgcacgccagctggcagaaggtggggctgtggacagctgacagcgcccggcacagagcgtccacatcgttgaagccaggtggcaggcggtccacacagaggcagcgggagtggagaagggcaggcgtcagttgcccggcatccgtccagtgcacgtagagggtgcgttggtcccagcggcttgcccagcaggtccgacttggcacgggcagccgagtccctcttcatgtactcagcaaacccatagcccttggattggccagtgcgctcactgtagaccaggaagcagcgctccaggctgccgaagggccgcaccagctcctcgaactgctgctgtgtgaggctggggggcaggttggccacacacagcagggcatccagtgggctgcagctgcaccgacagttcacgctcccgcaggcggctctggtggaaagcattgattgcggcctcggcctgctccccattcagcagggtcacgaaggctgtccctttgtatttgtccacaaaaacagtatttgagctcatagtcactgagcaggtcatgtacttcctggttggtcacagtcccccgggaggccccggatcagtatcttgcggcggttacggaactggcgctcggtgtgttccaggcgtttccggatctcttctggatctagaggcggcagctcttcttccggcgcccggcgctccgcggcatcgccggcttcgacttcggccccagacttagggctcagcgggggccggtgagtaacggacacgtccgccgccatcttgggcctcgtgccgaattctccacccagcctcgctaccttagtaaccgttatggtactgccgtcgtttaataaccggcggtgtacaacgacgcct

SEQ ID NO: 366536 - DNA, 1098 bp, Homo Sapiens
  misc_feature (15)..(15): n is a, c, g, or t
  misc_feature (66)..(66): n is a, c, g, or t
  misc_feature (91)..(91): n is a, c, g, or t
gcccctcaaaaaacnattgggaacaaaatgctgtccacaaatcccacatcctctgtcccaaagagnaaagaataatgtcccaaatccttcngtcggccccttggtttcgcccatcctcctcctcctcccaggttcctcccacaattcatatgccatcttggcgcacctgccaattccatagcagtttggaaagggtccatagagagtgctgagaaggtgtaaggcctgagctacagtgttgatccaacgctgatctccttccagaaagtaatccctgaaaaattctgctagctccatgctcaccaggatccacatcaagaggcagcaaagagaaggcccattcatcacagctcacatctcccatagattccctcttcctcaagcaccatctcacacgcatagaacttttgagggctgaagatcactttgtatttgcgagttcggccagccaatttgtcagcattgacaagactggcaatgtatcgcatattcttgatgcggggtctgaccaagaagcacaattgttcattggagctgagggctggcttgttctccaccttgtatagcttgtctacttcgtgttgcttcaggatggagacattggcaattcgatccaaagggctcatgagatctgccgtcaatgaagtaaatcctgtgtttccaggaagctgctccagcagatagatgagctggtctcgagccagcctcttcagcatggagaagtcaggcagctcaggggcgtccggccgatggggaaaagccatggcagcggtcacctgcgccgcggggtggaaggacgcccttcgttctgagaaggccggccgcagcccagggaagcgcaaggggggctatccttcaggcctgggcaccgacttccagagaccccagatgggccctcgctcctcagcagcactccaggaatgaatggccacctccaggcaagagagctactacctcggagcagccttgtctcagacctgcagccaccgtgtctcgaccctccctccctgatccactctgcccgtcagcaggattccggtctacaccccgcagagactccgcagcgtacgaggagaaccccgccttctaccagaaaaa

SEQ ID NO: 366537 - DNA, 1709 bp, Homo Sapiens
  misc_feature (1128)..(1143): n is a, c, g, or t
  misc_feature (1558)..(1558): n is a, c, g, or t
gctggtccggtccggaattccgggatatcgtcgacccacgcgtccgcaataatcaactcgtttttatattaatgtacttgtttctctgttgtaagaataggcattaacacaaaggaggcgtctcgggagaggattaggttccatcctttacgtgtttaacaagaaaagcataaaacacattttaaaaacatagaaaaattcagcaaaccatttttaaagtagaagagggttaaggtagaaaaacatattctatgtgcttttcctgataaagcacagctgtagtggggttctaggcatctctgtactttgcttgctcatatgcatgtagtcactttataagtcattgtatgttattatattccgtaggtagatgtgtaacctcttcaccttattcatggctgaagtcacctcttggttacagtagcgtagcgtggccgtgtgcatgtcctttgcgcctgtgaccaccaacccaacaaaccatccagtgacaaaccatccagtggaggtttgtcgggcaccagccagcgtagcagggtcgggaaaggccacctgtcccactcctacgatacgctactataaagagaagacgaaatagtgacataatatattctatttttatactcttcctatttttgtagtgacctgtttatgagatgctggttttctacccaacggccctgcagccagctcacgtccaggttcaacccacagctacttggtttgtgttcttcttcatattctaaaaccattccatttccaagcactttcagtccaataggtgtaggaaatagcgctgtatatgttgtgtgtgcagggagggcagattaactaatggaatggtttgggaatatccatgtacttgtaagcaagcaggactttgaggcaagtgtgggccactgtggtggcagtggaggtggggtgtctcgcacgtcagccggcaacccagcaaactaggccccgcagaacccattgccgggagagtgcgcgacttccacatcctatgagagagtcccatggccgcccatcggccagcgccaccccgccgcccacaccccgtcccgcccacccctacaacccgctactccaccaacccgtcggtcccatccgcctccccgagagtacccacannnnnnnnnnnnnnnnacgttgcgaacagtaccccaccaccgccacgtggccaccatgccactcaacgtaccgcactgctgccccgccgccactaatcccgctcctactaatggctttctacccccaaaacattccgacgatacctcaccccccgcacaactcaaaatccgcagccgccgcaacaacaccacgcccccctagtaagatatccccgccatacccactaaacccaatcggcaaataccccacctacacccccgctccactatccaatcgcgtgtgtgtacaccctcgacccccggctgtcctctgtcgccgccaccgtcaaccacaagaaccatgcgctgacctaaccgagacacgaatgccaacgatctgctcaggacaacaatagacagacgtccaccccactcaccgaacgcagtcgccntcgccacaccgcacactaacttacgtaaccaatagagcagaatgttagagcaaccacaaaggccgcacagagagcagctccaactccctaatcaggagagacacccaatcactttactcgcttctctcacctcatgcatcaaagaaacacc

SEQ ID NO: 366538 - DNA, 840 bp, Homo Sapiens
  misc_feature (74)..(203): n is a, c, g, or t
agttagtccaaatgaatgtacggagacgattaattcaatgggggaaaagacagttaccacaatggagcatttcnnnnnnnnnnnnnnnnnnnnnnnnnnnnnnnnnnnnnnnnnnnnnnnnnnnnnnnnnnnnnnnnnnnnnnnnnnnnnnnnnnnnnnnnnnnnnnnnnnnnnnnnnnnnnnnnnnnnnnnnnnnnnnnnnnggtgacaaagatttatatatgttgttgacagaagaaaaaatccaaatacttattaaacatggaaatatatttatccccataaataataaaggaagtacaaattaaaacaaaaaagcatatcacagccatcataagagtaaaaatcacagggtctgacaattcaaaatctaataaggatatgagaaaattctagacagcagtgtgaactgctacatttgcttcagacagcaatttaccaatatctggtaaagctgaaaaatcacacactctataacagcaattccacttctaggtatatatcctagacaaaatattgcacatacacagaagaaaaccatacaaaagtgtacattttagattacattgcttgtaatcaaaaaattggaaataatatattaagatggggaaatacataaactttagaattcataaaatggttaaaattaaagaaatatatatatacagaaagttcaaaaatacaattttgaagaaaaaatcctacagtgacacattcagtatgagattatttatgtggacttaaagcacataataaaacaatctctaaaaacagagattggatggatacacacaccaaattttaataaaggtataagttggacttattccggggatcctg

SEQ ID NO: 366539 - DNA, 919 bp, Homo Sapiens
atggtacggtccggaagttccgggatatcgtcgacccacgcgtccgcccacgcgtccgggtgaaatggattgaattattccactcatagaaaagtgaggtgagactgacacacagaagagagaaagaaaagagaggaccaggtacaggagaaatgcataaattgtaacagcaatttagagaggatcagatattttgagcatgctttcaactctttactttctatcctttacatactaacctttgtggatatgttgtatataattacagataaaggaatgttatatattaattatatcatcaatggactgttttattacttctttcaaccaattcttcaattttactcaagctgcaaatcacactatcaaaagttaaagatgaaaaacacttgcgaggtcacggcttgtcctttttcctgagtagggggaggaaaaccagtgttttcttcagtattttgtaaaagtgatattctatctttccacgcttgtgtgcactactgaggtctgcgcaaatgctcttgctttgctggttggtttagctcagagacaggttttaaatgcactagaggaaagcagcttttgctaaatgttttataacgtgtcaggaaacctttatcgaacatttaatccaaaacctggctttgaaccagggaggcatacaatttcgtaattaattttttaaccttcttttgctaatcgctgataaaaagcttaattctattaacaactcgacttgacaaattgcaccgctcaatggaagcgtttagaaattaattacgcattttattgcattagatcggataaacaaggaaggatcagcaaggaaaaggaaaacccaaaaagaaggaaaatggccaaatatatacaatccactggtgtctgactatttccattattattcaatgtgtcaccaaaaaaa

SEQ ID NO: 366540 - DNA, 1084 bp, Homo Sapiens
  misc_feature (47)..(103): n is a, c, g, or t
  misc_feature (335)..(381): n is a, c, g, or t
  misc_feature (458)..(467): n is a, c, g, or t
  misc_feature (844)..(963): n is a, c, g, or t
tggctggtactggtccggaattcccgggatatcgtcgacccacgcgnnnnnnnnnnnnnnnnnnnnnnnnnnnnnnnnnnnnnnnnnnnnnnnnnnnnnnnnntaagctactaccacttttaattgtctctcataaataatttgatgtaggagtgaattcaaaatcatttagaagaatataatatgacaatgacaaattatacacaccgtaatatacaggatacttttggatctgtactcagagtataactcctaattttaaatactaatgtatattgtcttaaaaacaaagagcctaattaactaggtattcaaacctaaattttaaaaagacnnnnnnnnnnnnnnnnnnnnnnnnnnnnnnnnnnnnnnnnnnnnnnnactaaagtaagcaggaggaattaggaaatattaaactaaaaatttgttgaacagagaatgaaaatgtaaaggctgannnnnnnnnnggtaaaaataattagtaaacagataaaccactaacttaaaaaataaaggataaagtgcaattaaaataggacatgttaatcagaggtaattagagctaaaaagacactaaagaaatgggaaataaatccttgttatacctgagggaaatgtacttgaaaatatgaaacaaaatttaacagtttcaacataaatataaatttccaaacatcaatccagaagacaaatctaaacgaacctattactaacaacaacaaaaaaagaagttgtctaaaatgcacttactccctactccacacagaaagaaacagaagacattatcccctgaaatttacttaaacatttaattaaatatattgcaatgctgtataaaccattnnnnnnnnnnnnnnnnnnnnnnnnnnnnnnnnnnnnnnnnnnnnnnnnnnnnnnnnnnnnnnnnnnnnnnnnnnnnnnnnnnnnnnnnnnnnnnnnnnnnnnnnnnnnnnnnnnnnnnnnggttcatagatgaccatcttcttagtgtcctcacatagtggaaggcactaccaacctcgttgggacccctttaattgtgctgttttaatgtacaataaaatgtattaaaaactaaataatt

SEQ ID NO: 366541 - DNA, 723 bp, Homo Sapiens
  misc_feature (56)..(71): n is a, c, g, or t
  misc_feature (368)..(377): n is a, c, g, or t
  misc_feature (573)..(657): n is a, c, g, or t
gctggtaccggtccggaattcccgggatatcggttctagatcgcgagcggcgcccnnnnnnnnnnnnnnnncaaacacagtaaactaaattagtcgtcagtgtttaaattgcccctacttctcctctcctgaatatcctctcctctcttctttcctctactagtcccttctctttcccctctcaaccaggaaaccatcatgtctctctgccttcctcctctcccctccaggggagtcaggctgtctgtgaaagccatgagcttctctccctctcccactcctcctctcctactttcagatggattaatcccttttttaaacaaatgaacatcggaaatgagactgtggggtgtggtttctctctctcnnnnnnnnnnaattttctttgttgggtttttgagcaacctcatgtccccttcccagggagctttttaatttacctcttagaactcaagtggatgggaagtagagcactatgtgtcagtatgctttgttttctgacacgattacacagcgaggctttaatgccatttgggtaggtgagcttctgcacttctgttgtgctgaactgtnnnnnnnnnnnnnnnnnnnnnnnnnnnnnnnnnnnnnnnnnnnnnnnnnnnnnnnnnnnnnnnnnnnnnnnnnnnnnnnnnnnnnaccttccttggattatccttccaggttttcataataaatttatattttcgacctccccctcccatg

SEQ ID NO: 366542 - DNA, 820 bp, Homo Sapiens
tgctggtacggtcggaattccgggatatcgtcgacccacgcgtcgggcagggtcttcccggcctcgccttctgtctccctgaaacaagtggagaaatacgaccctggggccaacaagtggatgatggtggcccccttgcgggatggcgtcagcaatgccgcagtggtgagtgccaagctgaagctctttgttttcggaggaaccagcatccaccgggacatggtgtccaaggtccagtgctatgacccctcggagaacaggtggacgatcaaggccgagtgcccccagccttggcggtacacagccgctgccgtcctgggcagccagatcttcatcatgggaggtgacacggaattcacagccgcctcggcctaccgctttgactgtgagaccaaccagtggacgcggattggggacatgactgccaagcgcatgtcctgccatgccctggcttccggcaacaagctctatgtggtcgggggctactttgggacccagaggtgtaagactctggactgctatgaccccacttcagatacatggaactgcatcaccacagtgccctactcacttatccccacggcctttgtcagcacctggaagcacctgcccgcgtgaggagcaactgctgagccaagcagaccgcggcttcagtgtcacagcgtggccttgcttgtctagcacagcgggagctaagcggacctgggccagcactcgaagaggtggaaagggagcctgccaaatctggggaccagcagccttggagatgttctgagcttcaggcaagagaccagacgcatatctatgataccgtgcacct

SEQ ID NO: 366543 - DNA, 829 bp, Homo Sapiens
gggctggtacggtcggaattccgggatatcgtcgacccacgcgtcgggagagggggcggagcgtggaggcggcagctggaaccgcgcagcgcacgggaacgcgtaccgctccttgggtcaggttcgccgtgtcgcgggagccccgccgtgcagtcggaggaacacgtggccatcagtaatcatgagcaacccattcgcacaccttgctgagccattggatcctgtacaaccaggaaacgaacacttcttcaatttgaataaattggaggattcaagatatgggcgcttaccattttcgatacagagttcttctggaagcagcccattcggaattgtgatgagtttttggtgaagaaacaggatattgaaacatattctacattggaatgtcacgcagcacaagaaacatagaagtgccatttaagcctgctcgtgtcatcctgcaggactttacgggtgtgcccgctgtggttgactttgctgcaatgcgtgatgctgtgaaacacagtaaggaggacgatccagagaaaataaaccctgtctgacctgctgatcttgtcaatagatcattccatccagggtgatttcaacagaagggcaagacagtttacagaagaatcaagactggaatttgaaacgaactagagagcgatttgaattttaaagtgaggtacccaggcttttcacaacatgcggattattccccatggctcacgacatcatccaccaggtgaatcaggaatatatgggaagagtggtatccgaacaggatggatattattacccagaaagactcctggggcacagactcgccacataacaaaattga

SEQ ID NO: 366544 - DNA, 627 bp, Homo Sapiens
  misc_feature (55)..(68): n is a, c, g, or t
aattcggcccgaggccctgattccctttctctcctggcccttcctccccagaacnnnnnnnnnnnnnntcctgcctgtgcctgatacctgtaagatctcactccactgtaagaaaatagctatccctggttttcctttcccaggcccctctccaggccccagctcaggcacctccccgctctgcctgcttccctgaacttgcggactaaggtcattcacaccttgctgagccccttgcacgccttcatcctggtgagggtggagctaggagggcaccctcctcatgtgcccatcttggtccggctcctttctccttcacttcagcttggcctaccgtgtcattagacagttgtgccatatgtggggaggctggcagaagaggtgactggggactgcaatccatcctatactctgctccccaagccatgcaccctggtttggggctgtatctgtctggaggaaaagggctcctttttaaaatttgcacagggatgttctacaggttagtggcagccctgagtggaccaattgtctactggtccatctatgtatctgtcagctgtctttatctgctaccatcttcccatccaacccccaaaagtccatcattctgtccatccatccact

SEQ ID NO: 366545 - DNA, 1593 bp, Homo Sapiens
cggagctccacccccactgacgggttctgattggccgcttctgacgcgtctcggggcacgattggtccgtccggtcccggacaccgctccctcccccttgaggcaactacggcggctccaaggagggggtgggggaaggagggacggccggtcccgtcagtcaggcagcgggagccgccgggagcggatggcggcggccgtagcggctccactcgccgccgggggtgaggaggcggcagccacgacctccgtgcccgggtctccaggtctgccggggagacgcagtgcagagcgggccctagaggaggccgtggccaccgggaccctgaacctgtctaaccggcgcttgaagcacttcccccggggcgcggcccgtagctacgacctgtcagacatcacccaggctgacctgtcccggaaccggtttcccgaggtgcccgaggcggcgtgccagctggtgtccctggagggcctgagcctctaccacaattgcctgagatgcctgaacccagccttggggaatctcacagccctcacctaactcaacctcagccgaaaccagctgtcgctgctgccaccctacatctgccagctgcccctgagggtcctcatcgtcagcaacaacaagctgggagccctgccccctgacatcggcaccctgggaagcctgcgacagcttgacgtgagcagcaacgagctccaatccctgccctcggaactgtgtggcctctcttccctgcgggacctcaatgtccggaggaaccagctcagtacgctgcccgaagagctgggggacctccctctggtccgcctggatttctcctgtaaccgcgtctcccgaactcccagtctccttcttgccgcctgaaggcacctgcaggtcattctgctggacagcaaccctctgcagagtccacctgcccaggtctgcctgaaggggaaacttcacatcttcaagtatttgtccacagaggccggggcagcgtgggtcgggccctgggggacctggccccttctcggcccccgagtttcagtccctggtaagtcctaggtggggaggaaggaagccctgggatactgaatgccccttcccggccccaggcaccccctgctttctggcaggaggatggggggctgttgtccagcatcatggctgaccagatccgcctggctggccccagccctgcagaggatctatttccgggacatcggtacgatggtgggctggactcaggcttccacagcgttgatagtggcagcaagaggtggtctggaaatgaggtaagggcgtcctgtccatgggtgattgagggtgtcagccctgggagagcacctctgaactggggacctccaaattgcagggtgccaggcagaggctggagctgtcctcttccttccctctgcccagcatcccagggaagggctggctcagcagagaccctgagcttagtcccacacaggaccccccaggtcctgagcccccatgtacagagaggccatcttcccatctctgactctgcctttacagtcaacagatgaaattcagagctgtcattccggatctcagagctggccgggagccccgggggccca

SEQ ID NO: 366546 - DNA, 771 bp, Homo Sapiens
tgattgacagaggcgatcctgtacacccggctggggagcacagcatcactgttgagcacctccaccttcatccctttcatcacatcctcccactggtcatagagtgggacgtgcttgaaacagctgacgggagcagccttgtaactgtgatccttcaggaacttcccccagtcgaagcccaagaccagagcgtcttgtcctgttggtgtcccatctgccagctgtcctgtcccttgagagtggaggaaggctccaattttggcagaccaggcagccttgtgcaggactttggcttttttggtcggtggttttccctgtaacctagccaagatactggctttcttggagttggaggagtagctcctggagcaggagacgctgcagaacctcttggtcttggagaagaaggcttcccttgtacccacgataccacacatctcacagacagctggctcagaaccactgccatccaaggagcgaggagtcccagggctgagcaaatgcagcggggaggtcggcagttcccctgcttcccgatcctcattttctgcttcacttgactcctccagataggagctgctctcactgcccacactgctgttataactccggaaactatcatagccaccaaacagctccaagtcgtcatcttcctcttcctccattggttctgaagatggggtctcctcaatactccggggcttctccatgagacctcagtttcgccaagcgtcaccaggtgcaggaagccatattggcctgccccccgct

SEQ ID NO: 366547 - DNA, 1377 bp, Homo Sapiens
  misc_feature (113)..(113): n is a, c, g, or t
  misc_feature (179)..(179): n is a, c, g, or t
  misc_feature (1060)..(1082): n is a, c, g, or t
aaccatcgtccaaccccgcactcgagtcaggggatccagcagcaactatatacagtagatacgcgcagagacggtgagcaaacagaccggtgagagcgcgagtcgtccttacngcgaagtgagggagggcgaggagcacaggatggcgagaggcggagtccaactaagataatctacgntcggcagcggcgcgatatcacgctcgagagtgcgccgggcttgcggggagaaaacgctgaggcaggtgcgcggagaggtatcaagacgcgagggtgctgcatgaggacggaggccgtaatcgaaagagagcgcacgaccgcacagagggatggaggggggcgctaagaaaaacgtgcgacgggcgggggcgagcggagacaacgacacgcgccgagagtggggtaaagtagcacgaggagagagaaagcacgccgcgcgaagtacaactcggggccggacgagcagcggggtcgcccgatcctctggcaaccaatgcgcgacagctccacaggacccggcgcgggcgtgtcgcgggggagggataacaccggactgtgggtcgaatggggggaggctggccgggatacgctagtgacagaggggaggagggggcggagaaaaggggggaagtaaagcggtgggacaacggcgggaggcatagtgaaaccggcaccaaggagccgtgggaaggccacaaggataggcgcggatagaagtgtgcgctaacgattaggcaggggagagcaaggtgtggaaagagcgggaatgccgtcgggaaacgtcttaagcacgcactgggtgcataactccgcggatcccgagcacggggaatcgaaagcggcccatggtatacgcggtggaaacagacacacagtagcagccagccatgctcagctgatggatctgccggccgatatccttcaccagctgcctcactttgtcctcgctcagcctgatagtctcttgcgcagcaacacggcgtggatgaggctctcgtcaaggcacaggcctgcaatcttgcgacaggtacgcggaggcctccgtcggagcctgcgggagnnnnnnnnnnnnnnnnnnnnnnncctcgcccgcctcactcatgcctcctcctcctctgctctcgctcaggcgcctcggtggcggttggtcggcggttagcgcggctggtcgtcgcggcggccggggctcgctctcggggaggccggggcggatctcgcggcgcaggcggcggcggccgaggtggggtcgcgcggcggaggcggctcgagcttcgtgctgcgcgctcgctcttgggctcctccctcgtgccgaattcgccacccaggcctcgctacctaggacctaacagtcctataacgggaaaagttgatagaggat

SEQ ID NO: 366548 - DNA, 790 bp, Homo Sapiens
agctgtaccggtccggaattccgggatatcgtcgaccacgcgtcgggggacagtgggctcccagggaatgcaggttgaccacatctggctcctgccaggcaacgagcagcatctggcagagtaaggggccaacgcccatgggggatggaccctctcagttcttgggaattctgccccaaaagtcctttccctggggtctcagagggcccccgtccttcccttcttggtgtcactgtggcccctcactgctcttttcctattcaaacctgagtcccaccaggcccagggcttcacctgctgagctgttgtgtccttgcctgtgacgaggcctggccagggtgcaggagcagaaggtggggagggttatagacgctgcaaaggccaaaagaacatctgagagtggcagctggtgacctggccagaggggctggtgaggggcagagaacctggctagaggctgggtccctcaggtggtcctctcaggtgggaggcgagcagcaggtgtgggtgaggggaaggttctgatgacagctgcagaggcagggcccagtgctggcaggtggggggccaagaccctcccctggtgggacgttgaagccaaggatggccttggaccctgtcaggcccagcatggtcccgccacctcccccaccccaacttgaagttggggtgggagtgtccctcctcctgggaggccagccagagaggtcatcaggttgggaggtggccatgccccttctggccagggaccctgcccctcaccagcttctacttctgcatgtcacactgc

SEQ ID NO: 366549 - DNA, 876 bp, Homo Sapiens
  misc_feature (628)..(628): n is a, c, g, or t
aggctggtacaggtccggagttccgggatatcgtcgaccacgcgtccgaaaaaaaagagtcttaccaagtagcaggcgctgcagtagccatgttaacatgacatttaccagcaacttgaacttcacctgcaaagctctgtggccacattttcagccaaagggaaatatgctttcatcttctgttgctctctgtgtctgagagcaaagtgacctggttaaacaaaccagaatccctctacatggactcagagaaaagagattgagatgtaagtctcaactctgtccccaggaagttgtgtgaccctaggcctctcacctctgtgcctctgtctccttgttgcccaactactatctcagagatattgtgaggacaaattgagacagtgcacatgaactgtcttttaatgtgtaaagatctacatgaatgcaaaacatttcattatgaggtcagactaggataatgtccaactaaaaacaaacccttttcatcctggctggcagaatgtggagaactaaaggtggccacaaattctttgacactcaagtcccccaagacctaagggttttatctcctccccttgaatatgggtggctctgattgctttatccaaaagtggaagtgacattngtgtcactttcagatcctgaatcttaacgaggctgacagcttctacttgctgtcccttggaactcttgctatcggggaaaccagacgccatttaaaagtctgcctatcctggccaggtgtggtggctcacacctgttaatcccacgcactctgggagaaccaaggcgggccggatcactttaaagtcacggagtccaaagaccagactcgccaacaatggtgaaaccgtatctctaatacaaccataa

SEQ ID NO: 366550 - DNA, 941 bp, Homo Sapiens
cggggcccctcctccaaggtacacagcctcatcctgccccacggcctcctgcacagtgttcgtccactgccggagctgctctggggtcaatgggtctgggtgttcacatcccaagcgcagctgctcaggattgagatgggagccctgctgctctgtgccagggcccagggtctgcctcagtgcccagtttcagcaggtgggtgccgtatgcttcgccatgcagcctagacgccaggcctcatccacatgcagctgcacctggtcccctaaccgcaggcactcaggggctactgcctcatgcaggatgaaacctccacagacctgggcccgggctactgggaacagcacgtcctcttgccctgcccgcaccaggtagccacggtctgaagcctggcccccctgttctgcgtagaagttggtcctgtccaagaggaggccacagcgctggcctttccccacggaggccactgctgtcccgtcctctgtatacagttgcaacacctgggcctcacaggtgccgaactcataacttccgctgggtcgcagggagtagttgtacttggggctgtcgtcagttgggggcactccttggcgctgcagctccccaagcgcatggacatcaagccacaatccctgcttctgaactggctcagcctgccgtgcccggtgctgggcctcctcttgggccaaccgctccagtccagcggagtctagctggacccctttctcctccagcatcagctctaccatgtccaaggggagtcccaggtctccacacagtgacaaggaccaggccacttcagcagggaacatatctgaaggccccagggtcctcagagtccgatcaatgatccgcctaccccgctccagggaggccaggaaggctgcctcgtcctctgacaccaggttggcgatctgggctgagttcctttgccgctcgt

SEQ ID NO: 366551 - DNA, 771 bp, Homo Sapiens
  misc_feature (50)..(133): n is a, c, g, or t
ggctggtacggtcccggaactttcgggatatcgtcgacccacgcgtctgnnnnnnnnnnnnnnnnnnnnnnnnnnnnnnnnnnnnnnnnnnnnnnnnnnnnnnnnnnnnnnnnnnnnnnnnnnnnnnnnnnnngacctttataagatcaatttttctgttcacaagcatttctttactcatagataccatttttataacttatatgagacgcatttaatgtaatcatattactttcttatactagaagataggatttcttctgatgtatcgaagttactttatacttcatatgaagtcattaggaggtgaattattgccaattcaatgaattatttatgagtattaggggaatgtttttgttatgctgcttttaatttggaaagcagcatatcactcaaactatagtaattcacatttttccatttaactaaaaatgtctcgtaactactatgccacaagaacaagcatggatacttatgtaaccagccaagactatgcatttctaaatatttatttttttcggttatccgtagacttttcctttcgaaatccaacgatctgtatcaaccacgtcttcattttccttttcctgtttgtcttactctccccccaaaaagagtcagtttcctgttttctcaatttctcagtttaacaattagagccctatggcaggtgccatgtacagctgcaaaggtggcaagaagccctgagcaaagctcaagaagcaggtcaagggggtgggtaaggaagatgggcacgtcaagcacaaa

SEQ ID NO: 366552 - DNA, 540 bp, Homo Sapiens
tgggatatgtcgaccaggcgtcgacacacacgccgcactgccaggtccctcctcagaccgccagccctgggacagggcaaacaactgaacttgctaatggaaaggacagtgtgggaggctgggggagctgtgtcctgcagttcccaggaccccatcctctcagaaggtaggggaagggcgggaggattgagaagggacaagccaccttgaacgtaggggaaggaggaatgtgggctgggggaagatgccctcaactcaccccctacacacacatgagagagagcccccacccagttccttggcctaggtctcccctccaggctgagggcctctctacttccccagatgcctgggtgcaaagaacggcttggcttggctcctcctctggaggttaaaatttatagtcattctaactgcactttggaaaccaagcaaggggtagatagcacaatgaagaaaaactagactagagagcaaaatacacataagttgtgtcgcgtagcgatagagagaagatgatatttatgttattaaactgac

SEQ ID NO: 366553 - DNA, 970 bp, Homo Sapiens
  misc_feature (641)..(927): n is a, c, g, or t
cggctggtaccggtccggaagtatgggatatcgtcgaccacgcgctcgcaggcccttactctggcctgagtcttttgggaggggccctgctgggccttctcctgccacctaccttcctggaccatctgtgcccctgcccacgcagtaccacactccccagactgtggaacgcatctccagtgccatctgggggccagttactgtacctggtccccaggcagagctcttggcctggcagcatccaggcaggtattaagtgcccagtgatggtggcacatgggtggggacggagccacatccaagtctagccctctgattaggaggatgacagtcttggaatttcttgttctctttctcctagggttctcgttctcccagctccagcctttctagtttcgaggcatgaggcaaaccattgctgtgggaatagcagtgaccattggtagggccatggtggccgggagaggaaacctcagggtcaccccagagcctgtggggagacggagggtgagctgttgttggagctgcagaaacgccttgaagggcagcatgggcgatgaggaatgccattgcagcctagaaattcggtttctggaggtttagcctgattttgaagagtatttaagaacagagggctccannnnnnnnnnnnnnnnnnnnnnnnnnnnnnnnnnnnnnnnnnnnnnnnnnnnnnnnnnnnnnnnnnnnnnnnnnnnnnnnnnnnnnnnnnnnnnnnnnnnnnnnnnnnnnnnnnnnnnnnnnnnnnnnnnnnnnnnnnnnnnnnnnnnnnnnnnnnnnnnnnnnnnnnnnnnnnnnnnnnnnnnnnnnnnnnnnnnnnnnnnnnnnnnnnnnnnnnnnnnnnnnnnnnnnnnnnnnnnnnnnnnnnnnnnnnnnnnnnnnnnnnnnnnnnnnnnnnnnnnnnnnnnnccacacaaaacgacaaccacaaagggaggcgcgaaaaagcacc

SEQ ID NO: 366554 - DNA, 642 bp, Homo Sapiens
ttgagataaccatggccccccccgcgcgtattgtgatatcgtcgacccacgcgctcgcccacgcgtcggggcacgcgtccggtttcttccaggtggtgagcttcatggtggatgcggaaaacaaggagaagtgggacgagagctcagcaggtgtcccctggctctgtgcacctgctccgtgtcgtggaggacttcattcacctggtggtgcgatgctctcaaggccttccagagctctctgattgtcacagataatctagtgatcagcattcagcgagagcccgtctcagactgtgtccagtgacatcacgttccccatgcggggccgccggggcatgaaggactgggtgcggcactcagaggaccgcctcttacctgcccaaggaggtgctcagcctctcctccccagggaagccagccacatctggggccagcaaggcagccctggccagggggaggggccccaggaacgggtgcctccatggcacaggccactcccaccagcgactcctaccaagcagacccttgattgagtcctccctacttttgttgatcgggtgctgtaactctaaccggacccttgggctcaatccttgccggctcacaggggccccaggtgtggcggtcacattcccgggtgaa

SEQ ID NO: 366555 - DNA, 765 bp, Homo Sapiens
gatactctagagcgccgcctggtgcttgacgggccgatgggccagcaggttgcgcagggcggcggcgctgcccatggcgatcatcttgtgcttggagtgcaccagattacgcagcatgcccacggcgcccaggtcccacagcagctcctggtcacgggcgctgcgggccgacaggttccagagcgtgccgcacgcgttgctcacgatggtcaggctgtgcgaagtcagatgctgcagcagcgtctgcagacagttgtgatcccggagcacctgcctgtagtcctcacgggtggcgacgaggctggacacattgcggaggatgccgccgccgctctcgatgatggccagcgagttgctctgacacttgtaggtcagggtgctcaccaggaagcccagggcgccatccacctggcagatggccgccttgttctctgtgctgtgtgcagacagattccacagggcgctcagcacgctcttcagggtggactccttggtggcccgcaggacacactgcaccagggcagtcacgctgcccgcctccctcagcaccttcttgctgttgatgtcggccctccaggacaagttccgaaggatgctggacaccacctggtggagctcctcactgtcggaggccagctgggccacgatggcctccatgcagccgcggcgcgcacacagggtggccttgttggcaacgtccccaaaggtgaggttggtgagggtcatgcccgcgtagcggcgcagcgccaggttcagcgggtcccg

SEQ ID NO: 366556 - DNA, 1511 bp, Homo Sapiens
  misc_feature (797)..(806): n is a, c, g, or t
  misc_feature (853)..(934): n is a, c, g, or t
  misc_feature (1190)..(1190): n is a, c, g, or t
  misc_feature (1403)..(1415): n is a, c, g, or t
  misc_feature (1484)..(1484): n is a, c, g, or t
ctggtctggtcagcggtttgggatatcgtcgacccacgcgtcgggcaggaatcgcggcaggacccgcgcaggcccctccttagctgaggggcggccgggtactcgggtcccgacccgcgaccaccgcacccatcaccaccacagcgggaactgcccggcggcccccagaagccccggcccggccgcagaggtgggcccccgagcacagaggccccgaaactcggctcgcagccctcagccccaatgtcggggggcgcggtggccccgggcgaccccccaccccgctcctggagcccacaggtggccccacaacttcgcggcccgcgctgcgcccgcggggcctagcacgctgccgcgggacctgcccaacgtggagtgtgtgcctgccccctcccgacccggcccccggcgcagcccttacccagaagactacattgaagactaagatcagtctatcccaacatacataacaccccaacggtggttccgccctcccctctgcaagcccctcacattgcaccttgtcttgggactaaacaaatcacctcatcccccctcgaccaccctcggccatgcccactttcgcccctcttcctcacccctccccttttccccctattttcttatccgtcctcccatcccaatccgatcgcttccatccacgccttttcctcccctacctcccacaatctctccctccctcaccttcttttctttcccctaaaccactcacccctcaccccctttcttctacccccccattcctaatccattctcacttcacaccttcgcgcatnnnnnnnnnnacaattcccccacctcctgtaccgatcacctcacgtcatcatccttnnnnnnnnnnnnnnnnnnnnnnnnnnnnnnnnnnnnnnnnnnnnnnnnnnnnnnnnnnnnnnnnnnnnnnnnnnnnnnnnnnccacatcacgatttttacccaatctacgtcttacttttgcgctatcaacacccccattcactttatatccaccaagaacgaacccattgcctttttctccccgaccaatcttatcccatcctaccacttatttccccaatactccgtccgcatagcacatactatcagacattattgcttccaacattcctccccgccatattttatcatctaccatatctcgtgttctaaccctccgctcctcaccttttcctcntcctcccaccacactcgctactatttttatttaccctcttcttcctccgcctcgcgttctctaccctatctcacgcacttgtttctgcttaccccaaccgatgtacaccttacccctcacgcgggtttacatgcaaaacctacttgttctgcacatctcccctctatacacatccctcccctcattacgctctaccaccttccatacttatannnnnnnnnnnnnttatattacaacctcctcattccctttcccgcctttctagcgctccttcctttattttcccctctctanctacgtaaacactcctaactccccccc

SEQ ID NO: 366557 - DNA, 651 bp, Homo Sapiens
tctgtacggtccggacttatgggatatcgtcgaccacgcgtcggctaacagtgagcctggtggtggatggcgtgtgggcgcagtgtgcccgggggctggagaatcccaccagggaggccttgacctccccaaggcaggaagaccttcagggaaggaggctgcctggcatggcccctacccgcttcaggctggtgctggtgaggggtcctgtggccctgggcaggccattgtgctgcctgcctcttcacccactgtgctgggccttggcttccctgggctctgggtcatggtggtggtgcccacccgcgtggggcagggctatgtatacgaggccgccagcctggagcagtgacgagtacgacataccgcgacacctgctggccccggggacacaggacatctatgatgtgcccccgtgttcgggggctgcttcccagccagtatggcccaggaggtgtatgacacaacccccatggctgtcaagggtcccaatggccgagacccgttgctggaggtgtatgacgtgccccccagtgtggagaagggcctgccaccgtccaaccaccacgcagtctacgacgttcctccatcggtgagcaaggatgtgcccgatggcccactgctgcgtgcaggagacctacgatgtgcccc

SEQ ID NO: 366558 - DNA, 1001 bp, Homo Sapiens
  misc_feature (316)..(598): n is a, c, g, or t
gtgccctacttcagagcgtcaccacaccttaaataagaaaaacaaagccctcgccgcgttgtctaataattaaaaaggccaagggtgtacggtccggacttccgggatatcgtcgaccacgcgtcgcgagcttttgattctggaaataattgctttaaaatataaatcaatcagaaagtgatctaccactgaaatcattctaggaaactagcatgggatgcactgcacaatgttctttcctctaaaggcatgggccccataaactgtggcatctggcagcaggatgccatcagtcctttagaaagcctaattttgnnnnnnnnnnnnnnnnnnnnnnnnnnnnnnnnnnnnnnnnnnnnnnnnnnnnnnnnnnnnnnnnnnnnnnnnnnnnnnnnnnnnnnnnnnnnnnnnnnnnnnnnnnnnnnnnnnnnnnnnnnnnnnnnnnnnnnnnnnnnnnnnnnnnnnnnnnnnnnnnnnnnnnnnnnnnnnnnnnnnnnnnnnnnnnnnnnnnnnnnnnnnnnnnnnnnnnnnnnnnnnnnnnnnnnnnnnnnnnnnnnnnnnnnnnnnnnnnnnnnnnnnnnnnnnnnnnnnnnnnnnnaggaagacacaagaaagccctaatattgggagaatgtttgtgtacggattggaacatctgtttatttttacatacagatagcactgatgtgaatcttatttggaaatttacagatacctgccaattaagcgatgcttttctatcttccattaattcattaggtaagcgcctatgcactttgtggattggttaaggtgccctagggtagtgataaagtagtgtccggtgtccttcccttagtcccattcatggtacccatctagcctctatcccctagggttcctttattcaatgaatttttccagttatcgacgaaaacactgaatttgaaaactaagtcatctatataaatactaaggctgtgggcaatgggtactatccaagatacaagattaagtaagaa

SEQ ID NO: 366559 - DNA, 1336 bp, Homo Sapiens
ggctgtacggtccggaatgctgggatatcgtgaccacgcgtccgtattttttactatcggcggagcagaccagggatgaacgtcttttaattgcaagtataactgttaaaaccacgtcgggatagtagtcaagatggataaaaagtcctttgaaatggtgctggatgaaattagacaggctgtttgacagaatacaaattaaaagcaattgaatatgtgcatggatacttttctagtgaacaggtggttgatttgctgagatatttttcctgggccgagccccagttgaaggcaatgaaagcattacagcataaaatggtggctgtccagccaacagaagtggtcaatatactcaactgtttcactttcagtaaagacaaactagtagctcttgaactgttagcctcgaacattattgatgcacagaattctcgtccctatttgaagatttattcagggtaaatatgtctgagaagcaaacggtgcaagagaatacttgaacaggctttcaaggggggctgcaaagctcctcatgctatgatatcttcttgtggaacaatcccaggaaatccaatatcccaaaggaagacctagccgcataaatggaaattttcccagtgaactccttttgaaaacaagatggtgacagacatgtactaacgaaggcaaaggacatagctgcacgaattcttgggccatccaaaacacctccttcaacatataatccacataaaactgttccttatccgatacatccatgccgaccacattgcaactattgcaccaagtgattataacaatgcaggtctggtaccattagcgaatgtcatagctccaactccactccatatactcctaatcctgtaggaacagagaatgaagacctttcgaatccgtcaaaacctatacagaatcaagacattttaccagcccagcaagtcaactcttttctccctcatggttctaatcccttcagaactgtctgcaaatcctgtacctacatgatccccagtcaaggcaatttaatcattccatctaggatcagaaggtgacaaccgtatcctgaatgaaccctgctgaatacttgtccttcttgtgtacacagggcagggctcctcaacgaacacacactcatacatcaataacaaaatccaacaagtaatcagaagcgcttcattgcccaatgacacttgttaacttcaatccacagaaagacacaatcctgctcttcacaagtacttggctagtggtcatgccaggtcctcgtcacatactaacgaaacatctaccaatgatctaacaagtcacacttggtccaggaaaatttgttacatca

SEQ ID NO: 366560 - DNA, 779 bp, Homo Sapiens
aaggctgtaccggtccggagttacgggatatgtcgaccacgcgtcgctggggggcggtggcggcggcggcagagcaggcggcacgaggcgcaggcggcggaggcgtgctggggggtccggaagtcaacaccagtgtcaatgtctgcacaagagccgaattgcagatttccaggatgtcctgaatggagccctcaattgcattggaaaagctgcgggaactcagctttagtggcatcccctgtgagggcggactgcggtgcctctgctggaagattctcttgaactaccttcccttggacgagagcctcatggacctccatcctggccaagcagagggagctgtatgcccagttcctgagggaaatgatcatccagcctggcattgccaaggccaacatgggtgtgtccaggcaggatgtgacttttgaggaccatccactcaaacaccaaccctgaccagccggtggaacacgtacttcaaggacaacgaggtgctgcttgcagatcgacaaagaatgtccggaggttgtgcccagacatttccttcttcccagagggccactgactacccttgcctccttcatccttggaccccccagaatgagtctgaaaccccttcgtaagagagtggcaacagacaacactgaaatctcagacgggtggcccggaaccggagtggggtcacaacatatgagctccccacacaagaactctgtgccatcatccctacatgagtatgaggtgctgcccaatggctgtgagcgccactgggaggtggt

SEQ ID NO: 366561 - DNA, 922 bp, Homo Sapiens
  misc_feature (49)..(86): n is a, c, g, or t
  misc_feature (126)..(307): n is a, c, g, or t
aagaataggggcgaccccccgcgcgggttttattctgacgaggtggggnnnnnnnnnnnnnnnnnnnnnnnnnnnnnnnnnnnnnnatcaggccaaatcggcgagctcgaattcgtcgagagcggnnnnnnnnnnnnnnnnnnnnnnnnnnnnnnnnnnnnnnnnnnnnnnnnnnnnnnnnnnnnnnnnnnnnnnnnnnnnnnnnnnnnnnnnnnnnnnnnnnnnnnnnnnnnnnnnnnnnnnnnnnnnnnnnnnnnnnnnnnnnnnnnnnnnnnnnnnnnnnnnnnnnnnnnnnnnnnnnnnnnnncaatgcttatggggagtcttggggtctcctggcagatgggatggcgaaaacttccaccttgagtaacaagattatttcctgttccctcttgacaggaggtagtgcccagacatttccttcttccagagggccactgactacccttgactcctcatcctggagccccagaatgagtttgaaacccttcgtaagagagtggaacagacaacactgaaatctcagacggtggcccggaaccggagtggggtcacaaagtatgagctccccacacaagaactctgtgccatcatccctaaatgagtatgaggtgctgcccaatggctgtgaggcccactgggaggtggtggagcggatcctgttcatctacgccaagctcaaccctggcatcgcttatgtgcaaggcatgaatgaaatcgtggggaccctataatacacctttgacaacgagcccaaatagtgagtggaaagagcacgccgaggcagacacctgattctgatacaacaacctcatggccgagatccgggacaacctaaatcaagacgactggatgactcgcagtgatggaacaccttcaaaggagggagaaggtgacgcaacatgcaccgaaaggcacg

SEQ ID NO: 366562 - DNA, 1364 bp, Homo Sapiens
  misc_feature (1299)..(1299): n is a, c, g, or t
  misc_feature (1321)..(1321): n is a, c, g, or t
  misc_feature (1330)..(1330): n is a, c, g, or t
  misc_feature (1343)..(1343): n is a, c, g, or t
gtcgaccccacccggggaccgactctgggggttggagagactcttggggccggggtcgggcactccagctttcttctagccccgagctgggattccctggcctgcgccagctgcgtacacggcgagtacaccgcacctgcccgggacttcacccgcagctgcgagactcctccattcccggagggctccccacacctgctgcggccgtgccccatctccccgcagctgcggcgctgagcacccccatgtcgagaggctgagaccaggacagcagccctgaccaacgctccaataggccgggatccagccatacttcaatggatcccaggggtatcttgaaggcatttcccaagcggcagaaaattcatgctgatgcatcatcaaaagtacttgcaaagattcctaggagggaagagggagaagaagcagaagagtggctgagctcccttcgggcccatgttgtgcgcactggcattggacgagcccgggcagaactctttgagaagcagattgttcagcatggcggccagctatgccctgcccagggcccaggtgtcactcacattgtggtggatgaaggcatggactatgagcgagccctccgccttctcagactaccccagctgcccccgggtgctcagctggtgaagtcagcctggctgagcttgtgccttcaggagaggaggctggtggatgtagctggattcagcatcttcatccccagtaggtacttggaccatccacagcccagcaaggcagagcaggatgcttctattcctcctggcacccatgaggccctgcttcagacagccctttctcctcctcctcctcccaccaggcctgtgtctcctccccaaaaggcaaaagaggcaccaaacacccaagcccagcccatctctgatgatgaagccagtgatgggggaaagaaacccaggttagtgcaggctgatctggaagccctcatcagtggccactaccccacctcccttgagggaggattgtgagcctagcccagcccctgctgtcctggataagtgggtctgtgcacagccctcaagccagaaggcaaccagatcacaacctccatatcacagagaagctggaagttctggccaaagcctacagtgttcagggagacaagtggagggccctgggctatgccaaggccatcaatgccctcaagagcttccataagcctgtcacctcgtaccaggtccagaaagcagcccaggcctttaactctgggctgctgtgtgtggcatgtggttcataccgacggggaaagggcgacctgtggtnatgttcgacgtgctcatcactnacccagatnggccggtttccancggggttaatttttcaggccg

SEQ ID NO: 366563 - DNA, 748 bp, Homo Sapiens
aggcttgtaccggtccggaatttccgggatatcgtcgaccacgcgtcggtgcaggggttctgtgggggtcttgtgtcacaggctggacaaagactttcctcaaactaatattcagggatttctgtcctgcagggtggggaggtggcagctgcctgccctgccaaggatcttgctgtggacgaaatatctgggggttagggggacagttgtagcatctgctggcattcgggtgcctcccaggacctgggagctgactctacagagaggtctggtgccaagccaggcaccttcctgagttctcaggactcccacctctgccccaagggctttgggcaggcacctaaaggggaaagagtcctggatccatctctagccaaatcacaccccagagccagaggcctggggacctccttgccttccccgtcccccacagcaaggtcaacactactacgccttagccacccctcaccctgctgactgcgacttccctctgcagcacagggcaggcagcacacctatcccccacaagacggaacccgggaggggagtagagggcaccagggaatgctgtgagggacttcagggtgggcaaatgcagaagggagccagtgtcgcccctaccccatcccacagccattttttctctcgggttctacccaccactgtgtcggatttttccttaacataacatggaacgcggtcagactggaggtgggggcagcagctcccatgaacagagagtacatgg

SEQ ID NO: 366564 - DNA, 1551 bp, Homo Sapiens
tgggctgtaccggtcggaattcccgggatatgtcgacccacgcgtcggaaggagccagggggagcagggctcactccagccacctgaagtcaaaaagggtcagtctacctcccgccataaaaaactcatgttcaagacagaagggcctgactcagactgacattctccacttcttgttccccactgacagcctcccacccccatctctccctcccctgccattttgggttttgggtctttgaacccttgctttgcaataggtgtgcgtcagaagcacccaggacttccatttgctttgtcccggggctccactgaacaagttggcctgcactggtgtttggttgtggggaggaggatggggagtaggacataccagcttagattttaaggtttttactgtgagggatgtttgggagatgtaagaaatgttcttgcagttaagggttagtttacaatcagccacattctaggtaggggcccacttcaccgtactaaccagggaagctgtccctcactgttgaattttctctaacttcaaggcccatatctgtgaaatgctggcatttgcacctacctcacagagtgcattgtgagggttaatgaaataatgtacatctggccttgaaaccaccttttattacatggggtctagaacttgacccccttgagggtgcttgttccctctccctgttggtcggtgggttggtagtttctacagttgggcagctggttaggtagagggagttgtcaagtctctgctggcccagccaaaccctggctgacaacctcttgggtgaaccttagtacctaaaaggaaatctcaccccaatcccacaccctggaaggaatttcatctcttggatatgagtgatctggatccacccaagatttgttttttatgctcaggggtcaatttccttttttcgccctggccctcctctctgtgttcccccttttctccatataaaaactgggggccctccggttttagtttgccccacgccttgcgagatgggaagtgggcccgtaaatccattgggcttatacgtggcaagcccttttgcgccctcccccgggggtcaggggaacaggtgcatatggcccttaaacccctttcacgggaagaaaacccttgggggacccccaccaggggttctccatgggcccccccttgtggcgcccacgcccacaaccttttttgtctcaggggtctatttgagaaataaaatcatagcggggaccactcccacaaggaggggaattcaccccaccagagccgtgggggcatttccgagagaatatcctatgggggggactctcaagggggggaaaattccaccccgccagtggggtattcccgacgcctctcgtccccaggaggatggtgactgcggggaaaattataccaaattttgggggtgcaggagctcactcccagtgtctcccatacaagtttgtgtggaaaaggggggcgtcacaacaaaaatacctgtcttttttaagcacactttgctctcgggggagaggctgccactgcgttttttggggcta

SEQ ID NO: 366565 - DNA, 892 bp, Homo Sapiens
  misc_feature (482)..(502): n is a, c, g, or t
  misc_feature (537)..(583): n is a, c, g, or t
aactataacataggctaggtagcgaggctgggtggcgaatcggcacgagggccacttcaccgtactaaccaggcaagctgtccctcactgttgaattttctctaacttcaaggcccatatctgtgaaatgctggcatttgcacctacctcacagagtgcattgtgagggttaatgaaataatgtacatctggccttgaaaccaccttttattacatggggtctagaacttgacccccttgagggtgcttgttccctctccctgttggtcggtgggttggtagtttctacagttgggcagctggttaggtagagggagttgtcaagtctctgctggcccagccaaaccctgtctgacaacctcttggtgaaccttagtacctaaaaggaaatctcaccccatcccacaccctggaggatttcatctcttgtatatgatgatctggatccaccaagacttgttttatgctcagggtcaatttcnnnnnnnnnnnnnnnnnnnnnctcttttctcttggagacggggctctcgcttggtnnnnnnnnnnnnnnnnnnnnnnnnnnnnnnnnnnnnnnnnnnnnnnntttgcctccccggtcgagcagtcctgcctcagcctccggagtagctgggaccacgggttcttgccaccatggccagccaactttggcgtgttttgtagagatggggtctcacagtgttgcccagggtggtctcaaatctcctgggctcaggcgatccacctgtctcagtctccagagtgctgcgctcaccttgtggccccacgtccagctggaggtcactcctttcttctgcaggccttgcttttcccaccttccctccttctcttttatatccatttattcgccccttttacataaatttgtgggccc

SEQ ID NO: 366566 - DNA, 1651 bp, Homo Sapiens
gccctgatgaaagaaagggagataaagctgagaaagaggcctcagacctcagcacagggtgctacactaccattcactgtccctgtgccatttcttcagactctggccggccaccaccaccagatgccaagagcagataaccttttgtccacagccaggtagagatggctacttacatggccttgagaagaggtatagaaaaagggagtgcttttgagggctaccccctgttgtgaccattcctgaagtgcagagaccacaccagcaaaacatgcccagtcttagtagtggggacgaagaattgatgagtggatccagtcagctccggcagacaggccacagggttgccaggtttgatgagccaaccaggtgagcacacagcttcggagcactgccctgaatcctgtcttctccctcaggactgccctttcctggccacaccaagtttggcacctctccagaaagttggcagggagcaagtggcagacagcacccctctctccctagcctattaacacacagagccgccaatggcagggcagcatggccagaagtcaccttatatattgtagggacagcaatagaactgtccctgcctgaagggttcagaagcccatgttggcctgggcttctcctgctgtaatggcttgtacatcagtgacatggccgatgcccttggtgacaccctcccggaacagcagtttggcgcccaccttcaggtactctgggtgtttcaggaagcggaaacgtaccactgccttctcgcctgtccgcagtttgtccttggcatggatcttttccaccactgccgtctgacgtacgttgcccacgtgtactgtcacctggaatcctcgtcggaaggtggtggcatggaacagtaagactatctctgcctcaaacaccgagcagatggtaggattcatctccgggctcaccatcaccatgcccttgcgaagcagtgcacggtcaaagtccccaagcgtccagtgtagcagcctgaccagctcgcagcacacgacaggcagagcggttgcgctggatgctgcatactctcagctccaggaagcagccatcatccgtggggcccaccaccagctggtccccctcacggcaaatcccactggaaagtgttcctccaacaacagtccccacctctggtactgtgtagatttcatccacctggaactccgtcagctgctgcatgagttcctcctgctctttgctgttggtgagtggcggcagaatattcagaaagactttgaggaggtccagactctctccagacacactggacaatgtgaagatgggggtgacattgggtgactgagcaaactgctgggcagcagtgacggcatcatcctcagaggtgaccagcatggggaccttgtggcagccaggctgcttgaggacccgctccagctggcgtactgtcctctccactgtggtcttggcacataggtcgatcttgctgaccacagatgaagaagggcacatttcagggccagggccagccccagatgttcccttgtggtgccagcaatcccagtgttggcactgacgaggagcagggcgcagtcaggggcagtatgatgtgaggccaaagatggtggtgtgtaggtacgttatggatggcctgccaggtcgatgaagg

SEQ ID NO: 366567 - DNA, 890 bp, Homo Sapiens
  misc_feature (770)..(796): n is a, c, g, or t
caattccggacagaataggtgatacataggaaactgggaagaggtacttaagagccaaatagtgattgggaagtagccttgcactgacctcccatgttctgtacagagttgaatgtttactatatcacctttcttctagatctttaaaaaacttttttaaacgttataaattgtcaaaataaataatttgtatcataagtaaatgatgattaatgtatctatttcctcctggtatgcctatttgtacagtgcatatgtttcataagcacaagagaggattaatttaggtatcattatctcttgtttacttaatgtccaacacaggatttcagtattctacatttatctggttttggctctcagagaaagtcccatctttgtttaaatgtggtttctcctatgaggatttcctaggttcagaacctgaactcacctagcaggatgtcacagtttcagtttcagtgtgtcctctttcaggtattaaggagattaacaacctggtttactcaattatcttttaagcatcattgtgaaaatgtgacaggatttcaccgtttgagctttatttagatatacagttttttgaaagcccttcctgaacacacatattcctctccacttttggaaaatgtcttaaaagaaaccttttccaatacaaatgcagaaaaataggtacacaaaccaagccaccactatagaagaagaataaaaaattgcaactctattagggcatggacttccacatgttcacacagtacttgctctggtannnnnnnnnnnnnnnnnnnnnnnnnnncggacgcgtggtcgacgatatcccgggaatccggaccgtaccacctgctttattaaccggctgttctatagttcacctatgctgtctgttactc

SEQ ID NO: 366568 - DNA, 1111 bp, Homo Sapiens
  misc_feature (97)..(159): n is a, c, g, or t
aagcggctctccctgccaagacctctaggagcagtcagggcgagtagagacagagcctgccggttggcatggaacattactgactgaaggcgaggtnnnnnnnnnnnnnnnnnnnnnnnnnnnnnnnnnnnnnnnnnnnnnnnnnnnnnnnnnnnnnnntctcgcttgcttcagacccagcccttctagtcagcccgtcgacaactcgcgccagctacggggcctcagagaagccggacttcgcaagcaccatgcagtgtgataaggggcggatcgggaatgctctgggtgaaccaggaggatgaggtggaggaggggcccagcgatgtgcagaacggacacctggaccccaattcagactgcctctgtctggggcggccactacagaaccgggaccagatgcgggccaatgtcatcaatgagataatgagcactgagcgtcactacatcaagcacctcaaggatatttgtgagggctatctgaagcagtgccggaagagaagggacatgttcagtgacgagcaactgaaggtaatctttgggaacattgaagatatctacagatttcagatgggctttgtgagagacctggagaaacagtataacaatgatgacccccacctcagcgagataggaccctgcttcctagagcaccaagatggattctggatatactctgagtattgtaacaaccacctggatgcttgcatggagctctccaaactgatgaaggacagccgctaccagcacttctttgaggcctgtcgcctcttgcagcagatgattgacattgctatcgatggtttccttttgactccagtgcagaagatctgcaagtatcccttacagttggctgagctcctaaagtatactgcccaagaccacagtgactacaggtatgtggcagctgctttggctgtcatgagaaatgtgactcagcagatcaacgaacgcaagcgacgtttagagaatattgacaagattgctcagtggcaggcttctgtcctagactgggagggcgaggacatcctagacaggagctcggagctgatctacactggggagatggcctggatctaccagccctacgtccgctactgtacgaaggggg

SEQ ID NO: 366569 - DNA, 1073 bp, Homo Sapiens
  misc_feature (844)..(844): n is a, c, g, or t
cggagttccgggatatcgtcgacccacgcgtcggggagatgccggcggctgctgctcagggtcctgcacggtctctgaaaaccccgtacctctgacaagtcagagtgagccccgaggtccgggatgtgcggccctacattgtgggggccgtggtgcgaggcatggacctgcagccagggaatgcactcaagcgcttcctcacctcgcagaccaagctccacgaagatctctgtgagaagaggacggctgccacccttgccacccacgagctccgtgccgtcaaagggcccctgctgtactgcgcccggcccccacaggacctcaagattgtccccttggggcggaaagaagccaaggccaaggagctggtgcggcagctgcagctggaggccgaggagcagaggaagcagaagaagcggcagagtgtgtcgggcctgcacagataccttcacttgctggatggaaatgaaaattacccgtgtcttgtggatgcagacggtgatgtgatttccttcccaccaataaccaacagtgagaagacaaaggttaagaaaacgacttctgatttgtccttggaagtaacaagtgccaccagtctgcagatttgcaaggatgtcatggatgccctcattctgaacaatggcagaaatgaaaaagtacactttagaaaataacagaggaaggatcactctcagatactgaagccgatgcagtctctggacaactcccagatcccacaacgaatcccagtgctggaaaggacgggccctcccttctggtggtggagcaggtccggggtggtggatctggaagggagcctgaaggtggtgtacccgtccaaggncgacctggccactgcccctcccacgtgactgtcgtgcgctgacgccaggggcgcctggccgcgtttgttttggccgttctcttgcgaagtttttattgggccacgcgcccactcccccggttaaaatttcccgcccagcctgtgtcggtcgaaatgcccctctaaaccaccggtgctccgcccccctgacgccccggtctcgcgccgcggtttgcgcctcgcccccccc

SEQ ID NO: 366570 - DNA, 855 bp, Homo Sapiens
  misc_feature (39)..(39): n is a, c, g, or t
  misc_feature (802)..(802): n is a, c, g, or t
  misc_feature (826)..(826): n is a, c, g, or t
ccagtgctggtacggtcggaagttacgggatatcgtcgnccacgcgtcgctctatgcagataaatttggagcagacaatgtgaagataatccaggattccaacaaggtaaaccccaaggatttggaccccaaatatgcctacatccaggtgacctatgtgacgccgttctttgaggaaaaggaaatcgaagaccggaagacagatttcgaaatgcaccacaacatcaaccgctttgtcttcgagacacccttcacgctgtcgggcaagaagcacggtggggtggcggagcagtgcaagcggcggacgatcctgacaacgagtcacctgttcccctacgtgaagaagagaatacaagtaattagccaatcgagcacagaactgaatccaattgaagtggcaattgacgagatgtccaagaaggtttctgagcttaatcagctttgcacaatggaagaagtggacatgatcagactgcagctcaaactgcaaggaagtgtcagcgtgcaaggttaatgctgggccaatggcctatgcacgagcttttcttgaagaaaccaatgcaaagaagtaccctgcacaaccaagtaaagcttccgaacggagatccttcagcgcaactccgcacatgcactgctgggcagccccttgacgtgaactgagcgcctcatcaaagaggaccagctggagtaccaggaagaactgaggtcccactacaaggacatgctcagcgaactctccacagtcatgaatgagcagattacggggcagggacgacctggtcaaagcgcgggagtggacccnaccctgccactccgagtaattaancaaagcaaactcccggccccctaacccaa

SEQ ID NO: 366571 - DNA, 689 bp, Homo Sapiens
  misc_feature (48)..(60): n is a, c, g, or t
  misc_feature (397)..(407): n is a, c, g, or t
tgctggtacggtccggaattctcgggatatcgtcgacccacgcgtcgnnnnnnnnnnnnngtaatatccaggaaccctgcccagactaatactgtgggtggcataagagaatcaagccattctcaagagataacttcataaccagaattgtctgtgggctagcagctgtcacagataggcagggcacttgggatatgacctttctgtccaggtgattcacagactagacctttcttatcctcctcctagagttttgacttgggactctagtgttaagatgatgagcccgtgcatcaggtccttctgcactttggtggaagtctcccagggtaggtttcctatttggaaacagtgggaatcatgtttccagtgataaaagtttaatggacctcatccnnnnnnnnnnncctcatctggccattggggtgtctaaaaggggttaaatggcttgaatgtggctaaggtgggttctcagaattggcgccagtatgggcccaacaatagcttctggctcggtctaactggactcaataccttaaggattggtatcagagttgggatactagtgtaagggggggtgtcaccattacttaatggggagataatgaacccaatcagggatgcggttaatggggcatgtcatctaagagaggagaaatagcggggtagggggtctaattttgaatacc

SEQ ID NO: 366572 - DNA, 489 bp, Homo Sapiens
  misc_feature (261)..(272): n is a, c, g, or t
gccacagatctgtcttttctcctctcttacattacatgccctataaaaacagcatcatgattggtttcattatctcccaaataagtagtggtgacaccaccactaacactagtatccaaactctgaaacaaatcctaaaggtattgagtcagtaagacagagcagaagctatgtcgggccatactgaccaaattctgagaaccacattagccacattcaagcaaataaaacccatctaagaaacacaaatggcagatgagnnnnnnnnnnnnggatgaggtcattaaactttatcactggaaacatgattccactgtttcaaataggaaacctaccctgggagacttccaccaaagtgcagaaggacctgatgcacgggctcatcatcttaacactagagtcccaagtcaaaactctaggaggaggataagaaaggtctagtctgtgaatcacctggacagaaaggtaatcccaagtgcctgcccatct

SEQ ID NO: 366573 - DNA, 1152 bp, Homo Sapiens
gctggtaccggtcggaattacgggatatcgtcgacccacgcgtcgtgaagggccaatccatcgtggactaactctgtgggtaggagctcagatgacctagggagaatataagatgtaacttaagctaaatgtaatctatttataaagcaagagactctcatctatttttatgaaaggaagggttttttaatctagggtaggcagttgtggtagcccagcattttcctgtggacgagacatggtgcatgttgttgctggattgaatggaacccattcctgtcccccggcctcgtcttctgtcctcacttttggtcatccacacccatgagcagcttcagcagagtgtaggtcccacttcaccccattctcctctcctctgacccctcagctccttggaagtcttggggtggggatctgagggggtgggtgggctgcaggaaattcagaaatgtggtgggtgggggaagggacaaggcgcattagggagggaacaagctgggctctggggataggctctgattaattagttactctgactctggtctgccgagatccatttccaacccagttgcgttgggagagggtcgggaggcagcagagcatgggtgacagtgggagcacacgacttccttggagcctgggcctttgcgggtcccaggtggtcaggcagctggagcagaagtggaaatggcttaagatgctcatagcccagccccggctgtgtctactccaggcaaagcctgggctgcagtccttgctatgttccccccagggccctgtgggggagggattcaggggtgctggggggttcctaggacaggggtcttcccccttgagacaccaagctctggctctagaagagctctctcctgtagtggggagtctggaggggactgggtgggtgcaggtaaagccagattctctctggaagggaattttctatgaatggatgatttccaggctcagggtgggctgtgtgttagttctgagcaaatccctcaccaagacccttccctcccaagccctcaaagaaatgaggcaaagcccttccctgcaagaccccttgtggatgtttttgcatctacctgatttttagccccacccagggagactttataccccatgatcctgccccaccgttgctgttgtctg

SEQ ID NO: 366574 - DNA, 1700 bp, Homo Sapiens
ggggctcgggcgcggggcgttcttggtgcgccgggccgtggtgagtccgggctcccgtggccgcgtgctgggaggagactggagcccggttaggaagaatggagttggcgactcgctaccagatccctaaagaagtggctgacatctttaacgcccccagtgatgatgaagagtttgttggcttccgagatgatgttcccatggaaaccctctcgtcagaggagagctgcgatagttttgactcactagagtcagggaaacagcaggatgtgcgctttcattccaaatacttcacagaagagctaagaagaatttttatagaggacactgactcagagactgaggattttgcaggatttacgcagagtgatctgaatggaaagactaacccagaagtaatggtcgtggagtcagatttgagtgatgatggcaaagcatctttggtgagcgaggaagaggaagatgaagaagaagataaggctacccctagaagaagcaggtctagaagaagtagtattggtcttcgagtagcctttcagttccccaccaagaagctggccaacaaaccagataaaaacagttcttccgagcagttgttttctagcgcacgcttacagaatgagaaaaaaacaattcttgacaagaaagaaagactgtagacaggtgatacaaagggaagattctacctctgagtctgagcgatgactctcgcggatgagagccaggagagttcagatgctttgctgaaaaggaccatgaacatcaaggagaacaaagccatgcttgcccagttattggcggaattgaactcgatgccagatttcttcccagtacgaaccccaacctcagcttctaggaagaagacagtgaggcgggccttctcggagggacagatcacgcggcgtatgaacccaacccggagtgcgcggcctcctgagaagtttgctctagagaacttcactgtctcagccgctaaatttgcggaagagttttacagcttccgaagaaggaagacaattggggggaaatgccgggagtacagacgacgtcaccgtatatcttcttttcggccagtggaggatatcaccgaagaggacttagaaaatgttgccataactgttcgagataaaatctatgataaagttctgggtaacacgtgccatcagtgtcgacaaaagaccatcgacaccaagacagtgtgtcggaaccagggttgctgtggtgtgcgaggacagttcttgtggaccatgcctgcggaaccgctatggggaggatgtcagatcggcattgctggacccggattgggtgtgtcccccctgtcgtgggatctgcaattgcagctactgtcggaagcgtgacggccgctgtgccacaggaatcctcattcatctggccaagttttatggttatgacaatgttacggaatatctggagagcttacaaaaaggagctggtcagaagaccaattaacgaggaaaacaaaccagaaccagccacctcaccatagaagtaactcaaacaagacatgcatacccattggctgccctaagaacagatttccttagcagatcgtgctcttaatcacaaaatcctccgctacaacttacctaatattttgtcaaccattgctcatatgctcacaaaccactccacgcacaaaccacgacccacaccacctctcttcatgcctcccccactgc

SEQ ID NO: 366575 - DNA, 898 bp, Homo Sapiens
ggtccggaattcccgggatggggagggggcaggaaagccaggtggctgctctgtcccctacatggggctgatgaagacacccagcacccctcaggtccttctccacccctaggttgaaagatctgttctaccgctccagcaacctgcagtacttcaagcggctcattcagatcccccagctgcctgagaacccacccaacttcctgcgagcctcagccctgtcagaacatatcagccctgtggtggtgatccctgcagaggcctcatcccccgacagcgagccagtcctagagaaggatgacctcatggacatggatgcctctcagcagaatttatttgacaacaagtttgatgacatctttggcagttcattcagcagtgatcccttcaatttcaacagtcaaaatggtgtgaacaaggatgagaaggaccacttaattgagcgactatacagagagatcagtggattgaaggcacagctagaaaacatgaagactgagagccagcgggttgtgctgcagctgaagggccacgtcagcgagctggaagcagatctggccgagcagcagcacctgcggcagcaggcggccgacgactgtgaattcctgcgggcagaactggacgagctcaggaggcagcgggaggacaccgagaaggctcagcggagcctgtctgagatagaaaggaaagctcaagccaatgaacagcgatatagcaagctaaaggagaagtacagcgagctggttcagaaccacgctgacctgctgcggaagaatgcagaggtgaccaaacaggtgtccatggccagacaagcccaggtagaattggaacgagagaaaaaagagctggaggatccgaggagcgcatcagtgaccaaggcagcggaagactcaagaac

SEQ ID NO: 366576 - DNA, 695 bp, Homo Sapiens
ggatcggggcttccggtcgggagggtccgcccgctctcgcgtcctttgctgggtccagacaccggttccgttgcaaacatttttaaagggctggttattcttcctgaaatgagtttggtgattagaaatctgcagcgagtcatccccatcaggagagcgccacttcgcagtaagatcgagattgtaaggaggattttaggagtgcagaaatttgacctggggatcatctgtgttgacaacaagaatattcagcacattaatagaatctacagagatagaaatgtcccaaccgatgtgctttcttttccatttcatgagcatctgaaagcaggtgaatttccccagcctgattttccagatgactacaatttgggagacattttcctaggagtggagtatatcttccatcagtgtaaagaaaatgaagattacaatgacgtcctgactgtgacggccacccacggactctgtcacttgctgggattcacacacggcacggaggcagagtggcagcagatgttccagaaggagaaggcggtgctggacgagctgggccgacgcacggggacccggctgcagcacctgacccggggcctcttcggagggagctgagggccgcgttccttctgaaaccgggacgcgggaggggtggaggctgcggggagccggggtcgcacacgaataaataacgaatg

SEQ ID NO: 366577 - DNA, 992 bp, Homo Sapiens
  misc_feature (237)..(286): n is a, c, g, or t
cggtacggcccggagtatcgggatatcgtcgacccacgcgtccggctgtccccaacgccgattggtacttcttgtcaggaagaagacgccaagaggtgggagtgcctggggagggaggcaggcggtccctaccgcaggcgcggggagctgcctttccgcccctccgcctgctttccaagcctggactcttaggagtggctgaagctgcggagcgcttttggagcctgtgaatgaacnnnnnnnnnnnnnnnnnnnnnnnnnnnnnnnnnnnnnnnnnnnnnnnnnngacggtacagtgatataatgatgatgggtgtcacaacccgcatttgaacttgcaggcgagctgccccgagcctttctggggaagaactccaggcgtgcggacgcaacagccgagaacattaggtgttgtggacaggagctgggaccaagatcttcggccagccccgcatcctcccgcatcttccagcaccgtcccgcaccctccgcatccttccccgggccaccacgcttcctatgtgacccgcctgggcaacgccgaacccagtcgcgcagcgctgcagtgaattttccccccaaactgcaataagccgccttccaaggccaagatgttcataaatataaagagcatcttatggatgtgttcaaccttaatagtaacccatgcgctacataaagtcaaagtgggaaaaagcccaccggtgaggggctccctctctggaaaagtcagcctaccttgtcatttttcaacgatgcctactttgccacccagttacaacaccagtgaatttctccgcatcaaatggtctaagattgaagtggacaaaaatggaaaagatttgaaagagactactgtccttgtggcccaaaatggaaatatcaagattggtcaggactacaaagggagagtgtctgtgcccacacatcccgaggctgtgggcgatgcctccctcactgtggtccaagcttcttggcaagttattccgggt

SEQ ID NO: 366578 - DNA, 964 bp, Homo Sapiens
  misc_feature (113)..(113): n is a, c, g, or t
  misc_feature (128)..(128): n is a, c, g, or t
  misc_feature (284)..(284): n is a, c, g, or t
ctggtacggtccggaggtatcgggatatcgtcgacccacgcgttcggattttaaaaaataaatgttaatgtcaaaatatatacgccagatactctttaatcccactgttgggnaatctgcacaatagnaaacaaaagaaggtaaaattaggagttctaggtgaacattagaaacaagcttcaatgtctgtagtaggtaatggcccaaaatacggacatacattccattctagaaatattctgaaccttacaaagaactgggttacatctttacgtactgacctnggaaaagtattcatgattattatgaaaaggacaagacggctgtcaaatgtctgtactgggggtaaaagctcctccaaacacatgcaaaacatgctttctgtgtacaggttgtttgagcactaaaggaagaagaaactacacatactggttatctcagagatttcgacgcggcacagggaggaaattgtattcactctatttcactgtcttcagtgacaatatttcactggctttcacgctgcacacccatgtcattccagaacaatttacttctccacataacacaaacatctacttcgtcacatacactggttcaattacccaactacctcacgcaacacaacgcattacacacacttgagaaccaacacactttaccacttcaagcttatcccacgttacgtgcaacctttaaaaaacaccaattctgaattcgcacaagcgactgtactcgtacaagttaaaattaacactaccttacatcgcaaaacctgcgctagcgactctttaccctaaaacctaaccacacccgtagtcaaacattaaacacagcaaaaaggcacacacactgtagtaattaagtcccagtccacacaccacagctcttccaatcgcagtgccttagaaaactaagcgcaacccaggcgtcaccgggcaagacacccaaaggcacacaccac

SEQ ID NO: 366579 - DNA, 907 bp, Homo Sapiens
  misc_feature (635)..(635): n is a, c, g, or t
ggaagggtcaaatatagaccttgatgccccccagcatagaatggagagaatggaggatgatcacacaggccaaggaagagcgaggcaaattggtcacatacttgaccccccacaacaccaccagggtcatgaaggtcaggaaaatggtcccataacacacgcatattgttcaaagtggcattcgacgtgtcatgagcacccgatggggtaaaaaatggcagctgttggggcaatgtaggtcagcaagatctcgatggcccccaggatgtacatggctgctggcgaatgttgttcccaggtagaagcacaggcccacagcacctccaaattctggccccagtgaacaagagatcatgaaataggagcccccagctggaaccacaccgttggtggcgatggcactcatggagatggccgtcagcagggtacaacagcagcagataagcacgatgaggagggcctgtagcacacctgctgtgcccaccatccaggtcagccgcaggaagaggataaccccaaagatattctgcaggcagggcaggtacacccccatgagggtgcccatgctgggtgcctcggctgccctccggcgggtgccctccccactctcggcctcctcatgctctttggcgccntgggtgaggttggtgtagctgacgagctttcccagaagagacgatacctttgggcggatgtccagctcttcctcaaacagtgccaggttcctgtcatagtagtcaattcctctggaagcctccaagggggaaagaaaagggctgctctctctgtggttgccatgtcccaatgtgcaggatgccaagggttcggtgtcctcagggaccgcccaggcagtgccctccagatagacgaagccgcacacagcacctccggctgccatggcccaaag

SEQ ID NO: 366580 - DNA, 1237 bp, Homo Sapiens
  misc_feature (133)..(142): n is a, c, g, or t
cccaagacaagtttcccccgggggggattccccggggttttcgggtccccattttttaaccaaaaagttagggttccccagggattcggttctaaaagggtggggggctgggccaaaaagaaactcccataannnnnnnnnnccccctgtttccaatgtccccttaacaactgtttttgggaccagatgttcaaacctgttccccggggccagggtcctggtgccccagccatgcattccggaaaaccacgggagggttccaaatatagacttttatggcccccagcatagatggagagggatggagatgatcacaccaggccagggaagagcgaaggcaaatttgttccacattcttgaccccccacaaaaccaccaccaggggtcatgaaggtcagggaaaatggtccccatacacaccgccatattgttcaaagtggcattcgacgtgtcatgagcacccgatgggtaaaaaatggcagctggtggggcaatgtaggtcagcaagatctcgatggcccccaggatgtacatggctgctgcgaatgttgttcccaggtagaagcacaggcccacagcacctccaaattctggccccagtgaacgagagatcatgaaataggagcccccagctggaaccacaccgttggtggcgatggcactcatggagatggccgtcagcagggtacaacagcagcagataagcacgatgaggagggcctgtagcacacctgctgtgcccaccatccaggtcagccgcaggaagaggataaccccaaagatattctgcaggcagggcaggtacacccccatgagggtgcccatgctgggtgcctcggctgccctccggcgggtgccctccccactctcggcctcctcatgctctttggcgccctgggtgaggttggtgtagctgacgagctttcccagaagagacgatacctttgggcggatgtccagctcttcctcaaacagtgccaggttcctgtcatagtagtcaattcctctggaagcctccaagggggaaagaaaagggctgctctctctgtggttgccatgtccgtccgagtcatccagctcggcgcgctccccgtagtccacccaactgagcccctcgaggttgtcatagtcgccgcgcctcggcccgtccactggcaccacggtgaagtgaggcatcgtgcgggctcggccccgccgcacccgccgtcccatcccgggaattccggaccggtaccac

SEQ ID NO: 366581 - DNA, 1204 bp, Homo Sapiens
cgtttggtgaatatgaacactggttattaaagcaggctgtacgagtcggaattcccgggatatcgtcgacccacgcgtcgcgccgcgccgcgctgggtgctcggtccgactcagcggtggggagcgagccaggcctcccgccaccgctgctgccgccaccactgcgtcgggctggtgcagccccgggccaggccgcggccggggcaggagcgcaggggctttgttatgcacctaaagccatattggaagctccagaagaaagagcaccccccggaagtcagcagggaaacgcagagaactcctatgaaccaccaaaaggctgtaaatgatgaaacatgcaaagctagccacataacatcaagtgtctttccttcagcctctctcggtaaagcatcatctcgaaagccatttgggatcctttctccaaatgttctgtgcagtatgagtgggaagagtcctgtagagagcagcttgaatgttaacaaccaaaaagaatgcaccatctgcaacgatccaccagggcgaagaagaaggacccacttgatatctgggccaggtgtggagaacctcgtggacatatcccaggggaaacaaaacgtcgcattctagaagacatcacaagcagtgatagtaaacaggatacggatctatgaaacatacaacaaagttcctgggcatattcgatggggaggagctactacagcagaaggcacacacaatcaggggatcttaaaaaaacacaacggtccaggtggacacagggactgagcggacggttaaacaagcaacggctgcctaaccacacacttgagcccatagagcacatgtgcgcaattggagacaacatggtaacttgctgcacctaatgttacagttgacacacgtgggcaactgagaagtcaacacgcacgagagcagagcccacacagaccacgacgaactccaagcacaggaaccaggcccgacaacacacgaaagcaccacaacggaacgcccaaaggggcgccaggcaaacacgaacagagcgcacaaacacgaacgcgggcgagaaatgcacacgcaccggcaacacgggtggacagcatagaccaggggccaacaaccaaacacggtatgtagccatcacagcatgtccagaaacaacgcaaaacaggcacacaagagacgacacgtgaaacacaaaaccccacgaacacaaggggga

SEQ ID NO: 366582 - DNA, 887 bp, Homo Sapiens
  misc_feature (165)..(173): n is a, c, g, or t
  misc_feature (640)..(640): n is a, c, g, or t
ctggtacggtccggaagtttccgggatatcgtcgacccacgcgtcgctgcatttgaaagctgaaggaattactttagatagataggaattgctacctttattctggaaaggtttagtttctgcctcaaagcattttgaagtgttttaaccattaaagggtctaannnnnnnnncttaatgaaatcaagcattttaatttactgtgggaggcatcctgaccacggacatccataacagcaaagcacaaatcgttttcgtctgtagtcatatcctgaaacataggtggacaaatttttaactgagagacaaaaatcacatagttgaattgagcagaacacttaagtgctttctgcatctatttaggagtctatttcttaccaataaacttgacaacgcatttggaaaactagtgaacaccttacagctttcattctgctttaatgtttcaattcaagccggtgtaaaaataatttccaaggcatttctgtttattctttagtaatctcactactggctatgtcagcaatatctttttcaatctggttccttttgtatatgatgtcactgtgacctctttgaaatatagtgatggcttttacctactttgaaaagaattttcacatagagtcagaaaaaaaanggaaatatcaaatcacttgcctttccacttggagagcacgacagttgccaacaacaaggggtcaagggccgcacaggagatgtgtgggggcctggccacctcccacctgctgcccagaggcttgtttgcattttcatttttttctccacttgtaacaaccatagtttcagctcctaaattcttatcatggatttacttagtcatcttaactgacctgcagtacatgcctgttcccagtgtggagaga

SEQ ID NO: 366583 - DNA, 548 bp, Homo Sapiens
cacaaaacaacagactttaatggaaatcatgaaggagggaagcgggcggaccgggaaggggctgagtgacatcgcccatgccgctccctccgccaagcctgagcagctcctgatgccaccctctcctcacactccccagatcttttggcaggagggcagaaggttggaggccccttgttcagcatgcctgcagtgagcccagtgaggatgcggtggtagaaacggagctggggcagtagagtgggctcagcgggagtgagcagcaggaggaggtgttgtttaagccagaatgattcccaagtttccccaaggaagggctgtttgtctcctgggtctcggaggagtggggattggaggaagtcaattgcccccagtgcgggcctggtaccatgaaaaggggcacagggtgggggagatgccagcctgagaaggacaggtgtgagcttggtggcactgtggttgttggcttaagggggaggggaacagagtgccctgcttgtgaaccagagtgtgcttgtgggtgaccacaaaaggatccttagagtgac

SEQ ID NO: 366584 - DNA, 1028 bp, Homo Sapiens
  misc_feature (815)..(815): n is a, c, g, or t
  misc_feature (898)..(898): n is a, c, g, or t
  misc_feature (914)..(914): n is a, c, g, or t
  misc_feature (938)..(938): n is a, c, g, or t
  misc_feature (959)..(959): n is a, c, g, or t
  misc_feature (983)..(983): n is a, c, g, or t
  misc_feature (1018)..(1018): n is a, c, g, or t
ccctgcggccgcgcggagcggacgcgcgtggcgctgcccggtgtggaccattccgtgaagtccggtgccatggatgcaccgggggtgtggatgagcggccgcccagccccagcacggcccggtcccgcatgccaccgccccgcgaggaccgctctccaagggctgcctggggccccgcgcccgtactctcctaacccggagctctcggcagcccattgctgcctggctacccggggaggaggaggcgcaggagtgagctgcccgagaccgcagggcaagtaagcggctgacggcggaaagaccctggggaaggggctttgcggccggctagaaacattttccccaagcggctccgcaaaatgaccagcctgttccgccggagcagcagctgtgctagctggcgggggtggctaccgccggggtcacgctgggggcggtgggaggcacggccgcccccaggagctcaacaacagcctggcctgcccgccaggtgcgccgcctggagttcaaccagtgccatggacgacttcaagaccatgttccccaacatggattacgacatcatcgaatgcgtgctgcgcgccaacagcggcgctgtggacgccaccatcgaccagctgctgcagatgaacctggagggcggtggcagcagcggctggcgtgctatgaggacagctccgactcggaggacagcatccccccggagatcttggaccaaggactttggaacctgatagctcggatgaagagcccccacctgtgtactccccgccagcctaccacatgcaccgtgttcgaccggccctacccctctnggctcccccgaagtccggactccccgtaatcggacgcgctgggctctggagcccctacaagaccagagacgctatcggaactngaacccaccactgctnggcaaccttccggatgactttttncgcatcctgccccagcagctnggacagcattacagggtaacggtnggggccccaagcttgggagttggagagggatgttncaattgccat

SEQ ID NO: 366585 - DNA, 1255 bp, Homo Sapiens
  misc_feature (36)..(36): n is a, c, g, or t
  misc_feature (97)..(135): n is a, c, g, or t
  misc_feature (195)..(203): n is a, c, g, or t
  misc_feature (1174)..(1206): n is a, c, g, or t
ggcggcggggggaggatcggtaaaggccacgttatntacccggccgtgtgtatagatgaactgtgggggtcgcaagggcgtggcccaatttacattnnnnnnnnnnnnnnnnnnnnnnnnnnnnnnnnnnnnnnngaaatggccccgcgcaaatacgccgagccggcggcaataggggacccggggcccttagannnnnnnnnccggggtgttctacttggtttccccccggaagtttgcggggctttcccgggctccgacccagtgtggcgaaagaccccttggagccccaggggcctgcaggggcccccgacggtgccagcaagcagtttcccacaaggccgggggcaagggccagcccggttcctcctcccccggcttaggggaccgggttggtgccccagctccaaggacggggccagggcggggggccttgggacaaagacagccccgggcagaccctggagctcgttgtggtgtaggcctgagccgttctcaggggcgggcaggccaaccagggcctcgggggccagcacgctgagcgcgttgtgcgacagccgcagccagcggacgcgcagtagcccctggaaggccatggcgggcaggtaaaccagggcgttgtgggccaggtttagcgtggccagcgcacccagtgccccgaacgtccccggccgcagctcctccagtgcgttcccctccagctccagccgccgcaacgagcccagcccgtccagcgcctcctggggcagctcacgcaggtggttggaggccaggttgagcaggagcaggcggcccaggccacggaaggcgccctcggccaccagctccacctcgcagtggcgcaggtccaggtgtgtgaggtgaggcacgccctggaaggcggctgcggggatcaccttcagcaaattgccctgcaggtccagccgctgggtcagctcagggatggcgtctggcacctcagtgaggttctggtaccggcaggcaacgtgtcgcctggagttgtcacagatgcaggcctgtgggcagcgctgggcggcggcctgcctagccggggccagcagcagaagtacaagaagcggcagcaccaaggggacatgggtggagctccggggcccctccatgccgcctggactccgctctcgacgaattcgagctcggccgatttggcctgatnnnnnnnnnnnnnnnnnnnnnnnnnnnnnnnnnatgcgccgccaccgcgtagagctccgttcccctatatggtgttcatttc

SEQ ID NO: 366586 - DNA, 1359 bp, Homo Sapiens
  misc_feature (56)..(56): n is a, c, g, or t
  misc_feature (90)..(90): n is a, c, g, or t
  misc_feature (155)..(155): n is a, c, g, or t
gggaccctgaaaaagcttgagtctccacccccatctaccaatcccttcctggaagnatgcagtccaacaccagagatggaggtaactggncaacggagaaaggagatttagatcaaccaaagaagcctaaagccccagacaatccatttcatggncattgtttccaagtgttttgagcctcatctctacgtgtatatcgaatcccaagacaagaacctcggagagctgatagatcggtttgtggctgatttcaaagcccaggggccacctaagcccaacactgatgaagggggtgccgtgctccccaggctgcgccgacctctttgtctactacaagaagtgcatggtgcaatgctctcagctcagtactggggagcccatgatcgccctgaccaccattttccagaagtacctccgagaatacgcctggaaaatcctctctggcaacctgaccaaaaccacaaccagcagtggaggactgactatcagcagacctcctcaaggaaaaggagggctcagacagtacgacaagttcacatctggaggagctctgcctcatctgtcaccatcctgagacaccggcagagtacctgctctggcacaccacccagcagctagaagaacacaaatcaacgacaaaagtggacctgtacacagtacatgactgaacgaatccacatctgacctggagcagactggaacacgatacaagcaccgaaaatctgcagccacgaagtcaccgactgacaggcaacaagggactctggatgcacgactgtagatccccagaccctgaacatgcccatgcagccacgatagccgcaggacaagaacgacggagcacagtaagagagacccagagcccccatacgataaacactcaagaccacccaagacaacatacaacgcagaaacagatacccccaatacaacagccaagtggaaccaaccccttgggcgaataccaaacaccacaccaacgataacatgaaaagacaacgagcccacgggataacaccatacaggcgacaacctacaagccaaagcaaacaaaagtagcatcaacacacaaaccagtcgatacaaaagcaggcacaaagccgacacactaaacaatgcgatgggcaacccacaaccgcacaacaagcgctgaggcgcacagcacacccaaccacgcccagcaaacaacgcgaacgagcagcaaaacaaacgccacacacacaaaaaggacaaccaaaaccaacgcagaccagcaaaaacaacaacacggacacaagcacactccccacaatacaacacaagcgacacacagcgcagaggcgcccgagacagaagcaaagacagccgaaccaagcacag

SEQ ID NO: 366587 - DNA, 893 bp, Homo Sapiens
cggctggtaccggtccggacgttatcgggatatcgtcgaccacgcgtccggaagaaagtggtatatcctaaagaatgagttacaagggaacaaaactttatttaaaattcctccaatttcttgtagaaaggcagggccgctggatatgtctggaaatgtagaaacctgtagctgcttctgggatcacccacctgatggtggtgacttgtctgctgaggccggctggaggggacgcttagagatggggcgacgggggaggccagtgtctgtggtctgcgagcctctcctgtccatctcgttttgcagctgagggcacttggccacaaagcaagcacagacagcagagagggccaggcagtgctggagtgcgtctgctggcacgggtttattgtcggagaggaattctgagtttaggatctgaatcttgtacataagaaatgcaacaaggcttccctccaccccgtccccaaacatatgcccgtacctgtatccatgagcacgtcgcatgtcggttctccacgtgagggtcagagtggcagggtcggacggatgtcaaggcctggcgtaccttctcagacggcctctagcggcagcgacgcgtgagctccgacacactcccacaactgccaaatgagtggaactgcaggtggctcgtgcggccccatgcgcaggcgcgcacggcggcccctgacccacacctacacagccgccagagcaagaccaggcgggatcaagggccaccagcgcgcaccacgctgacgggcgtcgcccccccaaggcatagccagacccccagacacgccccaggcggcagcgcgacccccctgacaccaccagccgcaccacgggccagacaacacagccgaacacagctaaacggaactcgacagtac

SEQ ID NO: 366588 - DNA, 1494 bp, Homo Sapiens
  misc_feature (107)..(330): n is a, c, g, or t
  misc_feature (1016)..(1038): n is a, c, g, or t
  misc_feature (1354)..(1354): n is a, c, g, or t
ccccacactatcaggtgaatatagaaccccggttataaagcaggctggtaccggcccggaatttccgggatatcgtcgaccacgcgtcgggagtttcactcggttgnnnnnnnnnnnnnnnnnnnnnnnnnnnnnnnnnnnnnnnnnnnnnnnnnnnnnnnnnnnnnnnnnnnnnnnnnnnnnnnnnnnnnnnnnnnnnnnnnnnnnnnnnnnnnnnnnnnnnnnnnnnnnnnnnnnnnnnnnnnnnnnnnnnnnnnnnnnnnnnnnnnnnnnnnnnnnnnnnnnnnnnnnnnnnnnnnnnnnnnnnnnnnnnnnnnnnnnnnnnnnnnnatgagccaccaggccggccccaggattttatattaagccttcttgctctcaaacaaaacaaaaaaggtttcaactattcccatttcccagatgaatcccatgagcgctgcttactggtcgaataccaaggtctagggctctgcttccggtagacacgcacacgtggtctccatccaatgggcctttcctgaagttaccagaaaacaccaacatgggagggagtttatgaagcaaaggcaaaggcaacacgtcggctagcttcagggtagcaccgtgagaaatgggctgtattgatactgtgaatgtttgttttccaagctgttttatacaggtttgttttttcatggtgtagggtatttatgacaaagtaaatgttgtgaaggttaaagataaattaagattatccaccaaatgctaaaaatactgatgtgtaaatcacctttatcgcctcacctcttctacaagcttttgtggcttgagggcttttgtttttggcttttgtctggatgaaagttttgcccagttgtgttttaaaaacaattcctcatgaacactaagattaattgtgtctgtatctctggaactgggtgctcatgttggttttaatgagcttgcaacccttccccgtttgctttgtttaaggaggtgcctctgttctttgtggaggagtgaaatggagctttaannnnnnnnnnnnnnnnnnnnnnnttgcacacacgcgtgtgttattgtaggcaataacaaaaagtagccatctccttgttccagctgaaaacctgctgtgagagttttgacagagcactttattttcgtcaagtttcaagtctgagttcaaaaccagccctgatcccttatgaccaactgctactcgaccagtcgccactcagtggccacctggtgcccgtttagatttttgcttgggttttactggccacctctatagacgagagttgcaaagttgctttgagcagagagggaaagattaatttacactgctggccaccgaaagcaagtgttttcctgngtagtaatctcacgggctctttgatctggaaactttcagagtaccaaattggtgggatggtgggaagggcaaggacaccgtatcttctggtctgaaccgaaaaaacagaacctccgggggcttgccgttaaaacccctgc

SEQ ID NO: 366589 - DNA, 943 bp, Homo Sapiens
  misc_feature (118)..(118): n is a, c, g, or t
tttccaccatctaggctgatcatgaacacacccaatttctcttataccaatgtttattaagagaaaatatagcagcctttccagttgtatttaaaatacttaggagaataatgtgatntttacagtggtcttcaaaaaatgtatttgtagtaaatcttataggagaggagtttaaatttaaaaaggggcaatacttcctggttgtgaccaattcaaaccagagatcttgaagcatcaggctttgaaccacacccattttccaagccatttagcgtgttcatgaacacaccaaatttctcttataccaatgtttataagagaaataaagcagcctttcatttatttaaaatattagagaatatgtgattttacagtggtcttcaaaaaatgtatttgtagtaaatcttataggagaggagtttaaatttaaaatagggcacacagatataactaatgtttcaagatcagtaaggcacaccacatctgagtgcaatagggcccagaataagactttcctagatgtagggtctctatgtgctaagacaaaaagaattcaggctaattttataacaggggattaaaacaaatttccaagtgcatttaccatgtttctctaaaggaactgatttggaacagaaagaaacttttagatgaggctttttgctttgattaaagcctaagaacctttgaaaaacacttgcatttcaaaaatgtagcatttcatgtcagaaattcaacttcatctgagacataatctcctatatttcatttaaaacctctccttaaaccaataattaaccttgacaataaaaaggtaaacaaaagcataataaatgaatttttgaatagttcttcctccactgaaatcagccagggagaacacgtaggcttggcctggtttctcagagtactcaggtatattttcaaagaaagtcactctaga

SEQ ID NO: 366590 - DNA, 2043 bp, Homo Sapiens
  misc_feature (1673)..(1674): n is a, c, g, or t
  misc_feature (1686)..(1686): n is a, c, g, or t
  misc_feature (1771)..(1771): n is a, c, g, or t
  misc_feature (1774)..(1774): n is a, c, g, or t
  misc_feature (1798)..(1799): n is a, c, g, or t
  misc_feature (1861)..(1861): n is a, c, g, or t
  misc_feature (1931)..(1995): n is a, c, g, or t
gtgaggacggggaagactcggacgagaaaacaggtgtccagccacatacaggttctagctcggaagaaggtgcgggagtaccaggttggcatcaaggccatgaacctggaccaggtctccaaggacaaagcccttcagagcatggcgtccatgtcctctgcccagatcgtctctgccagtgtcctgcagaacaagttcagcccaccttcccctctgccccaggccgtcttctccacttcctcgcggttctggagcagcccccctctcctgggacagcagcctggaccctctcaggacatcaagccctttgcacagccagcctaccccatccagccgaccctgacgccgacgctcagcagttatgagcccctggccccgctcccctcagctgctgcctctgtgcctgtgtggcaggaccgtaccattgcctcctcccggctgcggctcctggagtattcagccttcatggaggtgcagcgagaccctgacacgtacagcaaacacctgtttgtgcacatcggccagacgaaccccgccttctcagacccacccctggaggcagtagatgtgcgccagatctatgacaaattccccgagaaaaagggaggattgaaggagctctatgagaaggggccccctaatgccttcgttcctgtgtcaagtgctgggccgacctcaacagcaccatccaggagggcccgggagcctttctatggggtcagctctcagtacagctctgctgatagcatgaccatcagcgtctccaccaaggtgtgctcctttggcaaacaggtggtagagaaggtggagactgagtatgccaggctggagaacgggcgctttgtgtaccgtatccaccgctcgcccatgtgcgagtacatgatcaacttcatccacaagctgaagcacctgcccgagaagtacatgatgaacagcgtgctggagaacttcaccatcctgcaggtggtcacgagccgggactcccaggagaccctgcttgtcattgcttttgtcttcgaagtctccaccagtgagcacggggcccagcaccatgtctacaagctcgtcaaagactagggtgccctctgcgcctccttaaggatgcagggtgagcatctcctctccacacctgcctggcacccctgggggggtccaggattgaggattcatctacctgccaggcctcaagcccaagacccaggaggcctcccccacctaccccagcacacacactccctgccactgttctgcgctttaattgtgggagaagagaggagaggagggctcagcggtggggcagcctgtccggggcgctgacccaccatcaccctgctctgcccagcctcgcgtgacctcagagaggtggggataggggacaccttcagcctccagcatgtgtggccactgtacccccacccacccttgggggagcatgatgggcaggtgagggcaggatggagaccaagggagtcagtgagcagaggccctgggagtgtccggttggggttggactgaggacagaggggcccacacttccttgcccctttgtgtcccaggcctggtgcccagactccttgcatggcttgtgtggtcctcagactccgcacagcgagcgtaggtctctgggtttcagatgaagtgcccaggctcccaggaagttgagggacccacanngagaggtgggcnagagctggagttctcatccagggctgcttgtccccagagcccaggtttatactacttcccctggggggcgggggctggccgcaanggnttaagggggagaggctctggcaannggtggaagtgaagccctcatccaaggggcgctttggggttagggggacccacctgtttttcngactggggccaatgaaagaagggaaagcacaggcaagctaactagaacccccatttaaccaccctcattnnnnnnnnnnnnnnnnnnnnnnnnnnnnnnnnnnnnnnnnnnnnnnnnnnnnnnnnnnnnnnnnnagcaacccttcccaaaaattggaaaaaaccaagggggtataaaaggga

SEQ ID NO: 366591 - DNA, 863 bp, Homo Sapiens
cggagttccgggatatgtcgaccagcgcgtcgcgcctccggcagctccccctcaacgactgcaaatagagcctaaaccaaaatcccctagtttcggattgaagcactatcgctgtgatgtaccaattcctggactaggtcggcgctaagagaggaagtaggtgaaaaaaataaagaggcgctcccctccacgtgatcccagccctgcctctttaggtgaggcacgcggccgggcggctccaaggctgccggctagggtgagcagcggagcgcttgggcttggagtagcaaagaacgcgctctccagagaaagtatagccactgcttagacagccagggaaacgtgtgcggggaagtggaggactcaggctctcgtgcgagagcggagttggacgtgcagggccgctggggtcacgcggagctctcccgcctcccctccgcgtgagctctgggatggtccgcgccgggagcgcgcgcgaggcttgaagcgcgggtgaagcgcgcaggtcggagtgacagctgcgctgccggcccggctgcggtcagcaacgcgccatggacgcagagctggcagaggtgcgcgccttgcaagctgagatcgcggccctgcggcgagcgtgtgaggacccaacggcgccctgggaaagagaagtcccgagtccaaaaaatcttttcaagccatacaccaattcaattcggaacggatggaagtcttcaaagagaatctgaaacaatcagcttggacaattagaatcagaactttcatttctaaagtacgcttactgggcatcactcataagaaatcactccaaggcagacagaagacctaacaagcactgagatgacggaaacgacgacttcgaa

SEQ ID NO: 366592 - DNA, 818 bp, Homo Sapiens
cagagacatccagagcctggggtcacctcttgcaggagggttctggggagacaatcgggctctgatggcttgcaaccatggcccagcatcacacgagggcctgtgggtgcacaggtgctgccaggacacaaccagttacaccctccagcggctgctcatcacagggcctggcactgcgcagatgggcggagttcagtgaccgccacacagtcatagaaagagagggaagttttggcgatcactacagcgccaaatctgagctccacgctcacggatacgtagtcggctcctctcggcagcactggggcctcactaggatctggtggaggggcacattcacaccagaaccagtcagcagggcaggactctgatgttccccaaagtggcaggaatatgactcccctggccacatggggttggcaggtctggcactgataggaaaacctccctcgtctcctcgtcggctgatgttggcaggactcatggctgccacttgcagacagcccagctcaggctggaagctccatagccactgctctgggccctggcccctcgagcactcagaacggcgactgcacctgtccaaggagcacgcaccacccacagtatgggtccctgtgagcaaggcaagatgcacagtccaggtgctgagcacaggaagccacaggaaccttcagaagtgtgcttctgggtcatgacatacaggtgctcaaaggtcccatcaaaggtgaggtctctgctcactgcagacccctgctggatgctctgtgtggagtatgggtggccatcgcttcctggcgacgcgctggtcgacgata

SEQ ID NO: 366593 - DNA, 1274 bp, Homo Sapiens
  misc_feature (1053)..(1053): n is a, c, g, or t
  misc_feature (1066)..(1066): n is a, c, g, or t
  misc_feature (1074)..(1074): n is a, c, g, or t
  misc_feature (1085)..(1086): n is a, c, g, or t
  misc_feature (1138)..(1138): n is a, c, g, or t
  misc_feature (1148)..(1148): n is a, c, g, or t
  misc_feature (1162)..(1163): n is a, c, g, or t
  misc_feature (1169)..(1169): n is a, c, g, or t
  misc_feature (1171)..(1171): n is a, c, g, or t
  misc_feature (1173)..(1173): n is a, c, g, or t
  misc_feature (1182)..(1182): n is a, c, g, or t
tacgggatatcgtcgaccaggcgtcgccacgcgtcggccacgcgtacgcaggagtgctgtcacctccctgacacctcctttacagcccccttttccccagcgcgtggtatgctctgacttagttgggctctaccaggacaccgtactgctgcaaagtgctcagtgggtgaggtgggagagggagaagctgtcgaatacccttcggtgagcccgaccccaacacctgatggttaagaaaaatgtctctgctttctgccttttggaaattttgctctttctctttttcacagtgagttatacaagagtcagctgaaaagggatcttccaaaaggctgtcactctaagagaatatttgtcctcttgggtatccctagtgtactagctgtggattccactcttagttactgaattatatttttgtctttgtcaaaaaacatttcacaagataataatccatattatataatcccttaagttccatacatactttgggagacgtaccgaccagatttcagttgttattaaatgaagcttgtaaagcttaagtcgtaatgtaagggtgagtaatttctgcccgtgcccaaccacagtgcaccaatcacagacgaaatgaaggaagcacttgctgcgtctgtcctaatacgcacatgagcaggggcgagaagtgctcattgccagaagcattgctgattagccatctgcatgtcatgagcccacgccaaaaaactgcatgcagattgtccttttcccaaatctaagcagacttctagctccctgtcagttaccagtgttcttgatactcttgtctttttacttcttgtcttgattatgaaataagccttttgatgctctttaggctgcttgtgtgccgtttgtccctcataagaatacttccttttaccccaattttcttttatctcattccctaagacaaagtccctcacccattaaaggcacgtgaagtactgagctcttgtaatatcaatatgtctgtgaataaatctagaaataaagtttctttgaccagagctgagctgggtgtggggagggttnggggaagtgcccngtctcagnttctgggtggnngcggcagtgaccatgcacttctctaccaaggggctgggggagaaggctctgnctcctacagngtcgcattctccanngggcangnangggttgggnaagggaaagcgctagagaacccagaaatggggggatattttgaaaatcttgcaatttgattgaggggggcctcccttttcccaaaaagaaaa

SEQ ID NO: 366594 - DNA, 772 bp, Homo Sapiens
cttacgggatatgtcgaccgagcgtcggtgcgagggcggctggcggaccgggctggctgggggggaaacgaaactgacggaggaggcggcggctctggcagcggcggcgacagtgtcgcgcctgaccccccctaccgactccccggcagctcgctctctcccctcagacttaactgatgaagaggagaactgacccagaatgcactgcccccatcaagaaacagaaaaaaagagttgcagagcttgccctgagcctcagctccacgtccgatgatgaacctccctcctctgtcagtcatggagcaaaagcatctactacaagccttagtgggtctgatagtgagaccgaggggaaacaacacagcctctgactcttttgacgatgccacttcaacagcacgactctcttgtgcgcacaggaacttcttctcgctattccatgtataatagccgtctcccagaagcttatggccaagatgggcttcagggacagcgtcaccggattgggtcaacataccgccagggctcggaacggacatcgctcgaggcttccagtcagaacaggtcgaagcaggcttggcgtctgacacctccggcggcttctgaccacggagctgaacgtggcactgcgcgcagatgagccagagtcccagctgccttgtgagccacgtctcactgcgcctcccacggacatgctccccactgccaacttccctgatcactcactggccctgcagccgcaccggcctcgccggtcggcccagccgcactc

SEQ ID NO: 366595 - DNA, 1741 bp, Homo Sapiens
cattacgctagtacgaggcctggggtgaatcggccgaggtctctatcctccggaaggtggcctgggactatgcggcggcatggccttgtgtgacagatgcagacagtgtggcttcagctatgcacggggacagccatgaccggtatgagcgtctcacctctgtctccagctccgttgactttgaccaaagggacaatggtttctgttcctggctgacagccatcttcaggataaaggatgatgagatccgggacaaatgtgggggcgatgccgtgcactacctgtcctttcagcggcacatcatcgggctgctggtggttgtgggcgtcctctccgtaggcatcgtgctgcctgtcaacttctcaggggacctgctggagaacaatgcctacagctttgggagaaccaccattgccaacttgaaatcagggaacaacctgctatggctgcacacctccttcgccttcctgtatctgctgctcaccgtctacagcatgcgtagacacacctccaagatgcgctacaaggaggatgatctggtgaagcggaccctcttcatcaatggaatctccaaatatgcagagtcagaaaagatcaagaagcattttgaggaagcctaccccaactgcacagttctcgaagcccgcccgtgttacaacgtggctcgcctaatgttcctcgatgcagagaggaagaaggccgagcggggaaagctgtacttcacaaacctccagagcaaggagaacgtgcctaccatgatcaaccccaagccctgtggccacctctgctgctgtgtggtgcgaggctgtgagcaggtggaggccattgagtactacacaaagctggagcagaagctgaaggaagactacaagcgggagaaggagaaggtgaatgagaagcctcttggcatggcctttgtcaccttccacaatgagactatcaccgccatcatcctgaaggacttcaacgtgtgtaaatgccagggctgcacctgccgtggggagccacgcccctcatcctgcagcgagtccctgcacatctccaactggaccgtgtcctatgcccctgaccctcagaacatctactgggagcacctctccatccgaggcttcatctggtggctgcgctgcctggtcatcaatgtcgtcctcttcatcctcctcttcttcctcaccactccagccatcatcatcaccaccatggacaagttcaacgtcaccaagcctgtggagtacctcaacaaccccatcatcacccagttcttccccaccctgctgctgtggtgcttctcggccctccttcccaccatcgtctactactcagccttctttgaagcccactggacacgctctggggagaacaggacaaccatgcacaagtgctacactttcctcatcttcatggtgctgctcctaccctcgctgggactgagcagcctggacctcttcttccgctggctctttgataagaaattcttggctgaggcagctattcggtttgagtgtgtgttcctgcccgacaacggcgccttcttcgtgaactacgtcattgcctcagcctttatcggcaacgccatggacctgctgcgcatcccaggcctgctcatgtacatgatccggctctgcccggcgcgctcggccgccgagaggcgcaacgtgaagcggcatcaggcctacgagttccagtttggcgcagcctacgcctggatgatgtgcgtcttcacggtgggtcagaacataag

SEQ ID NO: 366596 - DNA, 928 bp, Homo Sapiens
  misc_feature (225)..(241): n is a, c, g, or t
  misc_feature (865)..(865): n is a, c, g, or t
  misc_feature (870)..(870): n is a, c, g, or t
  misc_feature (880)..(880): n is a, c, g, or t
gggagttacgggatatgtcgaccggacgcgtcgccacgcggtcgcccacgcgtccgaactcctcaagcaaaatttctgttcattttacccttaggagaagctttagttcttcctcaagtcagggagtagtgagtttgtattttgagtagtcatttctcactaagctggttgctttctagagagacagtggaatctagtactttaatacattttctctgacatggnnnnnnnnnnnnnnnnngaggggcattttaaacttagaggtggtggtaaaacctacttttgagttctccgaactgaggttaaaataacttgcagaattttccaaagtcaatgggcttagcatgattactgctgttgggtggggctgagaatgaaatatttgacattctggaattgctggcatgtaaagcttctccagagaggcaccccagggaaatcactctttacaattggtaaaggaagggcctgtaaaaggatcaaaacacatggacctacattcagtgtaatagttacaaagttactgattggggttccacaccctgtggtccttagtcaaaaataatgatctgtttcagtttgcaagagcaggattttattattttgcttggggtgaggggcgggagagtggaatatgagtaaggttgctgaatgaattctaaactcgcttatctggtcttcaggcttcccaactctctccaagccttcttatttcactgcagttaaataacatcttcttgttcctatagttgtgctgtgagttttctgttcatatttgcgcagtgtattttaatacggcccatgtcattatagttgattttatccctctaaacaattactgtatttgtttttgacgtagaggttncaatnttttcacctngggggcaaatgaaaaacttgggcagttttcatttggggagcatataat

SEQ ID NO: 366597 - DNA, 1085 bp, Homo Sapiens
gttggccgcggtggagctagcaggcgggcgggcgggagcgggcgccggagtggagaaaggagccagcggtgggcagcgctgctgggatggcgcgggccgggccggcgtggctgctgctggcaatctgggtggtcctgccatcatggctgtcctctgcaaaggtctcctcgctcattgagagaatctctgaccccaaggacttgaaaaaactgctcagaacccggaataatgtactggtgctttactccaaatctgaggtggcagctgaaaatcatctcaggttactgtccacagtggcccaggcggtgaaaggacaagggaccatctgctgggtggactgtggtgatgcagagagtagaaaattgtgcaagaagatgaaagttgacctgagcccgaaggacaaaaaggttgaattattccattaccaggatggtgcatttcatactgaatataaccgagctgtgacatttaagtccatagtggcctttttgaaggatccaaaagggcccccactgtgggaggaagatcctggagccaaagatgttgtccaccttgacagtgaaaaggacttcagacggctcctgaagaaggaagagaagccgctcctgatcatgttttatgccccctggtgcagcatgtgcaagaggatgatgccgcatttccagaaggctgcgactcagctgcgaggccacgccgtgctggccgggatgaatgtctactcctctgaatttgaaaacatcaaggaggagtacagcgtgcgcggcttccccaccatctgctattttgagaaaggacggttcttgttccagtatgacaactatgggtccacagctgaggacattgtggaatggctgaaaaaaccgcagccgccacagccccaaggccctgagaatccctggggcaaatgagggcggctccctttattaccctgaccgataaagacttttgacagtttgggaaagaacactcctctggcccccgtcaaggtcccacgccccattgggttccccacttgtaaacaaatgagaccccgagtttgcaactgagccccaaacaccccccccatgagaagtcagcaactctct

SEQ ID NO: 366598 - DNA, 1007 bp, Homo Sapiens
  misc_feature (24)..(24): n is a, c, g, or t
ttaccgggatatcgtcgaccgacngcgtcggaactgagcggtatcgcggtggtgggcattgaggaccctgtgcgcccagaggtgccagatgctattgccaaatgcaaacaagctggcattactgtcagaatggtgacaggtgacaacatcaacacagcccgggccattgccaccaaatgtggcattctgacacctggggatgacttcctgtgcttagaaggcaaagaattcaaccggctcatccgcaacgagaaaggcgaggtagagcaagaaaagctggacaagatctggcctaagcttcgggtcctggcgcgatcttctcccactgacaagcacaccctggtgaaaggcataattgacagcactgttggggaacaccggcaggtcgtggctgtcactggtgatggcacaaatgacgggcctgctctgaagaaagcggatgttggttttgccatgggcatcgcaggcacagatgtagcaaaggaggcttcagacatcatcctaacagatgacaacttcaccagcattgtgaaggcagtgatgtggggacgaaatgtctatgacagcatctccaagttcctgcagttccagctcactgtcaatgtggtggccgtgattgtagccttcactggagcctgtatcactcaggattccccattgaaagctgtgcagatgttgtgggttaatctgatcatggacacttttgcttcattggccctggccacagagccccctacggaatctctgttgaagcggcgcccctatggccgaaataagcctctgatctcacgcactatgatgaagaacatcttgggccatgcattctatcagctcattgtcatctttatccttgtctttgcgggtgagaaattctttgatagtgatagtgggaggaaggcacctctacattcaccacccagccagcactataccattgtttttaacaccttcgtgctgatgcagctcttcaatgaaatcaactcccgaagatccgatggagagcggac

SEQ ID NO: 366599 - DNA, 1247 bp, Homo Sapiens
  misc_feature (12)..(12): n is a, c, g, or t
gtaatcgctatngtgaatgaacagatgaaacacacacacgtgcacgcgcacacatacagcagccagaggcacaataggcttggcagagatgaaaacagcaagggacagccagacccttttgcacaaagtacaaagcgatcctggtgatagacgagcagtctgggggagtgtgggaggggtgttggtcccacagtggctggtccagccaggacaagaatggaaacaaagcatgtgaccccagggagacaggtcggtagatgccataccccaggtggatagacacctgcaggagaggagagtcatacagtgtcccctggccataagccctaaaggctgaggtgctcagcctgctcagcccatggccatactgcagttcctgcccacccaggccaacagctcctcaggaagggagggcgcctctcccctcatgaatgtatctgcaagtgcacagctttgcccatctctggggcacgaacaagtccaagtaccaacatagtcttaggttggctggctgtgcccatcgagttgggacaaggtcttccccagaggagaaggggccaggcccacccagccgggatcagtctgtgagcaccaccaactccccatcgctcttctcttcgccctccgagtcctcgtcctcgctgtaccggtacatctcgccatcagccaccgagtgcctgtcatctgtgccctcaccctcctctctgaggctgcaggtgttgacgatcacaggcatgttggggtccaggctacgagggacatagtgctccaccagtggctgtgccagcggcatgcctgctgcccgagggtacaggacatctgaggagctcatctgcacctggccagcctgcggggggatcacgtagctctggcgggcatcctgacgccgggtcctcatcagggccttgtactctcccacgcgcagccgcttgccctccacgatgcaggtgcgcttgggccgcggcttgtacttgtagtcaggatacttctccaggtgctgccggctcagccgcgcctgttcctcatagtagggctgcttctcctggttggtcatggacttccagcgagatccaaggatcttgctgatgctggagttgtgcatgtctgggaaggcttgcaggatcttcctccgctcatccttggcccacaccatgaaggcgttcatgggcctcttgatgtggctgctgtttcgggactcgggaaagtggcgggagcctgggcctcgtgcggaattcgccacccaggcc

SEQ ID NO: 366600 - DNA, 966 bp, Homo Sapiens
  misc_feature (24)..(24): n is a, c, g, or t
  misc_feature (896)..(896): n is a, c, g, or t
ccggctggtacggccccgacgtantggatatcgtcgaaccaggcgtccgcggacgcgtgggcggtgctgagcagtagcctgcagtcactggagtatctcatcaacgacatccggccgccctgcatcaaggagcagatgctgggcaagggctatgagacggtggccgtgccccggctactcgaccaccagcatgcccacatccgcctacccgtctacagataaggcctgccctgcggacatacggacatgcggacagggcgcagagccgggaggcaggccgcagaacagggtgggcggctcgcaggggcgctcagccccaccctgtgcctgctgatgcccacaggggagccaggctggctgccgcctcgctgtggccggatggagggtggcagggcaacctcacataccaaggcccctccccaccatcggttgccccaggacacagtgagggcctgggggaagccactgtacgcccatgccttccttttatctaagctgtgctagaggcacgggcagagagaaaccactcaaaaacaggaatggttcttaactgggcctcctgcgtgacaggggcccaggccaaggtggggtgcacgagagaaaacaggcgcaccagagtcacgctggcgggcagggcagcccccccaggggtcaggcagctgtgtctccccacactggctccccagtattctggcaaaaggggtacaggaggccgataggaagtcactgggcccaaagtgtctccccaccagccaggtgaagaccactctgacagaaggctccagggactattaccagtccccctgttcctccttcccctacccccaccattccttcctaacacagagttgcacccccatccccattctccaaaacctggactaccatattccccntttcccttcaatacatcttatagggctgctgggtacagttgttcaggctgtgcactgcacaagggcacct

SEQ ID NO: 366601 - DNA, 1617 bp, Homo Sapiens
  misc_feature (1060)..(1083): n is a, c, g, or t
  misc_feature (1265)..(1296): n is a, c, g, or t
  misc_feature (1339)..(1347): n is a, c, g, or t
  misc_feature (1377)..(1467): n is a, c, g, or t
atcaggccaaatcggccgagctcgaattcgtcgagagcggagcttctgcaatcgcagtccgcgcgtcgtgctgcccgtatggctcaacttcgacggcgagccgcagccctacccaacgctgccgcctggcacgggccgccgcatccacagctaccgaggtcacctttggctcttcagagatgcagggacacacgatgggcttctggttaaccaaactgaattatttgtgccatctctcaatgttgacggacagcctatttttgccaatatcacactgccagtgtatactctgaaagagcgatgcctccaggtcgtccggagcctagctcaagcctgagaattacaggagactggacatcgctcaggtcgctctacgaagatctggaacgaccaccaaaatgtgcacgaaagacctggagcggctgacacaggagcgcattgcacatcaacggatgggagattgaagatttctgttgaaacttacactgtttcatctcagcttttgatggtactgatgagtcttgatctagatacaggactggttccttccttagtttcaaagtgtctcattctcagagtaaaataggcaccattgcttaaaagaaagttaactgacttcactaggcattgtgatgtttaggggcaaacatcacaaaatgtaatttaatgcctgcccattagagaagtatttatcaggagaaggtggtggcatttttgcttcctagtaagtcaggacagcttgtatgtaaggaggtttgtataagtaattcagtgggaattgcagcatatcgtttaattttaagaaggcattggcatctgcttttaatggatgtataatacatccattctacatccgtagcggttggtgacttgtctgcctcctgctttgggaagactgaggcatccgtgaggcagggacaagtctttctcctctttgagaccccagtgcctgcacatcatgagccttcagtcagggtttgtcagaggaaaaaaccagggggacacttatgttagaaaagtggcttaacaggcatcctggccttctaattttttgtttgcnnnnnnnnnnnnnnnnnnnnnnnnaccctttaaaaaatgtggtaaccaggtggaaaccaaaaatggttccttttaaaaggggggaaaatccatttattttattgtgtaagggcaaaagcccaattttttatatttttaacaaaaaaatctatttatccctctaaaaacgctatctccggtggtgcctcacaaccctttttattttnnnnnnnnnnnnnnnnnnnnnnnnnnnnnnnnacaaccctgttcacccttatttgggtgggatccattttcgggnnnnnnnnncccctttcgggccccctttgggagctaatnnnnnnnnnnnnnnnnnnnnnnnnnnnnnnnnnnnnnnnnnnnnnnnnnnnnnnnnnnnnnnnnnnnnnnnnnnnnnnnnnnnnnnnnnnnttttgtgccaaacccaaatttttttccccctaaaacaccagggtgttttggggcttctgcaaaataaaacgaaaataaagagtccccaatatttttatttaattacggcgctaaacaccctcctttggggtccccacatttctccccgcg

SEQ ID NO: 366602 - DNA, 753 bp, Homo Sapiens
catatcgtcgaccaggccgtcggattcacaaggcgataggtgactttgctacaagaagaaaggtcaagccagcgcctttagaaataaaacctttgccagaatgggaagaattacaagccccagttagatctcccatcactaggagttttgctcgagactcttccaggtttcccatgtccccccgaccagattcagtgcatagcacaacttcaagcagtgactcacacgacagtgaagagaattatgttcccatgaacccaaacctgtccagtgaagacccaaatctctttggcagtaacagtcttgatggaggaagcagccctatgatcaagcccaaaggagacaaacaggtggaatacttagatctcgacttagattctgggaaatccacaccaccacgtaagcaaaagagcagtggctcaggcagcagtgtagcagatgagagagtggattcatgtgtcgttgaccaacagaagaccttggtctaaagagtacccgggaagcctggacagatgggagacagtccacagaatcagaaacgccagcgaagagtgtgaactgacaaactattgccttgccatttctgaacaaaagaaaactgaattgtacagataaatcccttttgaagaatgacttgacacttccactctaggtagatcctcaaatgagtagagttgaagtcaaaggacctttctgacataatcaagcaatttagacttaagtggtgctttgtggtatctgaacaattcatac

SEQ ID NO: 366603 - DNA, 700 bp, Homo Sapiens
  misc_feature (155)..(230): n is a, c, g, or t
  misc_feature (410)..(446): n is a, c, g, or t
ggtcatgtgtggaacttagaatacagattcaaaatgtattctggagggaaccgactatttcgcagactcgtgttcccaggtttcagacccgaaaatctcactccgtgatcaaaggttgctgctgctgctgcctcctgcgtgctaccttgctatannnnnnnnnnnnnnnnnnnnnnnnnnnnnnnnnnnnnnnnnnnnnnnnnnnnnnnnnnnnnnnnnnnnnnnnnnnntgaagaagtggaggttgcttggccttcctctactgggtgtggccctgatgaactcactgagtgctgaggctggctacaatgtcctatcagaggggaagtaataccacaggagcacatcaagactacaaacataaagaaccatggacactgatttcatccaagttctacagggagtgaacnnnnnnnnnnnnnnnnnnnnnnnnnnnnnnnnnnnnntagccctttgtagtaaagggcatgctgggaaggcaagagccagagccgcctccccaagcgcatgactagggaggaggcgcaaccaagagccgcctctctagagacactcctgggaggatgggcaccagagctcgcctcacctgagcatactgggaggatgggcacccgagccccctctgtagagcattactagtgagagatcggaccaccacgtacatctaccaatggactagcacttccccccccttgaaaag

SEQ ID NO: 366604 - DNA, 1054 bp, Homo Sapiens
tgtggcacgaacaagtatacaaaccagggccttgcctggcagttcctaagggacattggcagggctgacctgggattcagctcccctgagtggacagtctgtgttgcctggggtccccaggctgagaaggggtatgggtaattgcacttcggggcacagtgaacacaggcacgggctggatgtgccctgggagacagaaaggagaggctgacctattctcaggagctggctatggctgggacagtgcctgcccggccagaggaaggccacagcagagccactccacagactaagacctgtgttgccaaggaatcagacactggcttggaggagacaggaggacaaagcctgctgctattaagcccacaccgtagcttagagatccttcagcctcctggccttcaaaacaaactccagggcttccactctgaaaggcaaaggaatcacctcgtgtttgcttcatccccttagcaggatgaacgaaacgcctaaggcccaaaaagactgagggcaggacccccagcatctcccatctcctccgtgcaggctgggtgagagaatggcctggaaaggaagcatctgcgctacattgtgcttcaggcccccccagcaactttcccggaggtaactatttgcctggaaaactaggaaactgggttttaaaaacagaattttaagcagacttctttagagggacaaggccatttgatggtagtgattttggttttgttttatgaaaatggtacaggtggtaatccctgatgacagaatgcactgagagtggggccaagggccctgaaggatcctgtctgttcagtctggttaaggcgacagctgggcgggcatgtggccggggagcagtggcacagcggaccctggcagtttgctcacacctggccctcgtcccagagccagcccacctgcctcttggccctggtagtgactccacagaacttccccgagcagaagcctcacagtgggccagcacccatcttgcatgcaagggagaacctgcatgcagtgcacacaccccggccagggtggcacatggctg

SEQ ID NO: 366605 - DNA, 704 bp, Homo Sapiens
gaccacgcgttcgcagagactgtgatggtgcatcaggctaaccacctcttcctgggtggccggctcagggaaccgccaactggcacacaaagaaactgcagattcagagaacagtgacatacaaagccttttatccctcacgtcagaggagtacacagatgatattccactgttgaaagaagcatgagggcagcggccagcctttcctctctgcgaggttctctcagcccttcctccctctccctgctgcgggcatttgagcaccctgtactctccagccaccttgaccttggatacctcgagctgcccaccttgtgttaatcagtgtatctctgagcgggccctacaaagggcccaacatttgcctcggcaaaaccccccaacggcaaaagaattcctccggccattctttggccttggatcagagaaccacggcctctgggcagggaacgccctcgcgcgcttccttattgggccctggcgccaccccacgcgctatgtccctccaattcgttggcttcaccgccaacgaacccttaatcttcccggacaacctcgttgcccttgggaactttcaaaacacgccccgtcagccctcttatatcccgtataaaggcccccttcctggaggcgcgataccccccattcccaaggggcccacggctccaatttctggggctggggcaagtacacccacccagcct

SEQ ID NO: 366606 - DNA, 948 bp, Homo Sapiens
  misc_feature (812)..(812): n is a, c, g, or t
  misc_feature (876)..(876): n is a, c, g, or t
gggcgatgagagcgggtactgcgaactgccgggcgatgctgtcgctgccgccgtgatacggagagcaacagttccccagcaacacccctccccgacacaggcacacaccccccgacaggcacgcacacccaccccacagtgcccggctcggctgcgcctcctctattggcccaggaagcccacccagccccgccacgcagagcccagaaggaaagaaagcctcatgcctgagccgaggggagcaccatggatctgacaaaaatgggcatgatccagctgcagaaccctagccaccccacggggctactgtgcaaggcctaaccagatgcggcttggcctgggcactttgtgcgatgtggtcatcatggtggacagccaggagttccacgcccaccggacggtgctggcctgcaccagccatagatggtttgagatcctcttccaccgcaattagtcaacactagtactttggacttcctctcgccaaagaccttccagcgagatctctggagctatgcatatacagccacgctgcaagccaatggctggaggaccttggatgacctgctgtatgcggccgagatcctggagatcgagtacctggaggaacagtgcctgaagatgctggagaccatccaggcctcagacgacaatgacacggaggccaccatggccgatggcggggccgaggaagaagaggaccgcaaggctcggtacctcaagaacatcttcatctcgaagcattccagcgaggagagtgggtatgccagtgtggctggacagagcctccctgggcccatgggtggaccagnagcccttcagtctccacttcatttgggtctttcagcccatgagtccccaccaaaggcctgcagntgggacagtttttgatggacccattagggacaggtcttctccctgcccagggaaaacttctttcaggcccac

SEQ ID NO: 366607 - DNA, 865 bp, Homo Sapiens
taacgggaatatgtcgacccgcgccgtcgcgtctgggggttgataaagggcagcattattgggtcctgggaaggagcgggcgtgaggccagctgaggcatggtgacccctgggaaggagcgggcgtgaggccagctgaggcatggtgacccctgggaaggagcgggcgtgaggccagctgaggcatggcgacccctgggaaggagcgggcgtgaggccagctgaggcatggtgacccctgggaaggagcgggcgtgaggccagctgaggcatggtgacccctgggtacgggggacttgggggccgcaccttggtttgcccagggcccctcctgcaccacgggccacatgcggaggacggcgtgggataggctccctgggtccacagcttctgcccgtgtatggggaaccctccttggtcaggactgcaggctctgggcagatggggcaggaaccctgaggctcccggccctcccatggcctctgatgtgggacactggagcgaggcacgattctgaaggactccatggatctgggaggatgaggcccacctccggttggtggccaaagccgtccttgcggggccggctgcttcacggacactctccgggtcgggctggtgggccccatcgtgggttgggaagtcgcctgagcctgggccgcccttgagcttctcccagtcttgactttccagacgggtccgtggctgtggtcatggtcggggcaggtggaaaatgctgcatggaaacctgatcctgtcaccttggaggaaatgatgatgtcgccggcttcttcgcagtctaaggattaatgcatttgaagaaaggggtgtggggttggtatgggttaaagtgctttgaataagtt

SEQ ID NO: 366608 - DNA, 871 bp, Homo Sapiens
ttggcagtgttcgggtttgatcctgaagacagaggcgacatggaaagggctttgtcaggggctcctggtgctcgtgattcacaacattagaaagaccattctggaggcagcatggaggctggtcagttgaagaggaggcagagtcctgtgaccaggttcttgtgacgccttctgagggtccaccccctcaatggctggtcctcagtgcccccatagccgggagccctggggcagggggactggcagtccctgcagtccttgccatgcaagaatgggaacaggcaggcctgggcagtactactcgtcctcctggaagtagaatttggtgaccatgacgccttcgtcaggcatattggtgaggctgacgggctggtcagcttccatcgctgtgcagaggaaccaaccggggcaggcggcagactcaaaactggtggtggggccactgtctgagcggatgaaggcgaagcgcttgtcctgctttctgttctcgctcaggtcagtgatgttaactgcctccagctggagtctggtctcatcaccagacttgacacaggacaggcacatcttccctccatggattcccaagaacagagcatgaggctcaatgggtaccacatctatcttttcttctaaattgacatttggtccttgcaagtatccagcaactagttggttgttcctcagatagaaggtcttctggttaacatcccagattctgaaggcttgcatcttgctggattttctcccagagggtcggcagatcgtctctgaatggaacaggaagaggaggagagtgattaggtgactgcggaggcctctgcagatttccattctgtgactgcagcaaggcagtggacatcccgggaattcc

SEQ ID NO: 366609 - DNA, 2218 bp, Homo Sapiens
tctagcttgacccaatggccaattctgccgtcctttccgtgtgaattcacccacataagaatgtccaagtttgccaatttcgaaaccaagtggaaatccaaccgacacttcgtgaacttggacacctaccccagggacaaaatgtcgcccgcaccctgtcagtggcctcttgccagggaacacaggagcgagatctctgctacacctattacggggaggggcctgctgttgggccgttggcccctggtcaccggtgtcaggttcatcctcatctgtgtcttccccactcacactctgcgagcgcttcaaggtaatggaatggccagctctgtggatctttcttatggagcttggccaaaaacctcaggacaagcatcttgctggtttccaggaatgctcgagggccccagaggaactcatactctgcgggctcagtgtaagggattcgcctgtactctaggtacttctgcctgacaaacacttcggtgatgagcttcttagtatttccaaagagaacgtttgtctcccggacatccaaccctaacttgaacagaaaattaaagatcagatcctccctgacacagttgcctttcataaagatgaggctcaagaccaccatcagaaggccaaacttgggcctgtctaaaataggatgccaaccagaattccctgtatggtagcccagcttgatgatgataatataggcgtggtttctggtatcaatttcgttcaaattgataaccaaaggcacacgtccagcttattgttggcacggttgatgatatctaacgcactcatcgtttatactctcggaggatgactttcaccatctccgagcgctggacaggcaccttggcttggtccttgactaagaggaactgcaccaacgcatttgccctctcatccaagggagacaagggctgtgcctccaccttggaattatcctgggtggcactggatcccggagagacactcgcgacctcagacacaacctacgggcagagagctccctgggctttcagagagacccagggccctggaggtgctcgggccctcccaggcactcagggcccaggatgcgctgggcccttcccagccactcaggatcctggaggtgctagggccctcccaaccactcaggccacggggggtgtttgggtgctcccagtcacccgagacctggatagggctttggacctcccagtcactcagatttagattctcccagggccattgggccctgccagtcatgaaaggctagcgtgtggccacggctgtccctcttgggccttcccagatgcttccttcttccgggtggccttgccggagcggcgtggcggctcgacggaggtcttggaggcctcttgagtggtggcagttgcctggggggcagctgccgtagccatcaggaagggtggccactgccggcgatgcctttgaggcattcatattgggctgtgggacccatggaactgcaggcagggcctctacacaggcaaagggatcctgcagagcatatggcagtgactttggggtctctgaggcagcagaggggcctttaaaggcattcagagaggcaggctgaaactgggaggtagctgggaagacacttgaggagggagcaaaggtctccggtgtggcaggcaggtttttccaggcagctggcaggtgtgctcgcgcagctgacactgccttgggagcacagaaggtggcagcaaagatcatgcggtcttttgaaggggccctgcgctccttcgaggaggtcctgcgctctttagaggagcccctgcggtctatagaagaggccctgcattctcctgatggagtcatcaatgatttagcggagcccaggggaaaatttgccgctgctaccgggggtccgggctgggcctgcaagactgcaggcggtgcctgccaggaaggctggagcggcagtgtgggcacctccgcttgcggacccgatgcctgggcctgctgggggggtagctggatttgcacggctttttgggagggcggggctccctgaaagggctgctccagctggaccaaggggggagcctgcctctgggcctcctgggcaggcaggggctgccagatgtgagtgggggccttctgggcctgccaggccagcgcctgtgtctgctgcacctcctggaattccattgacgttggaatctcgtgtggcaccgggggctgacatcccgggaattccggaccg

SEQ ID NO: 366610 - DNA, 1093 bp, Homo Sapiens
  misc_feature (322)..(356): n is a, c, g, or t
  misc_feature (400)..(409): n is a, c, g, or t
  misc_feature (838)..(878): n is a, c, g, or t
  misc_feature (923)..(951): n is a, c, g, or t
  misc_feature (955)..(955): n is a, c, g, or t
ctctgcgaggaaactcacagcccagaggagggcatccacagtttccagtgttactcaggtagaagttgatgaaaacgcttacagatgtggctctggcatgcagatggcagaggacagcaagagcttaaagacacaccagacacagcccggcatccgaagagcgagggacaaagccctttctggtggcaaacggaaagagactttggtgtagagaaggctctgtgtgttaactgatgggagagactgtttgtttataaatgtgtacagttttgttttctcgtaaggggagcatcatagggttactttataccagttgtaacannnnnnnnnnnnnnnnnnnnnnnnnnnnnnnnnnnaatggcagctaaagatatacagattactgttaaattgcagtccnnnnnnnnnnaaagatattttcttgagttatttagaacatggtaagcctggtattttttaatcaaacaaaatatttatgaaatgggttttctcttaattctggattcatcatggctttctaataccaattgtaatatttacaatattcaccaaaacttagaattttgcaaatgctggaattctgccagtgtttctttgctaagccttgcatgcaaaatttgaaattttaacattggcacccaaaacctacatggaatgtatgtctggagtatttcaaactttacattgaaacataatttccttggaaaacaaaccataagcctgaggaggcttttatcaacctggaatgctttatattaagtggtttttcactgtacattcctcattttacattcatttaaccctgccgattatttaaatttttttattgtaaagtagnnnnnnnnnnnnnnnnnnnnnnnnnnnnnnnnnnnnnnnnncaaattggcatgtcttttaagtatttttcctcctgattaaaaaannnnnnnnnnnnnnnnnnnnnnnnnnnnnaaanaaaataaatttttttaaatccccttaaattttaccaaggggaaaccaagcccttactgttttttgaacccatttaagaaaaattgccctttttttaaatggtaaccatttccagggtaaaaaaccccctgtaaaatgg

SEQ ID NO: 366611 - DNA, 792 bp, Homo Sapiens
  misc_feature (630)..(630): n is a, c, g, or t
  misc_feature (669)..(669): n is a, c, g, or t
  misc_feature (756)..(756): n is a, c, g, or t
ggggccgccgaaggaggggcaaagctcaagatggcggacaaaacgccaggcggatctcagaaggccagttcaaagacgagatcatcagatgttcattcatctggatcttcagatgcacatatggatgcatctggaccctcagatagtgatatgccaagtcggacacgacctaagagcccaagaaaacataattataggaatgaaagtgcccgtgaaagcctttgtgattctcctcatcagaatctctcaagacctcttctggaaaacaaacttaaagcattcagtattggaaaaatgagtacagctaagcgaactttaagtaaaaaggaacaggaagaattaaagaaaaaggaggatgaaaaggcagctgctgagatttatgaggagtttcttgctgcttttgaaggaagtgatggtaataaagtgaaaacatttgtgcgagggggtgttgttaatgcagctaaagaagaacatgaaacagatgaaaaaagaggtaaaatctataagccatcttcaagatttgcagatcaaaaaaatcctccaaatcagtcttccaatgaaagaccaccatctcttcttgtgatagaaaccaaaaaacctccacttaaaaaaggagaggaagaaaagaanaaaagcaatttggaactcttcaaagaagaattaaagcanattcaagaagaacgtgatgagagacataaaacaaaaggcagattaagtcgatttgaacctcctcagtcagatttctgatggtcagcngtcgttctatggacgcgcccttcagaaagaatagat

SEQ ID NO: 366612 - DNA, 1094 bp, Homo Sapiens
cggatgactgtagtgaaggaagctgtggcgagcatcctttcttcctgctcatttgtttctttatgtgtcatttcatctgtgcgttcttctgatactggagtgcaatgaacgttttggctttgactttcagtcttttttgtaagttttttcttagagctcatcaccatcgaaagttcctcgtttggcactaaaatggattttcctaaagctggttttccacatcgacattttcacttttagctggggtatttcttgtagatctccttctaatgctgggagcttctttcttcttggggcttctctcttccttaacagccttagatcctacatcttcagatggattgatttttcttggtctaccacgttttctaggtatggcagacatatcaaattctgcttgaacagtcaactgagatgagctcaaggttggagtcttctctgcacatctgatggactgaacttgctctgccctcgtgacccttctaacatgtttaatacgcagctgcttgtcactggatttatcatcttgcttatttcctgtattttcagaagcatctaaattagtacttgctcaattttctgatcattctgctaggacttgttaccgtactaacttttagatcattgtataagtgttcaacactttccgtgattttctacagatctgtttaattcttctaggagtcctttttgtaacagatgaaaccttaacttcgttttttagtagtttcttcaactgctggttccaacagctgagatgattttaatcttgtttgattccctacctgtagtgatctgtaattcttgttccacagaactggtgttttctagtatgtcctgattaacttcgttctttctccttcctctcctaggcgtaacagaattttgaggtatttgctggttctgagatagtcctctgacatcagaatagatgttttcagaagcttcagaaatttcttttgccttcctagttttcttcctgactgactgcctggcatcttaggagtagcaacatctgctgatgcttcctgttgtgctgatttgacattcacgttttggatacgttgacctctcgtacgagttttggaggaaac

SEQ ID NO: 366613 - DNA, 953 bp, Homo Sapiens
  misc_feature (21)..(21): n is a, c, g, or t
  misc_feature (43)..(43): n is a, c, g, or t
  misc_feature (55)..(55): n is a, c, g, or t
  misc_feature (107)..(107): n is a, c, g, or t
  misc_feature (116)..(116): n is a, c, g, or t
  misc_feature (176)..(176): n is a, c, g, or t
  misc_feature (554)..(554): n is a, c, g, or t
tttgattggtctagggagacnacagtccaatgcaatcatccgnactttaaatttnaggggatccctccgtgatgattggctctatagtgaatgccatgccctcctcnatgggtagnatcactgtcgtttgcatgatgccaaatttctggatgtccatgaaagtaagatcctattcnatgtcccacaaaatgtggacagacttgaaaaccattctgatgagttatgtggctgattgtgtttccaattacagagaagggagcccctgctctgcaagctgcaattgcttcatctctacacctcctggcaacctccactaactgttgttaccacattcgtccacattgcccaccaaaaatgtttcagaggtgtctccatggtagccattgtaatagactgtgacatcaatgttgataatatctccatcctgaagaggtcgactgtcaggaataccatgacagagcacgttgtttacagaggtacaaacagattttggaaaacctccatagcctagaggtgagggataggcattatgactgatgatttcccgatgacanagagcatctatctcttcagttgtcatgtcaacctttaaactcttcccagccaagaggaggacgtggcgggccagctgacaagcctgatgaagcccttgaatctgatcttcattcttaacttctatgctgtctccccagtctggtacaatgcctgtcgtcacatagtctggcttctttatgtgcttaggaaccggatgagctgaagaaactgcagccggcaaaactatactgtgtcggagacatctcgctgtctcacgcaggatacgagatttcttacttcgtggcaccgcttgactggttgcgtaagtagatatgattgaggggcaaagaccatacttgtaggagaaccatgggcgaacggagcacggtgaccacagctggagtccacatggttggcat

SEQ ID NO: 366614 - DNA, 840 bp, Homo Sapiens
  misc_feature (581)..(615): n is a, c, g, or t
ccggtgtttatcgatgccaccaaaagaagtgaattcagttacctccctccctctaggagttttacagactaaaggaatttttaaaatcagatacactttggtaaatactgaccttgtccccctcccacacccttctgcctttgacacttccatccaagaggaaaacatgatttggttgattccgaggaacgaaattgcctggtttttcccccgtccacccctggatggtcacacagctggctcctggcatgggcagatagtgtggctctcaacaaggctgcggggagacaggtctgtgtctatctcatctacccatgtagattcctggctccctctgaacacagcgaggacttctcacccctgtcaggtgttggctggtggctcagactttgggataactctgagcaggactatgggtctcagcttagcagggtcccctcccctgcgtaaaaccacattggcagtggtaatgagactctgagtcttaacttccatccttttgggaataccccacaaagttctaagcccccttgcttcccctgagcccaggtatgtcattcctacacacactgatcgagctnnnnnnnnnnnnnnnnnnnnnnnnnnnnnnnnnnntaatgtgacatgcatgtactgatccggagaagcctttataccaagaatagagctgggatctcaagcccaccctcccaagatcagacagcagagtgaaccaggaggccacgacaggccttgtgtcagatggcagacgatgcagcaggaagcagaaccacgggacgtgggacagtgggatgctatgggcagccagctgagggcaggggtctgagttccgacgcgtgg

SEQ ID NO: 366615 - DNA, 776 bp, Homo Sapiens
cggacgcgtgggcggacgcgtgggtcgacccacgcgtccgagcagtggcgctatagccacgaaagtgactggcagtgggctctgcggcgcagcttcatctgtcggcacctgcacagctatcccggggctgccctcgaccagctcctcgcgctctccgccgcctggaccaaccacgtcttcctgggctgcaggtacagcccacgcttgatggaaaaaattctccaaatggctgaaggtattgatattggggagatgccttcatatgatctggtgctgtccaaaccttccaaaggtcaaaaacgccacctctcaacatgtgatggtcaaaatcctcctaaaaagcaagccggttccaaattccatgcgagacctcgtttttgagcctgtacattttgtagctagtagttcaaaagatgaaagacaggaagatccttatggccctcaaacaaaagaggtaaatgaacaaacacattttgccagcatgccaagagacatctaccaagattatactcaagactctttcagtatacaagatgggaattctcagtattgtgattcatcaggattcattctcacaaaagaccagcctgtaacagccaacatgtattttgacagtgggaaccctgccccaagcaccacatcaacagcaggcaaactctcagtcaactcctgagaccttcaccatcacagacatttcccgagtctgtggtagccgaggaagcagtatttattgaaaattacgggacatctggaagaaccttctaatcagaaatggc

SEQ ID NO: 366616 - DNA, 1369 bp, Homo Sapiens
  misc_feature (993)..(1055): n is a, c, g, or t
ggtggcgtttggggtgtagagaaagcacgtatcattatcctttgtagtgtaactcagctatatcccagaggggaaactgaggcacgagggccattgccccctcgccccgatcatccaggcaccaggataagactgattagccacatgtgtcagctggcaccgatggcctgggcccctcatcagcgagatgaaacgtgtggttaggaactagtgtgaactaggtgcctgtgactgccatccccagcactgccaacctcggactcctgaggccctcgggtgccacctggcccctgactgcagcccctggtgtggtggctttgggagtgacctgcacatgggttctgttgtctgaggccagtgaggtcagagagacctccatcttaggtgtcctcgagtgccatgggggacaagccagaggctggaggagcagcatcccttccaggctgaacacttgtcagtgccgggttctggggagagccagcacgggaaggagaggtcgctggacggcatcggtatgctgaatcaccagagacaagacctgggcaccttccctctggggactcccaatctggacggggttcctggcttgctgtggggcatgttgaggccggaggctgggcttgtggggctgcacaggaccctgcccaggagaaacatcagcaaactgaccctgaacaggatgaggactcaagcaatactagaagctagagaggcatcttattcagagcccatggaaaagtggacaccatgagagacaagaggtagacgaccaaaagatagatcagtgaataaacacctaaggacgtagaaacgaaaccgaagaaacaagacacaaagacaagaccaacgcaaaaagacaaggacataatccacaaaacaagaaggagcagcaacaaaaatgcaccaacacaagcactagagaacgatagaatagatagaaccaagcaagtagagaaggcacaaagacaagaagacgagacatagaagatacannnnnnnnnnnnnnnnnnnnnnnnnnnnnnnnnnnnnnnnnnnnnnnnnnnnnnnnnnnnnnncagagcgaaacgaacaataacgccgagcaagacaacgagagagaggagcgagaaagcgcagaggaaaagaggtaccgcaacgggaaccacaacgacgaaagcaccgaagaaccagcaacaagcacagcaacaagaagaagagggacagcagaggagcgaggaaaagccagaagaatataggacgcaaaaacagatcaaatagtggagcgacagagggaaagatgacagtacagcggaagcacaaagcacaggacggcagcaagaaagcgaagatcgcaacagacgacgcagtaagacgacaaagaaaacaaaac

SEQ ID NO: 366617 - DNA, 580 bp, Homo Sapiens
  misc_feature (59)..(73): n is a, c, g, or t
ggctggccatgctcctggtctctccttcctgaggtcacaggcaggggctgccctggacnnnnnnnnnnnnnnntggcctggaaggggagacagaggtggagggtggcacaggctgcacattcagcttagaagtggacctggctttggtggcaggagaagaataaacacttgcccagacccctttgtgtgggggaattggggaggggtcgtggcaggcagggtgggccacggaactgggtcccaggcatcaaggccacgtgcagggccatggagggatgcttctcacgaggcgcttcagaagcgagcgaagggacagagaagccctgcgtccaagggccttttgtcctgttagcaattgaggtgtgcagagcactgtacagagccccactctccctgtacattccgtccctggaggtgccctggtccccgctttggggatgggagttttgtagactgtactataaatcggcagctctatgttcttgtcagctcagtagttctgttaagtctggaatatgcagacagacgtaaagatgttttagcagaaattggacgacagacatagaacattgaaatcaag

SEQ ID NO: 366618 - DNA, 420 bp, Homo Sapiens
  misc_feature (108)..(117): n is a, c, g, or t
gggaattagtgaaatggttaaacttctgcactttcttagttaccacagtcttcataccaagtattgggtacaggttacaattttgaagccatatgagtttatattgannnnnnnnnnccatttaaaaatccactaatggtgtaaaagagaccagtagattttcaatgggaaatgtacctagcaagctggttcttgcttatatatagtgataaactttgtagctgcctctttaaccaagaatttgtaaacacaactctaataaatgtgagttttaaaggattgttatttactactttggattgtaattagaacaatgcacatctgtcttccaagattttgtaaatatttttgatttttttcattaaatgtaaattttacataaaagttgtgctcttaataaacatgtaatatataatttac

SEQ ID NO: 366619 - DNA, 990 bp, Homo Sapiens
ctcggatctgcccctgcccacctcacgctgcgttccatgctggccccaggcgatgtcaggcctgctgcaggccaggactagttccacggccctgagcatgcgttagccccttcttgcctccatgcctcgagtttacctcggagtgagctgcgggagacgtctccctgcctggccggggcggctctgtcgtagcggagggcagcggtggtgcagagccggagccggagccggagccgcgccgcgccgcaccatggcgcccaccctggccactgcccatcggcgccgctggtggatggcctgcacggccgtgctggagaacctcctcttctcggcagtcctcctgggctggggctcgctgctcatcatgctcaagtcagagggcttttactcctacctgtgtaccgagccagagaatgtcaccaatggcacagtgggcggcacagcagagccggggcacgaggaggtgagctggatgaacggctggctcagctgccaggcccaggacgagatgctaaatttggccttcactgtgggctcctttctgctcagtgccatcaccctgcccctgggtatcgtcatggacaagtatggcccgaggaagctcaggctgctgggcagcgcctgcttcgcggtttcctgcttgctgattgcgtacggagcaagtaaaccaaacgctctctccgtgctcatcttcatcgccctggctctgaatggctttggtgggatgtgtatgaccttcacctcattaacactgcccaacatgttcggcgaccttcggtccacgtttattgccttgatgattgggtcctacgcctcctcggcagtcacctttccaggaatcaagctcatctatgatgctggtgtctccttcatcgtcgtcctcgtggtctgggccggctgctccgggctggtattcctcaactggcttctttaactggccccttgagcccttcccggggccggaggacttggactactcggtgaagatca

SEQ ID NO: 366620 - DNA, 1260 bp, Homo Sapiens
  misc_feature (481)..(481): n is a, c, g, or t
  misc_feature (492)..(492): n is a, c, g, or t
  misc_feature (558)..(558): n is a, c, g, or t
  misc_feature (570)..(570): n is a, c, g, or t
  misc_feature (592)..(592): n is a, c, g, or t
  misc_feature (648)..(648): n is a, c, g, or t
  misc_feature (699)..(699): n is a, c, g, or t
  misc_feature (817)..(838): n is a, c, g, or t
  misc_feature (868)..(888): n is a, c, g, or t
acagagaagagaaacatagaaaaaaagcgagcgcggcagggcaagagaaagacagggcggtggagtggggcggcgtggaataacaaagcgggcgggccaagagacaaaaatatataaaaaggggttggggagaaagtgaggcgcgggggcggtgatttatctatacatgggcgccaccgaccgcacaaattgtgggtgaggaaaatgtcgtgctacatataaatataggctgccgcgctataaagatgagcgagaggggatgcagtctgttgagtatgagtagtggtaataacacacaagtgaaaataaagtggggtggaggagagggcagcaagaaaggcgcgggaggagcaggggggagaggataacgtggcgggcaaaagtactatcgtcgagcaaaatatctgtgacgggcgcgcggcggcggtaaaagatatacaataataagagcagcggacgccgtaatgtgggcgagttatanaagataaatanaaaagagagtggggggcgtgggggaaaaaataagatgggggcgtgaagagtagtatagaaggtgtntaatacataccncggtgcggagtgagtaataacnagcgcggcgctgcgtgaataatatagccgcggcgcgcgggggtgtgggcggagaanataaggaggaggtgggcaggggataaagggcgtacaaaaaggtggaggaanggggagaggttatgagaagagacagataaaaagaggagggggtaggcgggtgggcaaatgtaaaggcgcgcgagaggagggggtaagcggcacgtgatgggcgggcgggaagataaannnnnnnnnnnnnnnnnnnnnnagaacattggcagtggggcaaacggaagannnnnnnnnnnnnnnnnnnnncgtggttgcgggagagagcagattagtaaaagccgtggtattggggaaaaacggggtaggctgtcggaggtagaggcacgggggggcagggtggaagcgaagagatcactgtggttatggcggtcagtcccacttataagggtccaaatgcctttgagaaaagttccagaaatcctcctccctccctacccaatatatgatcctatgtccttgggatgcccgtttccacacagctgaagaactacggaaggaaaatgtagtaaactagaagaaaaagacaaaggccttcctgttcccacttctctaaaaccccatagctaggaacagaaaaaaaggaaaagacttgaaatgttctagagatataaccaaaac

SEQ ID NO: 366621 - DNA, 873 bp, Homo Sapiens
  misc_feature (824)..(824): n is a, c, g, or t
  misc_feature (830)..(830): n is a, c, g, or t
ggctatggaggcggcggcggttgatggttgaccgttggctccggggtgggggtcgccgttcgagtgatctgctcagacccgaccagagggcgcgggctgctgatgcttggcttggagcccgtgggggagacctagttcggctccgccatgccggccgccgggagtaacgagccggacggcgtcctcagctatcagagaccagatgaagaagctgtggtggatcagggtgggaccagtacaattctcaacattcactatgaaaaagaagagctggaaggtcacagaactctgtatgtgagaagttcggatgccgcttggccggcagagccatcggcatcaccgcactcatggccagaagcaccggagacgagggcggggcaaaggagccagccaggggggaggaagggcctggaagccctggcccacgacacaccatctcagcgtgttcagttcattcttggcaccgaggaagatgaagagcatgtgcctcatgagctgtttacagagctggatgagatctgtatgaaagaaggagaagatgctgagtggaaggaaacagccaggtggctgaagtttgaagaagatgttgaagatgggggagaacgctggagcaagccttatgtggcaaccctttcattgcacagcctgtttgagctaaggagctgccttattaatggaacagtcctcctggatatgcatgcaaatagcatagaagaaatttcagacctgatcctggatcagcaagaactgtccagtgacctgaatgacagcatgagggttaaagtgcgggagcccttctcaaaaagcatcatcatcagaatganaagaangagaacaaccctcattccattgttcgctcctttgctgaggttg

SEQ ID NO: 366622 - DNA, 916 bp, Homo Sapiens
ttcagcgcgcccacctcgtcatccagcgcctgcacttggctccggagccgcgacgtggccgcccgcgcccgctcgccctccgctttgtgcgcgtccacggccagcgacacggcgtccacggcgttctgcagggcctgcagggaggagccgtccagctgccgccgctcgtccaggctcacctgggtctcctccagggcacgcgtggcgtccctctggccctcccggatgacgtccaggtctaaatagagcttctggcaattgcagtccttcacgtacttgatgaggtcggcatggccaccctgcaggtgctgcagcgtgaggttgagctccaggagctgccgctccacctcctccttgttctcctccatgatcagagacttctccatcaggatcacgcgcagctcacggagcgccgtgtggttcacctgcagctcctccacctgccgctccaccttgctaatctgatcgaaagtctcgtccgattcggagtacagttccttgatctcatccacgtgccgggtcagggtggccctcatgtcctccagggtgtactgcaactcctcctccctgcgggccgtggtcatgtgcagctctgagaggttcctctgcagctggcccagcctggcctgcaggctgtccggctcaggccttgccccagccccaggcgttgccaacaccagactgccattggtccctggggcctcctgagccttgtgcagcctcttcaatttggtgtccacatcggcttggagctctgagaatcgagcggtgcagggtaaaagtgctgggcgtgcaggcggtcctccacgtctggtcgcagtgacccatctctgagtgttctcctggaccttggcctcaatttggaccaagtcctggcagtcagcctgggcagggactggtctggactctggaatgg

SEQ ID NO: 366623 - DNA, 834 bp, Homo Sapiens
  misc_feature (46)..(46): n is a, c, g, or t
  misc_feature (401)..(410): n is a, c, g, or t
gctggaccggtccggaattctccggatctgtaagaagaggcttttntggcccagaaagccttacttattttacatcttccagtttgtccatcccatgagttagagttcgtcttgactctgcaagctagaatcaaagaattatgaaagtaagatcatttagatttgaccaagggcaccattaaatggtgtcaggttttaggaagcagacgggtgtataaaaagaaaatgaacaaagatttcacttattggggatcaggcataactggatgcctggattgtcctgccacccagctgccaccaataaaatcattcatcactctgcaagagggaccagatgcttccatcatcagtactccttgtttttctgttatctcctttgaggtagctaaaaatggcagccnnnnnnnnnntgttgaggcttttctcaagtatatactcatgttattttgcagaagatagggtcaacttcttcagttgagttatctgaaagtgttgggcagtgacaccatgccaaacactgttaaattcatgccattaaaaacagtggagtgttctgcaaagcccgattctctgcagctttaagactggacagtattgaaatattcacaggaatcttccaagccgtgaaagcttaatattaaacagcccttttaattgcaaaggagaaaaaaatggagacacttgtgaaaccttgcattctgagtgctgccacaaataaattaaggaattccagaatttcttcatctacttctgcagtcttaactctgaattaatgactgtatatatcaaacttcagatcttaaaaaacatcagctcgcaagaagctgaggccag

SEQ ID NO: 366624 - DNA, 205 bp, Homo Sapiens
ctcctaccccaccctaggacagacaggacccctgcacttatccagcatgcatttaatgtgcacttcctgtatgcccaggcctgggttaggccgtttcacaggtagatactggagaaccagagggtttggggatcagaaggtagtgaatttgctttctttagaccaacttcagaaattggtttgggccaggcaaaatggctcaccc

SEQ ID NO: 366625 - DNA, 671 bp, Homo Sapiens
ttagggcattagcccttcagaaacacagtatatttctgagcccaaactctgtccagaatgcagagaaggcttattgtgtcagcagcagagggacctgcgtgaatacactcaagccaccatctatgtccataaagtagtggataataaaaaggtgatgaaggattcggctccggaactgaatgtgagtagttctgaaacagaggaggacaaggaagaagctaaaccagatggagaaaaagatccagattttaatcaaatcatgcatgcattttcagttgctccttttgaccagaatttgtcaattgatggaaagattttaagtgatgactgtgccaccctaggcacccttggcgtcattcctgaatctgtcattttattgaaggctgatgaaccaattgcagattatgctgcaatggatgatgtcatgcaagtttgtatgccagaagaagggtttaaaggtactggtcttcttggacattaatctttgaatacttgctgactgctaagaaatgaccagagcgggaagaggagtccgacatgctagggcattaaagcaaaggtggatttaagaattaaaccattacatgccccttccaaaaggcagaaatccattcaaacgtgactgtcccaaatgccttatgtcaaataaagcagattgcactgatggaaaa

SEQ ID NO: 366626 - DNA, 238 bp, Homo Sapiens
attgtaacttcactccgcagtaggattcagtgccccttctaatgcctcatttctccaaaacatcaaggaaggcttacatggtatcaacgtgcatgtcggttcctggtggatgataccctggatatataggctatagatccaagagtacaatcataaattgcacatgccttcaaagtctccattccatctgtctgcccaagtgggggtcctgctgagcgacatacccacctcaacattc

SEQ ID NO: 366627 - DNA, 534 bp, Homo Sapiens
  misc_feature (457)..(466): n is a, c, g, or t
ccctctgggagctgagatcatcctggggttttgtcgcctggtctgacttgtgcactgggatcttctcgtgccaggccaggccccgcccccctccccgggactgggcagaccccctccctcatgcatctgtgtccactgaggcttccctcacctagaatggcccatccttcaggacccagctcactctcatcttctttccagggacttatcccccaaggctgtcctctgttctggtgagctcagggctcttggaacttggtctgcagtgactctggggttccctggttaggacccatgttctctaggtcccagcaccctgcacggggcagtgtttgtgacactgggcccagctattctgagagaaggactccaaccttccatcaggtgtggcccgagatgtgggtggccctgggcatggggcatggatgcattgtgactttcatgggcctcttctgcnnnnnnnnnnttaaaattatactttatgactattggtagaaagataaatatattaatacattaaaatttcaaaaaaaa

SEQ ID NO: 366628 - DNA, 511 bp, Homo Sapiens
  misc_feature (356)..(356): n is a, c, g, or t
  misc_feature (418)..(418): n is a, c, g, or t
  misc_feature (440)..(440): n is a, c, g, or t
  misc_feature (468)..(468): n is a, c, g, or t
cactgggctgggtagaagggcgccacggtcaggaacctgaggatgtcggtggtctcaggtaccagggacgcgggtggcaagttggacctctgcgtggcagaccgggcggcagtgtgactctgaacatctcccgagctcaggacggggaaccctgagtccaggaggcgcgcggggctgaggcagtccagccaggctttcccgacttgtctcccgggaaaggacatcctcgctccgccctcctgccggctccttgtgtccgtctctctgacccttcacccgcccgggccctgcacatataaacagaagcagcctcgagctcttcgggagccgactttgtgggaagcagagtgggagtnggagggggctgcccaccctcgctgttacacagctggggcccagatgggccctttcttgattncccccaggggcttgacccagtnccagaccagggaacgaagagagaggttnagagccgttaaggaagggacccccagattctttccttaattga

SEQ ID NO: 366629 - DNA, 368 bp, Homo Sapiens
  misc_feature (16)..(16): n is a, c, g, or t
  misc_feature (21)..(21): n is a, c, g, or t
tgtggggaccccaggnagggnaggaggtggtggaaacggggtgaaatccgtgggctgtgtgaggactgtccatagtgggtcccaaccccctccctctgctggagtttcctagcccttccccctccccaagactgtggcagcaggcaggagcccctgccctccctccctgtcctgtgccacacttctggggccaaacccagcccccttgagccaggccctgccagactccaagcccaccctagaaccctcctcctgtgtggagactctgttgccccactttggacacagattggcaacctgcctcaccccgccccccttcgctggggcttccatcttaatttattctcaataataaagacttcatgatg

SEQ ID NO: 366630 - DNA, 418 bp, Homo Sapiens
ggatttgagtacttgcctaattgtatttaattagaactatgctggatgctgtagacagaagaaataaaatactcaacttggtccctatcttccagcaggttagaggcctttagggaagaaaagcctgtgtgcagggaaagagaacctcaccagaaagtattcaataaaatgccaaagtgatcttacagaacagtgcctgtgacaccggaggggattgttctgtctttgtgagtgaacatacaatgatggggataactggtcctcataccatgcaggtcccatttctgatcaccccactggcaggacaattcacagttcttgagcaaactgagttagggagggtatgctaacgacagaacctatgcaagttcttagaaatattttttgtttgctgaaataaagctcaatcaacacacta

SEQ ID NO: 366631 - DNA, 1218 bp, Homo Sapiens
  misc_feature (236)..(236): n is a, c, g, or t
tggctgaagttccaggccccagaattggcggttcgtgactggaccctgccactttcactgcctgttgcctccagcctttaaggagagctcgaagagggagcttttggttttccgaatgacctggaactggcggaacataggccttggttctccaggtgatttggggatgccctccatgtccagtcaaagggccgctccggtatttgcgggattgtcctcacttgttcgcccactgnaatgccagcttctcgatgttcacccaaaccatctgacaagggtcttactcccttcgtgcaggaaagtccaggtctttgaggatcagaggcacgaagggaatcacagggggcttcattttggagatcacttctcggtagcttttgtggttcctgcaggggtccgtcaggttctcaaatttgccgaaacacagttcttgaagtttccctggcagcttctcccaggtgagtcgaaggcggctgacagcggcgttgtccagccccatgaccacggcgtagaaagacagcaggtcctggttctgcttgcagagggccgcgatcttgatgaacttcttgagcagctgcgcgcgcttgcccggggcctcgcagagcagcacttcggtggccacccagtgcgtgacctcgctgcagcgctgcagcagcagctccaagttggccgtctcccggcggccgcgctccccgtggaacacgtagtccacgaactccagctcatgcacacatcggaacagctcccagtggaaggcagttaggtggttggcaacgtcctcaggctccactcggtggatctctgtgtctccaggggagacctggatctcctcggggaggggcaccagagcctcatagctgtcccgagtacaggcaaacaggtggctgttgatgcccagtgcggtgaaaacacagtcctcagtgggctggagaaggaccttctctccagaggaggacacagctaccaggatgagggaatcctcacgccccgcgggctcctctgaatattgaagtttctccgtcacagagcccagaatgtcctgcacagatgctgaaaggcggctgcgtatggtcacataagagtggtcaggcatgtatacacggcagaagatctcatcagagccccggaaggccacccgggtctgcagacaggagtctatccggcggaagtggcggaagagtggcttcacctgcttgctgggtggctggttctcctctg

SEQ ID NO: 366632 - DNA, 437 bp, Homo Sapiens
gttcattcagagagatagggatgcctccaagagtggcattttattccttctcattggtagcctccttgttgggtatcttaatagaaattttcctgttcagcctgtgctttcctaaggagtgaggaagatagtagcagcaggacacagagagggaatgacagaggagcagtgtgtagtcccctgtttgacagggctgggacaggtgaaatttctttgagcctagtggttacttgggaagttaactaagcttgggtggttttgccagtttcttcctccccacacaggaagattgctccaaaggaaagaaggtcaagccagaacctctagagaattggaaggtgaaaaatgttgagtccagtttgtttcccaaatcagcggactgagaagttggaggcactaaagggaatttgaagaattatctctctcacacactccac

SEQ ID NO: 366633 - DNA, 285 bp, Homo Sapiens
ccacgcgtccgtgatatgatatctgtcctttaaaatatctttaaaatcaaattataatattttcagaggaactagaggacaacattatcttttaatgtaatggttccaaattaacaacatttaaacaaaataacagtatttatgactgtgcaaagtcaaatctacagaacttcattcaaaagggatgagtgaattttagtagttaggaaagattcaaaagcatgtttgtaatgagaattcttctttctcttccacattgaaggtatcacatttatgtacctctgt

SEQ ID NO: 366634 - DNA, 344 bp, Homo Sapiens
aattgcctatactggtgtctaagtctccagcccttcactcaatctgcctaatggaccttcaggggaatctgaccttccatgcatatccatttccagctcacaaacagttttgtaaaaatggactaagctcaaccacaggggaagaaggaccataaaccttcaaagccaaaaggaagagacttgggtgaaaacctgcctgtgtgacgtcatctctctgaacttcaatttccttgtctgtaaaatgggaaaagaaatgggacctaccatagggttgtcctgaggtatgaatgagacaatgcacatttaaaatccttgtatgttcaataaattatctcgttgacttg

SEQ ID NO: 366635 - DNA, 146 bp, Homo Sapiens
ccttgcctacgaggcctccctaaaaacaacgccgcgttacactttttctaccgagggttgttgtgtgacacagcagatgtgttggaagtgatggtgtgtcacttctgaggttaggtcattaaagacgcagcggcttctaaaaaaaa

SEQ ID NO: 366636 - DNA, 552 bp, Homo Sapiens
cagacggattctctctgttgcccaggctggctatcaacaaatgtcagggatggatataaaactggagagaagaattacctagtttctttcttctacttttcccccgatcctaagttagagaagaggaactgttttatgtatcttgagcactcaggaaaggagtaaaaaagagctcgtaagccaattcaattagacatgaagatgggggaagctaaggccattatgatctagccttagttctgtaatcactaaaaaccacatcctaggagctttttagctgaccaactgggggtgggctatgggggactccaggctggccttgtctaatttagaggcaaagtagcttctatacctctagtttttctcatgcagctgctaatcactggcacagagcagttcaatcagaaaccaaagaaggggattcagtttctgcaagagaaaggcctcctcaccatcccaatggacaacacagaggttgctcagtggctccgagagaaccctcggctggacaagaagatgattggagagtttgtgagtgaccgcaaaaacttg

SEQ ID NO: 366637 - DNA, 1671 bp, Homo Sapiens
  misc_feature (861)..(899): n is a, c, g, or t
  misc_feature (974)..(974): n is a, c, g, or t
  misc_feature (1079)..(1079): n is a, c, g, or t
  misc_feature (1146)..(1146): n is a, c, g, or t
  misc_feature (1622)..(1622): n is a, c, g, or t
  misc_feature (1634)..(1634): n is a, c, g, or t
taataacaatacaacaccacggtaccgcggcctgggtggcataccggcagaggggagggtctccactgtaaaggcaacagcagtaaggactggggggtcctcaggtcttgccccctgggccatttcctcccagggacctcagaggtcaggttttcagcgctgaacctgctgatccactgacctcatgcccctcatgcaactcccctcccttcctggccaccaccctccctgcccaggtcctgtcacctccccaacccaaggccctgtccggtccaggggaccacattggtagacagagctgatcaacaccaaaaattttatttggggaattaattagcaagggtacccttaagaacaatagagaatggttttgtggctttctcgtccccaaatgggagatgtagaaccacaacccagggtggacccaaggacagggaccctgtgaccgagaaaggctggaccgaatgacaacctgccgcaggccgtaacgctgcctggaggacacaggggcttgggaactcaagaaatctagaaatccaagaaggaaaaagtacacatgagatgcccgacaacccaaacggggaggcccagatctggacactgggaacaaaaaccgacgaaagaaaccatcgtaagcgtaaagacaataaagcccaactgagaactcaacaacaagataggaaaggaactcaataaagaaaatatatgaggcgcgctcccgctaccaacctccaccacacctgcggaaaataggtcatcgaatgataacactcttgtagaataatcccttgtcaagaggggtgataaatagacacaccagcgacccctccagcacgtacgttcatttcgcacgcatcaccnnnnnnnnnnnnnnnnnnnnnnnnnnnnnnnnnnnnnnntgagatatttaacggagacgtaaaccacacgttctaacaaaaatgcaggctgcaaatacctctaaccacaggagncacgaattttggtagcggaacccaaacacatcttatcatttccccatagtaacagagccacggcgacgaaacaatctatgtatctctttcccggcccctgcgcancccctcctgcccgggtacctacagactgaagggaaaagaaaaccgaactcctgcacgacgtacatanacgaaaaacccacctcctgctgccttcgccataatagaatccttcaaatttactcaaaactaaggttttttaaaaataaaaaggttaaagtgagcaggaagcccaagttctgaatgcctccacagggcgtgattcgctccatgagaaacacccataaagtacataagtatagccagcaatggtgatacccgttgcatctactcactcttttcatcccattctgtcacaaaaatttttttataataggacctatagccgctccccgagaagtctgcgtcgcgaccaaaacaagcgggggccggccccacccgtccggttaacctaatacaagattaggagggccaaaaccagtaaataataaacaaatccaagccccatctcccgcgttgtctcatatttgttgtgttggccagccaccgtcaatatgtaaggacaaagacaagaaaccacacgccaaaagacatatacaccctaanaagcactaaatnccaaccaccaagaaccacgtaaaattaaaactcaaaa

SEQ ID NO: 366638 - DNA, 645 bp, Homo Sapiens
  misc_feature (143)..(151): n is a, c, g, or t
gacactgccctggtgacaccttctcagaacattgttgggggacaggggaggcaggcgcaagtaggggatagaatctgaccctgacatgcagctatcacctggcagagagactcgtcaaagcaaattataacgaccagtactannnnnnnnnggaattgaaaacccaagaagccctaaaataagaacagtgagatcaaaggctggtttctaaaacaatgcagaaaatagaaccatgttggaattcctaaattctagctttcaaatactactgtttccaacagtgaatccttgacagagactgaatgcagatggaattttgaaacattttcagtagctacctcctctcctgaaattcctataagtggcagaggaaaatccaaatcctttaatataacatgtccatctcatgactcctgcttacacacatttgtgttgatttgcttcatttctggaggatgggaatttgcagagctggtgacatttccttcattagacaccagaaattcaccagagagagacagatctgtgccttctctttttaggatctggttattgatactttaataaatgtggtgtaaagaaaatccatggctacagtctgtatagaaaatgtgaattttttaaataagattgtgttcttaatgt

SEQ ID NO: 366639 - DNA, 472 bp, Homo Sapiens
  misc_feature (88)..(88): n is a, c, g, or t
gattatggaattcttcaccatgtaacttcgtaataggtgtccatggatagattttcaccctatccagagagtattctaaaaaaataancaaagtgaagtaaaagttaagatcccagtgtgaagtatatattcccctaagatttgatatatgtatctttataattgatgatgttgtaaaatgaatttgttgttcctttaacctttgctgtagtgtttctttttattttagttccttctatacatgtttgcagtgttaagataattgtactttgaaaacaccagctgtatatatttttcttatttatgtaacaaagtttgctgaaagatatgtatatttttgatctttgagtgtattctatttgtgtaaggactttggcttacatttgaataatgtctagattttgaaaaattacctgtataatggagaattaaaactttgtagacattttgaaataaaaatggatcaagtgcg

SEQ ID NO: 366640 - DNA, 358 bp, Homo Sapiens
gtcacccattcacttgccattgtaaagattttcctttgtctgttgttggcatagaatcttttgtacatatttatttatttgtggttatatatgtcaattggtttcctttcttagcttgatattgcctagctttgttgttttaattaactttctattagagagactgtatatattttttctaaatactttgtgaaatcatttttggtagcaatatctttgaatatgatgaataaaagtgactgtgagtgcaaatagaattagcagtaagaagctactctagctaatttgccattttacttaaatggaaaatgtttttcaaataaatacttatgttgttcatgttccaagttaaaaaaaa

SEQ ID NO: 366641 - DNA, 130 bp, Homo Sapiens
ccaaaggtccttaaaaagttttccagcaaagtaaacccttccaacggtgacaaaagttttggttaaaatttaaccaccccaggaaagcagcccccagaatacccaaaattaggcccttaactttgggcgg

SEQ ID NO: 366642 - DNA, 709 bp, Homo Sapiens
gaatgtgcccttttcgggttccctctggtgccaaactgcataggtatgggcattcagtgaattttcggcggaggctctgagactggtacctctcagtgtgttctggtcatctgtggcttagttgtagaagcaggtgtgtctcttgcctctgcttgcctcctacggcacactcagcacccggactggaaatcaccgactactgaatctcctacatgtattgctgctacttcaagctcctccacttgaaaccttatgattttcccaaggggagatgggacagtgtcatctaaatattccgaatgtttggccttctgagaaaagagcttctagtaattgaaccatgggaaacccagcttctggagggttggccgtggggctgtgtacatgtgtgtgcccaggggtgagtgtttctcaggattcctaacgattcaaattaccgttgagtatatataaagaatgagtccctgtatggaagaacaaatgtgtgcattcacccccagtcacaatggtctccattgcatttcaaaggagaggatcagactatctgaatataaacacaatctgatgttaatttattctaagaacaccatcattttgattgtcctaaagaattctgcctttgtgaataccgtgttaaatttttttaaatttgtgacaggattgtagcaaattattatttaaggaaaataaattgtgtaaacatttaaaa

SEQ ID NO: 366643 - DNA, 871 bp, Homo Sapiens
ggggtctctggtttctggccccttgtctgcaaagatggctcccaatgcttcctgcctctgtgtgcatgtccgttccgaggaatgggatttaatgacctttgatgccaacccatatgacagcgtgaaaaaaatcaaagaacatgtccggtctaagaccaaggttcctgtgcaggaccaggttcttttgctgggctccaagatcttaaagccacggagaagcctctcatcttatggcattgacaaagagaagaccatccaccttaccctgaaagtggtgaagcccattgatgaggagctgcccttgtttcttgtggagtcaagtgatgaggcaaagaggcacctcctccaagtgcgaaggtccagctcagtggcacaagtgaaagcaatgatcgagactaagacgggtataatccctgagacccagattgtgacttgcaatggaaagagactggaagatgggaagatgatggcagattacggcatcagaaaaggcaacttactcttcctggcatcttattgtattggagggtgaacaccctgggcatggggtgttggcaagggtcaaaaagcttaattctattaatccctaactcaacgaacacatcttctgatgatttcccaaaattaatgaaaatgagatgaaaagaaaaatcattttggtggggaagggtaaggatgaataaaattgcccccccttcaatgtttttttgattctaacccgcattaaataagtggcctgtgcttttaactaaaggtacttactggaaaccaattaaataaaattttttagggggaaaattagagcctttctgaatggacaacgaatctttccgtacaactttaggtccttattccgggcgcccactcctgt

SEQ ID NO: 366644 - DNA, 1253 bp, Homo Sapiens
  misc_feature (193)..(274): n is a, c, g, or t
ttggagcacacgcagccatagcaagtgcctgtgtccctgtccttcaggcccatcagtcctggggctttttctttatcaccctcagtcttaatccatccaccagagtctagaaggccagacgggccccgcatctgtgatgagaatgtaaatgtgccagtgtggagtggccacgtgtgtgtgccagtatatggcnnnnnnnnnnnnnnnnnnnnnnnnnnnnnnnnnnnnnnnnnnnnnnnnnnnnnnnnnnnnnnnnnnnnnnnnnnnnnnnnnnaataagtcggacttattaactctgagtgccttgccagcactaacattctagagtattccaggtggttgcacatttgtccagatgaagcaaggccatataccctaaacttccatcctgggggtcagctgggctcctgggagattccagatcacacatcacactctggggactcaggaaccatgccccttccccaggcccccagcaagtctcaagaacacagctgcacaggccttgacttagagtgacagccggtgtcctggaaagcccccagcagctgccccagggacatgggaagaccacgggacctctttcactacccacgatgacctccgggggtatcctgggcaaaagggacaaagagggcaaatgagatcacctcctgcagcccaccactccagcacctgtgccgaggtctgcgtcgaagacagaatggacagtgaggacagttatgtcttgtaaaagacaagaagcttcagatgggtaccccaagaaggatgtgagaggtgggcgcctttggaggtttgcccctcacccaccagctgccccatccctgaggcagcgctcccatgggggtatggttttgtcactgccccagacctagcagtgacatcctcattgtccccacacccagtgggcattggaggtgcccaggggagtcagggttgtagccaagacgcccccgcacggggagggttgggaagggggtgcaggaagctcaaaccctctgggcaccaaccccgcattgcaggttggcaccttacttccccgggatccccagagttggtccaaggagggagagtgggttctcaatacggtaccaaagatataatcacctaggtttacaaatatttttaggactcacgttaactcacatttatacagcagaaatgctattttgtatgctgttaagtttttctatctgtgtacttttttttaagggaaagattttaatattaaacctggtgcttctcaaaaaaaa

SEQ ID NO: 366645 - DNA, 1656 bp, Homo Sapiens
  misc_feature (121)..(121): n is a, c, g, or t
  misc_feature (355)..(355): n is a, c, g, or t
  misc_feature (1007)..(1088): n is a, c, g, or t
  misc_feature (1377)..(1377): n is a, c, g, or t
  misc_feature (1535)..(1550): n is a, c, g, or t
  misc_feature (1582)..(1590): n is a, c, g, or t
ctgtgacagcccccggagccccaggacgaaccagagccagagccccagcttgagctccaggtggaccggagccagagctggaacagttgccggattcggggtgccctgcgcctcggggaangagaggatagcttcctgtagggggctggcctaccctgccctgcctgaagctccccccctgccagcacccagcatctcctggcctggcctgaccgggcttcctgtcagccaggctgcccttatcagctgtccccttctggaagctttctgctcctgacgtgttgtgccccaaaccctggggctggcttaggaggcaagaaaactgcaggggccgtgaccagccctctgcctccanggaggccaactgactctgagccaggttcccccagggaactcagttttcccatatgtaagatgggaaagttaggcttgatgacccagaatctaggattctctccctggctgacaggtggggagaccgaatccctccctgggaagattcttggagttactgaggtggtaaattaacttttttctgttcagccagctacccctcaaggaatcatagctctctcctcgcacttttatccacccaggagctagggaagagaccctagcctccctggctgctggctgagctagggcctagccttgagcagtgttgcctcatccagaagaaagccagtctcctccctatgatgccagtccctgcgttccctggcccgagctggtctggggccattaggcagcctaattaatgctggaggctgagccaagtacaggacacccccagcctgcagcccttgcccaggcacttggagcacacgcagccatagcaagtgcctgtgtccctgtccttcaggcccatcagtcctggggctttttctttatcaccctcagtcttaatccatccaccagagtctagaaggccagacgggcccgcatctgtgatgagaatgtaaatgtgccagtgtggagtggccacgtgtgtgtgccagtatatggcnnnnnnnnnnnnnnnnnnnnnnnnnnnnnnnnnnnnnnnnnnnnnnnnnnnnnnnnnnnnnnnnnnnnnnnnnnnnnnnnnnaataagtcggacttattaactctgagtgccttgccagcactaacatttctagagtattccaggtggttgcacatttgtccgatgaagcaaggccatataccctaaacttccatcctgggggtcagctgggctcctgggagattccagatcaccatcacactctggggactcaggaaccatgccccttccccaggcccccgcagtctcaagaacacagctgccaggcttgacttagagtgacagcggtgtcctggaaggccccgcagctgccccagggcctggggagacncggggcctccttttctaccccgatgaactcgcgggtgtctggcgagggcaagaggccatggatcctctgtggcgcaatccgactgtgcgggctgctctgaccgatggcggggacgttttgttacacgagtccttggtcccggtgtgggggctgggtgnnnnnnnnnnnnnnnngggccggtggtgttccccccattttcctcgcnnnnnnnnnaccccccgggggacgccccgcccgcccgggcgactttcttataaattctttatttcactacgctcc

SEQ ID NO: 366646 - DNA, 1029 bp, Homo Sapiens
gggtccggaattcccgggatcggacctccttcccggcggcagctaccgagagtgcggagcgaccagcgtgcgctcggaggaaccagagaaactcagcaccccgcgggactgtccgtcgcaaaatccaacatgaaaatcctcgtggccttggcagtctttttttcttgtctccactcagctgtttgcagaagaaataggagccaatgatgatctgaattactggtccgactggtacgacagcgaccagatcaaggaggaactgccggagccctttgagcatcttctgcagagaatcgcccggagacccaagcctcagcagttctttggattaatgggcaaacgggatgctggacatggccagatctctcacaaaagacataaaacagattcctttgttggactaatgggcaaaagagctttaaattctgtggcttatgaaaggagtgcaatgcagaattatgaaagaagacgttaataaactacctaacattatttattcagcttcatttgtgtcaatgggcaatgacaggtaaattaagacatgcactatgaggaataattatttatttaataacaattgtttggggttgaaaattcaaaaagtgtttatttttcatattgtgccaatatgtattgtaaacatgtgttttaattccaatatgatgactcccttaaaatagaaataagtggttatttctcaacaaagcacagtgttaaatgaaattgtaaaacctgtcaatgatacagtccctaaagaaaaaaaatcattgctttgaagcagttgtgtcagctactgcggaaaaggaaggaaactcctgacagtcttgtgcttttcctatttgttttcatggtgaaaatgtactgagattttggtattacactgtatttgtatctctgaagcatgtttcatgttttgtgactatatagagatgtttttaaaagtttcaatgtgattctaatgtcttcatttcattgtatgatgtgttgtgatagctaacattttaaataaaagaaaaaatatcttgaaaa

SEQ ID NO: 366647 - DNA, 800 bp, Homo Sapiens
atcaggccaaatcggccgagctcgaattcgtcgagagcgggaaagagcgcgctcggacctccttcccggcggcagctaccgagagtgcggagcgaccagcgtgcgctcggaggaaccagagaaactcagcaccccgcgggactgtccgtcgcaaaatccaacatgaaaatcctcgtggccttggcagtcttttttcttgtctccactcagctgtttgcagaagaaataggagccaatgatgatctgaattactggtccgactggtacgacagcgaccagatcaaggaggaactgccggagccctttgagcatcttctgcagagaatcgcccggagacccaagcctcagcagttctttggattaatgggcaaacgggatgctgattcctcaattgaaaaacaagtggccctgttaaaggctctttatggacatggccagatctctcacaaaagacataaaacagattcctttgttggactaatgggcaaaagagctttaaattctgtggcttatgaaaggagtgcaatgcagaattatgaaagaagacgttaataaactacctaacattatttattcagcttcatttgtgtcaatgggcaatgacaggtaaattaagacatgcactatgaggaataattatttatttaataacaattgtctagggttgaaaattcaaaaagtgtgtatttttcatattgtgccaatatgtattgtaaaccatgtgttttaattccaatatgatgactcccttaaaatagaaataagtggctaatttctcaacaaagcacagcgttaatgaa

SEQ ID NO: 366648 - DNA, 897 bp, Homo Sapiens
agcgggggaccagatgttatgggcatcgacgagttaccgtctcggaaactctcaatcacgcaagcgaaaggagaggaggcggctaattaaatattgagcagaaagtcgcgtggggagaatgtcacgtgggtctggaggctcaaggaggctgggataaataccgcaaggcactgagcaggcgaaagagcgcgctcggacctccttcccggcggcagctacagagagtgcggagcgaccagcgtgcgctcggaggaaccagagaaactcagcaccccgcgggactgtccgtcgcaaaatccaacatgaaaatcctcgtggccttggcagtcttttttcttgtctccactcagctgtttgcagaagaaataggagccaatgatgatctgaattactggtccgactggtacgacagcgaccagatcaaggaggaactgccggagccctttgagcatcttctgcagagaatcgcccggagacccaagcctcaccagttctttggattaatgggcaaacgggatgctgattcctcaattgaaaaacaagtggccctgttaaaggctctttatgggacatggccagatctctcacaaaagacataaaacagattcctttgttggactaatgggcaaaagagctttaaattctgtggcttatgaaaggagtgcaatgcagaagttatgaaagaagacgttaataaactacctaacattatctattcagctttcatttgtgtcaatgggcaatggacaggtaaaattaagacatgcactatgaggaataattatttatttaataacaattggttggggttgaaaattcaaacagtgttatttttcatattgtggcattatgtactgtaaacatgtgtttaatccatatgatgactccttaaataga

SEQ ID NO: 366649 - DNA, 450 bp, Homo Sapiens
  misc_feature (47)..(47): n is a, c, g, or t
  misc_feature (57)..(57): n is a, c, g, or t
aatacaaaaactttcacattctttattcagtgggacttaatacaatnatttatattntaaattattaaagtatctggaaagggaaaatgttttcttcatttttaggatctatctagcaaaagccagatctgaaattcagatatttgtactgtttttactgtgtatagaaattagtgctttggttttaaaatgatcttttaaaaaagttaaggacatcctagagccttaatagttaagaagagttaaattatcaagcctatttgtgcatttgctttttttgaaaaaggtaagttgctgattaagtctaattggaattgataattccatagtcttagattaaaatgaggatattttctcctagattttctcatgttatgccatgcatttatatatctaaccattaatttcacactaaggatgcttcaccatataataaaaggagcaagatgg

SEQ ID NO: 366650 - DNA, 1189 bp, Homo Sapiens
  misc_feature (1011)..(1041): n is a, c, g, or t
  misc_feature (1107)..(1115): n is a, c, g, or t
ccagattcctgcagacattgcaaaccaaatgaaggttgttgaatgacccctgtccccagccacttgttttgttatcatctgctctgcagtggaatgcctgtgtgtttgagttcactctgcatctgtatatttgagtatagaaaccgagtcaagtgatcatgtgcatccagacacactgtgtcacctgagccacagagcaaatcaccttaacgatctggaatgaaactgtgaccagtgccgccctgggtggttctggagagactgccgtcttcttgtttggccataggtgctggggccccggcttcagtcactgtctcagacaggagtcccgataagcagatcaccagtcctccactgtccttcctgtcggccttgctgcatgagaagatagctgcttcctccctcttttcctacactgtaattattgttttacaattgagtgccttaataatagtttacaaatactatgtatttatgcaaaactgttaaagtctcatctgttatgattggatacttggtcttgtcagtagtggtcagcattgggttgtgagcttgtcctactccatacgtgtttatcctgctatgcagttttacattgtgtgttcacatctattcccaaggagccttgctagaaacaacactggccgttcctgcaggccaggcaggcattggcccatgctgtgtcccataggagccaatggaaagaacgtaacttgggtctgctagcccagcccgtggggtggcgcaggccaggcagcctctgcacccagagtcccagcacctgccccattcccccagtcacacaatcatactcttctttcatagagattttattaccacctagaccaccctagttttcctctctgttagtgtcctgagctcttttgcaacaaaatgtaggtacagaccaatccctgtcccttccccaatcaggagctccacaccatgagttgtttggttttccagaagctgccagtgggttcccgtgaattgcgttaagatatcgatgannnnnnnnnnnnnnnnnnnnnnnnnnnnnnnaaataatatatttaaaggcagtatcttttgtactgtgaatttgcagtagaagatgcagaatgcacnnnnnnnnnacttctgttggtgtgtattgtatatagtgtgtgtgcttcttgtgatgaaaataaactttttctttataaattca

SEQ ID NO: 366651 - DNA, 630 bp, Homo Sapiens
gggggctgtgatagccagatctggttggcttttgtgggctgacccagacatttaatcaccatctcttatgttgttgccgtaagaaatgcattccaggttgggacttgggatcctgagagcacattcgccccctgtggtggccgcttgccaccttgcaagatggaagcccagtctccttactaccaaactgtagttgtaagcagagggaggggtgagatgtttataggacattccctaagctggggagtgatttttatcactattcatgtcaactgtactttggtatagactccctatcaatttaataatatgaaaagcctaaaataaaactatgcatgctattctatgtgctattttatatcagtaaataagcttatgcttgccagttgtatacacagttatgaggtgtatagaactgactttgacagtattttttgcactgtttcctatctgtttttataaagtcttatttagatattggaccttgttgatgttctcactgcccttgtgcttgctataaaatgtttcatatgtgcctttacaaatgtgagatctttattctaacctttttttgtaaaagatatctattgatttccatatgcaataaacctttttttcagagaaaaaaaa

SEQ ID NO: 366652 - DNA, 534 bp, Homo Sapiens
tagcccttatgttctccagaaagttccaatactaacaaaaatgtgttttaccacttactatttgacttattttaaccgtagtcaaaacttaataagctccaagccaaagcaaacacattcacgtgccttctgctctacatactgtgaaatcctcttcatgtccattcccatggaccagccttacattgaatgggtacccactaagaaaagataccagtttaaactcacatagcttaagtgattatgcatcagaagtcagtaccttatattgacccagaaataagaaatattcttttatttaataattgagtcatctgaagagaaaagtgtactctggtaaattctggtatttatttataagtcaatgctaactctgatgtggcatatccaacaatatcttttcaatgaagacaatatacaccaaatgtaatccatttaaactccaactaattcaaaatgcttaaactgtttaggttaatcaaatactccaggtaacaaagctattatatgtgacatatcaggatcacaaataat

SEQ ID NO: 366653 - DNA, 498 bp, Homo Sapiens
  misc_feature (187)..(187): n is a, c, g, or t
  misc_feature (484)..(484): n is a, c, g, or t
aatctcagacctcgggactgctgttgcggtaccgtgtgtctgacacctgccagcagccctttgctatctgcgcgcaggatgggggtgactgcccagacattcccgctagataggctctgatttccggggcagcctttcagatgcggcagacatacaacacctgtactttagagttttaagggaaaanaaaatcagaagtgcctggttagatagcaaaaacttaggataacttagaaaggctagttttagcttcctttgtggctccctggtgcaaaacaattagcagttatgcaatggacctgattctagtttattctaattaagaagtgaggccgggtttgacttcgttcctgaatacaatcttgagtaactgggaaagtctgagtgaaaggatggcctcattctctttctaatcttgctggtttcaagattagaaaatggcattatttgatctgaaatgtttgagaagacacgaataaatttnatttaatcagaaaa

SEQ ID NO: 366654 - DNA, 364 bp, Homo Sapiens
aaatatggttggcgtaagttgtattttgaaattcacttattttaaaatcgaagaggattgtaatcatggaaatagaatgtttgtatctacctgcccacattttcttaaaaagatatttcatatacagataatgaagaccaagctagtggctgcactgtaggtctgctgcttatttgtatttgttgtgcttctgtttatgttgtagaagctgaaattctagcaacatgcttcaattctgttattttgatacttatgaaaatgtattaggttttactatattgtgcttttgaaagccataactcttaagaactttgtttttgcatattgtttgctaattctttactttaataaacctcaaaacctg

SEQ ID NO: 366655 - DNA, 453 bp, Homo Sapiens
tttttttgcagaaatgaaagattttattgaagaacacacacaatgtggatcagaaaacaatcaccaagcttacaactaaataaacaattaaaaaagagtaagctataccttttctgaactctaagaaagaccccaattatacaattttaaaataataataaaaacagactagcccaccctcttcctttggagactgtggaacccagtcatgtcttgggtctttaacaagcacaaccttaccttataggcatgcagtctcacaggggcaatattgctcccaagaaggcaaaaacaggttcttttgagggtaaacataattggattctttttaattttaataccacagatgtattgcttatgtattgtttatgtatatacatatagtacataaacaatatatatgtggcattaaaatgtctttgggggtgattaggaaaaaacgtctaagaaggc

SEQ ID NO: 366656 - DNA, 697 bp, Homo Sapiens
  misc_feature (362)..(370): n is a, c, g, or t
  misc_feature (488)..(488): n is a, c, g, or t
tcttcatataataatttaatatatgccagccaaacaaagtatttgtatctttattcaattaaattaaaacagacctgccaggtatattatataacattcactatatacatatgatttaggcaatgcaagataattctagatatgctgattactcaactatgtgtaaaacatgagcggtgtcagtgatgcccagcaagtgctccttttcacattgggtgcctgcatttccatggtatggttagagggatagctacgagccatgacatggactaccagtaaacttctgtgggagaaggagggaaaatgacaatctagcatagatgaacagtctcctaaatgcaaatagaatagttgacagttannnnnnnnnaaaaagttcttctgtcatgttaatgacacaaaacttctcttttttgaaggcaacaccaccacattttgtttgggtgtgtggggacaggtggggggaatgctcttaaaattggtacaantattcctaaaacaacaacaacaacaaaaaagtacctctttggtgaagcctcggtacccattcagttcaccgtaataatctgtaaacaggcctgtaggtacagtgccgggccttgatttcaacaaggtcaggtaccacagcctttcctcacagtcctttgaggtgatttttaaggaaaatattctaaagtggaggagtaaagcaagggga

SEQ ID NO: 366657 - DNA, 507 bp, Homo Sapiens
accccttcctctcctcccacctcctgaagtatatacgtccctaccaacaacttggagaaggaaataagagtcaaaaatcattttttaaataaggaagtagataccataataatccctttttgtcaggtgataaaactgagacacagagagaaaataacttatttcaacttatttcacacagataataagtggtccagctaggatttgaatccagacggcttggctccagagcctgagcacttcactggtacaccctgaaggaagggggcaaccaaggccaaggccccagagtactctacctacatttctctaacacaaaactgtgtgaggcaggtactattaccgtgcacactttttagatgaggaaacaaaatcttggagaagttgctatgggcacagggtcatctgaatacaagtgggcaagtggagtgtaatttagttattttgctatgtaggctgaggtcagaattaaaagcaaaaaattagctggaagaagacttatgccta

SEQ ID NO: 366658 - DNA, 947 bp, Homo Sapiens
  misc_feature (394)..(394): n is a, c, g, or t
  misc_feature (425)..(483): n is a, c, g, or t
gcggggagggaacagcaaaccgggaggcgcgaaacaaaggtgggggaaaacagagacgggcacagggagggggcgaaacggaggggcaaacgaagaggcgcagggggagcgggcaaacacgaaaaagaaaagcgggcaagacggcggggataacggggtggggcataacaagggggcgaaaaaaaggaggtgaagagcaggcaacgggcgaatagaagggtgtgataacgcggacatcaagaggaacggggaaggaccgagaaaagagggagctacacagcgagataagtcaacaacggcagcgacgaagagcgtaacggggcatcggaaaacacgggggagccaaacgtcggacagaaacaccgggttagccaaacagagagacagaaaatangggaggggagaaagcgtaaaagggacgcgcnnnnnnnnnnnnnnnnnnnnnnnnnnnnnnnnnnnnnnnnnnnnnnnnnnnnnnnnnnngagactcgaagagacaggcacagggaaagtaacggggaagaaaacatggtaaacgagaaaggggaaaagcgggggacagggggaagagggcagagaagggacaacggctgaaaggaaatactcaaccaaaaagtagctcagaggtgcgcagagcgagaaggaggtggagattcgggtcggataaacaagctcaagaaattcacattctattttcgaaccataagaggttaaaagaattacaattgtaattccctggcaccatgaaagcattattgtggtagtactcctaggtgagggaatggtatgttaagtctgttttggaaaagtaaaatgaatacgagttcacaatcacgaaatacagattgttaaaagtcttgtaacagaaaaatccaaagttagtatagtttttaaataagccaaaactacatggagcaagttgctgtcataaaagctgccttaaaaaa

SEQ ID NO: 366659 - DNA, 294 bp, Homo Sapiens
gaggtactggaatctaattaatatctcttaggtatcaacaaaagggaacaattggaatgagaatttaggccttagcttccatggtgatatttagttttttatacagtaataattgtgatgctatttgtcaactggatataaatacacatataattttaaaaagtcaaaagtgcttttgtttctttgtttaatgtaatttttgtgcttcacctacaggatgctgcagtaaattaaatatcagtgaagcttctgatgtataaagaatgctatgaataaaacattaagaagctgtgt

SEQ ID NO: 366660 - DNA, 550 bp, Homo Sapiens
ctgtgtggcctgggcaagtcacttaacctctctgtgcctcagtttccccatctgtaaaatggggataataatactgacctacctcacaggggtgttgtgaggctttaactaaatgttttgtaaagcgttttgagatacagaggcaaaggcgctagggaagggcaaagtattattggacttaaggaagctgaaatggtaccataaatgctgctattctgagagccattttaaactgcactgctccaaccacccccgcttctcatcacccaggacagcaggtcgagaaaatgtctttcctttcacttgcttctggggtttgtgattattcaagacaattttttccccttgctgtatctccttccctcacctcctcgacttgttccctgttctgtttatgcggaaatggcagaaatgcttgagaaatgagaatgtgtaagtggattggaagtttatagtatgaaatttcaattttactttgtactgtacatctttttactttagaatttgcaataaagggttacgtcaatcttgttttcaactctcaaaaaaa

SEQ ID NO: 366661 - DNA, 1444 bp, Homo Sapiens
  misc_feature (1410)..(1410): n is a, c, g, or t
  misc_feature (1421)..(1421): n is a, c, g, or t
ttcctgcactgggctcgatgcattatgtctggagggcgagggctgcgctacccatggcagatctaggaaagcgtgaagaagagaatgcaaatcacttgttccactgttctgactgctgtactttttcttgtccatggcctggaggagtagacatctgagtttttacccctacatgtacagatgccatttgttactttcgggatagaaaaggcaaaggtattttacaccagctgtagatttcttgctccttatatgtcactccgaacagagttgttgttaacattgagaacctatgtagctcaggtccccattctctggatgctgcctccatagtgctcaggatcagaggccaaaagagagcccatcaatccttaggctgctgatcagcaaaacctgcctacaattcatcttctacacaccagtactgagggttattccaccccggatcagcgccatcaggttctacagctggtctgatagtacttagtccagtagacctttggaacttaaaaatgacacacaatttagacatatttgtaaaagacccttaaatggtatgacttgcaatttatatttttgttgaaggacaaatctgaaatggtatgttaaaaggctggccattcagtagcaaatactatggcaggtgggcagctgactatatctcagggtagcttccttgtttctactcagaagctagttgggccacaactgtcacgacattctgcagagattcccaacctgggattccagaagatctctggacaggtcccttcagtaggcaagcgtctgagtagacagcaggctgatgaagagctgctaataattggtgggcttgctgtgccagtacacttgcggagtacctgttggtttgtcctgctgatgccccccaaccatgctaaataggtctgaggcacacattacatttggttgaatgagcccgttaatatcctaccacagatgaatacaatgaggtgacaggaaaacctaggaaccatgacttatgaagactggctgttaaagtagcatttatgaaaatggggtaagcacaaggctgataaaactaaaggatctggaagctcatggctagacttagtctgcagagaaaacccacccagttctacacaaagccatctccccacttttcaaaaataggtttttcacactagaattctggaaatgacttcatttggctttcctggcctgtatggatatgggtttacataacattggttacaatatatttattcccccttatgccttattccattaaaaagaaataattagagatgcaaaggaaatcttccaaagtggatcattacagccagagattattacaaataggatatcttaggggtaggaggaaacattactttcattggcccagagggcaaagttctaaagatttcagtncattactagcntcggcaggtttaaagatttttta

SEQ ID NO: 366662 - DNA, 820 bp, Homo Sapiens
atgaggagttacaaaatcaaagccatctgctccacccaatgaaaaaggaaccagtgatttacttgcttgggaccccctatttggaccatctcttgattcatcttcttcatcttcactaacttcatcatcatcagccaggcccacaactcctctttctgtaggcaccattgtcccacctccgaggcctgcttccagaccaaagcttacttcaggcaaactcagtgggattaatgaaatacccaggccattcagcccacctgtaacttccaacaccagcccacctcctgctgcaccattagcccgggcagaaagttcttcttctatctcatcatctgcttcattgagtgctgccaatactccaacagtaggtgtgtcacggggtcccagccctgtcagccttggaaatcaggataccttacctgtggcagttgcccttacagaatctgttaatgcctactttaaaggagcagatcccaccaagtgtattgtgaagatcactggtgatatgacaatgtcatttccaagtggaattattaaagtcttcaccagcaatccaactccagctgtgttgtgcttcagggtgaacaaatatcagcagactagagcagattcttccaaatgcacagcttgtgttcagtgatccatcacaatgtgattccaacacaaaagattttggatgaacatgcaagctgttacagtctacctcaagaagctgtcagagcaaaatccagctgcttcttattataatgtagatgtattaaagtatccggtatcatccaatggtattcagtccactcctctgaaatcttgcacatactgg

SEQ ID NO: 366663 - DNA, 776 bp, Homo Sapiens
gaggaaccggggagcagcccaggacccgaggcagggccctgggtgagggccgagactcaggctgggcagtgcccagagaacctttgtaggagaagcgcagtcattctggggactggtgggacagctgcttttcgtagaggctcatgacgtggtgcacaaactggtactgctcgcatgtctggatcatgccgcccctgtcctgacggagctggcacgtggtcttcaggatgtccaccacaccctcctgccgcagctgctggcagcagatgctggtggcaatgaagcagccggtcctcccaatccctgcactgcagtggacgatgatgggggcacagtggggcccctcctgctgggctgcctcctccacctcccgcaccaggtgcaggagtgggggggcccggtctggggtcttctggtcggcccaggatgtgaaccagtaatgcttcaggcctcgctcctcagtcccactcttgagggagatgagtcgcagccggtaatcctccgtgtgaatgactttctgcacagtgatctcaacaccgtcgtacgccacctgctcctccggccaatactcggtgcatttctcgttcatctcctcgatgttggtgatcatgacaatgatgggcgtgtgctcctgccacaccatgcgccagaagtcggcgaccgtgctgacgatgggtccctgagtggcgatgtacaccttctcctccccaccatagccccggatgtagttggcattgatgtaggaactcagagggtcgtcagggtctggtgaggat

SEQ ID NO: 366664 - DNA, 809 bp, Homo Sapiens
ggcaccgagaagaaaactggtgtctatatgcaacagatgccctatccctgttacgttgatgacatctttctgcgggtgatgagccggtcaatgcccctcttcatgacgctggcctggatttactcagtggctgtgatcatcaagggcatcgtgtatgagaaggaggcacggctgaaagagaccatgcggatcatgggcctggacaacagcatactctggtttagctggttcattagtagcctcattcctcttcttgtgagcgctggcctgctagtggtcatcctgaagttaggaaacctgctgccctacagtgatcccagcgtggtgtttgtcttcctgtccgtgtttgctgtggtgacaatcctgcagtgcttcctgattagcacactcttctccagagccaacctggcagcagcctgtgggggcatcatctacttcacgctgtacctgccctacgtcctgtgtgtggcatggcaggactacgtgggcttcacactcaagatcttcgctagcctgctgtctcctgtggcttttgggtttggctgtgagtactttgccctttttgaggagcagggcattggagtgcagtgggacaacctgtttgagagtcctgtggaaggaagatggcttcaatctcaccacttcggtctccatgatgctgtttgacaccttcctctatgggggtgatgacctggtacattgaggctgtctttccaggtacactgctttgggcatctgtttggaaaaatatgacttctagctgatgtcctttctttgtgctagaatctctgcagtgcatgggcttcctg

SEQ ID NO: 366665 - DNA, 1132 bp, Homo Sapiens
atcaccaccatcatcaccattaaggtgatcttgcgctccgagcgcttgcgctgctgccagccggccttgagggccaccatgcgcatcttagcaatgatgagcacgtagcacaggcagatagcccccacggggcagcaggaagcccatgagaaatgtgtacaacacgaagcccaccagccagcgttgagcgggctctggcatgagcatgttgcaagccaccgtgccgtcgctgttggccgcggtgcgagagaagaccacgatgggcaggatgacgagcagcgatagcacccacacgcccaggtttactaccttggccacggtgggccggcggtagcgggccgccttgatgggatgcaccacggccacgtagcggtccacgctgagcacagtcagacagtagatgctggtgaacatgttgaccgcgtccacgctgagcacgaggcggcagagcagcgcaccgaagggccagtggcgcaacaacgtggaggtgactaggaagggcacgctgagcatgagcagctcatcagcaatggccagatttaggatgtagatgttggtggccgtcttcatcttggcatagcgcaggatcacgtagatgaccatagagttcccacacagccccaccaggcacaccacggagtagatgaaagagatcaggatggcgctgccctggccctcgctcaaggtcccgttctgggacgcatttcgccctggctcctccatgccgtccgcagcgccggccccggggcccctgctgccgccgccttcgccgcagctgcccgggctggggctaggagaggaggaaggagaggagccggtgccattggggaacatcccagctgaggggggccagtggggctgccagggctggggctttctcctcgcgcacccgccgcctgcgccctccctccccacccgaccgcttgcctgcagcccacagccgcccagcgcctccgggtagagcgcaaccgctgcggggagcgcggctcctaccggcgccggcggggcagcacagcccagcggattgcctgggctctgcagtttgcagctccggggtgcccgggcacaggcgactgtggagaggagaggccaggatgtgggagcaccgcacggcacagccatttactccgct

SEQ ID NO: 366666 - DNA, 749 bp, Homo Sapiens
ggctcattgggaatatatctgtatgatcactttggtggaagaaggcgtcagatactattttattctgaatagttgttggttcaaggtacacaattctccaggtcctttaagaataaggaaagaagggtgaccttcctttccttatgacaaatgcttctgttgtctcattttctgggtgccaggaggattgagggagggaagcttgagcagtcatatagaaaactgctggactgaggccattctcgcctaccttttagacacttgtcatcctgtgtactctgctcacttgttgctgtttctgttgttgctgctgtttttgctgtggagcacttaaaccaccacctgagcaggatagtgggagaaaatatcagcagaatgtccagagtcagcctccaaggtcaggagccaaatgtgattttagaagcgaggaaaatagcgaagatgatttttaagagatgaagaaggatgaggtgctgacccctgagggtgccttctgctgcccagtcccctggacacattgaagagaggagcaagtagccctgtcctgacattgaccctgatttgacccctcttcttataaggatctcaagaatctcttcagaagcactgatgacgttgatcccagtaaggacatcacctctacccttggtaccacaaactctgtatggggttgcccagctactcttcctttcagttgcagtcccaattttaactccgtcagaaaagcagccctcccctccctcccctta

SEQ ID NO: 366667 - DNA, 1478 bp, Homo Sapiens
  misc_feature (1049)..(1049): n is a, c, g, or t
ccacctcatgctttaatataaaggggaggaaccggaatcacgatccccaccaacggcccggaattttgggatctgtgggcctggcacccacttcggaggtgagctcggccagtgtgtgtcatgtatgccaggaacataccaggacatggaaggccagctcagttgcacaccgtgccccagcagcgacgggcttggtctgcctggtgcccgcaacgtgtcggaatgtggaggccagtgttctccaggcttcttctcggccgatggcttcaagccctgccaggcctgccccgtgggcacgtaccaccctgagcccgggcgcaccggctgcttcccctgtggagggggtttgctcaccaaacacgaaggcaccacctccttccaggactgcaaggctaaagtgcactgctcccccggccaccactacaacaccaccacccaacgctgcatccgctggccccgtcggcacctaccagcccgaatttggccagaaacactgcatcacctgcccgggcaacaccagcacaaacttccatggctccacccaagcccacccacatgcaaaaatcaacaagtggcagcagaccaaacattggtgaataactcccgcttaacaatcagaagacccccccaacttactcctgggcggacccaccccagccccgtcgcctataatggccattctgggaaaaaatgcgtgcacctacccccacaagaggagggacgagaaatccttctcaatcccggggctccctctgtagggaatccttccccacggctcccgtttctcgatcatacggagacacgcctctgtttcaaacggccttccttagcgcccccttggagcgagcataacaatagtatgtgccctccttttatctcagtccaggaccccttctgtccccgtgtaccgcttatgctgttataggggaactcgctgggccgcaacgataaacccctacgctcgcgaagccagtgaggtgacccccacaatctcccatgggctcgcgcctgtataaaaacctatatctcgaaaaaacgagcatcaccantccacgacaaacggagccccgtctcgcgtgagggcgaataactaccaccagctctttgacagcacaaatggacgagtacgcccatcctctgagaaacaaaagcgccggaagaaacacccctgtcatcaccaaaaccagaagatgccgagcttttgtgccggtaaaaagccctttccgtaccttcatatttaaaaatgtataccccaataatttttgggaccccccgactgttttagccccgtcagatgtaacgctttcgacagtacgagaatcggcgggtgtaaactcgctctggacggaaggaggaaaaaacacccctcaagtgcgcgccatgtaatacagtcaagataacgccttatagcacccttacgctcggtcgtagtattacgctcctttttttgagtcgtgtggtgcccgattaataccgcc

SEQ ID NO: 366668 - DNA, 892 bp, Homo Sapiens
caccaaggcgctgatgagggcccttgaggggaaatggatgctaaagaggctggacctcagtcaccttctgctgaacagctccaccttggccttgcttactcacagactaagccagatgacctgcctgcagagcctcagactgaacaggaacagtatcggtgatgtcggttgctgccacctttctgaggctctcagggctgccaccagcctagaggagctggacttgagccacaaccagattggagacgctggtgtccagcacttagctaccatcctgcctgggctgccagagctcaggaagatagacctctcagggaatagcatcagctcagccgggggagtgcagttggcagagtctctcgttctttgcaggcgcctggaggagttgatgcttggctgcaatgccctgggggatcccacagccctggggctggctcaggagctgccccagcacctgagggtcctacacctaccattcagccatctgggcccaggtggggccctgagcctggcccaggccctggatggatccccccatttggaagagatcagcttggcggaaaacaacctggctggaggggtcctgcgtttctgtatggagctcccgctgctcagacagatagacctggtttcctgtaagattgacaaccagactgccaagctcctcacctccagcttcacgagctgccctgccctggaagtaatcttgctgtcctggaatctcctcggggatgacggcagtgccagagctgggccaggtgctgccgcagatgggccggctgacgagagtggacctggagacgactccgatcacagcttgggggcctggctcctggctgaacgactggccacgggtctagcatcccgtcaatccgcctcgggactaacccca

SEQ ID NO: 366669 - DNA, 935 bp, Homo Sapiens
cagaagccagagtccccgggcgagcctcccccaggcttagagctcttccgctggcagtggcacgaggtggaggcgccctacctggtggccctgtggatcctggtggccagtctggccaaaatcgtgtttcacctgtctcggaaagtaacatctctggtccctgagagctgcctgctgattttgctgggcctggtgctagggcggaattgttttggctgtggccaagaaagctgagtaccagctggagccaggcaccttcttcctcttcctgctgcctcctattgtgttggactcaggctatttcatgcctagcaggctgttctttgacaacttgggtgccatcctcacctatgccgtggtaggcacactctggaatgccttcacaacaggcgctgccctctggggcttgcagcaggctggacttgtagtacaaagccagctgcagtcgccacttcatctcagaggatgcgcaggagcggcaggacaaggaggtcttccagcagaacatgaagcggcggctggagtcctttaagtccaccaagcacaacatctgcttcaccaagagcaagccacgaccccgcaagactggccgcaggaaggatggtgtggcgaatgctgaggctacaaatggggaaacatcgaggcctgggctttcaggacacagctgctgtgatattaaccgtggagtctgaggaggaggaggaggagagcgacagttcaagagacagagaaggaggacgatgaggggatcatctttgtgggtcgtggcacagtgaggttctccaaagaggggcaagggtctcaggaagccttgagggtttgcccaagcccacgaatcatttcccgcttcccaactgttgcgacaaggagctccctgggaaagtgggcagagggacctggggaggaacgttcccgagaacccaagattgggctgg

SEQ ID NO: 366670 - DNA, 1037 bp, Homo Sapiens
cgacgccgccggcccgtctcgccgcgcttcccagcgaggccgccggcgcgccgagggctgtgctcgaccgcgaatcccgtgtgcagtcgccccgcgccccgcgcgacccttcgggtaaactacgaactgggagttctgaagaatgggtaaagactttcgttactatttccagcatccctggtctcgcatgattgtggcttacttggtgatcttctttaacttcttaatatttgcggaggacccagtttctcatagccaaacagaagccaatgttattgttgttggaaactgtttttcatttgttacaaataaataccctagaggagttggctggaggattttgaaggtgcttctatggctacttgccattctcacaggactaatagctggcaaatttctgttccatcagcgtttgtttggtcagttgctccgattaaaaatgtttcgagaagatcatgggtcgtggatgacaatgttcttcagcacaattctctttctcttcatattttctcacatatacaacacgattcttctaatggatgggaacatgggagcatatatcattacagactatatgggcatccgaaatgaacacgtttcatgaacattagctgcagtagggacctggatgggggactttgtcacagcttggatggtcactgatatgatgcttcaggacaaaacctatcctgactggggaaaatcagcaagagctttctggaagaaaaggaactgttacggatccactttattcttggaccagttctttattactctgacgtctgtggttggtacttgttgattaccacggactggatccgcttgggaccaggctgaattcggggatttttggcccagtggatgtaacgtttcccagaagcattccttgcgtcttatatcttgggcgtatggcaccttccttcattgtggaagccaggaattgggaataccccctattttctgcggaagaacgtggatagcataaactccccgggtgttggcaccccccctatgcgggtaaaatcccttttccaaga

SEQ ID NO: 366671 - DNA, 1309 bp, Homo Sapiens
ggtccggaattcccgggattgcgtcgggtgggcacctcagcaaccagtagccatgcgcggcttggaggagtcggggcctcggcctacagcgaccccgtgcggctgcgttaagccggctctggagacagggaatcttttaactgagccagtcggctacttggaatcttgtttctcggccaagaatggtactccaagacagccatccatttgtagctattctcgagcctgtttgaggattagaaagaggatctttaataatcctgaacattccttgatgggcctagaacagttttctcatgtttggattttgtttgtttttcacaaaaatggtcatttgagctgtaaggcaaaagtgcagcctcctaggctgaatggtgcaaagactggagttttttccacaaggagccctcatcgtcccaatgcaataggactgaccctggccaagctggaaaaggtagaaggtggagctatatacctttctggaattgacatgatacatggcacacccgtactagacatcaagccctacatagctgagtatgactcaccgcaaaatgtgatggagcctttagcagactttaatttacagaataaccaacatacaccaaacactgtgtcccagtctgacagcaagactgacagctgtgaccagcgacagttctcagggtgtgatgagccacaaccccaccatagcactaagaggaaacctaaatgtcctgaagacagaacttcagaagaaaactacctgacacacagtgacacagccagaattcagcaagcatttcctatgcacagggagatagcagtggattttggtttggaatcaagacgtgatcagagttccagcgtggcagaagaacaaattggcccatattgcccagagaagagcttttcagagaaaggtacagacaagaagctagaaagagtggcaaggagcagcagtcctgcaaggaagcagggcaagagacaacagcccatggcccctcactgccctgctggaagggctgatggagctccccgcagcatggttcctgcctgggtgacagaggctcctgtggccactttagaagtgcggtttactcctcatgccgagatggaccttgggcaagctcagttcacaagatgttggtcaggcgtcatttaaatattttcagtcagcagaggaagcaaagcgtgccattgaggctgtgctgtcagcggatcctcggtctgtgtaccgccggaagctttgccaggaccgccttttctactttactgtagacatagcgcatgtcacttgctggtttggtgatgctttgcaaggtctgag

SEQ ID NO: 366672 - DNA, 767 bp, Homo Sapiens
  misc_feature (493)..(532): n is a, c, g, or t
caagactcagccatagaagatgccgccccaccttctacttgggtagctgggctgggacgctgggacaggaccccgtcctccttcatgactcccactgctgcctctcctgggcatggctgttagctgttctgccttctgggtgagctggcactcttctccctgagaccaaagatttgacctgtcggtcttgatgtcaaggtccccaaagaccaggttaagtgacgacacctgtctgttcctgccctgttgcttccagccactgtgatgtttgaaatatgtgatagtacctggttgtgaaaaaaagacaatgaactgctagtgacattcctcaatgacctctcccaaacctcccatgatgccttacccttgctgtcatgacaaccctctggcttcctaagacccatctgcctatcgaaatatgtgcaagtcagtgagacgaagtatagagaacaggtggcccagatccaggggacccaacttctggccccttggnnnnnnnnnnnnnnnnnnnnnnnnnnnnnnnnnnnnnnnnccactcacccaccccacttcccagtctgttgggatcagaggaactttgaggtgtctgccggctaacattgtgtcattcctggagtccacagtacacgtcccctggcctcaacaggcacagctctcacaaagctcttcaagcatggaagtgggagtcgtgttgtactttcatggcactctgatgcctgctgtctcagtgttggttattatgcaaacaagtaatgtttgaatatctt

SEQ ID NO: 366673 - DNA, 1254 bp, Homo Sapiens
gtggttgttggtctttcgtgttgtcgcctgtggggtggcttgtggtgccgccgccgcggtccgtgtgtgcgcggtctcgttgccgggctccggcgcttggcggtccctggcgctgctgtttcgcggatgcacgtcgcggtacgtgtgttgttttctcttgtgggcctgtctttgtgggggtgtgtctgcttgcccgctgttgtgtctttcaggctcatgccttacattccgcttgcgttttccgcttgcccccgtcattctccctttgcatttccctgctgagtgcgttcgtttttgtagcgctctgtagtatgttgtcctgttcctgtcttcccccggttggtacataccggggcaatggacttggttgctccgttctctgtagtcctcttcgtcgcatctagtttaatgtgtccacgcaaggtccctgcgtctattccggttccgctaagcatgcgcttgtggctgcatccctgctcccgcccttcctcgctgggtgctcatgaatggctgacagtctgcgccagcctgatggctgtcagtctgatctgtattttccggggcccgtgtatgccaggcccaggggctctaggaatgcccggcaggcggcctctgccctcgaaggccagctcggccttgcaggtaggaagactggcagcgcaggtcggaaggttttgatcatggccttgagggcgaccttgcgctcccgatctgcaaacttgtccacgaggtagccagacatgcagggtgcatggcagtagagccggaaaaagcggtggtagttgcccagggcccaggctgtccttaatgccaaggcgtgggccacgcaaggatctgccttcagttctcgtgtgaggtatgccagctccgtggtgatgtctcccgagttcttggtgaagatgtagtagaggattcggtaggcagtaaactcgcccacattgccaggcaagttctcggcgtacagcgacttgagctgcgtctggcactggttaaactcttcatggtcacccttctccaaggcgatccgggcatgggtctcgtacacctccaccgtgaactcggtgcggatgccctgcaccgtcagatcctgccggatcgacttcatctgctcgcaggcaaacgcgtagtcctgcttctctttccagtggcacttgaccatgcacagcgactttttcaaaactgccacagggcgcacggtggacgggtcgggggccacaggtgaggcgcaggtagtgctaggtgatgtcagggcag

SEQ ID NO: 366674 - DNA, 1068 bp, Homo Sapiens
acctctatccacactggcagactgagctctgaggcccaatggcagtggcagggcagcatcctggcctccactcactagatgccaagagcatccccttgcttgtgacaagcgaaaacctctcttgacattgcccagcgtcgcctgggcacctcaatcaccagacagaaccatgcgtctaaacatgagtcaagcaactcatccccacccacagcaagccaggcgcaatgtctagtgaacgaaggacactgcaggggcatggcctgaccaggggcctctggcaccgcgcccagtgtggcctctaacacaggtgtctcctctaagcgtttctggtgtctctcaaaggtagctgagtgggactgggccttgtcctggtagaccagaggctgtctagatggtctctatggtgggagcacagcgacaagctgagaaagcagagacctcagggttctgaggaagcccagggcaaggagtgaactagggggtccaggcaggagagaacaggaggaagagacacacagatggggtggagaagaggccccagaggcagtgagctgggaacagtggggagagggagaggagtgacccggaacacagaggtgaccaacaaggagagcaagaggaactggagaggggagggctgaatggagaaagatgatggggaagcaaggaccaggacaagggttgggggctgggggaggcctgcggccaggagctggtctgaggggcggtgcgaggcggaaggatgggaagagcaaaggcagaagggagcttggcaccacatacgttttgatcatggccttgagggcgaccttgcgctcccgatctgcaaacttgtccacgaggtagccagacatgcagggtgcatggcagtagagccggaaaaagcggtggtagttgcccagggcccaggctgtccttaatgccaaggcgtgggccacgcaaggatctgccttcagttctcgtgtgaggtatgccagctccgtggtgatgtctcccgagttcttggagaagatgtagtaaaggattcggtaggcagtaaactcgcccacattgccaggcaagttctcg

SEQ ID NO: 366675 - DNA, 749 bp, Homo Sapiens
ttctcgctctggaggtcgtggaagggaatcttgccaatgtgctgagccaccgaggacacattaaccacccgtgcaggggcagacacctttagctgctccaggagcaggtaggtgaggaggaagtggcccaggtggttgactcccaggtgggtttcaaagccatcagctgtcttggaatatggacacatcattactcccgcattgttgatcagaatatggagctgcttttcctctgccagaaagccctcagcaaaggctcggatagatttggtgtcggataggtccaatttccgcaccagcacctgggagttctttgtatccactcggatttcactggcagcagactcccccttcagtacatctctgcaggcaatatagactcgggctcctcggctagcgagctctctggccgtctccttgccaatgcccgtgttggcgccagtgatcaccactaccttgccaggaagctgcacatttgttctacacactccaccagcaaagaacttcctgatggatggagctaccatatacaggaacgagaagaaggaggtgagcagtcccaaggtgaccagcatcgttccaacttctgtagctgctgttgcttttgctgctgctccagcttcaaccccagctctggctcaggttcctggtctggctccagctcttggctgcttctgctgcttctctgctcctctccgtcctgggtgctgagcagcagcctgactctgagcagagcccagaatctattt

SEQ ID NO: 366676 - DNA, 900 bp, Homo Sapiens
gagcggactcttcgtttcagccctggcgcggtcctgtggtgaactccttgtctctatggcgactggacgcggtcggatcttgcagcagcactggctcggcctccagacgctgcgcgggcccagcaggggcggtggcgcggcccgggggcgcgccagggcctttgggtgcagaaaggggccagggtcaagctttctgcaggctctgctgccctgaggtgccatgccggaggtggacagcactgggagagctctttctcctgctgttctgggttcctggatggaatgccttcagaaatcttgctgaagatattttcctacttggatgctgtgagccttctgtgtactggatgtgtgagcaggcgcttttatcatctagccaatgacaattttatttggatcggaatctactcaactgctttttcacctgcaagatcaaattggaaatttaattcagtagagaagatagctatgtctatgagctttctgtcagttcaggataaagaagctggttattggaagaaagaatatatcacaaaacaaatagcatctgtaaaagccgcactagctgacattctcaaacctgtcaacccttacacaggccttccagttaagaccaaagaggccctcagaatatttggtttaggttgggcaattatactgaaagaaaaaggtggaaaagaatatatcatggagcatgttgatctttccataaatgacacatcagttactgttatatggtatggcaaaaaatggccatgcctagcatcattgtcaaccttaagatttatgttggcatgacaccagttttaccgactgcgtataaaatccaaccaaaaataaactccgatggcatccttaattgcaaagtacacatctgaggtcattgacctatttaccata

SEQ ID NO: 366677 - DNA, 985 bp, Homo Sapiens
ggaggtgcgaatgactctgctctctgtcctgtctcctcatctgcaaaattaggaagcctgtcttgattatctccaggaacctcccacctcttcattccagcctctgacaaagctctgcacattaggccaggagaagcccccgagccaagtctcttttctcattactcttccaacaagtgcttggagctccaagaaggccccctttgcactatgagcaaccaggtgctctgctgtgtggtcctttgtttcctgggagcaaacaccgttggatggtggaatcactcagtccccaaagtacctgttcagaaaggaaggacagaatgtgaccctgagttgtgaacagaatttgaaccacgatgccatgtactggtaccgacaggacccagggcaagggctgagattgatctactactcacagatagtaaatgactttcagaaaggagatatagctgaagggtacagcgtctactcgggagaagaaggaatcctttacctctcactgtgacatcggcccaaaagaacccgacagctttctatctctgtgccagtagtccattataccgggacagggatgaaacaactgcacacgcgcagctggaacccagctctcatgtcctaggaggacctgaccaaggatgtatcccaaccgaggtcgcatagcgatcagagccatcagaagcagagatctcacacaccaaaaaggccaccacaggatggtaacctgcgccaacaggcaatcctcacactgaaacaacggtgaggagcctgaacaccaggagtagggatgaacatgcgaaaaaaggacggcatgacacaatgcagggcgaaagcgaccgcgaaccccagacaaacccttcacaaagtgtaaccagtcctctgcacacatcaacaggcacttcccacaactaccctggcccatcaaactagccccgcccactccagcgctacaacagcaacacctatcactctcccaacaaaccaccgc

SEQ ID NO: 366678 - DNA, 1047 bp, Homo Sapiens
cttggatttgaaagtggagcagactgcaacctgggattctgggctgtcagggagatacgtgaagcttatgaatgggaatcttaaaagttattcacaagagtgtggactatttagaaatcagacggactggggatgaattgatgggtttggagtaatttgtacaatgtgctagagtgtctgtttctgcattaaggggtgtttctgtgggaatctacatgttcttgccccttggggtcaataaaagtgatggaaaagggaggggctcgcaggacagggggataagaatctagtaagtaactgcagtaataatcacacacctgttaaaacttgttactacatgtttgcatcagtgttcagtgtttacatcaggaagagaaatccctctcgtcttccaaaaaaggtcttaatgttctacctctacttacaataagttacacatgttagttgatttaaataattgtaaaacattgttaaaatttgttcccttgtttttgttcattttttaaagagattaagctataagcaaacacacatacgaacatgttcatcatgtcaattcaggttgcgttttaagaaagtcttccgtgctggtaccctgttttgttcaatttttttctgcataaactaaattggtatctgaaaggcttcatagaaaatagaaactttcaacttttttttcctacaaagaaaaacaaatagtatccaaaatattaagcattaattgtttgccaattttttcttaaatattttacaaacataggaaggtggttttcataatgttcataacaaagaattgcatttctgctcttagcactgactacgtcaatgacatcttttgtccttgtcccaagagggtcagtttgtgtagccaccatcagagctataggaggacgtgggaccaagtaagatgctggctccttgcagacccaagggtgtccatcatgttcatgtgggggcaccactacacccccaaaagagctcctagtgctttcttcattattggtccatcagagtaagtagttttgtgctataagaaagcagttcttc

SEQ ID NO: 366679 - DNA, 1165 bp, Homo Sapiens
ggtgaaaggtggtttccctcccaaaggtccccttgttggggaacccccctgggaactccccaagaaaaaaatttttggcccccccctttaaaggcaaattttaagctttgctgttacccgttttgccagggcatcccatccatgggttttcattccccgggaactttcaatggggggttacggggcactgcaaaccctgggaggaatgtgtaccagtggctgtcccaccagcaagcctggggccactggggaaccgcacacgttgggcggccactgtgggcctcaggggccagggtgcaggcgcagggtggtgggctgtgatgaggccccagcgtccccttgggagcccacgaagagcccccgtgaggttgtagcccggctgcactcttcctacgtccccagggacacacaaggtgagtaccaggctgtgtgatgagggatttctggccagaagccgaagcggaaatgccggcctcggcccgccgtgtgcagcagccgcccgtcgggcagcaccacctccaggttgagcacgttgtcccgcatggtgccgtagcggaccgcgttggtccccgacgccccggtggccgccatgccacagagagaggcgtccgcgcctgggtccacgggaaaccagaggccgctgtcccgcaggtgggcgttgagggctttgcgggtgacacctggctccaccaccacagagaagtcctcctggttcagctccaggattcggtccatatgcgtcaggttaacgcagacgccgccctgcacagcacagacgccaccctcaagcccggtgccggtgccgaatgggatgatgggcacaccttggcgatagcacagggctgccagccggctgacctgctccacgttctggggccacaccacagcatcaggaggttcgcacctgtgcaccgactcatcgcgcccgtgctgctctcggaccaccgcggcagtggacacgtgggagccgcccaccacggccttcagagcctctacgaagtccctgcagagctctccctttgccttctgggagcagtagcccctccaggggaacagctcccaggttgcagacctgagcagtcgggccatagccaggcactggccagagggtgtgagcactgggtggcagggtgaccagtcagctactgtggcagatcccgggaat

SEQ ID NO: 366680 - DNA, 753 bp, Homo Sapiens
cagcggggcacgtgagcgatggagaccatctggatctaccagttccgcctcatcgtgatcggggactccaccgtgggcaagtcctgcctcctgcaccgcttcacccagggccgcttccccgggctgcgctcccccgcctgcgaccccaccgtcggcgtggacttcttctcccgcctgctggagatcgagccgggcaagaggatcaagctacagctctgggacacggcgggacaggagcggttcagatcaataacccgatcttattaccgcaactcagttggtggatttttagtatttgacattactaaccgacgatcttttgaacatgtgaaagattggctagaagaagcaaaaatgtatgtacagccatttcggattgtatttctgctagtgggacataaatgtgatttagcttcacaacgtcaagttacaagggaagaagctgaaaaactgtcagcagactgtggaatgaagtatatagaaacctcagcaaaggatgctacaaatgttgaagaatccttcacaatcttgacgagagacatatatgaacttattaaaaagggagaaatttgtattcaggatggctgggaaggggttaaaagtggttttgttccaaatactgtgcattcttctgaggaagcagtaaagcccaggaaagaatgcttctgctgacttcaaacatgctgaagaactaacaggaacagattgggtgtcagttcaggataaataccaacattaacagcagaatgatga

SEQ ID NO: 366681 - DNA, 841 bp, Homo Sapiens
cggaggcgaaagcggcccggggatcctcccgccgcctgcgcggccatcgcggtcatgggcgccagccgcgcgcagtgcccccgggtccaagtcggggtcgggagccacgcggcggccaagaggtggctgggaaagttgcggcggaagcgccggtggcggcgggcccgggaggcgggctccagagatccgctgccctccgcgccactcccggacccgccggcgcccgccgagtcccctaaggagctggacctgggcgcacagcgggagcgctgggagacgttcaggaaactgtggggcctcagctgcgagggcgccgccaaggtcctgctggacaccttcgagtacccgggcctcgtgcatcacaccgggggctgccactgcggcgcggtccgctttgcggtcttgggcccctgcagatctgcgcgtcgtggattgcagctgcaggctgtgcaggaagaagcagcaccgccacttcctcgtcccggcctcgcgcttcacgctgctccagggcgcagaaagcatcgtcacctatcggtccaacacgcacccggcgctgcacagcttctgcagcaggtgcggggtgcagagtttccacgcagctgtctctgacccccgcgtgtacggcgtcgccccgcactgcctggacgagggcaccgtgcgcagcgtgggtcatcgaggaggtcggcggtggcgacccgggggacggaggccgccaaggaggcacaaggccatccacaagacgtcctcccagtcagcccctgccttgtccccgcgaacaggagccagtgattggggccgcaagcccggctttgaaaccgggccggctggccctgcggggagc

SEQ ID NO: 366682 - DNA, 1002 bp, Homo Sapiens
  misc_feature (893)..(893): n is a, c, g, or t
ggtccggaattctcgggatccgtcatggggccttggagtcgagtcagggttgccaaatgccagatgctggtcacctgcttctttatcttgctgctgggcctctctgtggccaccatggtgactcttacctacttcggggcccactttgctgtcatccgccgagcgtccctggagaagaacccgtaccaggctgtgcaccaatgggccttctctgcggggttgagcctggtgggcctcctgactctgggagccgtgctgagcgctgcagccaccgtgagggaggcccagggcctcatggcagggggcttcctgtgcttctccctggcgttctgcgcacaggtgcaggtggtgttctggagactccacagccccacccaggtggaggacgccatgctggacacctacgacctggtatatgagcaggcgatgaaaggtacgtcccacgtccggcggcaggagctggcggccatccaggacgtgtttctgtgctgtggaagaagtctcctttcagccgtctggggagcacagaggctgacctgtgtcagggagaggaggcggcgagagaggactgccttcagggcatccggagcttcctgaggacacaccagcaggtcgcctccagcctgaccagcatcggcctggccctcacggtaccctctcgcctccctcactgccccttcccacctcctgcccctcagcctgcccagcccccgactcagatggaagggtgacccgggacaggatctctggtcttgagcctcactggctgccaacctcagggagctgctctggtgtgacagggcctgcctcctacagctgggccgcccccctacactgcagagtcctgatgctttcctggggggaggggcgcccgcaccctggggcaatggggncagccgccggtgtcttccctcccagtggtccgccttggctctcagctcccttcctgggggttgcccatccccctgggggttgcaacttgggacccgcaggggcaaatac

SEQ ID NO: 366683 - DNA, 500 bp, Homo Sapiens
agggggcctcctccgccccagcacctgtcccccggcgccgccacacctggccccaggatggcaaaaatggtctcctcttccgcggagaaagcgtcctccgcggcgggcccggcgccctgcgtggagtgcggcacgcgagcgagcttctccttggtgcggcgcttgaagtcgttccagcgcttctgcacctcctggcccgtgcgcttccagctggtgataccgttgatcttggcggcgatgccgtcccacacgcgccgccgctctgccacgctcacccgacggctctgcgcgccgtagagctgcgggtagtgggcgcgcacctcgcggatcaggatctggttctcttcgaatgagaagcgcggcttgcgcaaccgggtggtttcctccgcttcgcccgccgccgccgaggccatggcgccccccgacgccgccgtcctgccgtctggcgcatggggggcgccggcgcggctccgccgcagccgccggtgggtcagggctcg

SEQ ID NO: 366684 - DNA, 930 bp, Homo Sapiens
  misc_feature (79)..(113): n is a, c, g, or t
cgtgagagagaggtggagcccgtagtgcctgcttctctcgcgcgtagggttcgccacgagattactacacactactctnnnnnnnnnnnnnnnnnnnnnnnnnnnnnnnnnnnccagtccacaggagcacaagggtgatctaaggatccttcaacttgaccccaggggaaaactccctccaccacagcatgtgttagtgtgtagagggatgtggtagatcctggtggagtgaggatcggggttagttcctatggccctgaccaatagcctatactaaagatcaaagtcctccataagagttttgggctacagatagtgggagaaaaacagagagaagagatgggaagtcaatgcccaaccctgtcccatcataattgggttcagacccctcacatcaggaaatggcctcctacacagagagagaaatcttggactgcttaacctcctataactcacccctttccacacttaactctcttctcccccaaggcaaagctcctgtcctatttttcctgatctcactccaccatcagatgaaaatgtggagaggccagccagggaaagcactggggggaccaggcctcagactttcccaggaattagggggttagatgtggaaataggaactctgagcaccacttctggtggtgaagtgccatgaggccatgagcctgtgtcccgaggtggggtagggtcggggggaagcagccctgtatctaggatcatttgggagaggagctgggggtagggcattgtggttgaagccagataacattcccaaggtcacacaattcgaaagcagtcaattctagagttgggatagttcagatgggctgagcaaggctcaaaggcagtgccttcgaggacttgctctcaccccagctggccaggaggagatgttcaaaaagcctcatgtaagttgtgcacatg

SEQ ID NO: 366685 - DNA, 995 bp, Homo Sapiens
caaacagctgctaaaaagagaatgctgcgctgcgggccagcccacgtgaccgggaggaaggctctcccgcccatgacgggatgggaaaactatgcctggggccgacgctctgcccggctgctgccgctgaggaaagccgggacgcggagccccgccgagagcttctttgctccggacgcccctggacgtggcgggcagccgcgagggtaaccaccatgatcccctgggtgctcctggcctgtgccctcccctgtgctgctgacccactgcttggcgcctttgctcgcagggccctcaggaatgatgggacgaatgggctttcctggcaaagacgggccaagatggacacgacgacgggaagcatggcacaccaggcaagaaggggcccaagggcaagaacgggggagccaggcctcccaggcccctgcagctgtggcagtggccataccaagtcagctttgctcggtggcagtgaccaagagctacccacgggagcggctgcccatcaagtttgacaagattctgatgaacgagggtggccactacaatgcttccagcggcaagttcgtctgcggcgtgcctgggatctactacttcacctacgacatcacgctggccaacaagcacctggccatcggcctggtgcacaaacggccagtaccgcatccggacctttgattgccaacaccggcaaccacgatgtggcctcaggctccaccatcctggctctcaagcagggtgacgaagttctggcttgcagatcttctactcaggagcagaaacgggctcttctatgaccctttactggacagacagcctctttacgggcttcctaatctatgccgaccaggattgaccccaacgaggtatagacatgccacggcggtcctccaggcagggaacaagcttctggacttgggcttacagagcaagaccccacaactgtaggctgggggtggggggtcgagtgagataactacgctggaggctcactt

SEQ ID NO: 366686 - DNA, 963 bp, Homo Sapiens
aattcccgggatatcgatgccccgcccccgccccacagccaacctcccgggcaccgttgcccgcccggggcccgctaccggcccaggccccgcctcgcgagtcctcctccccgggtgcctgcccgcagcccgctcggcccagagggtgggcgcggggctgcctctaccggctggcggctgtaactcagcgaccttggcccgaaggctctagcaaggacccaccgaccccagccgcggcggcggcggcgcggactttgcccggtgtgtggggcggagcggactgcgtgtccgcggacgggcagcgaagatgttagccttcgctgccaggaccgtggtgaagcctctgggcttcctgaagcccttctccttgatgaaggcttccagccgcttcaaggcacaccaggatgcactgccacggctgcccgtgccccctctccagcagtccctggaccactacctgaaggcgctgcagcccatcgtgagtgaggaggagtgggcccacaccaagcagctggtggatgagtttcaggcctcaggaggtgtaggggagcgcctgcagaaggggctggagcgtcgggccaggaagacggagaactggctgtctgagtggtggctcaagaccgcctacctccagtaccgccagcctgtggtcatctactcgagcccaggcgtgatgctacccaagcaggacttcgtggacctgcagggtcagctccgatttgctgccaaactcattgagggtgtgttggaatttcaaggtccatgattgacaacgagaaccctgcccgtggagtaactgaaggcgaaagccactgtggcatgaaccaagtagtatcagatcttgtactcctgccgaagtgccgggacccaaggcaggacacaggtcagccaactcaggaaggaacaagaagcttccaaggcacattacggggtaacaagtacaggtaaaaactgatgtgtacc

SEQ ID NO: 366687 - DNA, 868 bp, Homo Sapiens
cacagcactccgggcaccgttgccgcccggggcccgctacggcccaggcccgctcgcgagtctcctccccgggtgcctgcccgcagcccgctcggccagagggtgggcgccggggctgcctctaccggctggcggctgtaactcagcgaccttggcccgaaggctctagcaaggacccaccgaccccagccgcggcggcggcggcgcggactttgcccggtgtgtggggcggagcggactgcgtgtccgcggacgggcagcgaagatgttagccttcgctgccaggaccgtggaccgatcccagggctgtggtgtaacctcagcggccaggcagtctctgtcctccagccaagttttccctcatcaaaacgatcttcgcgagattctgacaggtgaagcctctgggcttcctgaagcccttctccttgatgaaggcttccagccgcttcaaggcacaccaggatgcactgacacggctgcccgtgccccctctccagcagtccctggaccacttacctgaaggcgctgcagcccatcgtgagtgaggaggagtgggcccacaccaagcagctggtggatgagtttcaggcctcaggaggtgtaagggagcgcctgcagaaggggctggagcgtcgggccaggaagacggagaactggctgtctgagttgggggctcaagaacggctacctccagtaccgcagcctgtggtcatctactcgagcccaggcgtgatgctacccaagcaggacttcgtggacctgcaggggtcagcctccgatttgctggcaaactcattgaggggtgtgtaggatttcacggttcactgattggacaacggagaccctgccccgtggagtaactgggggg

SEQ ID NO: 366688 - DNA, 1110 bp, Homo Sapiens
ccgttgcccgcccggggcccgctaccggcccaggccccgcctcgcgagtcctcctccccgggtgcctgcccgcagcccgctcggcccagagggtgggcgcggggctgcctctaccggctggcggctgtaactcagcgaccttggcccgaaggctctagcaaggacccaccgaccccagccgcggcggcggcggcgcggactttgcccggtgtgtggggcggagcggactgcgtgtccgcggacgggcagcgaagatgttagccttcgctgccaggaccgtggaccgatcccagggctgtggtgtaacctcagcggccaggcagtctctgtcctccagccaagttttccctcatcaaaacgatcttcgcagattctgacaggtgaagcctctgggcttcctgaagcccttctccttgatgaaggcttccagccgcttcaaggcacaccaggatgcactgccacggctgcccgtgccccctctccagcagtccctggaccactacctgaaggcgctgcagcccatcgtgagtgaggaggagtgggcccacaccaagcagctggtggatgagtttcaggcctcaggaggtgtaggggagcgcctgcagaaggggctggagcgtcgggccaggaagacggagaactggctgtctgagtggtggctcaagaccgcctacctccagtaccgccagcctgtggtcatctactcgagcccaggcgtgatgctacccaagcaggacttcgtggacctgcagggtcagctccgatttgctgccaaactcattgagggtgtgttggatttcaaggtcatgattgacaaagagaccctgcccgggggagtacctggggggggaagccactggtgcattgaacccgtactatccgaatcttgtccctcctgccgaatgcgcgggcccccaggcaggtacaccggtcagccaccttcatgcaagaaccaagaaagccttcccaagggcaattcaaccggggggtacacccacttcccaggtttttttggagcttgggatggggtacccaccatgggacggggaaaacccccttcattgggggatatcagatctttttgtggcgcacttggcgaaaaatatatct

SEQ ID NO: 366689 - DNA, 1160 bp, Homo Sapiens
  misc_feature (1062)..(1085): n is a, c, g, or t
gctggtaccggggtctcggaattcccgggatcccacagccaacctcccgggcaccgttgcccgcccggggcccgctaccggcccaggccccgcctcgcgagtcctcctccccgggtgcctgcccgcagcccgctcggcccagagggtgggcgcggggctgcctctaccggctggcggctgtaactcagcgaccttggcccgaaggctctagcaaggacccaccgaccccagccgcggcggcgcggactttgcccggtgtgtggggcggagcggactgcgtgtccgcggacgggcagcgaagatgttagccttcgctgccaggaccgtggtgaagcctctgggcttcctgaagcccttctccttgatgaaggcttccagccgcttcaaggcacaccaggatgcactgccacggctgcccgtgccccctctccagcagtccctggaccactacctgaaggcgctgcagcccatcgtgagtgaggaggagtgggcccacaccaagcagctggtggatgagtttcaggcctcaggaggtgtaggggagcgcctgcagaaggggctggagcgtcgggccaggaagacggagaactggctgtctgagtggtggctcaagaccgcctacctccagtaccgccagcctgtggtcatctactcgagcccaggcgtgatgctacccaagcaggacttcgtggacctgcagggtcagctccgatttgctgccaaactcattgagggtgtgttggatttcaaaggtcatgatttgacaacgagacccgcccgtggagtacctggggggggcaacgccactgggcattgacccaggtactatcagatcttggccctcctgccgaatgccgggcccccaagcagggacccagttcagcaactttagcaagaaccaaaaaagcctcccacggaacatcaccgggggtaaccacaaacccggtttttttcaacttggattgggacccacgggggaccgggaacccccctctatgggggaaaaagaaactttgggggcccccggggaaaaagaccggggaactatttcccctaaagaannnnnnnnnnnnnnnnnnnnnnnnaattcgtttacctctcaaaccggcggaagttttgggggggccaagggcaaaacaaacgccccccctacagagaaa

SEQ ID NO: 366690 - DNA, 1254 bp, Homo Sapiens
cccgatgcgtcagtgaggcggctcggccatagcgtgcggcgcgggatggatagtgtgcgggatctcggggacgagaggagaggcagcggtggggagtgagaggacagaggatgttggagacatgtatagagcgaagaagatagatagcggagtaggtactaaggacgtattgagcagcacgagccgcgctccagcgatgctaggacgaggggcccggccgcggtgtgtccgcgcgttcgctgctgcctacgagggggcgcgtggaagggcggcgggtacccgtggtggaggagactggggccgaatggtgcgggcggcagtcggagggcggtgggcatggggtgcgagggactgggtttctgtggctttgcggagggcgttggtgttggagccggtaatggggtgttgcgggactgggcgtgaacgggggctcgcccgcgcagatgtgatgcccatgctggccggggccgcagccgggctccgcgcggcgccggcaggctgcccgcccgtcccggggcatgtcggatcccagcgacacggcaatactattctcaacgactcgcgttacgtcgccaccccccctctctcccaggcatgacacctttgaggcggccaacgggggccccacgacatctcgccacattctccacagctctggcgctccgccgcgtcctgcagcgggctcctggctttacgtcgcgtactcgggtgcgggaatcggcagccctggccagtgccagccccagcatggggtctgtgggcaggggcccccccagatcacttcccagagaccccttgacagccaggccccagagcccgatggccagggccagcagccccagcagggagaaggggaagttggagaggaagatcagatacttgacgcagctgctccctggggagagggaaggggctggtcctttcttgggagtgccactcaaggcctggtgcttggtctccgggggacagcagctgcagccccaggcctccgcctggtcctccctgggcactggacctaggcagcctgaggtgggtggcctgtgcacagagaggggcttctggcctgcagtttcctgggacagtaaggggctcctctccccctcctccatccttgacgctggaacagaaagcccccagaacaggcgccgggagaggttcgctggctcctctgtggctgggctgctgatcccggaaattccggaccggtaccagcatgggaggagggtaggagtggagtagggaggaggggagacg

SEQ ID NO: 366691 - DNA, 1028 bp, Homo Sapiens
  misc_feature (1009)..(1009): n is a, c, g, or t
gataaatttcagtgtaatggatggtggcgtgatcaaatgaaaagtatcctgtagctatgacctcgcatgggaccttggtgttgcattaaaaatggatttttgcagatcacatatctgagagggtacttgtgtcaggaaggatgagaggatagggagcctgtttttcatcagatccatgtgccacgcaggcttccttgggttctagtggattcgttagggatctggggctgacgcagctatcccactagagcaggccactctctgacttccaggtcgccctttctacttctgtatctggcattgattcagtttatccctaattagcgtttgcgttttccatgcaaatttcctgatgcatcctcactgtcttcaactgttgcatagccaggtgggtggcatgcgatggtttagggtttctgagttaagccgttttggggcaggcttctggatgcccatgtttccatggagaccccagggggaaagatgccttcctcccgtctgcattcccagaaaaggactcagaagtccaggctgcttctggggcacagactttctgtacttggccaccagaagtgccccttaggccacctaaggaaggattctgtgaaactcaatgtctaaacccctgagaaaggcattcagaaatgatttcaggagggggcaaccccaggagtccagcctcccctggcagcctggaaatactgcagtaacaaaaagagctggtttctggtgatctgaatgcattgtgtttgggggtgacaccgctggtggaaggttgagggcctgtggtctgaaaagacatctgaagaatgtgttaggttttcaacatttctttgaacaggctgcgtgcatcttaatgctgtcaaccagcaactggagccccttttttgagaggcccgaaccagtaaagctgcttgacttcaggagtatggggaagctgtgatttctggaagcttcccggaatctatttaggtgcatgaataatcttgcaaatcacttagaggcactntcccatgtggtccataact

SEQ ID NO: 366692 - DNA, 1005 bp, Homo Sapiens
ctggaccggtccggaattcccgggatgcgggagcgcagttagagccgatctcccgcgccccgaggttgctcctctccgaggtctcccgcggcccaagttctccgcgccccgaggtctccgcgccccgaggtctccgcggcccgaggtctccgcccgcaccatgcggctgggcagtcctggactgctcttcctgctcttcagcagccttcgagctgatactcaggagaaggaagtcagagcgatggtaggcagcgacgtggagctcagctgcgcttgccctgaaggaagccgttttgatttaaatgatgtttacgtatattggcaaaccagtgagtcgaaaaccgtggtgacctaccacatcccacagaacagctccttggaaaacgtggacagccgctaccggaaccgagccctgatgtcaccggccggcatgctgcggggcgacttctccctgcgcttgttcaacgtcaccccccaggacgagcagaagtttcactgcctggtgttgagccaatccctgggattccaggaggttttgagcgttgaggttacactgcatgtggcagcaaacttcagcgtgcccgtcgtcagcgccccccacagcccctcccaggatgagctcaccttcacgtgtacatccataaacggctaccccaggcccaacgtgtactggatcaataagacggacaacagcctgctggaccaggctctgcagaatgacaccgtcttcttgaacatgcggggcttgtatgacgtggtcagcgtgctgaggatcgcacggacccccagcgtgaacattggctgctgcatagagaacgtgcttctgcagcagaaactgactgtcggcagccagaacaggaaatgacatcggagagagagacaagatcacagaagaatccagtcagtaccgggcgaagaaaaacgcggccacggggaagcatccctggcctgtcctgtggcctggctggggggtcctgggcgggtggccctaaggcctggggtggg

SEQ ID NO: 366693 - DNA, 1402 bp, Homo Sapiens
gcaggatgatgagatgaacattttcatcaacctcaccaaggatgagtttgtagaactccgagccctggtcattgagatggtgttggccacagacatgtcctgccatttccagcaagtgaagaccatgaagacagccttgcaacagctggagaggattgacaagcccaaggccctgtctctactgctccatgctgctgacatcagccacccaaccaagcagtggttggtccacagccgttggaccaaggccctcatggaggaattcttccgtcagggtgacaaggaggcagagttgggcctgcccttttctccactctgtgaccgcacttccactctagtggcacagtctcagatagggttcatcgacttcattgtgggagcccacattctctgtggcttgactgacgtgggcagagaagagtgttcagcccctggcggatgaggactccaagtctaaaaaccagcccagctttcagtggcgccagccctctctggatgtggaagtgggagaccccaaccctgatgtggtcagctttcgttccacctgggtcaagcgcattcaggagaacaagcagaaatggaaggaacgggcagcaagtggcatcaccaaccagatgtccattgacgagctgtccccctgtgaacaagaggcccccccatcccctgccgaagatgaacacaacagaatgggaatctggattagccctggggctgggcccaggtcttcattgagtccaaagtgtttgatgtcatcagcaccatccatcaggactggctcccccatctgctccaagggacgtgggtcgtggaagaaacaacccacctgaaggccaaatgccagagatttggggttggggaaagggcccctccccacctgacacccactggggtgcactttaatgttccggcagcaagactggggaacttcaggctcccagtggtcactgtgcccatccctcagcctctggattctcttcatggccaggtggctgccagggagcggggagcttcctgggaggcttcccagggccttggggaagggtcagagatgccagccccctgggacctcccccatcctttttgcctccaagtttctaagcaatacattttgggggttccctcagccccccaccccagatcttagctggcaggtctgggtgccccttttcctcccctgggaagggctggaataggatagaaagctgggggtttccagagaggtatgtcagagtcgaggattaggatacatcggaccaaatgacggttccaggcctgctggatggcgctgaaaagaacctcaccatgagcacacaatggcacgatagcgacccccactcatcccgcatgctaatatgaatatctacctgcatccatatctgaaatagacatcggggggcgtctc

SEQ ID NO: 366694 - DNA, 190 bp, Homo Sapiens
cggtcgcggtcgcgggctttcgatagaaccgaaggattctgggttcggcgacatggggatctcggggcggttcctcctcctggccgtggcgctggtgatcgccgccgccgcggtggccgcggatgagcaggcggcggtggacctggcggggcccggggagatcgcggcgggcgtcaaggaggccgccgag

SEQ ID NO: 366695 - DNA, 1189 bp, Homo Sapiens
  misc_feature (488)..(498): n is a, c, g, or t
  misc_feature (945)..(945): n is a, c, g, or t
  misc_feature (966)..(966): n is a, c, g, or t
  misc_feature (1130)..(1130): n is a, c, g, or t
gggggagttctgggggccaggcggccgccgcgagtctggtatcctgagcttcgtgagttgagcgctgctgctccgcggtggagtcaccgcaccgctcccgggatcatggtgttctacttcaccagcagcagcggtaattcatctgcctacactatttacatgggaaaagataaatatgaaaatgaagatctgatcaagccatggctggcctgaagatatctggtttcatgtggacaaactctcttcggctcatgtataccttcgattacataagggagagaatataaaagacatcccaaaggaagtgctgatggactgcgcccaccttgtgaaggccaatagcattcaaggctgcaaaatgaacaacgctaatggggaatatacgccgggggctaaccgtgaataaaacccgttgacattggatgtgggcgaaagataggcttctcgccagggcagaagggatgttaaaatattggcgacccgtcggnnnnnnnnnnngtaaaatggtggatcccccgacaaccgcattttaagaagaagaacctaaaaggtgtgtagtcggagttaatccaacacaccccctatcgctagcatataatataaccgcatctgggcccaaggcgcactctccgtgcacaaccacaccacgggccatattgtatgaacatccataaatcggcccccccagacatcttactctcggcgggaaccaattttctgtgtgcaaagctactcccaaccagccaccagcgtagctcacacacttaacatagctacctgcgactgaccaccaggtggcaccgatgggtacccaggcacatttcgagggggccgttaagtacacaagaaaaaactctattcttcaagaagataacccaatattatcatattattgggcgctcgcgcataccaggcacccatctcattcataagagggaacataanggagggacaaaagatgcgggnaccacaaccaagcgctgccgattcaaccccctcagcgaaaaataatagtctgatggccagctgctgtgctcctaagggtgtggtctacgggaaattccacccgacatcgagagtcaacaaaaaaacctcctccgtcggcatcgcaaattctcagcctcggattntctatagaccagaagtccgaccacggcgtggagtgttgtgagaggttagcatataacct

SEQ ID NO: 366696 - DNA, 1333 bp, Homo Sapiens
agcgggggccaggcggccgccgcgagtctggtatcctgagcttcgtgagttgagcgctgctgctccgcggtggagtcaccgcaccgctcccgggatcatggtgttctacttcaccagcagcagcgttaattcatctgcctacactatttacatgggaaaagataaatatgaaaatgaagatctgatcaagcatggctggcctgaagatatctgggagagaatatagaagacatcccaaaggaagtgctgatggactgtgcccaccttgtgaaggccaatagcattcaaggtaaaaattgtgacagtggagaagaaagtaaatgagatcctgaaccgattagaaaagaccaaagtcgagcggttcccagacctagcagcagagaaagaatgcagagatcgtgaagagaggaatgagaaaaaagcccaaattcaggaaatgaacaaagagagaacaaagaagaaatgaagaagaagagggaaatggatgaacttaggagctattcatcactaatgaaagttgaacaatatgtcttcaaatcaggatggcaatgattcagatgaattcatgtaaacaggagcaaaaggagaaaaggacctttgaaaagatgtgaatgtagagacaattgcagaccttttggtttcatctgtgttctgaagtataaaatacaaccaaaattctaccttcatcctacccagaaattattgattttcaagttttaaaaaaacatgtaccttttttgctgacagaaaaggatccagatatgtataacaatagttgaacttgacagcatataacttaaagtgaaaatgtttttgccagaacatgtcttggtaccttgtgaaagcaggctgcccttgttcttgagatagactttaaaatgaaccagctctgaaaagtacttctgctgctctggtctatccctgaaaacagatgtcttgaaacacttttcatattcttaaaataatcttcacttctgttaagaagaacatgttggtgggtaattatgcgaatgtttccctgtccctgatttctcgattaggcgtatgggttttgaaaaagagatttttcagaagattgtcagcttcagtattcacgttccatcgtgtcatctgggtctgttagtgtagtgaccctcagtgcagtctgtcccagcgtttacgtccttgcttcctctgagcagaggcctccatcttagtatcaacatatttaaagaaattgatggtgttcatccagctgggggccctgtgggcagttgttggccttgagcaccaagtaaacccaagcccaccttatgttgacaactttctggggccccagggagtaattttctcc

SEQ ID NO: 366697 - DNA, 581 bp, Homo Sapiens
ggagtgcacggaggagttctgggggccaggcggccgccgcgagtctggtatcctgagcttcgtgagttgagcgctgctgctccgcggtggagtcaccgcaccgctcccgggatcatggtgttctacttcaccagcagcagcgttaattcatctgcctacactatttacatgggaaaagataaatatgaaaatgaagatctgatcaagcatggctggcctgaagatatctggtttcatgtggacaaactctcttcggctcatgtataccttcgattacataagggagagaatatagaagacatcccaaaggaagtgctgatggactgtgcccaccttgtgaaggccaatagcattcaaggagctattcatcactaatgaaagttgaaaatatgtcttcaaatcaggatggcaatgattcagatgaattcatgtaaaaggagaaaaggagaaaaggacctttgaaagatgtgaatgtagagacaattgcagaccttttggtttcctctgtgttctgaaatataaaatacaaccaaaattctaccttccaaatccaaacaccggcaaaaatttaaacgtttggt

SEQ ID NO: 366698 - DNA, 1109 bp, Homo Sapiens
gctcgcgccccgcggcagctccgcagtgcactagccaccaccgccgccgccgccgctccgccagacctgctgccagcttgcccggtccagccctgagagagcctcgaacgccagctgcgagggtcatgagccagagagccccggggcgccgcgcggagagcaagcggagatagcgactttgcgccccccagccctcgccttcttgcatcgcgttccccgcatcctcgggtccttctgtcctttccgctgtccccaccgccgccatggccaccttgctccgcagcaagctgtccaacgtggccacgtccgtgtccaacaagtcccaggccaagatgagcggcatgttcgccaggatgggttttcaggcggccacggatgaggaggcggtgggcttcgcgcattgcgacgacctcgactttgagcaccgccagggcctgcagatggacatcctgaaagccgagggagagccctgcggggacgagggcgctgaagcgcccgtcgagggagacatccattatcagcgaggcagcggagctcctctgccgccctccggctccaaggaccaggtgggaggtggtggcgaattcgggggccacgacaagcccaaaatcacggcgtgggaggcaggctggaacgtgaccaacgccatccagggcatgttcgtgctgggcctaccctacgccatcctgcacggcggctacctggggttgtttctcatcatcttcgccgccgttgtgtgctgctacaccggcaagatcctcatcgcgtgcctgtacgaggagaatgaagacggcgaggtggtgcgcgtgcgggactcgtacgtggccatagccaacgcctgctgcgccccgcgcttcccaacgctgggcggccgagtggtgaacgtagcgcagatcatcgagctggtgatgacgtgcatcctgtacgtggtggtgagtggcaacctcatgtacaacagcttcccggggctgcccgtgtcgcagaagtcctggtccattatcgccacggccgtgctgctgccttgcgccttccttaagaacctcagggccgtgtccaagttcagtctgctgtgcactctgtgccacttcgtcatcaatatcctggtcata

SEQ ID NO: 366699 - DNA, 865 bp, Homo Sapiens
  misc_feature (807)..(807): n is a, c, g, or t
ggggcctcggtgatgtcgtgggttcaagcagcctccttgatccagggccctggagacaaaggggacgtgtttgacgaagaagcagacgagtcgctcctggcgcagcgggaatggcagagtaacatgcaaagacgagtcaaagaaggttatagagatggaatagatgctggcaaagcagttactcttcaacagggcttcaatcaaggttataagaaaggtgcagaagtcattttaaactatggacgactccgaggaacattgagtgctttgctctcctggtgtcaccttcataataataattcaactttgatcaataaaataaacaatcttctggatgcagttggccagtgtgaagagtatgtgctcaaacatctgaaatcaatcactccaccgtcccatgttgtagatttattggactccattgaggatatggacctttgtcatgtagttccagctgagaaaaagattgatgaagctaaagatgaaagactctgtgaaaataatgctgagtttaacaaaaactgtagcaagagccatagtgggatagcattgttcatatgtagaatgttgtagaacacaggagcatgcacattcagaaaacccaagccccacatggattttggaacagacagccagtttagttaaacagctgggcctatcagtagatgtattacaacacctcaaacacactataaaattacccttccccttttctaatgaaaataatgtttcagaacatttggttttcctaacaatcgaaaatttggactggttttctgcaatcaaaccacctccactggtaagggntaccccctttatgggaaagtttggaaattaacccctaattgggccttcaaaaaattac

SEQ ID NO: 366700 - DNA, 866 bp, Homo Sapiens
agcgggatgggaccgccgcctgcttggaccgcagaagagcaggaggacgtctgagccatgctcgcggcgatgggctctctggcggctgccctctgggcagtggtccatcctcggactctcctactgggcactgtcgcctttctgctcgctgctgactttctcaaaagacggcgcccaaagaactacccgccggggccctggcgcctgcccttccttggcaacttcttccttgtggacttcgagcagtcgcacctggaggttcagctgtttgtgaagaaatatgggaacctttttagcttggagcttggtgacatatctgcagttcttattactggcttgcccttaatcaaagaagcccttatccacatggaccaaaactttgggaaccgccccgtgacccctatgcgagaacatatctttaagaaaaatggattgattatgtcaagtggccaggcatggaaggagcaaagaaggttcactctgacagcactaaggaactttggtttaggaaagaagagcttagaggaacgcattcaggaggaggcccaacacctcactgaagcaataaaagaggagaacggacagccttttgaccctcatttcaagatcaacaatgcagtttccaatatcatttgctccatcaccttcggagaacgctttgagtaccaggatagttggtttcagcagctgctgaagttactagatgaagtcacatacttggaggcttcaaagacatgccagctctacaatgtctttccatggataatgaaattcctgcctggaccccaccaaatctcttcagcaactggaaaaaactgacattgtttgtttctcatatgattgacaacacagaaaggattggaatc

SEQ ID NO: 366701 - DNA, 1352 bp, Homo Sapiens
  misc_feature (1094)..(1117): n is a, c, g, or t
  misc_feature (1260)..(1260): n is a, c, g, or t
  misc_feature (1298)..(1298): n is a, c, g, or t
  misc_feature (1318)..(1318): n is a, c, g, or t
  misc_feature (1324)..(1324): n is a, c, g, or t
tggacagctacaggcaaccaagcgtgctttcatcgtcacacaataccctctgccaaacactgtaaaagacttctggagattagtgtatgattatggctgtacctccattgtgatgttaaacgaagtcgacttgtcccaggggctgccctcagtactggccagaggaagggatgctacgatatggccccatccaagtggaatgtatgtcttgttcaatggactgtgatgtgatcaaccggatttttaggatatgcaatctaacaagaccacaggaaggttatctgatggtgcaacagtttcagtacctaggatgggcttctcatcgagaagtgcctggatccaaaaggtcattcttgaaactgatacttcaggtggaaaagtggcaggaggaatgcgaggaaggggaaggccggacgattatccactgcctaaatggtggcgggcgaagtggcatgttctgtgctataggcatcgttgttgaaatggtgaaacggcaaaatgttgtcgatgttttccatgcagtaaagacactgaggaacagcaagccaaacatggtggaagccccggagcaataccgtttctgctatgatgtagctttggagtacctggaatcatcttagttgggtgagactctttaaagtgcatccatgaagaaacctgtccatctattgagccagcagctgttgtacctgttacacttgtgcagaaagattttaatgtggggggtgggagacttttacatttgagaggtaaaagtattttttttatgaagttgtgtatcttaataaaaaggactgaattagtttttattactatattaaagcatcaacatttcatgccacataaattatatttaataagaaccagattgaaatgagaacgtattggtgtttgtacagtgaacatgccaccttttttctcatggtttcagtagagcagctaccacatgttgcatgagttcatactttctacgtggcatttttctccctttctaaaatgaaagctgatgaatcttaaaaggaagaagaaaagaaaagctgtgcaaattcatagtaaagttcgttttttatatgtttccagtgtagcagatctcnnnnnnnnnnnnnnnnnnnnnnnnactggcttattttcttttaatgtgcaatgatggctggatcatttaaagttctttttagaaaataacataagccaaagactccaagtgtaaatatgtctatatgggagaaagcacattatatttattgggttacttacattccntttttgatgggctaaaattactaccaccacacattctnctttttttcccgaggaaggnttttcnttaggctaaaatcattgtaaacggtttt

SEQ ID NO: 366702 - DNA, 907 bp, Homo Sapiens
cacggggtctggggcctcggcaggcacccacaaacggatgcccgcactgagtgccacccctgtgcctgctgatgagacccctgagacaggcctgaaggagaagaagcacaaagccagcaagaggagccgccatgggccaggccgtcccaagggcagccggaacaaggagggcactgggggcccagctgccccatccttgcccagtgcccagctggctggctttaccgccactgctgcctcacccttctctggaggttccctggtcagctccggcctgggaggtctgtcctcccgaacctttgggccttctgggagcttgcccagcttgagcctggagtcccccttactaggggcaggcatctacaccagtaataaggaccccatctcccacagtggcgggatgctgcgggctgtctgcagcacccctctctcctccagcctcctggggcccccaggacctcggccctgccccgcctcagccgctccccgttcaccagcaccctcccctcctcttctgcttctatctccaccactcaggtgttttctctggctggctctacctttagcctcccttctacccacatctttggaacccccatgggtgccgttaatcccctcctctcccaagctgagagcagccacacagagccagacctggaggacctgcagcttccggtgtcgggggacctcccctcaggagagtctgtcttccatgtcccccatcagcagcctccccgcactcttcgaccagacagcctcttgcacccttgtgggggcggccagttagacccggcggcccagggacgactaacatggagcagcttctggagaagcagggcgacgggggaggccggcgtaaacatcgtgcagatgctgaaggcgctgcacgcgcctgaaaaggaaaacg

SEQ ID NO: 366703 - DNA, 950 bp, Homo Sapiens
  misc_feature (30)..(30): n is a, c, g, or t
  misc_feature (44)..(44): n is a, c, g, or t
gttcacccccggaaaggggaggggaagacncccttgagggttcnaaaattaaaaaagaccgtaacgggggcccaaatttaaggttataaaagcctaaaacttgaaccctttagaaaaatcccccactagtccttctccctagaaagtctttcctagaccggacactaggatatttgtaatcattacactgtgggaccttagggaacccgaacctgtgttttgcaatgccagggtcaatattttctgttgaatatctttgtcacaaagagagtccattttcagtttccatatgtttatgaagtaattttctcaagttctcttagtactcaaacattggggaacaactacatgaacgcagtctcagaaataaagtgcgaaatctacacatcaataaagttcttttaacagaattgttcacttttcagaaaattgtctttatcataaagaagctactctacttaatttatagaaccagtttttacccagaaatgtaaattaattaacttcatttgaaatgaagtaaggtctttctgttctggagtaataaattctactatgcaataattattctgaaaatgtgttagcatgtcacaaaaagttaaaatatatactgattttttaatgcccaactaatagtatattcataaagactggatttcttccagatcccttataactacctgaattattagaagtggccatcacattttaattttttccctaagtgtgaagttgatcgtcttattaaaaggtctagatgagtcacaatatgtttaaagttaaaaatgttaataaataagaaatgccaccttcctgtccaactttaaagatgttcattttaagacagcattaaaagtaataaaatacactgacatgtcagcaagagttaaatgtacacttggtaagacaaggaatatatcctttaccaatgaatgataaatggatcctgc

SEQ ID NO: 366704 - DNA, 521 bp, Homo Sapiens
  misc_feature (310)..(323): n is a, c, g, or t
gcagaggatggcccacgggtggttttcatggtggatttgtggcatccaaacgtcgcagcggccgaacggcaggctcttgatttcatctttgctccgggacgatgagagtatttcccatgctggagtcggcgagaagggccgaggcggggcctgggcagactgtggtccggtccagtccctaccggtgttgtttccatgctcagaaacctgcctcagcggaaagctcttatttgggattttatatcatgtcgggtccctctttcccttggttattgtaaatggaaacttttcggcttgtatttccttagannnnnnnnnnnnnnccttccaatcatttgcttcagagactcctttctggcctaacagcgcattcctttgattggtccttgagtgaccagagacttagtgcccttgtaagtctgtcttctgttgctacttgtttttttcagtgctctgaaatagagtaactaaatggttatttgtctgaatataataatgtaaaacttcttgtggtcatctta

SEQ ID NO: 366705 - DNA, 1786 bp, Homo Sapiens
  misc_feature (710)..(737): n is a, c, g, or t
gcaggctgtacggcccgaagactttggatggcacgcagaggagggggctctgctggggagagcggctcagtctgttcttgtgaaggcgtgagggtctggggtcgcctgcgaggccgctggccaggcctgagcctctgccaccatggccattgtgcagactctgccagtgccactggagcctgctcctgaagctgccactgccccacaatgctccagtcatgggtagtgtgagcagccttatctcaggccggccctgtcccggtggggccagctcctccccgccaccacggccctcctgggcccaccttcttccgctcagacaggatggcctgctacggggtggctatgaggcacaggagcccgctgtgcccagactgtgcccccataggaaggctgtccctgtcaccagcttcacctacatcaatgaggacttccggacaggagtcaccccccagaccaagcagtgatgttgaggatgcccgagagcagcgggcacacaatgcccacctccgcggcccaccaccaaagctcatccctgtctctggaaagctggagaagaacatggagaagatcctgatccgcccaacagccttcaagccagtgctgcccaaacctcgaggggctccgtccctgcctagcttcatgggtcctcgggccaccgggctgtctgggagccagggcagcctgacgcagctgtttgggggccctgnnnnnnnnnnnnnnnnnnnnnnnnnnnnttcagctgctgacaaacccctggcatttagtggctgggccagtggctgcccatcagggacgctatccgactctggccgaaactcactgtccagcctgcccacctacagcaccggaggtgccgagccaaccaccagctccccaggctgggcacctgccttcccatggctctgggcgaggtggcactgcctgggccagccctgatgtggtccctactgggccctcccactcagacagtggccgggtcctcctccagcaagagcacaggcctccctaggggggccgtgtgggctggggggctttttgggcagtggtactcggggcctcccctgacagcagctccctgtggggagcggctcaccaacaaacccccgcctccacctccttcggatgaggccctgcttgcactgtgtcctggaaggaaagctccgagaccgggaggcagagcttcagcaggctgcgggacagtctggacgagaatgaggctaccatgtgccatggcatacgaggagcggccagcggcactggcagctgagagcgtgaggccctgcgagaggactgtgcggcccaggcaacaggcggggcacagctggagccaacagctgctgccagctgcaggtgttccagctgcaagcaggacgaagcggccattgcagggacgacttcgcaacagctgctgcaaggagcgcggaaagtgtagcggcgcttgcgccacagttgggagccgtgatccatgcgggaagctcggggccggagggctctgagggagaaccaagttgggaggttgtgccataaactcaggcgacatctacccatgcttgaacgccgagcgctgtgcaggcgcagttctcagggccagaaacttggatccacaaaacgggccagcgcaatctggtttgtctcatggcgaggtgtgccgcatgctggggaaggaccctgtggctacgcctgaccgggtcacagtgaagggccactgtgtagcgggagttaacagtgaatggccggacccggaggcatcggtgactcttttgaccttgggaagcattgttcc

SEQ ID NO: 366706 - DNA, 1056 bp, Homo Sapiens
ggaccggtccggaattcccgggatccgggagcccagagttcggaacctagagttcggagcgggctagggagccggcgttgtcgcggcgaggaggtgggcgcgctggagcaggagcggggccggaactggagccgaggcgcaggtggcgctgggtcgcctgcgaggccgctggccaggcctgagcctctgccaccatggccattgtgcagactctgccagtgccactggagcctgctcctgaagctgccactgccccacaagctccagtcatgggtagtgtgagcagccttatctcaggccggccctgtcccggggggccagctcctccccgccaccacggccctcctgggcccaccttcttccgccagcaggatggcctgctacggggtggctatgaggcacaggagccgctgtgcccagctgtgccccctaggaaggctgtccctgtcaccagcttcacctacatcaatgaggacttccggacagagtcaccccccagcccaagcagtgatgttgaggatgcccgagagcagcgggcacacaatgcccacctccgcggcccaccaccaaagctcatccctgtctctggaaagctggagaagaacatggagaagatcctgatccgcccaacagccttcaagccagtgctgcccaaacctcgaggggctccgtccctgcctagcttcatgggtcctcgggccaccgggctgtctgggagccagggcagcctgacgcagctgtttggggggccctgcctccttcttcctcctctttctcctcctcttcagctgctgacaaaccccctggcatttaatggcttggggccaggggctgccccattcggggacgcctatccccactcctgggccgaaattcccctgtccagccctgccccacccttaaagcaaccggaagttgtgcgaacccaaacccccagcctccccccgggcgggccacctcggccctttccaatggccttttggggcgaaaggggcacctggtcctggggcccatcccctaagggggtcccccacatggggaccactctcccccccc

SEQ ID NO: 366707 - DNA, 877 bp, Homo Sapiens
  misc_feature (406)..(406): n is a, c, g, or t
  misc_feature (442)..(442): n is a, c, g, or t
  misc_feature (494)..(494): n is a, c, g, or t
ggagtagaaggctcaaacaacccaaggttagttggtctttgtgtgacagtgggaagaagtggagagaacactctgtctccccgacttccttcttgaccctccgttccggtatctttcattcttccccacttggcctttccagatgaggtccaaaagtaagctcactcttcagggaaaagtgatactaaacccaggcgtgaggagtcatccttctgctcttacttttccctgcatttccttaggctggcccagactctagattcctgggcacttacctgtatctgagacccttagacctcctgtctcagtttctccacctgtgagatgggcagtcacacagatgagtgtgcatgagggaatcagaagcccatctgggttggactcaggaacccgggctctccccctngctgtggggtgggaaacaaaacacctttttcacagnaagctgttgtccctcccccatccctggataccattcacccagaagctgggtnggggaacggggaagctggaggaggggggttagagtttagaccaatgcgaggagctagtaagagctcgcctctccgtgacttccccccatgcaagggtgtgccaaggcttcccctgatatccaaagcaggacagcagccccttggtgggattctaactgctgctactctgtttctttcctcactttgctttccaaggtggtatgtgatccccagctcaggcctgtgcagacaggaaattctccccctgcagcaagtaggggaggtgggtagtgggcatgtgaactccttacagatatcaggccagtgagtgtaaacctggcacctccagcctgatccattcttcactagcgggtaacaggaaagctggtcctgtcgaattggag

SEQ ID NO: 366708 - DNA, 949 bp, Homo Sapiens
ggggaaagggtcttaactgggaaagggctctgtgtggtaacacctcagttgtgttctcctgacaccaggaaaagagagggatcagcttcaataactagaaaattctggctgtttaatggactcttcggtggcctctttaacggcaaagcagagaaagcaaattatgtattaagtgtattttgcattgtgtaaaacttgacgtgctgtattgtactaaattaagtgtaatctattaaggcaaggtatacacaatttgctttgaaacttactatgtttattctattataaagtgtattcaggtgcaacacagagactgctttcggtgacattaatgaagaaaatttctcatgccaggctttattatagaatcttcagctaaaatcctaactttctccttatttcttggcacttgtatacaagtggtgttgcctcttagggcaggcatgagctattcttttctgtaaaatattttgaatctataggctgtgggtttcatttttgaaaagtattttgtctggatgtctttcaaactagcttcagatattatttaatactatgtaactgggtcccctatggctcaatcaatattgcttatttttcttctgtagtggatgtgaaatttcctttagttggataagatacactgtaataattttaatgctaattaatgatatttcatactgtgcaatgaacagataatttaacactgtattttgaaatgtttttttcttcctgtcaccgcagtgtgtggtattgcataatgtgaatacctgtaaaaatataaattacttaaaaataaaaatatgaccaattggtatcagatcttttcagatagctaaataatttgctaagtatgcctgatagtaaatatctttctaaaaagaagtaatcagtgcttctttctcacaaatggaatttgtgtctgtgaataaaatcacattgatctgcc

SEQ ID NO: 366709 - DNA, 947 bp, Homo Sapiens
cagcccgagagccgggaaataaaaataacccctcagagcgatggatttcggggccgcccggcggccgaggcgcccgccgaaggccctgctgtaaaagagaggaggttcagatgagcccctgctgacttgagagagacagagagaccacgccgattgctgagaggaactggaagaagaaaaattcccagactcagtgggaagagctccctcaccatgagtagcgctatgttggtgacttgcctcccggaccccagcagcagcttccgtgaggatgccccgcggcccccagtgccaggggaagaaggggagaccccaccgtgtcagccaggggtgggcaagggccaggtcaccaaacccatgcctgtctcttccaacaccaggcggaacgaagatgggttgggggagccggaggggcgggcatctccggattcccctctgacccggtggaccaagtccttacactccttattgggcgatcaagacggtgcttacctgttccgaactttcctggagacggagaaatgcgtggataccttagacttctggtttgcctgcaatggattcaggcagatgaacctgaaggataccaaaactttacgagtagccaaagcgatctacaaaaggtacattgagaacaacgagcattgtctccaagcagctgaagcctgccaccaagacctacataagagatggcatcaagaagcagcagattgattccatcatgtttgaccaggcgcagaccgagatcccagtcggtgatgggacggaaaatggcctaccagatgttttgtgacttcttgatattttacctcggaatttgtgaggacgtggcggagaaaaacacaggttacatgagttatgggggactcgggagctaaaggcgtgtgtggtttctcccacttgattgcgacaggagtggctttggcggacttagtgcaactttgcaa

SEQ ID NO: 366710 - DNA, 932 bp, Homo Sapiens
  misc_feature (221)..(247): n is a, c, g, or t
catgcgaatgcccccgcagccaaagttggtaccggtccggaattcccgggatttcccctcggctttgcctggacagctcctgcctcccgcagggcccacctgtgtcccccagcgccgctccacccagcaggcctgagcccctctctgctgccagacaccccctgctgcccactctcctgctgctcgggttctgaggcacagcttgtcacaccgaggcggannnnnnnnnnnnnnnnnnnnnnnnnnnggcccacagccgcagcaatggcgctgagttcctctgctggagttcatcctgctagctgggttcccgagctgccggtctgagcctgaggcatggagcctcctggagactgggggcctcctccctggagatccacccccaaaaccgacgtcttgaggctggtgctgtatctcaccttcctgggagccccctgctacgccccagctctgccgtcctgcaaggaggacgagtacccagtgggctccgagtgctgccccaagtgcagtccaggttatcgtgtgaaggaggcctgcggggagctgacgggcacagtgtgtgaaccctgccctccaggcacctacattgcccacctcaatggcctaagcaagtgtctgcagtgccaaatgtgtgacccagccatgggcctgcgcgcgagccggaactgctccaggacagagaacgccgtgtgtggctgcagcccaggccacttctgcatcgtccaggacggggaccactgcgccgcgtgccgcgcttacgccacctccagcccgggccagagggtgcagaagggaggcaccgagagtcaggacaccctgtgtcagaactgccccccggggaccttctctcccaatgggaccctggaggaatgtcagcaccagaccaagtgcagctggctggtgacgaagcggagctgggaaccagcagtcca

SEQ ID NO: 366711 - DNA, 1066 bp, Homo Sapiens
  misc_feature (973)..(1013): n is a, c, g, or t
  misc_feature (1038)..(1038): n is a, c, g, or t
acagtctcggcgtagtcgcacatgcctctttactctccctgagccttctcaaattctctagcatgaactcctgtagcatcccgtacaggttccgctgggcccaggccacccgggctccactgagccctgaggcctgacaagtccatattggtccagctggaactgcaggcgacggttctcctcctggagcatgcagcatctctgtctccaaacgctggggctgcttttgccacaggagacttgggggcctgtggtcgggtggtgacccgctgagctcggcttgcatatcgcagggtgctgagagtctcaggaaggcactgggctgagggggacacgcaggccaccatgagggtgaccccgcgccctcccagtgagtctgccagctacttggtgagcttgctgtcccggaaagggatgtggctctgcttccgctgtgggtccagcagcagggagatgcagtgacccagggccagcaggcttcggttgatgctgttagcctcaagcatcagctccccacgggatcccgtggctgctaccttctcactgcctgccaggtccacaaagcacagcttcccaccaacagggggctccccagggtccacagaaggcatctgctgggcagtttgacggctgatgtaaagggtgagcagggcatggcttcggctggaggcctggttcagggtgtgggctgagttccttcgacggctgagacctgctcattgtagatctcccagataagaggcgcgaagggtgacaggggcacccaggtgctgcacgcggtccaacagccaggcgaaggtcctctgcatgatgccagccaggctggggggtacaggcaccccctccccctaggggcaaaaccagctgagccatcgtcatctccacagtaataactaccctctgtagcgcatgtatgataccgtgcgccgggaaacgtgccaagttcccaaacaatggctcatttaattcatannnnnnnnnnnnnnnnnnnnnnnnnnnnnnnnnnnnnnnnnagctaggaaggccccaaagttgaancccaaatgctccaaattgggcaagtccc

SEQ ID NO: 366712 - DNA, 996 bp, Homo Sapiens
  misc_feature (855)..(855): n is a, c, g, or t
  misc_feature (857)..(857): n is a, c, g, or t
  misc_feature (859)..(859): n is a, c, g, or t
  misc_feature (899)..(899): n is a, c, g, or t
  misc_feature (943)..(944): n is a, c, g, or t
  misc_feature (967)..(967): n is a, c, g, or t
  misc_feature (977)..(977): n is a, c, g, or t
gcctggctggcatcatgcagaggaccttcgcctggctgttggaccgcgtgcagcacctgggtgcccctgtcacccttcgcgcctcttatctggagatctacaatgagcaggtctcagccgtcgaaggaactcagcccacaccctgaaccaggcctccagccgaagccatgccctgctcaccctttacatcagccgtcaaactgtcactgcatctccctgctgctggacccacagcggaagcagagccacatccctttccgggacagcaagctcaccaagttgctggcagactcactgggagggcgcggggtcaccctcatggtggcctgcgtgtccccctcagcccagtgccttcctgagactctcagcaccctgcgatatgcaagccgagctcagcgggtcaccacccgaccacaggcccccaagtctcctgtggcaaagcagccccagcgtttggagacagagatgctgcagctccaggaggagaaccgtcgcctgcagttccagctggaccaaatggactgcaagggaaagaaaagagccagctgcagaatagccgagacctggcccagaatgagcagcgcatcctggcccagcaggtccatgcactagagaggcgtctcctctctgcctgctaccatcaccagcagggtcctggcctgaccccaccgtgtccctgcttgatggccccagctcccccttgccatgtgagtctcacggcccagcctggaggggtgacaagtagggatgtcatggagcctctgacgcacctttttgcaggcactgccagcccctctactcctgcccctgctgccacatctgcccactgtgtcgagtgcccctgggcccactggntngnccttgccagggggagcaccaccttgccccagacaagtccntgggctgttcattgggcatcttacaaggggccggcaaagaaganntttgagaggattttttttgaaanttgggcagantgttttttttaaagaacct

SEQ ID NO: 366713 - DNA, 933 bp, Homo Sapiens
gatatacggagacaagtggaaaagagagaacgcctccagggaaagactggagctgcagacagcatggacacgtgttgcacccgagagccggaagcaatcagagggggataatgcccatggtagggcatcacaaccaatgaagcaccggttacgggaaaccctcgctgacgtttgggctgagagccctaggggcccaccccgggagagtataaggtgtaagatggttagcactcatgacgtgcgagcaaagatttctcactgagctttcacagttgtgcgtaagtccctcatgggcaggcttcacaagaaacttttcatacggagttctccgggtttgtcctgggcggccttggccacgtggatttcggttaacttgccgccacggtcgccgtagcactgtcttgcgcaggctggtgatcagaaggttgtccaccaggccacttcgatgattcttcctcctagcatgctggactcgtccaagccgcagccgtgccgcactcatagctacagctgcttgaagacgccgcatgcgcaccgagcccggcccgctgggcgcggtccaggaacatgtggaagaggatgaccacgtagggcgactgccaggtgtgccagcaccaggagcagtggaacctgcctgaagcatgcaattccaggtactgcttccaaccagggctcagcacattgtgcttgaggttggggtctatgatgaggtcccagctgtcagccggctattgcctcctccatcttctcatagaagactttcttccactcatctgtggtcacgcttttacacatggtctcgtcagtagtgagggaaggcaatttccaccttagtgagaacacggagagtgagggtacgtgcagcgcagagcagcgcagtctccacggtctaaaaatcctcatcgacagaccaggaggaagcaggacccagct

SEQ ID NO: 366714 - DNA, 1071 bp, Homo Sapiens
gcgatgccctctgcccgcggggacccgagcctcgcgcgccctccgccctccctaccctggcccctgtacccatcacacctggggcactgccgtccgccgagcttgggcgcgcggcggcgagaaggcactggaggaggagaagcagccggggcgtaggcgccctcgcccccagcaggccggggagggcgcgcatggcgccagagggtccgcctcagttctcgtggagactgctccctcagctcgccgccgcgggtgtccggaatccctccgcacactcgcaggtggcccggcacccgcagccagtgccgcgggcaggacgctgaagaaaaggcggaatgggaggggcccggccgccttgccctactccccgagacgctcttaccgcgcccggccttccatcagttatgcagccctcagcccgctgctggcgttcccggatgtgcggtgctactcccggctgcagcctctccggcctccgccctctaggctctagcaggtcgggagagagcttgggcaggtgatgtgtagccccatcgcgtggggagaggttgaaactatccctgcagactggcctttgcacttcatctgaggcagatttcactaattttcgttgatgggacagatgagagacactttcctcctccccccgacccccggacatctttgggctttcttatgagggaggcttatttttgccgcaggtgtaacgttttatccagctgccaaacaacttggcactgatcttttcttttgcttttgcctactaagtcacacaccacccctcctctttcttaacctggggaagaacttaaactggatatttccaacggaatggaaaggttttcaagttgttccccaagggcccccaatacccgggaattctggaattctaacctctatactctttggcttgggtaaaggccctaaaacagacttctctggaagggagcgcacccctataaaaggcctcccaataaaggcgaataaacggctaacttgtgataaaagttatacaatacgcttctaggtgtaaaaaccctggcaacccacaaaaaaacacttttgtgatcc

SEQ ID NO: 366715 - DNA, 452 bp, Homo Sapiens
gagggactctcagactacttctaaatctccgaagatcttttttcatgtgtgagataataatagaagatattcctgagagttatgtgtatttttgtgtattttccttgcttgtggatggaagcgcgatgtcttctattaccaaatgtgcctaagccccagcctgtggctctaaagaaggttacatcaacataaaagtcacattttaattttctgtctccctgcacctgcctgctgactcaggatctcagcccagctcacgtggcatctcccaccacctccacttgtttctgggactacctggagcagcttggatgcactgtggctcagctccctcacagtcttcagtccagccgctgtcaggctccttgtggggaggcctctcgctgctgtcccttcagccgggggtctccaggggcgctgctgtggctgtctccagagctccccaaggggca

SEQ ID NO: 366716 - DNA, 838 bp, Homo Sapiens
  misc_feature (93)..(153): n is a, c, g, or t
atggtttgctgggggctctagggcctttggccacagactgaagcctgcacggtcagcttccctgcttttgaggctttggactcagactgagcnnnnnnnnnnnnnnnnnnnnnnnnnnnnnnnnnnnnnnnnnnnnnnnnnnnnnnnnnnnnntggtccaaacacaaaggcctcccgaccttagagttctgcgtctggatgttttggctacaaaaccagaaaactccttctcaactggcttaaacaggaaaatgaggtcacttctgacccagagactctgtcatcttaccctctcctgggggtcttcactctaaagaactgccactgggatcatacagtgtgctctcatctggaacttcccacatctccacgtgccctcaccttcagtgagagtctgagaagaagccgggtggggttgctgcccacatggtcggggctgctgccaatgccactcatctcaccgtcacttgctgcctctctgcctgccccctggtccatggttctctgacatctctctctccttgaggactgtcccactgagaggtctggaaacaatgacactccaggaacaatgacactccagaaacaatgaccactccaggaacaatgacactccagaaacaatgacactccaggaacaatgagcacatctagcacccagatcttggcttctacacatcattctctattaaaagaaagaagcatcccttggagcaatggctgattccagacgctgtggcagagaaattacaacgataagcctggaacatcttggctgtgactagaaagtaagcaagtgctcaaagaattatggcaatagaatacgctggacctgaca

SEQ ID NO: 366717 - DNA, 1126 bp, Homo Sapiens
aattcccgggatcagctcaccaggaagcaggcagagcggggaaggctgagtccacactgcaagtccagagagcagggaactaccttgagtattctactcaaacttatgtctcagagttccccaatttcccaagaagggagagatagaggccacaatccagggggccatctcttaaggtaccaataattttgcagcccagtaggagtcatgtacacggtataagacttggaggaaatgcagggacccttctgttttctcctgcaaagttgaaaaagctgcatgcagttggaagggatcttcagatggtgctggtgactttctgttccttttggagttgacatgcatgtggattggaggaaaaataatcaacatatattctcctttcgtactgtttaaatcacaggaagaagcggctttaagacaaagatcaaaccaaaatgacaactgctcacttttactgtcaatactgcacagcatcacttcttgggaagaaatatgtactaaaggatgacagtccatactgtgttacatgttatgatcgtgtattttctaactattgcgaggaatgcaaaaaaccaattgaatctgattctaaggatctttgttacaaagaccggcactggcatgaaggatgcttcaagtgcaccaaatgcaatcactctttggtggaaaagccttttgctgccaaggatgagcgcctgctgtgcacggagtgctattctaacgagtgctcctccaagtgcttccactgcaagaggaccatcatgcctggttcccgcaaaatggaatttaagggaaactactggcatgaaacctgtttgtgtgttgagaattgccgacaacctatagggacaaagcctttgatctccaaagagagtggcaattattgtgtgccatgttctgagaaggagttcgctcactactgcaacttttgtaagaaggtgataacttcagcgtggggataacattttgtgaccagctatggcataaagagtgtcttctggtgtaaggggctgtaggaaaagatctcttgtgaagaacaggttcctgtccccagaacagagtatccattctgcctggacttgatacaacaacttaatgccaacaagtgtttcctggtccaacc

SEQ ID NO: 366718 - DNA, 1659 bp, Homo Sapiens
  misc_feature (135)..(135): n is a, c, g, or t
  misc_feature (1573)..(1609): n is a, c, g, or t
gcaaatgcctttaaactccccatattccgtctcaacccgggaatttatagccctaagaccgttctaaataagcattatttaataattccccctatagattttaaaaaaaatgtcaatcgtctatttatattaagnctggcaggaagaaaaaaatggcctctctgaacagcctggcccaatttcaagctttaataaggaaagagtgctttgtgccccgcagtacaaaaatcacaagttgctgggaattggtacatcaagacacgaacaagagccttgttaaaaagaaatagaaaagtcctctgaaaccaatcacccatcaagagatacaacaggtaatttaattacaaacataaataccattctctccataaagttacttgacagaaaagagttaattgcagcaaagaagtaaaacaggttaaaaaaaatttctatcacagatggcatctatgatattagcacagtggaaataaagtctgcaacctcccacatctctagaacttgtctcagggtttcagtgtttgtcaaatttcatcttaatttctttaataaatttagtgggatgaggacaggaggttcagaacttcaagctttcaggattctgttcttttcttattccaagacagtaatttaaaaattcttcttgagctagttaacagtgggaaacacctttccatgaacaaagagcaaataatccacctaatgcatagtactttttgttttttagattttaggaaaaacaactaaacacaatttaacattttttaaattctgtgaatttgagaaatgtaaaaatattacagcattgtccccatgaatttaaagttcattgtcatttgtagaaaagaaaaaggaatacgacataagacttattggtatttggctaagagtaacgccagacttaaaataagccacacaactagcaggtgtgagctgacaagcagcaaggcgacaggatagaagtgtcgagaagttggcttgttatcagttagacagcctgtttcaggatcatcggattcattcagtgctccctgggtttgtctgcttctcatgcaaatccagcgctcggataaagaagtccttgtgtaactggtgctcatctctcaagattgagcattgttcaagtgtcactgacatcgatgtcctgtctttggcacttttacaacaggtgaaacgaataccattcagtttgcggcaaatcgttgcagccagccacataatttctacattctttctttttttggattggatattttgaaggagattttctagcaatgcttttaaatcattttgttcctgaaaatgtgaaatataatcaggaggcatcttttccataaatatcttgtaatattcttgtagaagttcgaagttttcctgattaatactttcttgcaaagagacatctccaaacctttcagccagagtttgctgttcattgattccaacattaaaaagtactggatacacatgaagcaactgtccttctttaatctgtagaggtagtgactcaaacattctggctggaagcttgaccgctctcgacgaattcgagctcggccgatttggcctgatnnnnnnnnnnnnnnnnnnnnnnnnnnnnnnnnnnnnncggccgccccgcgtgagctccggtcgccctatagtgagtcgtatacatct

SEQ ID NO: 366719 - DNA, 1169 bp, Homo Sapiens
  misc_feature (46)..(47): n is a, c, g, or t
aaacacaaacggggcaaaatgggcccccccaattccttttctccannggggttgccatcccttaaaagtgcccttaaggaccatcacggaaaaggcgtttctgggcataggaactttatggaaggagtaatgtgggaattttttgaaggaatcaaactgtcttttaatctttacaagtttgaaaggtatacgttattgtttccattttcccggatggagaaattgaggttcaggaaggttacacaaagtcccaggtctaagaaaaatgtctcccagattccaaaagatgttgtctattatgctaatagtgcccgttcaagcattagaggaaaggttgcccgtggtatcgccggtaaattcttcttcccactttcaaatctagaatagtaaaacagccaaaaatcccaacaggcatgagagttatcgcagtagataggttaagctgcttctctgctgtggtcaacgtcagctctgttgcgaggcgggttctcccaacaatagcccacaccatttccaggcttttctgggcgaggggcagggcgcccggcccccaaagcgagaagacagacagccccggttctccgcagccccaggtttgctcctcaaggacggaggggcctctcagctccggccgcctcctttccgccccctgcaggccggccggaggaaagctcagggcccaggtcggcccagggagcacggaaccaaagagcgctagcgccggttcggccgcctttccagaaagcccgggccgaacggccccgccgcagagactcagcgcggatcgctgctccctctcgccatggcgcaggtgctgatcgtgggcgccgggatgacaggaagcttgtgcgctgcgctgctgaggaggcagacgtccggtcccttgtaccttgctgtgtgggacaaggctgaggactcaggtgggttgtctaaacgcccaaacctgggaaaagaggactgccgggcaggctgctgaggtggtgtgggcctgcactccacagaaagccaaaaaacaaaaacgctattaccatcaactccctgagccgcatcccgggaattcaggaccctaagctcgcctattgaaggaatggtgatgaaagaaggagactgtaactttgtggcacctcaaggaatttcttcaattattaagcattacttgaaagaatcag

SEQ ID NO: 366720 - DNA, 1001 bp, Homo Sapiens
  misc_feature (341)..(341): n is a, c, g, or t
  misc_feature (514)..(581): n is a, c, g, or t
gcactacagaagacagactgtcaccaaaaagggcaaacaagcaaaacccctactgacaaacctcaaacctagggcacaccggacgaccccgacaaacgcgggtacacactacgaacgggcgactacttgccggaggaaactttatggaacagaaacaaactccagccaacgagagagaaactaaacgtgtagctcctatcgtccgacaatcgtatttgaggttttaaatatgggagtgtgttttgggaatggatgatatgggtggtaatgtttgggaatgggtttcgtgaatactaattatgagtgtaattgagagtttttgaaaggttagtgtcattggnagctttttatcagatttgttaactaatatatgaaggtatagaagcccaacgcgacccagcggcatctggtccgtcctcagtccgcactcccgggtcctcccgctatggttgttactatatccattgcgactcgtcggctcgcccacgtgaacctgcgcttgtcgtcctggtgnnnnnnnnnnnnnnnnnnnnnnnnnnnnnnnnnnnnnnnnnnnnnnnnnnnnnnnnnnnnnnnnnnnncttgttttctggcttcttcttttgttttgctggttgctagctactgggggtacaccaaatcagctctttatttctctcttttagttgttgcttgcttctgttgctttcttgttgcctttccgtccctagctatatctatactcctatggtttttctcttgttctttggtatttgccacacttgttgccgtggttccagcaaaattgcttgtcggttgcagcacccggtggcagcctgcggtcatcctcggtcgccaacggctgccactcccgctcgccgctggttgaagcaccccactccgcgccgcaagctgggttgccacatggctgcggtggtggatgggcagatgcccgccggagcagcgcggggcgggtggatggcggccactcaccggagcagcaccgggctggtggacgacgg

SEQ ID NO: 366721 - DNA, 1142 bp, Homo Sapiens
tttcagatgtgtgtgcttgtcagtctctcggcgcattctccgctcatgtttactccgtttccggtcgccccgttgtccgctccgtgtgtgtgttcgcttttcgtggcggtaataatcaacttttcacaggtgagactgttatccacctgttgggtctatagtgttttagtggcccaactgtgtaggcaaatgtccagggccacaccctgttgggtcactgggggccggactcttgacgtggatggaaaaccccaattcccccagcgaatattagccttaaatttagatgaacctgtcccaagttggaatagtctgcgaaggtgaaataagacaatgcccactttaaaaatgcatgtgctggttctccatcaaggtttaggtgagagagtgggtcggggacaggatgttacgggaaagtagggaagaaaaggacccggtttactaatctgtgtcaattatcatacgcacccctttcatcattgaagatttcagcaaccaaatactgaaggtcagtgcggtaccaaggattggggttatatattaaacagtgtagtcccgaacctgtagaaaactattgataccttgcatagagataggcaataatacatacaagattattgaaaactcttggttaaagtactttagtcagtatttgaaaacacaataggaaattaccctgtaggaatgggatgtgttagatcccagccgtagatacggcacgtgttaaactttcagaaggggaaacatgcttcacggctgattgcaaatttctcatgcaatatttgtcagaatccaggagcattttaagtggtcttctaacaatataagccccgcactttggactggtaagtacaacattttcatttggtaaataataataattcttaaacagaaacaagtcacgaccaaatagcgactcatcctcccccaggcataaaaccctttagccagctagccgcctttccacggggtagagtataaacagcaaacaaaaccgctttggtaccgggaggaaaaaggggaaaggagtcgagtcaaaacaccgtctcttaagttcctcaagatcaacccagggggaagggtcctccaccggaatagggccggattgccttcacaggaagggaaagtcactccggagctcg

SEQ ID NO: 366722 - DNA, 1252 bp, Homo Sapiens
  misc_feature (266)..(315): n is a, c, g, or t
agcggggacctccaggattaccgctgctccagggactcagccccgagccccgtgccccatgagctggtgatcaccatcgaactgccgctgttgcgctcggccgagcaggcggcgctggaggtaacgagaaagctgctgtgcctcgactcgaggaaacctgactaccggctgcggctctcgctcccgtacccagtggacgatggccgcggcaaggcacaattcaacaaggcccggcggcagctggtggttacgctgccagtggtgcnnnnnnnnnnnnnnnnnnnnnnnnnnnnnnnnnnnnnnnnnnnnnnnnnngaagagtccgcggaccggtccggaactgacggccaggcctgcgcttccgctcgcgagggggaggcgggacccgcgaggagtcgcgccgaggacggaggccacgatacctgcgtggctggggctgcgggctccggggtcaccaccctgggcgacccggaggtggcgcctccgccggccgcagctggagaggagcgtgtccccaagccgggggagcaggacttgagcaggcacgcggggtcaccgccgggcagcgtggaggagccatctcctggaggagaaaactcacctggtggcggaggctccccttgtttgtcctcccggagcctggcgtggggttcttctgcgggaagagagagtgcgcgcggagatagcagtgtggaaacacgcgaggagtcggagggcacgggcggccagcgctcagcctgcgccatgggtggtcccgggaccaagagcggggagcctttgtgtcctccgttactgtgtaatcaggacaaagaaaccttgactctgctcattcaggtgcctcggatccagccgcaaagtcttcaaggagatttgaatcccctctggtacaaattacgcttctccgcacaagacttagtttattccttctttttgcaatttgctccagagaataaattgagtaccacagaacctgtgattagcatttcttcaaacaatgcagtgatagaactggcaaaatctccagagagccatggacattggagagagtggtattatggtgtaaacaacgattctttggaggaacggttatttgtcaatgaagaaaatgttaatgagtttcttgaaagaggtcctgagctctccattcaaacagtctatgtccttgaccccaacataattgaagttcttccaggtaactgatactcaagatccaattactggcaagttgcaaggatgttgtacttcatgatcg

SEQ ID NO: 366723 - DNA, 1332 bp, Homo Sapiens
  misc_feature (1287)..(1287): n is a, c, g, or t
tggaccggtccggaattcccgggatgacggaggccacgatacctgcgtggctggggctgcgggctccggggtcaccaccctgggcgacccggaggtggcgcctccgccggccgcagctggagaggagcgtgtccccaagccgggggagcaggacttgagcaggcacgcggggtcaccgccgggcagcgtggaggagccatctcctggaggagaaaactcacctggtggcggaggctccccttgtttgtcctcccggagcctggcgtggggttcttctgcgggaagagagagtgcgcgcggagatagcagtgtggaaacacgcgaggagtcggagggcacgggcggccagcgctcagcctgcgccatgggtggtcccgggaccaagagcggggagcctttgtgtcctccgttactgtgtaatcaggacaaagaaaccttgactctgctcattcaggtgcctcggatccagccgcaaagtcttcaaggagatttgaatcccctctggtacaaattacgcttctccgcacaagacttagtttattccttctttttgcaatttgctccagagaataaattgagtaccacagaacctgtgattagcatttcttcaaacaatgcagtgatagaactggcaaaatctccagagagccatggacattggagagagtggtattatggggtaaacaaccattcttttggagttgcaagaatgtagtaactctgatcagctacaaggaaagggaggaaagagtaaatggaagaaagtcatctaactgaaaaggaatatatagaacattgtaacacccctacaactgattctgattcatctatagcagttaaagcactacaaatagatagctttggtttagttacatgctttcaacaagagtctcttgatgttcctcaaatgatacttggaaaatctcagcaacctgagtcaaaaatgcaatctgaatttataaaagaaaaaagtgctacttgttcaaatgaggaaaaagataacttaaacgagtcagtaataactgaagagaaagaaacagatggagatcacctatcttcattactgaacaaaactacggttcacaatatacctggattcgacagcataaaagaaaccaatatgcaggatggtagtgtgcaggtcattaaagatcatgtgaccaattgtgcattcagttttcagaattctttgctatatgatttggattaattctatataattttggacttttaaatattaaggttaaaaaatacctgtatctaaaattgattctggttactgttgtnctaaaaactaaaggtattaaaagtataaaattaaaattttgcaaa

SEQ ID NO: 366724 - DNA, 258 bp, Homo Sapiens
cggcggcggggaggtggcggcggaggagaggagcacggacgagagcgccagcgccgccgagaaggtcttgatggaggcggagagggagggggtgttgttgtcgccgctggacgcggagcaggagacggagaggcgcgccggcgggcgggccaggcgcggcttggcggcgaaggccgtggaggtggccatggaggcggcgagggcggccattgctgcgtccggcgcgcgggcgggcgagcgtgtggaggggtttgatgt

SEQ ID NO: 366725 - DNA, 999 bp, Homo Sapiens
  misc_feature (48)..(84): n is a, c, g, or t
  misc_feature (970)..(970): n is a, c, g, or t
atgtatagatcactataggggaatcggggctcatcgcggtggcggcgnnnnnnnnnnnnnnnnnnnnnnnnnnnnnnnnnnnnnatcaggccaaatcggccgagctcgaattcgtcgagagcgggggtggtgatgaattgggacgcaggcgcggagcccagggaccactccccctgcacagacatgagaccataggggacctgtctgggtggcctcagggataggcgctccccaaggtgtgaatgaggcaggatgaactggacaggtttgtacaccttgctcagtggcgtgaaccggcattctactgccattggccgagtatggctctcggtcatcttcatcttcagaatcatggtgctggtggtggctgcagagagtgtgtggggtgatgagaaatcttccttcatctgcaacacactccagcctggctgcaacagcgtttgctatgaccaattcttccccatctcccatgtgcggctgtggtccctgcagctcatcctagtttccaccccagctctcctcgtggccatgcacgtggctcaccagcaacacatagagaagaaaatgctacggcttgagggccatggggaccccctacacctggaggaggtgaagaggcacaaggtccacatctcagggacactgtggtggacctatgtcatcagcgtggtgttccggctgttgtttgaggccgtcttcatgtatgtcttttatctgctctaccctggctatgccatggtgcggctggtcaagtgcgacgtctacccctgccccaacacagtggactgcttcgtgtcccgccccaccgagaaaaccgtcttcaccgtcttcatgctagctgcctctggcatctgcatcatcctcaatgtgggccgaggtggtgtacctcatcatccggggcctgtgcccgacggagcccagcgccggctcccaatccaactttcccgcaaggggctcggggcctccgggncaaccgccctctcaacctggaaataccaa

SEQ ID NO: 366726 - DNA, 675 bp, Homo Sapiens
gtctcaagccctcccgtttccacgcacgccgtcgatcggccgttggacgccaccggcgacatggatcccctccgcctactcctcccccgcgcccaggcccagccattgcttccgctccccgccggcgtcccagcgccgagcgtcaggccccgcctcgtcccgcggcgacgggcgcgccgccaccgcaacggggccgcgcggatgcttccagcctcggccgtggcgtccgagtcgccgtggacggagcaggatccgccgtctggggagaaggaggagcggttcgactggctggaccagtggtaccccttcgcccccgtggaggacctcgaccccggcgcgccgcacggcaagatggtgctggggatccgcgtggtggcctggtacgaccgcggcgccggcgagtggcgcgtgttcgaggacgcgtgcccgcaccgcctggcgccgctctcggagggccgcatcgacgacaagggccggctgcagtgcgtgtaccacggctggtgcttcgacggccgtggcgcctgcaagttcatcccccaggcccccgccctcaggccccccggtgcacaccaacagcaaggcgtgcgtggcgtcgtacccgtgcgtggtgcagaacaagctcctgtggttctacccgcgcgccgggccggagcacagggacgtgctgcagcggaa

SEQ ID NO: 366727 - DNA, 1077 bp, Homo Sapiens
gggtccggaattcccgggatcatcgcccccgactgtggagaagtgtccggggtagccccgttacaggaatgtgtttctgatcatctgaatcttaatcatgtccaactgcctgcaaaatttcctgaaaattacaagcactcgtcttctatgttcaagattatgccaacagttaagaagtaaaaggaagtttttcggaactgtgccaatatccagattgcataggcgagttgtcattacaggcattggcttagtgactcctcttggtgttggaactcacctggtttgggatcgtcttatcggaggagagagtggaattgtttcactggttggtgaagagtataagagtatcccttgcagtgttgctgcttatgtgccaagaggtagtgatgaaggtcagttcaatgaacaaaactttgtgtccaaatcagatatcaagtccatgtcttctcccaccatcatggccattggggctgcagaattagccatgaaggattctggctggcatcctcagtcagaagctgatcaagtggctactggtgttgcaattggcatgggaatgattcctcttgaagttgtttctgaaactgctttgaattttcagacaaaaggttacaataaaggttagcccattttttgtccctaagattctggtcaatatggcagcaggccaggtcagcattcgatataaactcaagggcccaaatcatgcagtatccacagctgtaccacaggagctcatgctgtgggagactcatttatgatttatagcccatgtcaaagaccatgcatatgcccttgcagtttcctcaactaagggagcaacaggacatctgctgggagctgcaggggcagtcgaggcagcttttaccacattagcttgttattatcaaaaactaccacctactttaaacctggattgttcggaaccagaatttgatctcaactatgttccactaaaggcacaggaatggaaaactgagaaaagatttattggccttcaccaattcctttgttttggtggtaaaaatgcaagactttgtattgctggactgtaaaccatatggatttgtataaatg

SEQ ID NO: 366728 - DNA, 1520 bp, Homo Sapiens
  misc_feature (946)..(1001): n is a, c, g, or t
  misc_feature (1086)..(1133): n is a, c, g, or t
gcgtatggaaagcgccagccgagcggcatgccagtgcggggctggccatgtaaggcccacaggcggtcctgcccgcccggtgccctgcggagagcctcgtgcagccctgggcaccgcccctgccctgccctgaccccttggccttgaaatgctgtcatcggaggagccgtcccgctcgggacaaggccagcatggacaaagctagagctggggcaagcaaggagccttcctgtcctcgaggccgtgggaagagaagcacgcccagggggccactcctgagagcctctctgtccaccaggcctctgcagaggggtcaccatggctctggcccgaggcagccggcagctgggggccctggtgtggggcgcctgcctgtgcgtgctggtgcacgggcagcaggcgcagcccgggcagggctcggaccccgcccgctggcggcagctgatccagtgggagaacaacgggcaggtgtacagcttgctcaactcgggctcagagtacgtgccggccggacctcagcgctccgagagtagctcccgggtgctgctggccggcgcgccccaggcccagcagcggcgcagccacgggagcccccggcgtcggcaggcgccgtccctgcccctgccggggcgcgtgggctcggacaccggtgcgctggccaggcgctggcacccattcggctttgtgccaggtgcccgaaaactggcgcgaggtggcctgtcggggacagcactgggcatggccctggccctgcacctcctgtctcccagcaacggcacgggggctcctgcctcctcggtctcggcttcggccttcgccatgcacctaccgccagcagccctcctaccctgcagcagttcccctaccctgcaggcgcccttcgtcagccagtacgagaactacgacccctgcgtcgcggacctacgaccagggtttcgtgtactannnnnnnnnnnnnnnnnnnnnnnnnnnnnnnnnnnnnnnnnnnnnnnnnnnnnnnntcatctacccctaccagccccgggcgcgctacgaggagtacggcggcggcgaagagctgcccgagtacccgcctcagggcttctnnnnnnnnnnnnnnnnnnnnnnnnnnnnnnnnnnnnnnnnnnnnnnnnacggcctggaccgccgctactcgcacagtctgtacagcgagggcacccccggcttcgagcaggcctaccctgaccccggtcccgaggcggcgcaggcccatggcggagacccacgcctgggctggtacccgccctacgccaacccgccgcccgaggcgtacgggccgccgcgcgcgctggagccgccctacctgccggtgcgcagctccgacacgcccccgccgggtggggagcggaacggcgcgcagcagggccgcctcagcgtgggcagcgtgtaccggcccaaccagaacgggcgcgtaactcctgctcagactcctgcatgcccaggaaggaaggtggaggggcaggaacaggacggacaggcccgggctctggcacatcctg

SEQ ID NO: 366729 - DNA, 527 bp, Homo Sapiens
caccagcaccgcagtcccgccggtccaacagtgcgggccgaaccactccggcagcaccccggcgtgcgcctccccgctgcccacggggccggacatcacgtccccgatgattatgaggtagacggtgagggtcccgacgcagttgaaggcgatgaagacgttgagcagcttggcgccggcgcggccgaacgagccgcccatcagcgccgcgtacgacggcgtgccccgggtgtaccggagcatgaagtccacggcgacgttggcgaggagcgctacgcacacgatgagcgccagggccggggccacgccgagcacccgcatggccgccgggatcgacatgatcccggcgcccaccacgctcgtcgacacgttgaacaccgcgccgaggacggacgcgttgccgggaggcgcccccgcgtcaccggcgacgcgctccggcagcaggagcgcctcctccgcctcgctgccggcggcggccatgccgggaccgcgcgagctcttggacaccatgataagcaaagcaagag

SEQ ID NO: 366730 - DNA, 869 bp, Homo Sapiens
tccctgcctagcaaggcccagcctggggcagaaatggctgcaagtggccgaggtctctgcaaggctgtggccgcctctcccttcccggcgtggagacgagataacacggaagccaggggaggtctgaagcctgagtatgatgcggtggtgataggagcaggacacaacggactggtggctgcagcgtacctgcagagactgggggtgaacaccgccgtcttcgagaggcgccatgtgatcgggggtgcagctgtcactgaggagatcatcccagggtttaagttctcccgcgcgtcctacctgctcagcctgctgaggccgcagatttacactgatctggagctgaagaaacatgggctgaggcttcatcttcgaaacccctactccttcacccccatgctggaagagggtgcaggcagcaaggtgcccaggtgccttctgctgggcacagacatggcagaaaaccagaagcagatcgcccagttctcccagaaggatgcccaggtctttcccaaatatgaggagttcatgcatcgcttggcattagccattgaccctctgctggatgcggcccccgtggacatggcggccttccagcatggctccttgctgcaaaggatgaggtcgctctccaccctcaagcccctgctgaaggcaggcgcatcctgggagcccagcttccccgatattatgaggtcctcacagctcccattaccaaggtgctggatcagtggttcgagtctgagcctttaaaagccactctagcacagatgcagtgattggagccatgaaaagtccccagactccggggatgggtatgtgctgctgcaccatgtgatggggggcctggagggaatgcacggggcctg

SEQ ID NO: 366731 - DNA, 1129 bp, Homo Sapiens
  misc_feature (739)..(759): n is a, c, g, or t
gttaatcgaactataatgttggtgtgttgtcccgatgccttttaggcggcggcttggtcatatcctcgttttcacccttttgggggccgagcgcgcacatctttgggcacgggtttttagtacgctgtggccacagtgtttagcccccccctgtgtgtttttatcccccgatttttccaggcgcctgtgggcgccggggcgctttatccccgcgtttccggggcttttggactgagattgtctttgatccccgggggcccgggctttttttagcggcttaagggtttgcgatatgtgagttgctagcgcttgtgctatccgtgtgttgtgaccttttttctccaagcctctgacccttgctgcctgtgtcccctgtggtcctcttggaatatgaggttttttctcgtggaaagccatgggggccctttttttgccctcccaacgtgttcactgccgaacaaaccggggttatatggtaattctgtggaagattttcctccgtgtgtgggttaggccgccgaaaatagggggcccttacacatgagaggggtgtttgacacgggattaaatggaactctccagagatgtatccgcggatcaggttggccaccgtttttccattgttttttttgtgccaaagtagcaaaaggggccttacattcttgagcccccctccaagagaagttctgcggaaattcacggggtcccaagaatacttccatttacaacctcttggggnnnnnnnnnnnnnnnnnnnnnggcaagaatatggtaacatgatggtaattagcagggagaggtgtaaaagaagcatatgaaaataatattatatcactgggcttctttgtcagtgggtcaggttatgacctcaaatggcagtataactattactgatgtgtagaattttgacttaaaaaaatgcttgagagtaaaatcacctgagctatccataatgcattagtgtccatatccttttagatcaccagaaacaaaaaaataagaaagcatcacctgaattttactattgttaggatatacaaatcaacaatagcataaaagataactcatatttaagtcagaatttttgttttggcctgactccagtgaatttatgaagattgtgtaaggc

SEQ ID NO: 366732 - DNA, 1060 bp, Homo Sapiens
ttacttttcatatttatgatttggcaggaaagtttgagttcatttgaagttaggctttttaatagtttttctcctcccagtgaattgttctgagttgataggtgtaaaatttatagattttattgataataaaagtttgtaagcatctttaatgtagcgattccattgcttattttttattcagcactcaggtcacttcctatgtgctggagataattaaagactccacttccaagaaaggatacaacaaggaaaataagaggttgttaaataaaaattatgccaaagataagcctgtagaaagcttctgtggtgcgtatttggtagattttatggacggatttcgtgaaggataaatagcagcgtcctgaggggggaaaaaaggatagaagtggccaaatacaagagaggaaatgggagaaagaataggatatgaagaagcctggcattgagaggtagtattggcttgttaagaaaacttgtttgcctagcccctaagttctagtctcactcagtattgggtttagggctcctctagattctagtacatcatgatagatcatgcagtcagtaaaagtcctgctgattttccccagtaaagtgctttagtccacacaaagcctgatctttaatccatgcctagaattggcaaatgatgccaggaaagaaaacagttggtagtctcagctatgtagaaaagacaaagacttttagtacatctagtcttaagcgcttccacagctctttcgtatctgtaatgtattttgcatttgatccattttttcctagttactgcacctgggagcgactgccagtactaccacatcatttcggtagtggaggtccccatcgaagggtttttttcatagcacatagcatgatcacgtctaggaagatcgttctggctgtagatagtataattatctactaatacaaagggggaaaggacgtgagatggatgtgaaagggaagttttgcatccatttacttgaaagatactgtttcttctgaatttaatcacattggggattgggaaaagtaggtggataaaaatttaaaa

SEQ ID NO: 366733 - DNA, 831 bp, Homo Sapiens
ttcacctcgcttgagcctgtctactcaccccctggcaccccccaacttgggacccccgaatctgtcagggatactcctttggtggcaccctccattcgtcgttgacccaccacgacgcggtgatgaccgatgggcttggaagcgccctggtgactggagacctgtccaggtcggccagcggtggcccaggagctgctattgatgcaggacttcgcccgttcgtccagcatgtacgagctggacctgcgggagcctgcgctggccagggcagcttttctgtgtgtccacgctgcctgccagcgccagacagccaggagttcgcaagtcaagatcctcagtcgcaggcatggaggcgaacacgcagcgcaaagtggctgccctgcgcctgtgccagtcacaccccaacgtggtgaatctcacgaggtgcatcacgaccagctgcacacgtacctggtcctggagctgctgcggggcggggagctgctggagcacatccgcaagaagcggcacttcagcgagtcggaagcaagccagatcctgcgcagcctcgtgtcggccgtgagcttcatgcacgaggaggcgggcgtggtgcaccgcgacctcaagccggagaacatcctgtacgccgacgacacgcccggggccccggtgaaaatcatcgacttcgggttcgcgcggttgcggccgcagagtcccggggtgcccatgcagacgccctgcttcacgctgcagtacgctgcccccgacctgctggcgcagcagggctacgacgagtcctgcgacctctggagcctggcgtcattctgtacatgatgctgtcggctagtcggg

SEQ ID NO: 366734 - DNA, 812 bp, Homo Sapiens
  misc_feature (587)..(587): n is a, c, g, or t
  misc_feature (782)..(782): n is a, c, g, or t
  misc_feature (798)..(798): n is a, c, g, or t
taggtctcctctactcttacccctagaatggaacgcattaccacttctttccaccaccagctgagaaggtgatgtcattaggcagaaagtcggcaccgaccgtgtctgaggtgccagcgttgccacaagaccctgactgctgggagtcatgctgagcatgatggagtcccctactgccacgtctccctgctacggctacctgtttggccccaaaggtgggcagccccatcccagacatctgggatggcatgtacatgcctgaagtatggcatgtacatggtctgtgggtatgtgtggacaacttcccctgtggttaagcatatcctggccccccctactcaagttccctctaggcctgaaaccctgcaccacagacccagggcctttggtgatagggctctctctctcaggtgtgaacattggcgatgtgggctgctacatctatgacccagtgaagataaaattcaaatgagacgctcacaaaaaaggcaccctaactcaggcctcccatcatgcccctcatggtccaatggaagctacaaaaatctccagtcccatgggggttggggaaggtgggatcttggggncctgggcctaggctccatggtaggccagagagtctagactttctctgccaattttttccctttcccatttctatctggttagggaacagcccgttttgaagggtatcctcctcctggccatcacaacccctttccccagcacattctggagcttcaaggtactcataaaacttgtgtttattgaatttcagcctntgtggcttcttcaatnaaatgttggctccc

SEQ ID NO: 366735 - DNA, 519 bp, Homo Sapiens
aggaggccagtccatgcacagctcaggagatgactgggccagttcctccaagaggtcgtccgtgcatggcagtgagtgaaaacctaacaggggtggcccccgtgtgccagctcaggtgactggagccacgagggcatgacaggttcccagcagctgggccggccagcctgtgcactgtgggggctggtccttgagtcgtgtggccgtgcctcccagccctgccagggggctgcggcctaggggtccacgggaagcctccgtcaggagtagactgcagccctgggggccagctggtgctgcaaggaagggtgggaagcttgctggcttctgttgcgccactgagacggcagagaccccaggatcccagagcttcccaggatccctcccagatcctctgctgactccatatggaggcctcacaccagagggtagggcagcagatcttctttataactatttattgttcgaaccacttttaggatgtaactttataaataaacatgagcgctgatgatttgc

SEQ ID NO: 366736 - DNA, 1088 bp, Homo Sapiens
cccaacctacagcgaggttcttagaagttaccacttcgccctgtctccgggtttagtagtttctccaatctaattggaactattacttgttacttggaaactgacggtctagttagtcttcccactgagaaagaatatttaattattactgctttttgggtttaacaagctttttgttgtatgttgttgttgactacgctccatcctattgacttttcttcccgggaatcattgcaatgacttattttatattactatattttatttcatattttaccttttctccacgatgcttaaaagaaaggcgctccgaaatctggctctctgcgcccaggggaacgaggcacaaatctccgccactcagccccactgagcagagactgcgagtccgaaccctcaagttcctcggggctttgacccctcaatggcggcggtctaactgctggtaaaacccccggcccctgactgttccaccgcccgtctcccaaacgcccagcgaaggctgacttaggtggcgggcggacctcatcgattcctcaaaccacatcgtttggtcaaaatcgcccgccctctcttcgctcggattttaaaggctaggcttgtaagtcagtaagttaacggtatttgggccctgggctgcccttgtgggtcagggtcactgatgtccgcgacacggactggaccgcgcaccacgcctgctcccggcagaggcccacccgggtggctgaacgcagcgcactggggccccgcggtccgagagcggcgggggaggagccggcgctcgccgaaacgttcccgggacagtccggcttgggggactccaagcgggtcatgggattgccggcgcttgcccttctctgagatcctctgatccccccgcaggcacgagatcccctccaaattcgggtcaccctcatacacgtctccgtgacgccgaagtcacgagcgacagaggcacaaatatcacaaagtcccggactccaggccagcccaggcaagcctgagagactttagaggagcctgtgctaccggcatccgagacaccctcgaaacagtgcccaggccctgtgaaaggacctcgcgagcag

SEQ ID NO: 366737 - DNA, 214 bp, Homo Sapiens
ttttactattttttactgtgataaaaaatgctgtggcaaacacctttgtgtcacatacattgtcattctgtccagttttctctatagaaaccaatttttagaatttcttggttaaagtatatacatttcacgtgctttttgactagtttttgtattagataacttctgattaaacatttagtttaaatgattaaaagtatggcattacaataag

SEQ ID NO: 366738 - DNA, 766 bp, Homo Sapiens
gcctcacccatatgtgtgcacgtgcgaccgccggagctcccccatgccgtcactgccccggcacctcgagcatcttcccgggtttactctttcctaatggaatccgatgcggaaggctcgctaacgtgggaatcggtgcataacggaggactttctgctggcacgcgctagggatcatacgcggtgagatgcgatctccgagcgtctgacatgcgcacagtcccatgaacggtcggacttgtggcactgaaacagctgtgactacatccgcgagtacgaacagtgcctgaaagtgctggatgcgggagtctccagcagtgtagccgcagtcctgggctgtggtgaccgaggccctgagccgctctgccttgctgcccccaggtgggccgccaccccttgacctgcctgggtccaaagatctgagccctgctggcaggacttcaagtatgaagccccactacaggggattttgctcctagagtaaggctcatctggtcctcggcccccgcacctggtggccgtgtccttgaggtgagccccatgtccactctgggccactgtcaggaccacctgtgggagtgtcatccttacaataccacagcatgcccggctcctcccagaatccagtcccagcctgggaggatcaaggcatgaatcccgggccgttatccatctggaggctgcagggtccttggggtaacagggaccacagacccctcaccactcacagattcctcacactggggaaataaagccatttcagagg

SEQ ID NO: 366739 - DNA, 1160 bp, Homo Sapiens
cccaaacccagccactcacacatggcgggctcagcagccaccggccccgcccctcctcgtcgccgcagtcgcaactgcgtctgcggccacagggcggacagccacgcctctgcggagggcgaccggaagtgctcacgtcttcaccttccccgccacgccaccgtcctttcaggcccagcgtgcagcaggaaggaggactcttttgccgcggactcaagccggaagccgccttcctagtggagacgcgagtgggggaggagcagtccgaggggaacgtgggttgaacgttgcaactagggtggagatcaagctggaacaggagttccgatcgacccggtaccaagaaggggagtgcccgcggcagaattttgattcagctaaagttccatcagatgagtattgccctgcttgtagagagaagggacaagttaaaagccttaaagacttaccgaattagttttcaagaatctatctttttgtgtgaggatctgcagtgcatctatcctttgggctctaaatcacttaataacctaatttctcctgatttggaagaatgtcacactccacataagcctcagaaaagcgaagagcttagaaagcagctataaggattcacttcttttagcaaattccaaaaagactagaaattatattgctattgacggtggaaaagttttgaacagcaaacataatggagaagtatatgacgaaacctcgtcaaacttacctgatagtagtggtcaacagaatccaattaggacagctgattccttggagcggaatgagattttggaagctgatactgttgacatggctactacaaaagatcctgctacagttgatgtctctggaactggcagaccttcccctcaaaatgaaggatgtacatctaaactggaaaatgccactgggagaagcaatggacctccatttccccaggcttttatgtgtccaggggaaaaaatgcttatgctctccggttgggttaaactggatccctggccgctttggggggcctccggaaaaagtttaaaaaaaccccgggactgggactggggcctccaaaggagggaattcctatttctcggggggggttggctttcccaaaatataaaccccgggcaaaaacccttttctttaaatccccccgcaaatgtgga

SEQ ID NO: 366740 - DNA, 982 bp, Homo Sapiens
  misc_feature (54)..(54): n is a, c, g, or t
  misc_feature (134)..(134): n is a, c, g, or t
  misc_feature (471)..(533): n is a, c, g, or t
taagactaagtcaacacctttaggactgaatcagggcaatccccccatgtttgncagggaaactggaaaagctgccctggtgtctcaagaagcctgtttctaaaagcatcaccgccccttcccccaaccagtgnacagtcaggctgtgctggccaaagagcccaggctctggaatcagatggccaggatttgaattcttgtgctgaggcttcctagatatgtaactttgggcaaattactttacctctctaagtctcagttttctcctctataaaatggtgataacactgtcttctgcagtggttgctggagataagccagtctgtgaaagtgccaaacagcaccgccttttgttaagcaacaaagaaataattagttctcactgcctcccaggtccgcacacgggagacatatccaaagcctgcaaggatgatgccaggccagatgaagtggaattttgggtcctatctnnnnnnnnnnnnnnnnnnnnnnnnnnnnnnnnnnnnnnnnnnnnnnnnnnnnnnnnnnnnnnnctgattgcataatctttggaagatcctggaatcaagaaaatgaccacaagtattttctcactactgttctctgcataagtcctggtcccatgagttctaagggaatggaagctgctctcaaagtgaagaatccctcaggtgccatgaacaatggaaagaagggaccctctcaccttctttgcatggcttcctagactgcaggactaagcctgcaggagcaagaggatgactggactggtcctcacagaaccatcatgccccagggatgagctaggactacagtggtgactttctttgaaagcctaaaagttccagggttaggtatcaaagggagtaaatatgccacaacgttttgtgcacattaactgacccagatctgtaagactcctacccttagattcccaaaagagcacagacagcccttggaaccaactcaatttttctccagg

SEQ ID NO: 366741 - DNA, 871 bp, Homo Sapiens
cttagtgggggagtcgtcagagagcccgggtaggttccaggtagtgccggctggcaggcaggaggcaccttggggttgaagcagctgaactgggctttggtgcccttgaaccggaccatgtagagcgcatctgtcagacgattcatgctgggggtgctcgtctcctggtctccaagaaacaccaaccacagccaggccatcaggtgctgaggccgcctccccaaaagtgctgtacttcttggcattccagtgaaccagatgcagctcgctggggaaggacttgccgtccaccgtgtgctcagaacccacatcgtgcttcttgccccagtggaagtgaaactgcttgaggcggtagggcccttccagggggcccccagtcaccacggttcggtcatcgctgtcattgaagtctacctggacagagtggccattgttggtgatgctgagggacatgcaggcctcataggaaagctccagtggttgcaggctgggagagtacacagcctggctggagatgatattgatgggtgattggcgatctccctgggcaatgggatacagcttgtgccaatgcgaggggccttctgcctcttctccctttctctgagtcctaaggaaactgaggcaggatgaaggagctctcttccgcgtcagcccaggaggctggtgtgggccacgggctcccacgactcacacccggacgtgcgcaaacaccctgctcggtgtagacacccagacacatgcttgcgcccccaagtgcccccttccctcacgtaccggccgagaaggcagctcggccacttctgcggggaaattctctccgggggacactgcgcccttgccacgcggagccccgctcccccgaggtccc

SEQ ID NO: 366742 - DNA, 772 bp, Homo Sapiens
taaggatccgctgctttaagaggctgctccgcggtagcgagcggggccggagccgcagcccgaacgagcggaccgagccgaccgggcaggtgcacggcgtgcggggacggcagcggcatgaccggccaccacggctggggctacggccaggacgacggcccctcgcattggcacaagctgtatcccattgcccatgggagatcgccaatcacccatcaatatcatctccagccaggctgtgtactctcccagcctgcaaccactggagctttcctatgaggcctgcatgtccctcagcatcaccaacaatggccactctgtccaggtagacttcaatgacagcgatgaccgaaccgtggtgactgggggccccctggaagggccctaccgcctcaagcagtttcacttccactggggcaagaagcacgatgtgggttctgagcacacggtggacggcaagtccttccccagcgagctgcatctggttcactggaatgccaagaagtacagcactttcggggaggcggcctcagcacctgatggcctggctgtggttggtgtacatttggagacaggagacgagcaccccagcatgaatcgtctgacagatgcgctctacatggtccggttcaaggggcaccaaagcccagttcagctgcttcaaccccaagttgcctcctgcctgccagccggcactactgggacctacccgggctctctgacgactcccccactcagtgagagtgtcacctggattgtgctccgggagccc

SEQ ID NO: 366743 - DNA, 1446 bp, Homo Sapiens
  misc_feature (51)..(87): n is a, c, g, or t
agatgtatagactcactatagggcgacttggagctcacgcgggggcggcgnnnnnnnnnnnnnnnnnnnnnnnnnnnnnnnnnnnnnatcaggccaaatcggccgagctcgaattcgtcgagagcggaggtgagcggggacctcgggggagcggggctccgcgtggcaagggcgcagtgtcccccggagagaatttccccgcagaagtggccgagctgccttctcggccggtacgtgagggaagggggcacttgggggcgcaagcatgtgtctgggtgtctacaccgagcagggtgtttgcgcacgtccgggtgtgagtcgtgggagcccgtggcccacaccagcctcctgggctgacgcggaagagagctccttcatcctgcctcagtttccttaggactcagagaaagggagaagaggcagaaggcccctcgcattggcacaagctgtatcccattgcccaggagatcgccaatcacccatcaatatcatctccagccaggctgtgtactctcccagcctgcaaccactggagctttcctatgaggcctgcatgtccctcagcatcaccaacaatggccactctgatccaggtagacttcaatgacagcgatgaccgaaccgctgcatctggttgcactggaatgccaacaagtacagcactcttcgcgaggcggcctcaccacctgatggactggctgtgcgatgggggtttttggagacagcagacgagcaccccagcatgaatcgtctgacagatgcgagctacatggtccggttcaagggaacgcaaagaccagtacagcagcttcaacccaagcggcctcaggcagctgatggcctggctggggttggtgtaggattggcacgacaggagacgatgcaccccagtcagtgaatcgtctgactagatgcgcgtctacatggtccggttcaagggcaccaaagccccagttcaggctgcttcaaccccaagtgcctcctgcctgccagccggacactgactggatcctaccgcgggctctctgacgactcccccactcagtgagagtgtcacctggattgtgctccgggagcccatctgcatctctgaaagtgcagatggggaaccgtgccggagcctgctttttacctcggaggacgatgagaggatccacatggtgaacaacttccggccaccacagccactgaagggccgcgtggtaaaggcctccttccgggcctgagctgcccatctgcctagccggccactagggcaccatcttctcaagggcttccatgtcagcagacaccaaaccatctgaggcttcctccctggggggtgctggggaccctccttcagccagtttgctccttggtcaccctggaggcttctcggatgggacccttgagtctggggccccttcagctgccctgcggacaggaagacaggagctaagcggctcc

SEQ ID NO: 366744 - DNA, 974 bp, Homo Sapiens
tctgagaatgctgaccattgctggataaacctgaactcaaattcctttggcctccacactgttccaaggctgggagctcggtgacttctgaatttaaggccaggtcaaaagagtggctctccaactccaggaatacctcaaaatctgctcctgacaagcagcaattcgcttcatgaattttgtataacgtctgatctccacttttaattatggtcttctcatatttttcatcaccatcattaggaaggctttgggaaagcaactgatccatggcaatgccttctctctgctgatagtccctcagaaggctgtgggcatgatccaggttgacaaagtccctgtaatcatcctcatctgcaacacagatgtagtagggcaggaagagcggcagcccaggaggcacaggatgggcagcacccaggacagcatcctgcaggcggaggtcttggagccgagcagtccagtctacgtctttggcactgctggcatcattcccaaaatccaaggtaaactgtggtgaaggcccctcctcagtatcacttccccagtcatcagcaccttcacaccagtcctcagctgcaaggctgtttccctgtttctgagcgtcctgcgcctctctctctggcacctgcaggcactgggagcggaacaccttccagctgcgcgcaccgccggtgctacagccggggcaggcgcacgcgaacacgtgcagcagacggtgaaacggggagccttccagcgggcaatacacctgcacgaccagagcgagcggctgcccgcagcgctgacacacgggcctgggcgcagccacggtgggcagagcatccggaatgccgcccagcttgctagcagtccaggcacccggccctgtggggctgccgtgcaccggcgcatctcgaaggcccagcagcaccggcttcagaacggccgccatggccgccgggcgaccaggtaaaacgcaaactacggcggcc

SEQ ID NO: 366745 - DNA, 909 bp, Homo Sapiens
cggttggttgagaggacatccgtgcgtgactttataaagtgatttggcaaggtttttcgaggtaagtgatgatgtcaagtttgccagagatgatagataactcctgtgggcagaacaccttaggtcattccctgtttaaagtcaggtagctaagaggctgtttggtttctgcagcgctggctacctacttggggaacatggttgctcacaaaacattcagtacttgggcaaactctgggtgccatggtggccactgctgtctccgggagtgccatgtccacaaaactcagtcatccagacttgcttttgggagcagaagccagaggatgacaggtgccaacagacaggcagggatcaggttatctttggcttcttctgttctgtctttctccccctcaactgtgaatgcttttggagcctctgcagtcaagacagagcttttactgagacagcagttgccattttcagctgatagaaactcaggggatagaaggccttcccgtttgagccgcaggtatggcacacacaactctgcagctctgggcaagtgccttgggatgcccttgtcactagtatggctctgtcctgctaatgccagtctgtcaatacttgattgttcattctttctctttgcctctcaccgaaaagcactcggtgagaggaaatgaactgatattcaaaaagacagtttggtctgacataagaaaacacatattggccgtataaatacttcagacattaagctaaagactggctccaattctaggacaccaaggcaggccacaatgcacagggtccatccctatatatgtttattttgaaaaacaggagaaaagatcttctgtcttgagcaagtcagggttttacttgcctgggggcagggatttgaaaccagctgtcttctcctgg

SEQ ID NO: 366746 - DNA, 404 bp, Homo Sapiens
gcatcccaaggcacttgcccagagctgcagagttgtgtgtgccatacctgcggctcaaagggaaggccttctatcccctgagtttctatcagctgaaaatggcaactgctgtctcagtaaaagctctgtcttgactgcagaggctccaaaagcattcacagttgagggggagaaagacagaaagaagaagccaaagataacctgatccctgcctgtctgttggcacctgtcatcctctggcttctgctcccaaaagcaagtctggatgactgagttttgtgggacatgggcactcccggagacagcagtggccaccatgggacccagagttttgcccaagtacttgaatgttttttgttgaggcaaaccatgtttccccaagtagggtaggccagcgttttcag

SEQ ID NO: 366747 - DNA, 1235 bp, Homo Sapiens
  misc_feature (1026)..(1026): n is a, c, g, or t
aagccccagctcctggcggagcgagctagcctgcgaatttcagcatgagtgtactgctgaggtcaggtttggggccgttgtgtgccgtggcgcgcgcagccattccttttatttggagagggaaatacttcagctccgggaatgagcctgcagaaaacccggtgacgccgatgctgcggcatcttatgtacaaaataaagtctactggtcccatcactgtggccgagtacatgaaggaggtgttgactaatccagccaagggttattatgtgtaccgtgacatgctaggcgaaaaaggagatttcattacttcacctgaaataagtcaaatctttggggagctactaggtatatggttcattagtgaatggatggccactggaaaaagcacagctttccagctggtggaactgggcccaggtaggggaaccctcgtgggagatattttgagggtgttcactcaacttggatctgtgctgaaaaattgtgacatttcagtacatctggtagaggtaagccaaaaattaagtgagattcaagcattgacactgactaaagagaaggtcccgttagagcgaaatgctggatccccagtgtatatgaaaggtgtcactaagtctgggattccaatttcctggtaccgagatctgcacgatgttccaaaagggtacagcttttatcttgcacatgaattttttgatgttcttcctgtgcataaatttcagaaaacaccacagggatggcgagaagtatttgttgacattgatccacaggtttctgataaactgaggtttgttttggcaccttctgccaccccagcagaagccttcatacaacatgacgaaacaagggatcatgttgaagtgtgtcctgatgctggtgttatcatcgaggaactttctcaacgcattgcattaactggaggtgctgcactggttgctgattatggtcatgatggaaaaaagacagataccttcagagggttttgcgaccacaagcttcatgatgtcttaattgccccagganacagcagatctaacagctgatgtggacttcaggtatttgcgaagaatggcacaggggaaaagtacctctctgggcccaataaaacaacacccttttttaaaaaatatggggtattgatggcccggctgaaggttcttttagataaatccaatgagccattcagggaggcaccagttactttcagggaattgatatgttaagggaatccc

SEQ ID NO: 366748 - DNA, 1210 bp, Homo Sapiens
ttgcgtagggcctcgtccggtcacgactatccgctgggcggggtcggtgctgccgagggggcccggctgccggagtggacatggcggccggccccattagggtggtgttggtccttctaggggtgctcagtgtctgtgcagccagcggccatgggtccgtagcggagagggaggccggcggggaggcggagtggcaggaaccgtgggatggcgcggttttccggccgccctcggcgctgggcgcagtgggggtgacgcgcagctctgggacgccgcggccagggagggaggaggcgggggacttgccggtactgctgtggtggagcccagggctattcccccacttcccgggagactcggagcgcatcgagtgtgcgcgcggcgcgtgcgtggcgtcccggaaccgccgagcgctgagggactcgcggacgcgcgcgctgctcttctacggcacagacttccgcgcgtcggccgccccgctgccgcgcctggcgcaccagagctgggcgctcctccacgaggagtcgcccctcaacaacttcttgctgagccacggcccgggcatccgcctcttcaatcttacctccaccttcagtcgcaactcggattacccgctgtcgctgcagtggctgcccgggaccgcctatccggccccgccggtgccccctcccttggaacccctcgtaatgcgcgccacctctcctaccacgccgctgctctatcttcgcccacactcatggccaacggtccagcggaaccgaacaccactccgggttagcaggctattgcgcccaatccccgcctcgtatctctccttgtaaatcccttgtgtcatcccccgaactgtcctcttatacaaatttacacgcatataccgcgctgtcgtctctctggaggattccatgttctattcgaaacatttcttggtcctgttacttactcttctactttggccgctttgtcccctccgtatctatgatcacggtgtcactctgagtgcccatcattgcgggtgctccccaattctccccttgcaccctcttcaccatccctgtttaccgcgcccagctttccctctcctgttaaggagacctgcgatctctttgtccacttcctcctgctcggctttaattccctgtcaaccacgctctccgctaattttatccagtatcgcatcgcgatacgtaccgttcgagtacatcttccacaa

SEQ ID NO: 366749 - DNA, 1669 bp, Homo Sapiens
  misc_feature (73)..(87): n is a, c, g, or t
  misc_feature (128)..(185): n is a, c, g, or t
  misc_feature (1148)..(1148): n is a, c, g, or t
  misc_feature (1306)..(1306): n is a, c, g, or t
  misc_feature (1354)..(1354): n is a, c, g, or t
  misc_feature (1383)..(1383): n is a, c, g, or t
  misc_feature (1405)..(1405): n is a, c, g, or t
  misc_feature (1452)..(1452): n is a, c, g, or t
  misc_feature (1519)..(1519): n is a, c, g, or t
gccgaagtattcctcccacctcagcctcctgagtagctgggactagagatgtgagctgccatgcctggctaannnnnnnnnnnnnnnatacagacaaggtcttgctatgtggcccagggtaatctgannnnnnnnnnnnnnnnnnnnnnnnnnnnnnnnnnnnnnnnnnnnnnnnnnnnnnnnnnatgagccaccatggtagaccctgcattactcctctgtgctcactgccacacgcagctcaacctgagctacacagccaggtgtcaggtgcgtctctgctgatctgagtctaactgcagcatggacctgggttttccctgaagcatctccagggctggagggacgaccgccatgccctaaaggtatgacagccaggctcctgagagggcagttgcacttcctgtgtggttgcacataacaaaaccccatgacaagaaggatccagcctccgagtgtccacaccctgtgcgtctctctgtcctgccagcactgagggctcatccaatccgcagagcagggcagtgggaggagacgccatgagccccatcctcacggtcctgatctgtctcgggctgagtctgggccccaggacccacgtgcaggccagggcacctccccaaacccaccctctgggctgagccaggctctgtgactcagcccgggaagccccgtgaccatcaggtgtcaggggagcctgcaggcccaggagtaccaactggataaagagggaagcccagagcccttggacagaaataacccactggaacccaagaacaaggccagattctccatcccatccatgacacagcaccatgcagggagataccgctgccactattacagctctgcaggctggtcagagcccagcgaccccctggagctggtgatgacaggattctacaacaaacccaccctctcagccctgcccagccctgtggtggcctcaggggggaatatgaccctccgatgtggctcacagaagggatatcaccattttgttctgatgaaggaaggagaacaccagctcccccggaccctggactcacagcagctccacagtggggggttccaggccctgttccctgtgggccccgtgacccccagccacaggcgtgtctaggaagccctccctcctgaccctgcanggccctgtcctggcccctgggcagagcctgaccctccagtgtggctctgatgtcggctacgacagatttgttctgtataagggagggggaacgtgacttcctccagcgccctggccagcagccccaggctgggctctcccaggccaacttcaccctgnggccctgtgagccccctcccacggggggcccagtacaggtgctatggntgcacacaacctcctcccttccgagtgtntcggcccccagcgaccccctgnaacattctggagggcagggacagatctatggacacccgtctccctgntcagcacagccggggccccacagtggggccttccgggaaaaaaacttgacccctgcttggttcaaancccccgggggttaattttttgaacacttttccttccggaacccaaaaaaaggggcagccccattccccccaatggggttctggaaaaccattgtacgggaaacttcttaaattacccaggctggattttcccccatgaaaatccctgtgg

SEQ ID NO: 366750 - DNA, 905 bp, Homo Sapiens
  misc_feature (813)..(813): n is a, c, g, or t
gtgggaaacaaataatctaagaatgaggagaaagcaagaagagtgacccccttgtgggcactccattggttttatggcgcctctactttctggagtttgtgtaaaacaaaaatattatggtctttgtgcacatttacatcaagctcagcctggacggcacagccagatgcgagatgcgtctctgctgatctgagtctgcctggcagcatggacctgggtcttccctgaagcatctccagggctggagggacgactgccatgcaccgagggctcatccatccacagagcagggcagtgggaggagacgccagtgacccccatcctcacagtcctgatctgtctcgggctgatgtcttgggccccatggacccacgtgcagacagggcaccatccccaagcccaccctctgggctgaacgcagactctgtgatcacccaggggagtcccgtcaccctcagtgtgtcaggggagccaggaaacccaggagtaccgtctatatagagaaaagaaaacagcactctggattacacggatcccacaggagcttgtgaagaagggccagttccccatcccatccatcacctgggaacatgcagggcggtatcgctgttactatggtagcgacactgcaggccgctcagagagcagtgaccccctggagctggctggtgacaggagcctacaatcaaacccagccactactcagccccagaccagcaccgtcggtgaactcagggaggggacatgtacatccctccaggagacctcaccaggtgggaatatggaaggggcacacgaacgagggcacggcgnaggagacagatgaaccgagcagaacggctgaaacacacagcccactgcaccacggaacagacccggcgccacatcacccgagggcacccgcg

SEQ ID NO: 366751 - DNA, 721 bp, Homo Sapiens; identical to SEQ ID NO: 98675

SEQ ID NO: 366752 - DNA, 1245 bp, Homo Sapiens
  misc_feature (1164)..(1200): n is a, c, g, or t
catggtcggagtttccgcttggatctgtccctcctgggctcttcatcgtgggtttccggagggcccatgtccaccccgttctcggctgtgtgcccttcacgcagcacgaagttttctcctggacgtcagcacctgggctggacctccctctgtaggccccccgtcttggcttctggctcggcagccctggaggacgttggaaatcacctgtctctgggccaatgtcctggtgttttcctgacgccagtgttgaggaggaggaagaagaggagggagagaagcaggatggagaccaaccaagaccccgatcagtacctcccagtgccttctcagaccactgtgggggactgaccctgtaggcatgaggggctggtcctcagggccagctgttgagacggaccttgtgggtgagggcctgggatcctccaaggatcctgagactatgagctccagggggtcactggggtgtgacagcaggtagtgggagaagccgtgtgagctgaagcacctgtaggtccccccgtgcactgaggtcacaggactcatggggaattcagcctggtgctgctgagctccgtgctctgatctcagatgcagtaggggatgggctgcccgctccttgatcagaaggaaagtgtccattgggctccgtgactgacacagcagggtcacgctctttcctgaggtcacaagaggactcggcagggctgaaagggtgggtttactgtaggctcctgtcatcaccagctccagggggtcactgggctgtgaccagcctacagggctgcgatagtaacagcggtatctccctgcatagtcctctgtcatggatgggatggagaatctggccttgttcttgggctccagtgggttctgtctgtcccagggtgctgggctttcctctttatccagacggtactcccgagcctccagggtcccctgacaccagatggtcacagagttcccccagctgatcacagagcctggctcagcccagagggtgggtttggggaggggccctgcctgcatgtgggtcctggggcccagactcagcccgaggcagagcagagccgtgaaggtggggatcatggcgtctcctcccaggggccccagctgtgcagatccgctctcgacgaattcgagctcggccgatttggcctgatnnnnnnnnnnnnnnnnnnnnnnnnnnnnnnnnnnnnncgccgccaccgcgtaaagctccgggcgcccatagagtcttcttct

SEQ ID NO: 366753 - DNA, 1048 bp, Homo Sapiens
  misc_feature (808)..(808): n is a, c, g, or t
ggtccggaattcccgggatcttctccgtgggccccgtgagcccgaatcgcaggtggtcgcacaggtgctatggttatgacttgaactctccctatgtgtggtcttcacccagtgatctcctggagctcctggtcccaggtgtttctaagaagccatcactctcagtgcagccaggtcctatggtggcccccggggagagcctgaccctccagtgtgtctctgatgtcggctacgacagatttgttctgtataaggagggagaacgtgacttcctccagcgccctggccggcagccccaggctgggctctcccaggccaacttcaccctgggccctgtgagcccctcccacgggggccagtacagatgctacagtgcacacaacctctcctccgagtggtcggcccccagtgaccccctggacatcctgatcacaggacagatctatgacagaccctccctctcagtgcagccgggccccacagtagccccaggaaagaacgtgaccctgctgtgtcagtcacggcggcagttccacactttccttctgaccaaggagggagcaggccatcccccactgcatctgagatcagagcaccaagctcagcagaaccaggctgaattccgcatgggtcctgtgacctcagccccacgcggggacctacagatgctacagctcactcagctccaacccctacctgctgtctctccccagtgaccccctggagctcgtggtctcaggaccctccatgggtttcagccccccacccaccggtcccatctccacacctgcaggccctgaggaccagncccctcacccccactgggtcggatccccaaagtgggtctgggaaggcacctggggggttgtgatcggggatccttggtgggccgtccgtcctaatgggttcctcctcctccttcctccctctttctcatcctccgaacatcgaagttaagggcaaaacactgggacatcgcaccccagaaaaaaggcttggatttcccaccatccctgcaaaggggcttgtgggggcccaaaacccccaa

SEQ ID NO: 366754 - DNA, 373 bp, Homo Sapiens
  misc_feature (108)..(108): n is a, c, g, or t
  misc_feature (203)..(203): n is a, c, g, or t
ccttcatctcagtgcagccaggccccacagtggcctcaggagagaacgtgaccctgctgtgtcagtcatggcggcagttccacactttccttctgaccaaggcggganaagctgatgccccacagtggcctcaggagagaacgtgaccctgctgtgtcagtcatggcggcagttccacactttccttctgaccaaggcggganaggctgatgccccactccgtctaagatcaatacacgaatatcctaagtaccaggctgaattccccatgagtcctgtgacctcagcccacgcggggaccttacaggtgctacggctcactcaacttccgacccctacctgctgtcttcaccccagtgagcccctgggagct

SEQ ID NO: 366755 - DNA, 669 bp, Homo Sapiens
ggcaagcgcagacagacagaacttgagagagcgcacgcgagatggcagcctccatgatcacctcgccgattgtggcgccgacgagcgtcccctccctctcccgccggggctcctccttcgccgtcgtctgcagcggtggcaagaagatcaaggtcgacaagcccctcggactcggaggcggcttgacagtcgacatcgacgccaacggcaggaaggtcggcaagaagggcgtgtaccagttcgttgacaagtacggcgccaacgtcgacggctacagcccaatctacacgccagaggaatggtctgaatctggtgaccgctacgccggcggaacgaccgggcttcttatctgggccgtcaccctcgccggcctcctcggcggcggcgtcctcctcgtctacaacaccagcgctctcgccggctaagagagcatctacgtgtaacacagggccgggtctctgcttgcatgcacgtctctgtaatctacatagctacctcctgtgaatgtatgcaatcaacgatgcaaagtaattgatccgaacagatggtttatgtgtatgtacgtaacgctgtaacgatatacttcctactttggaaactggtacaagggcggcatctctggcagcccaaacaacaacccaacacacacccacaacaaaaccaaagggc

SEQ ID NO: 366756 - DNA, 822 bp, Homo Sapiens
gctgggtggcgaattcggcacgaggcttgatgggaatcatggcagcatccaggccattgtcccgcttctgggagtggggaaagaacatcgtctgcgtggggaggaactacgcggaccacgtcagggagatgcgcagcgcggtgttgagcgagcccgtgctgttcctgaagccgtccacggcctacgcgcccgagggctcgcccatcctcatgcccgcgtacactcgcaacctgcaccacgagctggagctgggcgtggtgatgggcaagcgctgccgcgcagtccccgaggctgcggccatggactacgtgggcggctatgccctgtgcctggatatgaccgcccgggacgtgcaggacgagtgcaagaagaaggggctgccctggactctggcgaagagcttcacggcgtcctgcccggtcagcgcgttcgtgcccaaggagaagatccctgaccctcacaagctgaagctctggctcaaggtcaacggcgaactcagacaggagggtgagacatcctccatgattttttccatcccctacatcatcagctatgtttctaagatcataaccttggaagaaggagatattatcttgactgggacgccaaagggagttggaccggttaaagaaaacgatgagatcgaggctggcatacacgggctggtcagtatgacatttaaagtggaaaagccagaatattgagttatttcttaacaagtttcgagagagaagggagcaagacaagagcaagcaacggctattaaatgtcacaatcctttaattagaaaccatttattggccggacgcggtggctcacgcc

SEQ ID NO: 366757 - DNA, 1016 bp, Homo Sapiens
ggcctgggtggcgaattccgcacgagggcgcccgcggccgggccgcattgtgacgtagcggggccgcggcagcgcctccaccgcccgcctacttcggctgaggctgttctgctcctgccgctgcggtccgtcggtcggtcagtcagtcccttcgcgctcctgagccgccggcgcgccgggcgccccgggaatttataagtatttgaccgtactcaaaatgtgcaaggaagaataatggaagcccctgaataccttgatttggatgaaattgactttagtgatgacatatcttattcagtcacatcactcaagacgatcccagaactgtgccgaagatgtgatacgcaaaacgaagacagatcagaatggtcagttggagtgcgtacgctggatggtgagcgaaacagaagccattgcagaactgagttgttctaaggattttccaagccttattcattacgcaggttgctatggccaggaaaagattcttctgtggcttcttcagtttatgcaagaacagggcatctcgttggatgaagtagaccaggatggcaacagtgccgttcacgtagcctcacagcatggctaccttggatgcatacagaccttggttgaatatggagcaaatgtcaccatgcagaaccacgctggggaaaagccctcccagagcgccgagcggcaggggcacaccctgtgctccaggtacctggtggtggtggagacctgcatgtcgctggcctctcaagtggtgaagttaaccaagcagctaaaggaacaaacagtagaacgtgtcacgctgcagaaccaaatccaacaatttctagaagcccagaaatcagagggcaagtcactcccttctttcacccagttcaccatcctcacctgcctccagaaagtcccagtgggaaatctccagatgccagatgattgattctgtagccaaaagcaagccaggagtccaagaggggatcaagggttcttggaagccctgtcagccttcagccgggtaagaccaa

SEQ ID NO: 366758 - DNA, 855 bp, Homo Sapiens
ggatcacagatcagataactataacctgcgtaaaagaaggtgggcagccaggcttggtcttggcctccgttgacgaagtagtccacatgtccaacgggaatccgaatacccaattgtcggtgtctgtgtggatggctcccacgaagaggggcatctccagcatccaagcgctcttccacactgggccctcgtgtactcaggtccagcagggtccaggcctgtgatctgtcccagctggcctccgaagagctgtcccaccatgcccccaacgtgggcccccaggctaacaccaatgatgtggattgaggattccgacacacccagcaccaggagtttattgaggaaaagggagatctcgaggctcaacttaatcacatttttcacagctgagaagtagactcctgtagacccataaatccagtccacggcaatcacattagcattcgttgcacgcagaagggttctaataaatgtgtcaatccaggaaggctttgttcctaaaaccctgaatccatggataattagtttggttcccagagtggcattgaacccagagttttggaggtcactgcttccttctactagctgcccacagctaggattcgaagggacaaagaggagaaactggactttgagatcggtgccttcaaaaaggttggcgctctggaagtcagcgcactttggctgtggggtaggaggtgcatcccctgaacttccaacgctgagccacaaaatgaggccccccacccagaagcagctctcccagggacctgggggcatcgctgagctggaaatctcagagctggtatggagtaattccctaaagccaaagagatcatataacccagcctcccc

SEQ ID NO: 366759 - DNA, 144 bp, Homo Sapiens
acaccatccaccagttcatctcactgagctcgcaggcagccccagccaccagcgaaatggccgcgtcggcgctgcaccagacgaccagcttcctcggcaccgccccgcggcgtgatgacctcgtccgcagcgtcggcgactttg

SEQ ID NO: 366760 - DNA, 482 bp, Homo Sapiens
ctcttcggttgtccagcccttctcccagccctggtccctcagaaggagggtaactcccttccagaatgttacggtccgcctgcgtctctcagcacgccggtggcatttgggttgaccgcggaggcccccagtgccagagggtgttcacgttctgccgtgggctcagcccaaactttggacgctcagagacccaacgggagcgctggataaggtgttgacccccattccgcgccccacttcaccggccagcttacccactcctggactttgatctctctccaccaggccaggacgagctgatggctcgtggcagaaaacactctcaaggtagctggtccgaccgcgacatagcaccgatctagctcttgtagctccacccgcgtgaaccaccgaccgaccgctgggtcgcagctccgctcgatgagccagccgtaggatgctgcctgggctgtccagactagtacaggcgtctgcagtcatgg

SEQ ID NO: 366761 - DNA, 1019 bp, Homo Sapiens
  misc_feature (28)..(28): n is a, c, g, or t
  misc_feature (122)..(122): n is a, c, g, or t
  misc_feature (164)..(164): n is a, c, g, or t
  misc_feature (296)..(304): n is a, c, g, or t
  misc_feature (628)..(867): n is a, c, g, or t
  misc_feature (891)..(923): n is a, c, g, or t
tttggcccttgggagccccaaagattanttggaactttccccaagttttgggctactttggaagtagaagaggaagaagattccacaagtatgaatggactaagggaaagctggaaacattnaaacttttaaagagcccttcccctgcaccttaatcctctttncatctacttaactcattacatcaagaacagagaagtaacaacaaaaaatagagacacccttttggtctggtagagttggggacttcccaggattcagatggaccaaaaagctgagaccaaatctcacacacnnnnnnnnntagtcagatatcccccctcccttgaaacctgaaattcatggataagttattttaatgtttggcccatttgaaatgtggcaaaactgccaaatctctaactacttagcacatatttcaaactttaaaatgtctttctatattttatcccttatgtaacctgaatcaaaactgactagtgcacagcaagtatattaaaccaaaccttgtgtgtatatatgcacacactatggatggtttgttttctatttttacatgtcaaaaatatctccatgaacttccccaaaatttaattttaagaagttgggaccaggcatagtagctcannnnnnnnnnnnnnnnnnnnnnnnnnnnnnnnnnnnnnnnnnnnnnnnnnnnnnnnnnnnnnnnnnnnnnnnnnnnnnnnnnnnnnnnnnnnnnnnnnnnnnnnnnnnnnnnnnnnnnnnnnnnnnnnnnnnnnnnnnnnnnnnnnnnnnnnnnnnnnnnnnnnnnnnnnnnnnnnnnnnnnnnnnnnnnnnnnnnnnnnnnnnnnnnnnnnnnnnnnnnnnnnnnnnnnnnnnnnnnnnatgacagagtgagactctgtctcnnnnnnnnnnnnnnnnnnnnnnnnnnnnnnnnncttgcgctacctttcagaaatcttcgtattaaacctactggtaagcatctatatatttaaggatacctaccaaatatcctcgtcctgagacacttg

SEQ ID NO: 366762 - DNA, 1031 bp, Homo Sapiens
cggagctcggctctccccggcacgttctcagctgctcctggttcagacccagcgagggagccgcgagcgaggctcaccgtccccggcgtgcaggatccggggctgctgagcgctcgctcccgcgtgtccggcgcttggagtccccgcggcaggagaggagtcgggacactagagctccaggggcgcctgtgggctccagggcctccggcttccccagtccccttcagctaaagccccagagacgtgctcagccccaggacctctgcggaacaagatccggattgagaagccactgcaactaccgaaatgggcagcaaaaccttgccggcgccggtgcctatccacccttccctgcagctcaccaactactccttccttcaggcagtgaacggcctgcccacagtgccttcggaccatctgcccaacctgtatggtttcagcgcgttgcacgctgtgcacctgcatcagtggacgctgggctacccggccatgcacttgccgcgctcttctttctccaaagtgccgggcacggtgtccagcttggtggatgcgcgcttccagctgcccgcctttccctggttccctcatgtcattcaacccaagcccgagatcaccgctggaggcagcgttccagcgctcaagaccaagccgcgctttgattttgccaacctggccttggcagcaacgcaagaagatccggccaagctcggtcgcggggagggcccaggcctcccctgcaggtgggctgggtgccctcctcgacgtgaccaagctgtctccagaaaagaagcccacaagggggacgtctgccttccaagaccaagaaggaattcgtctgcaaggttctgtggccgccacttcaccaagtcctacaacctacttatcccatgaggcggaacgcacaccggacgagccggccctacaccctgtgaacatctgccaccaaagcctttccgggagggaagaccaccgtgcgagacacaggatatatttcactcccaaagagaagccccttcaagtggtcaagagtg

SEQ ID NO: 366763 - DNA, 1075 bp, Homo Sapiens
  misc_feature (56)..(98): n is a, c, g, or t
taaaagaccccccaaaagggggggaaccccgtgttgattccccctaagttgagaannnnnnnnnnnnnnnnnnnnnnnnnnnnnnnnnnnnnnnnnnnggaataagggtgggttggagcttgggcagaggcccctggccccgtttgggggcccaggcactttccagttggcaggaaggagggcccaggcgggggcacccccaggagcggggcacccgagccagggaccaggggggatccccaggaagaagtcccagggccttgcaggccgcgccggggggccccgcggcccaggaacacgcagaagtagttgtgcagacaggtgaccaggagggacaggacccacagcagggcgcacaccacggccgacaggcgcttggccgccggcgccagtaccaggcggggaagatgaccgaggcgcagcgctcggcgctgacggccggcaggaggctcacgccggtaaggaacatgcagagccccaggacccggcacacgctgcggatgtagtcggcaaacgtgcccaggaagccccccgtgttcaggatggagaacaccgccttgctgaagaggtagcccacatcggcgctggccaggtgcaggaagtagatggagaaggggttcctcttgatggagaagccgaaaaaccagaggaccagcccgttgcccaccaggccacacaggcagaggagcaggaagatgtagttcatgacggccggaggcggcagcatcgcgatctgctcgatggtcaggaagccccggctgtagagttccggggcctcgctcaggccagggcacatcttgttcctgttgccgggatgggcctcccaggagcagtttccagccatctccaggcctggcgcgtctgggcccctgctggcagctcaccagtctgcacacccacctgcagctgtcctgatccgccgaggcctccttttgtggagggctcttcctgtgactcccgcctccggccggcggacccgccggggcagcaggccagcgccgagcgcggcccggagcctggaaaataggagctcagagtagagccctctcctgctgatcccgggaattccggaccc

SEQ ID NO: 366764 - DNA, 818 bp, Homo Sapiens
ctggaatcactttgcctctaaaggccagagaaaaatcacagcttccttgtcggaggggaaaaggacaggtgatctggggaaaacgcagctacacctggagcaaggtctcttcccggcttggcaatctcagctgtgccggcgctacgggacccgagccgtcccagaaaccaaagggcaggcacggcagcaaacgcctgagtgctgctgccttcggtgactatagtgagaatggaaacttctaaggaagccaggttgttagaattgttaccccctttactcagagataacatagattatccaggctgagatggaaaacaagccctttattgaattttcaacacagactccctgcttctcatctccttaataaaatttcattaaaatccccttgaactcccatgttcaaatctccatttgttgacagacaaagccaacaatactctaaactgaggcctgcaagtcatttcatttgtatttttgtccagaaatttcccataggaagacttcacctcctacaactccgaagaaaacccttactgtccaaagaccgtcaccagcaaccatccgcagtcattcaaagtggaagctttcaccagcttttgtacattctctggtgtcaatatacaactgagttacagactgtcccctggctccctgacccttacaaaacactaaaagtttggatggactcaacttcaagctgctcatctgttagtaagtgatgttcactccagaacacattcatgatgagaactttctaaaagaccagcactgctcttcccctcctataatcataataatcatgataacctgaaaca

SEQ ID NO: 366765 - DNA, 925 bp, Homo Sapiens
aacctttcccaggggtggaattcacaggtttgggggtttgaaatcaaactttccaaatttcccaaaggaattccaggaagccttgaaaggaaaagattccctaattgaacttggaaggtgaccttgggaaaacctggggtcataaataaagcttgggggaaattccccaaatactttcaggtcacgtcttgctcctcggaggcactcattgatgtccaaggctgaatcaggcaggcctgggttcattagctgggtatagatgactggaaacaggctgtcaaacaattcattgaccatgtcatctacattgatgtcagaacccaagatgtagagagacacatctgtgaaaaattcacccacaaactcaaaagcttgtggagtcaggcttgggtagttgttcttgaacatggcattggtgtagttcttggcatggcgaacaacaatttcaaaggcctcttggaaaaccgcagcattctgaataattaagaacttgagctccatacttgcagactgaagcagctgttccatgttcaatcgtgctgttagttggtatttttcttccatctttcttgagcagcatgttgggcccttagggagacatacttgcaaatctgatcctggcacgggagtttctggcacccacttgagtccgggctgcagtctctggaagaaggagcggacttggtgacaggtggcgtccggcggcggcggcgggggctgcgcctgtcccgggaagtccaagctgagcagcatcgccaccaccaagcacgcggtgcgcacggtcccggccatcctgcttcgcagggagctaggagagcgcgggagagtggcagccggagcgagagcagtcccaggactcggcaagcctggcagtggccctgaggagcaagagacgtgctgctacccagccgctgcaaaagtttcc

SEQ ID NO: 366766 - DNA, 1283 bp, Homo Sapiens
  misc_feature (1267)..(1267): n is a, c, g, or t
attgcttctgggtttggggtgtgagaggatgcagagtgggagaccttaaaaccgtctgatctggctgctaaagcgagtgtctgacgaccacccattaacaccagcgagtagcgtttgctcacggctttaggataagaagcctggaatggtcccccctccgccgggagaagaaagccagacggtcatccttccacctggctggcagagctacctgtcgcctcagggccggcggtactatgtcaacacgaccaccaatgagaccacctgggaacgtcccagcagttctcctgggattccagccagccctggctctcacaggagctctctgcctccaacagtgaatggataccacgcatcagggaccccagcgcaccctccagagactgcccacatgagtgtccgaaaatccaccggtgattcccagaacctgggatcctcatcgccaagcaaaaagcagagcaaggaaaacaccatcacaataaactgtgtgacgttccctcacccagacacgatgccggaacagcagctgctgaaaccaaccgagtggagctactgcgactacttctgggctgataagaaggacccccaaggcaacggcaccgtggctgggggtgaactactgctccagaaacagctgaagggcaaacaaatgcagaaagaaatgtcagaattcatccgggaaaggataaagattgaagaagactatgcgaagaacttagctaagctctctcagaactccttggcttcacaggaggaaggctccttgggagaggcgtgggcccaggtgaagaagagcctggcggacgaagcagaagttcacctcaagttctctgccaagcttcacagcgaggtggagaagcccctgatgaacttccgtgagaacttcaagaaagacatgaagaagtgcgaccaccacattgccgaccttcgcaagcagctcgccagccgctatgcctcggtggagaaggcccggaaagccctcacagagcggcagagagaactggagatgaagacccagcagctggagatcaagctgagcaacaagacagaggaggacatcaagaaggcgcggagaaagtccacacaggctggagacgacctcatgcgctgtgtggatctctacaaacaggcccagtccaaatggtttgaagagatggtgaccaccacattggagctagagcggctggaggtggagagggtagagatgatccggcagcacctgtgccagtacacgcagctgcggcatgaaacagacatgttcaaccanaagcacagtcgagccc

SEQ ID NO: 366767 - DNA, 1691 bp, Homo Sapiens
agcggggggcccggcccgttaagaagagcgtggccggccgcggccaccgctggccccagggaaagccgagcggccaccgagccggcagagacccaccgagcggcggcggagggagcagcgccggggcgcacgagggcaccatggcccagacgcccgccttcgacaagcccaaagtagaactgcatgtccacctagacggatccatcaagcctgaaaccatcttatactatggcaggaggagagggatcgccctcccagctaacacagcagaggggctgctgaacgtcattggcatggacaagccgctcacccttccagacttcctggccaagtttgactactacatgcctgctatcgcgggctgccgggaggctatcaaaaggatcgcctatgagtttgtagagatgaaggccaaagagggcgtggtgtatgtggaggtgcggtacagtccgcacctgctggccaactccaaagtggagccaatcccctggaaccaggctgaaggggacctcaccccagacgaggtggtggccctagtgggccagggcctgcaggagggggagcgagacttcggggtcaaggcccggtccatcctgtgctgcatgcaccaacagcccaactggtcccccaaggtggtggagctgtgtaagaagtaccagcagcagaccgtggtagccattgacctggctggacgatgagaccatcccaggaagcagcctcttgcctggacatgtccaggcctaccaggaggctgtgaagagcggcattcaccgtactgtccacgccggggaggtgggctcggccgaagtagtaaaagaggctgtggacatactcaagacagagcggctgggacacggctaccacaccctggaagaccaggccctttataacaggctgcggcaggaaaacatgcacttcgagatctgcccctggtccagctacctcactggtgcctggaagccggacacggagcatgcagtcattcggctcaaaaatgaccaggctaactactcgctcaacacagatgacccgctcatcttcaagtccaccctggacactgattaccagatgaccaaacgggacatgggctttactgaagaggagcttaaaaggccgaacatcaatgcggacaaatctagtttcctcccagaagatgaaaagagggagcttctcgaccttgctctataaagcctatgggatgccaccttcagcctctgcagggcagaaacctctgaagacgccactcctccaagccttcaccctgtggagtcaccccaactctgtggggctgagcaacatttttacatttattccttccaagaagaccatgatctcaatagtcagttactgatgctcctgaaccctatgtgtccattttcttgcacacacgtatacctcggcatggccgcgtcacttctcttgattatgtgccctggccagggaccagcgcccctgcacatgggcatggttgaatctgaaaaccctccttctgtgggcaacctggctaccggaaacatcttggtgctccactaaacgaagcccatgggcttggtggcactgcactaaccactacccccaccacaacctcccgagcgcctcctaatgcgaggggcggcaaaaccgagcgctactgtccatgcgccatcggcccacacccgggccctgacacccaccctctctgtccaacggtg

SEQ ID NO: 366768 - DNA, 867 bp, Homo Sapiens
  misc_feature (306)..(306): n is a, c, g, or t
  misc_feature (676)..(736): n is a, c, g, or t
tatacatagtgaagagctcgtcaatcgtgttgattcttttcgtcctacactattgttcacccacgggcagtgatgatccatttgtccgtatacatcttttggcaaatactgcagtggtgggcgcgctgcgggtttaatacagcagcacttggggcacttgtagatgacttccccgggcttcagctgcaagctctccatgtattctttcgtagcgtttcctttggttactgccccagggtcggtgagcatggttctcaggtgggatgacagggcaaagcacggccaagcagttaaagatgacccccnttgaccacagagtaccagaagtctttggaaggcagcagcatgacgaaagtcaccacgaagtctgcataggcgaccagaagccacgtcatgacagcacagatcatgccgcagccgtcacggatgaaccagacccggtcagccacgtcagcctcggaggaggaggacgatgaagagtcatagttgtcattttcagccaggagaggatgatgctcgacgtcccggagcctgtgtcctgatggctgcatgatttccctgacgcaccctcacaagttatttctaaacatcacttgaacattttgtgccgtttcttcaggatcttaaggtgcatactgtcctatgtgatcggatccgaggcccgggcgggtcgccnnnnnnnnnnnnnnnnnnnnnnnnnnnnnnnnnnnnnnnnnnnnnnnnnnnnnnnnnnnnnggacgcatcatgcggccgcgctcatggccgggccggagcgggccccgcggctcggctcggcttggtccactgggtcccgccaggcaggtcggaaggaggctgcagccaagcaaatgcctcagcccggagcc

SEQ ID NO: 366769 - DNA, 872 bp, Homo Sapiens
atgaagggatctttggggctgacagcctatgatgtggagggatctgcactcagctaaataaatacatgctatagataccttgggcccaaaataaagtctctcttgataaggtttttctgtgatttcccagagtccttaaccttctctgtctgcaagattatcaggctcccagtagccactaactttgagcttagggatgaaaatgacaggattgcccagctgtgccgggttaagcaaattagaggctgcctggcagaacagaaaaactatcacatgaatatttagaatggaagctttcctgaaacactccagatactgcaaagctatctttattcctctctaaaggctataattttatcaacacaaagtcagccttttctttttccacattaagtaatgtattctgaagttggatgtgcttagatttcttaaatcagaatgagtgctaggaaatctataacaagaaacctcttttgcttctcccagatttccctttcactaatacgggatagggaggctccttgggtaatgctaacctatgcaaagaagttaccaaatggtggtagttgctagaattaaagacacgttcttggttcacactttgatgtagtgacctgaatttactcttttcctgtgagtattctactctgccctattgcactctcctttgtcatgtggatgtgtgtttatcataggtctttaacgcgtccttcccaagaagacaaagcatacagttgtacatgaagatatcttatgcagtaaaaatgtgaaatttgaacattgctgcacaagtattgtataaaaaaaagtctgtaaagaactttcttatgtaaacatacaggggaataaagacttttatctgttcaaatggg

SEQ ID NO: 366770 - DNA, 1262 bp, Homo Sapiens
  misc_feature (110)..(110): n is a, c, g, or t
cccagatttcccagtcaacaaatccactcatacaaattatataagaaacaaacacacatgttcaaatactttcatcattctggcaaatctgacaaactgaatactgaatntcctgatccttacctgttattgttacaaattgttcactagacatgtatctatttatccagataccttctgaattgtaattattcaagtagaaaatcatgattgtgattctgacgcctgctcatgccaatcccttactgcaaaatccacttttctttacataaaagtaccaaaaaaatctagccccaaatgtgcatcactaatcacttagcaaatatattttacttgcttgcctttgctgagcaaaaagaaggtaggaaaacatttacacacatatgtgagacactaatagccaagggcaaaataagatacagtctttgaatgcatctttcaaggttctaacattaccccagaaacaacgttaagttaaaatggaaggtttccatttatcttctgctgttttatatcacaatctcttgatacaaaaaacaaaagccaggaaccaagaagtctatgcacaaattcaggagagctctattatttataaacaagatggctcaaccacagcatgttataacaggacacagactattgatcacatggcttttttggtggtttgtactagtcataaaaccagagtttatgaaaaggttgcacacagacaacatcaaggatttgtcttttacaaagatatagaagattgcggaattggtttaaatctgattgttctaatttacagttgtcatgatccactcattgcgagaattttctcatcttcattctacagtttttacatcagaattacaagaggtttctgagagtcaaacaggatggtgccacaatctccttgcagaatgagatttgcctttggaaaatgtcaagtattatttcaaaactcaacaaagctactggtagtcagaggtgagaactgcaagctctttgtaccgtcaggaatgaataacaaatacattaccctaacttttcttgaggcctacagtgagaaaaaagcttttccatattggcagaaatcatcctctgtccacatagagattgagtttaatttgtggtgatagcagcaggtggcacattaggggtatttccttaaaagagaaataataaaaaatttatttttggaatctttcccaagtatattgcatggtttctgcaattcttctttaactgcaaggaagactatcacagattattagaatttt

SEQ ID NO: 366771 - DNA, 979 bp, Homo Sapiens
ggagtcgccggggctccttcctgtggtgcagcttcgggtctcggagtttggcccctactctgaccccaccccagctccgctccgccttgggttccggcagaacccgccttgcggtagccatggcagcaggctccgaggcgaccactcctgtgatcgttgcggctggggctggaggggaggaaggtgaacatgtcaaaccttttaagccagagaaagcaaaagaaattatcatgtctttacaacaacctgcaatcttctgtaacatggtgtttgattggccagcacgacactggaatgctaaatacctttcgcaggtccttcatggcaagcagatacgattcagaatggggatgaaaagcatgagcacagttcctcagtttgaaactacatgtaattacgtagaagctacactcgaagagtttctgacctggaactgtgaccagtctagtatttctggaccatttagagattatgaccattccaagttctgggcttatgctgactataaatattttgtcagtctatttgaagacaagacagatcttttccaggatgtgaaatggtctgacttcgggtttcctggaagaaaatggacaggaaagtacattgtggattggctccttgggagccaacacaccctgtcatctggactcctatggttgtaactaggtattccaggtacaaggaaaggaacacgactggcatctctttcctcctgaagatactcctttcctttatccaactagaatcccttatgaagaatctagtgtgtacagtaaagcaaggtgtcaatctggatgaaaagcgtataccgtcaggttccggagaggcatcaaagacatgccgaaacactgaaaccaaggacagagactataagagcccagaaactggtggcattacagtaaaaagccatgcagccggaacgtgaagctgaaacccaaggagggcctgggaaaaggcaaccaacccggggcaaaac

SEQ ID NO: 366772 - DNA, 1401 bp, Homo Sapiens
ttcgcccgccttccggcgctgtgggttccttttgtcccgagagaggccctattttgctcggtaaagcttgccgttctagagagatcgtcactggttggtttccccatgagttttgatcttggccagaattctgttgttgggccacagccctgggtgcggccacaggctgaaccccccgtgcaacacttgtccatggaagagacttttgccacagctggaactgctgggcaggcacaaatgcacctgccagagatgtcctgagaaaaagtgtctgttgcaaaataataattaataattcatataaatctgaatgcaccaggaggagaggaagcaggaccggttacccaggtttgccctgggattctcttaaggcctcctccagtttctgcctaaacttgtcatacttcttttgcacttgttggattttgtcctgctcctctttttccaggattgttaggaagttctgaagttcagggatggagaaggcatcccactctacctctccagtttcattctcctttagcacaaagctgaggacctccgtgtcaggcccagcaagcaggcgcaggtagaggggcggtcagcaatggagagtttctggaagagcacttgtccgtccttgtgtatccgcttaaaaagtgcaaacttctggggattgtccacaaccatgaacttcttgagcagccctggatgacctcactgacggtggtggtgctgctgatgtgcagctgcttgatggcatctaggggcaggtagaacggatgtccgcttgtccgtggtagccgccaggttcacctccttgatggcatcatagatcgactggggccggatcccacgcacggcaccgtcacagcccgccggagtttcagatgcactttgatgaaacccgtgtaggtgccgtcttcactcagtttcatgcccaggcagttcttctctcgcgtgttgtagctgtcgatcttctgcttgatctcctgcagtgtgggcgggcgctgtgtctcctccacaggtttacagacattctttgaaagatgtttgctctgcgcatttctgaaaaaggtagtcttagcagtgaagaagcagtcttccagttcctcgtccaggctgcagtacccactgctcatgctgctgtccaccgtcatctacccccggagttcccggccgaggcttgggatgccggcggagggaggtgggcacccctccccgggctccgcttggcgtaagcccctagctctgagccccgagccgggagctggtcgggtagcggaccaggcagagccggcgggccgcctgcgtttctttcagcggggtgcgagcgctcgggcggccgggtaacctgctcctgtccccgcgccgcctgcgcctgcagagccccgggctcccggctcgcgcctcactcccgct

SEQ ID NO: 366773 - DNA, 860 bp, Homo Sapiens
  misc_feature (475)..(494): n is a, c, g, or t
catcttaaggaatagccttaaaggttaataaaggttaacaacatgcccattttgtggaaaatcaaattcaacactttgggaaaccacaagcttcttaaataaacgggttttcactggtgacagtgtcctgagaatacatgccatccagaggtaattctgcttaatactcagattcctttccaatacttcccaaaaagggatccaatattagacctgtacaacaaattaccactcttttcacagaaaataataaaatatccaagtctctcaccaaattttcaaaaaagaggaaaagtgtaagcttcccagatgaaagtttctatagctttccccaaatttagtaccacccatgaaaaagaaattcttcactcattcaaggcatacgactagaaaactaatttccatggcatcaaattaatttcctcccttggagataaaaccatgagatcttttccaaagcattaaatcccccagnnnnnnnnnnnnnnnnnnnngaccattaccagcattttaaaactgagtaagagaatgaagtaaacaaaaagggaaagaaaaagcttcaaaagttcatttttctcctaatttcttgaactctctattccagaagtacctaatgcttttcttaaaagagaggctttcaatttttccctatgtctaaaggctgctttaagtagcctaagaccaggacaggagagtgaaaacgaagagggttttggctctccaaggtgggggtggaattgcagctactgcttagggatattttccagtggtcatctcttcaactccagtgagtctcacaacagggtgcaccagccaatccaagtatccagtatctacaatgcaactgtagatactatcca

SEQ ID NO: 366774 - DNA, 847 bp, Homo Sapiens
cctcacttcacccatcctcacttcctccgtttcagtcacagttcctctatgctgagccgtttctccttaagctgaattggtggaaaagggctttattcctttcttgtggtgaatattcatctacagtgtgacgaccgtgcattccaagtattcttttgaaattctttcaattctttttcaagtattggatattcataaacatcatccagtacattcctatatatggtctttaaaaacatttttgaatgttcatcttcaggtaaccagtctttgtacagagcaatccactgggaaacaagatgcaagactttacgtttcctacgcggaacatctgagttttcctctttgccttgatacttcttagcagaatagtgccttaacagagcctggcacaagtcatcagttgtcatgaagacagtgtacgtgagaaggaagtcatccaggagggtctctgtttctttgtcctggacttcttccaggtgcaagtcattcaaaaggtgctccaaaatcttctccggggtcccggacaccaccacatatctgtcagagagcagagagtccactgagtcatcctcggtggaagactgcgagcggctgctccattcatcgtcctcatcctcctcgtcgatgtatttgaaataaggcacatcgaaggtaggcaagggcagctctcggtctgagagcgccgcggcggaatctttcctctccaaatgagggtcaaagaccctcagccgggagctgcccattgtgaacggttactaacaaaggcatcccctaaatgctaaaagatcttgccatccctgtcctttcactgggaactgagtccatctggctgctaagagctctg

SEQ ID NO: 366775 - DNA, 893 bp, Homo Sapiens
cctcctcagctgctctatctgagcagcttcctcgtacaggctgatcagatctgacgtcctatcacccttggcagcaataacatcgccaattgccttttcaaagtatgccagagctaggttcagtctgtggatgccaaggaggctctgcccaagcaagtgttaggtcgttctcagagacttgtaattcacaacacctcctgtatataattctttcaagctccttcatgtttctctctgccttctgcaggttgaaataggcttctctgccacggttctgcaggagccaggccacgcccagagtgtagtacagcttgaccagagcttccaggatttcctctttctccttatttgaggtcgtatttgccttccaggtcaacagtgtattcttggctgatgtagcatgtttcttggcctgaactgggaggcctctcagtgtcaagtagccataagctaggttggccagagctcgtgcacatttccagtgatggtccccaaaaataatccgagaaaggatgacacatcgaatcagctccttgtttgcttgagtattcattttttccttaatcagctgagctactttcttctgggattgggctaatttctctttgggatgagacatacagtctatggccttctccttctctttagctttagtttcctcttcactctctccacacccaccagtgggatacaactcatctgtttgctggtgagctgggatctcggtttgctgtgacatatggaagcagaaatcccagtcgatgtcattgctaacagttgggatacggatggggctggcttgcatcttcttcctcggtccgggcgccaaagcggtgcctcgcgaaagctgcacagcctgcgacgtccccagttaccttccgcaaccccccgct

SEQ ID NO: 366776 - DNA, 1355 bp, Homo Sapiens
  misc_feature (1198)..(1206): n is a, c, g, or t
  misc_feature (1311)..(1311): n is a, c, g, or t
tttcaggctcccggcggctgcttgcgccccagcgcgcgcccaggcgccttggaatccccgtccttgggcccccgcaaggtccccggccgtgcgcgaggcagcatgatgaggcgcaccctggaaaaccggaacgctcaaacgaaacaactgcaaacagctgtctcaaatgtggagaagcattttggagaactgtgccaaatcttcgctgcctatgtgcggaaaactgccaggctgagagacaaagcagacctcctggtgaatgaaattaacgcgtatgctgctacagagaccccgcatttaaagctgggcctgatgaactttgcagatgagtttgccaaacttcaggattatcgacaagcagaggttgaaagacttgaagccaaagtagttgaacccttgaaaacttatgggaccattgtgaaaatgaaacgggatgacctcaaagcaacactcacagcaaggaatcgagaagctaagcaattaactcagttagaaagaacacgtcagcgaaacccatctgatcgacatgttatttcacaggcagaaacggaattacagagagctgcaatggatgctagccgaacaagtcgtcatctggaggaaactattaacaactttgaaaggcagaaaatgaaggatataaagactatattttctgaatttatcacaatcgaaatgttatttcacggcaaagctttagaggtctacactgctgcctaccagaatatacaaaacattgatgaagatgaagatttagaggttttccgaaattctctgtatgcaccagattattcatctcgtttagatattgtaagagcaaattcaaagtcacctcttcagagatcactgtcagctaagtgtgtatctggaacaggacaggtatccacttgtcgactaagaaaggatcaacaagcagaagatgatgaggatgacgagttagatgttacagaagaagaaaattttcttaagtaaactacacatttccattttcatcataaatgacttgaaatccacaatgactaaattgtagaactttatactcactttgctatgttaagcctcaaagtgaagtccaactggaaacagaaaaataattaaaggaaacttatgctgaccaaaaatgaaggctttaaaaaatattgcataccagtcatttcaacatcctacctagtgttacatgatttttgtgtaagtgccnnnnnnnnnaaagatggtgtatttcaaagtatttcatattaatgtactatatctacctgaaagtccaatagtacattatgacagaaaccaaaagatctaacaattctgcttagnctttttggttaaggactccatggctttcattaccaggaaaaggg

SEQ ID NO: 366777 - DNA, 685 bp, Homo Sapiens
cagcagccagctcaggccatccctcaatctctagcctgcagcatcccatcctgtgcctgcaccttctcaaggttctatactcctgctgccttgtcagtgagggcctgtgccgtcttctggggcaggagcccctggcttggaatccctgtttatgttgattcagggcaaggtaaaagtagtagatgggaagagtctactgaagtgacactctacttcctctcccttcttgtctctcggctccaaaacctgccttgtggaatggagaagctaggcagcgacgttgctactctctttacccattcgcatgtcgtctctcttgtgagtgcagcagcctgtctattgggacagcttggtcagcaaggggtgacctttgacctccagcccatggaatggatggctgcagccacacatgccttgtctgcccctgcagaggttcggttgactccaccaggtagttgtggattctatgatggcctccttatccttctgttgcagctcctcactgagcaggggaaggctagcctaatcagggatatgtccagttcagaaatgtggaccgttttgtggcaccgcttctccatggtcctgaggctccccgagggaggcatctgcacaggaaaggggagctttcgctatccagtccacacagccctgagccagactggaacactgatttctacccagg

SEQ ID NO: 366778 - DNA, 970 bp, Homo Sapiens
cctggatgatgctaacccccaagcacttcccctccgaagactctgacctggctggagaagctgggccacggagccagaggagaacagtgtggccatgctatgatgatgtcagctgtactcagcctgatgctctcaccagccttttcagtgaaattgaaaaattggagcacaaattgaaccaagcccctgagaagtggcagcagctgtgggaaagggtatccgtggaccttaaagaagaaccaagaacagatcgctcccaaagacacctgtcgagatccccaggaattgtgtctaccaacctaccttcctatcagaagaggtctctgctacatctcccagacagcagcatgggggaggaacagaattccagcatctccccatccaatggagtggagcgaagagcagccacgctctatagcccagtatacatccaagaatgatgaaaacaggtcctttgagggaacactttataaaagaggggctttgctgaaaggttggaagccccgtggttagtattggatgtaacaaaacatctagcatgcgctactatgactcagggtgacggacacaagctgtaaaggccacattgatctggctgaagtagaaatggtcatccctgatggccccagcatgggagccccaaagacacacaagttgaccaaggctttctttagatctcaagaccagcaaacgtgtgtataacttcttgcgcccaggatggaacagagtgccaagcaatggatggacaagatccgagattggactctactgatgactgatgccatggtcaaaccagcagaaagaacaagaagcaaatcattgcagccagcaaagaataggaaaaggacgacaggaacctagagagagcagacaccagggaaaccaggagaccaaaggacacaggagacgatacccaagagcaaggagaagaaacaaagaggaccgagcaagaagagcaaaacaagagagg

SEQ ID NO: 366779 - DNA, 1217 bp, Homo Sapiens
  misc_feature (346)..(346): n is a, c, g, or t
taaccatgtaaaagtaaatatatttcaataacaaaaactgaagtgcaatttaaaattgaaaagacataaatagattcaaatattcagggttttttcctttgttgccttaagattataacaaaatacaaaagaaaaaatagactattattttagataaaataaaattatactcctaaacaataaatgctgaactatatgtgaactcctaaaacagagatatttaaaacataacttctatatttcaagtgtatcctgtgaaggagatcagcctacatttgctggtcttcattttacaaaacattctgggcaatgtgtccatttataactgcccctcttaaacataaanaaaaacattttaaagcactaagtaagaaaaccaagcagcatgctaacaaaatctatctacttaatctgttttgcttctgcaaaaagccactaacagaaggtttaaaaaactaattctatatacacactttacataacatatatttatgctataaatattttaaagaatggcttttacataattctttatttcaatatatatctcattaatttcattgcaagttatgcaatatagtcttttggatctgttattgaaaattattcgctccatgatttagaaaatggttaatttcttggataaaacatagcatatttagaagtccgaaagccaagtaaatcccttatttcatttcggaattttgacagatcttggcgcagttcgtttagattttccacagttgcctgatctgtactttgcatcttctgtctcatggaagtcaagtaacgatgcactaggcagcacatcactttttgatagttttcatctctcttctgtttcaaattcctccattcctttaaactgttttgccgtttgaccttgccttttgatgtatgagagcaaatccacttactgaggctactaatcatatagcagatagtctttggtgagggaatgatgttgaaaggtggaggtaacgtacatttgtcatcaaagtagctaagccataattttgctcgagcaacttccattctttgtcttcatgatttgctatcaactgaaagcttttatgaagcattgccaccagcagtttggtaagcacaatcacaaccacgacattgtatgtaccaacaatgacagctcccacaaaggacctgcagttcttctccatagctaaatcttgtgacaaagattgccacatgcgctaaggaga

SEQ ID NO: 366780 - DNA, 1299 bp, Homo Sapiens
  misc_feature (1247)..(1247): n is a, c, g, or t
  misc_feature (1257)..(1257): n is a, c, g, or t
  misc_feature (1280)..(1280): n is a, c, g, or t
aacggcagtaactccacggtttaaggtagcgaggcctgggtggcgaattcggcacgaggcatctacttgctgttctgggccttcctgctggtcttcagcctgtggtcagagccggtggtgtgtggcattggcctggccatcatgctgacaggagtgcctgtctatttcctgggtgtttactggcaacacaagcccaagtgtttcagtgacttcattgagctgctaaccctggtgagccagaagatgtgtgtggtcgtgtaccccgaggtggagcggggctcagggacagaggaggctaatgaggacatggaggagcagcagcagcccatgtaccaacccactcccacgaaggacaaggacgtggcggggcagccccagccctgaggaccaccattccctggctactctctccttcctcccccttttatcctacctccctgccttggtcctgccaacacatgcgagtacacacacacccctctctctgcttttgtcaggcagtggtaggactttggtgtgggtggtgagaaattgtaaacaaaaactgacattcatacccaaagaaccagcctctcaccccagggtccatgtcccaggccccaatccagtgctgcccacactcccagctgctggaggagaggggagatgccaaggtgccctgcaggacctcccgtccgggccacaccctcagctgcctcttcaggaaccggagctcattactgccttccctcccagggaggccccttcagagaagagaggccacaggagctgcattgtggggggacagtgctcaagcaattctgtccccatcaaggggtcagctggagatgacccaagaccctatctgttcaccagggacccaaaatccaaggggatgcttccctctgccctctttcctgcccctccccatcatacctgcacccaccccagccagggctccctgtccagaattcggttctcctcaggacgccaactcccagagctaaggaccaaggagaagaacagcctctccacccccaagccaggcggttgaggaacatattgagaaaggttcagattgcagaaacccagccctgcccctgcctcctgcatccagcccccaacatggtgccaaagcttccagaagccaaaaagcttctgatttttaaggtagtgggcatctctctcctaatgacgaagctgctcagcaactccacctgcccgccgcaggaagggagcagtcccctgctatccctggcagccacttnccaggcacanccgcacacagccagcaccaccgnccccaccgtggcacttgtt

SEQ ID NO: 366781 - DNA, 909 bp, Homo Sapiens
tgacattcgcaacgggcctttgtggtccggcacctgttacccagccactcctccccagtgcgcgggacactccctgaagtcccggaagtccccgagccccggagtgcaggctgtcttttccgtaaggatgacggcggtccaccaaatccagaacctcctcaaacaccgctgggaggtacgcccctactgtgctgaccagccattcgtcccctgtcaccctctccttgccgtcccggtcccagcactccttgcgggccctgagccgcagagcctggttctgcctgatgatggtggcctgaatgatctccacgacctccacttccttccgggggatgtacgtgccaggtccctcgaaaagccactcatctcctgccaccaccttgtctccatctttatcctcaaaatcaagcagcgcctttagatggagggcagtgttgggcagaaccacctgcaggggtgtgatgtccttttccagcacctcccctgggtacagggggaaggggtcctgggccagccggatctcgaggtcagcgtggcgaagccgaacttgccctgtgacatcaaacagcaccaagccctgggcatcccgagacacagggttggccactgtgcagtagtgacgtggggggacggtcaccatgcgcatgggggcaaacagtaccctctcattgtcctgccggatgtaggtctttggcccgacctccacacgggacacgttgctgttctggtccagcacatggatatagtggtatggggggatgcggatgatgaactcttcagttgccatggtgactcctaagcccagggctcacaagaagatgactggtaggtgggggagacgacacaggatgaacctggggagcatctagaagtgcaggtagctgcaacaaacgcctcagatcccgggaa

SEQ ID NO: 366782 - DNA, 1138 bp, Homo Sapiens
  misc_feature (923)..(947): n is a, c, g, or t
cggtccggaattcccgggatgttgcagctacctgcacttctagattcatcttcttgtgagccctgggcttaggagtcaccatggcaactgaagagttcatcatccgcatccccccataccactatatccatgtgctggaccagaacagcaacgtgtcccgtgtggaggtcgggccaaagacctacatccggcaggacaatgagagggtactgtttgcccccatgcgcatggtgaccgtccccccacgtcactactgcacagtggccaaccctgtgtctcgggatgcccagggcttggtgctgtttgatgtcacagggcaagttcggcttcgccacgctgacctcgagatccggctggcccaggaccccttccccctgtacccaggggaggtgctggaaaaggacatcacacccctgcaggtggttctgcccaacactgccctccatctaaaggcgctgcttgattttgaggataaagatggagacaaggtggtggcaggagatgagtggcttttcgagggacctggcacgtacatcccccggaaggaagtggaggtcgtggagatcattcaggccaccatcatcaggcagaaccaggctctgcggctcagggtcccgcaaggagtgctgggaccgggacggcaaggagaagggtgacaggggaagaatggctggtcaccacagtacgggcgtacctcccagcggtgtttgaagaggttctggaattggtggacgccgtcatccttacggaaaagacagccctgcacctcggggctcggccggaacttccggggatttcaggggagtgtccccgccgcatctgtgggagggagtgcctggttaacagcggcacgtacactgatggcccatgtggctagaatgtttcacccaggaggctccctccgggcgctccttccctttttnnnnnnnnnnnnnnnnnnnnnnnnnatccctgtcgttgtttccctcccatccctgtttcggtacctgtttgggcctataatatccaattttggcccccccataagtctttgtgtgttccacctttgtatcatccacacctccttccttttttcccttccctcttaccgacaatgtatcacctgttcccccacattttctaccctttccccccattt

SEQ ID NO: 366783 - DNA, 853 bp, Homo Sapiens
  misc_feature (239)..(264): n is a, c, g, or t
cggcatgaaaaagtttctgtgaagatggcacttcttagcatagtcctcgcccttattattaaaagatgcatttccactttgacagtgatttccccacccgagagcctggttgggcagccctgagccccttagccagtatctttcccatcagctagcattagctgccaccagtcctcccttctcctccctcacctcttcagggtgtacctggagcagctattaaaactctttaagccgtnnnnnnnnnnnnnnnnnnnnnnnnnnggggggggcgccctaaaaagattacccccggagaggggccaaaagtagccgcacgacaactcacagatgtctcttgtgcacccaacgaggtggcgcccaaaaaaggagagaccacccgactattaacaagcaccaaggcgcaacaggagccacgagagtcagttacacaaaaacagactcgcacgaacgagaggtagcaaacacgtcggatcacactacggagcagcacacgggagaacggcgacaccgcctaaaacaatcaaccgagagcagggcgaccaacaaaaacgtgcggccacccacaacccgaaccgcctgaccgacgacagaaagtaaacacaaggacccgtccaaacgggcgaacagacactctccaaacaccacttagacaaagaggcgcaccaaaaaagcggggagtgatcacaaccacacaaacgaaccggcaaaaaaactgcacagaacacgagcgcaccagaaacacaaagaacaatgctgcggaccacccccccgagcagaaaacatgctggacacctacacacgacaaaaaatagccacatacacacccacacaaggcacacctcaacaggac

SEQ ID NO: 366784 - DNA, 797 bp, Homo Sapiens
tagccactccagtccgatacatacttattatcggtttggaggaatttgctgcagagagtccattcagtatggttcagatacatgtatgtgaccactgtatttattgcatgatattcaatctactagtatcttcctttagcgatctctgttagagggtgttattgtataggactagattctctcggctgtccgtgtctggaggatttagttactgaagaacttaaaggaactcatttcgaaaggattttagcagtgaaaccgttcttttaaatcatctccacatagatttcattctacgaacgtcaggccttcacaaatcctggtacgctggagacccatgtgttctggtctcttctttttggctataatttctgattaaaaaatactgctctgtagtcctggccaaggggcctcatatagtctctttgaagttgatgaataacaatgaacttcttctagttcattcaattaaaaaagagaagccatctgtttcccatgaagaagtttgaggcctgctttccttatgttggaggctgtgaagctccttaatatataaacagttctcaggagaaggaataaaagcacagccacctcctcagcagagccagtttacactctgctagagacaagaggagctgggaccttctcccctaacccttactgcatatgtgagagaagccagacctgctggatcgactggaaatgcaccagtgctctgagatcggggaggataagagaagccgtggggaggaaaagacatgtaaactctaaaaggcattgaagtcccacctcaccag

SEQ ID NO: 366785 - DNA, 1025 bp, Homo Sapiens
  misc_feature (489)..(544): n is a, c, g, or t
  misc_feature (821)..(821): n is a, c, g, or t
  misc_feature (1004)..(1004): n is a, c, g, or t
cggagcgattagagcgaagtgcttcggtcaggcagtatctttgaaaataatttggccaagtgaaagccctggcattggatgaaagtgctagctgctgggaatgctacccctccttttggttctctttcaagtccttcaggttcaaacaatacagaagtgtataaagtaagaattggaagtctcttcgctgctctaatctcactcctcagaggtgatcactggacctgagtgagcagaaggcttttcagaattacagcctgaactatttcttgagcaatttgggaactcatttctaaagcagtcctcagattcacacaacgtagtttgtgacggagtatgcccagagcagtgtggaagatgatcaaagtatgacatttcttctaccccagaggctggcatttctgcaggcacaaatgagcttggttttcaagcactgctctttgaacacaaggaattcctttaatgatcacgccggactatatagacttnnnnnnnnnnnnnnnnnnnnnnnnnnnnnnnnnnnnnnnnnnnnnnnnnnnnnnnngtttcggaaatctggattgtagcagggcattgtggatctgcctgttggtggagaaccctagactgcatgcagccatgcacatgatctggagacacagcagagacaaggtctttgtctgttgctcaggacggagtgtagtggtgccatagcacactggtaatcttgaatttctggactactggcatacaccaccatgcttaggttcgggccacaacatccgtgactttaccggttttggtctcttccttgtaactttcggctccaggatgctgcgcantcctctctgcactatctatcagaacgttgctctgcgtgcttgaaagtttcgccaaacagaagtacacaaaaacaaacagaggcgaaacacaaatcccctcagccctggaggaaaaggccttgaagctcttccagtgcagaggccacgcagaggacatgctcctacctgtggcacatcggccangcctggggtggctcctggaag

SEQ ID NO: 366786 - DNA, 2478 bp, Homo Sapiens
  misc_feature (1526)..(1538): n is a, c, g, or t
  misc_feature (2098)..(2146): n is a, c, g, or t
  misc_feature (2176)..(2294): n is a, c, g, or t
cgctcacttctgcttgcacttaggcgacctcgggagctcggactcctacgcagtcaccgggaagggccgccgccccgcccgcggctgctggcccgggtgacacttccgcctgctataagagcagcggccctcggtgcctccttcctgacctcgcacccagctcggagcccggagcgtgcctcggcggcctgtcggttttcaccatggagcagctgagctcagcaaacacccgcttcgccttggacctgttcctggcgttgagtgagaacaatccggctggaaacatcttcatctctcccttcagcatttcatctgctatggccatggtttttctggggaccagaggtaacacggcagcacagctgtccaagactttccatttcaacacggttgaagaggttcattcaagattccagagtctgaatgctgatatcaacaaacgtggagcgtcttatattctgaaacttgctaatagattatatggagagaaaacttacaatttccttcctgagttcttggtttcgactcagaaaacatatggtgctgacctggccagtgtggattttcagcatgcctctgaagatgcaaggaagaccataaaccagtgggtcaaaggacagacagaaggaaaaattccggaactgttggcttcgggcatggttgataacatgaccaaacttgtgctagtaaatgccatctatttcaagggaaactggaaggataaattcatgaaagaagccacgacgaatgcaccattcagattgaataagaaagacagaaaaactgtgaaaatgatgtatcagaaggaaaaatttgcatatggctacatcgaggaccttaagtgccgtgtgctggaactgccttaccaaggcgaggagctcagcatggtcatcctgctgccggatgacattgaggacgagtccacgggcctgaagaagattgaggaacagttgactttggaaaagttgcatgagtggactaaacctgagaatctcgatttcattgaagttaatgtcagcttgcccaggttcaaactggaagagagttacactctcaactccgacctcgcccgcctaggtgtgcaggatctctttaacagtagcaaggctgatctgtctggcatgtcaggagccagagatatttttatatcaaaaattgtccacaagtcatttgtggaagtgaatgaagagggaacagaggcggcagctgccacagcaggcatcgcaactttctgcatgttgatgcccgaagaaaatttcactgccgaccatccattccttttctttattcggcataattcctcaggtagcatcctattcttggggagattttcttccccttagaagaaagagactgtagcaatacaaaaatcaagcttagtgctttattacctgagtttttaatagagccaatatgtcttatatctttaccaataaaaccactgtccagaaacaagtctttcattttctttgtaagtttggctctgttggctgtttacacccatgaattttggcatgggtatctannnnnnnnnnnnnacattgaaaaaaatccagtggttgcttttgaatgcatcaagtaaagaagaagaaaagaatacatccgatgcgtagattcttgaccaagtagtaaatctataaaaatgctatatcctcctgatagccatgggaaaacatgataagatggccattaatttggcagttagaattttgggaagccacaaaatagacagacaccctgactgttgaagggaggtttaaaaacagatattcaattgaaatgtaagagagcaccccaattgagagcccaggttacgaagacaagcttgcctcgcctgacttttctgtcccttgttctgcaggattagtattctgttacagacctctagtttttagactcttcaattaaagggccaatggttataacctgcattcccttttttgttcttctttatgtataatatatagttcatgtggcgctgcatgaaatcaagaagtgggtgtcttaggataaaagataccaagagtctacaaaaataaccatgtagtaagataaactgctgaacaaaggttttactgttagccaccttctcatgtgnnnnnnnnnnnnnnnnnnnnnnnnnnnnnnnnnnnnnnnnnnnnnnnnngagacagagtcttgctctgttacccagggnnnnnnnnnnnnnnnnnnnnnnnnnnnnnnnnnnnnnnnnnnnnnnnnnnnnnnnnnnnnnnnnnnnnnnnnnnnnnnnnnnnnnnnnnnnnnnnnnnnnnnnnnnnnnnnnnnnnnnnggctaatttttggtattttttagctagagatgggggtttttccatgtttggcccaggctgggtcccgaaaactccctgacctcagggggatccgtggcaaccttaaccctccccaaagtggctgggggaataacagggccttgaacctaaccttggccttgggccttcctcaaggggggttttt

SEQ ID NO: 366787 - DNA, 489 bp, Homo Sapiens
aagtgcaatgttggagtgcaagtatggcgatgcttgtttgatggagcttttgctttaaatgagctgaacagcatccttatttcctagaagttcccagtaaagggaactaccccaaaggcaggttcatgaaattgtgtaactttccttttctgtttcttaataggggcactatgaacgaagaggagcagtttgtaaacattgatttgaatgatgacaacatttgcagtgtttgtaaactgggaacagacaaagaaacactctccttctgccacatttgttttgagctaaatattgagggtaaggacacagtatagttttgatcttatggaatgaatttaacacagctgctttgtactgactgtaaggtaaaactaaaatgtcttcaatgattggaaattgtgctaagtatgaatagtgtagagatttgttaaagataaggtttctggaaatgaaggtgcagttaacagagttacgaatttaagagaaatc

SEQ ID NO: 366788 - DNA, 788 bp, Homo Sapiens
caacgataggctaggtagcgaggccgggtggtagaatcggcacgagggctgaatggacatctgaaaaaagtagataataacctcacggaagcccagcgcttctcctccttgcctcggagggcagctgtgaacattgaattcagggacctttcctattcggttcctgaaggaccctggtggaggaagaaaggatacaagaccctcctgaaaggaatttccgggaagttcaatagtggtgagttggtggccattatgggtccttccggggccgggaagtccacgctgatgaacatcctggctggatacagggagacgggcatgaagggggccgtcctcatcaacggcctgccccgggacctgcgctgcttccggaaggtgtcctgctacatcatgcaggatgacatgctgctgccgcatctcactgtgcaggaggccatgatggtgtcggcacatctgaagcttcaggagaaggatgaaggcagaagggaaatggtcaaggagatactgacagcgctgggcttgctgtcttgcgccaacacgcggaccgggagcctgtcaggtggtcagcgcaagcgcctggccatcgcgctggagctggtgaacaaccctccagtcatgttcttcgatgagcccaccagcggctggacagcgctcctgctcaggtggtctcctgatgaagggctcgtccaggggttcccttctttggcctcccaggccggcgaattcggcgtgccccgttagcccggccggccgtgtttccgggaatgccttgcgcctggggggtccac

SEQ ID NO: 366789 - DNA, 1848 bp, Homo Sapiens
  misc_feature (791)..(805): n is a, c, g, or t
cggtccggaattctcgggatgtttctggcagaatttttaaaataaaagtttgaatataaatgtagtcaaatctttctcctgtgtttgttgttcattctacgccacttatctttagaaaatcttccccatttaaagatcagaataaccaactatattttactgtaattttacactttattaaacattaagtagagtgtaggctttaagtttcttcctcatggttatgaaaattttctaatcaacattagatattttcttgtttagcacctctagctttactatcaaaattattggcatttattttaaagattccgattgattcctcacttcaggttttacagacatttcaccagaggaattgaggcttgaataccataacttcttaaccagcaataacttacagagttatgtaagtttgtttcctattaatctactgcaataacagatgagctcttaattactgctttctttatcgtggcttgtgttttggcaaaaccgatgaggtctatgatcttttttcaggagtaggctatttttcttttctatattattttcattgaatttggttggttattaaaatgataatatatttttactttaataattaggaatattactatttttattataaattacccaacagtcaatcccagaaatgaaacccttttatcatttgacagatatttattgaacatctgttaggtacccatccagtgatgaatgctagaaaaacaaagttaaataagatacagtctgtaatacagattaacatcctcatatatcaaatatcnnnnnnnnnnnnnnntcttgactagaataagttgagtacctgaaggaagcagtttaaatgctgtatttttctgtttctacagtcatgatcatgcatttcaactagtacatgtattcaccgcccatccaaatataactaactacgtgctgccaggtacttgtgatactaaccagatgatacaaggagttgaacgggagagggaactggagctggcatatctttgacaaataggccaagtcaatgcaaattttgcaagtcatgggccataaaactgttacataaaccttttgtgattttggcaaagaagtatgtgaagtttttattgaagaaactaacttaaacatacaatattgaactgttatttttctgtcttccgttttcagctaaattctgtccaacgtttaataaatcaatggaggaacagggtaaatgaactgaaaagtctaaatatatcaactaaagtagctttgctctctgatgtaaaggatggagtaaatcaagcagcacctgcatttggatttggcagcagtcaagcagcaacatttatgtcgccaggctttccagtcaataacagcagcagtgataatgctcagaactttagttttaaaacaaactctggatttgctgctgcctcttcctggaagccctgcttggttttgggagttccccagcatttggagctgcagcctctaccagttcagggtatctctacttctgctccagcttttggatttgggaagcctgaagtcacattcggctgcatcatttttcattcaaaaaccctgcagcttccagttttggatcacctggattttcaggacttccagcttccttggcaacaggtcctgtcagagctccagtggccccagcctttggagggggggagtctgtggcctggttttggtagtcccgggctcaattttcacactgcttttttcctagccattccagtgacactttttggaaataagcagcctatcccatttctctggtcagcccctaaagccgcaacatttgcaaccaaaaaaaggtggttattccacacccccggaggataa

SEQ ID NO: 366790 - DNA, 1172 bp, Homo Sapiens
ggcgccgaggttgccttagggctctctgcccagtaacaggcatcgaacggtgcagactgaagacgccctccgtcagcgacgccgtcgcaatggccatttgtcaattcttccttcaaggccggtgccgctttggagatcggtgctggaacgaacatcccggtgctaggggtgcaggaggaggacggcagcaaccgcagcagcagccttcaggtaataatagacgtggatggaatacaactagccagagatattccaatgtcatccagccatccagtttctccaaatccacaccatgggggggcagcagagatcaagaaaagccatatttcagttcttttgattctggagcttcaactaacaggaaggaaggctttggattgtctgagaacccatttgcttcacttagtcctgatgagcagaaagatgaaaagaaacttctggaaggaattgtaaaagatatggaggtttgggaatcatcagggcagtggatgttttctgtttattcaccagtgaaaaagaaacctaatatttcaggttttacagacatttcaccagaggaattgaggcttgaataccataacttcttaaccagcaataacttacagagttatctaaattctgtccaacgtttaataaatcaatggaggaacagggtaaatgaactgaaaagtctaaatatatcaactaaagtagctttgctctctgatgtaaaggatggagtaaatcaagcagcacctgcatttggatttggcagcagtcaagcagcaacatttatgtcgccaggctttccagtcaataacagcagcagtgataatgctcagaactttagttttaaaacaaactctggatttgctgctgcctcttctggaaacccctgctggtttcggggagttccccagcatttggagctgcagcctctaccagttcaggtatctctacttctgctccagctttttggatttgggaagcctgaagtcacatcgggctgcatcattttccttttcaaagccctgcagctttccagttttgggatcacctggaattttcagggatttccagctttccttggcaacaaggtcctgttaaaactcccagtggcccccagccttttggaggtggcacattctgggggctggattttggaaatccccggcttccaattttcccccggc

SEQ ID NO: 366791 - DNA, 1037 bp, Homo Sapiens
  misc_feature (20)..(20): n is a, c, g, or t
ggtccggaattcccgggatncatccctccttcccaggacacactcaaagcgtcagagcggtccgctcttctcaagtcctattggctcaagtccatgcgtctcatggcactgccgggtgagaggcggaaaaaggccttcccaggcgcgagaagatgacgtcacagtagcccggccgggcgccgaggttgccttagggctctctgcccagtaacaggcatcgaacggtgcagactgaagacgccctccgtcagcgacgccgtcgcaatggccatttgtcaattcttccttcaaggccggtgccgctttggagatcggtgctggaacgaacatcccggtgctaggggtgcaggaggaggacggcagcaaccgcagcagcagccttcaggtgactctcctctgaatcctccgcggtaaccgagccgggaagggtccgccggcggggaccgggcgtcccgcgtgtttcccgctgctggtgaccccaacgtgcccgcgtcgcggccttgccggccctactgggccctgcacaacgtttttaaaccgagggttttatctacatattattcatgtggtccgtttttattgagcttctgaggacctgggtttgggcctggatgcttgtgcgaaactgagtttttaaatcggaagtacctatcgaaactaccttgtaggtaataatagacgtggatggaatacaactagccagagatattccaatgtcatccagccatccagtttctccaaatccacaccatgggggggcagcagagatcaagaaaagccatatttcagttcttttgattctggagcttcaactaacaggaaagaaaggctttggattgtctgagaacccatttgcttcacttagtccctgatgagcagaaaagatgaaaaagaaactttctgggagggattgtaaaaagatattggaggtttgggaaatcatcagggccagggggaaggttttccgggttaattccccaatggaaaaaagaaaccttattaatttccgcctaaatttctggtcccaacggtttaaa

SEQ ID NO: 366792 - DNA, 919 bp, Homo Sapiens
  misc_feature (859)..(859): n is a, c, g, or t
caacagggcttccagaagagcagcaccaaatccagagtttgttctaaaacctaaagttctgagcatgatcactgctgctgttattgactggaaagcctgcccacataaatgttgctgcttgactgctgccaaatccaaatgcaggtgctgcttgatgtactccatcctttacatcagagagcaaagctactttagttgatatatttagacttttcagttcatttaccctgttcctccattgatttattaaacgttggacagaatttagataactctgtaagttattgctggttaagaagttatggtattcaagcctcaattcctctggtgaaatgtctgtaaaacctgaaatacttaggtttctttttcacctggtgaataaacagaaaacatccactgccctgatgattcccaaacctccatatcttttacaattccttccagaagtttcttttcatctttctgctcatcaggactaagtgaagcaaatgggttctcagacaatccaaagccttccttcctgttagttgaagctccagaatcaaaagaactgaaatatggcttttcttgatctctgctgcccccccatggtgtggatttggagaaactggatggctggatgacattggaatatctctggctagttgtattccatccacgtctattattacctgaaggctgctgctgcggttgctgccgtcctcctccagcacccctagcaccgggatgttcgttccagcaccgatctccaaagcggcaccggccttgaaggaagaattgacaaatggccattcccaccgctctcgacgaattcgagctcgcccgatgtggcctgatccataagcgtctcagctagtanagtgtagtgcatatagcgggagagttgatgcgggccggcgcgaccggcggttaaaagccc

SEQ ID NO: 366793 - DNA, 845 bp, Homo Sapiens
  misc_feature (164)..(164): n is a, c, g, or t
  misc_feature (195)..(195): n is a, c, g, or t
tctagagtgtacgaaatggaacgaacaggtctcaacactactattcttagaaggaaagacaggcaagaaagaacagaaccaggcagccaaggccttaatgacaggcaggatgactcttctattcacaacaggaagctaagaggttccaacagttgtacatacanggcaaacaacgaacgtagagtctcttcctgnggctttatttaaatagttttactcccaagaactatatgtcttaaatagactatattctccaaccgttaatccctaaattatgaagtttggctagaatacccgaatactttaaacaatgcccaaactctcctagttgtagctaagttggtagttgatttctttatttggcattcttttggttttagaaaataatagttttagaacatactttaaaaatgcacaatttttcagttacctgaaatattaggtttctttttcactggtgaataaacagaaaacatccactgccctgatgattcccaaacctccatatcttttacaattccttccagaagtttcttttcatctttctgctcatcaggactaagtgaagcaaatgggttctcagacaatccaaagccttccttcctgttagttgaagctccagaatcaaaagaactgaaatatggcttttcttgatctctgctgcccccccatggtgtggatttggagaaactggatggctggatgacattggaatatctctggctagttgtattccatccacgtctattattacctgaaggctgctgctgcggttgctgccgtcctcctcctgcacctatagcaccgggatgttcgttccatttcgtaacctctaggtcacccag

SEQ ID NO: 366794 - DNA, 1294 bp, Homo Sapiens
gcgcaaatcagaaaatcacatcctaacaaagaagtctgtctaagacagtacatctcctgttgaacttgcatctttccacaggactttctgtttttagggatgagactattctctgcttcatcaaggaaagagaaatgttcagggttgtagggatggcacacttattagttctgcctgtctgaaaggttcctgcaggacagtttggtcagagctgcaattcttagtccatggtctaatgcttgagtatctcttctttccctttcctgtctcaggaatcagctgagaattcattcgattgtcatgcctctagccccttactgtgatttgttggttgcactttcatttgctttagttctagaatcacctgttgactcctcagacttcacctaactttggaaactctcttttggaggcttctcatttccccctaattctgtgctgcctgagccctagaattttcccaccaacgaattattccaggtagatcctaagttgctggatctagttgatatttaaacaatatctagttgatatttctcattcagttggatccagaaaccagtatctctaaaaacaacctctcataccttgtggacctaattttgtgtgcgtgtgtgtgtgcgcgcatatgtatatagacaggcacatcttttttacttttgtaaaagcttatgcctctttggtatctatatctgtgaaagttttaatgatctgccataatgtcttggggacctttgtcttctgtgtaaatggtactagagaaaacacctatattatgagtcaatctagttggttttattcgacatgaaggaaatttccagataacaacactaacaaactctcccttgactagggggacaaagaaaagcaaaactgaccataaaaaacaattacctggtgagaagttgcataaacagaattaggtacgtatattgaagacagcatcattaaacagttatgttgttctccttgcaaaaaacatgtactgacttcccgttgagtaatgccaagttgtcttttttattataaaacttgcccttcattacatgtttcaaagtggtgtggtgggccaaaatattgaaatgatggaactgactgataaagctgtacaaataagcagtgtgcctaacaagcaacacagtaatgttgacatgcttaattcacaaatgctaatttcattataaattgttttgctaaaatacactttgaaactatttttctgtattccaagagctgagatcttagattttatgtagtattaagtgaaaaaatacgaaaataataaacattgaag

SEQ ID NO: 366795 - DNA, 1182 bp, Homo Sapiens
  misc_feature (818)..(845): n is a, c, g, or t
ggaagttccatgatcataagactggaatataatgtaagtttctaaaggtgtgtatacagggaattcaggttttggtttttaaactttcttctgtttttgaagtgtttcaagttcagttctagtcagtgcatcttccttggtcctgtcaatcttgtttcttgatatttagcataaaactgcccagcatcctggatgaggtgaggtaatgcttttagtgtaaggcaaaaccaaatccccagtttgcatggaagcaaatcatgccactgtggtttcatcagcaatctttcatttttttctgaagcaccgagttttgatacatccacactcttgctgccagtctttgtgtttctgtttctctctgttgtttctacttagtagttcatccagttggttttttccaggtagattgaccaaatccacagcatgaatgacccactgtgagaataatgaacaagagtaatgccagctcagcattgctcattggttcgtcacccgcctgtagtagaatacaggctgtcgccaatctggaagtccattgatcaggaatatgcatcatacctctgccttcgttcatcagccgtgttaaaacttcataaatggccaccaatgtgtctaaactgagtttctgcattgtcagtctttattcttgtctggatgtaaagttagtgaaagcttacgatatgcttttctgatgtctgcagatgatgcatcctgctgcaccccgaggaactggtagaagttgagctgcacctcgctccactaagtcaaacaactccaggtctccgctctcccagccgcgcgccggcgccacggcggcnnnnnnnnnnnnnnnnnnnnnnnnnnnnggcgtccgcggcgtcgtcggcgggaacggcaccagcccgagctggcggcgtccaggaagctgcgccggctgggagcaaggagccgtcatcgcgctgggctcggaaaggtcacccgccgcgcagctccgttggccgagagctgggacgtggcgggcggcgctggctgtggggaacagcgcctgtcagtgaaaagcgcgggcaggcgcaccggagcggcccgccaggtggctggccccagacagagcgcggaggcggcgggagccggctgccggacgggcgggtgggtaggcgggcggggccgcagccagcgctacgttccgaagaccctcgcccccag

SEQ ID NO: 366796 - DNA, 1002 bp, Homo Sapiens
  misc_feature (576)..(587): n is a, c, g, or t
catccctctcgacctggcatctggagaattaatttaaaaggcaagctcaccacaatgtaagcctatggtctggccaacctgctttgggaactgtgacaccaaagcccccaggactatctgcctctccaggagccagatagaatgacatgcctttttcctaattgtccacattccacccccaacccactgccactgtgggccaagccatccatcttgcaatcttcatctaaaacagctctcatttcatgccagttttgctcaaacctgcaccgtcacaagatattcagaagatgaaaacgtagaagacacccctgaattaaaaacacttacatagcagtggctggaattactccaaaacgtgcccagtgatcgcactgtaacatgggattttctcacccaaataggcaactcatgcttcctgagtgtaatcaaagcatgtggtgttttggggccatatgcaccaggtttctattttagaaacccttcagctgtcttgcttatgtaccatatgtaaatttattctttttaaaaatcacttttatttgattttgacttattaaatgctttaaaagccgnnnnnnnnnnnncagacacaacccctccatcctagccacacaaacaagaacggggcggcgggccaccagaaaatatattcctcccgccggagcgggcgccacaattcgatcgcacacgcacccactttcgtcctaagacaagacggggccccccaacacagagcggcacactatcaatatcacgaacgacagagcgcgcgccgcgccttctacacacacgcgacgcgaggacagaaaaactcgccgcacctgcggcccgctagcaggaaaccccacacactctcggcggccggcacaactggcccgacgcccccacccgaactaactccccgcggaagataatacctaccgaggcgacagtggtgcgccaccacgccagcgtatggcgccggcaaaatgcgtcccgagtgatatgacaaacaaaacg

SEQ ID NO: 366797 - DNA, 445 bp, Homo Sapiens
  misc_feature (24)..(24): n is a, c, g, or t
  misc_feature (43)..(43): n is a, c, g, or t
cccttttcccctaaatgtcccaanaatcccaccccccaacccnactgcccactgtgggcccaagcccatcccatcttggcaatccttccatcctaaaacagctcctcatttccatgcccagttttgcctcaaacctgcacccgtcacaagatattcagaagatgaaaacgtagaagacacccctgaattaaaaacacttacatagcagtggctggaattactcccaaaacgtgcccagtgatcgcactgtaacatgggattttctcacccaaataggcaactcatgcttcctgagtgtaatcaaagcatgtggtgttttggggccatatgcaccaggtttctattttagaaaccttcagctgtcttgcttatgtaccatatgtaaatttattctttttaaaaatcacttttatttgattttgacttattaaatgctttaaaagcc

SEQ ID NO: 366798 - DNA, 1017 bp, Homo Sapiens
  misc_feature (899)..(946): n is a, c, g, or t
ggggacaaagtgagatgccccaaggggggagacatgtggtgtgtttcgctgagcacgtgctcaacatgtcgcgctctggaaaagggggggcacatgaaaagagcacacaaggcgccactataagtgtggtgttatctgggtgtgtggcacactccggggaagcggtgtgggattttaggcccaggggcacatgtctttcggaaaggcgtttgtgttcctttcgtaagggaagtcacagggagccccattagcccctttaacgttaggtgccccttgggattctaaggttcttgttttcccccggatccggagaagaggacaaggcccttttgatgaaggagtggttcgttgctcccgtccctggggttcactgccaggcagttctttgggcaactaagtgaacccaccagcaatcgtgtgtgtctccttcgttctctcctggggccctttctccttggttggaatcaggccactcttgtaccactgcagctcttcctgcaccaccaggagctgcgacttgagtttgttgcgttcctgcagcacatcccttgagctcctgcagagtgaagcggggtcgggttgggatctgtcaggtcaaccaccattttgttgggccccaggttcacctccccgctggccggagggctctgtctccgcagcccctccacctccttcctgaggtggtccctctccatcttcagctcctccagcgccaggctgccctcattcaccagcgcctccagcatctccaggacgcggacgactttgaactgcagctgcgtcacccgggggtcgctgcccagggccataagctcgcggcccaacaggtaggagatgtcatacacgtcctcggcggtcagctggaaggggctcttgcccagcgccccctcgggcccaannnnnnnnnnnnnnnnnnnnnnnnnnnnnnnnnnnnnnnnnnnnnnnngcacagggggctcctccatggccaccctgacccccgccgacctcggagctgctgtcttggagtctcccccc

SEQ ID NO: 366799 - DNA, 1559 bp, Homo Sapiens
  misc_feature (312)..(324): n is a, c, g, or t
ggcctgggtggcgaattcggcacgaggattttattatggggagctgaatgggcagaaaggccttgtgccctcaaacttcttggaagaagtgcctgatgacgtagaagtctatctttctgatgctccatcccactactctcaagatacgccaatgcgctcaaaggcaaaaaggaagaagagtgttcatttcacaccttaatcaggcaatgtagccttcacgtaagtgagcaactgaagataccgataaagataccaacttaagctaccttaaccgggccagtgtggtagacttaaggcttcattgtggggttnnnnnnnnnnnnngatacaaagaaatatgtctcaaaaaactattggacctaaataattagaatattacttggtctcagttgtaaagcaactgaatttatagtgaagcaaatcatctttaataatcatttcctactatttgcattaagaatatttgaaaggccaacattgggaacatatttcttaacaagctaactgtgtgtttacatagagagagctgcatattgcattgttagccactcttggaaaaagcacaacctaacaaacatgtttactataggaagctttactttagaaacttaacccaaggtcaagcagatgagtagtgaacacaggtgatcgagtgttggctctgaacactccaaacactggctcgagtggccagaacgtgttttccttaagtaaccctgcctctaccttacgagagagctatgctcctcctcaaagcacaatcatccctgtgacagaagttgctgcaacacgcgtttgttgttggtataccaatgcaatactaagttgatgaagcacgcagctcaaatgatcacattagatggaatagatggtatcttcaggtgtactttggggatgctttactaggtgttttcccattagaattagaccttgattttaaatccaagcaagcttgaagccccttggcttacagcatttgcctgctgaatactaaacactcacatggcaggagttgctctggagaggtagggccagaggaatgctgctgcacttgccaactcaggcacatgcttagctgtaaagggaagcgaggtgaagctcgtcctgcaggcgtattagagtaaaagtctacccctctgaagcactatttaagcgcttaaccgtatatttaaatactaccatgtgctatctacttgagggaagattcatgttcaattatttggcaaataatgccaagcatccactaaggggcctttaagcttcctttgagtcatattcaagggtccaatttacagactgttcgtcttaaagtactttcaaacacagggtgtggccactcttccaaataaattcttaataggtaatactaaatcaacccccagggaatgtgctactttcacccatatttgggattaatattatccacaattaggtgtcggatccaagaaatatcccctttatatgaaacttttaggcgttgctgaatagcacttcatgtatgggtgtacctagtgccaaacgtgttaacatataaccctaatttacgaatccagatctcc

SEQ ID NO: 366800 - DNA, 887 bp, Homo Sapiens
tggaggcacacaggctggatgtattctgtgagggcagggactggagaggtggaccagggcaatatcgttgctgttctcctcgctgttggggtcccgaaagggaagatagcccccgtggtagaccacagcctgcacccccagctgcagaccgtggggagaggcctgggccacggcaccggcaaacactcgccatcgggacaggacccggttccgctccgggaagcagtgggcggctgtcagcacccagtccccggagagcagggatcccccacagaggtgtgctccatcatagcgaaggctgacttgccacggccaccggcccaagctggtgtcccggcctcccacgatgcggtccacgggcagcttcctgcggccacagtcttggcagatggcggccaagaaacggcctctggggcaatcacacacggagatgacctccagcagcctctgggtgtggggcagcctcccctcgtccacacagaagaagcccgacgtgccattggcgcccgccgttcgcacgtccagctcggagtgggtcagtgccctgaggaagcccatctcctcgcagctgagtccggctaccctggcgttggagcgcgaggagcacagcagccgccacgtcccttccgtcttgtcaaagaccatgagccgagcgtccgcagagctgacctgcactgggtacagcggctcctggtcactcctgaggagaacagccacaatggcccaggatgccgccccgatggctgtcagaagtagcagggtccccgcagtgagagctgccaccttgggtctggagcagcatggcacagtccggccacctgcaacagacaccatgctgggaacacagccaggcctgtcctcaatccgaaaattccggaccggtccac

SEQ ID NO: 366801 - DNA, 1116 bp, Homo Sapiens
  misc_feature (852)..(865): n is a, c, g, or t
  misc_feature (912)..(952): n is a, c, g, or t
ggtccggaattctcgggatctgtgccatgctgctccagatccaaggtggcagctctcactgcggggaccctgctacttctgacagccatcggggcggcatcctgggccattgtggctgttctcctcaggagtgaccaggagccgctgtacccagtgcaggtcagctctgcggacgctcggctcatggtctttgacaagacggaagggacgtggcggctgctgtgctcctcgcgctccaacgccagggtagccggactcagctgcgaggagatgggcttcctcagggcactgacccactccgagctggacgtgcgaacggcgggcgccaatggcacgtcgggcttcttctgtgtggacgaggggaggctgccccacacccagaggctgctggaggtcatctccgtgtgtgattgccccagaggccgtttcttggccgccatctgccaaggtgagatcctaaaactcagaaccctctcctttaggcccttggggaggccacgtcccctcaagctccccaggatggggccatgtactttcagaccccctagggcagggccaagcctgggctctggggacctgggctccagtcccctgtcgccgccccctgctgacccttgtcccacagactgtggccgcaggaagctgcccgtggaccgcatcgtgggaggccgggacaccagcttgggccggtggccgtggcaagtcagccttcgctatgatggagcacacctctgtgggggatccctgctctcccggggactgggtgctgacagccgcccactgcttcccggagcggaaacgggtccctgtccccgatggccaagggtttgcccgttgcccccggttacaagnnnnnnnnnnnnnngttccgtcagtctggagggtgtctcggattcgcgtataccaacaggnnnnnnnnnnnnnnnnnnnnnnnnnnnnnnnnnnnnnnnnngtagccactccccccgtgttcttgcgcttgtcgcccactatcccccgcttcccccgtttctcctttcacaatcccaattaccccccatcgctattctccaaaccctatacgccacactcccctccgtaccgcccccccttaaccccctcacaaaatacgcgccg

SEQ ID NO: 366802 - DNA, 446 bp, Homo Sapiens
gggccagaggaagtaggcgccgacggcgctcccgacgaggccgagccccgcgacgaccgcgctggaggcgttaacctcggccagcctctgacggacgagatcacgtagcctgtcagcaagcgacccggtggcggcgacgtcttcgtcctcgtcctctaggagttgataggcgtcgtggtcgccctcctggtcctcctggaggcaactgtcgtcatcgtagtagtaccggtaatcgtcttcgtagaacacgagcgccggagacgtcgcgggaagaggggtcgggccgagggctgccggggaagggtccagcaggccacccgtgttcatctcggctgaccttggttccccctggtggtggtggccgtcttggtctccggctgcagctagtagggaggcggacatcgcacatggtttcagaagaaagactggctcgctcactcactcgc

SEQ ID NO: 366803 - DNA, 1530 bp, Homo Sapiens
aggcagctgactgatttctcgaactgctgttgtcatgaagacttgtcaagaggaaaaattgatgggacacttgggtgttgtattgtatgagtatttgggtgaagagtaccctgaagtattgggcagcattcttggagcactgaaggccattgtaaatgtcataggtatgcataagatgactccaccaattaaagatctgctgcctagactcacccccatcttaaagaacagacatgaaaaagtacaagagaattgtattgatcttgttggtcgtattgctgacaggggagctgaatatgtatctgcaagagagtggatgaggatttgctttgagcttttagagctcttaaaagcccacaaaaaggctattcgtagagccacagtcaacacatttggttatattgcaaaggccattggccctcatgatgtattggctacacttctgaacaacctcaaagttcaagaaaggcagaacagagtttgtaccactgtagcaatagctattgttgcagaaacatgttcaccctttacagtactccctgccttaatgaatgaatacagagttcctgaactgaatgttcaaaatggagtgttaaaatcgctttccttcttgtttgaatatattggtgaaatgggaaaagactacatttatgccgtaacaccgttacttgaagatgctttaatggatagagaccttgtacacagacagacggctagtgcagtggtacagcacatgtcacttggggtttatggatttggttgtgaagattcgctgaatcacttgttgaactatgtatggcccaatgtgtttgagacatctcctcatgtaattcaggcagttatgggagccctagagggcctgagagttgctattggaccatgtagaatgttgcaatattgtttacagggtctgtttcacccagcccggaaagtcagagatgtatattggaaaatttacaactccatctacattggttcccaggacgctctcatagcacattacccaagaatctacaacgatgataagaacacctatattcgttatgaacttgactatatcttataattttattgtttattttgtgtttaatgcacagctacttcacaccttaaacttgctttgatttggtgatgtaaacttttaaacattgcagatcagtgtagaactggtcatagaggaagagctagaaatccagtagcatgatttttaaataacctgtctttgtttttgatgttaaacagtaaatgccagtagtgaccaagaacacagtgattatatacactatactggagggatttcatttttaattcatctttatgaagatttagaactcattccttgtgtttaaagggaatgtttaattgagaaataaacatttgtgtacaaaatgcctaacaccccacccacccttttcccctttccttccccctttctgcccgtcctcggtcccttccaaaaaccttttctacaaccattcccttttgccccccccgggccccagccaggtaaagtgcaaacaaggttcatta

SEQ ID NO: 366804 - DNA, 616 bp, Homo Sapiens
gaaaaaattgggagccagtgagccaagatgtgttaaaagcaagtgatcaagcttagattgcagtgttagttaatagagcatatgtgtccctgcctgatgcattaccttccctgcagtagttagccttctgggaccctgaaaagcatgcagaaaggttgacagcttacaatcaataccatgttcactgatgcaggaagcaacattatcacatccaagatattgcccccacacccaggctgcagcactaaatattccccataacaaggcaaagggaagtgacaagagctattattctcaaccctcccacttggaaacaagaggtgagacaaaccttcccctagatgttcttagggaaaggcaagacccccaaagaaatctttcagagctgagcacatgcctaatacagcaagacagggatgggagaagattggcattttcatttgcctgggtgtccacaatattgcaggggaagctctgtgggcagctgggaaatacaacaataaattggagggggatgaacaatagggtcagtggggctgtgtgctgagtgaatgctggattttattctacatgcccaattcactccaataagataaacttgacttcctccagtgtg

SEQ ID NO: 366805 - DNA, 601 bp, Homo Sapiens
  misc_feature (323)..(433): n is a, c, g, or t
  misc_feature (588)..(588): n is a, c, g, or t
atgaggatatggtttccaaacttcgcaaatacttatagtccagccacaggggatatactgataaaatcagctcagggaaggtaatgcatcaggcagggacacatatgctctattaactaacactgcaatctaagcttgatcacttgcttttaacacatcttggctcactggctcccaattttttcttaattccctgactcctctgagcagtcctctgatgccctgtttggatctccatatatcattcaaactcccaatggcatgccgctcatcttataagcttcctgtgggcaagtgctgtgcctgacttccttacacatttnnnnnnnnnnnnnnnnnnnnnnnnnnnnnnnnnnnnnnnnnnnnnnnnnnnnnnnnnnnnnnnnnnnnnnnnnnnnnnnnnnnnnnnnnnnnnnnnnnnnnnnnnnnnnnnaagggtggttgagaaagcatctctgaggaggtgacatttgagctgagtttatcagtatatcccctgtggctggactataagtatttgcgaagtttggaaaccatatttcctcattttagtgcctcatagccggctatggagaagctcctatatgnaaccacactaagt

SEQ ID NO: 366806 - DNA, 872 bp, Homo Sapiens
ggccagtaactatcgcggttttaaggtagcgaggcctgggtggcgaattcggcagagggcctcctgagtagctggaactacaggcgagtgccaccatggggatctggccatgttgcccaggtgggtcgtaaactcctggcctcaagcagccctcctgcttcagcctcctgagtagctgggactaccgctgcacaccagcaggccctgccaattgactgcttttacagtgagtgcacccagggcggccgcagatggcagtgtctctggggacagcagctgcgaatgagtccacgggccaacgctgagctgctcaggctgaggcggtgtgctcagcacagagcccccggaactggcatctgcagggcgtgagccaaggccgccgcgatgccgcacttcctggactggttcgtgccggtctacttggtcatctcggtcctcattctggtgggcttcggcgcctgcatctactacttcgagccgggcctgcaggaggcgcacaagtggcgcatgcagcgccccctggtggaccgcgacctccgcaagacgctaatggtgcgcgacaacctggccttcggcggcccggaggtctgagccgacttgcaaaggggataggcgggcggcaccgggcggccgtcagggcgtcgcagcacggcccccacaacccctatcacgccaaataccaacgccccaacagtccctccaccctcacctccaaccactaagggccacgagggaacagcacatcggaacgatggggagctaacgccagcgtaagagaagaagggaggatgtcaacacatcaaagtagccaggaaagggcaccacagcacgcggacgacagggacaccacatgaggccatcacagaagcaga

SEQ ID NO: 366807 - DNA, 756 bp, Homo Sapiens
gctgcagccctctcctaaggaggctaggccttggggcgctgactgggagtctccagaaagagggtttcggggaggcaggagtgagcttttactctgggcaaagacctggagtgagccaccctgtctatgagagcagagatgactccatggagcttgtgggcaggaggctggggatgagccccatctaggctgacagagcagggctgtttctcacatgtatctgagagtgaaggaggggtgggaaggtgcagagagggcaggagggacagagggctgtacctaacgctcacgcacggtggactcctgtgtgcagaaagggatgcgcaccagcagacagggccaagaatctccatgcgtgtctccactcaaaacctcagggctgtgactcccgctttctcagaagggatgcgcaggctcaccccttccccctaggaatcaccagggcacccccagccccagctcatctcctttagccatttgacagggaggggccagcagtgagctgcaggcttagaggggtgaccagggcccttcctaactcgaccgcatgtggttgggtggctgccttgggagggaggctgtccgatgctgacattccccttagcatggccctgacctgtggctgtcagtgggccaccattgcctcaccaggccaagcccactgggaatggggtcagtcacagcagaaccgtcgaaaggtggacctgatgtgggccctgccgggggcgcttggcctcagcgggcatgggagaccca

SEQ ID NO: 366808 - DNA, 1309 bp, Homo Sapiens
cggggtgctgcgagcgcggggccagaccaaggcgggcccggagcggaacttcggtcccagctcggtccccggctcagtcccgacgtggaactcagcagcggaggctggacgcttgcatggcgcttgagagattccatcgtgcctggctcacataagcgcttcctggaagtgaagtcgtgctgtcctgaacgcgggccaggcagctgcggcctgggggttttggagtgatcacgaatgagcaaggcgtttgggctcctgaggcaaatctgtcagtccatcctggctgagtcctcgcagtccccggcagatcttgaagaaaagaaggaagaagacagcaacatgaagagagagcagcccagagagcgtcccagggcctgggactaccctcatggcctggttggtttacacaacattggacagacctgctgccttaactccttgattcaggtgttcgtaatgaatgtggacttcaccaggatattgaagaggatcacggtgcccaggggagctgacgagcagaggagaagcgtccctttccagatgcttctgctgctggagaagatgcaggacagccggcagaaagcagtgcggcccctggagctggcctactgcctgcagaagtgcaacgtgcccttgtttgtccaacatgatgctgcccaactgtacctcaaactctggaacctgattaaggaccagatcactgatgtgcacttggtggagagactgcaggccctgtatatgatccgggtgaaggactccttgatttgcgttgactgtgccatggagagtagcagaaacagcagcatgctcaccctcccactttctctttttgatgtggactcaaagcccctggaagacactggaggacgccctgcactgcttcttccagcccagggagttatcaagcaaaagcaagtgcttctgtgagaactgtgggaagaagacccgcgggaaacagggtcctgaaacctgaccaatttgccccagaccctgaccaatccacctcatggcgattctccatcaggaattcacagacgagaaagatctgccactccctgtacttccccccagagcttggatttcagccagatccttccaatgaagcgagagtcttgtgatgctgaggagcagtctggagggcagtatgagctttttgctgtgattgcgcacgtgggaatggcagactccggtcattactgtgtctacatccgaaatgctgtggatggaaaaatggttctgctttcatgactccaatattttgctttggtgtcctgggaaagacatcccagtgttacctacgggaaattcc

SEQ ID NO: 366809 - DNA, 1033 bp, Homo Sapiens
agcggggttaccgggcaacgcggcccgggccatggaggcgtcgtacgagtccgagtccgagtccgagtctgaggccgggcctgggactcagcggcccgggaccgggaccgtgagcgcggccgtgcgcgagcacttgcggaagctgtgtctgcgcgagttcccgtgcggtgccggcagctggaataagtcgcgctttcttcctcaaacttggcgaacttggagggagcttgtccccagagaggaggatgtggtgagccccggagaggagacggtggaggccctgctgggcctggtccgcagccgccactccccctgggctctgctgaacaactcgaatgcagaagacagtttcctgagagaattggccatccggaacccgctgacgatcacagacaccttcttctactcctacttccggtccctgcgggtaatagacaagaaggtcaccctggtggataaagacctcctgaaatttctaaagctggaggagttggtactgagcgccaatcgaatcaaggaggtggatgccaccaatctgccccccacactcaaggtgctggagctctacggcaatgagatcagcagcatggagtgtctgtgtgcccacccacccgccggcctgcagcacttggggttaggccacaacaaacttctaggccccttggaaagtctctacgtcaccgctaatcactggcccaacctcgtctcccctggacctgggctttcacgacctgacagacctgcagagcatggtcacccagcctgagggaccctccgacacctggcgactcctggtggctgcaagggaaacccacttgggccttgggtggcccctacttaccgcgggccttcaccattcgaccgccctggggccccgcctcttgccgttgcctggaacgaacatcccccctggtcctccccaaatgagaaagccattcctccttcccgggggggtcttcgagccctccaatgggggcgaaatctcccttgggcccacaaggaaagggcccccaaatttggggtggggtgaacc

SEQ ID NO: 366810 - DNA, 932 bp, Homo Sapiens
  misc_feature (903)..(903): n is a, c, g, or t
caggctgtacggtctgggatgttaaggatcctgccgggcttgctgtgcgactattctccgtggtagccgtcctgtgtcaccgccggacacctggcgcaggttctttatacgataaagtgccaatggtaggaaatttcgccgatggtgaagtggtaagaggtcgatggcctgggagttcactttattatgaagtagaaattctgagccacgacagcacctcccagctttacactgtaaagtataaagatggaacagagcttgaattgaaagagaatgatattaagcctttaacttcctttaggcaaaggaaaggtggctcaacttccagttccccttccagacgccgagggagtcgatcaaggtcacgctcccgatcccccggtcgagcacctaaaagtgcccgccgatctgcttctgcttcccaccaggccgacattaaggaagcaaggagggaagtggaagttaaattgactccgctgattctgaagcccatctggaacatagcatcagcagatataatggggagcctgagcactattgacgagaaatgacgcacctcataaaaatacacaggacaaaattcaatttgtcacaagaaagcagttacatagcaacacagtatagccttcgtccaagaagagaagaagtcaaattaaaagaaatagattctaaggaagaaaaatacgttgcaaaagaactggcagtgagaacctttgaagtgacccccatccgggcaaaggacttggagtttggaggagtacctggtgtgtttctcatcatgtttggcctgcctgtgttcctcttcctgttgctgttgatgtgtaaacagaaagatcccagtcttctgaatttccctcctcctttgccagctttgtatgagttatgggaaaccagagtatttgnggtctacctcctgtggcttttgattcaag

SEQ ID NO: 366811 - DNA, 802 bp, Homo Sapiens
cgcctgcgcttgctgtggcccgggaccctcagtgccgcggcggcccggaggtggcgggaggacggctccgcgctgcatgcggggcggggaccaggtgacccgtgcgggccgcctccagagaatgaggctgccagccttgagagcaccaccgttacctggttgaagaggggaggggaagtccagcattggcctctgcagcgtggatctcccggccaggctctcagctgtcaggtgagtctcacctcacacctctcagaagacatggacaatggcagtgaatggagccaggaggacccggagtgtcggcctgccactgagaaacggagggcaggaatcctacaaccagaactctgcgccccaggatggaggctccagcccagaaggctgggcagggaggactccccaaggccgatgcccagggtgcctccggggcccgggagaagaggcccgaggagccgaggcccctcgaagaggaccgagctgggagccgccccactcaaaagggggacctgcgtggagcggcgggcggtaggacgactcccccaggcgggggctcccggggctgcagcctcggggtgagccccggcccggggacccggcacagcgccgggaccagacccctcgtgcgggagccgtgcggccacacctcttctcagaaccctgagctggttatccccgaggggctgcaagcccgggagggcccctgtaggagcccagcgcgtggcggggactgcagcaggaactcctgcctggcgtggcatcgcggggcgcccgatggggagacgccagccgtgtgtgaccg

SEQ ID NO: 366812 - DNA, 705 bp, Homo Sapiens
cgagtccctcagagctgggatgagcaccctctgcaactataccccattccccaaccatcagcccctacagccattggaccctaagggtagcagaagtagtgttaggagctccagggaagggcggaagaagggctgggaaggcagccaggaggccctgaacatgccctcctcctgtgccctaccacccagaagaccggaagctctttgtggggatgctagggaagcagcagacagatgaggacgtccggaagatgtttgagcccttcgggaccatcgacgagtgcactgtgctccgggggccagatggcaccagcaaaggctgcgccttcgtgaagttccagacccacgctgaggcccaggcggccatcaacacccttcacagcagccggaccctgccaggtgcctcgtccagcctggtggtgaagtttgctgacactgagaaggagcgaggtctccgccgcatgcagcaggtggccacccagttgggcatgttcagccccatcgccctccagtttggagcctacagcgcctacacccaggccctgatgcagcagcaggcgagcctggtagcggctcacagtgcctacctcagccccatggccaccatggctgccgtgcagatgcagcacatggctgccatcaatgccaatggcctcatcgccaaccccatcaccccatcctcaggaaccagcagccctcctgcca

SEQ ID NO: 366813 - DNA, 1002 bp, Homo Sapiens
tacaggacttatgtcatcccccttcgtgggcacactccttccctccaggagtaccagtgctctagtaacacccccagcctgaacctcaccaatcaggaggatacagatgagtcctcggaagaagaagcggcacttacagcaagccagatactctcacgcacacagatgttaaacagtgattctgccactgatgaaacaataccagaccatcctgacttacttctccagtctgaagattccactggcagcatcgcaacagaggaagtgcttcaaatcagggatgagaccccaactttggaggcttctctagataatgctaacagccggctgcctcgaggatacaacttccagtattaaaggaggaacatgttacaacctttgaagatgaaggatcctatataattcaagaacagcaggaatctcttgtgtgtcaaggaattcttgatttagaagaaactgaaatgccagagcctctagctcctgaaagttaccccgagtcagtctgtgaagaggatgttaccttagctctgaaagagctagatgaaagatgtgaagaagaagaagcggatttctccggactgtctagtcaagatgaagaagagcaagatggttttccagaagtacagacgtcgcctctgccgtcaccatttctttctgccatcatagccgcctttcagcccgtggaatatgatgatgaagaggaagcctggcgctgccacgtcaatcagatgctgtctgacaccgacgggtcctctgcagtgtttacttttcatgtgttttctaggctgtttcagacaattcacacagaaagcttccggagaaataactaactgaggcagtcagctttcttggtgatagtctgcaacgcattggtaccaaatttaaacagttccttggaagtgatgatgctgtgctcagaatgcccaacagtctttgtggatgctgaaacactgatgtcatgtggctcgctggaaacactcaagtttggtgttttggagttgc

SEQ ID NO: 366814 - DNA, 718 bp, Homo Sapiens
cgaggcttcgtagtggaggaacgggttggcgtgtgggacgcagctgcctctgtactggggagtcacggaggggccgggctccagggacatggcggcggcctctgcggtgtcggtgctgctggtggcggcggagaggaaccggtggcatcgtctcccgagcctgctcctgccgccgaggacatgggtgtggaggcaaagaaccatgaagtacacaacagccacaggaagaaacattaccaaggtcctcattgcaaacagaggagaaattgcctgcagggtgatgcgcacagccaaaaaactgggtgtacagactgtggcggtttatagtgaggctgacagaaattccatgcatgtagatatggcagatgaagcatattccatcggccccgctccctcccagcagagctacctatctatggagaaaatcattcaagtggccaagacctctgctgcacaggctatccatccaggatgcggttttctttcagaaaacatggaatttgctgaactttgtaagcaagaaggaattattctttataggccctcctccatctgcaattagagacatgggtatacaagagcacatccaaatccataatggctgctgctggagctacctgttgtggagggttatcatggtgaggaccaatcagaccagtgcctgaaggaacacgccaggagaattggctatcctgtcatgattaaagccgccggggtg

SEQ ID NO: 366815 - DNA, 996 bp, Homo Sapiens
  misc_feature (50)..(86): n is a, c, g, or t
  misc_feature (836)..(836): n is a, c, g, or t
ggaatgtatagatcatatagggcgaatggagctccaccgcggggcggcgnnnnnnnnnnnnnnnnnnnnnnnnnnnnnnnnnnnnnatcaggccaaatcggccgagctcgaattcgtcgagcagcggaaggggggagccgtggtcctcatttcgggagctgtgctgctgctctttggggccatcggggccttctacttctggaaggggagcgacagtcacatttacaatgtccattacaccatgagtatcaatgggaaattacaagatgggtcaatggaaatagacgctgggaacaacttggagacctttaaaatgggaagtggagctgaagaagcaattgcagttaatgatttccagaatggcatcacaggaattcgttttgctggaggagagaagtgctacattaaagcgcaagtgaaggctcgtattcctgaggtgggcgccgtgaccaaacagagcatctcctccaaactggaaggcaagatcatgccagtcaaatatgaagaaaattctcttatctgggtggctgtagatcagcctgtgaaggacaacagcttcttgagttctaaggtgttagaactctgcggtgaccttcctattttctggcttaaaccaacctatccaaaagaaatccagagggaaagaagagaagtggtaagaaaaattgttccaactaccacaaaaagaccacacagtggaccacggagcaacccaggcgctggaagactgaataatgaaaccagacccagtgttcaagaggactcacaagccttcaatcctgataatccttatcatcaggaacgggaaagcattgacatttcgaaccctagactgngatcacgaaggaatctgtcgtatagaaatgtaggcgggagctaacacccactgcagaaagatctgtgaaaccccggggggggctatttacccatggcccttttatttttccaggctgccgctccggccgcgagtcctcatgcctgtagctggtgggctgg

SEQ ID NO: 366816 - DNA, 692 bp, Homo Sapiens
gcgcgggcagtggtgggaaggctggcgcgaggcgtgaggtggcgtgaggcgaagctggaatcgtgcctctgtcacgggggctggtgcctcacgggtttgtgtcctagacaggcgagtggatccaagtgggcgagagacattttaatctggaagagtcttgtgatttgggagacagtgaagaagaagtaaaatattcacaagatgaagatttttccagaagggactttgagtcaaagatggctttttatatttgacaagtcttgtcatctgtaatgaagatcattgtgaaacagaagattgattaaagcccttgtaacattggacctagattagagatttagaaaagaaaagtcaaaattagtcactttagtggttagtgttcccatttcataatatttattctttcttctaaatagatttagggagtagaaattaaaattcaatgctataccaaagggtatactaatatatgttggctttttttccctttttgtgagggagaaaaaagtagataacgaaaagctatagtcattcgtaatgaaatatactaaacagaattttatgatgtcagttcttggcattataatctacgtaactgatttaattgtggacatatgggtatctgtcagatttttccatgaaggacaggtatgtatagtgcttgagcgttaagcttgatgctttgtggaaca

SEQ ID NO: 366817 - DNA, 761 bp, Homo Sapiens
  misc_feature (20)..(20): n is a, c, g, or t
agggattgctcatgcttganaatgtagcagacacttgactgtagtctgttacacatttccttcttaaattcctaatggtcagtgtgagtaagaaagggagaagcccagtcagcaatgaagagtctcaacactgctttcctgatgaggatgtcctcagaggacactgaacaaggtgggtttagatggtcaaaggtggacctttaaactggccactgtacaagtcccttcatctaatggtcaccccaccagagagccaggcactccaactctgaggctttatcagttcagggctggggagaagcagcaggtccaacaaggatggagctttggtttgtctgacatctcaatataaataaagacaggaggcttccaaactgtgcaaataggtcattcatgtcacttgttcccctcaaccctgtccccaatctactccatcacaggaaggaagggggatgaaaggcctggaatttaactgtcccgaactttatagaacatacacccatggcctaaagtgttccctgggtttattatgctagagacatctggagaagaagaatttgcttaagggcttgacatgtcttcccttagttatacccctggttctccacatctctggtcaaggctgttctctggaatatggctacttgctggggagaaactcattttcctaaagtctcttatacaaagagatgctgggtaatgtgtatacaaaacaaaataataaatattaatgtccaaaaggctttgtgagttaatgaaac

SEQ ID NO: 366818 - DNA, 1228 bp, Homo Sapiens
ccctggccttcccagcagtgtcggctgagcccttcctctactccagtgacctctatttggctctggcccagccaggagtcagtgcctgcaccatcctgaagtgggactatgttgagcggcagcttcgagactatgatagaatcccagccccctctgcagtgcactgcaagccgatggtggtggacagccagctgtacgtggtcgtggcgccagctgtttggcggctcttacatttaccactgggatcccaacaccacgcgcttcaccaggctgcaagacattgaccctgcagcgcgtgcgcaagcctaacgacctagaagccttccgcatcgacggtgactggtactttgccgtggctgacagctccaaggcaggcgccaccagcctctaccgctggtaccagaatggcttctactcccaccaggcactgcacccctggcaccgtgacaccgacctggagtttgtggactggcgagggcaagccacggctgattgtgtccagcagctcccaggcacccgtcatctatcagtggagtcgcacccagaagcagtttgtggcccagggtgaggtgacccaggtgcctgatgcccaagctgtgaaacactttcgtgccggccgcgacagctacctgtgcctcagccgctacattggcgactccaagatcctgcgctgggagggtacccgcttctcggaggtgcaggccctgccctcccggggctcgctggccctgcagcccttccttgtgggtggccgccgctacctggcactgggcagtgatttctccttcacccagatctaccagtgggatgagggacgacagaagtttgtacggttccaggagctggctgtgcaggctcctcgggccttctgctacatgcctgctggggacgcccaggctactcctgtgccccagcttcgcaggggacagacgctggtgtctcgcacacattgtggctggatctcagtgcctagggggtgcgaggcctctggtctcctcaggctggccactggaggatgggtgggggcctctgtgagcaccacgctatgcctgtgtgaagacaagcgaccaagctgcattcatgcccgtgtattccgctcacgcaccagcgatgtacatggcgcacccccgtgggactggccccaggaggacgtgcatcatcactgcaatcaggcattaatctccagggaaccccatgagaaaacctaaaggccccatgttcccgtaga

SEQ ID NO: 366819 - DNA, 1104 bp, Homo Sapiens
  misc_feature (1036)..(1045): n is a, c, g, or t
  misc_feature (1047)..(1047): n is a, c, g, or t
cgccgaccagccggatggacgccgcgcgggcccacctttccttattcgttgggcacggtccggaattcccgggatcgaaggagagctcgccgccgtcgaatggaaacgattgtctttgtggacaaagaaatctttgccagtcggatttccaacccctcagatgacaacagctgtgaagacttggaagaggaacggagggaagaagaagagaagaccccgccggaaacaaagccagaccccccagtgaacttcctacgccagaaggtcctgagcctccctctgccagatcccctgaaatactacttgctttattacagagaaaaataagtctcctgtttgaaagggggaaataggaagagcagattgctgagtgtgaagttcgtgctgcctgtgtgctgttgaagggtcacctggaggcagacgttgtggggaagggaactgctgggctcatccacaccatggttttcttctagttcctgattgacctctaaaattctattcagttgtatgatttgtttacatagttccacaagaccttcattgcatagaagattgttttcccaaagtggagagaatcttcatagagaaaaagagaaggctgtttctttttcggctctgacgaaacactgaagtctgcgtaagagagactgtttgatgaccgtccctcatgcaacatgcacggtactcactaaaaatgaaaactgaagtggaaactaacctgtgttgcttataaagtgtgaaagcacaagcttataaatgtataaaatcttttctgggtgtgacgcacctgcgtccaagtatgaatggttatgatatgtaccacttaattactggcactgagtatcactgaatttcttagtaaactagtggggaaacattattgagaagcccctcccttatttaagtaagttgattaaatcttatgtgagttgccagttgtaaatttttcaaaggaaaaattttgatgggggtggaaggaatgaattgccagaataatctttctggaaattcggagagaattccaaagaagggtttnnnnnnnnnntntttttaggacatcttttgatacctttaaaagaaaccactggtcaagtaataccctta

SEQ ID NO: 366820 - DNA, 530 bp, Homo Sapiens
  misc_feature (81)..(81): n is a, c, g, or t
gtcacctatgtactagttgtccttgtcctcgctcagcagcaaggctgagtagttgtagatgtctggctcatgaaactgcanccaggtgcacctctctgtgctcccaggtgatccggggtatgggcgcaaatgccatcgctgtcccaaacatcacttgcaagggccatgagcagtccccctaatgggggtgcacatcctcatcaggtagaggcgaccccaggggcttcagcagcaaaggctcacggcagcaggtggccgggcaagtgtgctattgcagatgcggctcagcgccccaggaccagggccagcagcacagcctggagctcgtgaacagcgcggtccctgagaatccacatttcccagttctccaggtgaggaggggtcgctctcaccaccgcaatgtcaaagcccacttgatacttcttcagggcctcagaagaaatgcaaaccatcagtgtcgtcaaacatttcagcacatggtttctttccactatctggtgttagcagagtctgcagcgcgcgtcctgccc

SEQ ID NO: 366821 - DNA, 918 bp, Homo Sapiens
  misc_feature (300)..(300): n is a, c, g, or t
ccgtatttaagatgttatgttcgggtgtcaccaggcccgcttggatgccttggtccccactcacgtatccgtatcggcctcttgattgcctgccgcccccctggatgtagttgagccactctgttcgtgtttggtctcccctgttttctgcaccatttgcgttttccttgtctttctgagacccttccaatacacctcatgctgcttctcggagatgttgagtgcgttccacagcgaagaccgcctcccgggcacctatgtacaaggtgtccttgtccttcgctcagcagcaaggctgangtagttgtagatgtctggctcatgaaactgcaccaggtgcacctctctgtgctcccaggtgatccggggtatgggtgcaaatgccatcgctgtcccaaacatcactgcaagggccatgagcagccccctaatgggggtgcacatcctcatcaggtagaggcgaccacaggggcttcagcagcaaaggctcacggcagcaggtggccgggcaagtgtgctattgcagatgcggctcagcgccccaggaccagggccagcagcacagcctggagctcgtgaacagcgcggtccctgagaatccacatttcccagttctccaggtgaggaggggtcgctctcaccaccgcaatgtcaaagcccaattgatacttcttcagggcctcagaagaaatgctgtatcttatgcctcttgaaactttccagtcatttctagaaagacgtcttcagaaatctttgctttccaggggccatgctcctgaccccacgctggtcagcgtgtcctcagccaccagggaggatggatactcaggacaccatctggccccgccgccccatcctcacgcagggcctctgctcgcctgggacgtctgtcctgactgcaggggtttcaagggctct

SEQ ID NO: 366822 - DNA, 777 bp, Homo Sapiens
gtggactgcaaggatcctgggcgattttctagtcctgactccatatgacagatggacacaaagagccagaaaggattttaaaacaatctatcacctatctttgaccatatggactaaaattgatatccaccaatagacactgatgcctgcaagtcaacagcataaagagtggtaaagtcagtgctgcaaaagatgaaatgtttttaatgtgctctggaggctaaccatccaagaccaagatgtcagcaggattggttcctgagggccttgaggaagaatctgttccaggactttccctttggcttgccattggccatattctctctgtgtcttctcacgtcttccctctgtatttgtttccaaatttcctcttcttataaggacagtagtcatattggaaaaaggaacaccctaataacctaattttaacttgattacctctttaaagaccttatctccaaataccatcacattctgaactattaaagattaatgcgtcaatatatgaatttcgtgaggggcagggagacagaatacaaccaacccacaacacccagatacatagcgaaatcttcttcttctaggccccctgtgcctgtgtccaccacttcatcccccaattagctatatttgaaaaagtaagagggaaagaacagttggagggggaagcagagagagaaagaagacagacaacttagattatgtgccctagatgttggcttacaaaacgggagcaaatcttaaccaatcattgtagcaaaaacctttgtttatgag

SEQ ID NO: 366823 - DNA, 1286 bp, Homo Sapiens
ggggtaggccttaaataggagctattaacgtgattaatgcccgcgtcatatcgtgaggttttcgccttttacggtggaactcatcaacctattacaagtgggactcccatacactgtttctagtggcgataataatggtcacacccctcttctgcggcccgttgtatagatccattgtctgtcgtacaccgaattgtgcaaatgtgcacaatattagagctggcatggacatttaatgtgtaggtcgctaggtagtagttgctatatggcgacaattggtgttcaaatgaacgcgttgcattgcttatacaggtaacaaatggtgtaacacttgggtacaactcttgaatccttattgtggcctgtgcgatggagaagaagatggggaacgggaatgcataagaatggggacccgcactcccttcctactgtgctcttcagatctgtcagtgggcccgggcgcagcagatggccccttccccaagaggcaggggagagtcctccaccccctctgcagcctccaggagcattctgacttccaccagcaggcactccagttattatgcatctagacatatggatctacacgaggaacccccggcgcagccaagctctgcgctggctcccgcacaggcgaagcgcgcgcagcagcacaggagccccgcccctgcagcttgacgagctgagctggggtccacaggaaccacgccccaaggagcgtttggggatggtagtggggagacaggccattggcttccccctctttctaaggaagtcagcctcactctactccttggggatttcgaacatgcagaggctcttgtacttttgcagaagctcattcttggtcctgacttgctcccggaggctctgcagctgctgctgctgctgttcggggctcaggtggatgccgggcatggtgctgatgagcttgcgcatctcctggaacttgcttttgagggcgttcaggtcctggtggacctccgggctgtccttgtccatgcatttgatgatgttgtgaaccaaaggtaaaaaggagtagttctcttcctccctcgcgcgggcaggtgactgaggccgtggcgccggcgactgctgcggttgaggcgcagggaccggcggcggctgaggaggcggcagcggcttggtgtcaggcagcggctggtcggacgttggcggcaatacatcctccgcctgtcgcccggctgccaccccagcagaggccatggctccgggggtaggttagccagaggtcgggtcgccaaaagcgtcgcgcactctccgct

SEQ ID NO: 366824 - DNA, 864 bp, Homo Sapiens
  misc_feature (334)..(334): n is a, c, g, or t
  misc_feature (337)..(337): n is a, c, g, or t
ggatcctctatgagatcctgctagggaaggccaccctgtatgctgtgctggtcagcgcccttgtgttgatggccatggtcaagagaaaggatttctgaaggcagccctggaagtggagttaggagcttctaacccgtcatggtttcaatacacattcttcttttgccagcgcttctgaagagctgctctcacctctctgcatcccaatgagatatcccccgagtgtgcatgcacacactgcacactcacggctgaaatctccctaacccagggggaccttaacatgcctaattgaactacaaccaataaaaactgatctggttctggcctgatnccnaggcactcggaacaaaaccatccttagatcaacaagtggataaagcgctgtctatgcgaacttgcggttgcccttgtcaatccccgtcgaactgtcttttatgggtttcttagacacgtgtaactaggccccgcaggggcccaaatgtggaacaaagcatgaagccgtgggaaaactcgtcccccctttttccacacatcaaagcgttttttgagaagacttgggggccgttggtctaacagctcccctcttaatccacaccattccctttggagtgttaaagctcatggggggggcctccaagttatagcacggacatggaatggggtaccatttttctaccaaagggccctattttgggaaacagaattcccagaggtcctggggattcctggccgggaaccagaaccaccacccaaaaacccactcactgggaggtaaccccttggtaatgcctgtgaaacgcccctggtttgtaagaaagactttcccacacagacccggcacaatttttgggtatccccgaa

SEQ ID NO: 366825 - DNA, 854 bp, Homo Sapiens
gggggagtctgggacagcagagcgggcagcaccggtttttgtcctgggcctccaggctgtgagcacagatacgcagtattttggcccaggcacccggctgacagtgctcgaggacctgaaaaacgtgttcccacccgaggtcgctgtgtttgagccatcagaagcagagatctcccacacccaaaaggccacactggtatgcctggccacaggcttctaccccgaccacgtggagctgagctggtgggtgaatgggaaggaggtgcacagtggggtcagcacagacccgcagcccctcaaggagcagcccgccctcaatgactccagatactgcctgagcagccgcctgagggtctcggccaccttctggcagaacccccgcaaccacttccgctgtcaagtccagttctacgggctctcggagaatgacgagtggacccaggatagggccaaacccgtcacccagatcgtcagcgccgaggcctggggtagagcagactgtggcttcacctccgagtcctaccagcaaggggtcctgtctgccaccatcctctatgagatcttgctagggaaggccaccttgtatgccgtgctggtcagtgccatcgtgctgatggccatggtcaagaaaaaggattccagaggctagctccaaaaccatcccaggtcattcttcatcctcacccaggattctcctgtacctgctcccaatctgtgttcctaaaagtgattctcactctgcttctcatctcctacttacatgaatacttctctctttattctgtttccctgaagattgagctcccaacccccaagtacgaaataggctaaaccgaataaaaaattgtgtgttg

SEQ ID NO: 366826 - DNA, 133 bp, Homo Sapiens
cgccgccgagggcgtaggaggctccggcgagcttgatcgcgggggaggagagcgccatggtggtggtggccgccattgctgccggatggaacagagcaagctgctgatgtgcggctgccgctgctactgatgg

SEQ ID NO: 366827 - DNA, 1318 bp, Homo Sapiens
caatacattatacgaagttatcggatcagggcctcggccgagctcgaattcgtcgagagcggctgcctccttctgcctagctcttcccagagggatgtggtttggggcaggcaggtatggatcacataggatgcgatacctgtggccgtgtatgttcacatgtgtggcctgtagatacatcatcaagcccttcggagcttcctaagttgctttggctgttttgagaggaaaacatggattattcactccccccatactctttgtgatacacatgtgacatgtgaaagacatacgagacatagctacatgtgatgtgcacatgtgtgaagtgcatgtatgcgtactggtatgttgagctgggaaaccgtggccaggcagtgggcactacagcctgattggtcctccaggtcagaacggtgcccccacagtggtcagtccccagccctgtgggcccccacctccatcgcccagccttttattacacactctgagagtgtctccaatgcctgtctgacaaagacagtcccagcccattctcctgtctggctgggttgggtgcaagcaggctctgaatgcctggcatttcagctgcatcacctcccagctccttattgcccaaatagagagggtggccctggctcccctccgagcaactctgcatttaattttgtaatctgggaagtgcctggttttgaaaatccgctttctctcactcttcccctccttccttgcccctggctgctctagtgttctgtctcccagtcacctcgctctcccagcaccagtgcccttctcctgctcccagatactctttcctttcctctctccgtgttttccttcctctgctatctctcacacctctcccagactatgtcatcttgttctcctgcctgggttcaaactctgcatccttctctaacaacgtgactacctcatgtctgcttcaaggcactcgcctgccatcctcctgcctcctcttcactcagtgcttctgcttgccctgccccaggcagcccacccacgcccagtgcgggtgtggagaagatcttctggcttccctgcatcttgcctttgggattgggatccaagggttctccatggatggatccaagtcatagaggggaatgtctgagacagggaaggggactgtgatccagaggctcagaataaaaagatgccctcccttctatgcaggggggcaagtttactggattggagatgatttgggactctcttccagaagaagctaaaggaagagaagggagtgagagtccagggaggcccttccaacctgtgaggcttgactggtctggattgg

SEQ ID NO: 366828 - DNA, 437 bp, Homo Sapiens
  misc_feature (406)..(406): n is a, c, g, or t
  misc_feature (413)..(413): n is a, c, g, or t
ggggcaggcaggtatggatcacataggatgcgatacctgtggccgtgtatgtccacatgtgtgcctgtagatacatcatcaagccctttggagcttcctaagttgctttggctgaggggagaggaaaacatggattattcactccccccatactctttgtgatacacatgtgacatgtgaaagacatacgagacatagctacatgtgatgtgcacatgtgtgaagtgcatgtatgcgtactggttgttgagctgggaaaccgtggcccaggcagtggtcactacagcctgattggtcctccaggtcagaacggtgccccacagtggttcagtccccagccctgtgggcccccacctccatcgcccagcctttttttacacattcttgagagttttcttccattgcntgttttngacaaagacagttcccagcccttt

SEQ ID NO: 366829 - DNA, 832 bp, Homo Sapiens
atcaggccaaatcggccgagctcgaattcgtcgagagcgggaagaaggcccctcggcctcagcagagcgctatcctccactggttacccgggttccccggcttgctaccgggctgctccgtgcatctttccccccaggcgtcaggaactgcgccctcatggcggaggtgaaggtgaaggtgcagccgcctgacgcggatccggtcgaaatagaaaacaggattatagaattatgtcaccagttccctcatggaatcacagaccaagtaattcagaatgaaatgcctcatatagaagcccagcagcgggcagtagccatcaataggttgttgtctatgggtcagttggatctcttaaggagcaatacgggccttttatatagaataaaggactctcagaatgctggtaaaatgaagggatccgataaccaagaaaaactagtatatcaaatcatagaggatgcaggaaataaaggaatatggagcagagatatccgctataaaagtaatttgccattaacagaaatcaacaaaattctgaagaatctggaaagtaaaaagcttatcaaagctgttaagtctgtagcagcctcaaaaaagaaggtgtatatgctctataacctgcagccagaccggtctgtgactggtggagcctggtacagtgaccaggattttgaatctgaatttgtagaggtgcttaaccaacagtgttttaaattcctacagtccaaagcagaaacagcacgagaaagcaaacaagaacccaatgatacaaagaaatagttcatttgcctcatcacatgaagtgtggacaatatatctgcgacatgggga

SEQ ID NO: 366830 - DNA, 1146 bp, Homo Sapiens
  misc_feature (825)..(834): n is a, c, g, or t
  misc_feature (987)..(987): n is a, c, g, or t
gaacattctgtctttaaaaccttgaattcaaaacatatcagagagagatttacttcccttatatggatgtctgtgttctcattaggagagaaacaatgaaaaatgacttttcacaatgcctgccttagccgtgaggctcagccaacccccacttctatgtctcagcatttaaagggcaattgaagtcccactccatgctatatactctcaagaggttttctcatttacccttcagaacagctctgtaaagatggtatggtcagtcccatttcacagatgactaagctcaggctcacagagcctaagtcacccccccaggtaagtggcaggattggaatgaggttccatccctcaccctccctaaagaaccctgagcaccttcccttttagaagatgggcttccagggcttgagaaatggtcagattccactcccctgatattgtggccccacaggtcccccactccacaacccctctgggtgatgaggaagacagaagaggtgaaatcctgcactttatgccaagagatctgggtgtaggaccacaggagttagctaatccctgaagtggtgagtgggctcaggcagaagctcaagtgttggccttgggacaggtgagctgaagagaaggaaagtaacatgcactgaaccactgtaagcaaatgcactctatatttcatctcctttatcctaacggctgttcaaggtaccgatgattatgatcattattccaatcagggtgctgtctttaagggagtttgtgtaaatcagggagagaactttattatctccttattgtcagctaatctggaattaatctaaaggnnnnnnnnnnctctatttgccctgaagcccacagagaaatagaaatgtttttcttatcctttattcacgtttgttctgtattgatgagtatttagaatgtttctcattttttcctttttaaaaagatttcagcaatgctatttcaaataaccacttacctggnctattttgggacatgtggaaaatttttttcctccatttacatttgtaaaacttctatccccttgggggctttggaattccaataaatttaaaactccccttaaaaggggaaaggaacattcctcattttcttttaaaccattcttttgtaccctggttg

SEQ ID NO: 366831 - DNA, 798 bp, Homo Sapiens
gggtgcacacttttccagtcaatataattgcttgttctactgtaccatgtatgattcttgtcctttcctatatccttcatgacagattataatgtggcttatatgtgccttacttgtacatttaaaactaaacgtcttcattcccttccacttcctacatctttaactttgaccttatcggcaagagaatcagaactattacaaaagcatcactgaaggattccagatgggtatggtttcaaattccctctctttatagtcattttatatctgtatgaaagaccagttttggatggtctttgaatataggggggaaagattagcagctaattccactacatcccttttctctgactttcatgcatttctcatacatcttctttctgatgcttgacttcattcgcttcctagcaatagtctagcatttaaagaaaggtgtgtccaacttcatcagctctgcaaactccgacctaattcccactctctccccacgcactttcctcacgagaacgagatacccccactcccgtcctctactaaaaaccagcatgaccagctcctcctctctaacacacgcacaaccagaacgtaccagccaccctcttcgcaaactcaccaacacgcgtgccccagctctcgcgcacttccttcctcactactatcattatcattaataaatcccactcaacccaacgcatcctcaactcgtcacggcccctctcactcccacatcacaacgctgctacacccatacatccacccacacactgctccaacccaactccgcatcgctgccct

SEQ ID NO: 366832 - DNA, 1286 bp, Homo Sapiens
cggtccggaattcccgggattcatcttccctgtcttgttcctgggcgcagagggctcctccggcgccgccgagctgcgcccgctgccttcacaccccggacatccgcgccacacgtgacacctgcggagacagcccccgtaaggctcctgttcccgccccctcccgccccagggacccagaccccaggaggcctcaccccacagcaagagaaagaccacgagcatggacatgatggtcgcgctcactccggtgcagtgagtgtctgggtgatggatcctggaacctgttctagaaggagacgctgagttctccccactctacctggagctgctgaggtcaagtggagagtgccggggctgaagcccagcgagcccctccctgtcacaccacactgcacatgtgacaccaaaggtggggttcacctcttttcagactttctgcggttgccctcacatgggctgtctggaggtgcaccctcactcttcctgaggactgtggttccttctccatcactggttcattctgcatggtgtgacccaccacggctctggagtcggatttccacccaggtcattcagctgagacctgcgcttcccaggcctacccgtgacatgtgctcagttacctgagctgctggtggtcactcatgtggctatagcctgctgcctggaggccaggcctcccgcttcccctgcctccccctctcctcaccacagcctgttgggatggaacaggacaggggtgagaccgtggtgctttcacactcagcctccatggacatcctgtcattcccacccggggaggtctggtcccccaccctgggtgtcccagcctagctccgctacgagtgtgagggcccagggcaaaccgcctagccctcatctgccccctgcactgcatcctccccactcattcattccacaggcatttattgagcatctactgtgtgccagatgcaaagaagacagtgggataactgggcaaagagcattccaggcagaggggacagccagtgcaaacatgggagatgccggtgcagtgagaagcagcagagggagaccaggaagtgaggcgactgcaaagcgattgcaaagctcatagacgtgatgaaaaccacttgggcactgccgcgggctctggcttctgctggtgaggaaaccgggaactgtggaaaactccctctggtttggtcccattttcaatattgctgacaacccggtggaatggtctcctggccctgctcagaaccccgtacctggaaatggaaggttgtgttgttccgggg

SEQ ID NO: 366833 - DNA, 927 bp, Homo Sapiens
ggtagaatatataaattggctcctgggaattagaactagagaacaggggcccacaaatatgttcacctaaaatgaaatcacccaactcagcacccaacagaaacccacagaccccagacatgcacgtgtacaccacaagtcggtagatggagatagcactgtgcactagtctttatgttctcatacagcagctataagcccctgtccctccctgggctccaggctgccagacaagagggccacagtaacgtagaagaagaagagcagctctgtcctcagtcctggagagtctgtgtataagaggagcacgtgaaggtagttacagccgctcaattataatacaggcttaggtaggccacacggttccgatgctttctaaagtctttgtctgtggacagctcagcttttagggttcttttctgtagacatggaacctgagcccagtctggagatccaaatttcattggccaggcaatttttggcggtggcttcttctctgggttgtatgcaccagggctgggatagtaagtgtcctttgggtagttcttaaatcgaggcaccaagacattaaatggagcaaaattttgtttgtgtttttcctgctgaggacttactttctggtacctgcctgcatgaggtgtcatttccttctgtattggcttaaacctcacagctgttctggctcccaaagtatatccttttatactggttgggatcttagataagtcgtatgccaagccatatccatctgaaaaataacacccaggccctctgtggggtgatcccctaagagggacaaacttgttcccaatcaaattcgggggatggaagtgaggaaaaagtttcctctgttgacatgttccaaaagggtagttatccgcagcgtctgctctgctgaagcacatcgcgagctgctagggctccgct

SEQ ID NO: 366834 - DNA, 479 bp, Homo Sapiens
  misc_feature (469)..(469): n is a, c, g, or t
ggagatagcactgtgcactagtctttatgttctcatacagcagctataagcccctgtccctccctgggctccaggctgccagacaagagggccacagtaacgtagaagaagaagagcagctctgtcctcagtcctggagagtctgtgtataagaggagcacgtgaaggtagttacagccgctcaattataatacaggcttaggtaggccacacggttccgatgctttctaaagtctttgtctgtggacagctcagcttttagggttcttttctgtagacatggaacctgagcccagtctggagatccaaatttcattggccagatgcaccaaggctgggatagtaagtgtcctttgggtagttcttaaatcgaggcaccaagacattaaatggagcaaaattttgtttgtgtttttcctgccgaggacttactttctggtacctgcctgcatgaggtgtcatttccttntgtattggct

SEQ ID NO: 366835 - DNA, 826 bp, Homo Sapiens
  misc_feature (515)..(515): n is a, c, g, or t
ctgctactgcgccaaaggccagaatcagaacaggacagtggacaccgcccacacaaaggcattgatgtccgtgctttggccataattgaccctcataacaggagcaatcatgttcattgaggaacttctcagaaaagccggccttttgcaaggtttcaagaagtgttcgattaagcattccaaggaagtcatctcctcctagagcatgaagtaatttttcgacactactgaaggcatagtcatgagactggtagcggtagatcctcatgaacttgtctaacacgtcctctacccacatgtgcatacggaggaattgaaatccatagcgccaaactaatttaatcacgttaattatgaaccagttgctctcctcaaataccagagtctctccattatatatccccagtaggccaccagaggcctgaacagcagagagacccaggtctttgacaaaacgtttcatgtgcagatttaaaggatggatgacagaacctcctgcctcgtattcttgcccntgcaccatcatggtagccaggcggcccccgacctcttctctttcaaacaggtctatcttcacatctttcccaaatttctgccgcaggtaataggctgctgaagtgccaccaattccggctccaataatcgcgattttatctggcggagcacgcagctcggcgccctcggggcatccgcagcctgcacagcaacagccacaaccccagcagcgaggagacgagctccgcgacgacgcgccccatggcctccacaagctctgcagctggcctcaagagccccgcagtcctcccaccgctgcgcggctgcgcgc

SEQ ID NO: 366836 - DNA, 1189 bp, Homo Sapiens
  misc_feature (46)..(46): n is a, c, g, or t
  misc_feature (64)..(64): n is a, c, g, or t
  misc_feature (81)..(81): n is a, c, g, or t
  misc_feature (162)..(162): n is a, c, g, or t
  misc_feature (222)..(222): n is a, c, g, or t
ccaaaaaccaaacccaatcaggaagcctaaggcaacttctaagggnaaaggaacggggtaaggnaaattgctttgcctaanagaatgcctgcaaaacatctaatctaatctgaatttttggctgtgtagaccaggccaatgggggacgggccaagaccagantttccaaatgtacttgcatgaccaagttctgcgtggtagatggaccttggataggcagcnctcgttccactcccttcttgcaaagcttctggcttgatctactggggaacatgagtgccttagctgtggggtggtgtgagagtattattgctctgggtttgagtccatctgaagtctccctagctccgttgtgcttactgaccctcccctctggatgtccccagaggtgcttgtaagcctgcagccagctccatctcagggccacagtccacctggctctggtcagatcctctggggatctccagggtgagagccagtcagaaggagaagggggcacagagggaatgggccaagaagccaaccctgccctgtgtgcagcctggcttagaaagcccctgcatcatggggaggagcaggggcagccaggccccttgccctggataactgagggcactgaggtgcctgctgcttgggaacagcccgtttgccctatgcctaggggtcagcacagcccggggatccttgggcaaggctgggggcaaatgaacttagactgtaattttgttctgaaacatgaggtttatacaaagagaaagaggatgaaaggggcctgtcaaaagaccccataacttggaatggggctttatgccattgatttactcatcaagtggttagtgcctccgaagtaccagcctctgtgctgagcatgtgcaggtgtccagcaagaattgctgcctctgagacactgaggactcaacatctgtcatctctctggtttccactgtacctccaagagaggaaccattgccagtgggggaaacttgggcatggtagtcaagaactcacaaggatacaacataacgaagactcctaatgcccgcgatggcactgctgtgagggacagaaggctggtgccctggggacagggctgtgtggaagcagacatagacaggacttggaggtggtggggtggaaagatgggtcactggggagcacccaggaggccgggtctgcaaataagcaagca

SEQ ID NO: 366837 - DNA, 857 bp, Homo Sapiens
ttgtatgtacagcaattttgaacaaatgttttaaatgtatataagagaattagtttaaggaagtaaagagaatcatttgcttgtgttacattttcagtgaggattcagtttaagagtcattcttaggacttccatttcctaatatttattcatgggtaatgcagaaatggttgcatttgtggccagtcctaatttattttccagctgagccctaacttccggctcccacctacctccacggacttcctaacagagacttatgaataccaggatgtgttttgttaagtcaggttcaattcgttgcccctgtcagttttatagagtgtgagggtcactccattaaagatctctcctgggtggatcctacttggatgttcaggtgattttgaaaactgctaacatttttaaaaggctagaacatcctttgacttcttgaaaatctgcatgtctggcttgggttttattaccacatgcctgagttcttcaagaatggaaggctcaagtattctcatcttccatttgccaaacttccttcctgatttgagtcacgtgttccacttggaaagaaagggaacagagagcctcctccatggacagtgtatgaatttcattgggaatcttgctctctcccgcctctatgcctttctctctttttaaccttactttacataatattatagatgggccaagaaaagaaaagatgacataacatttgatgaatttcacctattccattcttcacgtttcagaattggtcgacttgttagaagataattgaagtagccttgggtcaaaagccaactttttcaattgtgattcatacctaaaaacatataaaaaccctgtcgtagattaaa

SEQ ID NO: 366838 - DNA, 957 bp, Homo Sapiens
  misc_feature (932)..(932): n is a, c, g, or t
ctcatgagccaggatccctggggaatttgaagtcagtgtgaccagggttctgtggctctggggtcagagctgggacacaggacccagcaggagggccaccaccccttccttttggaaacagctctggttccaagcagcaatcaggtaggaggatcggggctttggctgatgatgcacacacaagatgctgatggtgtacggtgagatattgtgaacgcaacaactggagctgtagttggcgtgtgtgagtgtgtacctgcggttctgtttagtggcgagacaaggtatgtttcagtactgctttcacggcaactgtgtaatgcatatgctctttctacactagcggtttgctcagttttgtctgtccggttaagttggagaaagaaccaagttgtgttgttctctggagggggtgctgctgcctctccttgagtagttctgtgacccccaatccagctgttttgtagagaatccttctagcttctggtatgcctgctctccagcagctggaaacagatcttcctgcctgaccaaagctccttgtttcttgcgtggcatgtttgttcttcccgatccggtggctgtcgtagccgagggcctgcctgccaccttcctttatcatttgccctgttggggttcagggtgcatccttagcccaggacctgctcttccagcatcatgggttttttcctaaagatctcaacggctcccttgggctccataaaatatttcttttttaaaaaagcagactcctttcatgcattgggatgaacggccctcttgtctgggtgctgggctacagcaaacaaatgtgtttgaatcccagtattccagagattcctgggcggtgggctgtctagaagaggcgaggctgggatcttcacggtttttaaactgtatttttacccctttgggaacccatacctgtgccnggggagtcttttcatgagggcacgt

SEQ ID NO: 366839 - DNA, 968 bp, Homo Sapiens
  misc_feature (780)..(780): n is a, c, g, or t
gtagggaaggcgccccacagcgaggcttgacttggccctgggcccctttcagttcctggaccaccttctgacaggcatcgaagacatctgtggccactacggtcaccaccactggaaggacaagctcaaccggtttaataagaaatatgtgaagaagtgtctgatagctggcgagcgctccaaggagccccagctcattgccttctaccacaagatggagatgaagcaggccatcgagctggtggagagcgggggcatgggcaagatcccctctgccgtctccaccgtctccatgcagaacatccaccccaagtccctgccttccgagcgcatcctgccagcactgtccaaggacaaggaggaggagatccgcaaaatcctgaggaacaacttgcagaagaccaggcagcggctgcggtcctacaacagacacacgctggtggcagacccctacgaggaagcctggaaccagatgctgctccggaggcagaaggcccggcagctggagcagaagatcaacaactacctgacggtgccagcccacaagctggactcacccaccatgtctcgggcccgcatcggctcagacccactggcctatgagccgaaggaggacctgcctgtcatcaccatcgacccggcttccccgcagtcacccgagtctgtggacctggtgaatgaggagctgaagggcaaagtcttagggttgagccgggatcctgcaaaggtggctgaggaggacgaggacgacgatgggggcatcatgatgcggagcaaggnagactccgtccccaggaaccgacgatgtcttcacccccgcgcccagtgacagccccagctcccagaggatacagcgctgcctcatcctcctcctcattcagaccaatcttagtttctaaccaaagagtctctggctcagctgtggtcccacccaggaagggagggagctgaggcctcccttgagtagg

SEQ ID NO: 366840 - DNA, 1146 bp, Homo Sapiens
taggacgcgaggcctgggtggcgaattcggcacgagggacttcgtccccaggaaccgacgatgtcttcacccccgcgcccagtgacagccccagctcccagaggatacagcgctgcctcagtgacccaggcccacaccctgagcctggggagggagaaccgttcttccccaaggggcagtaacgccagggccagcaggcagcgcctgtcccctcacagactcttccaccagagcaggggctgctgggggctccccttgcccttcctgacccggattggccctgcccctccccctaccgcatggcagctgggcccacagcccccaccccagcacagctcctcccctgccgcctcccgggaagcatcctccccaccagagctgcctccccaatccatttggcagaactgctggggctggtgaggccggccctgcccctccctagatccaggcttctcccggacctggactagggcctcggaggctcctccctctgcctcatcctcctcctcattcagaccaatcttagtttctaaccaaagagtctctggctcagctgtggtcccacccaggaagggagggagctgaggcctcccttgagtaggccctgctttatcaggggacaaaccaaggggtaccaggcacatggctgggggagggactgctgacccaccaaggtctcacactcctcctgccagctctgtcaccctggccaccacccaacctgtccttactcagagctgcgggctgagggcatctctgagtgtctctgcctggagcaggggtggtttctacggtgacagtgacgtgactcagagcttttcgaactgtgctcccacggggaccactgggcccctcaggggaagctgctaggggaaggactggccgtggctccagaatgttgctgccctttttaagttttggttggtccccactcctatataaggatgggttgcaccagagggcgcctcctggtttttaaaaaatttttggaaaaccccttggggtgaacgagggctctgccttctaaatcccctccttaaaattcccaaattaacccctccctcaattgggggcctggctggtccaaccccttccccacgggtttctctggccggggtggggctccttaactggttggttcccaaa

SEQ ID NO: 366841 - DNA, 1085 bp, Homo Sapiens
  misc_feature (260)..(352): n is a, c, g, or t
  misc_feature (989)..(989): n is a, c, g, or t
ggggcgagccgtgaagatggcggcagtggtggaggtggaggttggaggtggtgctgctggggaacgggagctggatgaggttgatatgtcagatctctctccagaagagcaatggagggtcgagcacgcacgcatgcatgccaagcaccgtggccatgaagctatgcatgctgaaatggtcctcatcctcatcgcaaccttggtggtggcccagctgctcctggtgcagtggaagcagaggcacccacgctcctacaatnnnnnnnnnnnnnnnnnnnnnnnnnnnnnnnnnnnnnnnnnnnnnnnnnnnnnnnnnnnnnnnnnnnnnnnnnnnnnnnnnnnnnnnnnnnnntgagccaccgtgcccggcagatttttacaacctattctgaagaaaatggtgaccctctttcagatgtgggttgttcccctctatttcacagtgaagctgcactggtggaggttcctagtgatctggatcttgttctctgctgtcacagcctttgttaccttccgagccacccgaaaacctctagtacagacaaccccaaggttggtttataagtggttcctgctaatctataaaatcagctatgccactggcattgttggctacatggctgtcatgtttaccctctttggtcttaacttattattcaagatcaaaccagaagatgccatggactttggcatctcccttctcttctatggcctctactatggagttctggaacgggactttgcagaaatgtgtgcagacttacattggcatctaccataggattctacagcgagtcgggcatgcctaccaaaacatctttcagacagtgtgtgtgctgtgtgtgggcagcagatctttgtggacgtcagtgaagaggggatcattgagaacacgtataggctgtcctgcaatcatgtcttccacgagttctgcatccgtggctggtgcatcgtgggaaaagagcaaacgtgtccctactgcaaagagnaaggtagacctcaagaggatgttcaagcaatccctggggagaggccctcacgtcatgtaatgggcaaactgctgggactgggccttccatacttgg

SEQ ID NO: 366842 - DNA, 1508 bp, Homo Sapiens
  misc_feature (1118)..(1118): n is a, c, g, or t
  misc_feature (1207)..(1207): n is a, c, g, or t
gaagatggcggcagtggtggaggtggaggttggaggtggtgctgctggggaacgggagctggatgaggttgatatgtcagatctctctccagaagagcaatggagggtcgagcacgcacgcatgcatgccaagcaccgtggccatgaagctatgcatgctgaaatggtcctcatcctcatcgcaaccttggtggtggcccagctgctcctggtgcagtggaagcagaggcacccacgctcctacaatgatcaaaccagaagatgccatggactttggcatctcccttctcttctatggcctctactatggagttctggaacgggactttgcagaaatgtgtgcagactacatggcatctaccatagggttctacagcgagtcgggcatgcctaccaaacatctttcagacagtgtgtgtgctgtgtgtgggcagcagatctttgtggacgtcagtgaagaggggatcattgagaacacgtataggctgtcctgcaatcatgtcttccacgagttctgcatccgtggctggtgcatcgtgggaaagaagcaaacgtgtccctactgcaaagagaaggtagacctcaagaggatgttcagcaatccctgggagaggcctcacgtcatgtatgggcaactgctggactggcttcgatacttggtagcctggcagcctgtcatcattggtgtagtccaaggcatcaactacatcctgggcctggaatagtgatgaagagcatcagtggaaaaaccaccccacacgccatggacctcagggcactctcctccctgcccacaaagacctcctgggtgggaaagactcaaaggggcgcttgggccactcaggacccctccggctgtgtcggactggggagggatatgatggagagccagccagtggggctgtcagcagtggggggctttttaaaagaaaactattttgatgaatatatttaaaaaacctttttttattgtggagcataggaattgcccccctccaggcttcaccctccctgcctaagcagggtgggggcagagccatgacatttttggtttaaaggagccttctcatctctggccgagaacactgctgggctcccaggtagctgaaggcctcagnccacccactcccttcttcccctgtgtgggggctcaagcctggtgcacttagtatagaagagctaacgtactcaggcctgtgccacgggntgagcactgagggccccaggtgtccctcccttcccccactgtctggggacacagggacaggtggttggcgtctgaactctggcctccccctgtcccagaagctatagggttggttggaggccaatgggaacccttaatccagtggactgggcccaacaaggggaagccttggggggcctcccaatttcctttgaaaattttggttttggggacaactggaaaaaattccggcaccatgggataactcccccccgtggggccagggcttggtggctcaccccaagaaataaaaagggcccat

SEQ ID NO: 366843 - DNA, 1058 bp, Homo Sapiens
aggaggagcctggagggaagtggcagaagatgccttccaggtagtccaggtaccccccatcactgtggcagtcagggttggtccggatgaagtcacagcggtcagagacattcaggccacacaccttgcggcagtctaccacgggggtctggttcacacctgaagctggaaactgggggctaatgtgagcctcctgtagacgagcccctagtcccaggacactgtctccgccaattagcagcacacaaagcacactcagttgcccagcgcagattcagcccttctgccggccatctgcccccacggggcctggcccttactctccacttccctttctgcagtagctcagttccaaacagctggcggctccggtggcctgtccacggaagacacggcccttcctcttctatggttctcccgaacccctccaactggagtccgagttactctatttggcaccaagttcaaacaggacacccctggtttcaaattcgtctcggccacttactatctgtgtggccttaaggaagtcacttcacctctctgggcctcttattcctcatgtgtgaaatggacacaaatgctggccgacgcggtatacaataagagctcaataaatgttcgcgtccctgatgtccccaacacctgaagatcagcatgcgtctcgtctctctttgctgccgatttattttactgattcactagtgagcatttattgagcgccttctgtacgcgtgggccgatgcccagcgctcggatggtcgccgacctgctaagggacaggggcgggaaatcggggctgcgcttcccaggaaagagacctcaggaacatctccgtgctccgtttcccgtccggacggaggctgagaagtcgaactcggggcgcccgggtcctccggccgtgcggggaggcggctctttcttacctcgggccgggcctgggaccagcaaactccgaacctcgacctcgcagggcctcgcagccttccaggtcctggccgccggaccgaccttgcgccagcgaagccgccagtccgggtgccccgcctgctgcagcg

SEQ ID NO: 366844 - DNA, 969 bp, Homo Sapiens
ctgggtttgtgtgcaaacttgatagctgggtaatctggggtctaatgtgagtcttcctgtagacgagccccttagtgccccagaccctgtgtgctccgccatgtagccagcagatcgatagcacactccaatgtcccagcgccagatttcagcccttgctgcgcggctcaatctgcaccccaccgggacctggccccttactcgtgcacggccagtttctgcagtagctcagttccaaacagctggcggctcccggtggcctgtcccacggaagacacggcccttcctgcttctatggttcctcccgaaccccgtccaactggagtccgagttactctatttggcaccaagttcaaagcaggacaccccgtggtttcaaattcgtctcggccacttactatctgtgtggccttaaggaagtcacgttcacctctctgggcctcttattcctcatgtgtgaaatggacacaaatgctggccgacgcggtatacaataagagctcaataaatgttcgcgtccctgatgtccccaacacctgaagatcagcatgcgtctcgtctctctttgctgccgatttattttactgattcactagtgagcatttattgagcgccttctgtacgcgtgggccgatgcccagcgctcggatggtcgccagacctgctaagggacaggggcgggaaatcggggctgcgcttcccaggaaagagacctcaggaacatctccgtgctccgtttcccgtccggacggaggctgagaagtcgaactcggggcgcccgggtcctccggccgtgcggggaggcggctctttcttacctcgggccgggcctgggaccagcaaactccgaacctcgacctcgcagggcctcgcagccttccaggtcctggccgccggaccgaccttgcgccagcgaagccgccagtccgggtgccccgcctgctgcagcgtccgggcccctactcttcc

SEQ ID NO: 366845 - DNA, 1043 bp, Homo Sapiens
ggtccggaattcccgggatcagcaggcggggcacccggactggcggcttcgctggcgcaaggtcggtccggcggccagggacctggaaggctgcgaggccctgcgaggtcgaggttcggagtttgctggtcccaggcccggcccgaggccaccggagccgccagctgtttggaactgagctactgcagaaagggaagtggagagtaagggccaggccccgtgggggcagatggccggcagaaggctgaatctgcgctgggcactgagtgtgctttgtgtgctgctaatggcggagacagtgtctgggactaggggctcgtctacaggagctcacattagcccccagtttccagcttcaggtgtgaaccagacccccgtggtagactgccgcaagtgtgtggcctgaatgtctctgaccgctgtgacttcatccggaccaaccctgactgccacagtgatggggggtacctggactacctggaaggcatcttctgccacttccctcccagcctcctccctctggctgtcactctctacgtttcctgggctgctctacctgtttctgattctgggagtcaccgcagccaagtttttctgccccaacttgtcggccatttctaccacactgaagctctcccacaacgtggcaggcgtcaccttcctgggcatttgggaatggtgcacctgacatcttcagtgccctggtggccttctctgacccgcacacagccggcctggcccttggggcactgtttggcgctggcgtgctggttaccacagtggtggccggaggcattaccatcctacaccccttcatggctgcctccaggcccttcttcagggacatcgttttctacatggggggctgtggttcctgaccttcctcatgctctttccgtggcagggtcaccctggcatggggctctgggtttacctgggccttggatggggttcatgggggcccccggggattcttctggccccgtggatttacccacggggaacggggagagggatctccttttcctgcccccactgccaag

SEQ ID NO: 366846 - DNA, 793 bp, Homo Sapiens
gggatttggacaatatttaagaacttcttgtcctagatcagccccaatctgtttaatcaaaatggaaggttcagtaatttcatgggaaaccttggtttttcattaagtgctaccaactttcaagtgaatcttgtatttgatttcctaaaatcatgtcttgaaaacatgttttctcatgaaacttgaatactatctcaaataggaatataaacctggagtcaacaagcttaggcagcattgatttaggtcactttcccagtgaggaaaatttctgtgttttcagaatttccatttctactaacctcttggagaaaaagaaattgaattagaggtaaatagaagacgtcactgtggctgcttctggaagtgctggaagatcaccccaattggctccaaatactgtcatgttttcttgcacactgacttctggtttccactgtatcagtatgtacctttgtaattgttatttttatgtcttttatgcccttgattattagttgggctcttcataaacagaggccatctctactactgtttatttttccctgctgtgcccagaacattggcgtagacacagtaaggaacctagtaaatattactgtttctagccatcaggggagattgtgggaactcctcccagtataaatttttacaaactccaagcaaatctgacccaaactcccaaattgtcaagtcctgcttaactttctctggaaaatagaccccttctcaacatcagaataggaagagaggaagaacttacaaagacacttaaaagttattcttacatggt

SEQ ID NO: 366847 - DNA, 767 bp, Homo Sapiens
aaacaaaacagcggctggtctggaaggaacctgagctacgagccgcggcggcagcggggcggcggggaagcgtatacctaatctgggagcctgcaagtgacaacagcctttgcggtccttagacagcttggcctggaggagaacacatgaaagaaagaacctcaagaggctttgttttctgtgaaacagtatttctatacagttgctccaatgacagagttacctgcaccgttgtcctacttccagaatgcacagatgtctgaggacaaccacctgagcaatactaatgacaatagagaacggcaggagcacaacgacagacggagccttggccaccctgagccattatctaatggacgaccccagggtaactcccggcaggtggtggagcaagatgaggaagaagatgaggagctgacattgaaatatggcgccaagcatgtgatcatgctctttgtccctgtgactctctgcatggtggtggtcgtggctaccattaagtcagtcagcttttatacccggaaggatgggcagctaatctataccccattcacagaagataccgagactgtgggccagagagccctgcactcaattctgaatgctgccatcatgatcagtgtcattgttgtcatgactatcctcctggtggttctgtataaatacaggtgctataaggtcatccatgcctggcttattatatcatctctattgttgctgtctttttttcattcatttacttggggggaagtgtttaaaaacctata

SEQ ID NO: 366848 - DNA, 1043 bp, Homo Sapiens
  misc_feature (432)..(463): n is a, c, g, or t
  misc_feature (1010)..(1010): n is a, c, g, or t
gtgagtaaattgaaaccaagaaaacttgtttttagaatatttcgtctgaataagtacagtagccaaggaatacaaacataattgcatgtttttaaaaattccttggaggctggaaggggttaagccagaagtgcaatcaataggaattagggaatgttgtatatttatatatgtaaactttttttgtaagaaaagttggtgacaactaaaccaactttttccaaagtgcgctatgcatatttttaatgaaagatgacatgtatttgcacaaaaattctcaggcacattaaattattgtaaactgaagtaaaacccgggtgcttgctttgagattgtggttttttcttcctaatgtaaaataaaataaaacacatctgccttcttgatatttatagaattagagaataaactttttaatgggggagtcaaagnnnnnnnnnnnnnnnnnnnnnnnnnnnnnnnnattcaaactgtatgaaatggcaaagtgaggctctggggttagatttcagcattcagcagttgacacaggctaagaaatggaaaagaagtagatctgttttttctcaatgttgctgagcaaagtctgcttctcatcagatgacgtggctttgtctagacagcacgcagttccagaaagaaatgtctttatacaaaagacatgatagagaaaagatgagagaggggactaattattttgtttatgaaaatggcaagtaaattacttgatctttttggtgcttaatttgcaaatgttttgttcctttgtcctgacttaaaggcagttttctgaagaactcttgactcttgctcctatggttcccataggcacacctattcccaggccaaggagagtccttcctctccccttttgaggcatccccgccatccccccacttagagctatgtgctcaaaaagccaacatgaatgcagtggtaaaaatttgttagtttcttatactttttagaatctctcaataaaatttttctaaataaattccaaaaaatanagggtgaagatgggtctctcccctttcgttccc

SEQ ID NO: 366849 - DNA, 1519 bp, Homo Sapiens
aatgcaaaaatgtaaaacagacacaacatagtatttcaatgctgtacctttatgcaaatgacttcatctatctttcttaaacatgttgatatagctaatgttaaaactgacacagcttcactttcctctttttctctgtaccgaaagctgcagaaatacagctttaattccaagacaatttggtttaagccttcaaaataaaaagagtgcatccacttccactgccctgactttccccacactgttgattgtgattctctgtggcatgttggtagatcaggctggcttatatataatttgtacaaaacacctctagccagggtaaggctttaggaactatcttaaaaagaaacttgtcaaaatactttttgatattttgtacaaatactaaatattataattttctcccagaacatccgtttaagcagcccaattaagtgactctgttaaaggtcggcttatggaaaaaataggtgaagtcatttcctgagccaaaagatacagataataaatgttaataatagcagcagactaaaaaattcctttttgttgttttccatagtcaacagttttagcaaaaggactttagaaaatgacatttttgtgttaaatttactgcctgaaaagagtttaataaagaacatccaggcctgattgctattattctgaatataattttcaataattttctgcaagttacatttggctactgtcagacaacttactgatgcatggaaaaacgtccaaaaaaaactgcaatcgtttacatatattttatgttacatatattacttcttaaaacccccaacagaatgaagtcttagcaaacacagattttaatttctgaacacccttccagtaagatttgtaaaggtggggggaagggaaggaaggacttgtcttttgtattcccggtctacttgattaaaatttaatctttgaagggtttgtttagctcactatccaggctgctagggttatgatgaacattatgacttctttccagggtaaaaaatggcatctgaaaataacataaatgctatgacatgattttcccaagcatgatctcaacttgaaacattagaatacttaagaattctaaagattggtataccaccactgcaccagaatttttaattattccaacaactacaggaatttttaaaatagttttttaattttatgaaattaaagctgaagaaaataactgatttagaaaccataataaaaggacaaatatttagccagagatatcagttcctcctgaaaaaggatatttatctcctctcactgcagtttttctcaaggtatcttaactgatttcagatagaaattaaaattcaccttaaaaatagaaacaaacaaaaggacaacttaaactgacattaactaataaaaatatgttcaaatttactgacagaatcatgggcacttcatataatacttagactctaccagttttaagtaaaataaataaggaaaaaattataattacaaagccagtctttcccctgtgaaa

SEQ ID NO: 366850 - DNA, 857 bp, Homo Sapiens
ccggtcggagggctcctagtgcgccaggttgtgggaagtgaggctggcggtggcgacaaccgaggaggaggggcgggacgccgtggagcacggcgaccggctgagcgtcatggagggctcaggtgagcagccgggcccacagccacagcatcccggagaccaccgcatccgcgacggcgacttcgtggtgctgaaacgtgaagatgtgtttaaagcatgtacaagtccagcggagaaaaaaagtaactttcgaaaaacagtggttctacctggataacgtcattggccatagttatggaactgcatttgaagtgaccagtggaggaagtctacagcccaagaagaagagggaagagcctactgcaggaaatagttcagcagttaattgaaaatagtacaacattccgagacaagacagaatttgcccaagataaatatattaaaaagaagaaaaacaaatatgaagccatcattactgttgtgaagccatccacccgtattctttcaattatgtattatgcaagagaacctggaaaaattaaccacatgagatacgatacactagcccagatgttgacgttgggaaatatccgtgctggcaacaaaatgattgtgatggaaacgtgtgcaggcttggtgctgggtgcaatgatggaacgaatgggaggttttggctccattattcagctataccctggaggaggacctgttcgggcagcaacagcatgtttggaatttcccaaatcttttctcagtggtctctatgaattccctctcaacaaagtgggacagtcttctacatggaacattttctgccaagatgttatcttcagagccaaaagacagtgctttggttg

SEQ ID NO: 366851 - DNA, 493 bp, Homo Sapiens; identical to SEQ ID NO: 89599

SEQ ID NO: 366852 - DNA, 992 bp, Homo Sapiens
  misc_feature (875)..(875): n is a, c, g, or t
atgtcacggaaatcagagcaaagagatataaaatcagtggaatatctgcagcattgtccttcctctgaagacatcatcatatgctttccactgtggcttcacctggtaggcatggatgaacacccacgaacaccaccacgaggcacgtcaaaggaacaagagctgcagtgaacaaagcagcatagacgtttggaataaaacacaggtcaccatgaatgagtccatagatctgtgacatgctctgatgatagattcctttcgaaaataactatgaggagaatcaccacaaaagctggtagtccccaactcagaaggaaaaacagcagatatcgcctctctgtgtgctcatcattcatcaccagcacgtaccagaaattcacagactgaatgagcatccagctaaactggcaaagatacaggtaatgtgtgacagcagccatagctgaacagctctcctcagcgagttggggacttgcgtatgcagacgccagaaacagaatctgtgtacctaagctggctgccatcatgtgagtcagaagtttagctgcaaacatggagtacctggcacagaagatatgggaaagaacagccaagcaaagacctgagatacatataaatccagaagtgaagaaggcttcattgtatgaagacaagttgtcagtccgagcatagacagcatacacagacatgtgtgaacaggcacattccacatagtctgcagtttcctcaaccactttgcaaaactgactgtcagacaaccagcttgcagcagcctgattccaaaggagacacagagatgtctgaggaataattctaggctcagcagcataaatcctgtagagaacctcattgtcattactcaggagttggtgacntctacctttcacactcaaagataataccttattttttagggtaggaagattgtttccacttataaaccactgttggctgctatactctgtaaactggactaatttacatgtactttt

SEQ ID NO: 366853 - DNA, 1061 bp, Homo Sapiens
gggacccatctttccaggcaggcttctggctggaagcttgtttaaggaactcttcatcagtatgcttgaaagtgtccaaaaggcatctcttcacggttttctctacactgattacatctcctttaggaaattttctgattaagttttgatgcaaattctgtgcagcaaattttgaggctcgaattcctccatgtccatcaaaaacagcaaaatatgaaacccgagtaatgagggacgatgggggcctacactcctcggtgatgtcgttcaggatgacgtgggcatcctgcatctcctccctctcacccttccgctcagccacatagccctatcagaccaaagatcaccgaagaggctaaggaaaagagaacaaaagagccaatacaaaactgtgcccaaccctctggaaaccctagtcccagagcaaatgagagggaactatgactgtctgactcagcaatatcctaatggcgcaaacaaataagcaataccccttaaggcatctcccccagctgcaagtctataactcaaatcggagcactgttggacagggtgagctctaagaggttgcacagggacacaaaagaggagtcagtaagcacaaaacaactctgtctagggtgtaagtcaaagcatcagggcaagggatgtgctgccatcccagagaagtgagattcaaatcaggcaaaaggatcatgtgcaaattagtcttgtgataattgaataaggacaaatgccaagtcaggagagtttatctcaaaagcccttaagatgccctgaaaatatgtatttccatgctcaaggctggtgaagaatttgaacaaacagtaagatcagctgcttttacttcaactgaggaagaaaaggataaaagattccagtgcaggcagagatctatttacatttaatggttagactcatttaagcttattttctgatacctaatgccagacaaataataaaatgaacactgtgaagagctgtcttctgggaagtgacaagctaagttgaagatgacatcttcccagcaagctacaagtgggttttttcacatacctctg

SEQ ID NO: 366854 - DNA, 1108 bp, Homo Sapiens
  misc_feature (895)..(895): n is a, c, g, or t
cggctctgcgccacccccgggccccggtgcccccccttcaggtggatcctcttcgggagaacccatttgccccccatacccacccagggccccttccggggtggcaaaaaaaagtgttcaccaccagcaccaagggcagggaccatcttccggcaggtttctgccggaagctgtttaagaactcttcatcagtagcttgaaagtgccaaaggcatctcttcacggtttctctacactgattacatctcctttaggaaattttctgattaaagttttgatgcaattctggcagcaattttgaggctcgaattcctccatgtccatcaaaaacagcaaaatatgaaacccgagtaatgagggacgatgggggcctacactcctcggtgatgtcgttcaggatgacgtgggcatcctgcatctcctccctctcacccttccgctcagccacatagcccttcagaccaaagatcaccgaagaggctttacaaactttcttttccacaagctcttcactgccattcttctcttcctcggaggtttttctctttgctcctttcccttcagtctttaccatcttggatattgatgtggcaagagaacctgaatcgccactgctagcgggtgggagatcatcaaaaagcaaaggtccccctgatcctgaaacacagcagaacacttggtgagcccacaaaaaatatgtaagacttaagtttcagaatccatcccaccaggacacctatgtaggttactgaaataaactcaaaactttgcgtcaatccagtggcaactcatactgcaatgaataatatcttgaacctattttaaagtcctattatttcaaaggaaataaaaatctgccttaaaaagttagattgtacttcaggtagtaaaatanatactcaaatgaaccagagaaaactgctccacatttcctcgcagtacttctcagggctagcgactagcagatttttctgccttacctgatgccatggattcaaaacttaaagacagtccaacacctatacatctgtgttgaaatgggggaaagggaaaaagatgagacaactacaatcccaggatgcgctcgtaggaggggtcctctggtcag

SEQ ID NO: 366855 - DNA, 756 bp, Homo Sapiens
cccggggggtaatcggccgaggagaagcggaggaataagagaagcagcaggactttaacagagactagaatatttaaatttttgcaaaacatgctcttcgtaatttgatcaaaacattgaggattggtaatggcgtcttctatcagaaggggccgaggggcctggacacggctgctctcgcttctgctcctcgcagcctgggaggtggggagcggccagctccgctactccgtccccgaggaggccaaacacggcaccttcgtgggccgcatcgcgcaggacctggggctggagctggaggagctggtgccgcgcctgttccgggtggcgtccaaagacacggggaccttctggaggtaaatctgcagaatggcattttgtttgtgaattctcggatcgaccgggaggagctgtgcgggcggagcgcggaatgtagcatccacgtggaggtgatcgtggacaggccgctgcaggttttccatgtggaagtggaggtgaaggacattaacgacaacccgccaatatttccaatgacagtaaagactatccggtttcccgaatcaaggctgcttgattctcggtttcctctagagggagcatctgatgcagatataggagtcaaatgctcttctctcctacaagctcagctccagtgagtttttccttcctagatatccggccatgatgaactagcgaatcttggctctcggcgggaaacgtggccggaggactgcgggtcattgtccgggggcactg

SEQ ID NO: 366856 - DNA, 708 bp, Homo Sapiens
tgaaatatggaggatgcagctgcacttgactgaccgattaaaagatttcccttgactttgagaaacgatatttaatcagaacaaaatactgtgcactaaagatggagttttcctggggaagcggccaggaatcccggcgtctgctgctcttacttcttctcctcgcagcctgggaggcagggaacggtcagctccactactcggtctccgaggaggccaaacacggcaccttcgtgggccgcatcgcgcaggacctgggactggagctggcggagctggtgccgcgcctgttccgggtggcgtccaagggccgcggagaccttctggaggtaaatctgcagaatggcattttgtttgtgaattctcggatcgaccgggaggagctgtgccggcggagcgcggagtgcagcatccacctggaggtgatcgtagacaggccgctgcaggttttccatgtggacgtggaggggaaggacactaacgacaacccaccggtgttcccagcaacacaaaagaacctgtccatcgcggaatccaggccgcttgactctcggttaccactagaaggcgcctccgatgcaaatatcggggagaacgccctgctcacttacagacttgacccagatgaaatccgttgctctgaaaaaccacctgatgaccgagctggtagaaggtctttgggcttatttgacggaaatcgttagaccg

SEQ ID NO: 366857 - DNA, 191 bp, Homo Sapiens
attccatcccgctccaccagtccacaccgcagcagcacgagtgagctcgagaccgagaggggaagagaggaggaagcgatacagtactacaggcaaccatggaggtggtgaccggcagcaacggcgggaggctgaacccgtgggcggagcccttcgtgccggggagctggtgccgccccgcccccgtgcag

SEQ ID NO: 366858 - DNA, 787 bp, Homo Sapiens
cataaatcagcacgcggccggagaaccccgcaatctctgcgcccacaaaatacaccgacgatgcccgatctactttaagggctgaaacccacgggcctgagagactataagagcgttccctaccgccatggaacaacggggacagaacgccccggccgcttcgggggcccggaaaaggcacggcccaggacccagggaggcgcggggagccaggcctgggctccgggtccccaagacccttgtgctcgttgtcgccgcggtcctgctgttggtctcagctgagtctgctctgatcacccaacaagacctagctccccagcagagagcggccccacaacaaaagaggtccagcccctcagagggattgtgtccacctggacaccatatctcagaagacggtagagattgcatctcctgcaaatatggacaggactatagcactcactggaatgacctccttttctgcttgcgctgcaccaggtgtgattcaggtgaagtggagctaagtccctgcaccacgaccagaaacacagtgtgtcagtgcgaagaaggcaccttccgggaagaagattctcctgagatgtgccggaagtgccgcacagggtgtcccagagggatggtcaaggtcggtgattgtacaccctggtagtgacatcgaatgtgtccacaaagaatcaggtacaaaagcacagtggggaaaccccagcttgtggaggagacggtgacctccagcccagggactcctgcctctccctgttctctctcaggcatcatcataggagtcaca

SEQ ID NO: 366859 - DNA, 1056 bp, Homo Sapiens
gatatggcatcctttagcaacaaggtttgaggttactgacagatcttctggttctatttgccttgtaccagtactggttgttctataatatgctcggtgtcgttcatcttcagcaaccatcctctcaaaacgacagtaacaacttgtcgcactgtagcagcagctgtattatttgtaatattatcttttgtgaagtgtagtcgaaaacaaagaacgattgccttagaaagtgcctcatcatgaactactgtattggttgttaaaagaacaagaactgtttgaagtagcttaagttcttcaagactattctccattagctgccaaagcatgttaattatatttccagctgcagtctcagacacgacttcatgtgacatgagtctctgaatagcagccaaacatagctgagtgatcgttcgcttccttggttccacaacccattaaaaaaggctgtacaacctctgagctgttctctttcagtgctgccaaaatttcagtgtttcgtgcagcaattgttttaacttggtataattcctgattcagcagcctctttgacaggtgggaatttcttcttgcactccagtgacaaggcgcgcaagtcgctctgcatattctccagcagcttcttcaccgcctcggggctgctggtgccggacatgatcctccaaggtcccagccaatttccgagaggtacaaacaagctctggcacggtcagctccttagggccacaggcagctccctcccggtgtctctggtccttcagcagcccgctctcttgggccatgggcttgcgaacccggagcctgctcgagcgtcccccagcagcttccccgcaacacctctggcttttctcggaggcgccccccgcagtcgcaccgtcccgctaggctccgccgactctggccgagaaacccacaaggcgggcaggtccctccgctgccgcggggcccagccacaccgggtgtcaccagccaacctggcaagaagcttcagcgccagctccccaggcccctaagactcgccgacgccattagccgagtcgcccacaatccgct

SEQ ID NO: 366860 - DNA, 1128 bp, Homo Sapiens
  misc_feature (447)..(741): n is a, c, g, or t
  misc_feature (944)..(944): n is a, c, g, or t
  misc_feature (982)..(982): n is a, c, g, or t
  misc_feature (1000)..(1000): n is a, c, g, or t
  misc_feature (1009)..(1009): n is a, c, g, or t
  misc_feature (1023)..(1023): n is a, c, g, or t
  misc_feature (1045)..(1045): n is a, c, g, or t
  misc_feature (1063)..(1063): n is a, c, g, or t
caagaccccggtgccatttggaggaccccttgtggggggcaattttcccaggccaggcacccccttcatcccggagcccctcagtggcttggaactcctccgtctcagacccagcttcaacagagtggcccagggctgggtccgtaacctcccagagtccgaggagctgtagccctagcctgaatcttcagttccccagtctcgggggcctggtaacatccggagccaagacttgtggacagcacttcacagttgaagaagggccttcacacacaaaacctgattgcaaatggcttcagaggtcaccaagttcagtcgtcccaaaacatgggtgtgcttccaagttacctggggatgctgttccaaattcagacaactggactgtcccagacttgcagcatcagagtctcctgagtcgaggaatctgtattattaatagcaaccagnnnnnnnnnnnnnnnnnnnnnnnnnnnnnnnnnnnnnnnnnnnnnnnnnnnnnnnnnnnnnnnnnnnnnnnnnnnnnnnnnnnnnnnnnnnnnnnnnnnnnnnnnnnnnnnnnnnnnnnnnnnnnnnnnnnnnnnnnnnnnnnnnnnnnnnnnnnnnnnnnnnnnnnnnnnnnnnnnnnnnnnnnnnnnnnnnnnnnnnnnnnnnnnnnnnnnnnnnnnnnnnnnnnnnnnnnnnnnnnnnnnnnnnnnnnnnnnnnnnnnnnnnnnnnnnnnnnnnnnnnnnnnnnnnnnnnnnaaatagcaaccagtactccaggtgattccagcataacttatccatggtttgtgtcattagggagtccacaatccacaacctctgcatctttcctgttcctgtagtgtacactcccccggtgacagggtgctcactggcaccccatcttcctgtgaataactcaaataattagaaaatgttccttttactgagatgcagttggncttcatctattcatgctctaaacagttcctaagcgctnactgtgcgctagacactnccagggccnggcttcgaggaggnaaagacagtagggaagacattntagagcatgaagtcaccnttaatttttccctaaagcattgcttattgacaatttagggacaaagtgtttttggagcaggaagg

SEQ ID NO: 366861 - DNA, 1667 bp, Homo Sapiens
ggatatgaacaaaggacactggaaagaccccccttcctttcaggctgtcctgtcgatgtggccaatccaccactcctggtcctctttcccctgtgacgataatcacttctccctcgatgaatgtgagctcgtcatcggttgtctgcctggcagtcataaaatggtcttcactcgcctcactttatttgttccccgtattgatttttctgggcagtggtacgggcgtctctggcagagtaggcgtgaggtcgttggagtcttcagatgcttgcttttggatggcgtctctggactgcacatttggggatagatccaatgggtgtgacttcagtgtgacctcagagggttgctgagccttgggtgagacatctccagtctgggattttgctagcaggtctcccagctgtggtttggggggcaggtccttcatctgtggtttgggaggtaagtctgagagttggggtttgggtggcaggtcccccagctgtggtttggggggcagttctcctggcttaggcggcaaatctcccatttggggcttgggggccagttctgtgggctttgggggcaggtctccaggtggtggcttttgtggcaactctgccaactgtgatgatttctgaaagatttcgggcgggatggtggctttgtctagggagagatgatctgttttccttagtgccactttctgaggtagtataggaagaactcttgggccaagggcagtctttgcagaactggtgctcgactgcgtgggatagtccctcaaacttgttggtagtcttacttgaagaggatggacccccatcgttacctttccaagcgaacctacgacgcagagggggagcccacgaggtaggtgagctgggagggtcggatagggttctcttgtgtccgggtggtgggggaggaggcctcttcttggatagggtggagctgccactagaggtctgggtgcttagagggagtgttgaaggtgggccagttggacctttcccggcgttcctaggaggcagagggggagcctccgtggttggtgatgtgggcgagtctgtgcttgtggaaacgaagatctggttggtgaaggctccataggagagccgctgtttgtcccttggagtgctgaatcctggcagtgccagcttgtcctggggggaagatgctggaggagtggcagaagctctgaggtctgggtgagcgctctttcttgacagggcttggtttgtcatccagatcatcatcgctctcatctatctcctcctgtcgaagattccactcatattctacgtggacgtgtggattgaactttccagatttagcctgggaaagcagatcttcacactgggtagcttttagtctctttgctatgtctagggcagtttctccagcctggttaactatatccacagtgggcttgctcctgagcaaaagcttcaaacactcaggtttactgtacatactacagtagtgtagaactgtgtttcccagggccgtctgcttatccaggttcccacagttttgtacaaggaagtcaaccaaatggagagatgtctgatctgcagttcggacggcaaggtgaagggctgtctccccaagctcctgtcccaggttccagacagctggttccattagtctctaccccttctgcatagacttgaattagtgca

SEQ ID NO: 366862 - DNA, 1214 bp, Homo Sapiens
ccttgggagtcgtttctcggccatttgacccgtgggacttgtgggtttgtgctgcttgggctttctttcttccccttttccaacttcagcaatacacccagatgttagtcgagtcacgtcccgacgccctctgcccttgtaaatgctggcaagtacgcagccccgcgatcgtcacgtgacgccgggggttcagcgtatccttgctgggcaaccgtcttagagaccagcactgctggctgcaccatgaatgtgatctacccactggcagtccccaaggggcgcagactctgctgtgaggtgtgcgaagccccagccgagcgggtgtgcgcggcctgcacagtcacttattactgtggcgtggtacatcagaaggctgactgggacagcatccatgagaaaatatgtcagctcttgattccactgcgcacttccatgcccttctacaattcagaggaagaacggcagcatggcctgcagcagctgcagcagcggcagaagtatttgattgaattctgctacaccatagcccagaaatacctctttgaagggaaacacgaagatgctgtaccagcagctttgcagtcccttcgcttccgtgtgaagctgtatggcctgagctccgtagagcttgtgcctgcttacctgctgttggccgaggccagccttggtctgggccgaatcgttcaggctgaagaatatctattccaagcccagtggacagtcctcaaatcaactgactgtagtaatgccacccactctttactgcatcggaatctgggacttctctatatagctaagaaaaactatgaagaggcccgttatcatctggccaatgatatttattttgccagttgtgcatttggaacagaggacattaggacttcaggaggctacttccacctggctaatatattctatgaccttaaaaagttggacctggcagacacattgtacaccaaggtctctgagatctggcatgcatatttgaacaatcactatcaagtcctctcacaggctcacatccaacaaatggatttactgggcaaactatttgagaatgacactggcttggatgaagcccaagaagcagaagccattcgcatcctgacttcaatcttgaacattcgagaatctacatctgacaaagccccccaaaaaaccatctttgttctgaagatcctggtcatgctttactacctgatgatgaattcttc

SEQ ID NO: 366863 - DNA, 538 bp, Homo Sapiens
  misc_feature (20)..(20): n is a, c, g, or t
  misc_feature (25)..(25): n is a, c, g, or t
  misc_feature (104)..(104): n is a, c, g, or t
  misc_feature (433)..(444): n is a, c, g, or t
aaaagcccctggggtcctanggaancccctggctcctaacagccatgaacttgggtggatccctgtgccaaagtcctttttaacctcttcccacaccccagggntgccgctggtcccagcaggattcccttatcagggagaggggacttagtaaaaccatctggagagcatgtctgcaaactacagtgggccagcctctgcccagagagcctgaagttgctcacttgcaaggaagaggtgcagagcattgcaatctgctaccacacctctcacacctggtgagaatcagttctgatctccaaggttctgacctctgagagtgacgttaagtccagagagccacaccactacaccctgagagaccttcagcaaaaggcccgtgagctcaaagaaattggggtcaggatgcttttaaagcaaaaaatgctttatnnnnnnnnnnnncagatggtggttaggagaagatttgggggtaggtattgaaaaggaagaatgggactggtatgtaaacccagctgacaggacagggtcaggccag

SEQ ID NO: 366864 - DNA, 664 bp, Homo Sapiens
  misc_feature (14)..(14): n is a, c, g, or t
  misc_feature (44)..(44): n is a, c, g, or t
  misc_feature (62)..(62): n is a, c, g, or t
  misc_feature (81)..(81): n is a, c, g, or t
  misc_feature (98)..(98): n is a, c, g, or t
  misc_feature (144)..(144): n is a, c, g, or t
gcttccctttcctncactgtggaaaccctttgttggccaactcngcctgaaacggtttcctncaatgtgccagccccaacnaacccattaaaaacccngaaccttcctaaaacaggttgaaaaattccagattcttgaccctanaaaaccgaactgaaagggccccgggaatattccattttaaaagcccacttaacgtgccttcctcatcccattctggagtgtaagaaccccagtcacaggaggcatacttgctcaaaatgtcacaggaaacccatagtgagatgtagcaacagctggaggaggccagagtcatggttttaggcagacattgcagaacacctgatgtatattctggattgatccaatgctcagtcttgggtgtgggtacagttcagcaatctgcagtattaggtaattgcttttaaagatttctctgcagtgcaatttctccatatgatttgacgacaggaatttgtttgaattgctcaccacttcacaggagcctaaggtgatcaagtgaagttaacgacagcagccttcacacaattgtcagtgactaagggcagtgtccaagcccctgcagccaagggtgttagttgccagagcagcacgaagagcctaagtgagttaggaaagaagctggtccctgtgtgttgggaat

SEQ ID NO: 366865 - DNA, 752 bp, Homo Sapiens
cggctgcccgcggggagcgcggaggcacaccgtctcctactcccacccagctcctagaatgtgaggagagtgtagagttcaaaaagcccggaagtaaaacaaccccaggttaagaaagtaagggtaagctctagcagtcggcaaaagcgctcggcaaaaaaaccccgacttctccagaaaaactttgcggcaagttaagcggaagcgctgaatggccgggactatttaactcgcgcttcctctcacaagaggcggatccctggacctgtttgggggaccctgacggtccacaaactcgccatttgcctgctgggtggccctctagaagttctgacatcctaaaaggtctgggcagtcccgctgacggggaatacctgtcgtagtacccattgcctgcgagtccctgatggcggccattacacttccatccgggtattgccgaaaagctgatcgcagcgctaccgggagcgcacgctgcggcggagggatctgcgctttacctgagacaagcggaagagaacggaggccggcagggtccgcgctcggtctgacgagactaggccatggagctgggttcgccgctgacctctccatctagcgcgcggccccggcgcccaccagtccagtgacccactactacctctttgctcaccagcagctgctgatcttactgccggtgaaatggcagacaaacgtctactctgtgctcttcagagtagacaccaggagcaggaactgtatgcacttcccaa

SEQ ID NO: 366866 - DNA, 822 bp, Homo Sapiens
  misc_feature (767)..(767): n is a, c, g, or t
gggagcgctgagctgcaggcgcggcgaaacttccctctacccgcccggcccgcggcgcgcaccgttggcgctggacgcttcctccttggaagcgcctctccctcaggtctcaagaactgttttgagatgcaggaattcatctaattttcactgccgggcgaggtgtgagagccctagcatctgaaagtggtcgacttgcgagttgttatggagaaaacttgtatagatgcacttcctcttactatgaattcttcagaaaagcaagagactgtatgtatttttggaactggtgattttggaagatcactgggattgaaaatgctccagtgtggttattctgtggtttttggaagtcgaaacccccagaagaccaccctactgcccagtggtgcagaagtcttgagctattcagaagcagccaagaagtctgacatcataatcatagcaatccacagagagcattatgattttctcacagaattaactgaggttctcaatggaaaaatatttggtagacatcagcaacaacctcaaaatcaatcaatatccagaaatctaatgcagagtaccttgctcatttggtgccagggagcccaccgtgggtaaaagcattttaacacccttctccagccttgggcgtctcccgttcaggaggcacctgggattgcaagttcgggccgggttgtgttgggggtgtggggataaatgaacagccaaaagccccaagccaaaaaaaggtggattgggaatattttgtttccggtaanatcccttggggaacatttacccctcccaatgtgggaatctcaaggggtattctca

SEQ ID NO: 366867 - DNA, 1062 bp, Homo Sapiens
tgggtggcgaattcggcacgagggaaggtttaaagggcgcctccatggggggcgctcagctggagctaccgagcggtgccaggccaggtgtgtgcgtccgtcggtctttccgtgcccacgccggagaccagccccggaggccgcctgggcctatccctgtgccaggcaccatgaagcaggagtctgcagccccgaacaccccgcccacctcgcagtcccctacgccgtccgctcagttcccccgaaacgacggcgaccctcaagcgctgtggattttcgggtacggctccctggtgtggaggcccgacttcgcctacagcgacagccgtgtgggcttcgtgcgcggctacagccgccgtttctggcagggagacaccttccatcggggcagcgacaagatgcctggccgtgtggtgacgctccttgaagatcatgagggctgcacttggggcgtggcataccaagtgcaaggggagcaggtaagcaaggccctgaagtacctgaatgtgcgagaggcagtgcttggtggctacgataccaaggaggtcaccttctatccccaagatgctcctgaccaaccactgaaggcattggcctatgtggccaccccacagaaccctggttacctgggccctgcgcctgaagaggccattgccacgcagatcctggcctgccggggcttctccggccacaaccttgaatacttgctgcgtctggcagacttcatgcagctctgtgggcctcaggcgcaggacgagcacctggcagccatcgtggacgctgtgggcaccatgttgccctgcttctgccccaccgagcaggctctggcgctggtgtgaggggctgagcccctgcggggagtgctcatgtggacatcaggggccaaacacccaactccagtgcacaagacagacttgcgacccgcttgagcccactgagcaaatatggtgggtggctggaggcttctctttctcagtccctgcctgtctgccagcctgcagctctcctgcttgacactgacttactacttgacactttatttattgcaccatgttggtgtgg

SEQ ID NO: 366868 - DNA, 878 bp, Homo Sapiens
tggacttggacttcattctggacagcatatgacaaggacgaggacccctattctagccagttaaagctggacagaatttttaaaagcaatgaagccagttccttggatatatccacgggcttgctttgagaaggaactgagtaggcagtgagaagagtcgagtgaagcctggcccgtgagtgcctcaacaactgagatgaacgtcgactcgcttgcaggcaagttgtcagggaggaagccgcagcccaaggaggtcgtcacttgccgggaaggtggctcgggccaggctgcactcaaaacccgtgctctgtccacactgctacggggccagagccaaggaagcttccacttcttcccccagacagccccaacagcggctaccccaaggagccagcagccttgtgtcctgggatccccagcccctgcagaatgacccaccaggatctgagcatcacagccaaactcatcaatggaggtgtagcagggctcgtgggggtgacctgcgtgttccccatcgacttggccaagcactcgcctgcagcaaccagcatgggaaagccatgttacaaaggaatgcatcgactgcctgatcgaagacggctcgggcggagggcttcttcggccatgtaccgaggggctgcagtgaacctcactctggtcactccagagaaggccatcaagctggcggccaacgactttttccggcggctgctcatggaagatgggatgcagcggaacctgaagatggagatgcttgccgggtgtggggctgggatgtgccaggtcgtggtgacctgtcccatggaaatgctcaagattcagctgcaggcatgctggacgcctggccgtccatcatcagggctcggcctcagcaccct

SEQ ID NO: 366869 - DNA, 1124 bp, Homo Sapiens
  misc_feature (139)..(139): n is a, c, g, or t
gtgtaagagcccccaggccagggccctgggaggtgggaagcaatcttccccaggccaaatgagggggtggcagaagggggccccctttgggggtgaaagccggaacccaatttggttaggacctggaggtggaagggtncttaaggccgacccccgaatgatggacggcccaggcgtgccagcatcctgcagctgaatctggagcatttccatgggacaggtcaccaacgaccctggcacatcccagccccacacccggcaagcatctccatcttcaggttccgctgcatcccatcttccatgagcagccgccggaaaaagtcgttggccgccagcttgatggcccttctctggagtgaccagagtgaggttcactgcagcccctcggtacatgccgaagaagccctccgcccgagccgtcttcatcaggcagtcgatcattcctttgtacatggctttcccatgctggttctgcaggcgagtcttggccaagtcgatggggaacacgcaggtcacccccacgagccctgctacacctccattgatgagtttggctgtgatgctcagatcctggtgggtcattctgcaggggctggggatcccaggacacaaggctgctggctccttggggtagccgctgttggggctgtctgggggaagaagtggaagcttccttggctctggccccgtagcagtgtggacagagcacgggttttgagtgcagcctggcccgagccaccttcccggcaagtgacgacctccttgggctgcggcttcctcccctgctttcggtaagaacctctgccttttctggaacccaggatatagttcagatcgctgctgagtgacaacttgcctgcaagcgagtcgacgttcatctcagttgttgaggcactcacgggccaggcttcactcgactcttctcactgcctactcagttccttctcaaagcaaagcccgtggatatatccaaggaactggcttcattgcttttaaaaattctgtccagctttaactggctagaataggggtcctcgtccttgtcatatgctctccagaatgaagtccaatccaggattctgggagcatctcatgctttctcgaacctgcaggaatctcccgct

SEQ ID NO: 366870 - DNA, 893 bp, Homo Sapiens
gctggtaccggtccggattcccgggatggggttgggaagatggcggctcccagcctcctcaactggaggcgagtttcttccttcacggggccggtcccccgcgcccggcacggacaccgagcggtggccatccgggagctgatgatcatctttggagggggaaatgagggcatcgcggatgagctgcacgtctacaacacggctacgaatcagtggtttctgccagctgttagaggagatatccctccaggctgtgctgcccatggatttgtctgtgatggtaccagaatattagtatttgggggaatggttgaatatggaagatacagcaatgagttatatgagttacaagcaagtcgttggttatggaaaaaagtgaaaccccatccccctccttctggtttacctccttgtcctcggcttggacatagcttctctttatatggtaacaaatgctatttgtttggtggcctggcaaacgaaagcgaagattcaaacaataatgttcccagatatttaaatgatttttatgagttggagctacagcatggctctggtgtagtgggttggagcattccagtgactaaaggggttgtgccttctccaagagaatcccacacagctgttatatattgcaaaaaagattctggaagtcctaaaatgtatgtcaaaggtggaatgtgtggtgctcgcctggatgacctatggcagcttgacttagaaactatgtcatggtcaaaaccagaaactacaagggacagtgccacttccacgaagccttcatacagcccagggttataggaaacaacatgtacatttctgggtggatgggtcccacgataaggggcacaatctgacacttccctcatgctcgtgcattggagatggtccac

SEQ ID NO: 366871 - DNA, 867 bp, Homo Sapiens
  misc_feature (610)..(672): n is a, c, g, or t
gtgctctgcagcccctgagcctggcctgggctcgccagcagaagcaggacctggattgagggcttgaaacggcacatcgagaagcaccgctaccacgtgcgcatgctagagaccatcctgcgcatgctggacaatgactccatcctcgttgacgccatccgcaagatcaagaacgacgttgagtactatgttgactcatcccaggaccccgtacttcgaggagaacgagtttctctacgatgacctggacctcgaggacattccacaggcgctggtcgccacctccccccccagccacagccacatggacggatgagatcttcaaccagtccagcagcacgcccacctcaaccacctccagctctcccatcccgcccagcccagccaactgtaccacggaaaactctgaagatgataagacgaggggacgttccacagacagtgaagtcacgccagtctccaggcaagaaacggctccaagcctgtccacacgcaaccacgcaccctcagtccccagctgtgccgccgactagcgagtaccggagacaacagcaacagaatcgacgcacaccctagcaaatcacaactcccgactcacataacagacatnnnnnnnnnnnnnnnnnnnnnnnnnnnnnnnnnnnnnnnnnnnnnnnnnnnnnnnnnnnnnnnccgtcaacaatcaacaaggaggcgcgacaggcacagaggcgcggactggacagctggcacgtcacacgcacgacgcgataggagcagaagaacgacagaccgacactgagcgcgggaagaaagcgaagcggacaaagggcaagggtagcccccgaacctcgagacaacgccaccgacacgaccccaggagaaccc

SEQ ID NO: 366872 - DNA, 829 bp, Homo Sapiens
gggaaaacgagtttcaatccactttcctgaccccaaccatcctgcccagtctccgcttccccgtcttgtacacccctaactcctgaggctcctccgaatcacgcgagtggaagcggagaagctcaagtggccgccatgtcagaggcttatttccgagtggagtcgggtgcgctggggcctgaggagaactttctttctttggacgacatcctgatgtcccacgagaagctgccggtgcgcacggagaccgccatgcctcgccttggcgctttcttcctggagcggagcgcaggcgccgagactgacaacgcggtcccacagggttccaagcttgaactacccttgtggctggcaaaaggactttttgacaacaagcgacggatcctttctgtggaactccccaagatctaccaagagggttggaggactgtgttcagtgcagatcccaatgtggtggacctccacaaaatggggccccatttctacgggtttggctcccagctcctgcattttgacagtcccgagaatgcagacatttcccagtctctgctgcagacttttatcggacgttttcgccgcatcatggactcctcacagaatgcttacaacgaagacacttcagccctggtagccaggctagacgagatggagaggggcttatttcaaacagggcagaaaggactgaatgactttcagtgttgggagaaggggcaggcttctcagatcacagcttccaacctcgttcagaattacgagaagagaaaattcactgatatggaagactgaaagccggaagaacacagaatggctcctcacagacgtattccga

SEQ ID NO: 366873 - DNA, 1433 bp, Homo Sapiens
  misc_feature (1281)..(1303): n is a, c, g, or t
aatacgcaggcggtaccggtctgggatgtaagggactgggaaagtgctgtctgctaagttcctgctggaaatgcgcggatgtctcaggaagtcacgaccggactctcaaactctgggatctacgcagcaaagtctgcataaagacagtgtttgcaggatccagttgcaatgatattgtctgcacagagcaatgtgtaatgagtggacatttcgacaagaaaattcgtttctgggacattcgatcagagagcatagttcgagagatggagctgttgggaaagattactgccctggacttaaacccagaaaggactgagctcctgagctgctcccgtgatgacttgctaaaagttattgatctccgaacaaatgctatcaagcagacattcagtgcacctgggttcaagtgcggctctgactggaccagagttgtcttcagccctgatggcagttacgtggcggcaggctctgctgagggctctctgtatatctggagtgtgctcacagggaaagtggaaaaggttctttcaaagcagcacagctcatccatcaatgcggtggcgtggtcgccctctggctcgcacgttgtcagtgtggacaaaggatgcaaagctgtgctgtgggcacagtactgacggggctctcagggctgggaggaccccagtgccctcctcagaagaagcacatgggctcctgcagccctgtcctggcaggtgatgtgctgggtatagcatggacctcccagagaagctcaagctatgtggcactgtagctttgccgtgaatgggatttctgaagatttgactgaggtctctcttggcctggaagaataacactgaaaaaacctgacgctgcggtcacttagcagaggctcaggttcttgccttgggaaacactactagctctgaccttccatacctcacttgggggagcacagggccccgctgggcctcctcaccaacggcagtgccaaaatcagcccccacatcaaggtggtgttctctgtgctttctctcgtccttccaaagtcggttctggcctaacgcatgtcccaacaccttgggttcatttgcccggtgaactcactttaagcattggattaacggaaactcccgaactacagacccctccccgggtggggttgcatgaatgtgtcttcattacttgcttgaaatgtccttcacatctcttccactgttctttcagagctttctggctctcttttccccacaaaattcgacacatttaaaaaatctccgtgtgggctttaaaaaaaggggnnnnnnnnnnnnnnnnnnnnnnnaaggggggaaaaaggaatggttgaaaaatcttttcccaagggaaaatgggtttccctgccccaaagggaaagggaagtggtttccctggaaacgaaccggccagaaaaccccccacaaaagggtggggtg

SEQ ID NO: 366874 - DNA, 763 bp, Homo Sapiens
  misc_feature (167)..(206): n is a, c, g, or t
ctggtggaatgccatggttattaaagtgtgtttgtgatagtgtcgtcaaaaaaaaggttttgaatagaaattacattcttgacaccctcagttctttcaaactttcaactctgcattttattgcattttctcatttaactgttagtatatgtttgaatataggctgnnnnnnnnnnnnnnnnnnnnnnnnnnnnnnnnnnnnnnnnagaaaataagcaattaggggttagatgcaatatgaatataaaatagttctgtaaataccaaatattatttttagttctggaagttaaaaatactctccatagtaacgtgtgttataataataaatatttcttttgtttgacttttttaaaattctacaatggtaaaagctattttaatccatgttagcaatttaattcctattaattcattttactatcataatagcaaagtattcagaataaaagaggtttatatcttctattaaaatgcagtaatactattcaaatctaatttagctggaagcaacatgggagtaaagtaatcatccaggggacccaccataaaggacattgggtaaaacatttacacacgtaaacacacgtgcaggcacacttgggaacaatatggacccacttcaggcagacatcttctattgccatgctgagctgtttaaagttttaaggagaaaatctaagtatggaagtagaagataagagtggttcttatgggggatatctcattttcttgagtattgtggtggaacatttggtgtatg

SEQ ID NO: 366875 - DNA, 779 bp, Homo Sapiens
cggtgatgtttaaggccaggagcattcatttctcaaccttgtatcaatccaggatccatcggactaggtttcattaggcaagagagtagttcgttcctcctctgtgctgaggatgttttgagattttagacctttttctccttgaatattccagtagataaaacaagcccatggctaatccacttatcagagcccatagaccttgtatagctgctgcccattcaaaaccaattttctcatacagaaatccacccagcgttggtcccataaaagcaccaattgaccacattgcactaaaaagacctgatacaagtcccaatgtacttaatccctcttcaaacccattttcatgtgcacaactgagaatttccgggaaagttggaattatactcattaccagcagagaggaccacttacaactaatatcagcaccagcagaccagagctgacttttaatatgccaagattgggacaggcccctaagagcatgtagcacccggctgtgattaagttgccaaacaccagaagccatttccttagaggtggccttttatcacttaggagaccaaatagtggtgaagagatggcataggacagtgccatacccaggaatactagtcccacatatccagctggtaaattgaacttctccaaaacaaagagagacagagtaggatcgaggaagccaaaacacgagctgagtgagttgatgacgaaggctataaggccaactttgggtaaagcgatcagtttccagaatgagtgttcacctggatcag

SEQ ID NO: 366876 - DNA, 896 bp, Homo Sapiens
ggcgggaccagaggcggtcacgtgaggggctctgggctaccgggtcacgtgaccgaggcacagatcagctgatgccggagggtttgaagccgcgccgcgagggagcgaggtcgcagtgacagcggcgggcgatcggacccaggctgccccgccgtacccgcctgcgtcccgcgctcccgccccagcatgacagccccggcgggtccgcgcggctcagagaccgagcggcttctgacccccaaccccgggtatgggacccaggcggggccttcaccggcccctccgacacccccagaagaggaagaccttcgccgtcgtctcaaatactttttcatgagtccctgcgacaagtttcgagccaagggccgcaagccctgcaagctgatgctgcaagtggtcaagatcctggtggtcacggtgcagctcatcctgtttgggctcagtaatcagctggctgtgacattccgggaagagaacaccatcgccttccgacacctcttcctgctgggctactcggacggagcggatgacaccttcgcagcctacacgcgggagcagctgtaccaggccatcttccatgctgtggaccagtacctggcgttgcctgacgtgtcactgggccggtatgcgtatgtccgtggtgggggtgacccttggaccaatggctcagggcttgctctctgccagcggtactaccaccgaggccacgtggacccggccaacgacacatttgacattgatccgatggtggttactgactgcatccaggtgggaatccccccggatgcggaccccatccgcaccccagcggaagatctaaacctcttggaaaagcactccaagataacgagaactcacgctcaaattccaaaagctgggtcaatgttaccatcgca

SEQ ID NO: 366877 - DNA, 948 bp, Homo Sapiens
ggggcgagccgctgacagattctcggtggcggcggcagcggcggcggccctggactgcggggaatgggaatcctaggtccctgactgagcacctcccccgcctccctgcccccgacatggctcaggagaagatggagctagacctggagctgcctccgggtacgggcgggagcccggcggagggcggtggcagcggcggcggcgggggcctcaggaggtctaacagcgcccccctgatccacggcctcagtgacacttcgccggtgttccaggccgaggcgccgagcgccaggcggaacagcacaacgttcccgagccgccacggcctgctgctgccggcctcccctgtccgcatgcacagcagccgcttgcaccagatcaaacaagaagagggcatggacttgatcaaccgagagacggtccacgaacgggaggtgcagaccgcaatgcagataagccactcctgggaggaaagtttcagcctgagtgacaacgacgtggagaaatccgcctcccccaagcgcatcgatttcattcctgtgtcaccagcaccgtcacccactcggggaattgggaagcagtgtttttcgccatccttgcaaagttttgtaagtagcaacggattgcctccaagccctattcccagcccaacgacccgatttaccacccggagaagccagagccccatcaattgcattagaccaagtgttcttggaccattgaaccagacaatgtgaaatggaaactgaatatcagccaaagagatttttccagggcatcaccaacatgctttcttctgacgttgcacagctgtcagatcctggtgtggtgtgtatctacggataccttgatgggaaacagcgcagttgccggatcttcttgtactcaccagcgaaagtcggattacacgagtctctgtgtcctgcccagcgggtctcccttatccat

SEQ ID NO: 366878 - DNA, 937 bp, Homo Sapiens
  misc_feature (200)..(208): n is a, c, g, or t
ctagtacgagactggtgttaattcggcacgagggggacgcctggcgccgtccgcgatccgcagggctgcccgcttaggcttaggcccggcccgctggcaaagccgagccgcagcattttatttcgttcgtggtttccgcacaggctggagtttcgtgggttgggtcgtacttgggacctcggcgaagaggacccgtttannnnnnnnnctttccaaaatggcagcctccagtcgcgcacaagtgttatctctgtaccgggcgatgctgagagagagcaagcgtttcagcgcctacaattacagaacatatgctgtcaggaggataagagatgccttcagagaaaataaaaatgtaaaggatcctgtagaaattcaaaccctagtgaataaagccaagagagaccttggagtaattcgtcgacaggtccacattggccaactgtattcaactgacaagctgatcattgagaatcgagacatgcccaggacctagcaagccggggaccagccaccagtggcggccagggaccaccttcagcatccactctctgtttgagctgggggctcccaaaaccagcttacaatagccttttgcgctgcctgtcctgtgggagctgataaaccaagtcacatttgcattctgttgcaggcttagtgaaaaaggactgctgtctttccttggttcaagtgttagaatggagagctggagttcgttcagaatagtgctgtgtgttaccacgtctcccctgcaccccattcctaccttgtagctcatgaccattgtgtatagcatttctacactttgtttcttggtccttggcaataaaaagaatgatctccctgagcccttgaccccaggataaacccctccccaattaatgcaattttcttttcttactggatacaaggcctggaagagggctgttggggggccccc

SEQ ID NO: 366879 - DNA, 1103 bp, Homo Sapiens
tatttcctgaaacttgacccattgccatcaaatttgtgtatattgaaatccatttttccagcttctggcttccagggcctgagttttatttgccaagttagctcctgcattcagtgaagaggttatttttctttaaagtcaccagaggcataaaaaagccatagcgattcttgcagggagggtgccacttcgggggaatagctgggttgtgtaaggttggaagccctaaagagccggtagcctaaggtcttcaaagatttctgagctgctcttgattcgtgtgtaggtttagtgaaagtttgttttcagtgcctgtagctgataccactgactctgtgagtaagagtaagctctctggatctcaggtttccctctgcaaagtgagctggactaaaggttatcttacgtccctttcaactctgcactgccaacgtgaattcatacacacagttgacacagaaccctcgttttctgaacaaaagcatataaaatcctgttgccaatccttgtatgtcagtttcccatggggtcttgaatgcaaatacaaatatcgtaaaccaaatattttgtgttttctttcctagactctccagaaagagcaacagtaatggagtacatgagcactggaagtgacaataaagaagagattgatttattaattaaacatttaaatgtgtctgatgtaatagacattatggaaaatctttatgcaagtgaagagccagcagtttatgaacccagtctaatgaccatgtgtcaaagacagtaatcaaaacgatgaacgttctaagtctctgctgcttagtggccaagaggtaccatggttgtcatcagtcagatacggaactgtggaggatttgctttgcttttgcaaaccatatatccaacactgcaaagcatttttatggacaacgaccacaggaatctggaattttattaaacatggtacgtttctttccgatcagttgggtgctatgtgctcagctttcctgctgcagcttcatttaatgcagagtggtgtttgaatttggcttagatgggctggtaggcatgattttaaaaaatgtaatcatcagtaagaagtacttccatgttaaagatgc

SEQ ID NO: 366880 - DNA, 822 bp, Homo Sapiens
  misc_feature (696)..(758): n is a, c, g, or t
cctttgctctgaggcgatcgccccagcctggtcgtcgggcttgcagagccaccccttggcctgcccaggaatcccgggctccagtgcttcaggtgccaccgttgggcccggaagacctcgcccctgggggacctgccgtgacggcagttgagccccgtctctgcacttgctccagggctgagtccaggccatttcagggacccctccggccacttggacatggcctcccttaggctcctggccgccctctgtccagagccccagctggcactgtgccgacgccacattgtgtagcacctcccaggcttgcagcttgaaccgcaggcccagctgcgtgtagtcgatggcagcgtggcccctcagctgctccagggccagccagaagtcagacagagcctcctggaacctttgccagctggaagttggccactcctcgctggaagaagccaaccgccatgcaggtgtccttggtcacggcttggtcaaatgcccgcagcgcggcctcaggggtccccaggccagcaggtgcacgcagcccgcgttgaagcacagctcctggcggacggcgccgggacgcccgagaagaggtgcaaggcgcgggcccagtccccacgatccacagcctgcgcgcccaggtgccaggcgcgcaccaggtcccccagagaggccatggcggccggtggcggcgctcgaggnnnnnnnnnnnnnnnnnnnnnnnnnnnnnnnnnnnnnnnnnnnnnnnnnnnnnnnnnnnnnnnctccgaggcgggcagaggtgcgggcgccaagcgccaggtgcaaccccgcctcgtcggaattgcc

SEQ ID NO: 366881 - DNA, 1455 bp, Homo Sapiens
caagttgccggtggaattggcccaggatgacagctggagaatggagtcagttggatccaagtatgaagatcagattacgtattttcactgactaccgtagaagaatatccagatacaagatgagctggtatggatcttagggaagcagcatctccttaaagacagaaaaatctaagctgttgtctgatataagtgctcgtctatggtttacatacagaaggaaattttcaccaattggtggaacgggcccttcatcagatgctggttggggatgtatgctacgctgtggacagatgatgctggctcaagcccttatctgtagacacttgggaagggactggagctgggagaaacaacaaagaacaacccaaagaataccaacgcatcctacagagcttcttagatagaaaagatcgtcgctactctatccatcaaatggcacaaatgggatgtaggagaagggaaatcaattggagaatggtttggaccaaatacagttgcacaggtgttaaaaaaacttgctttatttgacgaatggaattccttggctgtttatgtttcaatggataacacagtggtcattgaagatatcaaaaaaatgtgccgtgtccttcccttgagtgctgacacagctggtgacaggcctcccgattctttaactgcttcaaaccagagtaagggcacctctgcctactgctcagcctggaaacccctgctgctcattgtgccccttcgcctgggcataaaccaaatcaatcctgtctatgttgatgcattcaaagagtgttttaagatgccacagtctttaggggcattaggaggaaaaccaaataacgcgtattatttcataggattcttaggtgacgagctcatcttcttggaccctcatacaacccagacctttgttgacactgaagagaatggaacggttaatgaccagactttccattgcctgcagtccccacagcgaatgaacatcctaaacctggatccttcagttgcatagggatttttctgcaaagaagaaacaagactttgataactggtgtagccttgttcagaaggaaattctaaaggagacatttaaggatgttgaattagttcagaaacatccatcacactggcctccctttgtacctccaggccaagccagaagtgacaaccactggggcagaattcattgactctactgagcaactggaggagttgatctggaggaagatctgagattctgagtgtgtagaatcctgggaactcagcttgaaggtcctgtctttccatcctggcaccataaaaacatgaacttattgcataaaactttgctagtccaggcaagtgcctggatatgccaatagcattacaactcaataagcatcatgaactggagccatcacaggttctccgaaaacaaacaaaacaaaccaatgccgtaacccttcccggaagaactagaca

SEQ ID NO: 366882 - DNA, 1691 bp, Homo Sapiens
  misc_feature (582)..(594): n is a, c, g, or t
  misc_feature (667)..(680): n is a, c, g, or t
  misc_feature (1077)..(1077): n is a, c, g, or t
  misc_feature (1276)..(1276): n is a, c, g, or t
  misc_feature (1284)..(1284): n is a, c, g, or t
  misc_feature (1319)..(1319): n is a, c, g, or t
  misc_feature (1327)..(1327): n is a, c, g, or t
  misc_feature (1346)..(1346): n is a, c, g, or t
  misc_feature (1350)..(1350): n is a, c, g, or t
  misc_feature (1352)..(1352): n is a, c, g, or t
  misc_feature (1446)..(1446): n is a, c, g, or t
  misc_feature (1543)..(1543): n is a, c, g, or t
  misc_feature (1590)..(1590): n is a, c, g, or t
  misc_feature (1637)..(1637): n is a, c, g, or t
  misc_feature (1650)..(1650): n is a, c, g, or t
cgtctcgcgacccaggcgcgggtttccggaggacagccaacaagcgatgctgccgccgccgtttcctgattggttgtgggtggctacctcttcgttctgattggccgctagtgagcaagatgctgagcaagggtctgaagcggaaacgggaggaggaggaggagaaggaacctctggcagtcgactcctggtggctagatcctggccacacagcggtggcacaggcacccccggccgtggcctctagctccctctttgacctctcagtgctcaagctccaccacagcctgcagcagagtgagccggacctgcggcacctggcgctggtcgtgaacactctgcggcgcatccccgtgtcaatggcgcctattggctgccccgcacacgtgtgctctcgcccacccgcgttcacccctgggcccccgcatccccaagttatgttctccccatatcgtacctctcccatcccagatctgacgctccctcctctgatacccccccatccctcccgtctccacccggttccgtatcctcgtgtctacttcacgtcccctcctaccccagtggaggagatatacggtnnnnnnnnnnnnngcgcccgctttcaccacccgctgtgcctccgcccgtgtaattcccccgtctccctgttacgctgcctcgagtnnnnnnnnnnnnnnacgccccaccgccccatagcttattcccccctcttcgcacccctttttgttgtgcccgtagctctccatctcgcacactgaccctacctgcactgtgcaactcaccatcaactgcctccgtatgaagtctgccgtagtccccgtgttatgacgccacgcccgcccccgattgactctttattcaccctaccccacgccgccgccctgcaagaacacccattctccggttcactctcttcgtctcctatccctaccctactgtatgatattcttatcgccgcgctcgctcgcatgtgcacaccgctttcgttgtcacgcaccccgccgtcgccatcccactaccctcattttgtatcttgagtgcatcctctctctactcacctcgcacacacaacanacgagctcttgactatctgctactcactttactatatcctcgctgacaccgcccgtctgttgatcaccaccacttcattacttcctatagtcactacactcaacccaacagcatcgactcgtttctcggacggcttccgcagctcctcccaccgtcgtctctctcccgctctttgacgagcgcgacacacagtcgcgcncgtgatcnatgagcgacggttatcaccctccgtatcatctgantcgtaacnaagtacgtgcaggtacggntgangnagcgtacgcttgctcgctcggccgcttccgactcatgccgcaaccctcgctcgcgtccgcggtgcggtgatttacaaactacgtcttcggcccntcgcttttgattcttacgccctgtcgactccgatcccgcacaccaccaacccttctggtgttaaatgaatgataccccgattctggttcgttttctncaacgcaccaccccgcccccccaccacttgttcatcgcatcacttanacctcacaccaccctccgaccgttcaatcacacattatagttaaacnccttcccctggcncgccgtgtcatcatataagtcaaacccataataaacatact

SEQ ID NO: 366883 - DNA, 1020 bp, Homo Sapiens
gctacagcttgaagccaaacatttaatgaaagagagcgggaggggccgaatagaagaatgatgggcgtggcaaccccgaggtggctggaggccgcgcccccttcccagagtgcaccgcagccgctgcattcaggaaccgctttagcttcggccccggccggccgggcggggaagactggtgtggtctggccatggatgggctccaggccagtgcagggccgttgaggcgcgggcggccgaggcgccggcgcaagccccagccacacagcgggtcggtcctggccctgcccttgaggtccaggaagatacgaaagcagctgcgaagtgttgtatcccgcatggcagcgctgaggacgcagacgctgcctagcgagaactcggaggaatcgagggtggagtcgacggccgacgacctgggggacgcgctacccggtggggcggcggtggcggccgtcccggacgcagcccggcgagagccatacggccacctggggcccgcagagctgctggaggcctcgcccgccgcgcgctccctgcagaccccgtcggcgcgcctggtgcccgcttccgcgccgcccgcgcgcctggtggaggtgcccgccgcgccggtccgggtggtggagacctcggccctgctgtgcaccgcgcaacacttagcggccgtccagtcgtccggggcccctgcgacggcgtcggggccgcaggtggataacacgggtggggagccggcctgggactccccgatgcggcgcgtcttggcgagcttgaaccggatcccagcagccggcggcgagcgggcccgctctttgagtggctcatcgggccatgccgcagatcacttctaccggcgcctatggagcgcgaggaggttgttggtgcggcggggggaccacaacgtactaccaggaacttttctctacgctgactggattcgatgcttgcgcaacgagaaggttcagaccggcaggatttgaacgccgtcgcataacatcaaaggagagggaagaccctgaagccaac

SEQ ID NO: 366884 - DNA, 1003 bp, Homo Sapiens
cttccgcccactgtgctgcccttcctcggacctgggctgtcgggagagctggagatgttcacccttcctcaaaaggacttcagggctcccaccacctgtctgggccccacctgcatgcaggacctgggcagtagccatggggaagatctggaaggagaatgctccagaaaactggaccagaagctgccagagctccgtggagtgggtgatcctgccatgatctcctctaatacctcctacctgtcctctagaggaagaatgattaaatggttctgggattcagctgaggagggctacaggacctaccacatggatgagtatgatgaggacaagaaccccagtggcatcattaacttgggcaccagtgagaacaaactctgctttgacctgctgtcctggcggctgagtcagcgcgacatgcagagggtggagccatccctgctgcagtatgctcactggaggggacatctgttcctccgggaggaagtggccaagttcctgtctttctactgcaagagcccagtacccctcagaccagagaatgtggttgtcctgaatggtggtgcctcgctcttctctgctctggccacggtgctgtgtgaggccggggaggctttcctgatccccaccccttactatggcgctatcacacagcacgtgtgtctctatggcaacatccggctggcctatgtctacctggacagtgaggtcactggggctagacacacgccccttccagctcacagtggagaagctggagatggccctgagagaagctcactctgagggtgtgaaggtcaaaggactcatcctcatcaacccccaaaaccctctgggtgatgtatactcccctgaaagaactacatgagtacctggtatttgccataacgcacaaagctacatgtaaatgtgacatgaatatctacctggagaacccagattggaaggggattaatggaaaaatacaaaaaagaatatgaacaaccaaaacatctacataaag

SEQ ID NO: 366885 - DNA, 1518 bp, Homo Sapiens
  misc_feature (547)..(560): n is a, c, g, or t
  misc_feature (947)..(959): n is a, c, g, or t
tcgctgaggtgtttggtttggaatagggaaaaaggtaagagactaacgtggaaaggtgctaactcagagactggagattatagtttacagctgtactttccagatcttctatgtgacacaatgcactgtccttgtgggtttgtcatttattggttaatgctctagtttcaaaaccaccctgttgaaagttccagttatttatatgcccaacaaatttcatagcctgctgaactgaactgagtgtgtcagaagtgctggttaatgacgagaagagattgcctgaaaaacaacaaactgctttctggttagctgaaggcaagtgtgaaaatcagaatttagaatatttagagctaagcttctggaaccacgtagtttctacacgtggcaggccaagaatgggaggctgactcaaaactagatagaaaaatataaaataatcttcgaccacttgatagctctcaaatatatatttaaaagatttatgaatacaaaccatttatggtttatgatttctaaaaagaaagcacaattaattttatagagaggnnnnnnnnnnnnnnaatatttctattgcaaaagtctatccgatttgatgcactttgaatattgagatattttgcacggatgaatgtatgggaactacccatgatgatgtaagaggaaagaacatttttttgtgattcaccagacatcactttaaacttggtgatgagtttaaatccagtagctaatcccttcctgagactcaaagatcgtgacgctggttggaatttctgactgtgccctttagggcctcctgagtttcaaaaggaggaagtgttcgtgcttgtgtccctgaagttccctgttgcatgagcctgcgacaggacctcacccccaccaccaggcttctatttgggattcaaatcagtattagtatcgtagctacaccaagttcaggcttctcnnnnnnnnnnnnnacctagaaattgggctcagtggtcttcaacttgaggacgagggtgattttcctaagaaatcagcaaagagggaaggcggggcccctgtagattcaccagtataaacttcagctgcagggattccagagccctcgggaccactctgtcaccttaatagccaagttctcctggttcctccgatcttacaggctcatccaggttccaaagtgcttctgtctctgttttgattctccaaactgctctgtgatgtatgtaaggattattctcccccctttacaaaaaagtagtggtcctgggaaaaggccaagggtcctctaagttcaatgggccagtcataagcaaaaaggggagggcccagacacccattccaattaaccccttcccaggcccaacccctctggtaaatttggcccacccttttggggaaattaactgttggggttaatgaacctttgcccctccctgggtttgggattcttaccggttttggaagtcaaaaaacccctcattcaaaaataaatccatttgccccgcccggggggggttccctctaggcgga

SEQ ID NO: 366886 - DNA, 890 bp, Homo Sapiens
  misc_feature (419)..(419): n is a, c, g, or t
  misc_feature (433)..(433): n is a, c, g, or t
  misc_feature (439)..(439): n is a, c, g, or t
  misc_feature (441)..(441): n is a, c, g, or t
ggggacaccggaagcgagccctagaattatggcgacctccgcgacgtcgccgcacgcgcctggttttccagctgagggtagatgcggttactatgtggaaaagaagaaacggttctgcaggatggtggtggccgcagggaaaagattttgtggtgaacacgctggagccatggaggaagaagatgctcggaaaagaatcctgtgtcctttagatccaaaacacacagtatatgaagatcaactagcaaagcatttgaaaaaatgtaactcaagagagaaaccaaaacctgatttctatattcaagatattaatgcaggcttaagagatgaaacagaaatacctgaacaattagttccaatttcttctctatctgaagagcagttggaaaagttaattaagaaattgagaaaagcaaggntggacaggggcttntggaanantttcctaacacttaaagatcatattatgtcccatccagcattacacgatgcacttaatgaccctaaaaatggcgattctgcaaccaagcacctgaaacagcaggcttctattttaggtaacattgaaaatttaaagttacttggtccaagaagatgctttgttgagtttggagcgggaaagggaaaattatctcattgggttgatattgccttaaaagatgctgaaaaagttcacttcatcctagtggaaaaggtgaccacaagattcaaggtggatggaaaacacagaaagaaaaattcagtgtttgaaagacttcaaattgatattcaacacttgtgtttgaacaagattcctgtgctaagagaagaataactacctgtggtaggaattggaaagccatctgtgtggtatggcaacagatcttgcattaccgaatgttgggtgaaac

SEQ ID NO: 366887 - DNA, 808 bp, Homo Sapiens
tccttctccatgccaaccagcttgagcttcagctcagacacttcagtcatcagatcgagcttctgggtctcaagagatgtccggcttagcagctcctgttgaagcatctcttcagcagcattgagtttcacctggtgtccttccagacacacttccaggtctcgaatcttttctccctgggcttctacttggtctgtgaggacactcacctgcaatatgagggactccttatccccttctagacgtgccaagcgttcctggtaggtttcattactagcagcactgtggtggtttacctgggacaagctctcgtcaaaccattcctttatgtaggcagctgtttgggccagggatctggctcaggagggctgctctctccagaggaagctccagcatctccaaggccagcctcaagtcctcgatgagatggagcaccgggaaggggttcatgtaggaggccggggaagccagtccaggctcacaagtaccatcactaagatctgcacctgttttagtgcctgcaatgatcccgtccatttgctccagggcagcttccagcgcatgactagcatcagaagccatgactcctgtttgcctgcctggcctcctcctcttcttactgggtacggggccgaggctcctctcacaggccggctcaggtgtgcgggccgctcccgtgtcccatcccaccttcaaacatgagagcccagaagcgagcgacgggccactggcccaccgaccaactgccggaccaagcgcccgaccaaccagcggaccgaccgcagcggccggggccggcgcccccgct

SEQ ID NO: 366888 - DNA, 1012 bp, Homo Sapiens
  misc_feature (930)..(930): n is a, c, g, or t
ccagtactataacggtctcttaggtagcgaggcctgggtggcgaattcggcacgaggcttggtcaagagaactggggtgagcctggaaaagttggaagtgcgtgaagaccccagcagcaataaggatctcaaagttcagtgtgatgaagaagaactcaggatttaccagctaaacattcagatccgggaagtttttgcaaatcgtttcactcagatgtttgcagattatgaggtgtttgtcatccaacccagccaggataaggaatcctggtttaccaacagggagcaaatgcaaaactttgataaagcatcttttctgtcagatcagcctgagccctacctgcccttcctctcaagattcctggagacccagatgtttgcatctttcattgacaacaaaataatgtgtcatgatgatgatgataaagaccctgtactccgggtatttgattcccgagttgacaagatcaggctgttgaatgttcggacacctactctccgtacatccatgtaccagaagtgtaccactgtggatgaagcagagaaagcaattgagctgcgtctggcaaaaattgaccatactgcaattcacccacatttacttgacatgaagattggacaagggaaatatgagccgggcttcttccctaagctgcagtctgatgtactttccactgggccagccagcaacaagtggacgaaaaggaatgcccctgcccagtggaggcggaaagatcggcagaagcagcacacagaacacctgcgtttagataatgaccagagggagaagtacatccagggaagccaggactatgggcagcactatccgccagcccaaactgtccaacctctctccatcagtgattgcccaaaccaaattggaagttttgtaaagggcctgctgaaaggaatgcccccaataagaaccanaaggatgctgggtggaaaaaaatgggccggaaaaccttggggagctagggccttgggggaagggaaaactcacaaggggtgg

SEQ ID NO: 366889 - DNA, 1037 bp, Homo Sapiens
  misc_feature (815)..(909): n is a, c, g, or t
caaatgccttcttggggttcaatccccccagggggacagttttggttccaggggaattttgggggaataaggttttccgaccattaaaaaaccgggttcttttcaacttcgagaatcaaaatccccgggagtaccgggtcctttatcatcatcatcaggaccccattattttggttgtccaagaaaagatgcaaaccatctgggtcttccaggaaatcttgaggaggaaggggcaggtagggctcagggctaatctgacagaaaaagatgctttatcaaagttttgcattagctccctgttggtaaaccaggattccttatcctggctgggtgggatgacaaacacctcataatctgcaaacatctgagtgaaacgatttgcaaaaacttcccggatctgaatgtttagctggtaaatcctgagttcttcttcatcacactgaactttgagatccttattgctgctggggtcttcacgcacttccaacttttccaggctcaccccagttctcttgaccaaggcttgcagccgggcaatagtttcattctccttaagaagctcaaaattttctccttcagtcgtacttgaaatgaaagggctggcaccatccctggctttagaagcctgtatgtactggcataatgccgacagctcgtccggctccagcccggtctccgtgtccagtccgcagatgacaaagtagtcggcgaagcgactgggcgccgagccccctccgccgccgccgccactcatggcgccggggccgagaccggccgggcagtgcggagcggcaccgagcccccgcaacccgggnnnnnnnnnnnnnnnnnnnnnnnnnnnnnnnnnnnnnnnnnnnnnnnnnnnnnnnnnnnnnnnnnnnnnnnnnnnnnnnnnnnnnnnnnnnnnnncgcggctgccgtgacggggcgggggggcaccgggccgccccgcaccgcatcctggatgccttcccctccgcgccgccgccgctgcagctagccgagagcgccctcgtgccgaattcgccacccaggcc

SEQ ID NO: 366890 - DNA, 927 bp, Homo Sapiens
aagtagcgaggcctgggtggcgaattcggacgaggggccaataatctgccagagaccaagtaccaatgagcttcccctatttgactttcctgtcaaagaggtttttgaactgctcggggtggagaatgtgtttcagctttttacttgtgcccttctggagtttcaaatcctgctctactcacagcattaccagagactgatgactgtggcggagacgattacagctctcatgtttcctttccagtggcagcatgtctatgtccctattctcccagcttctctcctgcatttcttagatgctcctgttccatacctgatgggtttgcattccaatggcctggatgaccggtcaaagctggagctgcctcaagaggctaacctctgctttgtggacattgacaaccacttcattgagttgccagaggacttgccacaagttacccaacaaataggagtatgtccaggaagtctctgagattctacatggcatcaggaattccccctaaagggaatcttcattagcagtgagagtgcctccaagctgaagaggctgcgggcctctgagcttgtctcggacaagaggaatgggaacattgctggctcccctttgcattcctacgagcttcttaaggagaatgaaactattgcccggctgcaagccttggtcaagagaactggggtgagcctggaaaagctggaagtgcgtgaagaccccagcagcaataagggatctcaaagttcagtgtgatgaagaagaactcaggatttaccagctaaacattcagatccgggaagtttttgcaaatcgtttcactcagatgtttgcagattatgaggtgtttgtcatccaacccagccaggataaggaatcctggtttacaacagggagcaaatgcaaaactttgataaagcatctttttctgtcag

SEQ ID NO: 366891 - DNA, 832 bp, Homo Sapiens
  misc_feature (663)..(681): n is a, c, g, or t
tcggtgccgctacgcactgcccggccggtctcggccccggcgccatgagtggcggcggcggcggagggggctcggcgcccagtcgcttcgccgactactttgtcatctgcggactggacacggagaccgggctggagccggacgagctgtcgggagctgctaagccgcacatctcttgagacccagaagctcgatctgatgactgaagtgtctgagctgaagctcaagctggttggcatggagaaggagcagagagagcaggaggagaagcagaaaaagcagaggagttactgcaagagctcaggcacctcaaaatcaaagtggaagagttggaaaatgaaaggaatcagtatgaatggaagctaaaggccactaaggctgaagtcgcccagctgcaagaacaggtggccctgaaagatgcagaaattgagcgtctgcacagccagctctcccggacagcagctctccacagtgagagtcacacagagagagttgactagcttgactcggacgaaatgcagttgtctgggtcccctgggtctactcttataagtgagcatgtgtgtctataaaggagtgtgcatatgtgcttgtgttgttagccatgctaatgtacatgcatgtatgtgtgcaagcgtgtccaagtgaatggatgcaccagtnnnnnnnnnnnnnnnnnnnccctataatgcagcataatttgtggaatcattccccagggaaccctcccctgactagaaggtgtttctcagatgcacaggagttctgtgcagccacctctggagcttttactgattatgtagtaaatacctaactctgtcatggtgactga

SEQ ID NO: 366892 - DNA, 1106 bp, Homo Sapiens
tggagaggccgcggcggcaggcagcgggtgagtctctaatcttctaaaaggggttcctatagaaacgcggagcggggcgcgccccccgctcggcccaggcccgggctgcggcgcttcgcacagcgcgcccctccccaagagcccctctttgctgtgggcgctccccgtctccgttcggcccccaccggccgagcgaaagaaatcaggagctagaaagagaggcattagatcgagatgagcggcagaactggaatcccgtctcggattcgtgacatttcaggcctattagcatttctccaacggagccttctgaaaacctatttaaagtgtaatattaaaaacctcttggctgggggcctctctcgccttccatccgccgcagccccctccagggagggcgagaccgggaaaaaaataaaatctgttgagctcagaggaagtagccgccaagcccaaaaagtgcttggctggccacggcggccgtagggggaagggagccccaatcccccagacttggtacttttattttgcgctttcagcaaaatcctttctgggttgagtagccgtgagctgcccgcggccgacctacctgaccgggggcgcagggagtgcggaccacgccagcaggactgtcctgggggcccccgcaccctctctctgcagccccccgagcccggctaggcattacgtaccctggaaaggaagcttggaggggcagaaatccttccaatgctgcctcgaagagcaactgcagtgataagattttaattaaaacaagagaagcccgctctttcgccccgcgctgcggactcagcgttttcgcattgcccgttctgttttttttaaatcaatttttaaggcaactttttgggaggggggcacaaatgagcgagttagtgcccattcgttctattttcttttctccacttttagaaaaaagtggggggaggcttcgagaacgaacggggggggtgtctaatttacattccagggatacactttgaggaaaaagttcaggctcttgagggcagtttcaagttgccttcctggagcttcctgcgttagtttctagggctgccctctttggaagctgtagctccgtggga

SEQ ID NO: 366893 - DNA, 1646 bp, Homo Sapiens
  misc_feature (1394)..(1394): n is a, c, g, or t
  misc_feature (1475)..(1475): n is a, c, g, or t
  misc_feature (1533)..(1533): n is a, c, g, or t
  misc_feature (1551)..(1551): n is a, c, g, or t
  misc_feature (1595)..(1595): n is a, c, g, or t
  misc_feature (1601)..(1601): n is a, c, g, or t
  misc_feature (1613)..(1613): n is a, c, g, or t
  misc_feature (1631)..(1631): n is a, c, g, or t
cgcatctcgcacctgcctgccttgggccagcgggcggggcccgggaacgtgcatttcaaaggggccgcggttcctgcgatgcgctggactctgggaagcgcgaacagagcgttttgcgggctctgcggggagagctggcgccggcgtctccctgtagcaggactgggcgccgcgcccgtgggtgggctgctgcccggccccgccgcccagccaagccgccgcctgggtggccattcccaagccggactccggggaagtggcagcgtggatcccagccgccagaattcgaggtctgcggcggctttcaaaacttgacaactttcctttccaggaggaccccgttctggagcgttatttcaaaggccacaaagctgcgatcacctccttggacctcagccccaacggcaagcaacttggagaggaaaattctcagaatttaaagctcatacagctccagttcgaagtgtagacttttcagctgatggccagtttctagctacagcttctgaagacaaatccataaaagtatggagcatgtatcgccagcgcttcctgtattccttgtatcgacatacacactgggtacgctgtgccaaattttcacccgatggaagactaattgtgtcatgtagtgaggataaaactattaaaatttgggataccacaaataagcaatggggtaataacttctcagattccgtgggatttgcaaattttgtggactttaaccctagtggtacatgcatagcttcagcaggttctgatcaaactgtgaaagtctgggatgtaagagtgaacaaattactacagcattaccaagttcacagcggtggagttaattgcatatcattccatccttcgggtaactatctcatcacagcttcttcagatggtacccttaagattctggacctcttagaaggaaggctcatctatacacttcaaggacatacgggacctgtctttactgtttcattttcaaaaggtggagagctatttgcatcaggaggtgcagacacacaggtcttattatggaggactaactttgatgaatcgcatcgtaaaggtcttaccaaaagaaatctcaaaagattacattctgattcaccaccacatcttcttgatatctacccaagaacaccacatccccatgaggaaaaagttgagactgtagaagatttttttcttcatcttttgagattaatccaaagcttgaggtaatcgatttgcagatctctactccccctgttatggatatcctttcttttgattctaccacaacaacagaaaccagtggtaggactctgccagacaagggtgaagaggcctgtggatatttcttgaacccttccttaatgtcaccagaatgtttgccaacaaccacgaaaaagacnacagaagacatgagtgacctcccctgtgaaagtcaaaggagcatacctctcgctgtgactgatgctttaggagcatattcntgggaacaacttcaatgttttggacacagactgtttccaatcttgggaggcaggcgantgactttggacagagggntaggctggaaagactggccttggaaaattcagccaaagcttttncgtgcngttccaacaggnaagctggattaaaaattnctttttctttgttgg

SEQ ID NO: 366894 - DNA, 882 bp, Homo Sapiens
gggtccggaattcccgggattgcctcctcctagcaagctatatacctacatagtacagccatggcccccaccgtgatggcctcgtcggccacctccgtcgctcctttccaggggctcaagtccaccgccggcctccccgtcagccgccgctccaacggcgctagcctcggcagcgtcagcaacggtggaaggatcaggtgcatgcaggtgtggcccatcgagggcatcaagaagttcgagaccctgtcctacttgccaccgctcagcacggaggccctccttaagcaggtcgactacctgatccgctccaagtgggtgccttgcctcgagttcagcaaggttgggttcatcttccgtgagcacaacgcatcccctgggtactacgatggccggtactggacaatgtggaagctgcctatgttcggatgcaccgacgccacgcaggtgatcaacgaggtggaggaggtcaagaaggagtaccctgacgcctatgtccgcatcatcggattcgacaacatgcgtcaggtgcagtgcgtcagcttcatcgccttcaagccaccgggctgcgaggagtccggcaaggcctaaacagctcactcacgacaggccatatataaagtgccattgcagttttgtcaactctgacattgctttgggttttccttctccatttatctttcttatttgttcctaagaatatgtgtatgtccatgttcatgtacgaacatggctcgagaaagcatgctcgtatgtgaaatgctatcggtggctatgtatatgcacggacgcataatattatacaatatgtcgactatattacgtttaagtggtaacccacatggaacctaccaacaaaaacaacgaccacaaaaagggggcggg

SEQ ID NO: 366895 - DNA, 1143 bp, Homo Sapiens
  misc_feature (691)..(691): n is a, c, g, or t
  misc_feature (929)..(939): n is a, c, g, or t
ggaccggtccggaattcccgggatcaggtgcatgcaggtgtggcccatcgagggcatcaagaagttcgagaccctgtcctacctgccaccgctcagcacggaggccctcctcaagcaggtcgactacctgatccgctccaaatgggtgccttgcctcgagttcagcaaggttgggttcatcttccgtgagcacaacgcatcccctgggtactacgatggccggtactggacaatgtggaagctgcctatgttcgggtgcaccgacgccacacaggtgatcaacgaggtggaagaggtcaagaaggagtaccctgacgcgtacgtccgcatcatcggattcgacaacatgcgccaggtgcagtgcgtcagcttcatcgccttcaagccaccgggctgcgaggagtccggcaaggcctaaacagctcactcaccacgggccacatataaagtgccattgcggttttgtcaactctgacattgctttgggttttccttctccatttatctttcttgtttgttcctaagaatatgtgtatgtccatgttcatgtaccaacatgtctcgagaaagcatgctcgtatgtgaatgcaatcggtggctatgtatatgcacatgcacataatatatttatacaatctgtcgactatgtattcccggcaattaactaatgagaaacatcttttggcaatangtaaaaaataaaccactctccatatggggcgggccgctctaaagtatcccctcgaggggccccaaactttaccgcgtacccagtctttctttggtcaaaagtgggtccctaatagtgagcccgtatttatacagcctaggccctgggcccgtcccttttttaaaccgtccgttgactggggaaaaaactggcatagccttgggggatccttttgtgaaaggaaacctttaccttttcnnnnnnnnnnnaaactaaattgggagcaaactttcccttatagaagaatttaaaagctccttaaggggaaataattaaaaattctttaaaacgggaataaatggttggcaaaaacaagcctggcatatcgctttgccgcccttgaaaaaaattttctccctctcattgaaagtatagagctttttcggaaaaatatttccatacacccgggagag

SEQ ID NO: 366896 - DNA, 1088 bp, Homo Sapiens
ggagaggtgcagcggcccaaaatggctcccccccacaggtggctttggcccatcacgtgtcaggccgcttgtgtccactgcccccgggccctcagaagctgaagagtcatcctgctctgtgccgctgctgtcagccttgtcccagtcgacaggcgagaggcactgggcgtaatgcatgtcctgggcctgtcaggccagttgtccagacctgagggtttgtccgagacttgggcaagcctcgaaacgcgttcatccaggccatcatccagctcccagacaacactgctgccacctcaaggcttgtggccgcggcacctcgtccatgttggtggtgttggcgctgaccgtggacagcggggccttagccgtctcctctaagtccagcaggttcccagtggcgaccaagctcttcaaggggggggtgcagtcttgcagggcccccaggacgtcccctccctcttggctggctttgtccctcttctctttctcttccttggacacctgccaaaactcaaaggcgactttgaaggcctgggctacggtgagggtaacagcctgtgccatcttccgcttggtgcagaggaaggcgtggcactcgaggctctggttgtgctggctctgggcgatgtatgcaaacaccttgtcgtgcatcttgtctgctgtgcaataggagatcctgtatatggacacgttctcaatgagctggttggtgaggttgtctgtcaggataattccccgtggcgacaccttcagagtcaccttctgcagcttcttcccactggccttagctgtagccacgatcctcttgatggcggcggccgacagctcctcacccttgggctgctccactagcgtcatgcccaggtacttgaggctgaacagcatcccctccagcagcgtctcccgcgtgtctgtccagttctcaggcagcttgaggtgccggccaccgcccccccagctctgcttggccaagctggggctccggatcagcgcccgccccgccgacttgagcgcgtccatggcccgctccggccgccgccgccgctgccgcagccaaaactcctcgtgccggaatcgccacccaggcc

SEQ ID NO: 366897 - DNA, 894 bp, Homo Sapiens
cgcgcgtcaggcaatctggccaattgcgcatcttttccgcctaccgcacggccccgcccctgccacaggatcgatttacggccgcagagaaaaaccaagatttcactttcaagatggaaagtccgtcagactcagctgtggttttacctagcactcctcaggcctctgcgaatccatcatctccctatacaaatagttcccgaaaacaacctatgagtgcaacacttagagaaagattaaggaaaacaagattttcatttaattcctcttacaatgtggtgaaacgtcttaaagtagagagtgaagaaaatgatcagaccttttcagagaaaccagcatcttccacagaggaaaactgtttggaatttcaagaaagttttaaacatatagacagtgaatttgaagaaaatacaaatttgaaaaatactttgaagaatctcaatgtctgtgaatctcagtcacttgattctggatcatgcagtgctctccaaaatgagtttgtgagtgagaagcttcctaaacaaagattaaacgctgaaaaagccaaattggtgaagcaggttcaggagaaagaagaccttcttcggaggctaaaactagtcaaaatgtatagatcaaagaatgatctgtctcagttacagttgttaataaagaagtggagaagctgtagccagctcttgctttatgagttgcagtcagctgtgtctgaagagaacaagaaactaagccttactcaattgatagaccactatgggttagatgataaattactacactataaacagaagtgaagaagaatttatagatgtttaattcctgcattttgctccagaatatctttgagaatgaccaacttatttaaagatatttaggcccttttttattttggcactg

SEQ ID NO: 366898 - DNA, 1689 bp, Homo Sapiens
  misc_feature (12)..(12): n is a, c, g, or t
  misc_feature (234)..(234): n is a, c, g, or t
  misc_feature (305)..(305): n is a, c, g, or t
acgaggcctagnggggatacatagagaaattttcggcttagggcgatattggccgggaggatgagattggcccaggcattcacgttagcgccacaacacccgacgctgaaagtcgagacaaaaaagcataaagaaaggcggcggcatttaacggcggcgagattggcgccggaaaaaagtgggggctcccctggggtgccccccaataactatatcatcggttacgggaaaaancaaatggtcccgtgcgtatgacgcccggtatatggaggtactatgtagtcacgagcgcgccaaggcatatntcgacacgaaaggatggatatcatggacacttgacagattgggggggtaagagacgggtaaagctttcgaatgggaggatcggggagataaatccgagctaataaaaggaggggacgcaagatatgggggtaagaaaaaacgcgcgggagagagttaggagcgccctacaaaaaaataaaggagagagcgcgtggcatggttgtttggaaacgatctcaaatcgctggcgcggtgaatagtatgatatattgtatcacaatgcgcaagataggtggaatgaccggaactataacagtaaagagtagaaaaagcgcaggtgcacacgggacaggtagaaatatctaactgtgtccccggtgcctatctcggcgtcagtgctgacatcgacggtaaacagtaagtgagcggcgtcatatacgacggttcgtcactgacacactgataaaacggatagtattagctccagcgtcggatcgtaacttgagttcctccattggcgcgagactcggacggaccgggtgaggacactattgtgtaggccagggacaaaccaaagtgggcattcggctaggtatagggaataaaaccaatagcgttaggccgtaacggaggctaagcgggatgtgcggcagggtgttaaaagcaggcttatggcggatggataatattagcggcaaggataaaatagggagtgggggagggccaaaaaggggaccgaaacagtgcgcgcccgaagaggcgggataagaaaaaaactgaattttggtattacctctctgttgcaacttgttcgataaggttgaatgcgggcgtgggtgcggggcggaagggaacccggcgtcgctgccaccccgtgcgccggcatctaactgctaagctcgccggccccgaggcgggcggggtttgggagcatactccgcacaaatctggtagtctccccttacgcggacgaggggaagtcaaagacccgccgccacgtacagcgcgggaaataccggcgcggcagtccagagagttgccagtgtgtcctctcgtcttctccgccagccctcgacgaccgcacccagccccgcgcccaacgccagggtcaggccggcccgcagcgcccgcatggccggggagcgacctagcggcgggcgacccgcgaggctcttaaaggagccgcgtcgcgggatccaacgagggcacagggctgctggggccgcggacgatagcgtgacctcccttccactcacaaacactgccaagggcttgggcctcggaacccagaagggagcagcagagcccaaccgggtgtccccggccctcgtgccgaattcgccacccaggcctcgcttcgtataaagtgtaacgaacgattagacgccgggcagagaaaatatg

SEQ ID NO: 366899 - DNA, 864 bp, Homo Sapiens
cttcgtttccgtctcggccgggcacccgagcgcatcccgccgaggccgggccgtttcaggaggaggcgccaactcgtcgcggcgccgggcccctgaccgtgcagtaaccgctacccaggaggcggagcggacaaggctccggcctgcgaggagccagtacaggctactctgtcatctttgaagatgttagatgtgggaaagtggccaattttttccctttgttctgaagaagaactacagttaattcgtcaggcttgtgtctttggcagtgctggcaatgaagttttatacactacagtaaatgatgagatttttgtgcttggcacaaactgctgtggctgttaggggttaggtgacgtccagagcaccattgaacctcggagactggattctttaaatggcaaaaaaatagcctgcctcagctatgggagtggtccacatattgtccttgcaacaacagaaggagaagtctttacctggggtcataatgcttatagccagctgggcaatgggacaactaatcatggtttagtgccctgtcatatctctactaatctgtcaaacaaacaagtcattgaagttgcctgtgggtcttaccattctttggtgctaacatctgatggagaggtatttgcctgggggttataataactctgggcaggtaggatctggatcaacagttaatcagcaatccctcgaagaagtcactggctgccctacaaaattacagctatctgtgacccatagcattgtgggccagatgtggctgcatggcagctactacaccccgggggaaggcctaagtccgggggtaacaacggaaaccgggcggccggactccggaaacgtggcgcccagcagccc

SEQ ID NO: 366900 - DNA, 825 bp, Homo Sapiens
cccaggcaaatacctctccatcagatgttagcaccaaagaatggtaagacccacaggcaacttcaatgacttgtttgtttgacagattagttagagatatgacagggcactaaaccatgattagttgtcccattgcccagctggctataagcattatgaccccaggtaaagacttctccttctgttgttgcaaggacaatatgtggaccactcccatagctgaggcaggctatttttttgccatttaaagaatccagtctccgaggttcaatggtgctctggacgtcacctaaccccaaacagccacagcagtttgtgccaagcacaaaaatctcatcatttactgtagtgtataaaacttcattgccagcactgccaaagacacaagcctgacgaattaactgtagttcttcttcagaacaaagggaaaaaattggccactttcccacatctaacatcttcaaagatgacagagtagcctgtactggcttgccactgtctccagagaaaagaggaagttcttcttccatatggactcagtcctgggcagtccctttgtcaacttttctctgggattggaaagttccaaatcacggggaagagcggacatcaattctcagctccacagaagaatatatgatttgctaagctgattgttttaaatttctggaacccagtattcagtcatctttaatcctgttccttttagatccttgtaaagttgtcttctagagcaaagttaatgtgactcctcgcaggccggagcattgtccgctccgcctcctgggtagcggttactgcacggtcaggggcccggcgcccgct

SEQ ID NO: 366901 - DNA, 1194 bp, Homo Sapiens
  misc_feature (979)..(979): n is a, c, g, or t
  misc_feature (1110)..(1110): n is a, c, g, or t
  misc_feature (1123)..(1123): n is a, c, g, or t
tacgaggagaagacccagaagcaactacctctgaaattcagcaatacgcttgaactgaagttgaaaaaggaaaactggggcccctggagtgcggggggctcccggcaagtgcagttccaccaagggtttggggacctggctgtcctcaagcccagtaacaaagtgctgcaggtcagcatcggacctggactgcccaagaactcccgtcctaccagaaggaacactacccaaaatacaggttattccagtgggactcaaaatgccaactacccagtgagagctgcccctcctcccccaggataccatcagaacggagtcatcagaaaccagtatgtgccatatccccatgctcctggaagccagaggtccaatcagaaaagcctgtacacctccatggcccgcccgcccttgcctcggcagcagtctaccagttcagaccgagtgtcacagacgccagagagcctggatttcctcaaggtcccggaccagggagctgcaggggtcaggagacaaacaaccagtcggcctcccccagcagggggcagacccaagccccagcccaagcccaagcctcaggtgccacagttgcaaggctatgtatgccttatgacgctcaggacacagacgaactcagctttaatgccaatgacattattgatattatcaaagaagatccttctggctggtggacgggtcgactacgaggcaagcagggcctgttccccaacaactatgtgaccaagatctgaggtgcccgtgactctgacacatggggcagaggagctccaggcacagaccagggaaggggatatttaggggctccccttacaatccacaatgagcaattgcttctccaaggcctggagctattctggtaccttccccatggaggacactgaaaaggctgggttggggacagggagtatcacctccatagtgatcctaaaaggtagcctcttcataggaacccaggaggacnaaaccaccatgcattaagatttatttattgtatttaaacctggtgagaggacaagtgaggtctgctcagaccttgtaggcttctatcaaaacagcaccctgcttgctcacaggcctagagaatggctgtangtggccgctgacnagtgcctttagttgaagagcacatttctttcatctcctcttggtctaaaccctgatagaacacatttctcc

SEQ ID NO: 366902 - DNA, 1173 bp, Homo Sapiens
ggaattcccgggatggcctctgtcccgggtcccgccccccagcactccggaacagcgcgctcgcagcgggaggtcgcgaagcctgggactgtgtctgtcgcccatggccgccgcgctgctcgcccgggcctcgggccctgcccgcagagctctctgtcctagggcctggcggcagttacacaccatctaccagtctgtggaactgcccgagacacaccagatgttgctccagacatgccgggactttgccgagaaggagttgtttcccattgcagcccaggtggataaggaacatctcttcccagcggctcaggtgaagaagatgggcgggcttgggcttctggccatggacgtgcccgaggagcttggcggtgctggcctcgattacctggcctacgccatcgccatggaggagatcagccgtggctgcgcctccaccggagtcatcatgagtgtcaacaactctctctacctggggcccatcttgaagtttggctccaaggagcagaagcaggcgtgggtcacgcctttcaccagtggtgacaaaattggctgctttgccctcagcgaaccagggaacggcagtgatgcaggagctgcgtccaccaccgcccgggccgagggcgactcatgggttctgaatggaaccaaagcctggatcaccaatgcctgggaggcttcggctgccgtggtctttgccagcacggacagagccctgcaaaacaagggcatcagtgccttcctggtccccatgccaacgcctgggctcacgttggggaagaaagaagacaagctgggcatccggggctcatccacgggcaacctcatctttgaggactgtcgcatccccaaggacagcatcctggggggagccagggatgggcttcaagatagccatgcaaaccctggacatgggccgcatcggcatcgcctcccaggcccctgggccattgcccagaaccgccctcgaatggggctgggaaactacccctgagaaacccaatgggccttcggggcggccccctcaccaagctcccagggccactcaggttacaagttggccaacaatttgtccctggcgccccgggaagaaggtcacccgcgcgtctgaactctggcccggccatccccttgctctgacacgattaacaaatagagcccctttctcgacct

SEQ ID NO: 366903 - DNA, 1161 bp, Homo Sapiens
gaagatggacccggcgccctcgctgggctgcagcctcaaagatgtgaagtggagctcggtggccgtgccgctcgacctcctggtcagcacttaccggctgccccagatcgcgcgcctggacaacggatgagtgcgtagaagggctgcgggaaaatgactatctgctgattcattcctgccgccagatggaccaccatcactgaccacagcttggaggagggtcactatgtcattgggccaaagatagagattccgggtacattatgcagggcaattcaagctgctggaacaagaccgagatataaaggagccagtgcaatatttcaacagtgtggaggaggtggctaaggcatttcctgaacgcgtgtacgtcatggaggatatcacattcaacgtgaaggttgcttcaggtgaatgcaatgaagacactgaagtttacaacatcaccctgtgtactggggatgaactcactctaatggggcaggcagaaatcctttatgcaaagacattcaaggaaaagtcacgactcaacacaatcttcaaaaagattgggaagcgtcaattccatcagcaagctgggaaaacggcaaaatgcccgtgacctcattagttatgaatcaccggagccaacgacaagcattagccttccattccagtgcaagggcagatttagcacccgaagtcccctggaacttcagatgcaagagggcgaacacaccatccgcaacattgtggagaaaaccaggcttcctgtgaatgtgactgtgccaagccctccaccgagaaacccatacgacctccacttcatccgtgaggggcaccgctataagtttgtgaacatccagaccaagacggtggtggtttgctgtgtgctgcggaacaacaaagatcctccccatgcactttcctttgcacttgactggtccccaagttcagcctcccagaaacacctggtgaagggagagagctggcccgaaacctggtccatcaactggctaggtatcgtgcaagaacagttcgacatcggatgagtattcacgggctgtccgtgatgtgacaaacgaccgggaatgaagaatgcaaaaagcccccaagaaggggcggtgctctgggcacaaacacggtgccaattcgctcagtacgcccggaaggagttcaacg

SEQ ID NO: 366904 - DNA, 717 bp, Homo Sapiens
  misc_feature (677)..(677): n is a, c, g, or t
aggccaggtacaggaggatgccagtgaccatccagagggagaccacagaggccaaagcccccagagtctctgaacggtgccagccaaaggtcatggtgcgggtggctggacgggtggagagccagagggagaagaggctgcccatcatgctgcccacatccgccagcaagtgggctgcatcggtcatgatggccaggctgtgtgccagatacccgccgaccacctccccagccatgaagacaaagcaaacggcacaggcagcatatagctgcctccgtgcatgcagcctctcaggggtaaggcccggcggcggaagggggtccctgtggcagtggtggaagggcatctccacaggtttggactcctcagggaggggctctgagggctctgtgaagagactcttcaaacgcaggctgcctccggcgccaccgcggtcccgggggctcaccaggcgagtggtctccaagcccccagcggctggagagggctccatgttcccggtgccccgaccgtctaggccccaccgaggaagagagaggccgggccggccccgcgccaagtccgagcagcccgccgacccccgggatccccgcagggcggcggggccaccagagtggagcgaactgcagcgactgtggcgcgcggatccagggaattccggagccggcaccacgccnggtgtgtcggagatatggatgggggaagagaggggagaag

SEQ ID NO: 366905 - DNA, 1190 bp, Homo Sapiens
ctccactctgtgtggccccgccgccctgcgtgggatcccggtgggtcgtgcgggctgctcgtgacttggcgctggtggcctggcccggcctctctcttcctcgtgtggtggcctagacggtcggtggcaccgggaacatggagccctctccagccgctggggtgcttggagaccactcgcctggtgagcccccgggaccgcggtggcgccggaggcagcctgcgtttgaagagtctcttcacagagccctcagagcccctccctgaggagtccaaacctgtggagatgcccttccaccactgccacagggacccccttccgccgccgggccttacccctgagaggctgcatgcacggaggcagctatatgctgcctgtgccgtttagctttgtcttcatggctggggaggtggtcggcgggtatctggcacacagacctggccatcatgaccgatgcagcccacttgctggcggatgtgggcagcatgatgggcagcctcttctccctctggctctccacaccgtccagaccacccgaaccatgaccttaggctggcaccgttcagaaatggcctttgtgctgcaccaggctgggccaccacacagccacgggactagggggagcagagtatgcaccgctggaggacggggcctgaaagagcccctgcccctggggaacaccagcgtccgggcggcatttgtgcacgtgctgggggacctcctgcagagcctttggggcactggctgcctccatcctcatctacttcaagcctcaatacaaggcagccgaccccatcagcaccttcctcttctccatctgtgcccttggatccaccgctcccaccctccgagacgttcttcgaatcctcatggaaggtaccccccgcaatgtggggttccaacctgtgcgggatacgctgttgtcggtgccaagagtccggggcacccctgagctgcacctgggggccccttacctcacttaccatgttggcctctgcacacctgggccatcgactccacccctgacccctgaaaaccctccctgggctggaaaccctcatcccgggtttctaatccccgggtttggattcttcccagctggccaccttggccaggtctaagccaattattccaccccggaaaatgggcccccatgggcctgcgcccttgcccagggaaaccccccccaa

SEQ ID NO: 366906 - DNA, 965 bp, Homo Sapiens
gctggaccggtccggaattctccggatgcagagcggccggctgggatcttacataggaggggtggatttgcaaggcctaggaagagctggggagtggtttccccgcggaatcggcctccctgccgctcctgctttgtactgtgacgctcagcctgtgatgactggtgtggaatccgctgagccaccttggcctaaggagactttaccactctgagattgtaaatctgtaaaatagagatgtaggattagcccatacggtagttgtggtaaatactgtgagacaataaggggcctgggacacagcattcaaatgggaataatgaaggtcaagactgtgattcctgtatctttgacgctctcggtataagcaccgtcgtgggcacagggcagtggcctttatgcaggagtttaagagggaatgaaggaatgaatgggcaaactctggagttcccaagtattctctccaggagctgtttccattcttttcgtttccagcagattcaagaggcaattgttggaatgtaaaaagagcacgggacttggagtcaaatacttaagtctaccatcaagtagttgttaagaattaaacaacaatttttgtgtacccagttaaatgtgggctgcttaggaatgatgactgtgtcttaatgatctctgtatacttagtgacatgtagaatcattgtgcctgacacatagtatgtactcacggaaaaaatgggaaaatgtgggttttagcatttaaaggccgggagaaagggtcttacaaaattacaagcccctgccaggaagcctaattaagggaaaacgaaggagaaaaagggtttttagtctggtgccccgaaatgtaatttacacccggtttggagccccaaaaagccaaaaacgttaccaaccccccggggtttttccggtagcccatgattttttgggcttttcccgcccagaatttttaggggaggctgc

SEQ ID NO: 366907 - DNA, 1164 bp, Homo Sapiens
  misc_feature (1125)..(1125): n is a, c, g, or t
  misc_feature (1140)..(1140): n is a, c, g, or t
  misc_feature (1152)..(1152): n is a, c, g, or t
agcgggccaggcagcgtgggacgctacggcggatatggctgcagagcggccggctgggatcttagataggaggggtggatttgcaaggcctagaatagctggggagtggtttccccgcggaatcggcctccctgccgctcctgctttgtactgtgacgctcagcctgtgatgactggtgtggaatccgctgagccaccttggcctaaggagactttaccactctgagattgtaaatctgtaaaatagagatgtaggattagcccatacggtagttgtggtaaatactgtgagacaataaggggcctgggacacagcattcaaatgggaataatgaaggtcaagactgtgattcctgtatctttgacgctctcggtataagcaccgtcgtgggcacagggcagtggcctttatgcaggagtttaagagggaatgaaggaatgaatgggcaaactctggagttcccaagtattctctccaggagctgtttccattcttttcgtttccagcaggttggtaaattcattaatttattcattgatctaattaaaatatactaagtgcccctcacctgtgctaggccaatgtgatacaatgagcagaacagtcatgggccctccctgggaagccctcactagcccaaggactccttgtagacatttaagtgtccacaggctctggagttccaaccttgagtgcaatttagcagctgtggaccttgggcaagtcattacatctaagcctgttttctcttctgcaaaatggttaaggattcaataagataaaactgtaggcaatgaaaaccggtacctggtaacagtaggtgctgaagaagtgttagcttattaattttggcttaaatttactctctctgctctaatgtgatgaaaagattcaagaggcaattgttggaatgtaaaaagagcacgggacttggagtcaaatacttaagtctaccatcaagtagttgttaagaattaaacaacaatttttgtgtacccagttaaatgtggggctgcttagggaatgatgactgtgtctttaatgatctctgtattcttaggtgacatgtaggaatcattgtgccctgacacataggtatgtactcagggaaaggaattggaaangtgggtttttagccnttgaagggcccnggagagaggggt

SEQ ID NO: 366908 - DNA, 724 bp, Homo Sapiens
cccagcccctgctcctgcccaggctcgcctgcccagcgcctcatcagcctctgccttgtcccactgaggtccaggtagctcggggcaggggtggggcagtccagtgttggggactgtctacgtatgtgcaagtatatcccatggcatgtgccccgcaggggcctagagggtgggggccagggtatttgcattcgtacattgtgtcatcaagcattccttgagcgcctactgggcatccggcctgtgctgggcatgggtggtgacattggcagaaatggccactggaaaggggagcgatgagctgtggaggaagccctggtggtaccagaggccagaatggtgggaaagacagacccagataatgctgggaagtgtggctacaccgtggcttggtcatagggtgagtgtaaacacccacaggacactgggggctgtcaccctgctccggcagtcctgctaagagtgtcagggccgtctccattttatggttgaggaaactgaggtctagagaggtcaagattacttgcccagaatcactcaggcagctagtgatagaggtggggccaagcccaggctgaccgactgcagaccacgtgctcttccctggccaaccaactcctaacatccccacgcttggggcttccctgctcagtgttactgtcattctgggaggccttggggccctcagaccttgagacaccctgattctgctgcatgccaaggc

SEQ ID NO: 366909 - DNA, 1135 bp, Homo Sapiens
  misc_feature (83)..(151): n is a, c, g, or t
gaagggggggaaaataagggcggcggacgtgtgagcggggaaggaggagaggtgggccgggacgatgggggtgggattgtgannnnnnnnnnnnnnnnnnnnnnnnnnnnnnnnnnnnnnnnnnnnnnnnnnnnnnnnnnnnnnnnnnnnntgtggctggcggggaattcggtgaaggtatcccgtgtgttcaccggtgtaaggacccttgcttggcgggggttgtgggaagggccagttcaggggcgccgttgaaaggtgttgaaaaaacccccctccaggttggagtggacttttccgggccatcccataggaggtccggtcccccccaagaaaattgctccgtcccggaaaacggttgtgtctgcatctgcaaccggatcttgatgaggtccacgggccctcccagcccgacagagaccacgccggccaccatgctggccaggagcaggtctgacagcgtgcggggaggactgccctctggctccccgcagcggtgctggctgaggaaccgctgcgtgttactgaagaccccaaacaccacggagttgtagacggcaatgctggcgagggggaaggacatgcccttgaagaagccgaacatactctccctcctgtacaccacgcggatgcagctgagggtgtttccgtagccaacgccagcctgcaggcgagtcttgactgtgtccagagggtggccgacgatgacactggctgcacctccgatccagcccgccgcaaagtcttccagctggaagcttcccatggccggcgctcggtctcgccctcccggagccggggcagtgcccacttagagtcagtggggcatggcccgcgggcgcgagcgcgccgcaagaccgaagtcggagtctcgagcacgccgcaggtcctactccaaacccagtcccccagtcaccggctgcgcggactgccgcgctcacctctccaagtgccggagggcggctgacatcacgcccccagtggaccttaataggcacagcactcggggcactgacggtggagtagaaggcagtagtccctggcacaaagatgcaagggtcatcaagcgaaattctattagtgctgggtgatgcggttgtcctcaccccgtgtttgaaatattccggcgcggccc

SEQ ID NO: 366910 - DNA, 927 bp, Homo Sapiens
cccacgtcctctccttctcgccacttattatttattcgttttcccaaagaagcgactagggacccaagtttaaaaattcctccccccacccaatgcgagacgtggccagatcccatccaacacacggtttaattttcatggggctctgggatcaaaagaacagaaacagcaacaacaaaagcccagccgctgtctgattttaagctggcaaagtgggaaaaataaagtgttgagtaaacagaccaagttggaaacttttcagcattacctaagaagcaaaggctcaattttggctgcttcattcttatctcttctgccacagttctaacgtgcctgatctactgagaccaaggatgaccaatgactcagaagggaaaatgggatttaaacacccaaagatcatggggaatttcagaggtcatgccctccctggaaccttcttttttattattggtctttggtggtgtacaaagagtattctgaagtatatctgcaaaaagcaaaagcgaacctgctatcttggttccaaaacattattctatcgattggaaatttcggagggaattacaatagttggcatggctttaactggcatggctggggagcagtttattcctggagggccccatctgatgttatatgactataaacaaggtcactggaatcaactcctgggctggcatcatttcaccatgtatttcttctttgggctgttgggtgtggcagatatcttatgtttcaccatcagttcacttcctgtgtccttaaccaagttaatgttgtcaaatgccttatttgtggaggcctttatcttctacaacacactcatggcccgggaaaatgctggacatctttgtgcaccagctgctggtttggcgtctttctgacaaggccttcgttgcttcctagagttcctgtcggaacatg

SEQ ID NO: 366911 - DNA, 1065 bp, Homo Sapiens
cggtccggaattcccgggatgtcagccgagcacgtcccccacgtcctctccttctcgccacttattatttattcgttttcccaaagaagcgactagggacccaagtttaaaaattcctccccccacccaatgcgagacgtggccagatcccatccaacacacggtttaattttcatggggctctgggatcaaaagaacagaaacagcaacaacaaaagcccagccgctgtctgattttaagctggcaaagtgggaaaaataaagtgttgagtaaacagaccaagttggatcatggggaatttcagaggtcatgccctccctggaaccttcttttttattattggtctttggtggtgtacaaagagtattctgaagtatatctgcaaaaagcaaaagcgaacctgctatcttggttccaaaacattattctatcgattggaaattttggagggaattacaatagttggcatggctttaactggcatggctggggagcagtttattcctggagggccccatctgatgttatatgactataaacaaggtcactggaatcaactcctgggctggcatcatttcaccatgtatttcttctttgggctgttgggtgtggcagatatcttatgtttcaccatcagttcacttcctgtgtccttaaccaagttaatgttgtcaaatgccttatttgtggaggcctttatcttctacaaccacactcatggccgggaaatgctggacatctttgtgcaccagctgctggttttggtcgtctttctgacaggcctcgttgccttcctagagttccttgttcggaacaatgtacttctggagctattgcggtcaagtctcattctgcttcaggggagctgggtctttcagatgggatttgtcctgtatccccccaggggaagtcctgcatggggatctgatggatcatgaaaaatatttttggttcccccccatatgccttttgggtggcattaccgcagagaacccattggtccatccgctggggaaaggaaattatggcttttcaattaaccccgggtgtgggttaaaaaactt

SEQ ID NO: 366912 - DNA, 797 bp, Homo Sapiens
ggttgtagcaagagggatggcttcggggaggaagtcctcaattccaggttcgccggagtgctctcgcgggctggcaggtcgttgtccgggctggaggcccgttctgcctgcttctagcaaggaggaccttggccctccagtgtggtcagtcgctcactcatgtcactgagcccgggtgcagttcatgcattcctcatcacaggttgctcccggtgaagccagggcagcatctccactccagcaccgtcaccgtccggtaggacactctgtaggtgggtctgatcagagtcctgtaacttacgaggttggcgcagggccccggccaccggcagctctggtacacgcgctggaccaccgtctccgagccattctgcacctggcaggacaccgtccgtgtcactgtgtgatggcaccagtgccggcggctcgcgtagccgctgccaggggagccggcgccgggctcggggtagccgtgctgctgcagagctgcggccgagaagggatagagaaagccagtggccagcgccgacccgcagaggcagcaacacgcccagggcaggagcagggccagcttcatcgtgcgcagcagcccgcggggacccggagtcccgggcacgaggaccggcaggagcgcaccggcgcccggaccgaacccgcagccccggccaggagcagagcgagaggagcggggcgagcgatcggagcccgggtgcgagctggaaatgtgtggggggtgcccacgcctctccggggccgccttttcaaattcggcgaggtgggctctaagccgccccgct

SEQ ID NO: 366913 - DNA, 1035 bp, Homo Sapiens
  misc_feature (17)..(17): n is a, c, g, or t
  misc_feature (57)..(96): n is a, c, g, or t
  misc_feature (205)..(259): n is a, c, g, or t
  misc_feature (365)..(365): n is a, c, g, or t
caaaatactaaaatgangagttaaggttcgttctcattacaaatcaagagttcagcnnnnnnnnnnnnnnnnnnnnnnnnnnnnnnnnnnnnnnnnaatctttagtggctttaaagaataatattgccatttgtctactttgcaaataaagataacagaacacctttaaaatatatgtatgtgtacatatgtgtgtgtagatatnnnnnnnnnnnnnnnnnnnnnnnnnnnnnnnnnnnnnnnnnnnnnnnnnnnnnnntgctttcccaagaggaaatgcatatgtaccttgatttaagcaaaactgataacagaaaattgaacttaatgaaagaaaaaagtctgggatatggttactcactttnacatagagtaagattttttaaaactaattttggcttagtagttaattttacaaaaatgaagagaaacaccctttaagtgtactcgtaatttaaaacacctttgaaatgtaattgtccaaatgtaatgctgctatgtatattatttgggttccagatttttccctttaaaattctcaaaacactcagtgtccttacaactgcagctaaaatggttaatcattctggcaagaaggtgacagtgtgtatattggaaaggcagacattcacatttgaaaatattttgcattattgttagctaaaatcaacctctccttgaatgtagatacaatatatggttttgcagtcaattctgaatggaaaaaaagaatcaagtctgaaatttatgtgaaatgtggcttcagatcatttgaacgatatgtagaaatctagatgaacatatcattagaggtgaaagcaaaatttgaaagcctaatgagatgaagcaacattatctctctctaatctgccaacaatattccctagattgtgttgccactgtattgattctgagtaattttggcttgtttatgcgtgatttaaatgcatgtggctgaatgcagtaatttttcaagttatttgagtagtaagagaatcccccccttttcactgtcctccccgaaatggacctttt

SEQ ID NO: 366914 - DNA, 938 bp, Homo Sapiens
cagactcggcttctgcctggaagaacttgtagtaattgatgcattccggagcgtacccactttgccaggccactgtccatggttcctgggccttgtagtagtttttcatcagcacgcagtgctttggaaagtccgaaatcactgatcttggcgtaatgttgggtaactagcaaacacgtttcttgcagccagatctctgtgcacaaattgctctcctccaagtacttcatgcccatggaaacctgatgaaccagttctatgatgttcttatccttgacatgtctgttcttgctgcaaatacttattgaggggaccaagttctgccatctccataacccagcatccaggactcggcctcgcatatcccgatcatccgcacgatgtacgggttgtccagctgctgcatgaccatttgcttctgctaataactcatctttaagagcggggtcattggcctcgtttttcagtattttcacagccacggttttcacaacttttttcatttggtagtagccctttttcacagttccaaaattaccagagcccagttctttgtcttccagcgtcagcagctttcggtccaggtaaacctccttgggcctgatctcctcggggtccgcgtaggggctctcgtacacctctgtgtccatgggtagggcttctctctgggggcctttgtctgcagcccagggtgcaagttctggctcatacggattgaatgacacagtactctcttgccggttcccttgggcaggggaggactttctgtggccaggctttgggaaggagtatgatttgattcttgagattattccacccgctgaccaagtcgcaggatgggaacctggaagttgtggacggcctccaaaattaacatttccctgtgtgccgattttttgacatgggacagtaagaactcttaacaaaccatctgcttt

SEQ ID NO: 366915 - DNA, 1140 bp, Homo Sapiens
aattcaattaaaaatggttcttggtaagacatagccctcactgtggcccctgcttgttgatctaattctattgttcttttctctgttgttctgtgtatacaagtcatgagtcaccagaatgggcctgtgggagctgagagagaaagagggaaaataagttcttgattaaaaagtagcacatcagaggtcaacaaccatcacagtttagcttcagttgccaaagttgtctccagggatattccaaatttagaaaaccaataaagaaagacatggggatgataagcactgaatgctggatagctgttacctctgggtgacaaagcaatgcattcagggaaggacacacatgggattcaaagatatcagtaaagttttatttctgaggcttactggtggatacaccaatgttagcaacaaccacacagttcagcttcagttgctgaagcataggctccagaacccacaggccttaagaaaatgctgtgcagttcatcctgattcctctcctctatttaacagctttatacacacttagatgagacctttgagaggtaggggagaacgctaggggaggctactatagtaaggataataaagttgaataaattaacccagaagcattggaattaaacaccagcctagtaagccaggctaagaggaggaggctgatataaacaagaaaacattgttagaacttattatgcaaaatgttaccttgaggttgcaatctgattagttttttgcaattcatctcttgcttcctctttttgtctccagctttcctctcttcataggagggggtggggcttcttattccaggacccctgttcccctaagcagcctaaaactaggcagatctattagccaggaccgtctctgtcaataatggctgctcttccagtgcatttttcagtgtgtaagatgtaattctaaacatatgctgattcccacatgttagctcctattctaatgtaatgctcttgttgtggctgggaacatattgagtcccacaaatgagtacttgtggacaatggacctctttgggggaaggagccccaagggagaggagggaagagtgtttattccattaatgtgtatgtgtgtatctccaccataatttctgaagggactggaaacaag

SEQ ID NO: 366916 - DNA, 765 bp, Homo Sapiens
cgcggtaccaggagggaacgggacgggtcgggcttcgaggtcagctggtccgcagggaagcctttggcttcccaaccggcaatggagcggttgacgttgcctctcggcggcgcggcggcggtggacgagtacctggagtaccggagaattgttggtgaggatgatggagggaaactttttactcctgaagaatatgaagaatacaaaagaaaagttttacctctgcgcttacaaaacagattatttgtgagctggcggtcaccaacagggatggattgtaaacttgtgggcccagagacactgtgtttttgtacacataggtataaacaacataaaactgacttggaagcgattcctcagcagtgccccattgatctgccctgccaagtgactggctgccagtgcagggcttacctttatgtccccttgaatggtagccagcccattcgctgcaggtgcaaacactttgctgattcagcacagtgctgcgccgggctttacatgcaatacatgtttccaagtgtttcaggattccatagctgcttcacttgtgcttgttggtcagcctgcatatgcccatgacacagtagtggaaactaagcaagaaagattggctcaggaaaaaccagtgggacaggacattccttatgcagccatgggaggattaactggtttcagctcgctggcggaaggctacatgcggttagatgaccagtgggcattgtacgtacacagtacgtcaagtttcttcacttaaggagactg

SEQ ID NO: 366917 - DNA, 755 bp, Homo Sapiens
  misc_feature (687)..(687): n is a, c, g, or t
gggggtccgcagggaagcctatggcttccccaccggcaatggagcggttgacgttgcctctcggcggcgcggcggcggtggacgagtacctggagtaccggaggtataaacaacataaaactgacttggaagcgattcctcagcagtgccccattgatctgccctgccaagtgactggctgccagtgcagggcttacctttatgtccccttgaatggtagccagcccattcgctgcaggtgcaaacactttgctgatcagcacagtgctgcgcctggctttacatgcaatacatgttccaagtgttcaggattccatagctgcttcacttgtgcttgtggtcagcctgcatatgcccatgacacagtagtggaaactaagcaagaaagattggctcaggaaaaaccagtgggacaggacattccttatgcagccatgggaggattaactggtttcagctcgctggcggaaggctacatgcggttagatgacagtgggattgtaggtacaagtagtcaagtttcttcattaaggagacctgaagaggatgatatggctttctttgaaagacgataccaggaaaggatgaaaatggaaaaggctgctaagtggaaaggaaaagctccattgccatcagctacaaaaccttcatgaagactattggagaaaattaaaacatcatccaagnatcttttttcatgttttatttaaatggtaataatacagttttattttttcctgaaaattattttactt

SEQ ID NO: 366918 - DNA, 945 bp, Homo Sapiens
ctgtttataacagtgaataaaccaggaaaggatacttggatgaaggttttaattcgcccatagtcttcatgaaaggttgtgtacttgatggcaatggagcttttccttccacttagcagctttgccagttttcatccttcctggtatcgtctttcaaggaagccatatcatcctcttcaggtctccttaatgaagaaacttgactacttgtactacaatcccactgtcatctaaaccgcatgtagcttccgccagcgagctgaaaccagttaaatcctcccatggctgcaataaggaaatgtcctgtcccactggtttttcctgagccaatctttcttgcttagtttccactactgtgtcatgggcatatgcaggctgaccacaagcacaagtgaagcagctatggaatcctgaacacttggacatgtattgcatgtaaagccaggcgcagcactgtgctgatcagcaaagtgtttgcacctgcagcgaatgggctggctaccattcaaggggacataaaggtaagccctgcactggcagccagtcacttggggggcagatcaatggggcactgctgaggaatcgcttccaagtcagttttatgttgtttatacctatgtgtacaaaaacacagtgtctctgggcccacaagtttacaatccatccctgttggtgaccgccagctcacaaataatctgttttgtaagcgcagaggtaaaacttttcttttgtattcttcatattcttcaggagtaaaaagtttccctccatcatcctcaccaacaattctccggtactccaggtactcgtccaccgccgccgcgccgccgagaggcaacgtcaaccgctccattgccggtggggaagccaaaggcttccctgcggaccagctgacctcgaagcccgacccgtcccgttccctcctggtaccgcgccccctccgct

SEQ ID NO: 366919 - DNA, 913 bp, Homo Sapiens
gctggtcaaggcccgaagtcttgggatggagaaggaagccaacaggatccgacccggtgttttgtgacaaaggcaagacccccaggtctacttagagcaaagttagtagaggaggcagctaggcgtggctctcattccttcccacagaatggattataagtcgagcctgatccaggatgggaatcccatggagaacttggagaagcagctgatctgccctatctgcctggagatgtttaccaagccagtggtcatcttgccgtgccagcacaacctgtgccggaagtgtgccaatgacatcttccaggctgcaaatccctactggaccagccggggcagctcagtgtccatgtctggaggccgtttccgctgccccacctgccgccacgaggtgatcatggatcgtcacggagtgtacggcctgcagaggaacctgctggtggagaacatcatcgacatctacaaacaggagtgctccagtcggccgctgcagaagggcagtcaccccatgtgcaaggagcacgaagatgagaaaatcaacatctactgtctcacgtgtgaagtgcccacctgctccatgtgcaaggtgtttgggatccacaaggcctgcgaggtggccccattgcagagtgtcttccagggacaaaagactgaactgaataactgtatctccatgctggtggcggggaatgaccgtgtgcagaccatcatcactcagctggaggattcccgtcgagtgaccaaggagaaacagtcaccaggtacaaggaagagctgagccagaagtctgacacgttgtatgccatcctggatgagaagaaaagtgagttgctgccagggatcacgcaggagcggagaaaaagcttagttcatcgaggcctcatccagcagtacaggagcagtggacagtcac

SEQ ID NO: 366920 - DNA, 1324 bp, Homo Sapiens
gtagtttgtaagcccataaagtttgcttaatatggatgaccaggtatcatctccttgaagcacaaagcatcaaataaggtcttataaaagatcaatctgtgaccttcttcatttttaagttcttgataaattcataaagcttgagtctcaatttccagaaatggaggagccaaataattcagaatctcaagtgcgatttatgctttaccatgtacctgtccaatgtttcccaaaaccgtaagaacactggtctatccaaatgacgtttgtgatagctgagttctaatactgttacatcccatttctgaacatttggatccagacgaacttcatcatacttcagatggaaggctttaattttagcaaatatatcaactggtgatccatcaggcaaaagccatggccaacctttgaactgccatgcaggaccctgcacaaaaacggctacaacgcggtcccagtcttgaggcataagtttaaggggctggtctactactctataaggtactgtaacactaattgcagtgccccctggttgcatctggtcttgattcgtcgttgtattagagtttcattttctcgcttgacaaccttgtgttcttctgtgtcatctgatgggacaaatttcaggtcctgtagaaggtcttttgcattaagcatggttattaaagaggtggtagctgcaggaattatgataatgggtgttcgagatccgtttcttctgatttgggggaggtcttgcttgagaaactggtcttggtactggctgggctgcaggagtctgagtcttccgggcagatgcaccctccgttacagatttcagtgtcataccatggtaggttcccatagtgtcaattttgaagccttccgtttcttctttgtcctttgaatctttcctgatcgtatctgttataggcagctgggataggctgtttggtgcgcaaagtgggatccacaggtgctgcatttggggcaggtcgctgttcaggtgcacgcccttcttctctggcttttacagattgaagaattgcaaaaatgttcttggaaaaattctttcctgtgctttgtaagatagttgttcgtgtcctccatactctctctctgctgacaatatctcgggtcacatctacctcagcatccacaaaactcctctgtttaagggcagttatgtcatcatctagatcagtcttgatagtagatcttttcttagccataattttggctttgattgcagcaattttttccactgacatagcttcagacaaagacctaatctgttcagtctgtacaatcccttctttgtgaccctccaaacgggcagcca

SEQ ID NO: 366921 - DNA, 841 bp, Homo Sapiens
gggcaacaatctgccgggtatggcccggtaaccacaattcgttacaccagctgccctctccaccaccacgagccccaaaggtggggaaaagtctgcaagccaacctgcagaggaagaatagggtcgttaaggactggctttaggcaaaaagaagagacaaaaagaatgagggaggtctgggagtgagggaagtggtgggaagcagggaaagtccggtcaagccatgtgcaccaagacagagccccagcgcggccttgcagccaggcaccgggccgtccccaagggctgctctcagtccgctttcacttggagggcgaaagccacatttgcaaactgggaagtggagagtgggaggtgaggggaagcactagcaatgaatgaagaggattcttccgggaatcaggctgtttcaatctaaaacatccaagataagtggaaacactggggaggaaggtgatgaacagacggaggtgagccagagacacctcctgggcaagtcggccaggaggcgggaggcgtgggtcagagacactgcaggaactgggtgaggacaaggaggtgcgaggaaaggggttgggggatggtcccacaggcagccacacctgaggcgtgggaggcaggtaggagctgggggagggcggggagaagaggggtttctgtgtgtagatctgagtcctccctcacatcccagccgtgccacaagccgcatcggcatgaggccggctctcccttcttcactggtctcaaaagccacccaggcccaacgtcccggccagacagccgagcctgcctagcaacgctgaccggccgcccaggatggcccagacaccttctgtctcct

SEQ ID NO: 366922 - DNA, 1318 bp, Homo Sapiens
atgcgatggcggagtcgctgcccctggagatgctcacatatattctgagcttcctgcctctgtcagatcagaaagaggcctccctcgtgagttgggcttggtaccgtgctgcccagaatgcccttcgggagcaaccaggccttacctccctggacctcagtggctgctcagaactgactgatggggcgctcttggccgtgagccggggcctgcggcacctgcggcgcctgagcctggggaagctgcagcggctgacagatgcaggatgtacagctctgggtggcctgcaggagctgcagagcctcgacatggccgagggcgggaactggcccaggccctgggctgtatgcacggggctccatcccagctggcctccctcagcctggcccactgctcttcattgaagtcacgcccagagctggagcatcaggcctcaggtaccaaggacgcctgtccagagccacagggcccctccctgctcacgctgcgggccctgcaggagttggacctcacagcctgcagcaagctgactgatgccagtttagccaaggtgctccagtttctccagctgaggcagctgtcccttagcctgttgccagaactcacagacaacggcttggttgctgtggccaggggctgtcctagcctggagcacttggcgctgagtcactgcagccgactcagtgacaagggctgggcccaggcagccagctcctggccaaggctgcagcatctcaacctgtccagctgcagtcagctcatagagcagacactggatgctattgggcaggcgtgcaggcagctccgggtgttggatgtggccacgtgccctggcatcaacatggccgccgtcagacgcttccaagcccagctgccccaggtgtcctgtgtccagtcccgcttcgtgggaggggctgacctgaccctaacactctgaggccagaccctctaggactgggggtggggccaatcccagggcagcccagagggaacatcctgccacaccgccctggcagtagcctctttccagctacacgtcgctgccacaggcccctggaaatgctacctacgtgttgcccccacaggctcctgctctctggccaagccctgggtgggaggccaggcccccagcgggcagggtctggtgctgggaggagcagagcctctgcctcttgcctgccctcctctcagacctaaggccgggctccacctactcctgtgggactctcccagcaccctgtgtgcactgagcttcagcagctgagcctaggtctgtgctgtaaatcctaagattaaacattccagatagtaaaaaaaa

SEQ ID NO: 366923 - DNA, 819 bp, Homo Sapiens
aggcagtactcctaacggtttaaggtacgaggcctgggtggcggggatgcgatggcggagtcgctgcccctggagatgctcacatatattctgagcttcctgcctctgtcagatcagaaagaggcctccctcgtgagttgggcttggtaccgtgctgcccagaatgcccttcgggagaggctgtggctaccctgtgcttccagcaaccaggccttacctccctggacctcagtggctgctcagaactgactgatggggcgctcttggccgtgagccggggcctgcggcacctgcggcgcctgagcctggggaagctgcagcggctgacagatgcaggatgtacagctctgggtggcctgcaggagctgcagagcctcgacatggccgagggcgggaactggcccaggccctgggctgttattgcacggggctccatcccagctggcctccctcagcctggcccactgctcttcattgaaggtgctccagtttctccagctgaggcagctgtcccttagcctgttgccagaactcacagacaacggcttgggttgctgtggccagggctgtcctagcctggagcacttggcgctgagtcactgcagccgactcagtgacaagggctgggcccaggcagccagctcctggccaaggctgcagcatctcaacctgtccagctgcagtcagctcatagagcagacactggatgctattgggcaggcgtgcaggcagctccgggtgttggatgtggccacgtgccctggcatcaacatggccgcgtcagacgcttccaagcccagtgccccaggtgtcctgtgt

SEQ ID NO: 366924 - DNA, 655 bp, Homo Sapiens
ctacccaaggtgcgaaaaagaaagaaggccaaagggaagaaggtggtgccaacccttgcggtcttgaaaaagcaggagaccatgaaagtggtgaatcttccatttgagaaatttggcactggacaggacattttggcattggacagaacatccagcccaaaaggcacctcacttgctttgtcaaatggccccattatactaggttgcaacagcagagagccatcctctataagcagctagaagtgccttctgtgattaatcagttcaccagggccttggaccaccaaacagctgctcaatggggtaagctggctggcaagtacagaccacagacaaagcaagagaagcagcagagactgttggcctgggctgagaaaaaagcaaaggagacatccccactaagagatcacctgtccttttaacgggggttaacgctgtcaccaccttagtgaagaaacaagaaggatcagctggtgatgactgcacaggacagagatcccattgagttggttgtcttcctgcctgcctgtattgtaaactgagggttccttactgcattgtctaatggaaggcaagcttgagacatctaggattaaaaaaacaaacaaaggacaaacgaaacaacaactctttaagatattcttttaaaacttta

SEQ ID NO: 366925 - DNA, 958 bp, Homo Sapiens
  misc_feature (54)..(90): n is a, c, g, or t
cgaaaaagtgatagactcactatgggcgaccgggctctccgcggtggcggccgnnnnnnnnnnnnnnnnnnnnnnnnnnnnnnnnnnnnnatcaggccaaatcggccgagctcgaattcgtcgagagcggtctgctttgcaggcccaggctcaaggcaaattataagtagggaaccaatttgagggaaagacatgtgaacagagttaaggtaccacgtcctgggagcgaccagcagccccacctgaagtccgcatgcaactctgacaagctcaggtgcttgttttaaggaaaggggctactagagtcttaccaacagcgagcccaggtgggagatgaaacaggtactccccaaaataggtcatccgagggaggaaaactgatggagagcacaatgtgctctgagcgtttttaatgtttttaagcttttaaatgatttcttcaaggccgagcagcagcagcaaaggtgtggcttaaaggattaagggggtttctgctgacacctagaatgaagttactctattactaatcaagccgagaggaggcccactatgcccccgtttatcatcctttcccagttcctttttgctggtcacaaaacgatgctcatcaatcccacctaaagcaggaggccaggagcccagcctcttgtagaaacagcgagggtataactgccctcccgttctgcccccaagacgaaggaggactctcggaagccaagaaaggtttaagaagtctttctggatagagagcagtgcccaggcaggaagcctttcgccggcagagcggggtccaaggacgagctggagaggacaagaggcgcgatgggcctgctgcagggcctgctccgagatccggaagctgctgctggtcgtctgggtcccgctcccgcctgcgtgctctggccgtcctccgacccagcagcgaggcctcgtgtgcttacgtgctgatcgtcactgc

SEQ ID NO: 366926 - DNA, 1450 bp, Homo Sapiens
agcggggctgcggcggcggcagcggcggctccggcccctagatcagacattctctctcattacccggcgcgtgggaacgggtccacagccccttgtccgccctagaacccccatgggctgccgcccgccgccgcctcggctgccacccaggacacggcagagataagcgcaggaccagacggccaccatgtcaggagactacgaggatgacctctgccggcgggcactcatcctggtctcggacctctgtgcgcgggtccgagatgctgacaccaacgacaggtgccaggagttcaatgaccgaatccgaggctatccccggggtccagatgcagacatctccgtgagcctgctgtcggtcatcgtgacattctgtggcattgtccttctgggtgtctctctcttcgtgtcctggaagttgtgctgggtgcactggcgggacaagggaggctcggcagtgggcggtggccccctgcgcaaagacctaggccctggtgtcgggctggcaggcctggtaggcggaggcgggcaccacctggcggctggcctgggtggccatcctctgctgggcgtgccacaccaacatgcccatgccgcccaccatccaccctttgctgagctgctggagccaggcagcctggggggttctgacgagccctgagccctcctacttggacatggactcgtatccagaggctgcagcagcagcatgtggccgctggggtcaaaccgagccaaacatcccctgaggcatgccctctgaggggggagcaggctctgggttgctcctgctagcccccaggtggtggtgggcttgcccagtgcccagtacacatcatgcatggtcacaatgcctggcacccactacctagggtaacgccagcgcggtgggcccgcgaagcaacctacgggccaagcagaggtacttggagcctacagcaggagcggggaaccgcctaaggacggggagcacggaggcgagccaaggcttggactccatggggccttataaaccacgctagtagcgttgtgaagggcccggaggcgaagaagaggcacaaaaaccgaccattagggaggaaggactatagaaggcccaccagacaggccttggatactccaataggtgcgaagaaccaatagagccccacaatggtgcataggagccccagggggctggagaaaacgaccgcaaggacggtggaggggcacctccgcaaggcacaatcaatgcgcgtacgaaaggaagcgcaaacagagcaaacgtaggagaagctgaaatacacgccacgagtggattaggggcgcaaggaataaatacaaaagccacaaaccagacggcaacaatagaactgcgcgacataaacgcaactcatagaaagaggccatgaaacgcgaggcagacccagacgaaattagggccaaaagcagagcagccaggggcaaaacg

SEQ ID NO: 366927 - DNA, 1044 bp, Homo Sapiens
  misc_feature (144)..(145): n is a, c, g, or t
ggctttgtagttcttcctcaatgtccaggcccccctgagattgagggtaattccctcgtcaggagctgtctcccagaaacgtctgccttcaccggctcaacatctctgccctcagcttccaaaagcgcttgatctctccctcgnntgggccagtctctgaggagtccgcagacttcctgagttcactcaggtctggcttttccacaggcgggagaaaagctggccttctcttttcatcacagccccctctgggtcctgagcgttcacagctccttggttagacgcgtggtctccagacaactccagtcctgggctcgggaggtcacggagggtcatctctctaaccggtggagcctcttgagaagttggatttctggggagagagtgttctactgcccacatccgcaggaagcgctggatagccaccaatcccttctgcacaacgagctgaggagggaattccagagggcagtgtcttaggttcagtgctttcagcgtggttacgctccccagctccacaggtaacattttgataggatttctttctaaaagcaaagttttcaaatgctggtgagctccaatcccagaaggaagcgctttaattctattgtaccggaggtccagccaagtcaggttcggaagcaactgaaagaaatcttgaggaatcacacacagggcattcctttgcagatgcaattgttgaaggctggggattctaaagacctcctccaaacggcacagaccactttcactcaagtctaaaatcggtgaggaggaaaagatgatgcctccaacacccttgtgaacatctttggagggggtggcaggcaagctcctagtctgaccagcaccctcctccagatcagcagcagccacagagggaacttcgtaggagctgcttccctccatccgttctcttccagggacagcagctcatcctccttggtctggagtcacctgccgcgtccccgcccactgaagcgctggcgagccccgccgctgagagcagcagcccgacaatggaggccacccagccaacgcggt

SEQ ID NO: 366928 - DNA, 1175 bp, Homo Sapiens
  misc_feature (903)..(903): n is a, c, g, or t
  misc_feature (929)..(929): n is a, c, g, or t
  misc_feature (961)..(961): n is a, c, g, or t
  misc_feature (967)..(967): n is a, c, g, or t
  misc_feature (977)..(977): n is a, c, g, or t
  misc_feature (1059)..(1059): n is a, c, g, or t
  misc_feature (1108)..(1108): n is a, c, g, or t
  misc_feature (1159)..(1159): n is a, c, g, or t
gctgggtggcgaattcggcacgaggaccgcgttggctgggtggcctccattgtcgggctgctgctctcagctggcggggctcgccagcgcttcagtgggcggggacgcggcaggtgactccagaccaaggaggatgagctgctgtccctggaagagaacggatggagggaagcagctcctacgaagttccctctgtggctgctgctgatctggaggagggtgctggtcagactaggagcttgcctgccaccccctccaaagatgttcacaagggtgttggaggcatcatcttttcctcctcaccgattttagacttgagtgaaagtggtctgtgccgtttggaggaggtctttagaatccccagccttcaacaattgcatctgcaaaggaatgccctgtgtgtgattcctcaagatttctttcagttgcttccgaacctgacttggctggacctccggtacaatagaattaaagcgcttccttctgggattggagctcaccaggagcgtaaccacgctgaaagcactgaacctaagacactgccctctggaattccctcctcagctcgttgtgcagaagggattggtggctatccagcgcttcctgcggatgtgggcagtagaacactctctccccagaaatccaacttctcaagaggctccaccggttagagagatgaccctccgtgacctcccgagcccaggactggagttgtctggagaccacgcgtctaaaccagaaggagctgtgaagcgctcaggagccaagagggggctgtgatgaaagagaaggccagctttctcccgcctgtggaaaagccagacctgagtgaactcaggaagtctgcggactcctcagagaactggcccagcgaggaggagatcaagcgctttttggaagctngaggcagggagattgttgagcacgtnaaggcagacgttctgggagatcagctcttgangagggnattacctccnaatctcaaggcggccttgaacattgagaaagaactaccaaagccaagacacgttttcagaaggaagacagcctcctccaggngcatctttacccgacctttttgttcaccgttaccaaatgggcgatcccnagcaaaaagatttggaagaggagccgaggcggcgacgtttcccgagagttnccagggcgaaggcagg

SEQ ID NO: 366929 - DNA, 782 bp, Homo Sapiens
  misc_feature (260)..(260): n is a, c, g, or t
tttggagggaagaagagcactgaagatgcagtttgaagtcagtcatagtggagagggaagcctgcatggttctacagcacaccacagaaggaagggaggaacacaagcccaagccatagggaatcaaatccaggacggtctctctaggagagacagagagaaacttcacctatttgctttgagaaaaaactgccaatatgtttaacggtatctgcattggaaaggcaataaagtaaaaagaagaaaaatattaaaatccnatttggattttaaaatttttaaatgacagagttattcacatttgcttcttgctatttaggtctcataatagtgcttcacaaatgactgtgaatgtccttatatgtgtgcccatttaatctgtgtcaactcctccatttcacattaattacttgaaacttcagtgaggtagaaggaatttctgcagaatgttcagaacatacttgccactgctaggtagtcttggtagaaaaaataggaaaggaagtgtctagaaattgaatctgggccacacaccttttcttcccattcactgttttcccctaatagtctacactgtccagctcagagcataaacttcgcctttgagcacattctccatgtagtcacctgggctgtgtggaattaggtctttaccacttgacctcctcttccctaaggaccagtccttaaaagttgccatcattcgactggctgacatataattacagaatcagagacccatccacaccccatgtttaaattatcccagacatagaagactc

SEQ ID NO: 366930 - DNA, 710 bp, Homo Sapiens
ctgggtgacagagtgagactctgactccaaaaaaaagtgtctatttcgtattttctctttggcagctactgttgcttggacagtctttactcttccccttttattacgaaaaataccaccttgacaaaagagagcctgtcagatgggaacgggaacaccaggtccatcccttcccacggattctggtccctgaggtagctatccatcagtccttgcaaagtccacctgaaatgtgtccgcatcaccctcctgcatagttcaacacacaggggagccctctcacccagccttgagggccacatgcccatgtggctctcttggtgtatgtgacggtttcgcaatcagagatccacgtggagttctccatacattcctcttcgtttgggcacctgtggttacagaaggctagttttcaagttgcaggttttactgtaaagatttcaagaccctccagcatcatcagtatctgattgtgtgcgtttttttgaaacttcaattccattctcttctaacttcctctttgcacagtcctggcatgcattacccaataatgtggtgctgtccacgcgatcagcatctgggctttgctgtttgcagatctgagtggcaaggtcttgcacatatcctggaaagtggtcaaaacagtccccgtaggatacaactttgattccgtgcagaagcatatctgcctgatgcttaaagaaatggtc

SEQ ID NO: 366931 - DNA, 802 bp, Homo Sapiens
ccccaatcatgggattcatacaagatgactgatgggggcaagggaagactcaccttaaccagcattgtaaccaatctgtcatgttgaaatcgtgagagctccatggaagaaaggagatgctaagtagcgcttcaaagcttcagaccactaccatacacagcaccatttcaaatagaagcagtagccaacactgctcactttgatatggttcaaggatgctgacatcgatatttatctgctcattcatccaggaagaaggggacatcagttactactgtactttgattgtgttcaactcaatcaccatgttataaaaatagcaagctgccataataaaaaataaggccccccaacccagcacccagttatcttcagttcctttacctcccaagcctacaaatgccataaccatatccgaagaacataagggagcaaaaaaaccgcatctgatgtagtagctgggaccatcacactgttcaggctgagctattcctctgctgtgttattttccttatatttttggtgtttcacctaatcataaggatttttaggtctaaattatatgcactcaaaaaaatgggtgcatatatttatatataaattctgactgaaaatgcatggccatcaaccaagcacatgttatatagtaggtacaagcttgcaaagcctcgttttcactggtacagcagctgtgtgtcagtgtaaattgctcctatgtcccttgtacatctccaagctctgaacaggataatgtcacaggccattttgcccctttggctgccagcattatctgacttaattc

SEQ ID NO: 366932 - DNA, 778 bp, Homo Sapiens
  misc_feature (51)..(64): n is a, c, g, or t
  misc_feature (229)..(265): n is a, c, g, or t
ttttaatgcaaatacatacattcctgaaagacggggaattaaattactaannnnnnnnnnnnnnaaatgatgacagtggtcccagaactgggaaaagtggtagggatttctaaactcaagcagattcgcaagtgctgtgcgcttgtcagaccatcagaccagggccaaccaatcagaaggcaacttactgtataaattatgcagagttattttcctatatctcacagtnnnnnnnnnnnnnnnnnnnnnnnnnnnnnnnnnnnnncgagttgacctcggtcacaaaagcagttttactatcgaatcaatcgctgttattttttttaatgtaattggtacatcttttttaaatctgtacattggggctgtctgtatgtttttatagctgggtttttaaaaagcataatatgcctatagctgaaaaggaaacagggctgtttaagtcactgacttatgagaaagcaaagcacgggtacagttatttaacaggcatacacaagcagggaaaagataatccatttagatctttaaggcttgggaaatgcgtgtaacagtactggcaataatcacagctctgggaaaaacaacgaaactttccctgtggggagaggagggattttcctgctctatataagcaacatatttttagacattaaaatatatataattttgcaggtaattgttgacttttttaactatattaagtgttaagctgacaactgtcaaagaagaccatgttgtaaaataatttgactaaataaatggttccttctctcag

SEQ ID NO: 366933 - DNA, 877 bp, Homo Sapiens
  misc_feature (679)..(687): n is a, c, g, or t
gttaattcttaagcaagaaactttttttgatgaaaacaagtcagatctacacagtcacacaattattttttgttgtgtcactacattgtgcaattgatattgcctgctttgagcagtttggtcaacttaccaacttccccccaaaaaagggaacataaaagagcccatctttgtcagtttacaccaatagtttcttgttaatccttctttcctggatatataaggctggtggtaacttttgaattatatggttgatgtggaaaattggcagtgtaacatttctagatacttttcattacctttttattctggtatataggctaaccactttaaagctattcttatgctgtaacagttagcatggcttcacactgtttgtgtagccaagaggacagaattacatgaatgacagtgcccagagtgacagctgtatattgctcagagcttttatttcttatacctagaataaatataaaatgggggaaaaatgtgacagacaagcagtttttcattgcacacatattcttcacatttaatgtttgatagttcaatttcttgagctgaagaatatcaaagtatcgataatacgaattttaaaatattaaaaccaatacacaaaattttcctatgtcagaatgtggtggagcataatagatcgtattcggtgtgcttgcgatcnnnnnnnnnccatagaatttattaagtgaagtttctaaaactttgcttctccctgatcccggtgaagtgtacatcataagaatccatagtactttgaagtaccattgcaccaagatgtctgactgaattcatagtcaccctcttcattctgaacgaaaaattgtcgagttttttccatatcctaactctgtgtgatcca

SEQ ID NO: 366934 - DNA, 1031 bp, Homo Sapiens
  misc_feature (863)..(863): n is a, c, g, or t
ggtccggaattctcgggatcggccatcgtccccacctccacctgggccgcccggcaggcaggcgacggaggcccgggagccatgggtgactggggcttcctggagaagttgctggaccaggtccaggagcactcgaccgtggtgggtaagatctggctgacggtgctcttcatcttccgcatcctcatcctgggcctggccggcgagtcagtgtggggtgacgagcaatcagatttcgagtgtaacacggcccagccaggctgcaccaacgtctgctatgaccaggccttccccatctcccacatccgctactgggtgctgcagttcctcttcgtcagcacacccaccctggtctacctgggccatgtcatttacctgtctcggcgagaagagcggctgcggcagaaggagggggagctgcgggcactgccggccaaggacccacaggtggagcgggcgctggcggccgtagagcgtcagatggccaagatctcggtggcagaagatggtcgcctgcgcatccgcggagcactgatgggcacctatgtcgccagtgtgctctgcaagagtgtgctagaggcaggcttcctctatggccagtggcgcctgtacggctggaccatggagcccgtgtttgtgtgccagcgagcaccctgcccctacctcgtggactgctttgtctctcgccccacggagaagaccatcttcatcatcttcatgttggtggttggactcatctccctggtgcttaacctgctggagttggtgcacctgctgtgtcgctgctcagccggggggatgagggcacggcaaggccaagacgcacccccgacccagggcacctcctcagacccttacacggnacaggtctcttcttacctccccggggggccaggggccctcatccccaccatggcccacctacaatgggctctcattcccgggaacaaaaactgggcccaccggaccccccaaagaaaaaggctgccgtcctttcaaagccccctctctttctgggacccacccccctt

SEQ ID NO: 366935 - DNA, 563 bp, Homo Sapiens
cacgccgcccctcctttccctttccgctctctccgcctccggaagcgcgggcgcgcggcgccgggagcccgttcaggaccgcgggagtgcgccagcgccgcgcgtggggctgtggtggccgcggctctcaggtgaggggcgcgcgagcggctcctggctccctgctcgcggggctgcccgcctacgctcctttccgttcgcatccgtctccccgctccggagcccaggcggcggcgagtactcgggatatatttttgccatcatggatcagtttggagatatattagaaggtgaagtggaccattctttctttgacagtgactttgaagaaggaaagaaatgtgaaactaactcagtttttgacaagcaaaatgatgacccaaaggaaagaatagataaagatacaaaaaatgtaaattcgaacactggaatgcaaacaacagaaaattatcttactgagaagggaaactgacaagaaacgtgaaatttcccccagaacaccccgtagagaatgatgttacacaaactgtaagttctttctcattgccagcctcttcaagatc

SEQ ID NO: 366936 - DNA, 1048 bp, Homo Sapiens
  misc_feature (610)..(706): n is a, c, g, or t
gaaacgtcagtaatttcccccctctaaccttgagtgtccaagtgtttcttcctttcttttatgtagaagcactggatttattgagtgaataaacttaatatagctgccagccataactttatattagaatagttggcttgcctcagtgcttggaaataggggtggagtcctcaaatgtccccccacatccaagtcaacagttcatctcttctctctaccaaaagcttgaacgtctctcagcatttttggaagcataaggaaaggttcagaaattagaatacacattccaaaagcacttattcagcacttgctatgtgtattgcttgctatttgcactggagagaaacaagaaaagtaaaactaagagaacttagcatctgattgactgttccctttcttttatcccctatacgtcaaaggtacctaaagcttggaatttatgttatttcaaggatattggttccatcaaatacataaggaagatttgtggaagaaaaagcgatgttgttttgaacattgagagtttgaagttccacctatgggggcattcagattcagcattcccttcaggattggtgcttgggagatagattgagtcaatcaatttacnnnnnnnnnnnnnnnnnnnnnnnnnnnnnnnnnnnnnnnnnnnnnnnnnnnnnnnnnnnnnnnnnnnnnnnnnnnnnnnnnnnnnnnnnnnnnnnnngcgaaccaagacgagaccaaacaggcagacagtggaggcagtcgacggaccaacacactaccaacacactggaagggcccgacagaactagtacaccaaccccccgcgttgatttgaggcagcacgggccgctcactaccatcgcaagaaataccatcacaaacaacccaggcgcggcgcgtctcagcaaccaacacgacggcgaggacagaagcaccaaaacgcccggactcagcgtattgaggcgcagacgcacccaacagtctggtggggaggaactgcacgtagagacagcacaaccaaccgacttgacaaagaatagagcccagcgaagatcatata

SEQ ID NO: 366937 - DNA, 1090 bp, Homo Sapiens
aagagaaacttacggctaggtacgaggctgggtggcgaattcggcacgagggttttgccagttatgcgaaaacatggctgcggccggtttggcccttctttgtaggagagtttcatccgccctgaaatcttcccgatcgttaataactcctcaggtccctgcctgcacagggagcagcatggacctgtcagcaactaaggaacaaaagtaatgaagatttacacaaactttggtatgtcttactgaaagaaagaaacatgcttctaaccctagagcaggaggccaagcggcagagattgccaatgccaagtccagagcggttagataaggtagtagattccatggatgcattagataaagttgtccaggaaagagaagatgccctaaggcttcttcagactggtcaagaaagagctagacctggtgcttggagaagagacatctttggaagaatcatctggcacaagttcaagcagtgggttataccttggcacctaaataaaagatacaataggaaacgattctttgccttgccttatgtggaccattttctcagactggaacgtgagaaacgagcccgcatcaaagcacggaaggaaaatttagagagaaagaaagcaaaaattcttttaaaaaagtttccacatcttgctgaagcccaaaagtcaagtcttgtctaagatgtctgaactattaaatttaccattttgtttttcttgaatagtctgtgtacaggagtaaatatgttaagtggtttataaagaaattctgtttttagtcaagtgactttactaatcagttgttctaagtgtgaatatggcatgctaattagctaatttggtagaagctaatttgcttctaaaaatcaggtataaagttcagatgagattcccactttataaattctgacatttaagcaggctttaaatgtcacctgctaccttagagtgtgaaggtgatggtaactgccacagcaaaggcaataccgtagtttttgaatttgaataatagttttacctctgttgttaataggctatgaagaggatgtgggtattgctgttaataaacggaggactttgattcaaaaaaa

SEQ ID NO: 366938 - DNA, 1379 bp, Homo Sapiens
  misc_feature (901)..(957): n is a, c, g, or t
  misc_feature (1323)..(1323): n is a, c, g, or t
  misc_feature (1328)..(1328): n is a, c, g, or t
ggggcttaactctttaaaggtaggttcgtgacccttgagaaaagagttggtggtaaatgtgccacgtcttctaagaagggggagtcctgaacttgtctgaagcccttgtccgtaagccttgaactacgttcttaaatctatgaagtcgagggacctttcgctgctttcgtagggacttctttccttgcttcagcaacatgaggcttttcttgtggaacgcggtcttgactctgttcgtcacttctttgattggggctttgatccctgaaccagaagtgaaaattgaagttctccagaagccattcatctgccatcgcaagaccaaaggaggggatttgatgttggtccactatgaaggctacttagaaaaggacggctccttatttcactccactcacaaacataacaatggtcagcccatttggtttaccctgggcatcctggaggctctcaaaggttgggaccagggcttgaaaggaatgtgtgtaggagagaagagaaagctcatcattcctcctgctctgggctatggaaaagaaggaaaaggtaaaattcccccagaaagtacactgatatttaatattgatctcctggagattcgaaatggaccaagatcccatgaatcattccaagaaatggatcttaatgatgactggaaactctctaaagatgaggttaaagcatatttaaagaaggagtttgaaaaacatggtgcggtggtgaatgaaagtcatcatgatgcttgggtggaggatatttttgactaaagaagatgaagacaagagatgggctaatatctgccagagaattaacatactaaacacgatgagttatagagatacatctacccttttaatatagcactcatctttcaagagagggcagtcatctttaaagaacnnnnnnnnnnnnnnnnnnnnnnnnnnnnnnnnnnnnnnnnnnnnnnnnnnnnnnnnnctgactcctatttaaagaaccccttaggtttctaagtacccatttctttctgataagttattgggaagaaaaagctaattggtctttgaatagaagacttctggacaatttttcactttcacagatatgaagctttgttttactttctcacttataaatttaaaatgttgcaactgggaatataccacgacatgagaacaggttatagcacaaattagcaccctatatttctgcttccctctattttctccaaggtagaggtcaacattttgaaaaaccttttgcaattagcccaaggcttgctattttcatggtataaaggaaatagtttatgttgtaactggctctggagtctctgcctggggnaccangaggaaaaatgttgtttggaacctgacttgttaaaggggctaccggcttta

SEQ ID NO: 366939 - DNA, 724 bp, Homo Sapiens
  misc_feature (20)..(20): n is a, c, g, or t
acttccgggctgccaggcantgctgtggctccaggatgatggagacagagcgacttgtgctaccccctccagatcccctggacctaccccttcgggccgtggagctcggatgcacggggcactgggagctgctgaacttgcctggagctccagagagtagccttccccatggcctccctccttgtgccccagatctgcagcaagaagcagaacagttgtttctgtcatccccagcctggctgcctctgcatggtgtggagcactcagcccgaaaatggcagaggaagacggatccctggtctcttttggctgtcctgggagccccagtcccatccgacctacaggcccaaagacacccaaccacaggccagatactgggttacaaagaggtcttgctggagaacacaaatctctcggctacaacctccttgtctcttcgccggcctccagggccagcctcccagtccttatggggaaatccaactcagtatcccttctggccaggggggatggatgaacccaccataacagatctgaacacacgggaggaggctgaggaggagatagactttgagaaagatcttcttactattccacctggtttcacgaaaggcatggactttgcaccaaaagattgtccaacatccagctcctggactactacgccttagctgtatgtaggagcctctggaattcgggatgggggtgacgaggatgagaatga

SEQ ID NO: 366940 - DNA, 1001 bp, Homo Sapiens
tatcagctgtcatcaatttgcacagcaagtattatctcctgataagatgctggtgaatgcaggtgagtgagattcattgctcatctttggatatgaagtctgttagggaagaaacagtgccactattcccttagatgcaacagtagcatagcctcttcacccaggcgtcccaaaagcttggcgtgaagatttcagcaaacatgtcttacaacatgaggaggaggagtctaaatcagtcaggggataaaagtatcgaatcattgacaacacacacttggctttagttcttaggagggttttgttttagtttaatgttatttaggttgaagattttcttttaatattcagttttttgaaaaaaaatggatctacactgttaactgattgagactccactgtgattcacttgtttacttaaaaacttttcagggatgtctgtcaaatttcagtgttaatatgtcatgaaaagtggtgtggattgatctaacggagggaccagaaataatttttgctattccaaatactgacaggaaacaagataattgatttatactatgtttttaacaacaacaacaaggtatatgatgagccccaccacgcccactgggacatttaagcctttaaaagtttatctacagggtgtagtacgtcacagtagtttatagggtggacgtctccagaatggcatgaataaatctccctaaaatgatttcaaaaatacactttaagtttacaaacagcacggaagagaggaattgctttgggcttatacagttgtgcccccaaattccttcaagatggtgttagaagtaggtgatcgcagctgagagctatagataatcgtgtgtaactacatcgggatgtgtacccgattattatcataatatgtgtgttcctggttaggacagatcttcgatacgtggttatgtgtattgaagagtctcaactcttatcagttgctgtggctcatgaaaaattcccttgtgggttacttgtgacgt

SEQ ID NO: 366941 - DNA, 1204 bp, Homo Sapiens
acgaacttctgagacaggtgtgggtgcgatgggtcgggagggtcatgggattgggaccgaggtgtgaggagggaatctgcaattccttgctacacagagcgctggcaacttctgacaggctgtatctggggtatgggctgcctcgtggttgttgctgttacaaggaaagaaaacgagttcccctgcccacctgctcccagccactgggctacctcctggcaggaaatttgcaaatctgagtttaacaagttagtgatcagcagagggtagaggagggccctggacagatgtggggtctacgaagaggacagtgacttatcagggcctccggccattgtgctgggcctttgcctgtacaattgtttctcaagcagttgtgtccctgtggctttggtgcgcctgtgtgcactttctccctccacctggagcatgggctaacaccggaggaaaggaaaagacagagtcagacaggggacaatgaagcctttgaagtgccagtctatgaagaggccgtggtgggactagaatcccagtgccgaccccaagagttggaccaaccacccccctacagcactgttgtgatacccccagcacctgaggaggaacaacctagccatccagaggggtccaggagagccaaactggaacagaggcgaatggcctcagaggggtccatggcccaggaaggaagccctggaagagctccaatcaaccttcggcttcggggaccacgggctgtgtccactgctcctgatctgcagagcttggcggcagtccccacattagagcctctgactccaccccctgcctatgatgtctgctttggtcaccctgatgatgatagtgttttttaatgaggacaactgggcacaccccttaaatgactcctcccaagatttctcttactctccacaccagaacctcgtgcatttgactaacattttccagcgcctactatgtgacagaaacaagtgtatctgcctggacatcataaatggggacttggaccctgaggagagtcaggccacggtaagcccttcccagctgagatatgggtggcataatttgagtcttctggcaacatttggtgacctaccccatatccaatattccagcgttagattgaggatgaggtagggaggtgatcagagaaggcggaccaaggaagaagtaacctctgaagtggcggctatgctttctgttc

SEQ ID NO: 366942 - DNA, 1094 bp, Homo Sapiens
  misc_feature (137)..(137): n is a, c, g, or t
ccatatgtgcatttacactcttctttattagtggataaatattagaaaatcatctgctcaaaacagagtggcatgagggccggccccctccaggggctcccggcttggtgtgcagggtgaggctgtccctccagggnctcgtacaccagcgtggaggtctcgcccctcttgatggtgaacttataggatcggttgggcagcaggtttcggacgtcgaaggtgcagggcagccacggggatgacgccacactgggcgcactcctgctgtgtccgcgggtccagcagcctgaagcgcaactcatactgctccgatgtggctggctggatggtgacgaaccagcgcagccgggcccagtcctggtgagccgccgacgcctttcggtcaaacacgacaggcatcttggtgctcagcatgagccagatgtgcgggatcttggtggcactgacatcagacaccaggcggtgcttgacgtgtagccgccccggcaccatcatggtcaggaagctgtccatgacggccgacacgtccgccagccgccgctccaccagcgcccagtcggccaggaagggccgtgggtctggcgaccggagcagggcgtccagctcagcacggccatggtcgagctgttccaacaggtccccgagcagcaggagctggatcttggtctgagctgtgcccaccttcttcatgcgctggaacttccaggggtcgatgagctggaacaaggcgctaggcagcaccagcgggttctggtcgcccagggccaggtgcttgggcaggacctcgatgtagtaggagcacttacgcagcagctgcatgcgggcgtggtggcgcttgagcaggtgcgggctcaggtccgaggtcaggaactcacgcagggcattgcggcgctcggtgtaggtcttccacgcctctggttccagcagctgctggtcatctgcctcctcctggtccaggaaggactggggattgcccagcttcatcttgtccaggcccaggcctgccacatgggtgctcattatccgggagcctgcctctgaagcggagccgcgcgcggacttcccagagcccagcctccctccgcactccgcgg

SEQ ID NO: 366943 - DNA, 1227 bp, Homo Sapiens
cgagcaggtggggcgggtcgtggcgggggcagggtcccctccggaggcgccctgggttagagtctgggcgtggacgcgcccctcataggggtcattggggcatagaggcatagagccggcttctccagcttgggattcacgtgtttttcaaagggctaacggaaatgctgagatctaaaagcatgtttattgctgccaaggcctgatgatgaaacttcaagtcaaattacttcgggctgccggctcactcggctgctgcgtctggtctggcgtctgctgagaagatcctcttctaccctgctctgcacctgtgctcgactgccagccggctgagggcgggggtctccacggtggtcccagctcccaaggaggttgcagaagtaccgtacagagtggatttgcagggcagtggcatggagcccctcttccccgcgccgttctgggaggttatctacggcagccaccttcagggcaacctgtccctcctgagccccaaccacagtctgctgcccccgcatctgctgctcaatgccagccacggcgccttcctgcccctcgggctcaaggtcaccatcgtggggctctacctggccgtgtgtgtcggagggctcctggggaactgccttgtcatgtacgtcatcctcaggcacaccaaaatgaagacagccaccaatatttacatctttaacctggccctggccgacactctggtcctgctgacgctgcccttccagggcacggacatcctcctgggcttctggccgtttgggaatgcgctgtgcaagacagtcattgccattgactactacaacatgttcaccagcaccttcaccctaactgccatgagtgtggatcgctatgtagccatctgccaccccatccgtgccctcgacgtccgcacgtccagcaaagcccaggctgtcaatgtggccatctgggcctggcctctgttgtcggtgttcccgttgccatcatgggctcggcacaggtcgaggatgaagagatcgagtgcctggtggagatccctacccctcaggattactggggccccggtgtttgccatctgcatcttcctcttctccttcatcgtcccccgtgctcgtcatctctgtctgctacagccctcatgatcccggcggcctccgtggaatcccccctgctctcggggctcccgagaagaaggaccgggaaacctgcgggcgcatcacttcggttggtgcctggtgg

SEQ ID NO: 366944 - DNA, 1008 bp, Homo Sapiens
cacctcagtgctgctcataattgcagaggatggcctcaccagtcacggaggtcctggcagggcctgggggggcttggtctctgactgccagacaaaagacgctggtcacatctagtgcacgcaggaggcaaacactgagtcagctgacttgcctgactttaaccctcaggttttttaaaaaacagttaaaatacaggtgcaggggcttgggctcgggactcctggacccacgtggggctgagcgtggatggtgtttggtgtccggcttcactcccaaaccgcacccggagggtttgcggggcggaggggcctcacggcgacggttccagaacagacccaggctgctccggtcagcagcagcccctgccgctctcccacctagcggggacccccagccccgccagccgcatctgctctgtccctctcatgtcaggcaagccagttccggaccgagtggcaccaggagccgccaggagccggggcgacccagaggtctccagctgacctaggcgtaccggcgaggacacagcccccaggaggggttagaccacgggagccggagcccgagtcccagggccaccgagccagtttaagagtggtctccaggccctagtgggaaggggctccgcgctttctgggcgtccacaggagctgcatggccctgcccgctgacgcccggtcgggacgctccacacactgtgtgggggcgcgaagggacgcgggtgggtgcggcctgggcgcaggtgggctagagcctggagaccgccgggagcccgacttcctggcgctttgccctttggggagcggagccaaggaacagcgccaacctctctccacaagccaggaccctacgacccaccgccgcaggtgagctccgcccgggcgccccctcccccagcacgcctggatccctgccgggctcccccgagccgagactgtgccttctgcaacaggactgtgctccagatgctgtggaagagattcttgggagaatcctgaggacccacg

SEQ ID NO: 366945 - DNA, 857 bp, Homo Sapiens
ctggctgcagcatcgttgccaaaaggggaagctgagccagacaggcctgatcagagagccacagctggaccctctgaagatggctcagatccatgaagcatttggaaaaccactagagttttaagcaagacaggctaatgaaatgctgatatcttataaaggggaccttttttctttacatttctgacggtttttatcagaatgtatgtattaatgctattgtctttgtatatttattttatttccagccactttacaaaactctttagctttgaaagtttttctgttgattttcttggattttccagctcatctacaaataatgatcgtttgtctgcaccttttcaatatacctctttagtctgttcctgtattgcatagttagaacctctaaagtaatgtttttaaggaatagcagtgcagctgagcttcctaattttatctctagttcagaggatgttaactttttgggggtcatggatcctgttgaaaatgtgatgaaagcttggagtctctcccatcctgaagcatacttgcctcatatgtatgcacagaccttcccccagccctcatttcaactgcagatccccatcaggttcctgttggactaaggttaagttgtctctagtatttgctgtttgtttctgataaccatgttttatcatgttcagattcttttttattcatccttgtatgctaatgtttgtttttaaatcaacaaaatcaattttatcatgccttttcagcatctatcaagatggtcattgtaatctaacctttcaactgtacaaggctctcacttatattcaccagatttctaatgttgatcaaccactttaacatttcctggaatatat

SEQ ID NO: 366946 - DNA, 903 bp, Homo Sapiens
tgaaaggtgactggcaccagcagtttggatcgcctcctgtggcgggaggcccttgtagaggatacctttggagaacagtctcacaccccagagggaagtggcttggacaaagggggctgctcagcagacttcgatctcctctgggggatgtggataccgctcaggcccgcacccctccattggtcctggagactgatatgggaggcggtatgtgccttggctccggagggcacctggagcacccctcacctggagaaccctcatccagagcactcctttcctggagcacccctcacctgaagcaccctcagttggagcatcctctcacctagagaaccctcacctggagcaccctgttacccggggcaccctcacctggaaaaccctcatctggagcaccttctcacctggagaaccctcaccctggagcaccctgttacctggagcaccctgttacccggagcaccctcatctggagcaccccctcacctggagcacccctcacctggagcacccctcacctggagagcccctctcctgcagaacccctaccaggagcatacttcaccgggaccaccccttgccttggatgcctcagcactgaggagtctcccatctaggttggctgggagggcactctggagccatggggatgaggaccagaggctgctggtacatcttgccctgagactttggaggactgcaagggggacccacatttcacttcagactctgacacctgtggtgatattccccaaactggcagagcaaagtgattgctccgggggccagatggccaggcaaccatcgcccaaacaatgccctggcccggcctggagctagccgagagcaccaggatcatcatgtgaaggcagcaggtgtgggatgttggccgccgacctc

SEQ ID NO: 366947 - DNA, 1155 bp, Homo Sapiens
gtcacctttgaaagaaaaggttcacgtgacccgggagcatcacgtgctcttttaaggtctccttagaagtgccaagcgttctaaccctcattgaagcccaatggagcaaagatgcctgtcgtttctcgcagttttctgtttctttcagagtgatgggtgagtgcgtaggtgagtgaacccccagtgtttacatggtgacatacaggctcagaatccacttgaataaggcataaagatactctgcagtattgacataaataaaaataacagcaaaaagtgttttatgtgccagtttaaaaaactaagacttcaagtctctgcaataaaaacctgccatgaaataaagtgttacatctcctattagatacagaacctgatgttaaaaaaacaacaaccaaaaagtaagtagttaactttacaagaggaagtacgattaataaatattcagataactagttaaaatgccaccaaaatgtagcaaaagcatcccaaactgcattacttgttaaattcaatacacactgacttatgctttggactgtgtgtgtgtgtcgggatggggcttggtgattatttttccatttttgtttttggtttactgagaatatttccatggagtacagaaggggaaagactttaagcaagccatgatgaccttggaaactggttatgtgccttatgtagacatatgagattataattaagagttaactaaagtctattccatcttcctttactatggttgcaagtacccccaaaaaagatggtaagctagatttgacaataccacatgcttcaaaatttaggcttgggaattgaatcttttgttatcatatgtggatatataaaaacacatttttaactcttaaatgtattactactgtaataattagataaatttggtctcatcctattacatccaaattgccacttaaatgctggttttaaagtaagaagagcaaggatcttcctggcaactataatagtcaaagaaaaccagcagtgactgaagaaaaaaatgaactgctgagatgaaactatcactgtaactcccagcaaatgtcaatgctatccttatcttatacctgtgattctggcgcagctttcagagtttctctttgagacttgctccagtaaccagatctaaacttttcc

SEQ ID NO: 366948 - DNA, 1174 bp, Homo Sapiens
  misc_feature (14)..(14): n is a, c, g, or t
  misc_feature (490)..(581): n is a, c, g, or t
  misc_feature (616)..(822): n is a, c, g, or t
  misc_feature (985)..(994): n is a, c, g, or t
ggggggcaaattcnggacaaggcagagagggaattctgccttgagacggtggcttcccactcccactggatgtccagcccgcggccccacggctgggtgagcccgtcctctcctcgtttctgtctccggacccaccgtgtggccccagaccctccagtgaggacctcccgtatttcttcagagcagcccttgcgtgctggaggcctgggcttcagtgtgtccctgggtgccctggggcatgtgctgtgacctcccaactcctcgcctcatggggccgctgtatcaagtgacacagtttgtgtgctgcgtaccatgcctggcacccatttgaggtgttgcaaggaggccatgtttgctcgatgagagcagcctaagatctacaaactgttgttcgagtggatgggaacttgatgctattttcaggctgaatgacaagactccgcgatgcttctcggcctgggctgcacaacggaatctaccaggaggtttnnnnnnnnnnnnnnnnnnnnnnnnnnnnnnnnnnnnnnnnnnnnnnnnnnnnnnnnnnnnnnnnnnnnnnnnnnnnnnnnnnnnnnnnnnnntttcggtttatttgctttttcagagtcttgctctnnnnnnnnnnnnnnnnnnnnnnnnnnnnnnnnnnnnnnnnnnnnnnnnnnnnnnnnnnnnnnnnnnnnnnnnnnnnnnnnnnnnnnnnnnnnnnnnnnnnnnnnnnnnnnnnnnnnnnnnnnnnnnnnnnnnnnnnnnnnnnnnnnnnnnnnnnnnnnnnnnnnnnnnnnnnnnnnnnnnnnnnnnnnnnnnnnnnnnnnnnnnnnnatgaaccacaacacctgccgagcccaggtgttttgaatccagcacgggcaatggcaagaccctgtcccaacaaacaaaaaaacactggtgcctgaggcccaccccgagagattctgattgagttgatttggatttgaattatctttaaaatttggatgtgaannnnnnnnnncctgggaatggagtttcactcttgttccccaggcttggagttgcaacgggaaagatccttggctcaccgcacacctccgccctactgggttcaaggccatttctcgtgcctcagtttcccaagtagctgggataccggcttgttgcttccatgccaggtaattggatttagcacacaacg

SEQ ID NO: 366949 - DNA, 645 bp, Homo Sapiens
cttggatccatttgatgcctttgtggcacttcacatgaggaatctgtgcttatcagttatcaaagtaaggaagactttattatgagccactagtttctatatatggtgtactccctttaatgacagactgatcatcttccacaagtatttacccagcattttaaacactttgagttccgctcagaagaaaacaactttcaaaaaattttttccatgcattttccaagggagaatgataaggtttcaactgggtgacttgtccaccatggaaaaccaaacatggatggcagggatgttcttgaatctgcagcccatgttggttagtgcagccctacttccaaagcatggaatatgctttcagaaaatgcatattctatttttcctccttgcatctttctggtccttctgcagaaggtgctgtcaccgtgtaagtatgcctggcctcttcagagacacagaatgaccccataccccacaggaaatgaccttagattatttccctttgtggcaaaatgtgtcgtggttgcaaaatgtcttctggatgagaaagcatgggggtaggtgttgaacccgttacaacctttgaattatccgttcctttttccaatctagcaccagttcacttggccaaccttgtgtggacca

SEQ ID NO: 366950 - DNA, 1339 bp, Homo Sapiens
  misc_feature (207)..(223): n is a, c, g, or t
  misc_feature (904)..(918): n is a, c, g, or t
ccgtccggaattcccgggatgcagaaaagggaagcacaggaacctactgaggaatccacttgcaaagagtatgttgcgtcttaaaaacataacaccgtttttacattttgaaaccaatctcaggaagctccttttaatttttcctcattttgttgatagggattgatttgattacaaaatttgaggttgtgatgtctcttttttttnnnnnnnnnnnnnnnnncaggttgctgcatctacctttatccctgactgccttgaagttgaaggctctgtggctatctgacaaccagtcccagcccctgcttacattccagacagacacagactacaccacaggagagaagattttaacctgtgtcttacttcctcagctgccttctgaacctacttgtcaagagaatctgcctcgctgtggtgcactggagaacttggtaaatgatgtctctgatgaagcctggaacgagcgtgctgtcaacagagtcagtgcgatccgatttgtggaggatgagaaagatgaacgaagacaatgagacgagaacacttctaaggcgagccactccacacccaggggagttaaagcacatgaaaaagacagtgggagaatttacggaatgacatgaatgctgctaaaaggactggactcaaacaaaaacgaggtcaatcatgccattgaccgagtgaccacttctgtgtagagtttcacctccaagttttacctccctgtgtcttcctctgctgtcgagacgttcctgtctgcttcccgggagcctcacgtgctccttgtcctaaccagccccccgcgcgccatctttcccgtggagtggggggaagctgctgtctcccaggaagtgccttactcatcccgcaaccagtcagcgcaccagtggtctcccggtgtgannnnnnnnnnnnnnnaattccagttgtttgtaataagtagaatacactactgtaaacatacgaccttggttttggtcttatgtcggggtaaaggaaagcaggaaggggaatttttatcctcctcccttccgtaaagtgctgggatatttggaatcccccaagttcccttggacctactgatgagagatagtttccatgtctggggaaaaatggatactttttaaacctttttgggcagctcagatggtgtacattttaaaatttggtataggtatttcataacaaaaatttgtcttcgctttttggtcattcatcttgaaaacggtacatatttagtattggtgcagaaaaacaagtcctaaagtattggtctcattggtaccatccacttgtgccttactgtatcctgtgtcatgtccaatcagttgtaaacaag

SEQ ID NO: 366951 - DNA, 1062 bp, Homo Sapiens
  misc_feature (51)..(87): n is a, c, g, or t
ggatgtatcgatcactatagggcgaatggggctaatcgcggtggcggccgnnnnnnnnnnnnnnnnnnnnnnnnnnnnnnnnnnnnnatcaggccaaatcggccgagctcgaattcgtcgagagcgggcggtgcctgggacggttgcagtgggtctgggcgctgggaagtcgtccaagatgattaaaaaattcgacaagaaggacgaggagtctggtagtggctccaatcctttccagcatctggagaagagtgctgttttacaggaggctcgtatattcaatgaaactccaatcaatccaagaagatgtttgcatattcttacaaagattctttacttactgaaccagggtgaacactttggaacaacggaagctacagaagccttctttgcaatgacgcgattgtttcaatctaatgatcaaacattgaggagaatgtgctaccttaccatcaaagaaatggctaccatctctgaggatgtgataattgtcacaagcagtctgactaaagacatgactggaaaagaagatgtataccgaggcccggccatcagagctctctgcaggatcaccgatggaacaatgttgcaagccattgaaagatacatgaagcaggccattgtggataaagtttccagtgtatccagttcagcactggtatcttccctgcacatgatgaagataagctatgatgtggttaagcgctggatcaatgaagcccaagaagctgcatcaagtgataatattatggtccagtaccatgcattgggagtcctgtatcacctttagaaagaatgatcgacttgctgtttccaagatgttgaataagtttactaaatctggtctcaagtcacagtttgcttactgcatgctgatccgaattgccagtcgcttactaaaagaactgaggatggccatgaaagtccactggtttgatttcattgagagctgcttgccgaaataaaccatgaaatgggtattttatgaaagctgctttcaggctatcatcccatccttcctaaactggacctgcaaaaagaatttggcacccttgctgtttc

SEQ ID NO: 366952 - DNA, 907 bp, Homo Sapiens
ggggccagggatgttctgggcaacacaatggggaagaaagggcccccagaagcatcccccacccccatctctgacaacgccgcgtgtgcagttactgcccttcccggccttgggtgccatctgcgggccgacccacactaaggtgccactcctggggccttccaggagcgcatcgggagtcctaaggcgggtgggcgggcaggcgttcttgggaggtgagtctgctggtcagggaggcaagaaaagaagatagaagacggaggccagcccgccctggcccaccactctggagaccgcacctcctgcctgccaagtgctggcccggggtcagcggggctcactgccttggtgaccacgtcactgcacatccctctttcccagccacaagctgacattagtccgcaccgagaagcaagagtgaaacaaggcctgggcccaaatccacctgctcaagtcaggaactctggctcgttctactccactgtaagtcaaaccgatggtaaaaagcacgacacacacgtcccccaggactttcccaagatggtgctacaggaggccgctgctgggtggatggctcagccaccacgaagtgccaggtcccacccacgctgcccgtccgccaccattcccagagcgtccccactacacggcccaggcgtttcccctcagggcagcagcagtgctggcctctcacccaggccatagtgacaccagcggacccaaaaacaaacttctcagtgaaacaggttttaaaaagaaagccgctgtgctgggaagcgggttgagttaaagggcaaggcagaggtgacagctcttcatccagggacaggtgccacagggttccctcaaaatcggctaaggacagggagagcctggaggagtgcctccccccagggccggccctctg

SEQ ID NO: 366953 - DNA, 841 bp, Homo Sapiens
  misc_feature (576)..(626): n is a, c, g, or t
gccattcaggggccagccgggagccgggtgacctggcagaaagggtcgaggtggtggccctgagtgactgtcagcaggagttgagcttggtgaggactgtgactcggggaccacgcgccttcctgagccgcgaggaggcacagcacttcatcaaagcgtgtggactgctcaactgtgaggccgtgctgcagctgctgacctgccacctgcgtgggaccagtgaatgcacgcagctgagggcgctgtgtgccatcgcctccctggggagcagcgacctcctcccccaggagcacatcctcctccgcacccggccgtggctgcaggagctcagcatgggcagcccgggacctgtgaccaacaaggccaccaagatcctgaggcactttgaggcctcctgtgggcagctgtcccctgcccggggcacctcagctgagcctggccccacagccgccctcccaggcccatctgacctgctgaccgacgctgtgcctctccctgggagccaggtcttcctgcagcctctgagttcaaccccggtctcgtcccggagccctgctccctcatctgggatgccgnnnnnnnnnnnnnnnnnnnnnnnnnnnnnnnnnnnnnnnnnnnnnnnnnnnggagaccccagcgaggccgaggccagactggcagaaagcaggcggtggagacctgaacggatcccagggggcacggacagcccaaagagaggccccagcagctgtgcgtggagccgcgactccttgtttgctggcatggagctggtgggcctgtcccccgccctggtggggggctgggggctgcctgcgggagaagtccctgttcctggaatgct

SEQ ID NO: 366954 - DNA, 1033 bp, Homo Sapiens
  misc_feature (845)..(845): n is a, c, g, or t
  misc_feature (937)..(937): n is a, c, g, or t
  misc_feature (944)..(944): n is a, c, g, or t
cgggtggcgccttggcctccgcctccgctcgcctgcgcgcggcctgcgtgagggggcagaggcgaggtggaggcgttggcgctgccacgtctgggccgcggttcccaactgtggcgcgggcggtggaggaggaggtggggctggcgctgaagccggatccggatccggtgctgtgcacactggtgggggagagtccgacgcgcctggctaggagcgccgaccgcagggcctctacggaccttactagaaaaatgaaacctgatgaaactcctatgtttgacccaagtctactcaaagaagtggactggagtcagaatacagctacattttctccagccatttccccaacacatcctggagaaggcttggttttgaggcctctttgtactgctgacttaaatagaggtttttttaaggtattgggtcagctaacagagactggagttgtcagccctgaacaatttatgaaatcttttgagcatatgaagaaatctggggattattatgttacagttgtagaagatgtgactctaggacagattgttgctacggcaactctgattatagaacataaattcatccattcctgtgctaagagaggaagagtagaagatgttgttgttagtgatgaatgcagaggaaagcagcttggcaaattgttattatcaacccttactttgctaagcaagaaactgaactgttacaagattacccttgaatgtctaccacaaaatgttggtttctataaaaagtttggatatactgtatctgaagaaactacatggtgtcggaggtttctaaagtaaaaatcttgtaagaaaattgtcaaaggggctaatgctacnaggctacactcttccctagagttgaaatattttgttgctgcagccgagtgaccctcataaatactggactgaaaaaacattgttatactacnagtatantggaccatttagaagattacctttgaagctgagaatcccaccactgcacctcccagcctggcgaacagaagaaagactcccatcccaaa

SEQ ID NO: 366955 - DNA, 824 bp, Homo Sapiens
ggctggtacgcccggaatgtatgggatcgcgtgcgccgccgcaagcatggctggtgatgataggacgactggtaacagggggcggagggctccgaagtctggttttgggcgggaattgaaaccgccgctgaagccaacaagaatttgagaactgtaaataccaagccttgaaagggaccatggtgcggcctgtgagacataagaaaccagtcaattactcacagtttgaccactctgacagtgatgatgattttgtttctgcaactgtacctttaaacaagaaatccagaacagcaccaaaggagttaaaacaagataaaccaaaacctaacttgaacaatctccggaaagaagaaatcccagtacaagagaaaacccctaaaaaaaggatggctttagatgacaagctctaccagagagacttagaagttgcactagctttatcagtgaaggaacttccaacagtcaccactaatgtgcagaactctcaagataaaagcattgaaaaacatggcagtagtaaaatagaaacaatgaataagtctcctcatatctctaattgcagtgtagccagtgattatttagatttggataagattactgtggaagatgatgttggtggtgttcaagggaaaagaaaagcagcatctaaagctgcagcacagcagaggaagattcttctggaaggcagtgatggtgatagtgctaatgacactgaaccagactttgcacctggtgaagattctgaggatgattctgattattgtgagagtgaggataatgacgaagacttctctatgagaaaaagtaaagttaaagaaatt

SEQ ID NO: 366956 - DNA, 754 bp, Homo Sapiens
  misc_feature (682)..(682): n is a, c, g, or t
ggaaatacagaagcctgaataatctatgggttagaaaagcatccctgaataatcaaaaattggcagtatggcatgttctcaagcctttttatgaaaatgaaatctgaaatcaccaaatgtaaacctgggaacattattctagtgtgctgtcttggattcatgttaagaagcgtcttcattctttgctcatgttgcccacttcttgtggattgtctgagtgttttttgacaatcacttccttaaagactcttctgaactagttggacctggttaatcatagagagtagcctttaatcatggatagtcttcttggattatttttatatttgaaaagaaaatgttttatttgcactactgagtaggaagagttaattgttttctttgttctttttttgaagtcattacacaggacttcactccagagttaccattatgagtgtgttcagctctggtccacagaggatggataaaaatggtttgttatgtttttttgctctgcagtgctatgagccttatatctgttaatatgaaggacaaagtcaaaagcagcagtggatagcaggaagggtagagactaatatgtttgggaccaaaaccatctaagttagagatttccagatcacagaggggctgggcattctctggagcagtcattggtttggtgctttattgtaatcatttngcgccaatccccaacaattaggaactggaccctgggaataagctgagggtgctgaactgtcggggaagggtc

SEQ ID NO: 366957 - DNA, 721 bp, Homo Sapiens
  misc_feature (138)..(235): n is a, c, g, or t
  misc_feature (705)..(705): n is a, c, g, or t
ccgggaaccgcgcgccgaggccggctaagtttggcagactctctgagctctcggaattcgactgcctccattgttgctccttctggcacccacagaccacatctcttcagtggaccccctgataggccggttgctccnnnnnnnnnnnnnnnnnnnnnnnnnnnnnnnnnnnnnnnnnnnnnnnnnnnnnnnnnnnnnnnnnnnnnnnnnnnnnnnnnnnnnnnnnnnnnnnnnntgagccaccgtacccagcctgcttcctgttttaacagacgaagaaatggaataacttccaacaagttggagctgaaggagtgcccaggctgcggatggaggaaggacgtgctcgggagaaggtgaagatgggagagaagcaagatcttctgtgtttggaccaaggacacatttccttactccatagcagctgtggtcagtggcttagctcggacaaggagatgagagcccatgtgttgtgagggttcttctgggaactctgagaaggcaggagccgcccccgcccttcactgcctctcttccattctgcagcatggaatatggatgtgtggtctggatgtacagacaccattttggaccataaagacaaggacgattgtctaaggatgacacagccagagcactgagagtggcgagaaggacaggggagctgctgtgccaagcaggactgtctctcttaagagaaaaatnaaatttattggtgttt

SEQ ID NO: 366958 - DNA, 927 bp, Homo Sapiens
gtatcagcgtatgaattctgggaatctgccggaggggtagctgaagcagcagccggtcggcgtgtcagcagcaactggtggagaaaggaagagaatgagcccgagtcacagctcagaagaaaaaggccaggcagcttctgatccccgagcagttgaggaaggcaggcttgctcagaccaagtgactggaaggcatttgggcatttttgctgagaaatgtctctttgtttctgtctgtatccttctttctccttgactcttcatagtgggttctctgtttctctgtgtgatccagatacctgaacggactgttctcttatctcagttctcttcagggaattttgtctggttcaagaagtcataccccaacccaagagaaaccttggacatctctcataagacatccaagggacagagctcctgggagacctagagtgagctggagagtgaacaacataccccactgggaagtaagcagccctggattctgcctcttgctaactgattcgtttcgaaccctgtttttctatctgtaaaagggactgtaactcccctgcccctgcctagattctcatacctggagactagggggctaagaccccttctagagataaaaataaaagtcttaaagagaaagaccaagatgtttggcagccctttaagaagttctcttttctcttgggggcttttaggccacaagaaaagattgatgtggtctaaccatggccagagagtggtgatacccacaacgaaactcagactcacgtgatgcagagaactggttgcagagagccatggtgcagaggaggacagcaagggcagcagtggagacctgcatgattctgagcaggtgacggaatgtgggctcgagtgtcagcagagccaagaaaggactgaccactgtctgctatcccaagaattccggacc

SEQ ID NO: 366959 - DNA, 652 bp, Homo Sapiens
gggagaaggacgcaggcagcaaagagtagtcagtcccttcttggctctgctgacactcgagcccacattccatcacctgctcccaatcatgcaggtctccactgctgcccttgccgtcctcctctgcaccatggctctctgcaaccaggtcctctctgcaccacttgctgctgacacgccgaccgcctgctgcttcagctacacctcccgacagattccacagaatttcatagctgactacttttgagacgagcagccagtgctccaagcccagtgtcatcttcctaaccaagagaggcccggaggtctgtgctgaccccagtgaggagtgggtccagaaatacgtcactgacctggaactgaatgcctgagggggccaaaactttccaaggccaacggacctcagggggcccacgggggggaggagaaggaaccccgaacccttgggaaacctggcgggggcccctccaccaggcttcccctcctcttataagctccctaatttggccccaacaaccaccacctgggggaaatccctctcttaacgctaaaagttctaatttacattcaaaccattcccacgtctttaaaaacatttaatttttcgcacactcacaccaagggcggtcccgcaaatatgggtggtgctcac

SEQ ID NO: 366960 - DNA, 863 bp, Homo Sapiens
ctcttttactgttctacacagagaaagggaatgacgtgggctcagtgtacaagaagtaccctcaaggaaggggcttgagaaggactagctcttctattgacttacccagaaaggatacagttgctcaagccaagagtgggtggcaaaatatgggctcaaaaaattgaagctggagatttccagatgcatgggtcccagctgcactcatcaaaagtcaggacagaggtcagcatccgccaaacactgcagcatcttccccagcgttgagatccatggagtggtgagacacatccagtggacgcccagggagatggaggtgtacatcaggcacttggagaaggtgttaaggcgctatgtccagaggctgcagtggctgctgtccgggagccgccgactgtttggcaccgttttggagagcaaagtatgcatattgctggacacgtcagggtccatgggcccctacctgcagcaggtgaagacagagctggttttgctgatttgggaacagctgcggaagtgctgtgacagttttaacctgctcagctttgcagagagccttcagtcatggcaggacacgctggtggagaccacagatgcagcgtgtcattgaggctatgcaatggggtgacccacctgcaagctcagggcagcacctccatcttgcaaagcattgctgaaagctttcagtttccatgatctggacaggatcgtacctcctgaccgacggaaagccagacacaagctgcagcctgtgtcctaaaggaagtcaaaaactcagggggaacagagcatgtgaaacgtgccaccatccttgaactgctccgacagagcggggtgagtccgagaaagcgggaccttcacgg

SEQ ID NO: 366961 - DNA, 1276 bp, Homo Sapiens
atcaggccaaatcggccgagctcgaattcgtcgagagcggactattcagaggctgctgcctgcttaggaggttgtagaaagctctgtaggttctctctgtgtgtcctacaggagtcttcaggccagctccctgtcggatggcttttatgaaaaaatatctcctccccattctggggctcttcatggcctactactactattctgcaaacgaggaattcagaccagagatgctccaaggaaagaaagtgattgtcacaggggccagcaaagggatcggaagagagatggcttatcatctggcgaagatgggagcccatgtggtggtgacagcgaggtcaaaagaaactctacagaaggtggtatcccactgcctggagcttggagcagcctcagcacactacattgctggcaccatggaagacatgaccttcgcagagcaatttgttgcccaagcaggaaagctcatgggaggactagacatgctcattctcaaccacatcaccaacacttctttgaatctttttcatgatgatattcaccatgtgcgcaaaagcatggaagtcaacttcctcagttacgtggtcctgactgtagctgccttgcccatgctgaagcagagcaatggaagcattgttgtcgtctcctctctggctgggaaagtggcttatccaatggttgctgcctattctgcaagcaagtttgctttggatgggttcttctcctccatcagaaaggaatattcagtgtccagggtcaatgtatcaatcactctctgtgttcttggcctcatagacacagaaacagccatgaaggcagtttctgggatagtccatatgcaagcagctccaaaggaggaatgtgccctggagatcatcaaagggggagctctgcgccaagaagaagtgtattatgacagctcactctggaccactcttctgatcagaaatccatgcaggaagatcctggaatttctctactcaacgagctataatatgggacagattcataaacaagtaggaactccctgaagggctggggcatgctgaagggattttggggactgttctgtctcatgtttatctggagctccttatctatgaagacatcttcccagagtgtccccagagacatgcaagtcatgggtcacacctgacaaatggaaggagttcctctaacatttgcaaaatggaaatgtaataataatgaatgtcgatgcgaccgctgcagccagcagttgtaaaattgttagtaaacataggtataattaccagatagt

SEQ ID NO: 366962 - DNA, 1008 bp, Homo Sapiens
  misc_feature (365)..(591): n is a, c, g, or t
  misc_feature (752)..(752): n is a, c, g, or t
ccgtgggtacattgtcctcctctgccccaagtttccacccccttattagcctgttgggctgatgccaaagggtatgggatgcccacttctcaagctgggggtgatgacgggctcaagcagggatggggcaaaggaatcttccagaagcagcagaggtgtttcagtccacagtccagaggggccagccaagccaagccagggtagatctcttccccggggctgggagctgaggaactgccggtcactgagccaaccgaagagagggtcattgaggctgttccagaggagaaacactgtctgcaaacctttgctggtgtcagttcctctgctaaaacccactctggccaggcgctggtggctcacannnnnnnnnnnnnnnnnnnnnnnnnnnnnnnnnnnnnnnnnnnnnnnnnnnnnnnnnnnnnnnnnnnnnnnnnnnnnnnnnnnnnnnnnnnnnnnnnnnnnnnnnnnnnnnnnnnnnnnnnnnnnnnnnnnnnnnnnnnnnnnnnnnnnnnnnnnnnnnnnnnnnnnnnnnnnnnnnnnnnnnnnnnnnnnnnnnnnnnnnnnnnnnnnnnnnnnnnnnnnnnnnnntccgacccagaaggccattttgatgaatcttgtaacactgagacaaaggtgtcccacatagtagagccaggaagacattgtgcaggatggtggtgaagagagccagggagccatagaccacagctgtgggcagacccagcaacccaggcccggggctgacnccagccccatggctgcagccccagccttagccccaggagcaccggggagggctcatggccacaggcggtcttcccatcctcgtccaacagcgctgggaattatgaatgaagtataacagaaacagtgctgagctagacaccactaatctgggagtgactcgaggaaacagagagcctagatccgggtgggagcaggtaaatatccttgtaatcgggctccttcctcaggtaagggaatttgaaaagatgggtcaca

SEQ ID NO: 366963 - DNA, 1730 bp, Homo Sapiens
gtgggggaatgtgtgatccggtcaatgcgaatgcacgtgggtgcagagcccggctacctctcatctcaggacagcgtccagtatcctggtcccacttgcctgcccatcagtctccacatctcagagtctttcttcatcctggcttgcagctgtcaccatcaagcccttgctcttgggttcattcttcgggagccccaggggcctatctcatggggaagggagtgggtgtgacttgggagccaatggagggttgggatgggtgagagaaaagggcagaattcagatctgttttgtcttggatccttctggaactagaggcctggagtgtgcagattgggttcgtattgtacagtcttcctccctgggtttctctgggaggatggggatgattacgaattcctagcaccttagtagctggggcagcaaatgccctccacagagcctgagggaggccttggcgtgggcctgggtgtgtgtaggggtgtccctttaaatccctaggggtctgtgttaaaggtgtcccagtctcccagtagggcagttccacttaaaaccagcttgagttccattctggagggagcaggcgccattgctcgggagatgaggtcaagtgcaaagccagctggcttcctctccgctccagctcggcggggccacaggcctgggtctcaacactacctggactggtgtcctggcccccatcaactcaaagtctcctctggagcctcactccagcactttgggggtggggtcacagaccaggctccctcctgcgcctggcacttctaaagaagccgagcttccacagtgccaggaccagcagggccagcaggaggaggccccccagggtgctgcctacaatgatccagatggggacctgccagtcctcttgcttggagatctcaaacacgatctggcggctgggatcctcctcacggaagatgaaggggctgtggaactgcctctgcaaggctgcgttgaccatgattttcatggatttgtacttgagtgcttttagggacctcaaccacaggttccccagtagatggaaattgatttcctggttggggaccagccgtatattgcagttgatggagacgacatcagagttgctgtgattcagctgtggagcaagacgcaagtcttcctccactggggtgggccggtactcagtgctattgccccagatgttacaggacgtgttcgcctcgtccgtgaggaagtccctcagcttcagtaggcggttgccgctcctggtggcgatgggaatggtgatcttcatcatcatcccgtggatggggaacaagcccaagttctggatcctgaagatgcagctgaagggaggcccgataccatcgtatctctccagcgagctgttgagcttgacctcgtagtggctcaggctgctgctcctggtgaagaggacgtcagcctcgtatttgaggtggaagcgtaagggggccacgttgtcttccttggtgctgtcccgctcattactgtcactgcctgcagcgagctcgatctccaggtggtgtaggaagatggatttgcggaactcaaaatcaagacggaaagccacattggccttggcccggaagaagggatagctgacgttgcagagcttgcttctggagcctcctctccatcgttcacacactcaatgctaccgtctgagtcctccttctggatcaagctggcaaactgcaggtttgctgactgcgagatattta

SEQ ID NO: 366964 - DNA, 1554 bp, Homo Sapiens
  misc_feature (503)..(503): n is a, c, g, or t
gggatctttcagaatctggtcaggtagacaaagcatctttatgtggaagtatgacaagcaacagctcagcagagacagacagcctgttaggaggcatcacagtggttggttgttctgcagaaggtgtgacgggagctgccacttcccctagtacaaatggtgcttctccagtgatggataaaccaccagaaatggaagcagaaaatagtgaggttgatgaaaatgttccaacagcagaagaagcaactgaagctacagaagggaatgcggggtcagctgaagacacagtggacatctcccaaactggcgtctacacagagcatgtctttacagatcctttgggagttcagatcccagaagacctctccccagtgtatcagtcgagcaatgactcagatgcatataaagatcaaatatcagtactgccaaatgaacaagacttggtgagagaagaagcccagaaaatgagtagtcttttaccaactatgtggcttggagctcanaatggctgtttgtatgtccattcatctgtagcccagtggaggaaatgtctccattccattaaacttaaagattcgattctcagtattgtacacgtgaagggaatcgtgttagtagccctggctgacggcacccttgcaatctttcacagaggagtggatgggcagtgggatttgtcaaactatcacctcttagaccttggacggcctcatcattccatccgttgcatgactgtggtacatgacaaagtctggtgtggctataggaacaaaatctatgtggtgcagccaaaggccatgaaaatagagaaatcttttgatgcacatcccaggaaggagagccaagtgcgacagcttgcgtggcagggggatggcgtgtgggtctccattcgcttggattctacgctccgtctctatcatgcacacacttatcaacatctacaggatgtggacattgagccttatgtaagcaaaatgttaggtactggaaaactgggcttctcttttgtgagaattacagctcttatggtgtcttgtaatcgtttgtgggtggggacaggaaatggtgtcattatctccatcccattgacagaaaccgtaatcctccaccagggacgtttactggggctgagggcaaataaaacctcaggtgtaccaggaaatcgtcctggaagtgtaatccgtgtatatggtgatgaaaacagtgataaagtgactccagggacatttataccctattgttcaatggcacatgcacagctttgcttccatgggcaccgggatgctgtgaaattctttgtggcagtcccaggtcaagtcatcagcccacaaagtagcagtagtggcacggatctgacgggtgacaaagcagggccatctgcacaggagcctggtagtcagacgaccttgaagtctatgcttgtcatcagtggaggagagggctacatcgacttccgaatgggtgatgaaggtggagacatcagaacttcttggagaaggatcttccacttgaaccttctgtcaccaaagcagaaaggaatcacttgatagtgtg

SEQ ID NO: 366965 - DNA, 796 bp, Homo Sapiens
  misc_feature (530)..(530): n is a, c, g, or t
agaaaatgaacttaatgaaaaaaattataatgagcaatgacaatattcctataaaacctccctctgggtatcaagagacatattacctgccaaggccagattttactttttaaggtttcctctctctcaccaaagacactagtgggcacagaggtgacactagagttagaatgttaccagagtcatttgcattagacagtttatctgatcatgaacatgttcccagggagattagaaaaatgggaagcaggcctctaaagatcctcctgggacatttgtaaaaaggctggctgcttctccaggaatgtctgaattaagcaagaattgtgccactgaaatagcttcttgtttttatattaaacaaggaacgattgtgcagtggatgacctgggactgaaagatgtatgatggtcaagtttaaacatattaattcctgattgttttcttaaatacccaccctagtcattttttgggaaaatattgccagacatattttgacatgaattcatgtttattctgggcttctgttncccaagcagaagtggattaaccctggcaatggctggcttcactaactgtacttgcacccagcctgggctgccatctgctcagccaggagaagcagggagtggggtgtgggccctttaagttcgctcagggcacactcattcagtctcccctgaggagaccttgtccccctttgtgggggtgaatgctggctgttgcaggccagaggcagtgccaactggagactcatcctctcagctttggtcagcttcagcacgtattcttcatg

SEQ ID NO: 366966 - DNA, 1317 bp, Homo Sapiens
  misc_feature (417)..(651): n is a, c, g, or t
  misc_feature (674)..(699): n is a, c, g, or t
ggggacacaacaggggctccggggtattcgtcccaggcagaatcccaccaggagacttgaccagactggattgacccccggaaccaaaaattggaggggcagggtggatccattctctaaacagctaatgactgcttgagtggaaggttataaactaattctccctgggatataacaagtatttaaaaaaggattttctacaatgaaaatggtttttctttaagacagtttcccaatactgaatatcaagcccaattaattccatgagaaactaatctttcaagttattatctctgccactcttcattctttcattaaagagatttttaaaaaagtatacagaatttctctttcattaataatatttaccgtgcccatcagaactccactaatgggccgggcacggtggttcacacnnnnnnnnnnnnnnnnnnnnnnnnnnnnnnnnnnnnnnnnnnnnnnnnnnnnnnnnnnnnnnnnnnnnnnnnnnnnnnnnnnnnnnnnnnnnnnnnnnnnnnnnnnnnnnnnnnnnnnnnnnnnnnnnnnnnnnnnnnnnnnnnnnnnnnnnnnnnnnnnnnnnnnnnnnnnnnnnnnnnnnnnnnnnnnnnnnnnnnnnnnnnnnnnnnnnnnnnnnnnnnnnnnnnnnnnnnnaaaagagcgtgagactctgtctnnnnnnnnnnnnnnnnnnnnnnnnnnctccactaatgaaaaaggtggggaaaaacaatgtgtggttactaatcaacaaccaaaatcacacctggctgggacccagcaaagcaggggaccagctagttttgctggaggcttgggcaagggcagcaaaactgccaacctgacttggtgcccttggtgccttaactcctccagaagctaagatggaggagcagaggggcagagaacacacggattttcaacttctcctccaacacccctgccccccaccacagcctgacagtctcctgcaggagtagcagcagctgtggctgctggtctccaagatcatcaagagatacacctggagaaggctgaggtcaccagagagggggctgaaacagtgttttcagctgagtacggagtggccacagactgctagaaaagtacacgtggcagttaccatggaaacgaagtggccagatgctgaagaagcaagagttgcccctgctcactgtgggaccagttggatgttgggcccttgatggacagaagagaaaacggaaacctcaatggaggcacccaccactgctgtgtctggagttaacgtgtgtgctaagaaactgtctttgaattacttcaaaggctgaattctcagaa

SEQ ID NO: 366967 - DNA, 363 bp, Homo Sapiens
caagagctttagagcgagagaaagaaagacacatacacacacccacacaccctcaacgcagctagagagacaaagagaatggcgagccaaggcgttgcctccatgttcgctctcgcattgctcctcggagccttcgcctccatcccacaaagcgtcgagtccatcggagtgtgctacggcatgagcgccaacaacctgccggcggcgagcaccgtcgtcagcatgttcaagtccaacggcatcaactccatgcggctgtacgcccccgaccaggcggcgctgcaggccgtcggcggcaccggcgtcaacgtcgtcgtcggggcgcctaacgacgtgctctccaacctcgccgccagcccggcg

SEQ ID NO: 366968 - DNA, 905 bp, Homo Sapiens
  misc_feature (394)..(440): n is a, c, g, or t
cacgttctctgcgcagagcggctaccgcgtcccagggccccagcccggccacaaacactgggtgctcctcgggcggcttctcccccgtagcgggtgtgggcgcccaggacggagactatcaaaggccacacagcgcacagcctgcggacaggggctacgaccggcccaaagctgtcagcgccctcgccaccgaaagcggacaccctgactctcagaagcccccaacgcatcccgggacgagtgacagctattctgcccccagagactgcctcacacccctcaaccagacggccatgactgcccttttgtgaacacaatgtgaaagaagcctgctgtggtactgagcgtcgggctgtcacaaggcactggaagaagggagcctgctggtccagannnnnnnnnnnnnnnnnnnnnnnnnnnnnnnnnnnnnnnnnnnnnnnatccagtaggatcctagagacaacctgtcatactgtttacaaaattgtgcagctggtttcgtgctgacccttagggtgcgtctgttgggtatagttgggctagaaaaatgaaaatttttagatggcgttttcattcctctgactgatattgagctgctttggtgttaaaggtgtaatgtgtacagagttgtatttaacaataataaaagtaacttaagtttgctctatcagattttagttctgcacagaggttaagtgggaaaatgcagctgttgcaaaatgtatataaatagtatgttcatttttttcagtatattatctgatactgtgttagcagcaggtctgcttaaacctagtcttggtgttattgagtcatttcctctcctttgataactagaactgaaagcatttttaacattcttctcctggaaggaaatgaattacttgaagcatgaaaagcacaca

SEQ ID NO: 366969 - DNA, 1293 bp, Homo Sapiens
  misc_feature (1200)..(1233): n is a, c, g, or t
  misc_feature (1255)..(1255): n is a, c, g, or t
  misc_feature (1263)..(1264): n is a, c, g, or t
gggagtcacatttcagccactgctctgagaatttgtgagcagcccctaacaggctgttacttcactacaactgacgatatgatcatcttaatttacttatttctcttgctatgggaagacactcaaggatggggattcaaggatggaatttttcataactccatatggcttgaacgagcagccggtgtgtaccacagagaagcacggtctggcaaatacaagctcacctacgcagaagctaaggcggtgtgtgaatttgaaggcggccatctcgcaacttacaagcagctagaggcagccagaaaaattggatttcatgtctgtgctgctggatggatggctaagggcagagttggataccccattgtgaagccagggcccaactgtggatttggaaaaactggcattattgattatggaatccgtctcaataggagtgaaagatgggatgcctattgctacaacccacacgcaaaggagtgtggtggcgtctttacagatccaaagcaaatttttaaatctccaggcttcccaaatgagtacgaagataaccaaatctgctactggcacattagactcaagtatggtcagcgtattcacctgagttttttagattttgaccttgaagatgacccaggttgcttggctgattatgttgaaatatatgacagttacgatgatgtccatggctttgtgggaagatactgtggagatgagcttccagatgacatcatcagtacaggaaatgtcatgaccttgaagtttctaagtgatgcttcagtgacagctggaggtttccaaatcaaatatgttgcaatggatcctgtatccaaatccagtcaaggaaaaaatacaaggagaaaaaaacacagttgttactcggtaatgagggatgttgggactcagacgataccctaaagtatgacactttgggatactgagtactttgagctaaagagactgggaggcctcagaaacaagatctctgtgaacttctcccttcatcttccctcttgccccaagtcttcctccttccaagcaagtcataaaaaaccaggaattcaccgggcgcaatggggtcacctcctgtaaatcccatcacttttggaaggcccaaggccaaaggatctccttggacttccaggagttcaaaaacccgggcttgggcaaaccttaagcaagacctccctcttctatggnnnnnnnnnnnnnnnnnnnnnnnnnnnnnnnnnnttttccttggggctttaggggnaaaaaccnntttactattacacccccatccctatgccc

SEQ ID NO: 366970 - DNA, 973 bp, Homo Sapiens
ggaacacccggggagaccaggtcccgctcccaggaacgccggcggccagaccccctgcctggcttgggtgctcctagcagggcagctctctggtcagaggacagagaggagcaggctcccaccttcacccagtctgcaaacaagcccactgggccggcggggctcttgtgatttgctgagtatggtgtcttctcaaaggtgactgaggtccctgtggggtctcggcggggcttctatccccgaaccccgggccctggtgccactcaagcttccagctggacttgggcctcgtccacctgcagagtgtcacagtcccccagcagctcagtctctgggacagagccttcctcctcctcctctgcttcctgcacggtgctctgggccccatcttctggggcgttctgtgtgtcatcagcgccctctgagagcagggctgccctgtctgccatggatgtgttggagggggccgtggtgacgtagcctgtgctggtggagccactgccactgtggtgtgagctgggcttggggaccatctgaggaggcacctgctgcggggccatctgcattgggatctgcaccgggtagaagttgggcaggtaggccccataggccggcaccggctggtagccgttgacggggacgtagagctgcggcgggggcaccatgggtctgatctggcccttcatggggatgaactggggctgtgggaagggcggggccttctgcttgggccccacgtagcgggcgttgctcacattgctcactgggctggtgctcagggagctggtctgcgtggtgttgctggcccccgaggtctgcgccgagctgttgtagttggaaaggttgccccaggctcggagccggctgtggatgtccttgaagcggggccgccggctggggaactcgttccagcactcgatcatgagggcatacacccaggcaggacagtcatcggggcaaggcagcacctgcc

SEQ ID NO: 366971 - DNA, 740 bp, Homo Sapiens
  misc_feature (44)..(107): n is a, c, g, or t
  misc_feature (657)..(670): n is a, c, g, or t
cagctagtgacaaattatcttaacaaagtagattatcttttgcnnnnnnnnnnnnnnnnnnnnnnnnnnnnnnnnnnnnnnnnnnnnnnnnnnnnnnnnnnnnnnnngtgcacacgtagaaaggggaagaaacgcttttggatgttggtaattatgtacatcaaataatgtcatatatgaaattaaaagcagatcacaaaaccgagattcatgcctccatttttaccaaggggaggaaacaagagccatacagccagaataattcttcagaagcacactttgttatcaattatgtaactaaagaatcaaagtatgtatatataactgaagagttaatcaacagtaagaccgtgatctacatctgataccaataagaagctaagagtaataaatacctatcctgacattcactaagtaaataatgactatcattttaataatcattattttttctgactgttattttttttaaataggcaaaagagcaataataaatggcaaatgtggctccttaaaaagaagatagggatcaacccagttttcttcccatgaagaataggaacaagaagaaagaggtttaaattgctctgtgaggtatttcagttctaagattaagcttcctgataatgagtttacaacctggaattgcctattggnnnnnnnnnnnnnnccaccttgcctgaagtttgtaaagaaatggagggtgacagtagtaatgcccaaaggcaaaaggatggatc

SEQ ID NO: 366972 - DNA, 1120 bp, Homo Sapiens
ggcgaattcggcacgagggtattgttacctaggggtggtttcttttcctgcagtcgcgatgtgtgattgcagatggaaaacaaagtattttatgcctacgtttctaagatagaagaaatggacttgttgaaaagaagccagtttgtaaaggacacagtaggagaatttaaggtaccaccaccagagagaggttgagagtgcgtttgacttttggttttgtcaaacgcgaggttttccgtttccttccggggcaagttgaacctgtccagcccccgtaggctgtgggtcaaaagtgccggtcaaaatggaagtgaatccccctaaacaggagcacctgctggcgctaaaagtgatgcggctgactaagcctactttattcaccaatatcccagtaacatgtgaagagaaagacttacctggagatctctttaaccagctgatgagagatgatccttcaaccgttaatggtgcagaagttttaatgttgggagaaatgctgactttaccacagaattttgggaatatatttttgggagagaccttttccagttatatcagcgttcataatgatagcaatcaagttgtaaaagacatattagtaaaagctgatcttcagacaagttctcagcgtttaaatctttcagcctccaatgctgcagtggctgaacttaaaccggattgttgtattgatgatgtcatacatcatgaagtcaaagaaattggaacacacatcttggtatgtgctgtgagttatacaactcaggctggagaaaaaatgtatttcagaaaattcttcaaatttcaggttctcaaaccattggatgtgaaaaccaaattttacaatgcaaagagtgaccctcagttctgtgactgatgaagtattttctggaagcccagaattcagaatatgacaacctcacctatgtttatggagaaggtttcactggagccatctattatgtacaatgtaacagaattaaattcagtcagccaagctggagaatgtgtgtctacgtttgggtcaagagcatatttgcaaccaatggatacacgccagtacttatactggctaaagccaagaatgaatttgccgaacaagcaggcatcataagggagtaca

SEQ ID NO: 366973 - DNA, 1016 bp, Homo Sapiens
ggggggaggccgcgtattgttacctaggggtggtttcttttcctgcagtcgcgatgtgtgattgcagatggaaaacaaagtattttatgcctacgtttctaagatagaagaaatggacttgttgaaaagaagccagtttgtaaaggacacagtaggagaatttaaggtaccaccaccagagagaggttgagagtgcgtttgacttttggttttgtcaaacgcgaggttttccgtttccttccggggcaagttgaacctgtccagcccccgtaggctgtgggtcaaaagtgccggtcaaaatggaagtgaatccccctaaacaggagcacctgctggcgctaaaaggtcctgtttccctctgatttggcaagagagacaatcttgcaataataaattaacattctagctctgaggagttcaactaagaaattttctcatcactaagagtaactggattactgcagaatgactacagaagtaatattacattatcgaccatgtgagagtgatcccacacaactgccaaaaattgcagaaaaagcaattcaagactttcctactcgtccgctatcaagatttataccttggtttccatatgatgggtccaagcctccactcagacctaaaagatcaccacctgtgatttctgaagaggcagctgaagatgtgaaacagtacttaaccatttcagaacatgatgctaagtcacacagttatgattgcacagtagatctattggagtttcaacctagcttgaaaaagcagcatttaacctggtcacacacactgaaggaacagactaattctggaaatctgggtaaacaatcagaaaagggaaaacagcacaagaggagatcttggagtatttcccttcccagcaataattgtactaaaaacgtttctcctttgtctaaaaaattgcaagatagtttaaaaggcactaaatttacactcactttatagagcaagatggacaatagaaacacactatttgtaacagccaaactctggaagaa

SEQ ID NO: 366974 - DNA, 1002 bp, Homo Sapiens
ggggtgggtcaaaagtgccggtcaaaatggaagtgaatccccctaaacaggagcacctgctggcgctaaaagtgatgcggctgactaagcctactttattcaccaatatcccagtaacatgtgaagagaaagacttacctagagatctctttaaccagctgatgagagatgatccttcaaccgttaatggtgcagaagttttaatgttgggagaaatgctgactttaccacagaattttgggaatatatttttgggagagaccttttccagttatatcagcgttcataatgatagcaatcaagttgtaaaagacatattagtaaaagctgatcttcagacaagttctcagcgtttaaatctttcagcctccaatgctgcagtggctgaacttaaaccggattgttgtattgatgatgtcatacatcatgaagtcaaagaaattggaacacacatcttggtatgtgctgtgagttatacaactcaggctggagaaaaaatgtatttcagaaaattcttcaaatttcaggttctcaaaccattggatgtgaaaaccaaattttacaatgcagagactgatgaagtatttctggaagcccagattcagaatatgacaaacctcaccctatgtttatggagaaggtttcactggagccatctattatgtacaatgtaacagaattaaattcagtcagccaagctgggagaatgtgtgtctacgtttgggtccagagcatatttggaaccaattggatacaccgccagtaacttaatactgggctaaaagcccaaaggaatggcactttggcagaaaaaagcaggcattcatttaagggagttaccagtacattggcacacattcggatataggtatgggaaaacacactctaggttgaccagcggaaggttaccggaccaggccaacttccaagaatgggcccgggttcagcacaacattcaggtggcccgggagggccaaaccgaatccgtaaacctttaagaac

SEQ ID NO: 366975 - DNA, 1451 bp, Homo Sapiens
  misc_feature (962)..(962): n is a, c, g, or t
  misc_feature (1288)..(1288): n is a, c, g, or t
  misc_feature (1400)..(1400): n is a, c, g, or t
tgagactcagcaacttaccctcgacctctcggggggaagcgggcgccgggaccggtccggaattcccgggatgcccaccgaccggcctcgagcgccccggcgggaggtttttctatatgagtggagaagaacagctggttaccagggaggtcatacaacatttttttaggatgtctgaagatgaagaaaaagtgaaattacgccgtcttgaaccagctatccagaaattcattaagatagtaatcccaacagacctggaaaggttaagaaagcaccagataaatattgagaagtatcaaaggtgcagaatctgggacaagttgcatgaagagcatatcaatgcaggacgtacagttcagcaactccgatccaatatccgagaaattgagaaactttgtttgaaagtccgaaaggatgacctagtacttctgaagagaatgatagatcctgttaaagaagaaccatcagcagcaacagcagaatttctccaactccatttggaatctgtagaagaacttaagaagcaatttaatgatgaagaaactttgctacagcctcctttgaccagatccatgactgttggtggagcatttcatactactgaagctgaagctagttctcagagtttgactcagatatatgccttacctgaaattcctcaagatcaaaatgctgcagaatcgtgggaaaccttagaagcggacttaattgaacttagccaactggtcactgacttctctctcctagtgaattctcagcaggagaagattgacagcattgcagaccatgtcaacagtgctgctgtgaatgttgaagagggaaccaaaaacttagggaaggctgcaaaatacaagctggcagctctgcctgtggcaggtgcactcatcgggggaatggtagggggtcctattggcctccttgcaggcttcaaagtggcaggaattgcagctgcacttggtggntggggtggttgggcttcacaggtggggaaaatggatcacaaagaaagaaacagaaaatgatggagaagctcacttccagctgtccagatcttcccagccaaactgaacaagaaatgcagttaaaaaccaaatttcagtatcatggggtgccaacatgtctatcctgaggaccttggctgctgtgggacactccgtcaccttttgggaacacaagtatatcaagatagtggcaactgatgttcaagtgggattgaagtgtgataaatggatatattttgttgtttgctggggtgttcatggagatgttaagagattgaggccctggnctgagggtatataatgtatgtcaggtaaagtttgaagactgccaaggagcagattttctccctggaaatgtgaaaactggaacctataactctggataagggacttggaganggtgtagaaacgttgggggttatgggaagacctaggtttccttcccataaa

SEQ ID NO: 366976 - DNA, 1127 bp, Homo Sapiens
cgggaggggaggctgcaggtgtgggtatggcaaggttcctggaaaaggggctggaagggaaaggggaggaagatggagggaggagccgtagcttcacagatagcgcctgggggctgtggcggccctccccaccccacacacgctggcctctcacacggcacccaggcagggcacccgcaattcaggctgatgctcggccccctcgggcttcccctcttctctggtcaccctgtcttcccaacccaactggcctggggccaccccttgccttggggagccccatgcaacagccacccaggcctgatagagaaagaacactgcttgaaccaggagggtgaaactaaaagggatggctggagggagcgccggaggcccctctgggtgttcagaaaacccaggaccctctgaagggaccctgggggaggcagggagggcaggcagccggatgccagtggccatagacttataagtctaagaggggagcctcagctggtcggggggctgcaggtctcgtaggtgaggctgggcccttcctgctgggaaaagcagaagagcgagagtccatggcaggagaggcaggtgggctcgctaggcggagctcagctgggccagcaggcactgtggtccccttggctgaatagcacaggcgacccctaggagcaacaggccaaggtgtgtgagcctgctggtcggcgatagtgcttcagcgggggccaggaccctgccttcggtcacacactagcagctatggtggtacctgggagggagggaagggggctgtgtgtccccgcctggctgtggagtgtggagtgtgttgtgggatgaccgtgtgcatgggactctcacctagataccactggattgccgacagatagatgaggtgggaccctgactatcagccctgctttgcaagggaatttggctctcaggactcacaggctgggagctggaatacctgccctgggcagcatgactcaaaactgcacgacaggtacgggcatgccagggattgatgttcttagggactggttcagtgtgtgggtcaggagcaggtcgaacaggccctgctcctttaacccttgtgaggggaactgccacccagggggccagttcttgactaaggcctg

SEQ ID NO: 366977 - DNA, 1056 bp, Homo Sapiens
gagaattgatccaatgactgctggtgtgtagaatgaattgcgatgaaacatctcatcctacctgctcctcattcccttttctgccaacgatttatcttcagaagacaagcagatgaggagacaaaacctactgatgtgggtacccaagcaggaacccccctcttgcaccggcgactcacgtgggaagaagaattcactgagctgaaatggagtgagagctaagatgctctcagaatattcttaaaatgactgtgctgcaaagaagcccgggtgaatagaagaaaatagaaggaatggtggatacaagtgaaggttaaaatgagaccccatttatcgcaccagctgttggtgatttcagcgcacctttccaagcctcttgagagttctgctctaaccacactgccccctagtgttctctcgctttggtgcaactgcaggtttctcatacttccggagaaatagaaagcaccagatgacagccaccacacacttttgtccccattgcaataggatgcttctaacaatcgtaaaattatgaaacactgaattccttaaaagttgtccatttgtggatttatctgatggtaactattaaatatttaaaagtaactttaaaaactgagtacgtaaggcaggtagagatcaaaaatgaaagatcatgtgcagcgaacagactactgggaaagcagatggggctctgcgcctttggtgctcacagctgtcgtgcgatcctaggatacctgacttctctgcgtcgagtagcgacagttcgcttagtgcgcagcattccgattggtcgctgcggcagtgtcctgtctcatctgcgctccgtccggggtcggcttcctctagtattccgtagtgcatgggcagtcggcttggttctgttgcggctggtcccctggtccgtcctccctgagctcgcgtgtgcgtctgccgccacttcttggcctctggttgctctcggttgtcggtgcccgcggtgcgttggcgtgcggtcgcgttggtttgtgctctgctccggtcgtgcgtgtctcggtgcctgtttcggcgtct

SEQ ID NO: 366978 - DNA, 1149 bp, Homo Sapiens
agcggagcggcgcgccgccctggacggggcgcaccgactgcgcgcgcggctgcgggcaaacatcgggagtcctgcctcagctgccgcttctccagcagcagcttcaggcttctcccgcaggagcttcgggcttctcctggtagagacgtgggaacttttcttctcctggcgaggctgcagaggtgatgggccgctcccggggctcccgcggggaggcggcacggtgagcgtcctcgggctccggtgcggcgatcagtacctagttccggacgcgccggtccgacttggatgccggctctagtcgagtcttctgagctacgataagttttttggaacggcagaaatgattggttctagcaacagatgggaatttggagtcactctgaaatatatcctggaataagtgtgtttgactagaaccacatcttatgaggtccccaaggatgagagtctgtgctaagtcagtgttgctgtcgcactggctctttctagcctacgtgttaatggtgtgctgtaagctgatgtccgcctcaagccagcacctccggggacatgcaggtcaccaccaaatcaagcaagggacctgtgaggtggtcgccgtgcacaggtgctgcaataagaaccgcatagaagagcggtcacaaacggtcaagtgctcttgcttcccgggacaggtggcgggcacaactcgggctcaaccttcttgtgttgaagcttccatggtgattcagaaatggtggtgtcacatgaatccgtgttagggaaggagaggatttgtaaagtgctgccagattactcaggttgggcctgtagcagtggcaataaagtcaaaactacgaaggtaacgcggtagcgaagagagaggtgtgcttcaatcctggaggggcagcaggaggcggagctcttttgcttggattcccatacatggcccctctgcagaaaatgtctaggatttcagcaacttcatatttgtatattgtgagctgtgagaaggtggcattcacttaactggccagcctctctgcttcgtgatttatttcattgaattataaccacaagcacaacccatttgacatcctctctcggattccaaggagcatactccaaatcagaagaagaaccaaatcgagtcttccaaatggtttcaca

SEQ ID NO: 366979 - DNA, 217 bp, Homo Sapiens
ccacgtcgtctttggcacagagaaaaagtagcaggagcacctcgaaggacagccacgacgtggggcacggctcgcaggagttgttctggagcctcacggcctccagcgcccggaacagctcagtgcggacgtcactcacggcccctgccggcttcagccaagcactgggtcacgcgctcacgcagttcccgcagggcgctctcctgctccatcagct

SEQ ID NO: 366980 - DNA, 607 bp, Homo Sapiens
cggcttcctggggcggaactgtttcgcttttccccgtcccagtggagggtggggtgggggggtcgcagccctaagcctctgggagacatggagcccaggagggcggcgcccggggtgcctggctgggggtctcgggaggccgctggggtcggcatctggccgctggagcttgtgtaccatctagccggggccctgggcactgagctgcagtgatctggcgctgccgtttcgggcctggaggctggcggcctggtgctggttgcctgctagtggtgctgggcgctggagctcttggaacaggctgccgtggggcccgccccggactcgctgcaggtgtcggcgcagccggcggagcaggagctgcggcggctgcgggaggagaacgagcgcctccgcagggagctgcgctgcggggccacaggaggagcgctgcgctgctgcggcagctcaaggaggtcacggaccgacagcgggacgaactccgggcgcacaaccgcgacctgcggcagcgcggcatggagacccgaggcgttgcaggagcagctgcagcgcctcctgctggtgaacgctgagctgcggcacaagctggcggcatgcagacccagct

SEQ ID NO: 366981 - DNA, 734 bp, Homo Sapiens
cctgttcgctggtctctcgtgacttgctggattacaccttgtatgatctgattatcaggccatggttcccctgatagttgtttgcgtcggttggtaatttccatgatgatagattgcagcgcatgcgctcttgcccgtccagcgacttgtcgcgaggtctctcgtcttcgttgcttgaagtcagtgagtccaggacccaccagttccgtacacactatgctccacttcggggctccccgtgccctgcgtcaactgcactctggcctgggtggcagagagagagaccctatctgttcccgttggttattcgttgtctcatgcaggcacagagctgatcaaaacagcaaaagcaaagcagtgcccctggcccagttctgaagccaaccttcctgtaatcacccagagcccatccctggttaggacttgctgtggatcctcaggtgactccatctcaggatacagggactgagaaggtgtatgcaacatctcagacccagaaaccgttgattctgccaaaaaacacagcaataaccacatcccaccctcttgatttaaatgaaagggtttggaggaataaaagatgaacctttttttcttctttgtcagatcttgcgctcatttggttctggtggggaacaacagctggacgcttccgaagcccagcttccaggatcgccctatcctggccctgccccaggaaccgccaacctggactctacccaggacctgccccg

SEQ ID NO: 366982 - DNA, 1360 bp, Homo Sapiens
  misc_feature (210)..(472): n is a, c, g, or t
  misc_feature (974)..(1017): n is a, c, g, or t
gctgagtggcgaattcggcacgaggcaggcgtggaccaccgcacctggccaaaacaaagtttttaaaagattcctttaataaacatttacaataacatcaagaaatataaacgacatagcaaatatgtgaaagccagccagactctcaatggcatccagaaacataaactacatagaaaagacatgaaagccagccaggcttggcttcgnnnnnnnnnnnnnnnnnnnnnnnnnnnnnnnnnnnnnnnnnnnnnnnnnnnnnnnnnnnnnnnnnnnnnnnnnnnnnnnnnnnnnnnnnnnnnnnnnnnnnnnnnnnnnnnnnnnnnnnnnnnnnnnnnnnnnnnnnnnnnnnnnnnnnnnnnnnnnnnnnnnnnnnnnnnnnnnnnnnnnnnnnnnnnnnnnnnnnnnnnnnnnnnnnnnnnnnnnnnnnnnnnnnnnnnnnnnnnnnnnnnnnnnnnnnnnnnnnnnnnnnagaagaaaaaaagagatatgaaagcctatatattgaagactaccaagtactgcttagagcagttaaagacctttggaatagaaaatgtttcttcttgcatttcaagattgcttttgttttggggggacacactattttttaggaatatgaagttcttcttaggcattcctgtaaaaaaggccacttcttgataggattgtattgaatctgtgggttgctttgagttgtatttttatcttaaccatgttacaacttccaacccatggacacaagatgtctgtccaattgatttaggtcttcctgaatctcctcgagcaatgttctgtagttgtctgtgtacaagtacggcaccttcttgaacaaatttattctcaggcatattattcttacaagtgctattataaatgaaatcattgtgtcaattttcttctcagattgttcattgctaacacaactgattgtttgctgaaagtttgctgaattcacttattaactctagtannnnnnnnnnnnnnnnnnnnnnnnnnnnnnnnnnnnnnnnnnnnctggcctctgtatgcatgtatgtgtgtgcgcctctgtaggtattatgggggattctctatgtataggatcacaaaatctgcaaatgagatcattggttctctgtcaagaaatacttttctcatggttattttgcaaaagatatttgggcaggtgtagcattgtaggtgacagttttcttttaaagttccttatcgcaaacttctgtttgtatgaaaatctttgcccccttatattagggcctgtatgtacactgttcttcccttttaatccttgagagaatcctttatacccggctctgaggattgcatgggtcctgggaattcccgagttctgttcaaatct

SEQ ID NO: 366983 - DNA, 1037 bp, Homo Sapiens
  misc_feature (740)..(795): n is a, c, g, or t
agctggtacggtcgggattttaggatgaagatccatccagatccctaaagaagatcgctgttcccattccaatgaaactctgtcctattgacatgctatgggatagcagacaaatgtaaatgtgttttgcaggaggaaaagtccacttgctggaacagaagaccactctcatctccaggaaccagctctctgtgtggccacacagtgatgtttgacgaagatcgttgcgagatgtgtctgtaaaacaccatgtcccaagagatctaatccagcaccccaaaaactgcagttgctttgaggtgcaaagagaagtctgggagacctgctgccagaagcacaagctatttcacccagacacctgcagctgtgaggacagatgcccctttcataccagaccatgtgcaagtggcacaaacagcatgtgcaaagcattgccgctttccaaaggacgaaaagggctgcccaggggccccacagccgaacagaatccttgattcagcgttccaagttaccccatccctgatcattaataacagcatgctgcattagccaagtagctgtcactgtcataaaacccaggtgttcaccataaacaaatccatttcaacacagcaaccacagatgaatccgaaaccaaagcataccattcaaaaccaagctaccggagtccccaggtacacagatcggattgtctcctagcctgcaagacgcccactgaggcaccaaagaaacgcagcacnnnnnnnnnnnnnnnnnnnnnnnnnnnnnnnnnnnnnnnnnnnnnnnnnnnnnnnnggacgcaccgcacaaacggccagccaccccccctgcacacggcacacagacaccataatgaacttgatacaccaccgtatacaacacgacgcaccacatggaagcaacacaagacacccaaaacgacaaagacaacaaaactagccaccacaatcacgcaacgagcccacaatacccaaacacagcgcgagcaaaacacacgcacagaacaaccaagaaccagagcaacacaaacacgcacc

SEQ ID NO: 366984 - DNA, 893 bp, Homo Sapiens
cctgtataggaccagggtatgaggctgggatgtccgagctggtgccagctcatacaagaagcattggtgcaacattttaaaaaggacccacatgcctctgggtagacacagaccacactacgacataagctctgcttggtgaatggagcctggcaaggacttcagctcccacttgatgtgctcttgcacaagggcaatgacctatgcataggtggcagtcctggagagggtttgctcagtggtggtgtgagcagaagatgtgatctagccacccttgggctgttccactccttgctggaaagggccgatttgatttgtctggattattttggtcaacaaggggtcccttcttcttttcaccactctgtcggtttagctgaagaggaagacctctccaatgaaagaggaccatttttcacgttcaagtgtatgcatggctatcctctgcttcttcagcctccaagggggcttttaaggtttaatgctaaagaaataaccctgtattgattcttgattcctaagaaattatgctgtcagtctggttgtaggcaagggttgcaattttcccttttctctcggagcctcagcttggccgcctttagcccaggcagtgcggaggggaagcggggaggagagaggagcctgcagggctgcagcagccgggcagtcccggaatctccggactgcgtccctgccccaagcccgccgggaacccgggccgtggacgcccccacccgggggccgcggcgaggcagggcgcgcggggttcagcaccctcgaggctggttccgaaggctcgcggccctccccctccgtccgccgcacgtcgcggctagccgcccctccccgccgcagcagggaggccgccggggcccgggggacgcgatcccgct

SEQ ID NO: 366985 - DNA, 546 bp, Homo Sapiens
  misc_feature (415)..(479): n is a, c, g, or t
ggcggtacctacttttcacagggaaagttaaggtccatagtataaaccttagagcacctacctaacaggacaaaataagcaaaaacatatgactaataatctattagttgaaataaaataaaattcaaaattaaacacttaatccaaggtaaagcatcaaaagtggaaaatagtaataaagaacagattaaattttatggaaaataaattttatgatagtagatttaaggccaaaatatagataacaatattaaatataagtagtctaaaactactatttaaagtaagaattttaagactaaatttaaaaagtaatgttaaatcaatataaagacaaaggttggtcagaaaaaataggttgaagatagctgtacttcaccatgatacagtaagaggaactaaactaaattctttnnnnnnnnnnnnnnnnnnnnnnnnnnnnnnnnnnnnnnnnnnnnnnnnnnnnnnnnnnnnnnnnntataactcacacgtgattttataaccattgacaagaagctgaggatgctgatacctgtggaaaagta

SEQ ID NO: 366986 - DNA, 1633 bp, Homo Sapiens
actttcccacagggggaggagttcctaagctttgtttgtatgacgagccagtgcccaggtgagcaggagggtcttagcacagtcacctacacactcatttcgatgctctgaccccttatcttggctagtcaaagcgtggtctatgagtttgcattttgataggatcccctggtgaatcttgtgcatgtcaaaggaagagaagaactgccctcaaaatatagagcaggtgaactaaattattaacttatagaggtaggctggctatttatttatgtatcttgttgatgggaagattcaaattgatatacataatcacccccataaggatttcaggtaaaaaacaaacaaacaaaggtttagatgttagatatattttacaattaccacaccagtctttttactacagcatctagtaacacatttaccatagatttagatggaaattttcatcccataagcctttgttagtatttttaaaattgaatactcaataaatagtggccaagttgaatctcttagaggaatctcactcaaactacagtcatattttccaataggccccacaaaaatcattgctctagagtaatttaatatatttatccacctctttagacacttaggtaagtataataatacaagttttgtgcgtgtgtgtgtattgtgtaccttgtggcttcttgcccagtttctgcaacacctgaagctgatgcatgtttaatgtaaataatgtccagcaatgttacaaatgttgacttttatgtgcccatcaggaaaaaaagatgaatgttattgtagaggaaattttcattctggaaaaaatgcatactatttgaatattattttcatgatttccacagatattacacacagatattatattccaaggattatgtttcaaagtcatcaaaaatagaaaatacatctatatttctaactgaaaataataacagtaagtagcccagctttggggaaatgtaataaaaatattaatgaccatcacaactcattaaaagcataaattgtgcaatgatttaaactacatgttcttcatatgaatgtgtgtagaaatatagacacattggataaatgctatttaaagtctgagtgcgttggtaactgattcagtcatctgtaggttgaagtgattacttttatctgccttcatagtgagaattagatttctattcttggtaaagcagggaatatagattgtgcatggagtaaaagaattcaatccttattaataatgatgggagatgcgctgcagaaaagaaagcctgtcagagtaacttattcagttttacatcataatcagaggtgtgtccatctctgttgaaggcagaattaaaaaccccttcaacatttttaaaataatagatgaaaaacatctcaaagtctcctttaaaatttgaattgacgattccacataaaaggaagggaccaaaaatatcttaaagaaatacttcacggatggaagtgatgttttaagtgaaatttcatcaaggagaagtttttccaaaaagtatttttacctcaggaagaatctcattagtttattctgtaaatagttcctagtaaaatgataaagacttgatttttcaaaaacaataaaaaacttacacggtttaatcta

SEQ ID NO: 366987 - DNA, 1338 bp, Homo Sapiens
gttctacggtgttccaaagtcttccctggcgaagagaatattttcctaaattgtacacccaaagaggaatgttgtagaacccggccctgtatcccatgcatgaaggttgccgggcacttcaggtgcctgtaacccctggcacaccctgacctagcacaggaccttcttctgggttgccctgagtcttccgcccaaggtatttgcaacacaaattgttaccacccaggcctgaagcccacgacgaccagctgggtccagggatatgtctttcgttgatgtagttcaccatggctcccaaaattcccacgtgcaagccataaggtgaacatgcgtggcgaggtcaattcaatttggcaggcacccaggtggttcagcacggcgcaccgataccatttttctgggcgtagtcaacgaaagtgcggatgtattgcttctcgctgtgattggcaattccagggcagatgaccatggtgatatcatctccaacacagtggctcacccaagggctcgaagaggtcgaatgtagaagtggctccatcagacatagtgatgaaacttcccggtgccaataaggaatgtggcgaaccctcaccctgccaatcttcccatacaaggccgttctggaatgtgtccaccttttcccccagatcaacggtggaatgtattctttggtcagaagaggacagaacttgagcagaaagcgtgagagccccgagtcctggaagtagaggtcaggtggggctgtggggctcttcaggttcaaacaccggacgatcacgtacagcacagcagccactgcagccagcttcactccatcaaacacggctgggagttcgggagtctccagcatggcattcatcttgatcaatgttacttattcttcccactgcaaatacgaattttccttgaagagttgtacagttgggccggtcaggtcagatctcttattcaaacaaacctaaaagccatccatctctttcagctgtgtggctctctgatgctgaattctgccacctgggagcaacagcgcccctcagggctcggccaccagaccctcggacgctgtgagtagaaacaggatctcctgccagtttagagcagaaggcctgaaggtcacatggattcctctgtgaccaagtcttaggagacaaatgctaccagctaaatccagataaatatgaaggattcatctgtgcctgcgtgtgattgactacaggtgctcagctcgcccccagtctggttcctgcagctccccggctgccagcggcgctcatggatatacagccggaaccctggccagtgcagctcccgccgctaccggccccgcccaagtccgct

SEQ ID NO: 366988 - DNA, 1359 bp, Homo Sapiens
  misc_feature (1212)..(1212): n is a, c, g, or t
cttgggcggggccggtagcggcgggagctgcactggccagggttccggctgtatatccatgagcgccgctggcagccggggagctgcaggaaccagactgggggcgagctgagcacctgtagtcaatcacacgcagcttttaggtttgtttgaataagagatctgacctgaccggcccaactgtacaactcttcaaggaaaattcgtatttgcagtgggaagaataagtaacattgatcaagatgaatgccatgctggagactcccgaactcccagccgtgtttgatggagtgaagctggctgcagtggctgctgtgctgtacgtgatcgtccggtgtttgaacctgaagagccccacagccccacctgacctctacttccaggactcggggctctcacgctttctgctcaagtcctgtcctcttctgaccaaagaatacattccaccgttgatctgggggaaaagtggacacatccagacagccttgtatgggaagatgggaagggtgaggtcgccacatccttatgggcaccggaagttcatcactatgtctgatggagccacttctacattcgacctcttcgagcccttggctgagcactgtgttggagatgatatcaccatggtcatctgccctggaattgccaatcacagcgagaagcaatacatccgcactttcgttgactacgcccagaaaaatggctatcggtgcgccgtgctgaaccacctgggtgccctgcccaacattgaattgacctcgccacgcatgttcacctatggctgcacgtgggaatttggagccatggtgaactacatcaagaagacatatcccctgacccagctggtcgtcgtgggcttcagcctgggtggtaacattgtgtgcaaatacttgggggagactcaggcaaaccaagagaaggtcctgtgctgcgtcagcgtgtgccaggggtacagtgcactgagggcccaggaaaccttcatgcaatgggatcagtgccggcgggtctacaacttcctcatggctgacaacatgaagaagatcatcctctcgcacaggcaagctctttttggagaccatgttaagaaaccccagagccctggagaacacgacttgagccggctctacacagcaacatccctgatgcagattgatgacaatggtgatgaggaaagtttcacggctataactccctgaaggaatactatgaggnaagaaagttgcatggggtacctgcacaggaattatgttccctctcatgctgggttaatgcagctggagaatccgttgggggcattgaaagtcttcctaccacttccaaaatctcctttcgaagaaaccaaagaaagctcctgtttgg

SEQ ID NO: 366989 - DNA, 622 bp, Homo Sapiens
cgcaggcggtcccggcccacgcgggaaggtccttagcccgggcggcggcgtgaccggcggagacccgtggaggccgccgacgattgcggggccgacggaggccgagacggggttggccgagccccgggccctgtgcgcgcagcggggccaccgtacctacgcgcgccgctgggtgttcctgctcgcgatcagcctgctcaactgctccaacgccacgctgtggctcagctttgcacctgtggctgacgtcattgctgaggacttggtcctgtccatggagcagatcaactggctgtcactggtctacctcgttggtatccacccacatttggcgtggcggccatctggatcctgtgactccgtcgggctccgtgcggcgctcggtgtctataccatccctgctggcgtcgtctgcctgctgtccaccatctgcctgtgggagagtgtgccccccaacccgccctctgccggggctgccagctccacctcagagaagttcctggatgggctcaagctgctcatgtggaacaaggcctatgtcatcctggctgtgtgcttggggggaatgatcgggatctctgccagcttctcagaccctcctggagcagatcctcatgtgcaa

SEQ ID NO: 366990 - DNA, 1135 bp, Homo Sapiens
ggctggaccggtccggaattcccgggatgtggaggccgccgacgatggcggggccgacggaggccgagacggggttggccgagccccgggccctgtgcgcgcagcggggccaccgcacctacgcgcgccgctgggtgttcctgctcgcgatcagcctgctcaactgctccaacgccacgctgtggctcagctttgcacctgtggctgacgtcattgctgaggacttggtcctgtccatggagcagatcaactggctgtcactggtctacctcgtggtatccaccccatttggcgtggcggccatctggatcctggactccgtcgggctccgtgcggcgaccatcctgggtgcgtggctgaactttgccgggagtgtgctacgcatggtgccctgcatggttgttgggacccaaaacccatttgccttcctcatgggtggccagagcctctgtgcccttgcccagagcctggtcatcttctctccagccaagctggctgccttgtggttcccagagcaccagcgagccacggccaacatgctcgccaccatgtcgaaccctctgggcgtccttgtggccaatgtgctgtcccctgtgctggtcaagaagggtgaggacattccgttaatgctcggtgtctataccatccctgctggcgtcgtctgcctgctgtccaccatctgcccggtgggagagtgtggccccccaccccgccctctgccgggggctgccagctccacctcagagaagttccctggatgggctcaagctgcagctcatgtggaaaaaagcctatgtcatcctggctggggggcttggggggaaatgatccgggatctcttgccagcttctaagccctcctggaagcaaatcctcggggcaagcggccacttccagtgggtttttccgggcctctgtggcgctctcttcatcacgtttggggaatcctgggggcactgggcttctgggcccctaatggggaaccggaaccagccacttcactggaggccacccaagatttggcctgtggcctggttcttctctgggccggcgggccccctttggccctgggggtcccaacctgcaggggacagaacccttgccccttggtggccacctggcccccctgctttggg

SEQ ID NO: 366991 - DNA, 660 bp, Homo Sapiens
  misc_feature (48)..(68): n is a, c, g, or t
  misc_feature (263)..(271): n is a, c, g, or t
  misc_feature (456)..(456): n is a, c, g, or t
ttcatcattccacaaagattttattcacattaaacttgcacagtagcnnnnnnnnnnnnnnnnnnnnnctaagccacatatcaaagaacaatatacaatagagatttgaatttctcaatagcattggaaggtatttccataaataacatttacaattctaatgttaggactttcaaggtgtctgaagcttcacagtgctagaattgatttttatcagaacacatgcaaaaatgtgcaacataataattcatattaatgacacnnnnnnnnngcacgccagttatttgtcattccagcacggccatgccactctatgttctaaaaacaaacaaacaaccccccaaatccgggtcccattcattcttcaattatgcctttagtcactctgctttattatattcaaacagtcactgttagtgctcttcaccacgactttcaggttgacgtcactccctnctgctggctgtcaggactgggggacgcccctctcccagactcaccttcttccggatgtcttcatcatttgctccaagagaggcatagagcttgaatgcagctggcggagttcgtgagcatgttttaaatcatgatcaagctatggggaaaaaaaggatatgttccaactcagtccataaattcaactttcaataacattaactg

SEQ ID NO: 366992 - DNA, 1031 bp, Homo Sapiens
  misc_feature (727)..(727): n is a, c, g, or t
ctgagtgctagatacatttgagactagaagtaccaggtgtgtgtgtatgtgccatattcagggtgagagaggatggaagaacatgtctaacccatcaaaattattggttaaaaagtgggtttttggtcgagaacccatttggaaaaccttccaactcagagcatattctatgaccttcatgatgagtactgggaaaatcagacttaaaattccaacaactttgaataatttacaaaaacagtcacaaaaacaccagaatatcaagtttgaagggaaaattagtctcctgtccttcaaaacaaggacaagagctatttcctatctttctttcagcatcaacaggctttgtaggaatggaaaagtacatttaaagggttgtcctgagaaggccaagtcccttaacctttctattcttgttagaggaggtacagtgtggctgaggcggagagcaaccacactttgcaactctccaggcctggcactctgaaggggcaaagaaatgccagagaatatgggggaagcccagacctccacattcccttaaggaattctggtggtggcagcaccagaaacaaggtagtcgagagaaggataaattccaaatatactagaaacagaaggtaaccattaaatcttgttggcagataaaagtctttttttgagtatgtgaatgtgttcttacagggaaaatgtgttttcagggtgaacagttcctttatatgaaggntagcattgtgtcaacaagaaaaacgtgtttgaagcagtctctttactagcattgaaggattttatactaacctaacccacatgccttgaccccagttccctttggtaaccaatggcacgtcatagccagataccctgtggccatagagctcagtaaacactgcctgttgtacctcaagggctaaagcccagggcctggcttcatagtctgcacagggtcttacttatcatagagcctaacgtagggttttgttataattccctcaaactggatcatgcctctttttattttggttcacacataa

SEQ ID NO: 366993 - DNA, 615 bp, Homo Sapiens
agctctccttccatgtccttggcatctccccagccttgtggcctggccagtcatgaggaacatcggggtgccgccgaggagctggcatccacccccaacgacaaagcctcctctccaggacacccagcctttcttgaagatggcagcccatctccagtccttgcctttgctgcctcccctcgacctaatcatagctacatcttcaaacgggagcccccagaaggctgtgagaaagtgcgtgtgtttgaagaagccacgtctccaggtcctgacctggccttcctgacttcctgtcctgacaagaacaaagtccatttcaacccgactggctcagccttctgccccgtcaacctgatgaagcccctcttccccggcatgggcttcatcttccgtaactgcccctcaaacccgggatctccccttcccccggccagccccaggccacacctcggaaggatccggaagcctccaaggcctccccactgccattcgagccatggcagcgcaccccaccatcagaagagcctgtgcttttccagagctccctgatggtctgagggtcccactccttgcccactttaccatagcagaccagtgcccttggtggcaggtccc

SEQ ID NO: 366994 - DNA, 908 bp, Homo Sapiens
gatgctcacggcgcgcagcatgaaggacagggacaggtgcatgtggatgtagttgcgcgtgcagtgcagccgcctaaagtaggccaggatgagcacagctacggtgagggacgccagggacacggagtagcccacgggggtaaatcaaggcccagccggtgcaaacacctcccgttcacgagtctcattggtgagaaagtttgacacactcggctgtagttggccccacgtcctgtgtgtgccacaggcaaccagctcccagctgccattgcggtcacagcgtcggtaggcatggcctttgtgattgaagtcataaatgtagtccggacagggcaacagccaccacctcacctggtgcccccagcggccaagcacaggatgtggtcccattccggcagacaggggcgccctcggtacctgctgccaagtgggtgcctccttgtcctcctcagactcagggtagagcttcccagatgccttatctttcctgggcttccctgatgtggacgcagatgtccatcccttgtcgtgattccattatgctggctggcctctgcaggacctccttgagccgtttttcgcactgggcctgagcacggtgcagcaggaagatctgttcctctttagtcatgacgtcatctgcataccaccagcgcgtacgcggagactgagcacggggcagcagagcaggagcgccagacacgggtgcgatccgggcggtccccatcgccaccgcctagggccgcgtccctcggggcagccagccgccgccggccctggtggtggtagggggtgacagagcatgcgtcaggctggccgccccgcccacgccccggccatatgggacccacggcgtccacggcggcccgaggccccggggcccggcgcggggcccactgcgcatgagg

SEQ ID NO: 366995 - DNA, 1363 bp, Homo Sapiens
tgtttgaggaccccagcaaggtctccggggtgaggtccccctggttcatccgaggagagatggagctgaaggaggctcacgaggctgacaggtccaaagtgaaggcaatgaagagaaaggaagaccatgatgcagaccaccttcctgtgtgccagaccctaacgtgagctcgctgttttcagccagcagggcctccagccgccgccggagggcagcattctctcggcggagctgctggttgtcagccagtactgcttgcagccgagcctccagtccctgcagatactctttcttctttctccgggactggcaggctgactcccggttcttgatcattcgctgctgccgcttcagcagctttgcatccacttcaggcgggcaggagtgtccaggcataggagcgggaacgatgctcttcctctcaggccgtggtagagagggagccggcccttcaggctggactcgaatagcaccctggatgaggacaactggggacactgggggtggctggacaagggacctgcagaaaggactgtggtgctgggaggcacagctctggatggcattgggacagtggttagcactacaggtttgggctgcagtggcggcttccgggtgggcagggctttgcctgaggagccatcaagggatgggcccatgctgatctggacagctccaagtgagggggctgggacatcccacaggaggcatcctgaaggggacagggactctgtcttcacttccaggacctcctctcctataaaagcctggctggaggagtcggctgagagcagggaggcctcagagttgacggaagaacatggagagacaggttctatcttggtctggacatctgaggaatcatcagaggtggggataacgttgatctggacggtttcaaatgaggatgttgggtcatctcccaggagacacagtgggggtgccaaggactctgtcttcacatggagcacctcccctaccccaagagcctcgctggatggctctgtggagagacgcgatgactcggagctgagggaggaggaagagcagggggaagatggctcagacttcacctgaagatctgggaagatcggcaggagttcccatgggggctcagaggggctgacatccatccccacgtccagggagctgccgtcaaacgggacatcctgctccgggcaacggaagagctgcgtctgctcctcggccacttcatctaggccagaatacaaggtgctgttctgcagaccccagtcctccgggctaagcaggttgtcggtgaagaaacgcgtcgggtcagcaatctcgctgagcagcatcagctccgccatctttcccccccacatcccggaaattccggacc

SEQ ID NO: 366996 - DNA, 897 bp, Homo Sapiens
gggaaatcctgcgagagctcaattcgttgcccgtcattgatacttaatgtaatgttcctagatagaagttaaagaaataccccaatgaaatgttcccctgaaagtaaccccgtgacgagacaacccaagtcctcctgcctcggtccttgctcaaagtgggtcctgcagtggggaaagaagccttcaccatggtggtctggcctggctggtgcaaggctggcccacttcagctgcaaatcagcctccactcacctttaaagaatggttcttcttgtaccagaaaggggaagttgtagcagccagaggagagggaggaaaacaaaaacaaccataccaacaaaacagggcttaagattgtcgttcaatgcgcatcaggtacttattaattctactggataagcacttataaataaagaacagttaatcctcatcccaggccatattccattgttaggagtcatcgtacagagggttgttgtagtttccccaggacccgtagtcatggtcgtccaaaagtcttccataggaggaatgcctgatttttaggtaggctgcaactccaaacaccagcagcaccacggcaatgactgtcacggtaatggcggcgatgctgcctgcagttaagatgcaaagagcgaagagagtcttgtagaccatggtagcctggtatttggtgcccagcccggggcgggcggcaaggagtttgcggactgacagagcgcactgggcgctggtagcgactcctctgccgggtgggctgcggtgggagccgggaggcgcgaacagctccagtggagggcgcgaggcaaacgaggcgaacgcagcgcagctccgtcagctgcgtgccctccggtgctccgcgctcttctgctccatcccagccgcccgagcccgggg

SEQ ID NO: 366997 - DNA, 826 bp, Homo Sapiens
agctgacggagctgcgctgcgttcgcctcgtttgcctcgcgccctccactggagctgtgcgcgcctcccggctcccaccggagcccacccggcagacggagtcgctaccagcgcccagtgcgctctgtcggtccgcgaactccttggccgcccgccccgggctgggccccaaataccaggctaccatggtctacaagactctctacgctctttgcatcttaactgcaggatggcagggtacagagtctgcctacatcagctcctttgtctgtttctcttccgacaaacattgtaccaccgaccaccatctggactagctctccacaaaacactgatgcagaacgactgcctccccatccaacggcactcacaacaactcggtgctcccagtatacagcatcagccccaacatctctgcttcctaagaacatttccatagagtccagagaagaggagatcaccagacccaggttcgaattgggaaggcaacaaaccacagaccccctcaacttctgggttctcgtccaacaagcggtggagtccacttaacaagcacgttggaggaacacagctcggggcactcctgaagcaggcgtggcagcttacactgtcgcaagtccgctgctgagcctccaaatcatctcccctcagctccagcctcatcacctcattcctatcaacctcacacctgaggtcttttctggctccgttaatacaaccataggtccactgtgaccaggaccaaaccaatggagtccaattgggccagagtcccgacagaggagtcaggtctgacacaaacattcaatgcaagtgagcagtacca

SEQ ID NO: 366998 - DNA, 582 bp, Homo Sapiens
  misc_feature (396)..(396): n is a, c, g, or t
  misc_feature (491)..(492): n is a, c, g, or t
acactgtcgcagtccgctgctgagcctcccacactcatctcccctcaagctccagcctcatcaccctcatccctatcaacctcaccacctgaggtcttttctgcctccgttactaccaaccatagctccactgtgaccagcacccaacccactggagctccaactgcaccagagtccccaacagaggagtccagctctgaccacacacccacttcacatgccacagctgagccagtaccccaggagaaaacacccccaacaactgtgtcaggcaaagtgatgtgtgagctcatagacatggagaccaccaccacctttcccagggtgatcatgcaggaagtagaacatgcattaagttcaggcagcatcgccgccattaccgtgacagtcattgcncgtggtgctgctggtgtttgggagttgcagcctacctaaaaatcaggcattcctcctatggaagacttttggacgacctactaacgggtcctggnngaaactacaacaaccctctgtacgatgactcctacaatggaatatggctgggatgaggattaactgttcttattaataagtgcttatcca

SEQ ID NO: 366999 - DNA, 1060 bp, Homo Sapiens
ggggggacacaagggtggccccagacaaaccggcccaagtaccgggcccatgcccctcgggaatcccccgaggctgcagccaaatggatgcctggaaagacaggcttggttgccctgtggaatagaaaggtctggtgtgcccatgaggcccaagcccgagcttgcctgccaggcacagtaaaaggacccaggggtggtgacgggtatcccagcagcaagcagatgtaggagaaggaagctctgcagaacagaagcaggaacacaaggctgatgcgctccgcatgcaacagcagaagtgggaaggccaacagggtgagggctgtgaccatagcagctgagtagacactccccaactgataagcagccacagtcaggggaccctgagatttggtcctctctaaccggccccggaactcctcctgcatgtgtcggtagatttgagggaccacataatccaagtcagcttgagaagtgggggggcctgagaagggagtgaggacagtcctggtccttggagcgcctgccccagccttcaccagcactgtcacaggcttccagagcagcagcgcgagccctgaagcagccagccctgctacagcccgaggcagcaccatggatgccccagagaccaggacccggagacgggggggagcctcatctgcccccgacgccaatgcccagtaggcagcagtacccaatgccattaggggcagtccccagcgcacaaagagcatgggtggctcggggctcttgagattaccatagcggcgaagccacaagcgcacggcagctaacagggccaccagcgccgccacacaagctccataccacaaattcttggctcgaccacccaccatggatgccagaggactcagccagggagaggagtggcaaacaggtgtctcttcagggcaacgatgaaaaagcccagctagccttgtacataaaagcaacccaattccaagcctcagggcatatgcaccattgtgccgtggggggtttgttgtggctgaagtgccaaggcggggcattgtgagtagcttaggtggaagcagctcgg

SEQ ID NO: 367000 - DNA, 996 bp, Homo Sapiens
ctcttattttccaaagctccaggtgctgttttccttgggactcatatacagagtctttggttcaaatgctatggtacccaggctgaaaccttgagagaagaaccaccgccttggcccagtgaacctgaaggccatacccacagacctaaatactgcaccttctgtgtagcagctactcaggatggaccaaactatgttggatgattctgctgcagagagctttaatggcaatgagactctggggcacagttcaattgcttcagggggaacacacagcagggagatgggagactccaacagtgatggcaaaactgggctggagcaagatgaacagccactgaacctgagtgacagtcccctctctgcgcagctaacttcggaatacagaatagatgatcacaacagtaatgggaaaaacaagtataagaatcttctaatttctgacctcaagatggaacgagaggcgagagaaaatggaagcaagtctcctgcacatagttactccagctatgactctggcaaaaatgagagtgtagaccgaggagctgaggacctctcactaaacaggggagatgaggacgaagatgaccacgaggaccatgacgattcggagaaagttaatgagacagacggcgttgaagccgagcggctgaaagcttttaattctcgacctattccttcccaccttacttcagcagttgcagagagtatcttggcttcagcttgtgagagtgagagtagaaatgccgccaagaggatgcgtctggagagacagcaggatgagtctgctccagctgacaaacagtgtaaaccagaggcgacccaggccacttactcaacatcagctgttccaggctcacaggacgtgctgtacatcaatggaaatgggacctatagttaccatagttacagagggctaggagggggtctgctaaatctgaatgatgcttacagcagtggacccactgatctcagcatgaagagacaattggcgac

SEQ ID NO: 367001 - DNA, 915 bp, Homo Sapiens
gctaggcccagagagcctggaggaggagcctctgccagactggagagaagcaggcctgagcctccccaaaggcagctcctggggactcccaggaccacaggctgagacgagacgcaggttggctggaggaagtgagaggtgaactcagcctgggactggctgggcgagactctccacctgctccctgggaccatcgcccaccatggctgtggcccagcagctgcgggccgagagtgactttgaacagcttccggatgatgttgccatctcggccaacattgctgacatcgaggagaagagaggcttcaccagccactttgttttcgtcatcgaggtgaagacaaaaggaggatccaagtacctcatctaccgccgctaccgccagttccatgctttgcagagcaagctggaggagcgcttcgggccagacagcaagagcagtgccctggcctgtaccctgcccacactcccagccaaagtctacgtgggtgtgaaacaggagatcgccgagatgcggatacctgccctcaacgcctacatgaagagcctgctcagcctgccggtctgggtgctgatggatgaggacgtccggatcttcttttaccagtcgccctatgactcagagcaggtgccccaggcactccgccggctccgcccgcgcacccggaaagtcaagagcgtgtccccacagggcaacagcgttgaccgcatggcagctccgagagcagaggctctatttgacttcactggaaacagcaaactggagctgaatttcaaagctggagatgtgatcttcctcctcagtcggatcaacaaagacttggctggaggggcactgtccggggagccaacgggcatcttccctctctccttcgtgaagatcctcaaagacttcctgaggaggacgacccacaa

SEQ ID NO: 367002 - DNA, 810 bp, Homo Sapiens
cccggatgtgaggaaacttctttatcttctgcttctatggttacgcttggtcccgccactcgggtcctctggcttcttcccaaacacctcctctttctctcggtgattggccaagaggcagttcccatagtaactgacaccgcgctcccacttcccagcctggaggacagcaccggccctcgtattagcaacctggaagagagggcgcccaggtgggcactcgcaacttctcacgtatctgcgcgttctcttcgctcccactggcgtgagcctgcgctttccgccttccttccctcacaagcccccttggcaaccgtcgccgttgagacggagggagacgcccccacggattcgccccgccgcgcctctccgcgcgtagattggccggagcgaggcgaacgggcccggccttggtagccgccgaccgagcgctggctgtcctggaacctaggcggcgggagcccggggcgcctcgcggcacggaagagcggcgagatgctcaaccgcaagaccagccactttttgggaatgagggtgcagtcggagcttgaacatctctccgagctgcggcgggaagcggggaaggatcgcagctcagtgcatgggtcggccgcgcggacgcgtgcgagtgtgcggactcagtggacgacggcggcggcggcgaaagcggatgaagaccccggagccaacttgtttccgccgccgctgccccgaccccggatctgcatgtggaagtacctggacgtccattccatgcaccagctggagaagaccaccaatgctgagatgagggagtagggactgaagggg

SEQ ID NO: 367003 - DNA, 1030 bp, Homo Sapiens
cagtgccccagagggcagtgcagcagctttaggagacttctgggtaatgagatggagacagaaagttcaaatctttcagcaagctgtggtaggtatgatacagccctctcatagccaattcctgcagagggaggacgtgatcatgctccgtccctatgcccttcacctcagctgggaggaaaacggttcgctgccctgatgaaaaggaaagcagcttcacctcggaaacttgaatgggagcaccacagccactgcacccgatgactttattgtacagataagatggcaagcctttcaggtgaatgttgttatccacgtatacatactgtagttctcgagatcgacctaaatcaagtggcaaaaatgcaagacggtttccagccatggagagctcattgaggctgggcagctggcagagatggcgcggcacataccatagacgatttcggtccacagtgaggtactgcagagaaaggcacatgtgaagcctctcgggtaaagttagcaaacgattggtagaaatgtctagtgtctgcagctccttcaaatcgccaacctctggaggtaggaattgcagttggttattagctaatcgaagatgacgtaaagctctcagacgaccaatttctgggcaaacaatttctaaggcattgtcactaagatccagacattggagttttacaagagacccaatggcttccggaaccacaactatgttatttgagtgcaggtatagttccacaaggtttggaagcttctgagcaaggttttctggcaaggatgtcagggagttccttttcatatagagtctctccaagtactgcagtccctcatctttcagtaactccaatggaaaatggtgcagattcctataatttaagaacaaattcttgtgcttttctagccttgccacagagatcgtcttacaaagttcggacgccatgactgaatatatcccatcaggcacgctgcagcactatatcttgtcaaaattggtccatttctcagcgccagcagagccagcgctccg

SEQ ID NO: 367004 - DNA, 844 bp, Homo Sapiens
  misc_feature (134)..(173): n is a, c, g, or t
ccgagtgatggtggacctgtgcaacagcaccaagggcatctgcctcacaggaccttctggaccaccaggacctccgggagccggcgggttgccaggacacaacggattggatggacagcctggtcctcagggcnnnnnnnnnnnnnnnnnnnnnnnnnnnnnnnnnnnnnnnntgggtatttttggcaactcttctaattaatttccctgttatttatctccatgattgcatttgggtcgactaaaactgtgtgcagcaggggtaaggtgtttcatctctgcacagtttaaggccggtttaactcttacctagaagccattgcgttccgggataccaagggtatacttcttggtcccaccttgacagatgtttatttcaaactggagaagccgtctcctgggaactgactcgcacccttctgctgcagatgggaggtggaaggagcaggagcccacagccctgggaggggcattctgtgggccgtgtgacagctggtgctggtgcatgctctttcgaggctcagctcctgccttgccctctattgcctcctcctgcccagcgaatctgtgtttggttgaaaatcaatgaacttgatgttggcccctggtaaggcatttcttggctagaggaatagctcaaactgcttgagtggaaaggcagcatcctggcctccctgtggccggcactcaggtcaaaagggtctcctcttcaggggctacaggataagctatgaagatatggcttggcatctcggaggagcttccttttgccctgttaatgagcagggccatcaccactggagaaaagggcccagaagcaacaaggaacgagattgtgcccagg

SEQ ID NO: 367005 - DNA, 1138 bp, Homo Sapiens
  misc_feature (25)..(25): n is a, c, g, or t
  misc_feature (67)..(67): n is a, c, g, or t
  misc_feature (134)..(134): n is a, c, g, or t
gggggatggtttaatggttggttangatggtttttcccatagtatggtgtcccattggttttttaangggaaatttttggtcttcccttaagggaattcctatcactcagagaattttagccattctgggttcntagtctaaccaaattattcatcctaataatttgacattaagaaaacctataaataactggtagaaggaaaggctttgcacttcagtggattgaagacttgactttgagagtaagtccaaaaacatatatgatgtttctcagtgataagagtaaaaagtaatgaatcctgagagttcttaaacagcatgctacttggcaagacttcatattttttagttacaattcttccactgtttaactccagtttgaaatttgaaatctaatatgtagctaaatctgtgacttgtaaaactctatgcataatttttcctaatcagtggaaataagaataaaagaaaaaggtaaagttaattttttttctaagtctacatcctatctcttgattcagtgcctgaagaagctgggtaaggagattagtctagttattgattcttttatgtgtcagtgccatcttaatctcttcacatggtacactaaatgctgcctataacccatcctcatcttctttactcatcattgctttcttcaaggaaggtcttgatactgccctcgtctacctcactatccgctagtctagatagtgactctttggaaaattggtagcctctgaatgagttatccaacttctgcttcctcacattggccactttgcataggttcgggaacttagcaggttttaaatcatcatgcccatggaggtgaaatactttgaggaatgggaacatctcttcactgtgtttttggatcagccttctctcaaccgccaagaaatgcatgatttccctgccaactctaggaagtagtgctgcatgattgaatcattatttgatgaattctttcattgtaacatagggagtcattttcaaaaaggtagatatgaacttaaattaaattgacttatgaatgctttgcctgtgggcccaacagtgtcatgaccctccaattgaaacatagcatgaattatttttatgtcgagttcttgaactgctaatcaggtgtgtgtt

SEQ ID NO: 367006 - DNA, 509 bp, Homo Sapiens
  misc_feature (410)..(410): n is a, c, g, or t
  misc_feature (479)..(479): n is a, c, g, or t
  misc_feature (487)..(487): n is a, c, g, or t
ccagaattcggcatgaggtggcagccaaaggcccctccctgagagaagcaaaaggtcagatgtctccttttcctctccccttccaccatcctccctccaagcctggcacccaccgtctcggccctgaaccacgaggctgcccccatccagccacggagggaggcaccatgcaaatgtcttccaggtccaaacccttcaactcctggctccgcaggggtttgggtgggggctgtggccttcccttggcaccaccagggtggaccaggcctggagggcacttcctccacagtcccccacccacctcctgcggctcagccttgcacacccacttgccccgtgtgaatgtagcttccacctcatggcattgccacagctcaattcgggggcgctgggagggattgcccccaggnagccaccagtggacttagctgggatgggcccttctttgcaaccagggagttgagaacagggtttaactntttgggantaaggggaaggggttaaattta

SEQ ID NO: 367007 - DNA, 1209 bp, Homo Sapiens
cacgccccctcaccgccgctccgccgccgattaggtttgaggaagcttcgcactccgctttcgaggccagcggaggcggggggcggggatggacacgccccctccctgtctcccaccgatgattggcgcacggaactccgccttgggtttggaaggctcgcctgggagctcatacctggctggggccgaggattggctgttccggggctagggagcgctttctcccgggaaccgcggctgtgacccaagtggcccggaccagtttggggctgcgtgcggcctgcctcaagcaaccaggtacgtaggtcggcggcccagctcggcgctgcggtgggagccggagggcgacagtcagagccggggtgccagcgggacgcgaccgccagatccacttaggaccccgtcgttctgcgaagcggccacgtctgagtcccggggcctcctcgtgctgcagatgtcgccttaggacctcggccaggataccctctgccatgctcttgtgctgcccgtgatcaccgactggcccttgtaagcaccttcgcagcaggaagcccagagctgcgcctgccctttctgaaggctgtggaagaggttggagtgggcgcatcttagcttgccccatccccatttgaggtctgtcggagctgcccttcagtgtgagcatccacaatgggtaccccagcctcggtggtcagtgagccaaccccttggcaggccccgattgaggcccggggccgcaagcaggcctcggccaacatcttccaggacgccgagctgctgcagatccaagccctgtttcaacgcagcggggaccagctggccgaggaacgggcacagatcatctgggaatgtgcaggggaccaccgtgtggctgaggccctcaagaggctgcgcaggaagaggcccccaaggcagaaacccctgggccactcgctacaccactgcagccgcctcaaaatcctggagccccactctgcactggccaacccacagagtgccacagagacagccttccagtgagcagtatctgcactctagggaagaaaatgccaggatccccccggaactgggaggaagttagggcccaccaagtttccttccccccagaatcgaaccctttatccccgggaaaagagacccccgaatgggccagggccttttcctctttggccaaaaaaggccttggggggagggttaaaggaaaaaaca

SEQ ID NO: 367008 - DNA, 922 bp, Homo Sapiens
ggcctgggtggcgaattcggcacgaggggattggctgttccggggctagggagcgctttctcccgggaaccgcggctgtgacccaagtggcccggaccagtttggggctgcgtgcggcctgcctcaagcaaccaggtacgtaggtcggcggcccagctcggcgctgcggtgggagccggagggcgacagtcagagccggggtgccagcgggacgcgaccgccagatccacttaggaccccgtcgttctgcgaagcggccacgtctgagtcccggggcctcctcgtgctgcagatgtcgccttaagacctcggccaggataccctctgccatgctcttgtgctgcccgtgatcaccgactggcccttgtaagcaccttcgcagcaggaagcccagagctgcgcctgccctttctgaaggctgtggaagaggttggagtgggcgcatcttagcttgccccatccccatttgaggtctgtcggagctgcccttcagtgtgagcatccacaatgggtaccccagcctcggtgggcagtgagccacccccttggcaggccccgattgaggcccgggggccgcaagcaggcctcggccaacatcttccaggacgccgagctgctgcagatacaagccctgatttcaacgcagcgggggaccagctggccgaagaacgggcacagatcatctggggaatgtgcagggggaccccccgggtggcctgaggcccctcaaaaggctggcccaagaagaaggccccccaaggcaaaaaaccccctggggccaacttcgctacaccaactggaagcccgccctcaaaaattccgggaagccccaactttggcaactgggccaaacccacaagagtgcccaccagaagaccagcctcccaggggggccagtattctggcacctcctagggaaaga

SEQ ID NO: 367009 - DNA, 761 bp, Homo Sapiens
  misc_feature (157)..(178): n is a, c, g, or t
tggacttgggaggcgcggtgaggagtcaggcttaaaacttgttggaggggagtaaccagcctgctcctctcgctctcctcctcgtctgcgccgcgtttcagaggttgcccatcagcctgtgatttatttttatatctgctttttataaagagagaannnnnnnnnnnnnnnnnnnnnnttttttttcttcttaagagaaaattcctgttccaagagaaaataaggcaacatcaatgaaggagagaagagccagccagaaattatccagcaaatctatcatggatcctaatcagaacgtgaaatgcaagatagttgtggtgggagacagtcagtgtggaaaaactgcgctgctccatgtcttcgccaaggactgcttccccgagaattacgttcctacagtgtttgagaattacacggccagttttgaaatcgacacacaaagaatagagttgagcctgtgggacacttcgggttctccttactatgacaatgtccgccccctctcttaccctgattcggatgctgtgctgatttgctttgacatcagtagaccagagaccctggacagtgtcctcaaaaagtggaaaggtgaaatccaggaatttcgtccaaataccaaaatgctcttggtcggctgcaagtctgatctgcggacagatgtcagtacattagtagagctctccaatcacaggcagacgccagtgtcctatgaccagggggcaaatatggccaaacagattggagcagctacttatatcgac

SEQ ID NO: 367010 - DNA, 984 bp, Homo Sapiens
  misc_feature (823)..(823): n is a, c, g, or t
cggccatcgcccgcctggtgcgccgccgccagctctttgcccgcgcggggccgcccgccgcgggctcagggcagaccatgcgcccgccaagtccgctgcccgcccgctggctatgcgtgctggcaggcgccctcgcctgggcccttgggccggcggctgcagcaagatgtgggacaacctcacctgctggccagccacccctcggggccaggtagttgtcttggcctgtcccctcatcttcaagctcttctcctccattcaaggccgcaatgtaagccgcagctgcaccgacgaaggctggacgcacctggagcctggcccgtaccccattgcctgtggtttggatgacaaggcagcgagtttggatgagcagcagaccatgttctacggttctgtgaagaccggctacaccatcggctacggcctgtccctcgccacccttctggtcgccacagctatcctgagcctgttcaggaagctccactgcacgcggaactacatccacatgcacctcttcatatccttcatcctgagggctgccgctgtcttcatcaaagacttggccctcttcgacagcggggagtcggaccagtgctccgagggctcggtgggctgtaaggcagccatggtctttttccaatattgtgtcatggctaacttcttctggctgctggtggagggcctctacctgtacaccctgcttgccgtctccttcttctctgagcggaagggtacccagcacattcaccatggtgtggaccatacgccaggatccattttgaggattatgggtgctgggacacaatcaactcctccctgtggngggatcataaaagggccccatccctcaccttccatcttgggtaaaactttcatccttggttattttgccatcattccggaatccctgctttcagaaaaactggcgggcccccccagaatatccaggggaaaaaagtggaaaagccaggtccccattaactt

SEQ ID NO: 367011 - DNA, 1154 bp, Homo Sapiens
agcggggggacacagcgccagcgccactctgccaggctcccggccatcgcccgcctggtgcgccgcccgccagctctttgcccgcgcggggccgcccgccgcgggctcagggcagaccatgcgcccgccaagtccgctgcccgcccgctggctatgcgtgctggcaggcgccctcgcctgggcccttgggccggcgggcggccaggcggccaggctgcaggaggagtgtgactatgtgcagatgatcgaggtgcagcacaagcagtgcctggaggaggcccagctggagaatgagacaataggctgcagcaagatgtgggacaacctcacctgctggccagccacccctcggggccaggtagttgtcttggcctgtcccctcatcttcaagctcttctcctccattcaaggccgcaatgtaagccgcagctgcaccgacgaaggctggacgcacctggagcctggcccgtaccccattgcctgtggtttggatgacaaggcagcgagtcgatgagcagcagaccatgttctacggttctgtgaagaccggctacaccattggctacggcctgtccctcgccaccttctggtcgccacagctatcctgagcctgttcaggtgggctgtaaggcagccatggtctttttccaatattgtgtcatggctaacttcttctggctgctggtggagggcctctacctgtacaccctgcttgccgtctccttcttctctgagcggaagtacttctgggggggtacccagcacattcaccatggtgtggaccatcgccaggatccattttgaggattatgggtgctgggacaccatcaactcctcactgtggtggatcataaagggccccatcctcacctccatcttggtaaacttcatcctgtttatttgcatcatccgaatcctgcttcagaaactgcggcccccagatatcaggaagagtgacagcagtccatactcaaggctagccaggtccacactcctgctgatccccctgtttggagtacactacatcatgttcgccttctttccggacaattttaagcctgaagtgaagatggtctttgagctcgtcgtggggtctttccaggggttttgtggtggctatcctctactgcttcctcaatggtgaggtgcaggcg

SEQ ID NO: 367012 - DNA, 759 bp, Homo Sapiens
cggccacacccaatgcctgcccgctggtccggtccggaattcccgggatcggctcttcggctggagctgagaaaggagcgcttccccggactcggctcggctccgaggctccgaagccgacgccgccagctcagccccgggggcgggagcaggactgcccgcacagcccgcacctaggaggcgccgatcccgaacgcctcatgggacgcccccgggggctctctccacgccttgctgccgcgtcccggtcctaggcgcccgggatccacggcccaccccgcccgcagcccgcggcctgtctggagaggagtatgaggcccggggccccgcggacgccggccaccgggcggcaggggcctagctgcggagccccgcgcccgagagcggcgggtaaggagccgcgggagccggcgaggcgtcggggcgcgcagaggagcgcccctgcccgggcacccgctgggccacgggactcgcgtgtggcctgagcgccggggaggaggcggaggcgcccctctgtccgggctctgggaaggcgacgaggggctctgcgaaggcggcgaggggctccgcggcggccccggacccctggccaccatcctcacgctcctgctcccgccggggggatgtcgtggcccgggccccgagcgccggcacccgggacccggggctgagctccgggaccattgtcctcccagaaggacaacagaacaaacaaaggagacgaaagacaaacgaaaatgaagagacaccaagagacag

SEQ ID NO: 367013 - DNA, 964 bp, Homo Sapiens
tttaggcctttgaagtcaaccatataacttcttagctgtcccttagttttttgggacttgctctagaaattcactgggtttcttataaagggcaaattcagtaaagatcattctctagcaatggttctcaaccagaggtaccatgccctcaaggggtagctggcaatatctggagacatttttggttgtctcaacttgggggagggtgcaactggcatctggtgaggagaaagtgtggatgctactaaaaacctacagtgcacaagacaaacccccacaacagagaactatccagccccaaaagtcaatagtgttgaggttgagatgaacctctgtatacagtcggctatgtatctaaggttttcaggacacagatgtatttctaatctttgaaacttcgtttaatacacattacaaaaaattacctgccataaaccttatcttctctaccatgtcatattaaaacagtgaatgactgaaaagagcacatgttggtttgcaaacatcattctatggagttccaggtagaaaaacagggtaacacagataaattcatcattaaggagcaaatgttgtaaataaaaataatgcatgtaactgcaatgtatgtcagattaaccacctgtatttgatgacaatatttttgatgagctcaattttttaaacagtcaatactattactggatatatttttctcacattagagaaatgaatctaatttcaataaaacatattacagaattaggcaccaaaactatgtttgttaaaaagcatagattttattctttattagagcaatcacgtttttaaaattcaaaaaattataactatatttttgatcatttgaataatactggagcttattaaaatccataagagaaacacatgttttttattagcccattaatagcatttttcttccaataacaccaataaaatttaaattatttatttatatcaaaat

SEQ ID NO: 367014 - DNA, 884 bp, Homo Sapiens
ggagtcacggccctggccttcgctagacgcaggctaccatggcttcccgcgtctcggatcggtccatcggaggacgagctgctgtttcccgcaagccgcgagcgccctctttcttgagcaggtccgcgatcgcgcacgtgggagaatggagccgtgcgccgcgggtcgggggcaccgacccgggctccccgtttgacccgagggccgtccgcagctcctcacgcccagcctccgcccggtgcccccgccccgttcaccagcccctcggccgggacctgccgcgggtcgcgactctcggggggcctcggccccgccgtcctttggaggcagcggcccgcgaccgcgttcactggaggccacaccccggggcccgccccgtctgcgcaggtctgcaggccatccttgggctccatggggcccctcggccccagtgaccgcgcagcacgctgcagccaggccatccggcgtccaggtcgtcgggcgggctgggctgggcgctgcccacgcaggtacgtgccggcgccagccgccgccctccagttgtaccagctgcagctcctgcccggtgcagaaggcgcggatctggcacaggtacgtcatgacgatgagcttgtcgggcaccgacagtagcaccatgtccgcgggctccacgcagccgcgacacgcccagagccgcgaagccatcgaaggcctaggggaagggtgcactcggggtcagcggcggcggtggcccgcgccacccggcaacgctgcagtgccgccccacggagggggtccccgggattggcaccccgggtcttcgcctagcaacaccgccccctcctagcgagggaaatccagcaacaggcccgccctcgatcccgtaactccggcgcgatccagcc

SEQ ID NO: 367015 - DNA, 1069 bp, Homo Sapiens
ctatgcctcgctagacccactcaacatcaagcagaacaacaagcaggccttcgatggcttcgcggctctgggcgtgtcgcggctgctggagcccgcggacatggtgctactgtcggtgcccgacaagctcatcgtcatgacgtacctgtgccagatccgcgccttctgcaccgggcaggagctgcagctggtacaactggagggcggcggcggcgccggcacgtaccgcgtgggcagcgcccagcccagcccgcccgacgacctggacgccggaggcctggcgcagcggctgcgcggtcacggggccgaggggccccaggagcccaaggaggccgcagaccgcgcagacggggcggccccgggggtggcctccaggaacgcggtcgcgggccgcgcctccaaggacggcggggccgaggccccccgagagtcgcgacccgcggaggtcccggctgaggggctggtgaacggttcaacaccacactatctatgtgccggttttgccgctttccccctccacaaatttgtgtatcaacgtcacctaattttgggggtagggaggctttacctccccccaacgaataacccctaccaatacaacacatgccttaactccacaatataaaaccgtcggacacgtttaaacatctaggccggccggtgcagcaaccaccacagccgtagaccttattcgtccccccccactataaccgggacgcagcccaaattttgcccacccgcggtgtcaagtcacacctatttaatacagtaagcgtaagagacttaaacgctcccctccgaataataacttaatcctcgacacccgcccaataaaaaaaggtgcgaactaacccgcgtgcttaaaaacagctaactcgcataccactgcatggggtcttatcaaaaattaatgtccgctccttccacgcgtaacccttcgtcgtttattctgaaaccaccactacctcttactgtgctttcggaggcctctcacactcactctctttaatcaaaacccctcagcgaatacttcccgccctccccgttgtgaaatcaatttctccccccg

SEQ ID NO: 367016 - DNA, 905 bp, Homo Sapiens
  misc_feature (130)..(143): n is a, c, g, or t
  misc_feature (161)..(408): n is a, c, g, or t
agccatcagaatgccatgagagtgcacctagcatgtatcgaggcactaagtgcaggagtccctgtcctaagatggcagtgacatggagcatcgaaaaccacagataatccttaaataataaaataatagnnnnnnnnnnnnnncttcggggcagagtctcnnnnnnnnnnnnnnnnnnnnnnnnnnnnnnnnnnnnnnnnnnnnnnnnnnnnnnnnnnnnnnnnnnnnnnnnnnnnnnnnnnnnnnnnnnnnnnnnnnnnnnnnnnnnnnnnnnnnnnnnnnnnnnnnnnnnnnnnnnnnnnnnnnnnnnnnnnnnnnnnnnnnnnnnnnnnnnnnnnnnnnnnnnnnnnnnnnnnnnnnnnnnnnnnnnnnnnnnnnnnnnnnnnnnnnnnnnnnnnnnnnnnnnnnatgagccactgcgcctggcaaatgtttctagtttttatggttattattatttttatattaatgggaggggggagggtggtgagggcaaaggattggtttttcaaattatgtgtttctcaggttaacaaagttattctagaattctctgccatgccagcagggtgttagagagagcctgaaggtgttacatatggcagaaaataaatgtctctgattacttggctacctttaaaaaaatctatatgtgttggcaaaaccagcctagggggatctaccaccttacaacagcatgaattatccataagtcataggtgcacatgtatgagcaagttatttttgagaaagaaactgcctataatataataaacctgtcaggtctttgggtattgtttaatttgtgtgttgttgctgttttatctggactgcatcttggggggtactgggctctgcttctggtttttagtttgcctttgaatttactgagctactacaaagac

SEQ ID NO: 367017 - DNA, 677 bp, Homo Sapiens
  misc_feature (34)..(34): n is a, c, g, or t
  misc_feature (203)..(211): n is a, c, g, or t
aaatgtataaatttgccataagttatgcctattnagatggctgtataactggtacttgaaagagatgaacctgaccacctcagttttgtacagcttccctcaggaagacttcccaaaataagactcagtatgaatttgctaagtaactgatctatgaagttagctgaacaagtttagataagaactatatgtatgaagcattnnnnnnnnntcctgtgtcactaacaacaggaccctttaataaaatgcaaaactcattatctttataatttagaagagaagtattttaatcaccatatttacctaggatactactactacatatagccagtacctttatggggtttaaagaatcaggtcagatgactggcacagaaatcagatacagtacaatgtcatatacatggatttataggaagcaggcatggtctggatttatgaaaatccaggacccttcctctgtaaagggggaggctgagaaacattctcagctgcactgacactttgggacttcaaccaggacaaagagccctctgacctactgaaagatataaagaggtcttcgcatacaagttatcgtgcaaagcaaagtgtaaataaaccgaagctcccctctaagttgggactgcataaaggaacccaggctgaaaatataaacaatcctctccaaaggtgcc

SEQ ID NO: 367018 - DNA, 911 bp, Homo Sapiens
gggtcaggcgggagttggtgcagaacccgagttccaggccgtagctggatatgtccgtcccttggagcctgttggggcttgctgtcgaagctggagctttcgcaagccacgaggctgtcgtaggcggcctggctgagctgggccagggtagactggcgttcttgatgatggctgagatggccggtggacccggggaggtgcagggggagatgccatcctccgggggggcgcccccaccctccgcaccagctgcagcttcttggccaggaagctgcggggtgagcgatgggtgctcccggagctgccaccgtggttgctgaggaaggacgtgtccccgaagacatccccgccaacggcccacatgcatggtgtggcggaagtccccgagtgggtggctgatcatgtctgcagtcagccgcctctttgccctgtgaactggacacccagcccacaggcgagagcttgcccaggctcatggtggcggcgcctctgcccccctgggggccgggcatcagctctggctgctcacagctgctagtccatgcctaccaggggccgggggagggaggtgggctgggcttgggatggctgctcagctcctttgccctggcggaagctgtaaatggcactctcctaaggtgaggtccccaaatgcagaggctgtggggggttcatggctcgtctctcccaggggcccggctcccagcccctcagaagcagctatagatgttcaagcgcagagaaagcacccccgaggtggtcggcaactctcctgcccagaggtggagacctggctccgcgagccccgggggcgcgggacgagggcggactcgtcgtctgcagcggcggcggccgcgcgtcccggctggcagcccgggagagtcgctgcctcgtgccgaattcgccaccca

SEQ ID NO: 367019 - DNA, 1514 bp, Homo Sapiens
  misc_feature (642)..(643): n is a, c, g, or t
  misc_feature (648)..(652): n is a, c, g, or t
  misc_feature (656)..(661): n is a, c, g, or t
  misc_feature (663)..(1120): n is a, c, g, or t
  misc_feature (1122)..(1122): n is a, c, g, or t
  misc_feature (1128)..(1128): n is a, c, g, or t
  misc_feature (1131)..(1131): n is a, c, g, or t
  misc_feature (1137)..(1137): n is a, c, g, or t
  misc_feature (1151)..(1243): n is a, c, g, or t
  misc_feature (1265)..(1265): n is a, c, g, or t
  misc_feature (1270)..(1270): n is a, c, g, or t
  misc_feature (1286)..(1286): n is a, c, g, or t
  misc_feature (1297)..(1297): n is a, c, g, or t
  misc_feature (1301)..(1301): n is a, c, g, or t
  misc_feature (1303)..(1303): n is a, c, g, or t
  misc_feature (1307)..(1307): n is a, c, g, or t
  misc_feature (1309)..(1364): n is a, c, g, or t
  misc_feature (1391)..(1391): n is a, c, g, or t
  misc_feature (1409)..(1409): n is a, c, g, or t
  misc_feature (1474)..(1474): n is a, c, g, or t
  misc_feature (1488)..(1488): n is a, c, g, or t
tttccgggatctgagccgcagacataggtgttcttaaggatcattattgacttttatcagctgaggtcccaggtctgtgtaggtctccacctctgggcaggagagttgccgaccacctcgggggtgctttctctgcgcttgaacatctatagctgcttctgaggggctgggagccgggcccctgggagagacgagccatgaaccccccacagcctttgcatttggggacctcaccttaggagagtgccatttacagcttccgccagggcaaaggagctgagcagccatcccaagcccagcccacctccctcccccggcccctggtaggcatggactagcagctgtgagcagccagagctgatgcccggcccccaggggggcagaggcgccgccaccatgagcctgggcaagctctcgcctgtgggctgggtgtccagttcacagggaaagaggcggctgactgcagacatgatcagccacccactcggggacttccgccacaccatgcatgtgggccgtggcggggatgtcttcggggacacgtccttcctcagcaaccacggtggcagctccgggagcacccatcgctcaccccgcagcttcctggccaagaagctgcagctggtgccgaagggtggggcnnccccnnnnnagannnnnncnnnnnnnnnnnnnnnnnnnnnnnnnnnnnnnnnnnnnnnnnnnnnnnnnnnnnnnnnnnnnnnnnnnnnnnnnnnnnnnnnnnnnnnnnnnnnnnnnnnnnnnnnnnnnnnnnnnnnnnnnnnnnnnnnnnnnnnnnnnnnnnnnnnnnnnnnnnnnnnnnnnnnnnnnnnnnnnnnnnnnnnnnnnnnnnnnnnnnnnnnnnnnnnnnnnnnnnnnnnnnnnnnnnnnnnnnnnnnnnnnnnnnnnnnnnnnnnnnnnnnnnnnnnnnnnnnnnnnnnnnnnnnnnnnnnnnnnnnnnnnnnnnnnnnnnnnnnnnnnnnnnnnnnnnnnnnnnnnnnnnnnnnnnnnnnnnnnnnnnnnnnnnnnnnnnnnnnnnnnnnnnnnnnnnnnnnnnnnnnnnnnnnnnnnnnnnnnnnnnnnnnnnnnnnnnnnnnnnnnnnnnnnnnnnnnnnnnnnncnaaccanacncacccncaccacaaacacannnnnnnnnnnnnnnnnnnnnnnnnnnnnnnnnnnnnnnnnnnnnnnnnnnnnnnnnnnnnnnnnnnnnnnnnnnnnnnnnnnnnnnnnnnnnacccacaccgccaccaaccccnacaanccacaaccacccgccnccacaaccaanaacncnaaanannnnnnnnnnnnnnnnnnnnnnnnnnnnnnnnnnnnnnnnnnnnnnnnnnnnnnnngccacgcacaacagctaacaacacgcnacaccgccgcccgaacgncacaccgagcccatagacaccacgcaacaaccccacccgcagaacgcggagggacagaaccgcgnaccaagcaccagcnaaaaaaacaaacacggcacaacacaa

SEQ ID NO: 367020 - DNA, 1225 bp, Homo Sapiens
  misc_feature (1158)..(1167): n is a, c, g, or t
atcaggccaaatcggccgagctcgaattcgtcgagagcgagttggtatggtccgagacagtatggctgctgcatttcggccctcgaatcgagttctcctgcaggcgctgcagattttggtgtatcctggggtgggaggctccggctctgtcagctgccgctgccctctcggagctaaaagatacctacttacagataatgtggtgaaattaaaagaatttcaacaaaagaaagtggctgttgcatgtaatctttctggcactaaagaaacgtattttagaaacttgaaaaagaaactgacccagaacaagctcatcttgaagggggagttgataaccttactacatttgtgtgagtctcgggaccatgtggaactggctaaaaatgtcatttacaggtaccatgcagagaacaaaaatttcactttgggggagtataaatttggaccgctttttgtgaggttgtgttacgagttggatctcgaggaatctgcagtggagctcatgaaagaccagcatttacgaggtttcttctcagactccacatcattcaatattttgatggatatgttatttatcaaaggcaaatataaaagtgctttgcaagtattgatagagatgaaaaaccaacatgtgaagttcacccaaaggatacctatgtccttgcttttgcaattttgctacaaacctgaatagccctgaacccttcaaaatctgtaccacattaacaaaacaagctctactccaccagaagaatttctcttcagcaaaacatccatggctttcctgtggaaattacttctgccccgcaatgcccaccgtaacagtttcgggccccaattccttcccctaatatggatcccccaaaagcattatcccctgcatataattaaaggacccacagtccccttcccgtgtttacccccgccccgaacacccggaataaccaaccctataattcttctccttcaaatacacactttctcacttatagtgtggaattaaccgctacccctttccctatagcacaattgttctgccaccctctaatggcccgcaaaatgatatgaccgttgctatactcaccgcgatgaaacttaatttgtatttgatgccaccctgttgtgtatactcgggcacaataagcaagtatcagtgtnnnnnnnnnnagatactcctctttcacatctctctcccccccctcgttcccaccctctcgcgctatca

SEQ ID NO: 367021 - DNA, 863 bp, Homo Sapiens
  misc_feature (52)..(88): n is a, c, g, or t
ggatgtatagactcactatagggcgacccggagctgcacgcggtggcggcgnnnnnnnnnnnnnnnnnnnnnnnnnnnnnnnnnnnnnatcaggccaaatcggccgagctcgaattcgtcgagagcggagttggtatggtccgagacagtatggctgctgcatttcggccctcgaatcgagttctcctgcaggcgctgcagattttggtgtatcctggggtgggaggctccggctctgtcagctgccgctgccctctcggagctaaaagatacctacttacagataatgtggtgaaattaaaagaatttcaacaaaagaaagtggctgttgcatgtaatctttctggcactaaagaaacgtattttagaaacttgaaaaagaaactgacccagaacaagctcatcttgaagggggagttgataaccttactacatttgtgtgagtctcgggaccatgtggaactggctaaaaatgtcatttacaggtaccatgcagagaacaaaaatttcactttgggggagtataaatttggaccgctttttgtgaagttgtgttacgaattggatctccaaggaatctgcagtggagcccatgaaagaacaagtgctttgcaagtattgatagaaatgaaaaaccaagatgtgaagttcaccaaagatacctatgttcttgcttttgcaatttgctacaaactgaataaccctgaatctttcaaaatctgtactacattaagagaagaagctctactcaaaggagaacattctctccaggagagcatcctgtttcgctgtggcattagctctgaatcagaatgagatggcaaaagctgtgtccattttttctcaaatcatgaatccagaaa

SEQ ID NO: 367022 - DNA, 815 bp, Homo Sapiens
cgggcacccccgcccgccaggcacggccgcggctccttcctcttcctgcccgcggtagtgggggtggggcaggcctcgggacacctgcctccgccgccggccgccggccgccgtcctcgcgcggcttcccgggcggctctgccccgaccgtagactcccggcccgctcgccgcggcaggagccgtggttccgcggacctgggcgcgctctctccctggccactgggagaccccccgcggcctcgcggggaaaacctcgggactgccccgcgcccccggccgtctctgcgtcgctccttctcgcccgcgaccgtggactcgtcctcgcgagcctgggttggcggaagctgcgggggccggggtcgcactacttggcgcggaagggccggcggtgggcggagggatccccgtccgcggggtgagccgctgggcggagccgggaggagccgcgaggatccgcagtggggagccgggaggaacctggctgccggcacccacccgccgcgcccacgcgtgccgcggtcgcttgtttcccgcgggagcccggccgcgctcggggggaggcgcgcgcgcagctgtgggctgcctgggtctagggagctccggagccaccgttttgtgcccgtggagccgcggggaaggcgcacgcgctcgggtcttcccggcgggtcgtcctgcaacttctccctctccggtacggaccgcggcgttctgtttccagggcaaggaacataagtcaaagactcagaaggcagctgaatccaggccttgggatgcagggtttgctggatcgccaagcggagcaatcgcgccctg

SEQ ID NO: 367023 - DNA, 1030 bp, Homo Sapiens
ggagacctggggagtctcatattccaagttcttctttctttctgggagcagtgggcagttcatggtgttagggcactcacccccacagactggcaaaccctgcaggacttccgtggctgaggctgtgaccggaggccaggaatgccgttgggtggattgtgagtgaatgggccctttgagctgccctctagagagcaaagccagtttcctggagctcctgaatgaatatctgtactggctcgctcagatgcagaagctccattgaccatgaggccttgtgaacatcagtggccacaggcccagtgtgctgcttggcactgcactagtttaggacctgcagcatgtaggtagcgtcctagtgtttataatacaaagctgctctgcacagcttttctgattcttcttgcaatctcctgaggattatctgccccatttttaaaacgaggtggaatacccaaggtcatgtagccagtgagtgctctggaaagccaaagcagctcatcccttcctggggaccacactgctctgctccaccagaccacactatgaaataggaataagtgctcctgttgcaggactgccggggaaaacaggtggtgtggggaccttaagtcacccataattttgaagacttgcatgccagagggctcccaggaattgtagacattaaggaatttcactttcagttctaccccactacttaagtacttgtcatgtactcttagaggaggccagtaatgatcagaaccattttactttaaaattaataatattgtattagagaatatattaaatggttatattgggttatgttaggatatatacttgaatggaaatacatgtactattagcaatcatatttcatttatccctgtaattagacaagaaagcataatatagctctactcatgggtacacataccagtgtataagatttttagaagtttactttttaaaaataaaagcaaaatgtaagatcttaagagttatgatcattaactctaccagatatggagatttgctgtgcccc

SEQ ID NO: 367024 - DNA, 1005 bp, Homo Sapiens
ccaggacctgggtgtgtaccctcatccgcataccccatgtttagacttagcttccttaaacatcatctgcactgtcttggtgttgtcctcgttggttttaaagagcattccccttgtgtactttctgtcaaattgctcattccactttgcccttgaaataaatggcattcacaaggaccagctttgtcaggggatcgactgtcccagcatccagtacctctgaaatcttaccttcagtcttctctgccacccagtcatttatatgcttcctgcactcttcagtgtcttcagcaaaggacaactcctccagctctgcctgatagaacttctgacagtattctttaaagtctggaaggaaatcacacgtcttttctccaaagagtctgttggcagttctaagcaagtactgagtgccagttctgttaacttcactgagaagtgactggaaacctcggtgaatatctccgtctttgtataaacaaagtgcctgggacatctgggctgcagtgcttccctttgcccccatgaagaccatggccagggcagaggagatgctcatgggagagaagaatacgtttcttgagttgtcctcttcccccaatattttaaataagctgatggcaaaagtgccatttgcttcacagaggtcatccatcagagaaggtctttagttttatcagcaacccaggagtttacacgtgttgtggacttctctgtatcattcacaaagtctagctgttttatcgttgcttggtagaatttgccacaggaatctgtaaaacctgtgaggaaatcataagacttttctccaaagagcccgttggcagttctaagcacatattcagtgtcagttctgttaattgcaacaagaagtgactgaaaacctcgatgaatatctccatcttcacctccgattttactaaaacaaagtgccccagttctccgcgcagctgcccaggagcgaagtgagaccgggtcggcctcgtgccgaattcgccacccagc

SEQ ID NO: 367025 - DNA, 861 bp, Homo Sapiens
  misc_feature (102)..(102): n is a, c, g, or t
  misc_feature (106)..(106): n is a, c, g, or t
  misc_feature (117)..(117): n is a, c, g, or t
  misc_feature (181)..(181): n is a, c, g, or t
  misc_feature (183)..(183): n is a, c, g, or t
aacacaacttcccggatccctgtgaaacttgctgggcttccatccccatctttcctgcccggctgaatgacctgtatcccaacagcttccttcactgaagtncagngttcgcagggnccaggtggggatggcctccctcaccgtctgctgcttctacctacatggcgggctccctgcgtcncngtcgcctttccaaagcgccttgcatagcctccggagaaactttggattccagcactttcctaaaactgtcccgtgtggagtactccggcctcaccactgctaactgaggggctggaatgcagggtctttctcatctcacctcaaatccccaacagatcccttctaatggaaacagcttttaaaaatttcaggatattcgtaaagcacacgggaaacaaatcatggatgatctgccacacattttgcgactccttgagaaccattttgtaatactgaggtcacggagtgacagccccctgtgtggactgtgcttgttccttggccatgcactgcctcaccccacagaggtcaggcatggccatgtgttgtggccaacagaaagtgagcaggggctgtatttgtgcttgcaaggtagggcttggcctcctgtgcttctgccatgagaaagaacacggcccaaggtaagctgctgcttcaaccagggacccagaatacgggacatgttgtggagcagacgtgatcagacccccagcctggagcataacctagaagccaacttgtagactacccaagaatgggaatctagttgtagaccactgagatttctgatgctgttttgcagcaaaagctgactgatacatcacaggagaaatagttacagaatctgacacatgctga

SEQ ID NO: 367026 - DNA, 724 bp, Homo Sapiens
cggcgcctgcattaagcaggtatgcaaagaagccttttcaccctgatgtccttagagataatatggatcagtccagagttctcctctgggtgaaagcagaaccctttatagtgggtgccttgcaggtcccccctccatccaagtttagtcttcactatctcaggaagatatccacgctatgtgcaaatccgggccacagaaggagcttacccgcgcctctactggtctacatggaggcacatcgcttgtgggaagctgcagttggccaaggacctggcgtggctttacttcgaaatatttgatagtctttcaatgaagacacctgaggagcgcctggaatggtctgaggttctgtccaactgcatgtctgaggaggaagttgaaaagcagagaaatcagctttcagtggacacgctacagtttctgctcttcttatacattcaacagttgaacaaggtctccctaaggacatctctgattggcgaagagtggcccagtcccagaaacaaatctcagtctcctgacctgactgaaaaatctaatcgtcataataagaactggaatgattacagtcaccaagctttagtctatgatcatctgtctgatctcctcgagctgcctttagatccaaaagcaactcactgcatcatttcattcaacccatagtagtctagtgtctcgagaagctgttgtggcgctcagcttccttattgaaggtacaata

SEQ ID NO: 367027 - DNA, 1087 bp, Homo Sapiens
ccccaggccaattcttgatgtcccaagccgttatgttccttaaaaagaaaaaagtggaagcctcaaggggatggaggatagcaagaagaatgggtgtccttggccccagaggcattgtagggagaggaagacatgtatctcatcagggttctcaacattatgagattatcacacatcactatctttggaggggctgagtgattgagttatggctctgactcctctctggggtggagagtgaagatgacaaagaaggccatctgtcccctaggagacacagttgcagtataagacaggacagaagagaacagaaaaacaatccactggaaaaaggggtgggagaaggaagtgtgctaggtacacacatccagggagtaggggaagttccccacacttgaggcctccatcctcttgaaatgaccagaattgatccaagtagagatattcctttcttctggaaataaaccttggggatggctaggcaggatgaaaggaaactttacatggagaatgaatcctacaccctggcccatcattccagcctccaaactggccacacacccactgaagggttccagtcccaggagaggtgtgaggttctggtgaagagcagcaatagtcaaacatcttcccccaggcttgaatgcttttggccatctctgggttgctgtgcccagatgtagagatgggtggagatggaattgaggtaagggaagagattactcaatctatgacagagacccaatccaattctctgcataatcatgagtcctcttaggtccccacctctgtgaggtgccaggctgctgacccactctctaccccacctgtgtaggaatggccatattccatcgtgtgtgtgcatgcctgcacccacatctgtagtatcttgagtgtcatccatcctagggcccaccaggagggaagcatgccatagtgagttttataaagttatcagcaaattcagacacttttagttcatcccacacagcaaagtgcatccagagtagttgcttgagccaggtccatctgtccagtcaggtcctgaagaaggcaacaacccccttcccctagctcctatatcatc

SEQ ID NO: 367028 - DNA, 930 bp, Homo Sapiens
ccgggatgcaggatggagatccctgtgcctgtgcagccgtcttggctgcgccgcgcctcggccccgttgcccggactttcggcgcccggacgcctctttgaccagcgcttcggcgaggggctgctggaggccgagctggctgcgctctgccccaccacgctcgccccctactacctgcgcgcacccagcgtggcgctgcccgtcgcccaggtgccgacggaccccggccacttttcggtgctgctagacgtgaagcacttctcgccggaggaaattgctgtcaaggtggtgggcgaacacgtggaggtgcacgcgcgccacgaggagcgcccggatgagcacggattcgtcgcgcgcgagttccaccgtcgctaccgcctgccgcctggcgtggatccggctgccgtgacgtccgcgctgtcccccgagggcgtcctgtccatccaggccgcaccagcgtcggcccaggccccaccgccagccgcagccaagtaggaggcggctgggccgcgcccgcaccccgggagcctcctcaggctccctctattaaagccgatctgactccgcccagccagatgtcccgagtgcgccaaggactgtcctctcacccactcctggattctgccctgacctccatcctggacactgccttgataacatagacccttccactgacaccctcgctctcacaccccctccagctttccgaccccacaccgacaactccccggcttccagaccctaccagcactaccctaaccctcagccgacagtctcagccccaccgacccactttcttggcatatagccccacttaagacctctcctctacttccttctgagtcctctacaaagacatccgggtactacatttccatcccttccctattttgacaccaaattatggtgtagacagcccttccgcaaccc

SEQ ID NO: 367029 - DNA, 1289 bp, Homo Sapiens
  misc_feature (976)..(1070): n is a, c, g, or t
cggcaactcccatctatggcccgatgttgagcccactgaacttaaagaagacatgtgggggctcctcagggggtgaggggctctgctggcagaaagggggtccatcctaggcatgggtactgacacaggtgacagcatctgcataccagccagcttctgtggtgtttatggcctctggaccacaggttcccgcctcagctacactggaattgcctctgccatcaaggggaaaaaaatcggtgaccacggtggctggccccatggccaggacgtggagagcctggcgctgtgcctgcaagaccagctgagtgaagacatgtaccgactggaccccactgtgctccagatgccctttagggaggaggagaagaccccctttcccaccccaggctgcagtgagtgagaagcccacaggctcagtccagtttgtttccttcccctactggacaccagctgctttgacttcttggctatctggagccatagggggacacccaagaaactgtgggaacagcacacagcagtggaggaatatgagcaagagttcatagccaagtggaggtccctggacctggatgtgctgctggtgccagttctgggctctgccttctatataggctcttcctccctagcatcagaaagtcagtcttatgtgaccctgtacaacctcctggactttcccgcgggcgtggtgcctgtcactatcgtgacactacaggacgaggaggaactggccttctacaaggggtgctacggagatagttctgacaaaaatttctcagaggcggtaagaggatccgtcggagttctggtgactgtgcagtgcattgctttgccatgggaagaggagctgtgtctccggttcatgaaggaggtggacaccttggtcaagaatccagagggggcccaagtgataggctcctggaatggagtaacagctcatgaaacacggggctggttgtggtggctcatactnnnnnnnnnnnnnnnnnnnnnnnnnnnnnnnnnnnnnnnnnnnnnnnnnnnnnnnnnnnnnnnnnnnnnnnnnnnnnnnnnnnnnnnnnnnnnnnaagcattttcttggtgttactcctgtagatcctcacccaagtgtgctcctgatgccccttccttctcatgaataccatgtccaccttatgtctcctccttctggaaccccaccaggttccttttctttgttggtccctctgtgtgggtgctcaatattcctcagatgggcccaggatggggagcagggtgaggagctcaataaacattttctgactggc

SEQ ID NO: 367030 - DNA, 1106 bp, Homo Sapiens
  misc_feature (854)..(854): n is a, c, g, or t
  misc_feature (857)..(857): n is a, c, g, or t
  misc_feature (864)..(864): n is a, c, g, or t
  misc_feature (893)..(893): n is a, c, g, or t
  misc_feature (909)..(909): n is a, c, g, or t
  misc_feature (987)..(987): n is a, c, g, or t
  misc_feature (1058)..(1058): n is a, c, g, or t
  misc_feature (1068)..(1068): n is a, c, g, or t
  misc_feature (1080)..(1080): n is a, c, g, or t
gtcgctgtggctggttctgcggtgtgcggccagccatggagcgctctgggcccagcgaagtgacaggctcagacgcatcgggaccggacccgcagcttgtggtcaccatgggcttcacggggttcggggttcggtaaaaaagctcacacatttgacttggaagcaatgttgaacaaactcaaagaacagctgtggaaagaagtcacaaaacactgggccaccaggaacacacctgtagcccagcaaagttgaggccatcgactggctcatcacaacaaggaaggctgtgcaccactgggacccagcagcagctcagcagcagcagtgagagggccttgggaaagacttggagggtttggcttatacaagaccagattacagaggggtattgatttgccttgcccccgcccccaccatcacagtgtgtccctgtccagtgttggtgctgtgtggcattgcttgtgtccataggagtccatcaaggcagagcggcagagcggcaagcagagcggcaaggcaggtcagcttccggctcttccaggctgcatgtccccctcaatatcctttcaacccaatggaaatggattgaaagagtgaaagtcactggtctcaaagaatctacggaatttagcattttgaaaatcacagagcaattctgggtaggtattcacatgcactaaaaaaccaggcaaacatctgactcccaggataaagtgactgagagcagtagaagactttttgagccttaaggaataagaggaaaattatgtaatgaagtgcaggaacagcacagacccagacgaggggatgcagcccggagccagtaacccgggcgcctcctcctccccagggcncangctggcntgcttccccggataccgtgatcacacgtnccaggtcctgagagcncctcataggtagacagttctttgggacttttgggacgcagcacttgaagagaggtttacctaaactttcctcctgggnagcctgtcattcatttgaaagtaacagaaggaaagctgttcaggcttgagggaaagttttcaacagggcanttggttgagnattggggaagcnttccatttcctttgggggaattcacg

SEQ ID NO: 367031 - DNA, 1408 bp, Homo Sapiens
  misc_feature (516)..(566): n is a, c, g, or t
gggattggcaagttcccctgcagttgtttgggctgtccctgtggctggttctggggtgtgcggccagccatggagcgctctgggcccagcgaagtgacaggctcagacgcgtcgggaccggacccgcagcttgcggtcaccatgggcttcacggggttcggtaaaaaagctcgcacatttgacttggaagcaatgtttgaacaaactcgaaggacagctgtggaaagaagtcgcaaaacactggaagcaagagaaaaagaggaagaaatgaacagagagaaagaattaagaagacaaaatgaagatattgagccaacatcctcaagatcaaatgtggtcagagattgctccaaatcatcttccagggatacgagcagcagtgaaaagtgaacagagtttctgaactcttctgatgactgagttaaattggccctcctttaccccctaaaatggtaggaaaaccagttaattttatggaggaagatatcctcggtcctttacctccacctcttaatnnnnnnnnnnnnnnnnnnnnnnnnnnnnnnnnnnnnnnnnnnnnnnnnnnnaatcctgttcacaagattcctgactcgcatgagataacgctgaagcatggcactaaaacagtgtctgctttgggtctggatccctcaggtgcccgtttggtgacaggaggatatgactatgatgttaagttttgggattttgctggaatggatgcttcttttaaggcatttcgatcccttcagccctgtgagtgccatcagatcaagtcattacagtatagtaacacaggagacatgattcttgttgtatctggaagctctcaggccaaggtgattgacagagatggttttgaagtaatggaatgtataaaaggagaccagtatattgtggacatggccaacaccaagggtcatacagcaatgcttcatactggctcatggcatcccaaaataaagggagaatttatgacttgctcaaatgatgcgactgtgaggacgtgggaagttgaaaatccaaagaagcaaaaaaagtgtgtttaaaccacggacgatgcaaggcaaaaaagtcattcccactacgtgcacatatagtagagatggaaacctcatagcagctgcctgccagaatggaagcatacagatctgggaccgaaatttgactgttcatcctaagttccactataaacaggctcatgactcgggcacagacacttcttgcgtgactttttcctatgatggtaatgtccttgcctctcgtggaggtgacgattcattaaaattatgggacatccgacaatttaataaaccacttttttcagcctcgggtcttcccaccatgttcccaatgactgactgctgtttcagtccagatgataagctcatagtcactggtacatctattc

SEQ ID NO: 367032 - DNA, 888 bp, Homo Sapiens
  misc_feature (62)..(62): n is a, c, g, or t
tggatcccaagaccaagtcgtaatagcaacttcccttcctcagctgcctgaacttttttttncccttgctagctggagagaagtgtcacatttggctcactctcaaccttcctcgcccacccccttcccggagaacctgtgcggtgtgtagagggtgctgtgagccacctccagcctcgggtggctgcttaagtaactttcaactcctctcttcttaacactatgaagtgtctcgggaagcgcaggggccaggcagctgctttcctgcctctttgctggctctttttgaagattctgcaaccggggcacagccacctttataacaaccgctatgctggtgataaagtgataagatttattcccaaaacagaagaggaagcatatgcactgaagaaaatatcctatcaacttaaggtggacctgtggcagcccagcagtatctcctatgtatcagagggaacagttactgatgtccatatcccccaaaatggttcccgagccctgttagccttcttacaggaagccaacatccagtacaaggtcctcatagaagatcttcagaaaacactggagaagggaagcagcttgcacacccagagaaaccgaagatccctctctggatataattatgaagtttatcactccttagaagaaattcaaaattggatgcatcatctgaataaaactcactcaggcctcattcacatgttctctatgggaagatcatatgaggcgaagatgtcttcttaattttaaagctgggcagacgatcacgactcaaaagagctgttggatagacttgtggtattcatgcaagagaatggcatggtcctgccttttgtcagtggtttgtcaaagaagctctttctaacatttaagagtgaccag

SEQ ID NO: 367033 - DNA, 895 bp, Homo Sapiens
ttgctcggttcgtgtctaccgccttgagaaagtccaagtttcttttccacctgtggctgtacgcgtgtgaatcaacgttccacctcctcctctgtgtgagggaaggcctgagtaactccatactgccaatcaaggatttggtctccgggtttcccatcggcgaactgaaactggtccgtgaagaagtggcaaagtaacataactcctgcagcggccaggtcggccttcgggaacctcgccatgccgccgccgccacctccctaccccacccgccagtccttcgccggggctcggggggctcccgatgcaataggcgcgaccggggccaaacgctgcggatcggtctcggtaggacccggaggcctttgtaaatgtcgcggcgatttcacagtagggaaccgagaagaggaagaagcgaacgcgagtaggagcgcagcgctcttcggacctctgaggctctctttgcaacttgccacactcgcagccctcacccgacactgaacaacaaccgcggggaggagaggccacttgcagccgaggctcgcaaactgtcggttccactcgggcagcgccaacccggtgcccgcggacggtgacttccgagccccagcgatgcgctccactgggttcaaaacagatctaattccacagccagcgccgctgcctgccccagatccactagggctggtcggctctgcaggaactttcctctgtctagggatggccccggcaggaggtttaggtttgcgggaaggaggttgatgacgaaaccctcccgacaagttttgcttcttttcttcgcccgacgcagggcgcgcgtcctttctcgcagccggaggaatgggcagctccaaagagctgagccctgggaaggttagggctgcagcagtctccc

SEQ ID NO: 367034 - DNA, 1734 bp, Homo Sapiens
  misc_feature (1499)..(1536): n is a, c, g, or t
tcatttccatgtgtttctctaggcctatgatagcttctctagctatcatactccaatcaggcaaaaaatgagaaaatgttgagaaatacaagataattcctcatttaaggccaccttctagaattgtgcttaagattctgttttcttctcatgggccagcacttcggcaactggcaaaaattaggtgtacagggttctaggtaatgctgtttatttgagcaataatatattgtgctaacgttcaggcatcctattactgagaaataagggaaaatgagtgtaaagtacaactaagagtctcggctacagggaaaaataccatcagttaaatatccatagtcctagagcatttatataaaactgcaatttgaatcctgcaataaatttggctttttcctcagtgataccatgtgtgggaagtgttctgtcaaggtgggtcggataatttgccctggaaaggacggatagtgactttcctgacatgtaaaacatttgatcctgaagacaaaagtcaagaaataggcatggtggccaatggaactaagtgtggcgataacaaggtttgcattaatgcagaatgtgtggatattgagaaagcctacaaatcaaccaattgctcatctaagtgcaaaggacatgctgtgtgtgaccatgagctccagtgtcaatgtgaggaaggatggatccctcccgactgcgatgactcctcagtggtcttccacttctccattgtggttggggtcctgttcccaatggcggtcatttttgtggtgggtgctatagtaatccggcaccaaagctccagagaaaagcagaagaaagatcagaggccactatctaccactggcaccaggccacacaaacagaagaggaaaccccagatggtaaaggctgttcaaccccaagagatgagtcagatgaagccccatgtgtatgatctgccagtagaaggcaatgagcccccagcctcttttcataaagacacaaacgcacttccccctactgttttcaaggataatccaatgtctacacctaaggactcaaatccaaaagcatgaagcaacagctaagcaagaactaatggctaaattatcaacttggaaaactggaaaatctggatggcagagaaatatactatctcaccagtatttgctctcgactcaagaaggttaacattttctgattcatgttagactttgaagagactaaagaaaattttcaagaggaacatatgcctgagaacctttgcatgaatttaaaatttcaattatccattcttataagaaggaagatgattgtaaagaaatatctccgaagttaaaatctgtaataggaattgattcattctctaatgaaaacaaaacataaaaacatcacactaatcttggaggaataagaaaaattgtacatccattaaatgtacaattgattgcaacatcttgattgttttaccattaacttgtcaaatttacatcacagtttaagaaaatgatgtaaannnnnnnnnnnnnnnnnnnnnnnnnnnnnnnnnnnnnnaaaaggcggcccggtctaaagaattccctcagggggcccaagcttaagccgaaccccaggtttcttgggacaaagggggccccataaggggagccgcaattattaacttggggcctgggcccctccttttaccaccccccgggacgggaaaaaacgggtaacctttggggaaccttttggaaaggaaccctcaccttt

SEQ ID NO: 367035 - DNA, 699 bp, Homo Sapiens
agatcaagatcaggtttgattggtgatgtactattactgttgtccttggtcagggacacagaggatgtttggggtttggtggtgagacattatctaacacgtgctgtgtcctttttgggtttgagccccacaccagtgagaagcatcagcaccgtgaacttgtctgagaatagcagtgttgtcatccccccacccgactacttggaatgcttgtccatgggggcagctgccgacaggagagcagattcggccaggacgacatccacctttaaggccccagcgtccaagcccgagaccgcggctcctaacgatgccaacgggactgcaaagccgccttttctcagcggagaaaacccctttgccactgtgaaactccgcccgactgtgacgaatgatcgctcggcacccatcattcgatgagaggacagccaaggactctcccgggcctctccggttctcccttgcggaatgatgggcgcatcctgtctgccacgtgctgacggtcgggaagcttcagtggagaggcctaactctaatgtcgcctgcttaagcaaatcatgcttctctgtttcacgtagttggggttgacaagtttctgcctttaagataaatgagtaatagtctaatgaccagctcagccatttaaaatattttcttcctattctgttcaagaaacagtaaacttggtttcaatcttta

SEQ ID NO: 367036 - DNA, 1404 bp, Homo Sapiens
  misc_feature (16)..(16): n is a, c, g, or t
  misc_feature (38)..(38): n is a, c, g, or t
  misc_feature (755)..(764): n is a, c, g, or t
gcggaggcgaacctgngctaaaatcgcagacgaggcancataagctgggaccggaccggaattctacggattcctccccccagtccagatggtagctggctccttcagaaagggggctcagaacagggtgtggggagctacctctctctgcctccccccaccacatctgtctgcagggctgggagcccccacgattcagtggtcctgagccttctgaagttaggcttctgcctggtggtggggatcctgacatcaaggatgggacaccctggatggaggttcctggggcctggcccccaagactatgaagagcctttgctgaggccatgaggggttaccatggcgaccgaggcagccatccccgcccagcccgctttgctgaccaacagcatatggacgtgggccctgctgccagggccccatacctgctgggctccagggaggccttctccaccgagcccccgcttctgtgccccgagagctggactgggacacatttctcctgaagggcccctgagtatgagcgaggggatcctctttgatggccctcacccagcgttcctcacacggactgccgcatacatccacgtttgttccttattccgtagctgccttctcatatcgaactcccctacctaaaagcattcgtccgcccgcatactccccattcctaacagtgtgactatgtcgtatttacgccccttaggcgacaccctttctattatacccgctgcccccctccgagtcctcatcannnnnnnnnncgccctctccgtcactcctatatgtcacgcccactctttttatgtgtcctttttacatcgtgtccttgctacgcgtggcaccggcagctacgacgccctcaccggaggcccaagtgcccgttgccgcatcgttgtcggactagtacttcgccggtcttccgctgacaccgccatcagcctcgcctactgtagaccgcctaatacgacgctcccaaggcgcataactactccatcgttgacgcgctcacggtcagcgagccgcgaggtgtgacgctctgcgccgctgatgtaacccatgacgagtcatcacgtcgcctaatataatgacaccggtaccgacatcgcgcccgcgccgctctgtttaattcagcttgacccgcccaccctactctggctcatgctacgctacaccagccacttcatcttaaacctcgctagtacacctactcaatcaggttatgtactcctgttgcaggcacgggcggcttacctcgatgtctcctttccgacgatcgacctcgtatcttctgcacccagcatgtcgctccccctccagcgacccctcgcgcccgtcccccgccggacaccacccctctccctacttcctcgcccttgacccaccgccgggagccactacgaa

SEQ ID NO: 367037 - DNA, 808 bp, Homo Sapiens
ggtaagaacattaaaagctgaaattcaggttggtctgcagcctgggcaaggggaacagctcctggcctctgagcccagctggtggaccactggaaaatatggacatatttcagtacgatggtcccctttgacttgatttaggagctctcagttgcatagaaagatctggtgagcaccttttcatccccagaaaaggagcacgtgaattgagtcgcctggcggctctgtacgcgctcagggaagcttagcttcttggtgcccatctacgtgcactggatgatttttcttttgaacattttgccccactacactgtattggggatagctgggttaagcaagttaaagatatttacatttatattggaattttagcaactttttttcaggttaaatatataatttcaagtgcttttaatgaacttatttttaattggctagggagcaaaaaataagtgagttctgcttttagttagttaaccttgttcttttcttaaatagtacactgcatggtatttaatattccaggaagcatgggattttattttgcttgatttttgggcacatgaaataatagctctaggaaaaatgcgcatctttaatgactcttttggaaagagaggcatttcttaacactgtggatggtttgccttacataaaaagttaccctcataaaggtaaattctaaccttttaattccttgaaattttattttcatttccaataaccttgggttccatttggcaccgcctttgggaattttggattgaccctggtaaaaatgggatggttaggcaaaacttcaaaaaat

SEQ ID NO: 367038 - DNA, 1220 bp, Homo Sapiens
ggaggttgcacctgacttatatgctgaactacagaaggcacatttaattttattcaagggtgatttgaattacaggaagttgacaggtgacagaaaatgggagttttctgttccatttcatcaggctctgaatggcttccatcctgcaccactctgtaccataagaacattaaaagctgaaattcaggttggtctgcagcctgggcaaggggaacagctcctggcctctgagcccagctggtggaccactggaaaatatggaatatttcagtacgatggtcccctttgacttgatttaggagctctcagttgcatagaaagatctggtgagcaccttttcatccccagaaaaggagcacgtgaattgagtcgcctggcggctctgtacgcgctcagggaagcttagcttcttggtgcccatctacgtgcactggatgatttttcttttgaacattttgccccactacactgttttggggatagctgggttaagcaagttaaagatatttacatttatattggaattttagcaactttttttcaggttaaatatataatttcaagtgcttttaatgaacttatttttaattggctagggagcaaaaaataagtgagttctgcttttagttagttaaccttgttcttttcttaaatagtacactgcatggtatttaatattccaggaagcatgggattttattttgcttgattttgggcacatgaaataatagctctaggaaaatgcgcatcttaatgactctttgtaaagagaggcatttcttacaactgtgatgtttgcttacataaaagttacctcataagttaattctaacttttattcttgaattttatttcatttcaatagcttgtttcatttgcacgcctttgtattttgattgacctgtagaatggatgttaggaaactcaaaattgaacacagtgaaacaaatggtatttgaagaaatgtaatatcttttatattctatttatgatatccataatcaaatgagattattttaccacataaatgttttaaatatcagattttttagtttgcagttttaggaaaatgctttagatagaaaaggttcttatgcattgaatttggagtactaccaacaatgaatgaatttattttttatattcttacacattttattggtcattgtcacagatagtaaatactaaaaatttcaggtcagtttgttttacacctgaga

SEQ ID NO: 367039 - DNA, 792 bp, Homo Sapiens
ggcttgcgaagccggaagtgtcctgagtctcgaggaggccgcgggagcccgccggcggtggcgcggcggagacccggctggtataacaagaggattgcctgatccagccaagatgcagagcacttctaatcatctgtggcttttatctgatattttaggccaaggagctactgcaaatgtctttcgtggaagacataagaaaactggtgatttatttgctatcaaagtatttaataacataagcttccttcgtccagtggatgttcaaatgagagaatttgaagtgttgaaaaaactcaatcacaaaaatattgtcaaattatttgctattgaagaggagacaacaacaagacataaagtacttattatggaattttgtccatgtgggagtttatacactgttttagaagaaccttctaatgcctatggactaccagaatctgaattcttaattgttttgcgagatgtggtgggtggaatgaatcatctacgagagaatggtatagtgcaccgtgatatcaagccaggaaatatcatgcgtgttataggggaagatggacagtctgtgtacaaactcacagattttggtgcagcctagagaattagaagatgatgagcagtttgtttctctgtatggcacagaagaatattttgcacccctgatactgtatgacgagacgcacgtgctaacgaaccagatcatcagaacgacactatggagcaacagttgatctttggcagcatggggtagcatttacccatgcagctactggatcactgccatttagaccc

SEQ ID NO: 367040 - DNA, 835 bp, Homo Sapiens
ggagccagtaactttccttactaccgccgcatagctcccaaaatgccagttgtaacttccgtcaggagctcacagatcccagaaaactctaccagttctcagctaatgatgaatggagctacgtcctcatttgaaaatggccatccttcccagcctggccctccacagttgaccagggcatctgcagatgttctgtcaaagtgcaagaaggccttatcagagcacaatgttttggttgtagagggagctcgcaagtatgcctgcaaaatctgctgcaaaacttttctgactttgacagattgcaagaagcacatccgtgttcacacaggtgaaaagccttacgcctgcctgaagtgtggcaagaggtttagtcagtccagccacctgtataagcactcaaagactacctgcctgcgctggcagagcagcaatcttcccagcactttgctctagctgtttgtccttacaagacaacgctgaggccagttgtcagactgaatttcttttggtaagcagttaatgcctttgggttcgaggcttccagctgcccagtggctcttaaacagtttagcaactaataaccggagaactaacatgtagtatttgtgctgctgcatttctgagtgaagtgcacgtcttgggaaagggatgcaatccctgaaaccaggtgcttccttgggggttgagtaatgcagtcagaaagtagttgtaatgatattaaacgtggcacatttaaaaatttaacaaatttgaagtgcaacaacaaatttttagcaaatttgtaaaactgtgtagcatttaatttcctatacttctgagggagtattatatcccg

SEQ ID NO: 367041 - DNA, 300 bp, Homo Sapiens
cctacgcattcgctcgctcccagcctcaacactgcaccgatcaacaccagcgtcgtctccgacttcttcttcctcctcctctagcgctactcggttcttgattcctctcatccgtcgctcgttcgctggtcggtggtctcatccatcgtccggtcacgggagaagagcagccggcgtctcttttcgttgctttccagcgacccctccgagcccgaccttccatggccatcgcctcccgcatcacgaagcgcgcgctctccaccttcgccgccgcagccaagcctcccggaggcggccgtc

SEQ ID NO: 367042 - DNA, 896 bp, Homo Sapiens
tgtgttagccgtgtaatccagcatttgggagctttgagaaggatgttcaagcccggagtttgagccaaccttggccatgtaatggaacccctgtctcctgccaaaagaatgcaatattaacccacgggttggcggcaaagcgcctgtatgtctcaacttactcacggagcctgagtagagaggcttcacgtgagtctgagagttcaagggacggcagtgagctatgatcacaaccactgtactctagcctgggtgacagaatgagaccttgtcttaaagaatgtacagaaccgaaagcgaactttctaccaagaactacaaatgcctgctgaggaactcggaagcacatgcccacaggggtttcacatccattcagctccgcctgcagagatgcccagtctttccacagtgttcccagccttcctctaagagactctcaggcaggaacagcgtccacatggcaggaacctggctcggttctacgtggtgtatgatgcactataaaagcaaagacaggactgggggcaggagaaagacaacccagcttctaaaccaagcatgatccaccggaccaaggctggagcagcatctaaaagagcccgatgtgctaccggttgcactgccttgctgtgaaagaaatgtactacaggtgggtcaaagtgccccgtgtgtctactttaataatcgtgaccttggaccaggcatcccatctgcttcagcaagcggtgactgtgggcccaaatggctctcgcaaaattttaaagtcattccacggtagtgcagtgaggtggatggttgaccagttttactgaaaaataaactgaaatgcagccaggcacggtggctacacctgtaatcccagcactttggagatcctgtagagtcaccgcagcagc

SEQ ID NO: 367043 - DNA, 1005 bp, Homo Sapiens
  misc_feature (993)..(993): n is a, c, g, or t
cctgactgccagtgcccatggggaacaaggggctgaaacctcccgggagaccctgctggaaaccagggagggagaatgggacaagagccacgctgttacgccaagagaaaagaaagctcagagaagacaaaggacttcccaagcccacacagtaagtggcagagccagaacaagaatccaaggttcccgactccaaaagttcaactccctgcactgctggataaatatttgctgcatttcatttctgaagtaatctaagtggaggcagagcagtgtactccgtgctggaagaaggaaactgaaagggagacttcttagctggagaaacaggaagcactgttctggggcgaggatttggctgaggaatagttccagccagagcccagacaagggaagactctggagaagaactccactgtgcagctaaacggctagatctgaatccctttctgttattcactgactctgtgagcttaagaatccatgaaatgggagttctgagaacaccaagtaataaggattaaacgtggcggatgaagcagtctgcgtggtatttggccatgcaggaattcaacaaatgtccacttcctttctctttctcgtacagatcctcaaaaccgggtaaggcgaggcaaaaaatactgtgagggaaactgaggctcgcggactttaacacaggaggggtagggccaagatctgaaccccgcctcctgcttccaagtggggtgctccttcccacgcaaggtgcgacggcctgatggaaaagaacttctggaaggcgaagagataaacaggggtcgggggaaaagaagggagccacggaaatgtaggtgtcacaaatgctcagccctgccccgcctcccgtccggctggaagggggttaaagggaggggagggcagagtctgagggtccgccgccgctggtgcacctgagcaccccctccccggaaagcccccgccccgaacgattgcaacgccctcgtcccctcccgntctcgcgcgtcg

SEQ ID NO: 367044 - DNA, 1220 bp, Homo Sapiens
tctgtaatgagatcaccatggtcatgcctcccacccgagcaaaaacaaggttagcctgcagcagagccgcagcagcaacagccaccaaagcgggggctgaaagggaagagaacttagatttgacctgtgcaaggacctcagcagcttggacacagcccactgcagagatgaaaggagaagctggacatatgctacacaatgaaaagtcaaagcaggagggacacatctggggctctatgaggaggacagctttcatcctgggctctggacttctctcatttgtggccttctggaactcagtgacatggcatcttcagagattttggggtgcttctggctacttttggcaagcccagtgggagaggctgctgactacatttgaagggaaggagtggatcctcttctttataggtgccatccaagtgccttgtctcttcttctggagcttcaatgggcttctattggtggttgacacaacaggaaaacctaacttcatctctcgctaccgaattcaggtcggcaagaatgaacctgtggatcctgtgaaactgcgccagtctatccgcacagttcttttcaaccagtgcatgatatctttccccatggtggtcttcctctatcccttcctcaaatggtggagagacccctgccgccgtgagctaaccaacttccactggttcctcctggagctggccatcttcacgctgatcgaggaagtcttgtcctactattcacaccggctccttcaccacccaacattctacaagaaaatccacaagaaacaccatgagtggacagctcccattgggcgtgatctctctctatgcccaccctatagagcatgcagtctccaacatgctaccggtgatagtgggcccattagtaatgggctcccacttgtcctccatcaccatgtggttttccttgggccctcactcatcaccaccaaactcccactgtggctaccaccttcccttcctgccttcgcctgaattccacgactaccaccatctcaagttcaaccagtgctatggggtgctgggtgtagctggaccacctccatgggactgacaccatgttcaagcagaccaaggcctacgagagacatgtcctcctgctgggcttcaccccgctctctgagagcatcccagaatccccaaagaggatggagtgagagacagcctaagtgtcatcctggctgtccctcagccatgggatgc

SEQ ID NO: 367045 - DNA, 923 bp, Homo Sapiens
gtcccggggccggcggaccgcgggcaggcactgcccgggctggacgacgtctggccggctcccggcgaagggcagcggaggagcggcccagagcgcgcagctagggcactggcgaaaccccgggacagtccctctccgtgcgggggcggcgcagagcagtcccatccccgggggtcccgggcgctggctgactgcctggctggttccctgcgcgcagtagctccccgagccgggctgcaccggaggcggcgagatggtcgcgcgcgtcggcctcctgctgcgcgccctgtcagctgctactgtggggccacctggacgcccagcccgcggagcgcggaggccaggagctgcgcaaggaggcggaggcattcctagagaagtacggatacctcaatgaacaggtcccccaaagctcccaacctccactcgattcagcgatgccatcagagcgtttcagtgggtgtcccagctacctgtcagcggcgtgttggaccgcgccaccctgcgccagattgactcggtccccgcttgcggggttaccagataccaacagttatgcgacctgggctgaggaggatcagtgaacttgtatggctagacaccggaccaaaatgaggcgtaagaaacgcttttgcaaaagcaatggttgagcactgttaaacatccggctagggccaagaatttcccaatgtcttgaaggcccaatggcttaggaaaaacagctgagcctgggacctgcacttttgtcaggtaaacctcttcttccctaagggcacggggagggagtgggttgaattaggaacctctatggccttgaaggaaccatgattgtgcaattccagaccttttaattcagcaatgacaccttacattgatgaattctcaattgtacaaggtgtataccaaaattcagacacaaaacc

SEQ ID NO: 367046 - DNA, 1431 bp, Homo Sapiens
ccctggggcctggctggaccctgcgggcaggcactgcccggtgctggacgacgtctggccggctcccggcgaagggcagcggaggagcggcccagagcgcgcagctagggcactggcgaaaccccgggacagtccctctccgtgcgggggcggcgcagagcagtcccatccccggggtcccgggcgcggctgactgccggctggttccctgcgcgcagtagctccccgagccgggctgcaccggaggcggcgagatggtcgcgcgcgtcggcctcctgctgcgcgccctgcagctgctactgtggggccacctggacgcccagcccgcggagcgcggaggccaggagctgcgcaaggaggcggaggcattcctagagaagtacggatacctcaatgaacaggtccccaaagctcccacctccactcgattcagcgatgccatcagagcgtttcagtgggtgtcccagctacctgtcagcggcgtgttggaccgcgccaccctgcgccagatgactcgtccccgctgcggggttacagataccaacagttatgcggcctgggctgagaggatcagtgacttgtttgctagacaccggaccaaaatgaggcgtaagaaacgctttgcaaagcaaggtaacaaatggtacaagcagcacctctcctaccgcctggtgaactggcctgagcatctgccggagccggcagttcggggcgccgtgcgcgccgccttccagttgtggagcaacgtctcagcgctggagttctgggaggccccagccacaggccccgctgacatccggctcaccttcttccaaggggaccacaacgatgggctgggcaatgcctttgatggccccagggggcgcccctggcgcacgccttcctgccccgccgcggcgaagcgcacttcgaccaagatgagcgctggtccctgagccgccgccgcgggcgcaacctgttcgtggtgctggcgcacgagatcggtcacacgcttggcctcacccactcacccgcgccgcgcgcgctcatggcgccctactacaagaggctgggccgcgacgcgctgctcagctgggacgacgtgctggccgtgcagagcctgtatgggaagcccctagggggctcagtggccgtccagctcccaggaaagctgttcactgactttgagacctgggactcctacagcccccaaggaaggcgccctgaaacgcagggccctaaatactgccactcttccttcgatgccatcactgtagacaggcaacagcaactgtacatttttacagggagccatttctgggaggtggcagctgatggcaacgtctcagaagccccgtccactgcaggaaagatgggtcgggctgcccccaacatttgaggctgcggcagtgtcattgactgatggagatttctacttcttcaaagggggtc

SEQ ID NO: 367047 - DNA, 821 bp, Homo Sapiens
gaaaggttcccactgagataagaaaagggttctacaatgcaggtagctgtcaagcctcctaaatatttaactcgttttagttaacatcacactgtgcattgagtgcaagattctttggttacaccatattaaccaccaggaggataactcctggtttgtaaaagacatcagtggttcttaacggaggggtgatatggccccaggagacatctgactatgtctggagagaatttttcacagctctagcgggggtgctactggcacctaatggatatggatggcaggaatgctgctgaacattctaccatgcacagggtggccccacaacaaacacctctcaggccactaatatgaatagtcccgaggttgaaatgtcctgaaaaaggttcagaaaacatgtctagacgtttgcaaagtcaaatgtatattatggaggctgcaaggcgccccttgcatctcacagctgagggaccccgtcacctctcaccatcagaggcccattcattcccgccttccattccaggcccagtgcctgctccttctcactgaagaactcaatagagatttgctgaatgaatgagggaaaaataagctagaagcatagtttaaagtcttccatcgactacattaaacagcaattttatgtggcctaaactttattctgaaccttagtggtgtcatagtctctgactatatagaacctcaaagttaaggctaacacgttcttaaagatggagtgcacatcttaaggggagtttgtctaaacacttctcgagtcattttagtgggacaaaccaaataaaatggtgctaaaggcaaac

SEQ ID NO: 367048 - DNA, 1315 bp, Homo Sapiens
  misc_feature (37)..(37): n is a, c, g, or t
  misc_feature (51)..(51): n is a, c, g, or t
  misc_feature (201)..(201): n is a, c, g, or t
  misc_feature (207)..(207): n is a, c, g, or t
  misc_feature (219)..(219): n is a, c, g, or t
ctggatcttccctgaccctttgtgatcccgcccgttnttcagccttcccanaagtgctggggatcacagggagtgaagcccactgcgcccagcccactttttatccctaaataagtttcatttatccttggtatctgagttttatcctggactcatctcaatttaataatcattttgggggcggagaggactcctttgtcncaggcncagggctaattntaggataagttctcttttcagaaagagaaacactaggtatgactagtatccctttggcatataatcactttgtgggatggcagatagttctaggttaggagttcccaagctctagtctactttcaacactcttcagaccttagtaggaagttagccctcttctgggaagaaagtgggagcccaggaacaaattcaggtatgttcggtaaagatagggctgctcaaatcaatgcaaatggcaactaaaaatgacagccaaggttgtcacatagtgatcaagatgctccgtctaccagttacgtagatagaaaagttcactttcatgcagttggtatggtcctttggggggagttaaaggcagataaataatgtcttccatactgaacaggcctgttaagtgaattccttggaagctgacttttgcttttctttcacctcagttagcatcaggaactcactgccttgttggggccagatctttcccaattctgtcttcagaagaatctgttattaagaaatgcttgagcatccattttttcaggggactgaaaaaagcaggaacattagtattcacagtaaaaaaatactgtcattaatgcttccacatgttcacagagtaccccctttccagaatgagctactcagctgtgtgggaatggctcttgttcatccagctttggcaaagagatattacctgggggggccacaaagtactcctccacgacgcgatgggagttttgtagtaattcatcagcacagttgccttctaccacattgtcggatctcaggtatagacatctgtcctccaggaccgattccatgggctccaccccgtctgtgtccacggcgcgtagccggtcggcgaaggcgatagctttctccagtcgcgccacatgcctcgcggctgccgaagtccacaagcgctagacgctccaggtgctcgatcaccgcagccgtgatccggccactgccctgaggatccgccttggaggtgaagccctggcgcccgcccagaggggcccgaaggcccagccacaccaaccgcgaccacatttcttccttccttggcccccgcagtgcgcccgcgcgtaacccc

SEQ ID NO: 367049 - DNA, 964 bp, Homo Sapiens
  misc_feature (779)..(779): n is a, c, g, or t
ggaccggtccggaattcccgggatagcgcgcgctcccagcgaaagcagcagggcagggatctgcgttggaggaagggactgctctggtgctagaatgctgtgcgtcggaaggctgggcggcttgggagccagagcagcagctctgccgccccgccgggcgggccggggaagcctcgaagccgggatccgggcccgaagggtcagcaccagctggtctcccgtgggcgccgccttcaatgtcaagccccagggcagccgcttggacctgttcggcgagcgccggggtctttttggagttcctgagctgagtgccccagaaggatttcatattgcacaagaaaaagccttgagaaagacagaattgcttgtggaccgtgcatgttccaccccacctgggccccagaccgtgctgatcttcgatgagctctcggattccttatgcagagtggccgacttggctgattttgtgaaaatcgctcaccctgagccagcattcagagaagctgcggaagaagcttgtagaagtattggcaccatggtagagaagttgaacacaaatgtggatttatatcaaagtttgcaaaaattactagctgataaaaaacttgtggattcccttgatccagaaacaaggcgagtggctgaactgtttatgtttgattttgaaattagtggaatccatctagacaaagaaaagcgtaaaagagcagtggacctcaatgttaaaatcttggcatttgacgtaggtacatttcttatggggaaccaatttttcccanacaagattgagaaggcatctcttagccagagacacattcgtcgtaactttacatctgctggggatcatatccataattggatggtctccacgcagaatcacccagatgactttggtgcgaaaaagctgccttataaaaatttttttctttatccccaaatgctggggccaaattgaaaatggttt

SEQ ID NO: 367050 - DNA, 863 bp, Homo Sapiens
ggaagacggctggcgatcaaaagggcagacatgctgaagtatgtcatcaaaaggtacaggagcttcctccctgagattttcaagaaagcctctgacctccccgagttagtctttgggttctatctgaaggaacttgatccagcagagaactcctatgtcttgatcagaaaaatcgatcctgccctggtttggggcctgacaggcgaccagggcacaccaaagacccggctcctgatgattactctggactcgatcttcatgcaggccagctgtgtccccgaggaggtggtctgggaggtgttgagggtgttggaggcacatttcgtctaaaaagcatttcgtctttggggagtccatgaagctcatcaccaaagctagtgtgcagcaggagtatctggtgcacaaataggtgtcccacagcaatcccacgctctaggtattcttgtgggggctctcaaaggaaacaagacagatggaagtcccggagtttgtggccaaagtgaatgacacccaccccagttcctttccgtggcagtaaatgaggcattgagagaagaggaggagataccccgtgcccgagatggcagctgccgttgggtgacgtgacaagtgccagtgttagtgccagttccagttccagggcctatgccatggctgaagcaagcatcagcaccagcaccaaatgcaagtgccagttgccagtgccagggctagagccatggctggagcaagtatcagtacctgggacagtgccagtgtggatgcaatctcaggctagtgtcaggaactcctcctgccagcagtgaaggctgaggctgagatcttcactttgctcgccagggggtacaccaaaagggcccaga

SEQ ID NO: 367051 - DNA, 877 bp, Homo Sapiens
gggttgactagtggtggatccaactactcgctggccagacatacttgcaaggcactgacgtttcttctgctacagcctccaagccccaaacttcctccacacagcactatccgaagaacagccattgatctgattggacgtgggttcactgtttgggagccttacatggatgtgtccgctgttctgatggggcttctcgaacttcgtgccgatgccgagaaacaacgtgccaacatcacaatggggttgcgctctgagcccagcagctgagctcggcccgctctgcgaggcatgccctctcgctcatggccaccgccagaccacccgccttcatcaccaccatagccaaagaggtacacagacatacggctcttgcagcaaatacccaatcacagcagaatatgcacacaacaactcttgcacgagctaaaggggaaattttgagagtcattgaaattcttattgaaaagatgcccacagatgttgtggatcttctcgtggaggttatggacatcattatgtactgccttgaaggatctttagttaaaaagaaaggtcttcaagaatgtttcccagccatctgcaggttctacatggtcagctattatgagcggaatcacagaatagcagttggagctcgccatggttcagtggccctgtactacatccggactggaaaatgtcagacaatccatggacacaagggaccaatcactgcagtggcttttgctcctgatggaagatatcttgccacctactcaaacactgacagccacatttcttttaggcagatgaacacgtcactgctgggaagcatcggccatgctgaactcggcacctcagctgcgctgcattaaaacctaccaggtgcccctgt

SEQ ID NO: 367052 - DNA, 1326 bp, Homo Sapiens
  misc_feature (11)..(11): n is a, c, g, or t
  misc_feature (45)..(45): n is a, c, g, or t
  misc_feature (143)..(143): n is a, c, g, or t
gtcctaaaaanaaaaaatgatcacaacacacatttgcacacacgngaaaaaaaagtgtctttaaattattttcggcaattataaactacaaacattttataaaattattctgttcttacaaaaatgcaatgaaacattaattngttcttgtaaaccagatcttcgtcaactgactacccgtaatctactggacttaagagccctattgaaaacgctaatgagtgactagttaaaacaatgttgaccagaaagatgcggacacacacacgtgggacataaaaatgagtgatcgttatgttctcgcagaaacaaaacgctaaagtcatgccccagaactgacaactgacgagtgcgatgtagtttgtgttcttgaacaattcgccttaactccgagaccagtttccagagtaggatgctagggttctgtgttgaaaccaaatgcccacgggatgactgctgagcctcgatgtggtctaatagcttcaagaacaatcaagttcaaaaccttgcccacattccttccaagcccctgcaccctgctgctcgtaactcttctctgtgccaggatccctgtgacaatggttctgtaccccccacccggtcattccaccatcaaggagcactcacttctccaaatgacgcaaccagtcatctaagatgaaggccacaaatgaaaccctctgacctgtccaaggtctgtatcttcagcatctctggcaacagaggttcagtctaaataacatcctctcttgaagttctcatttgtaccaccagctacttcagagtgaagaaagaaagtgtctttcgccactggttcttaaggagtggatctctggtccacatctcccaatgctgcttagcccaggaaatgaagacagctgacaacacagaggaacattaacgaaaagaacaaaccccaaacttgaaatgcataactgggactgctggaatgggccaaggcataccacggcgggtcactgtcaccaggagggcgcctgtgttttagaagggagtggccaacaccgtctggccaacctggaaggagccaacgtgacagctaagaacactagacaagcatcctagccttctcacccaccgatctcagtgtgatcttgccacagagccactggcaagccattcagctgccagcctgcagaggtggactgctgtgggaaaagcttcagtggaacaaactggcctagaatctggtgccagagaatagttggctcataaatcttttatcccaaagcaccccaatgtgcaccgagcatctcgccatttggtagttccacagtgactgctcttctattttacgaagccactttt

SEQ ID NO: 367053 - DNA, 1866 bp, Homo Sapiens
  misc_feature (1628)..(1628): n is a, c, g, or t
  misc_feature (1707)..(1707): n is a, c, g, or t
  misc_feature (1716)..(1716): n is a, c, g, or t
  misc_feature (1774)..(1809): n is a, c, g, or t
gggacgctttgcggctgtcgtcggagaggcatctgggttcggactggggccgccatggggaaagtgaatgtggccaagttgcgttacatgagccgagatgacttcagggtcttgaccgcggttgaaatgggcatgaagaaccatgaaattgttcccggcagtttgattgcttctatagccagccttaaacatggtggctgtaataaagttttaagagaattagtgaaacataaactcatagcttgggagcgtaccaaaactgtccagggctatcggttgacaaatgcaggatatgattacctagctttgaaaacactttcttctaggcaagtagttgagtctgttggaaaccagatgggtgttggcaaagaatcagatatttacattgttgcaaatgaagaaggacaacaatttgcattaaagcttcacagactaggaagaacctcgtttcgaaatttgaaaaacaaacgcgattatcataaacataggcacaatgtgtcttggctttatttatctcgtctctctgccatgaaggaatttgcctatatgaaggcattgtatgagaggaaatttccagttccaaagccaattgattacaatcgtcatgcagtggtcatggaactcataaatggttatccactatgtcagatacaccatgttgaagatcctgcatcagtatatgatgaagctatggaactaattgtcaaacttgcaaatcatgggctgattcatggagattttaatgaatttaatctcattttggatgaaagtgaccatatcaccatgattgattttccacagatggtttcaacttctcatcccaatgctgagtggtattttgacagagatgttaaatgcattaaagatttctttatgaaacgtttcagctacgaaagtgagctttttccaacttttaaggatatcaggagagaagacactcttgatgtggaggtttctgccagtggctacacaaaggaaatgcaggcagatgatgaactgcttcatccattaggtccagatgataaaaatattgaaacaaaagagggatctgaattctcattttcagatggagaagtggcagaaaaagcagaggtttacaggtcagaaaatgaaagtgaacggaactgtctagaagaatcagagggctgctattgcagatcatctggagaccctgaacaaataaaggaagacagtttatcagaagagagtgctgatgcacggagttttgaaatgactgaattcaatcaagctttagaagaaataaaagggcaggttgttgaaaacaactctgtaactgaattttctgagggagaaaaacaaaactggaaaattacaacaggccaagatggtccagagaggttcaaggaggagtcccctgctggctctgacgagtatgaagatgaatgccctcatctaattgccttgtcgtcattaaatagagaattcaggcctttcagagatgaagaaaatgtgggagctatgaatcagtatagaacaagaactctgagtatcacttcttcaggcagtgctgtaagctgttcaacaattcctccagaactggtgaaacagaaggtgaaacgtcagttgacaaaacagcaaaaatcagctgtcagacgtcgattgcaganaggagaagcaaatatatttaccaagcaacgtagggaaaacatgcaaaatatcaaatcaagtttggaagcagctagcttnttggggagnaataatatatttaggatccttggatatggtttaatatatttttttaaagttactggtnnnnnnnnnnnnnnnnnnnnnnnnnnnnnnnnnnnngagccaaagcctaatcataatatttaataaaataaaacccctcttttccatcttatt

SEQ ID NO: 367054 - DNA, 1297 bp, Homo Sapiens
agcggctgtatcctctaggagcggagcccgtttgctggtgctggaggggggcgcacctggcgctgtgctccgctgtggccctagcccctgtgggcttctcaagcagcccttggacatgagtgaggtgtttgccttccacctagacaggatcctggggctcaacaggaccctgccgtctgtgagcaggaaagcagagttcatccaagatggccgcccatgccccatcattctttgggatgcatctttatcttcagcaagtaatgacacccattcttctgttaagctcacctggggaacttatcagcagttgctgaaacagaaatgctggcagaatggccgagtacccaagcctgaatcaggttgtactgaaatacatcatcatgagtggtccaagatggcactctttgattttttgttacagatttataatcgcttagatacaaattgctgtggattcagacctcgcaaggaagatgcctgtgtacagaatggattgaggccaaaatgtgatgaccaaggttctgcggctctagcacacattatccagcgaaagcatgacccaaggcatttggtttttatagacaacaagggtttctttgacaggagtgaagataacttaaacttcaaattgttagaaggcatcaaagagtttccagcttctgcagtttctgttttgaagagccagcacttacggcagaaacttcttcagtctctgtttcttgataaagtgtattgggaaagtcaaggaggtagacaaggaattgaaaagcttatcgatgtaatagaacacagagccaaaattcttatcacctatatcaatgcacacggggtcaaagtattacctatgaatgaatgacaaaagaatcttctggctagggtgttagatatatctatgcatttatggtttgttaaaaatcaagcacatcaacctcaagcccgtttagcaatgaggcagtgtagatgaatacgtaaaataacatgactttaaccaagtagctataatgggacttagcactgtatgcatacttaaaaaggttttgaaaaacaaactacttgagacatattgtatatatatattctctaacatcatgctatgtgtcagtctgaacatctgacaacagaaatttcagttattattctagctaagttttgaaaacatttgtcatgctgtttaatagaaaactgcaaaccagagatactgaatccatttaataaaccatatttgtgccgtatagactgttctgaaccaataataatggggacaattcctgacgatgaactgttggtggttgttaca

SEQ ID NO: 367055 - DNA, 741 bp, Homo Sapiens
atcaggccaaatcggccgagctcgaattcgtcgagagcggaattcacatgaacacccacatatcttttaaaacccgctttctcaccactgtgacagaattttatctcttcacttgttgagatttctctagagagtccagtactgcatcattttgacaaacctgaatgtggagagatgaatgcttctcatctctgaaacacttcaggatggccgcccatgccccatcattcttggggatgcatctttatcttcagcaagtaatgacacccattcttctgttaagctcacctggggaacttatcagcagttgctgaaacagaaatgctggcagaatggccgagtacccaagcctgaatcaggtggtactgaaatacatcatcatgagtggtccaagatggcactctttgattttttgttacagatttataatcgcttagatacaaattgctgtggattcagacctcgcaaggaagatgcctgtgtacagaatggattgaggccaaaatgtgatgaccaaggttctgcggctctagcacacattatccagcgaaagcatgacccaaggcattaggataaaatagacaacaagggtttctttgacaggagtgaagataacttaaacttcaaattgttagaaggcatcaaagagtttccagcttctgcagtttctgtgtcgaagagccagcacttacggcagaaacttcttcagtctctgtttcttgataaagtgtattgggaaag

SEQ ID NO: 367056 - DNA, 1042 bp, Homo Sapiens
tgacctggttgccttgctgccgggcactgatgctcagctccttccagggacagcctcagtggaccggctctcgggggccccggtccccttgcagggcgacctggcagcagggctggtgttccgctccaagtctgagtggcaaacagtggcctcactcgtgtccatgggctcagtgggccctgcccgtgggctctctttatccttccgctccccgctttggtctgcactgtctcctgcatccatggccacaggccggtgtttgaggaggcccactttgcctcctggctcgggccctggccctgagccatcagccagagggggcttcttcggctgggggaggccctcctggccatcctcaggactggccttgtgtgagacatcggtggtcatcctggctccggggaggccacagaccttgggccctgggcgttctgacccctctgcgagctcgctcagcgtgtcttcgagcaccttcacagtgaggatgaaggcccgctgcgccaggacctggcggtcagcatctcgcagatacttcttgccctggtctggggtccgctgaagcatggaggacaccttcagcagggtgctgtggtcccgcagctgggccagcaccttgagcagcagcacgatggagcggttcatgtgccaggcaaagctgcccggccggtcaatctcgtccacggggatccgccagatgccgttgaagaaaattggtcttgttcctctcgcagaagagcccctgtgccggcatgtgatgcagttgttgccacgggatactgctgcctagcaacacgtcgcgggcccactggaggttccggtgtgtcttgctgtaggtgtagaggaaggccagacggtagagactcttatagtgctgggggaagcggctcaggcacaggcggaaggaggcgatgcactgctctgtgagaaactgccgctgctcctcagcaccagccggcagcccctgggggaaggccactggctcccctgggaggtcccctctcttcttcccatcccacagggtgggtgggatgatccgaagaat

SEQ ID NO: 367057 - DNA, 1182 bp, Homo Sapiens
gtggtaccggtccggaattcccgggatcggcgccccgtccggccgcgcctgccccgccccggcccgccgcgagcgagagagcgaacgagcctccgcggccatggcccgtgcgctcgccctagctccactgctacagatgccacggcggagcaccggcggggcatctgtgctggatccccgtggacgagattgaccggccgggcagctttgcctggcacatgaaccgctccatcgtgctgctgctcaaggtgctggcccagctgcgggaccacagcaccctgctgaaggtgtcctccatgcttcagcggaccccagaccagggcaagaagtatctgcgagatgctgaccgccaggtcctggcgcagcgggccttcatcctcactgtgaagggtgctcgaagacacgctgagcgagctcgcagaggggtcagaacgcccagggcccaaggtctgtggcctccccggagccaggatgaccaccgatgtctcacacaaggccagtcctgaggatggccaggagggcctcccccagcctgaagaagccccctctggctgatggctcagggccagggcccgagccaggaggcaaagtgggcctcctcaaccaccggcctgtggccatggatgcaggagacagtgcagaccaaagcggggagcgggaaggataaagagagcccacggggcaggggcccactgagcccatgggacacgaggggaggccactggtttgccccttccaacttgggaagcggacaccaccccgtggttgccaggcttgcccccgcaagtgaccgccgtgccccgcaaagatagggacgaaatggctcggatactaggcacggacgcgaacatgccaaaggccgccccgccacggcgcacccgcctgccgaagccgccgtgtgcggccatacccggcggccgcggacggggtggatcgcaaacgggggtgtgaggcgggtaagggagaggggcgattctcgaagaatgcaaaggggagtacaccagccgtttcatctataatcttgcccccatgctgaagcgcactcttcaccttggcatcgagactagccgacctcgcgggagcggcgggaggggcatgccagaaatcgatgcggtgcgttccgtcgcgtcgcacccccccactcaggagtgttagtgaaccgcaccacaccagttgaatggt

SEQ ID NO: 367058 - DNA, 973 bp, Homo Sapiens
attctggccagttgcttagcgcagttcaagttacttagtgcgctggaagcggcatttcaggcaatccaacttctggctcgaaccttctcggagtattccaaggatggaatactctcacttgagcgctgccgagggtgccgcttgaggaaaacgtgagtttgtgaagaatgtttgttgcagatacagttccaccactctacattaagtatgtggaaaacagaagatatccttttggttcctgggtctccagaacagtaggagcaaacatccaaatctgatatagcacttccagagagcctggtcttggaggataaaactttaccttgatgggacttttggccccggtcccttaagagttggcatttggggttgtactgcagcacaactcagcctatcctaatacatatgggaatgcaaacatctcagatatttcttcttgggtgcaatttaaaatacgtatgaaatggcttcagaagtgtccatgaaccttcaaaattacatacaagaattagggagatacatttttctgggaacatacagatgttaagacttcccttctccgtctctatattgccagaagagagggccccagaattaaaaccccatccttcctacaacactcagctttctctttcaggaatatcagtactaatatcaccatgccttttatctctaggatatcttcatcccctgtaccttaatttctgcatgacttcatagggagtccatattgcttgatttttctccatatcattaccattgacataaaattttccttacattcttagaatgtgtatttcctcacctttttagatttcctggctcttaatggttgactgctgtatccctagtacctaacacacaacagggtttccaacaaatacttttttgtttggagaacaggctttggtcacccaggcttggaggccagcggggaacaaatcctgggcaccgggcaacccttggccaccga

SEQ ID NO: 367059 - DNA, 1377 bp, Homo Sapiens
  misc_feature (1294)..(1330): n is a, c, g, or t
cccggacaatgaggagtagcacagcccgatgatggcgaagggcacgatgaagcccagcgtgacctcgagccactgcaactcccggaacatccgcgaaaacagaaacaggcctcgtcggtgtgcctgcaaggtgcacggcggtgaaagggcaccagcgtggctgacacggatgccatccagatgaggccacagctcagccgggcgtggtgcttggtgcggaacaggctgcagcgcatggccctggccagggcgatgtagcggtcgaagctcatccaggtgaggaagaagacgctgctgtacatgttgacctgcaggaagagcgacatgaaggtgcacaggacggcgatgtcgtagtaccgctcgtgcaggttgaacacctcaatgagggagtcggccaccaggatgaggtccgccaccgccaggttgatgaagtacaggtcggggatggtcatcttctcgcggaagctgatgttcaccaccaggatcaggatgttgcccacaaagccgatggggaagaggaagatggtgtagaggcacgagaggaacaggccgatcacgtactgctggtgctccgagagctcacctgtcccattggccagggcggtgcccaggagcgggtgggacaggttgagctcgggggaggtggtgttgggggccgcaggctgcgcggtgcctaggtacatctccaggcccacgccccgggcttgggaagtcacatccatgtctctgcgccgtgcagctttcaagatttgccgaaaggctcccagagctctgttttaaatggtgaatccatctttagaaagaagcgtgattctccttgaagtgagcctggcatttgtcagacaggaaactccccaggaggagcacctgtggtggtttgggttgggtttgttaactgcagagagtgggaagaacagatgctcctcacaccggcatggtgcatccgtggaggcgagggccctccgcgtgctcgtccggcgggcgtccctgcgggtgtcggccaccgtgcacagtcccgcgtggagctgctcactctctgggtacctgggttgcagccccttctgtgctcctggaagcctccttggtcaggcccatcaggctggaggtgcacttggaacccgctgcaggaggtgtacctctgctggacctgccgaatgcctgagcagggctagagagaggaagagacccgccctgggagcccgcgagggaaggttcccggctggctggcgggtgcgtcctccctctgagccagtccgctctcgacgaattcgagctcggccgatttggcctgatnnnnnnnnnnnnnnnnnnnnnnnnnnnnnnnnnnnnncgccgccaccgcgatacagcccgagtcgccctatatgatctatcatc

SEQ ID NO: 367060 - DNA, 881 bp, Homo Sapiens
ctgcctctgagtctctctcgaccatggccaaattcgtcatcgcgggtagagcagatgtccatattatgctaaaacagaacttgtggcagactatttacaaaagaatcttcctgattttcggatacataaaatcacacaacgtcctgaggtttgggaggattggcgtaaaagatgtgtgtgaaaagaataagtggagtcacaagaattcccctatcatctggagagagctgtggatcgtggaggaaagggtttgctgttgggaggatataatgagttcctggagcatgctcagcgtttactatgatgtcacctctagcatgacgactgaactgatgatggtaattgctcaagagaacctgggggcacatatagaaaaagagcaggaggaagaagccctgaaaacttgcatcaaccccttgcaggtctggatcaccagtgagtgggtaacacacagagaattcgtggcgaattcttgaaaaacttgaccaccacaggaagacaatttggaggcattttggctgcgcgacagtatagccactacactgaaatactggtaccatggctcaccacctggggagattgtatcttaaggaatattgagtgaaggccagttgtggtattccgaaagggatcgtcttttctatgcctgagaaatttgagaatggaactttgggtggttctcacagatctcaaagatgttgaaataagagaacaaataatgacccgaatgacaagttatctaattcaggagaaacttgttgcacttggagacaagatacattatcagccataccaatcagtggacttgattgtctgaagcctgattcagcaggtcctactgcgtccaagtttctgggaagctcgcaagcactccctttctg

SEQ ID NO: 367061 - DNA, 789 bp, Homo Sapiens
ggggcggtccctgcctctgagtctctctcgaccatggccaaattcgtcatcgcgggtagagcagattgtccatattatgctaaaacagaacttgtggcagactatttacaaaagaatcttcctgattttcggatacataaaatcacacaacgtcctgaggtttgggaggattggctaaaagatgtgtgtgaaaagaataagtggagtcacaagaattcccctatcatctggagagagctgttggatcgtggaggaaagggtttgcttttgggaggatataatgagttcctggagcatgctcagctttactatgatgtcacctctagcatgacgactgaactgatgatggtaattgctcaagagaacctgggggcacatatagaaaaagagcaggaggaagaagccctgaaaacttgcatcaaccccttgcaggtctggatcaccagtgcctctgctcctgccggctacaacctaattcccatattgacgagtggcgaagtgttagggatgcatacagaaattagcataactctatttgacaacaagcaggcggaagaacatctcaaaagcctatgatggtggagacccaagacctggcatctcccgtactgcgcagtgtctccatactgcacgaaggtggaggaggacttccgccaggcccacgtccaaagtggtgctgggatgacagcaccaaaaaggagggtgtcactcatggaggaactggctaagaagcacggtgcctctctgaaggatcaaagcggtacctgaacgcaaaacaatgctcatgaa

SEQ ID NO: 367062 - DNA, 777 bp, Homo Sapiens
gtgactctcagggcaccgctgccgggtccagtccacctttgctactttgtcctactcccagcccgcgggcgctaggctcgggggcgtggcgcatcctgactccgcccccgccgcgggggggcctctggggcctggtcgccatggcgaccggctgtacgctaccacagcttcccaggccgcgggtgctgattgcccgcctgcccgtgggtcatggcctgccagcagtcgcggtaccacagcttctcgtccgcgtcgagattacagccacggccttcaggagtgaccatagacgaatcctttctcacagaagacaagagcacccagaatcgcaagcttcttcagaaacgaaggacgctgactggtcagttctccatgggtgggcacctgtccccatggcccacatacaccagtggccagaccattttgcaaaatcgaaaaccctgttcagatgactaccggaagcgagtagggagctgccagcagcacccctttcgcactgccaagccccagtacttggaggaactggaaaactacctacgcaaggagctcctcctgctggacctgggcacagattccacccaggaactaaggctgcagccttacagagagatctttgagttcttcatagaggacttcaaaacgtacaagccattactatcctccatcaagaatgcgtatgaggggatgctggcccaccaaagggagaagattcgggctctggagcccctgaaggccaagcttgtcactgtgaatgaggactgcaatgagaggatcctg

SEQ ID NO: 367063 - DNA, 692 bp, Homo Sapiens
gctgattgcccgcctgcccgtgggtcatggcctgccagcagtcgcggtaccacagcttctcgtccgcgtcgaggtaggcgctggcagggatgagggcagagatgagggtttgagtacttctagagagggaaatggcacttgatccggacctctgcacctcctgctggcctctgaccattgatctagggctccagcaccacagagtcaatggttagaatcgggctgatttagcccagtgaagacgttacgtgctagcaaaacgattacagccacggccttcaggagtgaccatagacgaatcctttctcacagaagacaagagcacccagaatcgcaagcttcttcagaaacgaaggacgctgactggtcagttctccatgggtgggcacctgtccccatgggcccacatacaccagtggccagaccattttgcaaaatcgaaaaccctgttcagatgactaccggaagcgagtagggagctgccagcagcacccctttcgcactgccaagccccagtacttggaggaactggaaaactacctacgcaaggagctcctcctgctggacctgggcacagattccacccaggaactaaggctgcagccttacagagagatctttgagttcttcatagaggacttcaaaacgtacaagccattactatcctccatcaagaatgcgtatgaggggat

SEQ ID NO: 367064 - DNA, 1007 bp, Homo Sapiens
gggcaggtgttaagcgataaaggggggcagaacaagtcttttatccggccatttaattggtcaccttaagaaagaatcctatcttcccaccgcagctgagaagacacttctaagaggtacagctaaaaggtggaggactgatagacaacttagaggttggtttcgggaacgataaaacaagtaacgggctgcccggcctgcgccgcggagtcccgaggagcctgcgctgtgctcctctcgcggtgtctcgtcatctccgggaagactcggcgcctgggtccgcgctctctgggtaagctttccgggaagctttcccgggagctcgctggtcctggccccagaagcctgcggacccgcccagggaggataagcagctgaaagaccgcgcggtgccgctccgaggccccgggacgtgggcccatggtcggcctggcgccacctttccgggggaagccacgcgcaccaggcatcgcacgcggctctgcacccgcgccgccggacctgaaacccggcggagggcacacggggctgccgctgcgggccccggagcaacccatgcttactccggagcctgtaccggcgccgacgggtcggacctccctgcgcggtgtcgcccaggcggggttcgttgcgaaaggcgggggcccggactacacgcggtgccgcgccctgagaccgtttatctgcaggtcaacgccagcctcccggctcaagcctgggaaaagatgcgcgaatcggggaaccccaggaggcgcggtggctaagacctgggctcccgccgcctcccccagagtccccgtttcctaagtcgttcagaccgggagcctgcgtcgacttcggccgggagaactgccaggatctccgtcctctttccctggtgtcatctttcttaattataaataactggggggcatgacggattacgacgaactttccgtattgaaagatttcaggaacgcatccacagggaatggaatttacagcggccctcccatgcagatcaagca

SEQ ID NO: 367065 - DNA, 1325 bp, Homo Sapiens
  misc_feature (1313)..(1313): n is a, c, g, or t
aacaaccccggacaaattaaatcagaagatctgagggtgagattcaggcaagaggacttcttaacagctccccaagtgattccattgttcagccaaggttgataactactcatttagaagattggtaatcctaactctggtacatgcgaactatctgaggagctttaaaaacaaatacagaagccagaatcttaggacaagtaaaatagaaatccctgggggttgttcccagacatggtgtctttcaaagctccccagatgattctaatgtgtagccagatttgtggaccctcaggtttaatgatcttcaagaatcctctatctaaggttctaagcttgtccgaatggacttgtagagctataagcacgtgtaccaccttctcaggaaggtggccgctccaatgctctctgactctaaagaatgaaatgattattcccacccgaacatccatcttctctgggtttacccgcccctacttacagtcctgaaaaaaggtcaccctagacttgacctcagtctcattgtgacacacacagcacgccagcgttcttaaccttttggttacagagacccttttagaaacttcatgaaaattgtaagtcatctcataaggaggatcttacatgcacatcaaattgagcatacaattttcatggatccctaaactcttgatacaaagttaattctatctcactataatataaaagtcaaaaacttacataacccagaaaagcagaatttgcaacatagtagaaatagaccagagtgaaagttctaatcctggttccacaactcaccagtcaacatttaggagtcactgaatcacttgatgcctcagtttactcatatgcccaattaagaattataaaatcatgcaccacataatgtcttggtcaagtacagatcacatatgacgatggtttcataagataatactgtgtttttactgtacctttgtcactgtgtttagatacacaaatacttacattatgttactattgcctatggtattgagtatagtaacctgctgtacagagctataagcctaagagcaataggctataccatacagcataggtgtgtccacaggcttctcccaccttggtttgtgtaagtacactctgtgatgtttgcacacaacgaaatcgcctgatgacacaatgctcagaatgtgtctccatcattaagagatacatgactacctaccccatcaatcttgcctattccaggaaacaaagtgaaattaataatattaaaattgggttgatccatttatggattacattgtcattggaagtagggggaactaggnccggggggcact

SEQ ID NO: 367066 - DNA, 758 bp, Homo Sapiens
agcggagtcgtccgcgccgactcgcacaagaaggaaccccgggcctctggatccgctcgcccggctatgctgctgtggccgctgcggggctgggccgcccgggcgctgcgctgctttgggccgggaagtcgcgggagcccggcctcaggccccgggccgcggagggtgcagcgccgggcctggcctcccgataaagaacaggaaaaagagaaaaaatcagtgatctgtgtcgagggcaatattgcaagtgggaagacgacatgcctggaattcttctccaacgcgacagacgtcgaggtgttaacggagcctgtgtccaagtggagaaatgtccgtggccacaatcctctgggcctgatgtaccacgatgcctctcgctggggtcttacgctacagacttatgtgcagctcaccatgctggacaggcatactcgtcctcaggtgtcatctgtacggttgatggaagaggtcgattcacagcgcaagatacatttttgtagaaaacctgtatagaagtgggaagatgccagaagtggactatgtagttctgtcggaatggtttgactggatcttgaggaacatggacgtgtctgttgatttgatagtttaccttcggaccaatcctgagacttgttaccagaggttaaagaagagatgcagggaagaggagaaggtcattccgctggaatacctggaagcaattcaccatctccatgaggagtggctcatcaaaggcagcttttcccatggggcccccg

SEQ ID NO: 367067 - DNA, 884 bp, Homo Sapiens
ccgagccccggaggaagcaggcgtgtgttgaatttctctctgcccctcaccttggaataaacaggaagcgacaagcacccagcccggcccggcacttgcctttgtgaaggggtctgccctgcacagcctttaggaagcttcctcgggaccccttcccggtgcgccgccccgggtgggcctgggggcgcgccctcggttcaagctctacgttcgtgacatcaaacctcctgttgggccatttccgagaactcccatcagtttctgtatagtgtaaaagtttcagaggcggagcacagagagctgcggctgggacaaggagcacccgcgtgcaggtgcgaccctgcaggatgctggcagcggcgtggccaggggcgcccgtgttctgagggcctgagggccagcccctccacccgcgccatggcctccgcgccctggctggacggctgacgggagcagggaccgccgccgcccaggtgccacacccaggtaccgcccgcccgcgcgagagccgggcaggtgggccgcggatgctcccagaggccggcccagcagagcgatggacttggacaggctaagatggaagtgacctgagcctcgcccggcggcttcctcgacgggacagcgcaagagttggagcacaggcttgtccggggagcagtatgccggaagctggttttcaggccacaaatgctttcacagagtgcaaattcacctgcaccagtggtaaatgcttgtatcttggttccgctggtctgtaaccaacagaacgactgtggggacaacagtgacgaagagaactgtctcctggtgaccgagcacccgcctccgggcatcttcaactcggagctggagttcgcccaaatcatccatcatcgcggggggtc

SEQ ID NO: 367068 - DNA, 1544 bp, Homo Sapiens
  misc_feature (1329)..(1329): n is a, c, g, or t
  misc_feature (1441)..(1441): n is a, c, g, or t
  misc_feature (1462)..(1462): n is a, c, g, or t
  misc_feature (1499)..(1499): n is a, c, g, or t
  misc_feature (1508)..(1508): n is a, c, g, or t
  misc_feature (1528)..(1528): n is a, c, g, or t
cctcagcgcgctacggtccgcgggcaactccgcagaagccccagcccccaggaccccaggacccagtggcgcagccggcaagccccggatccctgatctgcttgggcagctcctgcagaacctggaacagtgaatgggtaggggacactgggcgtgcagaaggcggggggcagtgtggaacatgccttcaccacctccagcttctgctgccggaggctgcacccacctgtgcccatggcctgcacgggcccatcacttcctagcgccttcgacattctaggtgcagcaggccaggacaagctcttgtatctgaagcacaaactgaagaccccacgcccaggctgccaggggcaggacctcctgcatgccatggttctcctgaagctgggccaggaaactgaggccaggatctctctagaggcattgaaggccgatgcggtggcccggctggtggcccgccagtgggctggcgtggacagcaccgaggacccagaggagcccccagatgtgtcctgggctgtggcccgcttgtaccacctgctggctgaggagaagctgtgccccgcctcgctgcgggacgtggcctaccaggaagccgtccgcaccctcagctccagggacgaccaccggctgggggaacttcaggatgaggcccgaaaccggtgtgggtgggacattgctggggatccagggagcatccggacgctccagtccaatctgggctgcctcccaccatcctcggctttgccctctggggaccaggagcctcccacgccccattgacggtgttccggactggagccaagggtgctccctgcgatccactggcagccctgcctccctggccagcaacttggaaatcagccagtcccctaccatgcccttcctcagcctgcaccgcagcccacatgggcccagcaagctctgtgacgacccccaggccagcttggtgcccgagcctgtccccggtggctgccaggagcctgaggagatgagctggccgccatcgggggagattgccagcccaccagagctgccaagcagcccacctcctgggcttcccgaagtggccccagatgcaacctccactggcctccctgatacccccgcagctccagaaaccagcaccaactacccagtggagtgcaccgaggggtctgcaggcccccagtctctcccctttgcctattctggagccggtcaaaaacccctgctctgtcaaagaccagacgccactccaactttctgtagaagataccacctctccaaataccaagccgtgcccacctactcccaccaccccagaaacatcccctcctcctcctgctnctcctccttcatctactccttgttcagctcacctgaccccctcctccctgttcccttcctccctggaatcatcatcggaacagaaattctataactttgtgatcctccacgncagggcagacgaacacatcgncctgcgggtttcggggagaagctgggaggcccttggngttgcccgnacgggggcaacctttgttgnggagggattttccagg

SEQ ID NO: 367069 - DNA, 1190 bp, Homo Sapiens
  misc_feature (998)..(1107): n is a, c, g, or t
tgtcaacaacatcccatcctgaagacttgcttaccacaactgagagtggggagtcagtttgaggcctagcatcacttaaacttcctccaaaggcacaaaagccagaagagaaaaatgaagacgggacattttgaaatagtcaccatgctgctggcaaccatgattctagtggacattttccaggtgaaggctgaagtgttagacatggcagataatgcatttgatgatgaatacctgaaatgtacggacaggatggaaattaaatacgttccccaactgctaaaggaggaaaaagcaagccaccagcaattagatactgtgtgggaaaatgcaaaagccaaatgggcagcccgaaagactcaaatctttctccctatgaattttaaggataaccatggaatagccctgatggcatatatttccgaagctcaagagcaaactcccttttaccatctgttcagtgaagctgtgaagatggctggccaatctcgagaagattatatctatggcttccagttcaaagctttccacttttacctcacaagagccctgcagttgctgagaaaaccttgtgaggccagttccaaaactgtggtatatagaacaagccagggcacttcatttacatttggagggctaaaccaagccaggtttggccattttaccttgggcatattcagccaaacctcaggctgctaatgaccagctcactgtgttatccatctacacatgccttgggagttgacattgaaaattttcttggataaaggaaagtgaaaggattactttaatacctctgaatgaggtttttcaagtgtcacaggagggggctggcaataaccttatccttcaaagcataaacaagacctgcagccattatgagtgtgcatttctaggtggactaaaaaccgaaaactgtattgagaacctagaatattttcaacccatctatgtctacaaccctggtgagtatgttctaatttttaaaaataatcttnnnnnnnnnnnnnnnnnnnnnnnnnnnnnnnnnnnnnnnnnnnnnnnnnnnnnnnnnnnnnnnnnnnnnnnnnnnnnnnnnnnnnnnnnnnnnnnnnnnnnnnnnnnnnnatctctacataattacataattatcatgcagttggtgtgaactctatacctttcttttgtagttgatttttatgactattaat

SEQ ID NO: 367070 - DNA, 659 bp, Homo Sapiens
tttcccaagtgcaggctcagtgttctgggtctgggtgtgttttctaagctgtgtgtgggtgttctgccggccctggggcagacctgtgccaggcaggcctctttgctgcctgctgaaaggcctgtgtccttgtcccggcttcctggtctccaggcgtgagaaccagctaaagctgtcccacgactggctgtgctatctggcccctgagattgtacgcgagatgacccccgggaaggacgaggatcagctgccattctccaaagctgctgatgtctatgcatttgggactgtttggtatgagctgcaagcaagagactggcccttgaagaaccaggctgcagaggcatccatctggcagattggaagcggggaaggaatgaagcgtgtcctgacttctgtcagcttggggaaggaagtcagtgagatcctgtcggcctgctgggctttcgacctgcaggagagacccagtcttcagcctgctgatggacatgctggagaaacttcccaagctgaaccggcggctctcccaccctggacacttctggaagtcagctgagttgtaggcctggctgccttgcatgcaccaggggctttcttcctcctaatcaacaactcagcaccgtgacttctgctaaaatgcaaaatgagatgcgggcaca

SEQ ID NO: 367071 - DNA, 761 bp, Homo Sapiens
cgcgccgcagccgcggagggaggggcggggcgggctccggtgtcagcgaccaagccgcaggtggcggcgagcgcggggctcggcccgagctcaggagatggggaaactgaggcacggagctggacagtgactcagacaccaggagctgcctggagtggagctgagagctcaggtctgggctcagccagtccagagtgcaaatctactgtcccttcctagctgtgtgatcttgacaggcactggacggggcctgcaggggtctccacagagaccatcaggatgtcgtattttggggagcatttttggggcgagaaaaatcatggctttgaggtcctgtaccacagcgtgaagcaggggcccatctccaccaaggagctggcggacttcatccgggagagggccaccatcgaggagacctactcgaaggcgatggcgaaactctccaagctggccagcaacgggacccccatggggaccttcgccccgctctgggaggtcttccgcgtctcctcggacaagctggcgctgtgccacctggaactgacacggaagttacaggatctcatcaggacgttctccgctacggcgaggaacagctcaagacccacaagaagtgcaaggaggaagtggtgagcaccttggatgctgtgcaggtactctcgggcgtcagccagctcctgcccaagtcccgcgagaactacctgaaccgttgcatggaccaggagcggctgcggagggagagtacaggcagaaggagatgg

SEQ ID NO: 367072 - DNA, 875 bp, Homo Sapiens
  misc_feature (474)..(474): n is a, c, g, or t
ggaacggctggagagactactgacacgctaccaggaaatgcctgaaccaaagttcatgtatgggagtcactactcttccccgggttatgtacttttttatcttgttaggattgcaccagagtatatgctgtgcctgcagaatggaagatttgataatgcagatagaatgttcaacagtattgcagaaacttggaaaaactgtctggatggtgcaacggattttaaagagttaattccagaattctatggtgatgatgtgagctttctagtcaatagcctgaagttggatttgggaaagagacaaggaggacagatggttgacgatgtggagcttcccccttgggcttccagtcccgaggactttctccagaagagcaaagatgcattggaaagcaattatgtgtctgaacaccttcacgagtgggattgatctaatatttgggctacaaacaaaaaggggagttgatgcagttnggggcccataatgtatttcatcccctgacctatgaaggaggtgtagacttgaacagcatccaggatcctgatgagaaggtagccatgcttacgcaaatcttggaatttgggcagacaccaaaacaactatttgtgacaccacatcctcgaaggatcaccccaaagtttaaaagtttgtcccagacctccagttataatgcttctatggcagattccccaggtgaagagtcttttgaagacctgaccgaagaaagcaaaacactggcctggaataacatcaccaaactgcagttacacgagcactgtaaaatccacaaagaagcagttactggaatcacggtcttctcgcaatggatcttcagtattcacaacatcccaagattcccacccttgaagatgtt

SEQ ID NO: 367073 - DNA, 684 bp, Homo Sapiens
  misc_feature (195)..(203): n is a, c, g, or t
gtgatcgaatcgagctcggtaccagttcgacggagactctctgagtgtgccctctgttaaagtgggacactcagagagatggttagaactatgtggcactgacaaacagaagttaatacaggtaaagtgtagaacagcccccaagtgcataggaaatgctgctattgctatttccttagctgaacataggtgaannnnnnnnncatatgtagtatggcagaaactgggaaaaactgtctggatggtgcaacggattttaaagaggtaagcagttaataaagctgatgagtaactggacttggggtttctaacggctttaaaacatgtttgtggttcttttttatttttgccccgaaactttcagttaattccagaattctatggtgatgatgtgagctttctagtcaatagcctgaagtcggatttgggaaagagacaaggaggacagatggttgacgatgtggagcttcccccttgggcttccagtgagtccccccttggaggtgttgtattatagacatgctttaccaagtagtgcaatttcagtaattattttattgcttagatttttaaaaatcacaatataattctctaaataaggatatatgagccctataccatatcagaagtattctatgagtctgtgatgtaaaaacattaaatatttgagaggctccgtcgact

SEQ ID NO: 367074 - DNA, 1149 bp, Homo Sapiens
ggaattcccgggatcagaggtggcgtgctgccgacttcgcgtttgccttgctggatgattccgcttgtttgccggctgcgtgagtgcttagagcttttcggtggaagatgccggacagtaacttcgcagagcgcagcgaggagcaggtgtctggtgctaaagtcatcgctcaggccctgaaaacgcaagatgtggagtacatatttggcatcgtaggcatcccagtgaccgaaatcgccattgctgcccagcagctaggcatcaagtacatcgggatgaggaatgagcaagcggcttgttatgctgcctccgcgattggatatctgacaagcaggccaggagtctgccttgttgtttctggcccaggtctcatccatgccttgggcggtatggcaaatgcaaacatgaactgctggcccttgcttgtgattggtggttcctctgaaagaaaccaagaaacaatgggagctttccaggagtttcctcaggttgaagcttgtagattatataccaagttctctgcccgcccaagcagcatagaagctattccttttgttattgaaaaggcagtgagaagcagtatctatggtcgtccaggtgcttgctatgttgacataccagcagattttgtgaaccttcaggtgaatgtgaattctataaagtacatggaacgctgcatgtcacctcctattagcatggcagaaacctctgctgtgtgcacggcggcttctgttattaggaatgccaaacaaccccttcttatcatcgggaaaggtgctgcttacgctcatgcagaagagagtatcaagaaattggtggagcaatataaactgccatttttgcccaccctaatggggaagggtgttgtccctggacaaccatccataactgtgtaagtgcagccaaatccagggctttgcaatttgctgatgtaattgtgttatttggtgccagactaaattggattttacattttggactgcctccaagatatcagccagatgtgaagtttatccaggttgatatctgtgcagaagaattgggggaataatgtaaagcccgctgttactttgctaggaaacatacatgctgtcactaagcagcttttagaggaaacttgataaaacaccatgggcagtatcctccaga

SEQ ID NO: 367075 - DNA, 895 bp, Homo Sapiens
agcggggttgccctcctgtccgtcagaggtgcagtaccagaggtggcgtgctgccgacttcgcgtttgccttgctggatgattccgcttgtttgccggctgcgtgagtgcttagagcttttcggtggaagatgccggacagtaacttcgcagagcgcagcgaggagcaggtgtctggtgctaaagtcatcgctcaggccctgaaaacgcaagatgtggagtacatatttggcatcgtaggcatcccagtgaccgaaatcgccattgctgcccagcagctaggcatcaagtacatcgggatgaggaatgagcaagcggcttgttatgctgcctccgcgattggatatctgacaagcaggccaggagtctgccttgtggtttctggcccaggtctcatccatgccttgggcggtatggcaaatgcaaacatgaactgctggcccttgcttgtgattggtggttcctctgaaagaaaccaagaaacaatgggagctttcccagcgagtttcctcaggtacattggaaacgctgcatgtcacctcctattagcatggcaagaaaccctctgctgtgtgcacggcggcttctgttattaggaatgccaaaacaaacccccttcttaatcatcgggaaaggtgctgcttacgcctccatgcagaaagagagtatcaagcaaattggggcaggccaatataaactgccattttttgcccacccctatggggaagggtgttgtcccttggacaacatccatactgtggtggtgcagccagatccaggcctttgcaattgctgatgtactgtgctcattggtgccagacttacatggttttacatttggactgctccaagatatcagcagatgtgaagtttatccggtgatactgtgcgaagat

SEQ ID NO: 367076 - DNA, 980 bp, Homo Sapiens
ctccaggcaaaaattggcaaaaaaggcccccgggatttttggggggtgcccccttacacccagttatgggaatgggtttttcaagggacaaaacaccccttttttcccccaaaaaagggtggcaaaaatgccagtttaatatggctcccaccaatttcttggatactctcttctgcatgagcgtaagcagcacctttccccgatgataagaaggggttgtttggcattcctaataacagaagccgccgtgcacacagcagaggtttctgccatgctaataggaggtgacatgcagcgttccatgtactttatagaattcacattcacctgaaggttcacaaaatctgctggtatgtcaacatagcaagcacctggacgaccatagatactgcttctcactgccttttcaataacaaaaggaatagcttctatgctgcttgggcgggcagagaacttggtatataatctacaagcttcaacctgaggaaactcctggaaagctcccattgtttcttggtttctttcagaggaaccaccaatcacaagcaagggccagcagttcatgtttgcatttgccataccgcccaaggcatggatgagacctgggccagaaacaacaaggcagactcctggcctgcttgtcagatatccaatcgcggaggcagcataacaagccgcttgctcattcctcatcccgatgtacttgatgccctagctgctgggcagcaatggcgatttcggtcactgggatgcctacgatgccaaatatgtactccacatcttgcgttttcagggcctgagcgatgactttagcaccagacacctgctcctcgctgcgctctgcgaagttactgtccggcatcttccaccgaaaagctctaagcactcacgcagccggcaaacaagcggaatcatccagcaaggcaaacgcgaagtcggcagcacgccacctctgcctcgtgccgaattcgccacccagg

SEQ ID NO: 367077 - DNA, 460 bp, Homo Sapiens
  misc_feature (132)..(132): n is a, c, g, or t
  misc_feature (404)..(404): n is a, c, g, or t
  misc_feature (421)..(421): n is a, c, g, or t
  misc_feature (434)..(434): n is a, c, g, or t
  misc_feature (441)..(441): n is a, c, g, or t
ggaacggaaggatgtggcgatatggtggggccttgggagtttactccctggttcttcgttcctcaggatgtggagtacatatttggcatcgtaggcatcccagtgaccgaaatcgccattgctgcccagcanttagggcatcaagtacatcgggatgaggaatgagcaagcggcttgttatgctgcctccgcgattggatatctgacaagcaggccaggagtctgccttgttgtttctggcccaggtctcatccatgccttgggcggttatggcaaatgcaaacatgaactgctggcccttgcttgtgattggtggttcctctgaaagaaaccaagaaacaatgggagctttccagggagtttcctcaggttgaagcttgtagattatataccaagttcttttncccgcccaagcagcatngaagctatttccnttttgtnatttgaaaagggcagtgag

SEQ ID NO: 367078 - DNA, 814 bp, Homo Sapiens
agcgggggggaagtcgagcagacacccagcgctgccggaactcggggcgcgcatccagcaagtagtgaacccggcggatcggatcccgcagatctggagacggggcctggagggtggctagcacgcaacagggtgtccctgtccctcaaggggtcatggcctccatgttgctgcgcccgagctgcgctgggcctgcaggcttccagctagcagctaccgcctgctggtgcctggatccagacacattagatcaagctgcgagccgagaagtcgacgttgaagttgtgattagtgatggggcgctcgtgatgaagactggaagtcccatgggccataggatctcaggagttaatgaaacagcgtgaatatatattcagaatgcaagaggctgtgcattgtttcactgcaattacgaagagagccgaggcaattgacctggttgatgtggagcggcaaccgaatgctggatctttatgcccagatctcctctgtccccataggttacatgccaccccgacctgctgaaactcgatcctaacgagtccgtcaataatgcgagcatgtatgtcaacagacccgccctcggaatcctgcctccggagaactttgtggagaagctccggcagtccttgctctcggtggctcccaaagggatgtcccagactcatcaccgagtggcctgtcggctccgtgctccgaatgagaaacgccttaaagaccagcttcatgtggtaccggagcaaggaacgagggcagaggggcttctcccaggaggagctggagacgtgcatgattaacaggccctggtgccccg

SEQ ID NO: 367079 - DNA, 512 bp, Homo Sapiens
tcgtgttctagtaaaattttatttgcaaaagtaagcagccggttggtccctggttgaggctgaggaagacattacttcctgctggaaatacttgggacttacatttgacacaggctaaaagtatgggatgagagaggaacaaaagcttacaaacaaagagcagccagtttggccaaagaggaatgtgcatgaaagaaggtggcaacagactgacatgtaattcggtaaggataaatacatttacaaatgtgcaaactgaccttttgctggttcatctttattttagtcatactacttaaaaatatatatttaaaaaatattattttaaaagtcatcttccacttgaatcataaacttcttccttgtatcaaaagttgtgccactatcctggttacttgtgggattcaccaagcagtccagcaagtcatccgtagaaatgaatgtttgaggagtcgtagtagtatttgaggcaatctggtcctcaattgcattttcactggtgcccatattgg

SEQ ID NO: 367080 - DNA, 1583 bp, Homo Sapiens
  misc_feature (1318)..(1342): n is a, c, g, or t
  misc_feature (1425)..(1433): n is a, c, g, or t
  misc_feature (1529)..(1542): n is a, c, g, or t
ggttggacaggacgtagacacacagaagaaaagaagacaaagaacgggtaggaaaattaaaaaggttaccatggggaagaaagtggccatcattggagctggtgtgagtggcttggcctccatcaggagctgtctggaagaggggctggagcccacctgctttgagaagagcaatgacattgggggcctgtggaaattttcagaccatgcagaggagggcagggctagcatttacaaatcagtcttttccaactcttccaaagagatgatgtgtttcccagacttcccatttcccgatgacttccccaactttatgcacaacagcaagatccaggaatatatcattgcatttgccaaagaaaagaacctcctgaagtacatacaatttaagacatttgtatccagtgtaaataaacatcctgattttgcaactactggccagtgggatgttaccactgaaagggatggtaaaaaagaatcggctgtctttgatgctgtaatggtttgttccggacatcatgtgtatcccaacctaccaaaagagtcctttccaggactaaaccactttaaaggcaaatgcttccacagcagggactataaagaaccaggtgtattcaatggaaagcgtgtcctggtggttggcctggggaattcgggctgtgatattgccacagaactcagccgcacagcagaacaggtcatgatcagttccagaagtggctcctgggtgatgagccgggtctgggacaatggttatccttgggacatgctgctcgtcactcgatttggaaccttcctcaagaacaatttaccgacagccatctctgactggttgtacgtgaagcagatgaatgcaagattcaagcatgaaaactatggcttgatgcctttaaatggagtcctgaggaaagagcctgtatttaacgatgagctcccagcaagcattctgtgtggcattgtgtccgtaaagcctaacgtgaaggaattcacagagacctcggccatttttgaggatgggaccatatttgagggcattgactgtgtaatctttgcaacagggtatagttttgcctaccccttccttgatgagtctatcatcaaaagcagaaacaatgagatcattttatttaaaggagtatttcctcctctacttgagaagtcaaccatagcagtgattgggctttgtcccagtccccttggggctggccattccccacagttgaacctccaggtcccgcttgggcagcaccaagtaattaaaggggaaacttggtacttttgccctcctaatgggagaacctggatggaatgataattnnnnnnnnnnnnnnnnnnnnnnnnnccccccaaatgggttttgggcaaaaagcggagaacccttaccggcaccggatttacctttgtttttaatatggggatggaaannnnnnnnntcccttcatattgggggggaaaaacccccaaacatctcccagtgtgggtggtttttctcccaagaaatctcccaaaatgtggcccgtggggaaaannnnnnnnnnnnnngggccccctttggtaagaccccccccaacccaccgtttttt

SEQ ID NO: 367081 - DNA, 905 bp, Homo Sapiens
  misc_feature (316)..(324): n is a, c, g, or t
  misc_feature (397)..(411): n is a, c, g, or t
catggattcgcatggagagattgataagtgttaacgggtgtaaacttgttagacccattgggattaagtatgcctgccgtgcctgaccaggaaattggttgtcggccttaagttggttgtccgaaccaagggttaaagtggaaaaaagggaaaccaccggttttttattgcacggaattatagccagaacaactgggaaaattatttccgcggagataaaggccatttggaacgggagaattaaagtgaatgttcagactccagatacttctccatgattattatagtggcttctgtcaagtaaaaatacgtgtgnnnnnnnnntgagttctagtgttaaaatgttctaagaaatgcagtactacagtaatgcctacttgttaaagtttcccggccnnnnnnnnnnnnnnnaaacagccctttaaaaacccaaattaatcaaatgaaagaagcggcaaaagatctaacctagctggcactctgcaagtgtctctcctctgtggaaacgaaatcctgccctgagcacaattcttgacataactgccttctgcctcttgagataaaaatgacctgaccgatggctggcaccctcagccagagctaagaagatggattcctaccttgttaagtaccacatttgcatgtagacccaaaacgtttaagagccacttaaatattcaagacaaatgaaatatgtgagaataaggttttaaaaaaccctttagaagatgttcaagagatactgcctcgcctaacgtgatgtttccaatcttcaaacgtgagtaggtcccaagaggaaaagcacacctcactcagattgatcaaaagtttaagggtgtaccagcatgtttttatagaacaatgtgctcactttgagaaatgagaaacatgaattgcaaaagaat

SEQ ID NO: 367082 - DNA, 869 bp, Homo Sapiens
agatcaaagggcgtcgcccaaagcgggacaggtccagcggttgttctgtgtgaagtcgcgcggcttccacccacgcagtgttctaagtgaaggccagaaactcgctcgccatgtcggctgcagaggcggggggtgttttccacagagccaggggcaggaccctggccgcgtttcccgcagaaaaggaaagcgaatggaaaggcccattctacttcatcctgggcgcagacccacagtttgggctgatcaaggcctggtccactggggactgtgacaatggcggtgacgaatgggaacaggagatccgtctaactgagcaagccgtccaggccatcaacaagctgaaccccaaacccaaattcttcgttctgtgcggcgacctcatccacgccatgccagggaagccgtggcggacggagcagacggaggacctgaagcgagtgcttagggcagtggacagggccatcccacttggtccttgtcagcggcaaccatgacattggcaacacccccacggccgagaccgtcgaggagttctgccggacttggggagatgactacttcagcttctgggtcgggggccgtcctgttcctggtcctcaactcccagttctacgagaaacccctccaaaatgccccagcctgaagcaggctcaggaccagtggctggacgagcagccgagcatcgcgaggcagcggcactgccagcatgccatcgtcttccagcacatcccgctgttcctggagagcatcgacgaggacgacgaactactacctcaaccctcagcaagtccactcggaagaagttgggcagacaagttcatccgagtggacttgctgaggttgaggtagtagtcgtcgcaacacaa

SEQ ID NO: 367083 - DNA, 1139 bp, Homo Sapiens
catgctgcagtgccggtttgtccaaccaggtcaggaggctgcccggccccctccccactctcaaagtgcttgttaaacacagagtcgtaatttgtggctaaatataactagtgtgttctcacggaaagtataattcagggtgctcattgtatgaggttatcaacaagacccatctgggttaaattaaagtgattttcataaagggcagaagcgccccttggcctggtttcccctgcctttttattagtgacagtgttattgttgcaattattagaggggatcaaggaaggtgggagttgccaggacccccaggctgaggagggagcctcccagcccccctccactcaccattgtcctgctgcccctccagccccctggtcactgtcacctctgcggctggagggctggagaaaggcccaggagcccagggaacctccaccatgccaggctgccttccctaaaggccggctccttccccccaggcagccagtctgggggtggacctggaggggcagggttctctgggaatctctgggccaagggatgcgctttggggatctgctggaataacagagtaatcggttttccttgcaggaggttgacccgaaaacagccctccgtcttcctgcccatgaggatgaggacaggaagcccagacccgggagagaaagcccagatcagacagatggggggtagcggagggcctagttggctgaaacttgccctgcttggggacaatgctcagggcaggaccaaatccaaacgagggcaactgcttatgtggtccttccggagcatcctccaaggcagagcctggcttcgggccctccctgcaaggacacctgcctccactccctgccagaccaggcctggctgcagaggcggaggggcggcagggctgcctgtctccactgtttggcggtgtttacacgtgtcgctgtcagggtgtctggacagtgggggtcgggggcctcccgggcccagacttccccaggcctattctcacactggtgagagggccctaggggaagggtgtgggctgggtggcgggccaggccagctgagacctacaggaccgtggagcatttaggtctcccagccaactccacccggtctctgagcatcagttacaagagccc

SEQ ID NO: 367084 - DNA, 856 bp, Homo Sapiens
  misc_feature (818)..(818): n is a, c, g, or t
  misc_feature (841)..(841): n is a, c, g, or t
gatataatgcttccaatagattaatttctcttcccctcccttattccccacccacagccagcagatgctgaaagactgcactgcccaacactgccatctttgctttatatatccaaaagagtgggaaatgctgtcacatctccagcagaaactgtcaaacactagtaatggtagaaaatatctgaatgacacaattaataggcttgattttgtggatgctctactttagaaagaaaattcatatgcttttcaaacacacatgcaatattagaaaaattaagtgtgaactagaccacaaagcaattttcaacaaatactaatgaactgataccatgtttaacacaaattctaaccaaagtgctataacattagaaatcaataacaaaaaactaccctccaaaaaacatctaagtaattcatgaataaaataatgtataatggaaatttatgagtttttaaacttaaatggtaatggtagtattatatatcaaaactcacgagatgcagcttttagcacgacattactaatttcctactcaacaatcattcccctaccttcatgactttgcgtgtcagccatatgattagggctcgggtccaccaaccagctgcattttcttggtcttagcatatactgattaaattgaaatgactaagagtcagtgagctgcaattgaattccccatggctgactgtggcaaaacattttaaaatagggcatagacggcaccaaccaaaaatgttggtgtattgtactgtagtaaaattaacaagtcttgttccattgaaaacaaacaaaacttttaatattatagtgnaaagaaaagccaccagagtgggnaggaaggatatttaa

SEQ ID NO: 367085 - DNA, 956 bp, Homo Sapiens
  misc_feature (315)..(351): n is a, c, g, or t
gaaggggacactgatcacggaaaaccttcggaggcaagagacgcggggctccccgggtttcacgttcggtccctgtctcgcaacccccgcgggcccggcagagttagttttgaatttatggcagcgcttgccgagcgctatttgggtaaacttcggtctccggcgggggtttccgtgggcaggtggttgggtgtggtggtagaataatgcaaacccactttcatcacttttagcacaactaaaatgcagtcccatggaagtagctgtccccttcctttaaaaacgtccgtcagatgctccctgaccctcttctannnnnnnnnnnnnnnnnnnnnnnnnnnnnnnnnnnnnggtgtatatgttctttggtctggggaaatggatttttattagcattgggagactccccgggcgatgggactacaggactgaaggagaacagctcaaatgggcggtggtagccaccttactaattcaagagaaatggctgtggctagaaaggtgtgattgcagggtgctctttagaaaggtttcagaaggaagacatgtgttaactttagttagaggcgatgggtaactgaacatagataaacttactggtattccttaggtgaaaatgtgtcatctatgaccatttatgggtgatttggataaacaatctaatacatatttccaaaatggtgccttgtgcaagtattcccaactcaggttgacaaaaataagcatatagatgactacatctacttccttcccaatagtagggaacttctgaaatactggagttaatggaacaccctaaaagatggggaggtggaacactatttgggcctaattcactcagtcttgaggctgggagatgtctactcattagcatacctgtgtggcacaagcaaggcctcatcatcatttaagtatccaataattcgaatttgactgggatttatccctgaaatgtc

SEQ ID NO: 367086 - DNA, 1318 bp, Homo Sapiens
tcatctatgaagactctcaggtcgcgatttaagaagacagagagtcaagactggggcaagagtgacgagaggctgctacaagccgtggaaaacaacgatgcacctcgggtggccgccctcatcgcccgcaaggggctggtgcccacgaagctagaccccgagggcaagtccgcgttccacctggcggccatgcggggtgcggccagctgtctggaggtgatgatagctcatggcagcaatgtcataagcacggacggggcaggttacaatgccctccacctggccgccaaatacgggcacccacagtgcttgaagcaactactgcaggcttcctgcgtggtggacgtcgtggacagcagcgggtggactgccctacaccatgcagcggctggtggctgtctctcctgctcagaggtgctctgctcctttaaggcacatctaaacccccaagatcggtcaggcgcaacacccctcattatagcagctcagatgtgtcacacatgacctgtgccgtctcctactgcagcaaggggctgcctgcgaacgatcaggacctgcaaggcatggacggccctgatgctggcctgtgagggggccagccccgaagacagtggaggtcctgctgcagggcgggagcccagccgggcatcaccgatagcgctggggcaggacgcggcttcactatggccgccctggcgcgggacaaactcatcctgcaccttctgcaaaacgcagcccagcgcccctcccgcacccagcgccctcacagaggatgattcaggcgaggcgtcatctcagaactctatgtccagccatggaaagcagggggcccccaagaagcggaaggcgcctccaactcccgccagacattcccatgccggatgatcgagatgcctatgaggagatcgtgaggctgcggcaggagaggggccgcttcctgcagaagatccggggcctggaacagcacaaggaacagaggcagcaggagtccccggaggccagctccctgcacatcctggagagacaggtgcaagagctacagcagttgctggtggggagacaagaggagaaggagagcctgggacgggaggtggagggtttgcagagccggctgtccctgctggagaacgagcgggagaatactagctatgacgtaaccaccctgcaggatgaggagggtgagctgcctgaccttccaggggccgaggtgctgctgtccagacaactcagtccgtcggcccaggaacacctggcctcgctgcaggaacaggtggctgtgctcacagacagaaccaggaactgatggagagggtccaag

SEQ ID NO: 367087 - DNA, 1233 bp, Homo Sapiens
  misc_feature (173)..(173): n is a, c, g, or t
  misc_feature (958)..(966): n is a, c, g, or t
catatacgttgctggcatgtggagctccattcttctccagcccacttaattttaagaatagacctgataagactttacccacctcaacctgctggcagcaggagggccctgtgtgctggcagcatctccccaggacacgccggctcacctgcacccacagcgttctaggagtncgcggcctctgcagactcagtgcaacccctgggccttaccaaagggacactcagaggtgcactgcctgctcagctcacacaaggaacaagtggagagctgggctggagaaaggattacaatttaccagaccagggtccctggctaggggccctcatgggacctgtggctgaaagagaaagttcgcccccgaggttgggagggctgaagacacctgggtgcttcttggtgcagtcctggtcaagatgaaagagcgctcctctgtgcccacgctgctgtgcacggggtgtgacgcagaggcgtctcctctggcccccaagccaaggccggagcagctcccagttgctggcaccagacctctgccaggcacggggcatggccatcctctggggtcctggctcaggggtggggagcggcagtgctgggacaagcctggggaaagggtttcccatacactgaggctgcgagatcttccagtggagcctcaggctagggtatgaatcagaccaccaggtgataggagccaaacctccacatggtgaaacttcactctcggcagccaggaacagaattattagcaaagaaaagagaaaagcagatgccaatcattctctctcttcgtcaaggttatgcccacgggcagggtgggctagtggtgagggtggagctgcgtccctgacccccagaaggagacagcaggccttcaagttaagccaagcaatacttggtcattgtttgtggccaaccattctctgaatgtctgaatgacagcgactatgtttaaggnnnnnnnnngtaaataagagaccttaagcaatgcattgactgcatggtctcaacctcatctgtgctgtgagaatgaggggtaaggctgggcatgcaggtagggccccagcaaagctggctccccgctccctgtgggacagagggctcccaccgggaaggcggctctagcgtgcctcctcggcgagctgagaggaggccaaggtgcttggggcacagctgtgcaaaccttcctggggctctcgctgtctgcctcgtgccgaattcgccacccaggcc

SEQ ID NO: 367088 - DNA, 481 bp, Homo Sapiens
  misc_feature (466)..(466): n is a, c, g, or t
gtcattcagacattcagagaatggttggccacaaacaatgaccaagtattgcttggcttaacttgaaggcctgctgtctccttctgggggtcagggacgcagctccaccctcaccactagcccaccctgcccgtgggataaaccttgacgaagagagagaatgattggcatctgcttttctcttttctttgctaataattctgttcctggctgccgagagtgaagtttcaccatgtggaggtttggctcctatcacctgggtggtctgattcataccctagcctgaggttccactggaagatctcgcagcctcagtgtatggggaaaccctttccccagggcttgtcccagcactgccgctccccacccctgagccagggaccccagaggatgggccatgcccccgttgcctggggcagaggtcttggttgccagcattggggagctggttccgccctttgccttngggccgagggagcct

SEQ ID NO: 367089 - DNA, 817 bp, Homo Sapiens
caggaggagcaggctgggctgtcccgcccagtcccggcaggacttctctgcttggcctggggctctgcctggcgggtcacctttgtaatctgccaagcctgctgtgaaagccaggctgctgggactggagtggcttggcctgcactcctgaggctctgcacccaggcacatcaagcctgtataggcggcagggagaaatagacccatccagccgggccacacattctgatggcagagcagctggggacgtagggatcgcagtttccggcctgtgcccgtaggacaccctggcacctgactcccctccctgccccatgcctgtgtctgctggtcttgctcttgtctccgtgaggtgccacgctcccctcaccttatggctcctcccaagccctgcccatcttgcccattcctagttgtgagctgcctggggtgaaccactgggcctgctgcctccaggtacccgccgggcaccaggttgcccttgcctgcgccctgccagcttgggctttgtgtgtgtctgttgcagtgtgctcttgcctcccctccctttggtgtattcatttggtttcttttctttgaatagcatagcatatcgtcgggtcattcgtgtctatcagtatgaagttggggatgatctgtctggaaggtttttctccttatttctcttcttacctcactgtgggctttactgatgcactcttgacattcccaggcggtccaacctgactaactgccgcctcggctgcttgggaaggaggggtctgtctccaagtgcacggaccagcctctgcccccaggtccttgggggcatttgcca

SEQ ID NO: 367090 - DNA, 809 bp, Homo Sapiens
  misc_feature (734)..(734): n is a, c, g, or t
  misc_feature (779)..(780): n is a, c, g, or t
  misc_feature (799)..(799): n is a, c, g, or t
gctgggtggcgaattcggcacgaggcgacttcctcctggtcggcggctgcagcggggtgagcggcggcagcggccggggatcctggagccatggggcgcgcgcgcgacgccatcctggatgcgctggagaacctgaccgccgaggagctcaagaagttcaagctgaagctgctgtcggtgccgctgcgcgagggctacgggcgcatcccgcggggcgcgctgctgtccatggacgccttggacctcaccgacaagctggtcagcttctacctggagacctacggcgccgagctcaccgctaacgtgctgcgcgacatgggcctgcaggagatggccgggcagctgcaggcggccacgcaccagggctctggagccgcgccagctgggatccaggcccctcctcagtcggcagccaagccaggcctgcactttatagaccagcaccgggctgcgcttatcgcgagggtcacaaacgttgagtggctgctggatgctctgtacgggaaggtcctgacggatgagcagtaccaggcagtgcgggccgagcccaccaacccaagcaagatgcggaagctcttcagtttcacaccagcctggaactggacctgcaaggacttgctcctccaggccctaagggagtcccagtcctacctggtggaggacctggagcggagctgaggctccttcccagcaacactccggtcagcccctggcaatcccaccaaatcatcctngaatctgatctttttatacacaatatacgaaaagccagcttaacnnagaaagccgcatggagganaaattcattt

SEQ ID NO: 367091 - DNA, 942 bp, Homo Sapiens
  misc_feature (360)..(383): n is a, c, g, or t
gcttcgtcgagaacggaggacaccggcggtccaggtcctgggcagtcgcgccagagctgagcggagggcgcggcgcgagaacgaatctttgtgacattctctctcagcattctttatcccctgtttgctgaagacttcgaccaaagctggtcttagctgtgggcattctcctgagaaaaggatagcttcagaaatcagaaaaacatttgggaggtgtctagcccagtggaccttctgaagagcaatgctaagaagacgtttggtttaaagaattaaaaggaagaacaacttaagagcttcttcaaagttccccgcatgaaaattacttaaacgttgcacacaacgtttcacaaaatcttnnnnnnnnnnnnnnnnnnnnnnnnagtgtgtgagtctcagcaggagttaagctaatgcagcttaaaataatgccgaaaaagaagcgcttatctgcgggcagagtgcccctgattctcttcctgtgccagatgattagtgcactggaagtacctcttgatctgggtacagcctccaaccatcacccaacagtctccaaaagattacattattgaccctcgggagaatatggtaatccagtgtgaagccaaagggaaaccgcccccaagcttttcctggacccgtaatgggactcattttgacatcgataaagaccctctggtcaccatgaagcctggcacaggaacgctcataattaacatcatgagcgaagggaaagctgagacctatgaaggagtctatccagtgtacagcaaggaacgaacgcggagctgcaagtttctaaataacattggtttgtccgcccatccagatcaccattgtggaccaaagaaaaaattgaaccaatcaaacttcaaagtggtcagtctttagtacttccccgcagacccccaattggattaccaccacctataatattttggt

SEQ ID NO: 367092 - DNA, 861 bp, Homo Sapiens
  misc_feature (433)..(753): n is a, c, g, or t
agcaacgtatgaagatgtggttgctccataatttgccaacaccaggtattctcattgtttttattttatccattctagtagatgtgtagtggtatctcaatgtggcttcaatttgcatttccttagtgactaatgatgttgagcatcttttcgtgtgcttattgtccatctgtgtatctttgatgaagtgttcaaatcttttgccattttaaaagaattctattgtttgttttcctagtttagttttgtagtttgtggcttgtctttttattctcttttattcaatttttatttcagtgtcttttataaagcaaaggttttaaatgttaatgaagtccagtttttccctctatggaccatactttggtgtcatatttaagaaccccatccctaactaatgtttaggaaatttttcttctagtagcttaatgannnnnnnnnnnnnnnnnnnnnnnnnnnnnnnnnnnnnnnnnnnnnnnnnnnnnnnnnnnnnnnnnnnnnnnnnnnnnnnnnnnnnnnnnnnnnnnnnnnnnnnnnnnnnnnnnnnnnnnnnnnnnnnnnnnnnnnnnnnnnnnnnnnnnnnnnnnnnnnnnnnnnnnnnnnnnnnnnnnnnnnnnnnnnnnnnnnnnnnnnnnnnnnnnnnnnnnnnnnnnnnnnnnnnnnnnnnnnnnnnnnnnnnnnnnnnnnnnnnnnnnnnnnnnnnnnnnnnnnnnnnnnnnnnnnnnnnnnnnnnnnnnnnnnnnnnnnnnnnnntctaatttatatgtttccactgtcatatatttgtctatatattatgtcaagttttactttatatattttgacactcagttgttatccaaatacaggctaagaattgtc

SEQ ID NO: 367093 - DNA, 846 bp, Homo Sapiens
cccgttgcccccgcgcgcgcgcacactcgcgagccccggcgacatgcaaatgagctggctccagtgcccagacccaagccccccactgctcaatggacacccccagcccagacccgttgccttcgcctttgcccggggaggaagagaaacctctggccttatctcctcctgttccccggggccgccgaggccgtcgtcctgggggagccacctcctcaaatcggacactcaaggcctccctccatcgcaagcggggccgcccccccaagtcagggcaggagcccccactggtgcaggtgcagggggtgacagccccagtaggcagcagtggcgggagcgacctcctcctgatcgatgatcagggtgtgccctatacggtctctgaaggttcagcggctgggcctgagggctctggccccaggaaggccccacacttctgcccggtgtgcctgcgggccttcccctacctctccgacctggagcgccacagcatctcgcactcagagctgaagcccggacccagtgccagggtttgcgggcgcagaccttcacagcgcgtcccagagcacctgtgcgcggggctgtgcaatattccgatgccggcctgcggcccttccgctgcccgctgtgcacccgccgcttccgcgaggcgggcgagctggcgcaccaccatcgcgtgcactcgggggagcgcccgtaccagtgccccatctgccggctgcgctttaccagaggccaacacgctccggcgccatgcgaagcgcaagcacccggaggccatgggggtaccctgtgtgcaccagatccaggtctgaaccgcgtggaacgaagagggcatcccggcac

SEQ ID NO: 367094 - DNA, 1106 bp, Homo Sapiens
gaggctggaccggtccggattcccgggatggaacaccaggaacttgggctcagtctccaccccacagtggggcggatccgtcccggataagacccgctgtcttggccctgagtagggtgtgacctccgcagccgcagaggaggagcgcagcccggcctcgaagaacttctgcttgggtggctgaactctgatcttgacctagagtcatggccatggcaaccaaaggaggtactgtcaaagctgcttcaggattcaatgccatggaagatgcccagaccctgaggaaggccatgaaagggctcggcaccgatgaagacgccattattagcgtccttgcctaccgcaacaccgcccagcgccaggagatcaggacagcctacaagagcaccatcggcagggacttgatagacgacctgaagtcagaactgagtggcaacttcgagcaggtgattgtggggatgatgacgcccacggtgctgtatgacgtgcaagagctgcgaagggccatgaagggagccggcactgatgagggctgcctaattgagatcctggcctcccggacccctgaggagatccggcgcataagccaaacctaccagcagcaatatggacggagccttgaagatgacattcgctctgacacatcgttcatgttccagcgagtgctggtgtctctgtcagctggtgggagggatgaaggaaattatctggacgatgctctcgtgagacaggatgcccaggacctgtatgaggctggagagaagaaatgggggacagatgaggtgaaatttctaactgttctctgttcccggaaccgaaatcacctgttgcatgtgtttgatgaatacaaaaggatatcacagaaggatattgaacagagtattaaatctgaaacatctggtagctttgaagatgctctgctggctatagtaaagtgcatgaggaacaaatctgcatattttgctgaaaagctctataaatcgatgaagggcttgggcaccgatgatacaccctcattccaaagtgaatggttcctcgagcagaaaattgacatgtttggatattccggggcacacttaaaaagaactccaatgggaaaatctcgt

SEQ ID NO: 367095 - DNA, 1173 bp, Homo Sapiens
tgttcctccggagctagatcatcgagggcggtgagccgtatgttcgcgctctcgctttgttgcgcgcctctgtcgtgtatcaatgtgctctggcctgcaagaccacttggctgcgtctgacatcgacgcagtgtcgttcggtataaaggtgccatgcgcccgcaaccaactgtgcgctcgccttgtgaaagggccgcgcaaggatgtgtgtgtggttcggtggattgcgcacgcaacgaggggctgttcctggaattaattaacagtcccgggcgccttgttgtcatgaggacctgctggagactcgtatagtggcgcgcgctcaccatggttccgcggtgaaatcgaccgcgaataactacagtgaaaaggtcaactgtgccccggcagtcgttgaaattgtcgccatacgtgtacgttcgtggcaagatcgcgagagatgacagttcaggcaagtatgcacagtgcagtgtcacaggtagtggtaaacgtgggaacagtgccacatgccgcgagtacaaagttaagagtaccccacccacgtataagcttatgagacgttaagggagtcacaagtcgtacaagaaaagtaatcgtcaattgtgtaaaactcatcacttaaacatggattaagaagaaaaggactgtctgtttactgtgcttgtgagacatgctccctactgaagcctgttaagtactatcttccagaaggcctatgaggaacaattctcacatctctttcaggaattaaacataagttagttccaaaactcaacagaaaaagccagtaaaaggatatcatcacatgttcttctgatattctgttaacaaattatctgtatctgataattttttgtttcaaggtaattaatgcttcaacatattcattcaaattctgctgcagagaggcgcagcccatgacatcgcgacaggtccgccgccgtcccgggcgccgccgaatgggtctcgcccggcatcatggtgccgccgccgggcccggtgggcacgcacgcctcaggggcccgcggcgtcggccccgtcctgtctctgctgatgccgccggggccgccgcctgccaggccgcttcccgccaggtccgggcgggtccatccgtgcacagaggtccccgtggggctagcaaaaggctctccgagatcccgggaattccggacc

SEQ ID NO: 367096 - DNA, 888 bp, Homo Sapiens
ggcttttccacagtgggtcggaccaatcgcgcccgctccgacgtgtccaggtccgcggccccgggagcttggcgcggcccggcctggatgcgctgggcggagggtgcaggggagggcacggcgccgcttgcttggcctgcgcacccggacctagaagccgggacgagccggggcagagccaggcgcgcggaagtctgaaggtgccctccagacacggccccgatgactgaactacagcaagatgtggaagacacaaagcctgcgaaagtgctcgggaagagggagagcaaacttggctcagcccactcagaggctgagaatggtgtggaggagaaaaagaaagcctgcaggtcgccaacagcccaatcccctaccccatctgtggaggcggactccccagaccagaagaaaatcattagcctatggtcaaaatccagttttgatggtgcctctttagcaagtgataagaacgactgtaaaacagaaagcaaaaatgaccctaagactgaaagaaaaaagtcttcatcttccagccagtacaaggccaatatgcactttcacaagttgtttcttagtgtcccaacggaggaaccactgaagcaaagctttacctgtgctctacagaaagaaatactataccaagggaaagctctttgtatcagaaaactggatttgttttcattccaaagtctttggagaaagacacaagagatctctattccagctttctcggtaaccctaataaagaaaaccaaaactgctcttctagtgccaaactccctgatcatagcaacagtcacagacccggtacatatttgtctccttactcttccagagattcaacattacaaactactaacatctgtgtgtggacccttacaaatacag

SEQ ID NO: 367097 - DNA, 877 bp, Homo Sapiens
agcgtggcggcccggcctggatgcgctgggcggagggtgcaggggagggcacggcgccgcttgcttggcctgcgcacccggacctagaagccgggacgagccggggcagagccaggcgcgcggaagtctgaaggtgccctccagacacggccccgatgactgaactacagcaagatgtggaagacacaaagcctgcgaaagtgctcgggaagagggagagcaaacttggctcagcccactcagaggctgagaatggtgtggaggagaaaaagaaagcctgcaggtcgccaacagcccaatcccctaccccatctgtggaggcggactccccagaccagaagaaaatcattagcctatgcccatatcttctctccaaatctatgcttcattcaggaccaagagtcaaaatccagttttgatggtgcctctttagcaagtgataagaacgactgtaaaacagaaagcaaaaatgaccctaagactgaaagaaaaaagtcttcatcttccagccagtacaaggccaatatgcactttcacaagttgtttcttagtgtcccaacggaggaaccactgaagcaaagctttacctgtgctctacagaaagaaatactataccaaaggaaaagctctttgtatcagaaaactggatttgttttcattccaaagtcttggaaaagacacaaagatctctattccagctttctcgagtaacgctaattaaagaaaaaccaaaaacgtgcgtcttcttagtgccaagcgccctggatcatagcaagaagtcacagacagggtacataatttggtcttcctttattctccagaggattcaactttacaaactacttaagaatctgtgtggtggacacttacagagact

SEQ ID NO: 367098 - DNA, 1276 bp, Homo Sapiens
  misc_feature (1060)..(1116): n is a, c, g, or t
cgatccatctgacagcagagggcccacgggccaccacgggaaaccccgccggtgccccaaaaggaaggtcggggcccgaaccagcagcaggctggccacggacaagaccagaactcgggtgcctacgttctccccgggaagggcttcacggaaaagtaccctaccaggccttgaagacaagggaggggcagaggggaacatcgggatcccttcagctccttgcccccccacccctgcaaatcggaggggctctcgggccctctcatcagcctcttctccaccaagcctgcccttcgggggagagtggacagaacagaggccagggaggccttggcctgagacggcatctctctggcgccaggcgatctgggtgggtccctctgccgctctgggcctcagtctccccctctccctcccacctgctggggactcagatgaccacagattggggggctcaggctgagggtccaggcagctgagagcaggagggttccgctgaatgcctccaaggcacaggagccccaggccagggccatggaccagccgaagctgacgcggacgccctgcatgtgctgcgggccatactgctgcaccgtctccgcaaaggccaggtgcgagtagctgatgtagatgctgacccccgccagtgtcaggacactccccagcaggaagtagcagccggtgaaaagcagcagagacacgctctgggccagggagctgagcaggccgcagatccagccacacacgagaaggaccaggctcaggggcaggaccacaatgactgcacggtgcagcaagatgaggtgctgcaccgaggtggagacgtccaggctctcactggcaaaagggtcgaccagcgggatgcagccgttctgcccttcgcagatgcgccagagccccgagtgcgaggagagcagctctgcgcgcccgggccaggcgctgccattgccggcgtccgccacctccaggatgtaccagtagtcgctggcgaccgcggcggccaggagcgcgaagctgagcagtgcacccagggcggcggccaggagcagcgcgcccagcnnnnnnnnnnnnnnnnnnnnnnnnnnnnnnnnnnnnnnnnnnnnnnnnnnnnnnnnngcggcggagggcgcgctcccgctgggccccgggccgccggcgcgctccgctgcgccggccccgcgcgggtccgccagcctctgaagctgccgggcccagcagcgtgcggggcggggatagccgcgccgcccgccccggcctgcgatcccggaaattccgg

SEQ ID NO: 367099 - DNA, 1234 bp, Homo Sapiens
agcggggcggcgcccgggccgcgcacgcgccctgacggagtcccagcaagcgcgggcccgtcttcctcgcgtctcctcggggagcgtcgtcgccgctaccctgggcgctgagagcttgcggagccgagccgctgtcgagtcccagcggaaagaagcccaaggtgccggagaagcccggtcgtggacgttgttgctccctcatcttcgagacccgcacgccctgcggagaggaaatgacaggcacgccgcgaccgtggggcggggctcgcacgagctccgggtttcctagaggcaggggccggggccgtagaaggcagagtcgcgcggggaaggcccggtacccgtgcgcttccgagtcgaaaccctgccccgagggagtggcacacggtacgccgaacctgatggacgtggagcgccagagagaacagaacagggcgagctatccgagcattaggaacagaaacgggagcatgcaaggagagacgcagagactgcaagagaggctggcatataagaagggcagaagcagaagaatcgaaaatatcccatacacaagagcatgatgaaccatcttgagagacacaacattagccatcataaggatgaaagcgagaaagagaaagatagaaacaaaataacaacaccagaagaacttaggaacaatgacaatgaaacccaatgatgacaaggacgaaaacaaatcagagagaaaacgaaaagcaaaacaagatccaacacagacaataaaaaaaatataacgaagaacagaaaacgaggacaacaaaataacaaacaggtccatcacaagaaaaaacgtagactgaaataaagggcaacggaaactgagagcacgaggacaagaaagagcactaaacaaagatgaggacaatataatagggaacaaatcaagagcacacacagagaaaaaacaaaacggataacaacaagaaaggtagacgaataaacaccacacagatagaacagtaacacgaaaaaacttgaacaacctagacaaacaggagaaaaaaggaaaaggaaagagaacacacacaagaaggaagcaaaatgacatacaacgattccgacagaaaaacatagccagaaaggggagaaaaataaaagacaaccacgaaaaaattagaacacgagggaaataacataacagaaaagtcaacgaggaagaccgatagagaacaaaggacagaaagaacattgaaaatagagagaaaagagg

SEQ ID NO: 367100 - DNA, 946 bp, Homo Sapiens
  misc_feature (840)..(840): n is a, c, g, or t
ggtttgacgcacacggcaccaaactgtttgatttaattttggatgagatcgttcttgcagcaagatgttaataagacaaaatctaggttattctggagcaaacccagacatatttgttatttattgatctccacctcatccccattgccttagattgtaagcaaaagaaatcaaggtcaagatctggaagcaagaagaaaatgctaacattacctcatggtgctgacgaggtttacattctccgatgcaggttttgtggcctagtctttcgaggacccttgtctgttcaggaagactggattaagcacttacaacgacatattgtaaacgctaatcttccacggactggagctggcatggtggaagtcacgtcactacttaaaaagcctgcctccattacagaaacttcattttctctactaatggccgaagcagcttcatagaaccaggaaaccttttaaatagccagtttgaattggatgtaaatttgaaattcttttgttttaagccacattaaattatctgtttataaatactaaagcaggaaaatggggggaacagtgaattacagtgacatcagagcaaattgaatacttaaaacagtaagtagtctatatattttatatagggtggaagatgtgttactaaggtttatgaagttctgtcggttaactgtgtttcactcagtaaaagagcagtacatgtaagcagccactaataaactgttgcacaatggatacttattagaaagacttattggaccaataatgttatttgcagtgttaccagaaatcaagggctctgtatattccccacaagacttgcttagaaaaatagaanattatattttggttggaagggaatttaagggttttggaataaaaccaaggaaccgcttgactaaatttaactcaaattagggcatttaaaatcatggaacctcccc

SEQ ID NO: 367101 - DNA, 969 bp, Homo Sapiens
gggcaaaaagagatgaccggtattccctcccatcttgcagtccccagttccacctttccaggctcttacaatacttgggattggcccacagggacactggattaaaggttccactttgaaaaataaggtcccactgggctcaagagtacaaagagcagggctttggtaggcttcttgactccaagagaaggctcagttcccaatgaatgtagaacgaatatacagactagccagatgttgaatatgggacccattcttgatccaaatttcacaaagctgttgaatacactctaagagctcttctttgtccaaataccggcagagttgccctcacagcagagcgatacattctatccatgttgagggtttggctgaaacagtcgaattttattatctactcctcgaaatgccttcaatccttcaaataattccactgcatagtgcaaagctgatgagccagggtgcaatgacaggttctgaagaggcttgatatgaggtttctcccatccaaactctgaggaccactccaccgtcagcatatgatccgtgaacacagttccaaaaaccagattattggggtctggtttttcctttaaaatggtagctggtgtgactattaggtctttagccttaaaagtccccaccacctcttttgatcctccttctccggtacactctgcggagcatccgttactgcaatccttcattgttccgtcggccacgagggaagctcgagctgagcggagggcaaatcccaagggtcgtagccactggccgtgtggaccgggtctgcggctgcagagcgcggtcccggctgcagcaagacctggggcagtgcccgaggcggcggcgagtacacgtggcgggctggattgcagaccggccctctcgcggcggagactcgcgacctagcggattgcatcagcaggaagacactaaggctgctcccccaggccgcccccagatccc

SEQ ID NO: 367102 - DNA, 1032 bp, Homo Sapiens
  misc_feature (944)..(944): n is a, c, g, or t
  misc_feature (1020)..(1020): n is a, c, g, or t
ctggcctctgtcctcttttagtctagtgtctggttttctagcaaacagtaaatttaaacaagtaaactattatggtttccattgcttacaaaatgattttcctttacattcttatcatgaacactattttaagcatcaaatgcaatcatctaaaatataaaggtcaatcatttataatagaaacaccttgaccacaagcccttgattgaacattttataatatttcatctacttattaaaacaaataatttcccttgggttggaggggaagtgatttcataaattaattagaaagccatctttagcatattgcttatgtctggatccatgtttctgaggaaaaagacattctcaggtgatgtatttttttcatgcattagtatgcatttttaaaaaataatgcatgtttctttaataattaattttcatcttctataagatgccatgtgaagaagttgtggaaatgtagaataaaaagctaaagctgccaaatttctgttgaactcttaaaaacagctcatgtttgtttgtcctctcgggttgtggcctagcctatttgcaatgtaatgaagctgcagggttcttgtatagctaaagcgttcaatgcatttcacgtgctgtggtggatgtgggtgctgtagacaggcttcttctcttcctgctctcaaaatacctcggcttgacatttggacagatcctgtcattgtttaagctgagcaaaaaaccacacaaaagttgtgtaagagatgagataacaaaggagcgagagaaatctcatgtgaatttccaagttttaattcgttctccatgaaggattttcatttcagtgaaagtcgcagcagaagagggaactttctggagtttttgagaatgccaaaccacatttttatcacacttctttgggaaatcaatgcctttgcataggaaaatccaaattcaggggncccccaaaggattttcagtgggggatgtctagtctgggggggtctgaggttgtttttactttatttgtgttgtttnaaatatttttaa

SEQ ID NO: 367103 - DNA, 1027 bp, Homo Sapiens
  misc_feature (909)..(909): n is a, c, g, or t
  misc_feature (969)..(969): n is a, c, g, or t
  misc_feature (981)..(981): n is a, c, g, or t
  misc_feature (985)..(985): n is a, c, g, or t
gcggctgtgcgcatgagcagatgaggcctagccgaggcggcgggacccccaagtttggaaagctcttttaacggctatgcgaaagttctgtccaaaggctgctcacagcccctgtctgactggttgtcatgatgaattgagctctctgttacctgcgcatcacaaccgagctgaggcttcgaagacctcagaggacttctctcagcactcacagaaacctcctacaccctcggatggcacaaagggactgttttcttactcttagtctgagtgactgccaaggaaggcaaaggtagagcaactggatctctggctctccacatagcttctgatctcagaccttactaaaatgctttctgggcccaaggacaaagctcacatgaacaaatgattttgagtcatgaatgaaaaatcttgctctttccatagtaaagaagaattaagagatggacagggtgaaagattgtctgctggatattctccatcatatgacaaggacaagagtgttctggctttcagaggaatccctatctcagagttgaagaaccatggcattctccaggctctgaccacagaagcttatgaatgggagccacgtgttgtgagtacagaggtggtcagagcccaagaagaatgggaagctgtggacaccatccagccagagacagggagccaagctagctcagagcagcctgggcagctaatctccttcagtgaggccctgcagcacttccagactgtggacctttcccccttcaagaaaagaatccagccaactattcgaaggactgggctcgccgccctccgacactacctcttcgggcctccaaagctcccacagcgccttcgggaagaaagggacttgggtcctggaccattggctcagtgagcgaaatcagccacagaccntgagagggcgcagggcttccttggccctccctgcatctggcttctacctggtggatgggnactcaaagaccnttgnccgatgggcgccaaggagatttttccggccttggtctcggtc

SEQ ID NO: 367104 - DNA, 957 bp, Homo Sapiens
  misc_feature (246)..(246): n is a, c, g, or t
cggtgtcttggcttggattccgttccctgataagccaaggtcctccacagtgtgttcccatgaagggcgacacgtcaagacttgggacccggtcactgtctcatagatggtcctggaggactcggccatgcactgggtgcttggctatccaggccacagctgagcaatggtcagggaccaagtccctttccttcccgaaggcgctggtggagctttggagggcccgaagaggtagtatcggaggcnggcgagccccagtccttcgaatagttggctggattcttttcttgaagggggaaaggtccacagtctggaagtggctgcagggcctcactgaaggagattagctgcccaggctgctctgagctagcttggctccctgtctctgactggatggtgtccacagcttcccattcttcttgggctctgaccacctctgtactcacaacacgtggctcccattcataagcttctgtggtcagagcctggagaatgccatggttcttcaactctgagatagggattcctctgaaagccagaacactcttgtccttgtcatatgatggagaatatccagcagacaatctttcaccctgtccatctcttaattcttctttactatggaaagagcaagatttttcattcatgactcaaaatcatttgttcatgtgagctttgtccttgggcccagaaagcattttagtaaggtctgagatcagaagctatgtggagagccagagatccagttgctctacctttgccttccttggcagtcactcagactaagagtaagaaaacagtccctttgtgccatccgagggtgtaggaggtttctgtgagtgctgagagaagtcctctgaggtcttcgaagcctcagctctggctggagcactcctggggccttcagtagggacagttactatcgttaaaagagctttccaaacttggggtcccgcc

SEQ ID NO: 367105 - DNA, 1089 bp, Homo Sapiens
  misc_feature (462)..(462): n is a, c, g, or t
aggctggtaccggtccggaattccctgtcatgatgagcagatgaggcctagcctacgcggcgggacccccaagtttggaaagctcttttaacgatagtaactgtccctactgaaggccccaggagtgctccagccagagctgaggcttcgaagacctcagaggacttctctcagcactcacagaaacctcctacaccctcggatggcacaaagggactgttttcttactcttagtctgagtgactgccaaggaaggcaaaggtagagcaactggatctctggctctccacatagcttctgatctcagaccttactaaaatgctttctgggcccaaggacaaagctcacatgaacaaatgattttgagtcatgaatgaaaaatcttgctctttccatagtaaagaagaattaagagatggacagggtgaaagattgtctgctggatattctccatcatatgancaaggacaagagtggtctggctttcagaagaatccctatctcaaaagtgaagaaccatggcattctccaggctctgaccacagaagcttatgaatgggagccacgtgttgggagtacagaggtggtcagagcccaagaagaattggaagctgtggacaccatccagccagagacagggagccaagctagctcagagcagcctgggcagctaatctccttcagtgaggccctgcagcacttccagactgtggacctttccccccttcagaaaagaatccagccaactattcgaaggactgggctcgccgccctccgacactacctctttcgggcctccaaaagctcccaccagcgccttcgggaagaaagggacttggtcctgaccatttgctcagtgagcgaatccagccacagaccctgagaggcgcaggctttccttggccctcctgcatctggctctaccttggtggagggactcaaaagaacctggcccatgggcgcaaggagatttttccggcctggtctcggtcaccaccatccaggcaaacttaaaacctttttttaaaagaaaaccaaggggaagaggaagaaacaaaagggaaggggaagaatttaacctggtgggaa

SEQ ID NO: 367106 - DNA, 786 bp, Homo Sapiens
tgggccttcaatatctgcctcccctttccttttcctccaatcatggcctcccatgacaggcctatgacttacacacattggcccagccttggcaaggtgacagtcgggtatggtaatagcaatctcaggagggctcttctgttgctgtgtagaaaatgaacccaagtagcatagaatcgtgaccagctttccacacctggctggagcactcctggggccttcagtagggacagttactatctgtagcagagaagaaaagagcaacaattccattaaacaaggaagtactcaaaggcaaatttcctgatagttggacctaaggaaacggccttcctgtaaaaatggatccttctccaatcaagtattcattatgcaccctctttaggcaaggagggggtatgattcttcaactgcttgctggaggttagattctctgcataggaatttaaattagatgggcccttagctgatcctttcaccatgcttgtccatgggcggctccccgtcccccaggttccccacggatggggtgtcattagggacccgccatagaggactccgtcccaggcgggcccccaggacaaaactatgggccactttgaggggcacagagacagacgctcaccggttgtgatgcgcaggtaacagagagctcaattcatcatgacaaccagtcagacaggggctgtgagcagcctttggacagaactttcgcatagccgttaaaagagctttccaaacttgggggtcccgccgcctcggctaggcctcatctgctcatccgct

SEQ ID NO: 367107 - DNA, 483 bp, Homo Sapiens
acatgtggctcactgtaatccgggggacagggcaatgcccccttagtcctggcaccccaggaactaaactgctctcactgtggcctctggcctcaacatctgcctcccctttccttttcctccatcatggcctccatgacagcctatgacaaaacacacattggccagccttggcaaggtgacaggcgggtatggtaatagcaatctcaggagggctcttctgttgctgtgtagaaaaatgaaccaagtaagcattaaaattcgtgtaccagcctcttccacaccatggctggagcactcctggggccttcagtagggacaagttactatcgtgttgtgatgcgcaaggtaacagagagctcaattcatcatgacaaccagtcagacaggggctgtgagcagcctttggacagaactttcgcatagccgttaaaagagctttccaaacttgggggtcccgccgcatcggctaggcctcatctg

SEQ ID NO: 367108 - DNA, 1383 bp, Homo Sapiens
  misc_feature (49)..(49): n is a, c, g, or t
  misc_feature (61)..(98): n is a, c, g, or t
ggccccccatagatgtatacgactcactatagggcgaactcggggtgancgcggtggcggnnnnnnnnnnnnnnnnnnnnnnnnnnnnnnnnnnnnnnatcaggccaaatcggccgagctcgaattcgtcgagagcggggctctatggttttcctcgtcgttcttgagtcgggaaatggccgctgtgctggttgcaacggagataaattcccggaaccgcgattcggcgtgtcaggaattcgaatttagagtttaatttctcagagcattctctccaggaagaatttttacagtatctcaaagacttcacttgacttcttgatcctgcataaaaccaaggagaaaagaaatgggtcgctccaattctagatcacattcttcaaggtcaaagtctagatcacagtctagttctcgatcaagatcaagatctcattctagaaagaagcgatacagttctaggtctcgttccagaacatattcaaggtctcgtagtagagatcgtatgtattctagagattatcgtcgcgattacagaaataatagaggaatgagacgaccttatgggtacagaggaaggggtagagggtattatcaaggaggaggaggtagatatcatcgaggtggttatagacctgtctggaatagaaggcactctaggagtcctagacgaggtcgttcacgttccaggagtccaaaaagaagatccgtttcttctcaaagatccagaagcagatctcgccggtcatatagatcttctaggtctccaagatcatcctcttctcgttcttcatccccatatagcaaatctcctgtttctaaaagacgagggtctcagggaaaaacaaaccaaaaaagctgaaggggaaccccaagaagagaatccgttgaaaagtaaatcacaggaggaaccgaaaagatacctttgaacctggacccatctggagtctatcgatgaattttataaagtcatccagccaaataccagatgataatttgggcctgggccgttcagccttatgaataataagcccctagaatcacccccataattcccttccacctttttgcgtaacccaccccagttcgaagcaccacccttggcccccggaatggccccccctggcctacaagtaacaggtttcaccacatgcgcaacaaaattacctcccttttcttcgatgaaatgacaacaattcccgaattttaggcacatattgcaccctacaaaaggggcctagggggttccgcgctttcccgcgactcagtgaaaatggggatactctaaagtagaaaaccacagattacccctttacgctaacaagaaaagaattctcataaatcgcccaccaaatatacgcccctgggttccccgaacgcaaatgg

SEQ ID NO: 367109 - DNA, 1143 bp, Homo Sapiens
  misc_feature (31)..(31): n is a, c, g, or t
  misc_feature (58)..(58): n is a, c, g, or t
gtaaggtggattaattaggccccaggtcccntaaaggaaacgggccccacagcccacnggagtagagagctggcatccaggtacgggtttaaagttttgcccagtaagtggcacacaacaaacagacaagtgatcctgtaataaagacaacataaaatacagggagatttaataagtgttttttccatagatattgaaataaaattaaatgtctgtttagttattactccacttattctggaaactgcagcttccaatatcaatattatactgcaagcagtatttaggtacttctgtatgttaagaaaaaaacctcactgaatttatgtacctttttttaaggagtgtaaactgatgatatatgatgtgaagtaatcacttatttgaatgcaatagtgattcagataggcataatctattcattgtttcataatgaaatgtatattcctagtttcgaacactttatgcagagttttacttatttcttacagggctgctgtgtggattcaatggcttatctatgtaagtgtccagcacagtatctggcacatagtaagcttttagtgtatgctacttatttatattaagtgagtcaatctgtcacttataatagaaaaactatctaatgcctcaggagaataatcaaaagataaacctacagatgtgtgacttctgttaaagtattatgcatccactatttcccaaattactaaactaattgtttaaaatgttacaatctatttttaagatcatatttgttctctatgtttttgctatggcctttggcctaaaccaatacaattctgacaggacattatcagaaaaccacataaaaacaatgtacactgaaatcaggtaacaaaggcatcttactataacttctttaataaagaagtagagagttaccagtgtaattcaggacaacctactcatttaagtttaaagttttttctttacatcatgcaatatttgacttcaaaaaacattttccattctgtcttctcttatatataaacattaagagctattacaaagttctttcctctaagtaaaaaacccactagaaaaagatatttgtaaaaatcattgcagggttactgatactgaatgaagcacaggggtacctgcccgggcggccgctcg

SEQ ID NO: 367110 - DNA, 1122 bp, Homo Sapiens
  misc_feature (747)..(1067): n is a, c, g, or t
ctcgcatggagactcctccatctctgtcttccctgttgtgacagtctcagagcctacgttctttcaatggctgggctacaagatggtgacaggctgcccaacctggtttgcaacgccacctcagtaagctgagacgtggtaatcgccatggcaacggggctgcattaaaagcattgtgcgcacaaagtgaaaggctgctgcctggcagagttcagtctggtctcactgcacctgttccctaattaagatgcaccttttggttttgtcttttgaaaaaaacaaaatgctccctttatcgccacgaggcaaaagaaaaattaaggccaagatcctttcatgcccaatatgggcctgcccggtggttggagcatgggggatcatgggcagcaagtgagaaagtgcacagtgatttgctgctgttacatcctgagaaactggagggctgtcatcaaagtcctcgaatagctggagagtgggtgtgggatggttacgtttgaaaatgcagctctgatataaaagaaagcaaagactgcactgttttcccagcaagagcctagctggagactctaagcctaagatagaagcttctgccatcaacaggccacaaaacccatacttcctgctctatgaggcttctgaccttggttccctagaatcctccctccttatcaagtatctgtgtctaggcctaggggagaccagaccgaggtctgtccttgtctgcctacaaggacaaggcattctacnnnnnnnnnnnnnnnnnnnnnnnnnnnnnnnnnnnnnnnnnnnnnnnnnnnnnnnnnnnnnnnnnnnnnnnnnnnnnnnnnnnnnnnnnnnnnnnnnnnnnnnnnnnnnnnnnnnnnnnnnnnnnnnnnnnnnnnnnnnnnnnnnnnnnnnnnnnnnnnnnnnnnnnnnnnnnnnnnnnnnnnnnnnnnnnnnnnnnnnnnnnnnnnnnnnnnnnnnnnnnnnnnnnnnnnnnnnnnnnnnnnnnnnnnnnnnnnnnnnnnnnnnnnnnnnnnnnnnnnnnnnnnnnnnnnnnnnnnnnnnnnnnnnnnnnnnnnnnnnnnggccccccccgtccattgggaaatttgtttaccccccccagaacatggctgtaaa

SEQ ID NO: 367111 - DNA, 1761 bp, Homo Sapiens
  misc_feature (604)..(614): n is a, c, g, or t
  misc_feature (1321)..(1381): n is a, c, g, or t
gatttaacttgactaaaattaaatgagcaaatgtttattgctatgtccattgttttcctttctctgtcattgttaaaaagaggagccatggcttctgcttcttctgtgtattctccattagaccttcttcatccaccctcttccccatccctttcagctctgaagggtctataaatgaaagtgggtaccaactgattcaataggacttatatcttactaaataacgttttattgtctttgttctatgtatttgcagagaaattgtaagtatctttaaaaccaattaacaaagccctgtgggtctttcaatcaagacctttgtaaacatctctactaggcccatactcccccaaacttcttgcacatggtagaagatgacattaaataaagcacattataaggtgcaatgagctttattctaaaaatattgtctggatgtgaaagtaagttcttgttcataaaatgttattagtaaaatgttattagattaaaattatggagtaagcatttggcaaactgattgactcttcactggaaagaccaggctttttaggacacatttctgttcatgcttaaggtcagaagtcaatcaaaggcaaccagnnnnnnnnnnnggcaaataacatgaattagggacataattacttttctgttataacataatcaggatcttttcaagtttaattatggggagttgtctgaataggctagttttatgccatgcaaataaaatgtgaatttcaaaaatcttagtgaaactcaaatttatttttacttagcgataataaaatcacaaatacttcttgagctcttgctgtaggccaagtgctgtgctcagtacttaacacggataaactcgattgagtatcacaattcaaagaggtaggcactccaggttaccctttgactctgctgatggcagaaacctcacttgtaataaataattatctttgcacaagagaaacataaaacaagacctgtaacaacatgatttgttcacagatttttcatgtcatagaaactatatagcattgatttttagctatgattttgattcagtttttaaagtatttaatttttattatatcagcccacactgaacattggtttttcagcagataatgcatcttccaagtgctccaaggcgaagagccacagagaagaatactgcatcttgagtcataccctgaaattactgaatgaattacctgtggccatgtaaacactctgcttcagtaggtagagtgcaacagacaatccaatcattcagaactaagtttttagttagcttctgttattcactgaagtagtttgcaattannnnnnnnnnnnnnnnnnnnnnnnnnnnnnnnnnnnnnnnnnnnnnnnnnnnnnnnnnnnnatggatgctcaagcgccttacataacttggtgtagtatttgcgaataacctatgcacatcctcaagtatactttatatcatctctaaacatataatacttaatatgtaaatgctatgtaattagttgttattactgtatttagtgaataatgacaagaaaacaacagtgtgtacctgtttagtacagacactactctgtactgattcttgtctgagtattttccatccagggttggttgaatccacagatgtgtaactcacaaatattgaagggctgacggtacctagtagtaattcagatttattcgcagtgatctacagtaatttcgcagtttacaagcacttttagtggttctaaacgaaaaacacaaacgaatctg

SEQ ID NO: 367112 - DNA, 813 bp, Homo Sapiens
atcaggccaaatcggccgagctcgaattcgtcgagagcggccaggcagttctgtgcgtgttcactgtttagtagtactcaaaactgccagtgtgagaggatttggaaatcactggatctgctcaatacaaaaatgttttttcgagtctttctccattttatcaggagtcattctgccactgcagtggatttccttcctgtgatggtgcaccggctcccagttttcaaaaggtacatgggaaatactcctcagaaaaaagccgtctttgggcagtgtcggggtctgccatgtgttgcaccgctgctgaccacagtggaagaggctccacggggcatctctgctcgagtctggggacattttcctaagtggctcaatggctctctacttcgaattggacctgggaaattcgagtttgggaaggataagtacaatcattggtttgatgggatggcgctgcttcaccagttcagaatggcaaagggcacagtgacatacaggagcaagtttctacagagtgatacatataaggccaacagtgctaaaaaccgaattgtgatctcagaatttggcacactggctctcccggatccatgcaagaatgtttttgaacgtttcatgtccaggtttgagctgcctggtaaagctgcaggtgatagtgacgattatttaaactattacgatatataaacatctatacaaacataaatcttgaaaaatagatttgtgtgtactgtgagaggatgttgaaactgctttctccctttgagtgtgtgcttagcgtcgtctacagtaagctgtggtacttaaataact

SEQ ID NO: 367113 - DNA, 948 bp, Homo Sapiens
acgtgatggacgtggaggagatcacccccgccatcgtggaggcctttgtgaatgacttcctagcagagaagctcaaaccagagcccatctagcgtggctccggcctcctgagacgttatttaaaactcagccttctcctcctccccctccttccttccgcccttggacttacccagcgtgccccgaatcccaccacccaagtgtccagcctctctgtggtgccttgtttctgcagtaaactcctcagccagcaccctggggtgcggaatcagcagcggcagagtccaccgtgtttggagactctgtttgggagcacgggatggccgggggcccggccagagcggggctgcatggctttcgcaaagtcactagcttttggtgaaggatctgccagggtgtcctgggcagagtgagcgtggagggccggtgggtcccgctcgggctctgactctgacgtcggcacacacggccccggacagccagaggggaaccgccgggtgacacctgcgtggaggctgagctgagaaagggcctccgcttagagctgcgggtgaggacgtccttttctaagcaacacagtcttcctcggtctgagagaaaagcagcccactcttgtgttctcaggcaggggatctccaaatgcaaaaggaagcttgtagaggttttttgggtgagaagaaaaatgtagctaaggtaatggttcatatcatacaaacagctcccacgatcctgaaattctgttaacgaatccttctctttggacatcttcccaagaaacttagccctgagtcctaggaggagcacctctgcaccagcacggacctctcgctccacccagctctgtgcccaaggcccctgatctctgctgaggtgcccacacccacgttcgatcacccctgcaattcccttttattatcttatttttgacgatggagtcttgctctgtcg

SEQ ID NO: 367114 - DNA, 488 bp, Homo Sapiens
  misc_feature (12)..(12): n is a, c, g, or t
  misc_feature (27)..(27): n is a, c, g, or t
  misc_feature (64)..(64): n is a, c, g, or t
  misc_feature (72)..(72): n is a, c, g, or t
tgtgtcctcccncggggtaacttccangcaaaagaggacccacccaaccgtgaatgaaggatgnacgaatgnaaagatgaagccatccctgaaagcaaacccctgcaaaataaagcccacttcggaaccgaggatgttgttccccgaaatgtcccggcgctgttgcccgtctgtgcctagaaccctggatttggttttacaaagggacttgttgtcgaacttcttccatttgtaccagcttctagttctggacgtcttgttggatctttattcctggttgatccagcagaacttgcatcttgtccaactttcatgaggatcttcatggctcttgtctggcacacccctccctcctggttatccaggccctccaaagacccatttgatgtagatataatgtaataatctttgttcttctgaaattctagaccccagaggttagggctgaattcttgaaacttgatggtgaatttgatatcttggtctgg

SEQ ID NO: 367115 - DNA, 432 bp, Homo Sapiens
  misc_feature (37)..(37): n is a, c, g, or t
  misc_feature (77)..(77): n is a, c, g, or t
aaacttgccaaccttgtcccaactttccatgaggganccttccagggccccttgtcctgggcaacaccccctccccnccctggttatccccggcccctcccaaagaccccatttgaatgtaagataataatgtaaataatcctttgttccttcctgaaattcctagaccccagaggttagggctgaattccttgaaacttgatggtgaatttgatatcttggtctggtttggcacagttgaggagaggggtattttccttcttaatagtgcatctgtctgcttggtctttatcaaccatataaactttatgatattcatactggccaacagttttagagtccactttggggcaaataatatccaatttgtctcctatctgtgggtatagtaccagtccttgtccaggtagaaatttggagttcgaggaattc

SEQ ID NO: 367116 - DNA, 502 bp, Homo Sapiens
  misc_feature (24)..(24): n is a, c, g, or t
  misc_feature (278)..(278): n is a, c, g, or t
  misc_feature (419)..(419): n is a, c, g, or t
  misc_feature (436)..(436): n is a, c, g, or t
acagcgtggtcgtgtgctgcggcnagtgcttcctgtgtctcctccggtacttcagcaagaggaccaccagcgtgatgatgatgacgatgaagatgatgcatcctgaagcaatccctgcaaataaggccacttcggaaccgaggatgttgttccccgaatgtccggcgctgttgccgtctgtgctagaacctggatttggttttacaaagggacttgttgtcgaacttcttccatttgtaccagcttctagttctggacgtcttgttggatctttattncctggttgatccagcagaacttgcatcttgtccaactttcatgaggatcttcatggctcttgtctggcacacccctccctcctggttatccggccctccaaagacccatttgatgtagatataatgtaataatctttgttncttctgaaattactagnaccccagaggttaagggtctgaaattcttgaaagcttgaatggtgaatttgatatcttggtctggt

SEQ ID NO: 367117 - DNA, 1150 bp, Homo Sapiens
  misc_feature (248)..(248): n is a, c, g, or t
  misc_feature (291)..(291): n is a, c, g, or t
tccccccgtatccgaatggtcacaaacccatcagcactccctcctgcccggaacccgcccgtgcaccaccacttgcaggctggcacctccacttgccagtattctgcccggtgtagcccagggggaacacttgcccattgccaggtgcctgatgtctgagacgtcccatggtttctgccagcctcatgcgaccaaggattcccgggggacctcacagaagccccccctgcatggctcccaggctttgnaagcagcctgagacactgcctgtgcagagcgaacaccaggcancccttcttatagggggacgattgtcttcccgttgaccctcccagtggcctccgggggagtaggcacagacaaaggcttctatcgctgcctggcctgcagagcacaggtgccgcccacagcccagctggcttgaggtggcccacacgagctgcatgtagtgggtgcaggtggcgttgcgagcacactctcctgccgcgtggctgtaccgctgcccctctgcaaaccacaggctgaccacttcaacaaaggacgccaagcccgcgggcagcagctgcatgttccagcccacttgcagggtgcgccacaggccggacgccaggctcggggttgggattccacagagggctgccctggcttgagccagctgggccaggctgtcactccagtccagcctccgcatgtcagccgcagggggctggacccagctgcgcaggcggttgtgcagggagaggagcaagaaactctccttcctgttcagggctccggccatcggagcctgctcctgcagctggggtggccacacctctgcccaggcggtgccaaggagggccaggagcacagccaggagatgcccccggccaggggaggtctctggatgcagcatgggtctgttgggcccgtcaggcgctccgtgcacagcctggctcagccacccggcttgtttctcaggctggatggagctattcacaatctccaggagtcaggctgggcccgctgattggcctggggacattccggtgctgcagattagtgaccgatggccgtgtcctggctgggacagtgtcctccgagcccactgatggcttccgctccccagccccgggcccgggaggaggcctcgcatcggagaatccggacc

SEQ ID NO: 367118 - DNA, 842 bp, Homo Sapiens
  misc_feature (207)..(238): n is a, c, g, or t
ctggggcggggtgcggcctgggctccggcccctggaggagctgagcattccaggtgcctccttccaggggcgccctctcgaagggagccagcgccggcagccaccatggcgtcacgcatagggttgcgcatgcagctcatgcgggagcaggcgcagcaggaggagcaacgggagcgcatgcagcaacaggctgtcatgcattacatnnnnnnnnnnnnnnnnnnnnnnnnnnnnnnnntcggagggccgcccaccccggccatcaatacccccgtccacttccagtcgccacacctgtgcctggggaggtgttgaaggtgcagtcctacctggagaatcccacatcctaccatctgcagcagtcgcagcatcagaaggtgcgggagtacctgtccgagacctatgggaacaagtttgctgcccacatcagcccagcccagggctctccgaaacccccaccagccgcctccccaggggtgcgagctggacacgtgctgtcctcctccgctggcaacagtgctcccaatagccccatggccatgctgcacattggctccaaccctgagagggagttggatgatgtcattgacaacattatgcgtctgaacgatgtccttggctacatcaatcctgaaatgcagatgcccaagacgctacccctgtccagcagccacctgaatgtgtacagcgagcgacccccaggtcacaggctccctggtgggcgtcagcagcagctcctgccctgcggacctgaccagaagcgagagctcacagatgctgaggagcagggccctggtcaagggagcggcagaagaaagacatcacaattaattgaagggagc

SEQ ID NO: 367119 - DNA, 957 bp, Homo Sapiens
caccggacgaccggatcctgagaccctgccccagcactgatacccggggtgtgcccagcgccagccacaagttgcctgccgaaagttcccaagggcctgcccatcgaaccttggaggcgttcgttggtagaaggcaaagattctcatcgagaggaaaacctgcgtgctctcctggtccactctgctcggtcccacttgctcctgctcgggcttctaccttggcggcccatggtagcttgtacctgcagccaggaagtcaaatgaagaacctcgttgatggccccagtactcgattctcctggctgaaaggagaagacacatagctcagccatgacgtgaagcttgccggtgtgatagaaaatgcaagcacgtaggggaagagctcagggttgcggtcgaagtagaactcccgctggacgtcgtcgtagtcatcgcagagctccagaatggcctcgcgcgagtggcagagcagcaagcggcccaggcgcgtctcggggaagcgcagcagcgtgtgcgagcgcagcctcctcttgaagccgcccacattgatgcggatctccccgtcctcgacgttagcctccgacacgtcccacaggctctggccggtcatgctggaggcgccgccagcccgcgccgcgcgggggcgctacacctgggagcacgggtgcccgcggccgaggccggcgggaaacttccccaacccgcgggcgagcatcgcggcggtggccgctgcctgctgccggtgcgtgcgcgggtgcgagtgtgtgcgcccggcgggccggcgggcgggggccgccgagcgtctcctcccgtctcgggccgggtacgccgccgccgcccgcagctgccgaaggctcacaggtggctgcgtggtcccgccgctcccggagccccctctccgaatccgcgcgcccctcacccacccagagaggcaggagcccgcgccgcattcgcccc

SEQ ID NO: 367120 - DNA, 870 bp, Homo Sapiens
aagaggcaaggcaggccctgggggcctcacaaaggcggttttatgcaagggtgagaaagcagagttatcagggaggtgggactatcgctttatgaacgtgatgattggaagcaaaaacggtggggctttttcctattgaatacaaagtaaaataatgaatgctggtgtcagtggttgggaataacaacattgcaggctcatgagagctgcctgacaaaaagcgtgtaaacaacagtgatgctcctgtggccctgtgattcagcaggtttatggagcagttaagaatcgcagatgtcaaatggccaacacagaatctaacgacatgcttaatacaaattattattagtagaaatgctgaattgcttcatttctgcaatttctgctgcttcttaagatgcttttaatgaataaaatctgccttaaaatttgatacctggtaacttctctctgtgagtttgaattggctgatgtaaccaaaatgccagctcttgccatctaactaccattaaaaggaacttctaaagctccgaagtggtcaacagtttcacttccaacttttttaaaagatacacaattttctaaaaaatttttctttatgggcgatgaatagttgggcttggctaattcctcattagcaatagaattatgtatatttgcaaacctctaatacagaacacttaatgtatcagacaaccatgattatgatgtatatacctggtataaaaaaatcttttttgatattgaattctgcatttttttcttccttgatacgtatgagattcaccagtaccagtttttctcttgttggtggcatatagttgaattgtcatttgcattatctattaaaaactgtgggagtcagggtattat

SEQ ID NO: 367121 - DNA, 1044 bp, Homo Sapiens
tagggagggtctcggagttgtgtaggaggaatgattggttgcgcatggcgctgatggtgcgccgttgcgtcatattatcggctattggcctgtgcttttcagccgttgtgctgagcgtcggggtgcaggttttatagccgcgtcttgaacgcacaacttgcgaaggctcatggggctttacgcccttgggcgctcatatggtgattccttgtcacctctcaagatttgcttcataggcttgttgggggttaatcaccttgtgtgggccatcaggggagccaggccaagcattggttgacatatgtattttcaaatatccttctggatttgtggagtcagagtctgtggagagtgggaagaaggggagagagggagatttagtaccacgatattcgctctgcagacggggatatggtagcaagattgactgctgttgaagtgtgggatgggacgaagggagtcagagtgagagtcattcttgtagcagcacgtagtcactcaaaagcatagatactgctgtcaggtgtggtggtgtgcacctatagtcccagctattctggagtactgggagttcaagtccagcctgggcaaagatagcaagatcccatcgtcgtgggagaaagaaggaaaaggcatagatacactataaatttatgtaaatatctatatgtttattaattatagaattctagttataaaactcattttatgaatcacaaaatacgctatcaattaaacgtataatatatagtagatcatcaattataacatgaaccctgataaaatgtgaaaaatctgtattttataatcagtgaaataagatacacattttgtgaccatcttgattagtgtctactgcagcccataaatatgaggtccagggtataagcttttgttcatcattgtacccacagccagcacaaataatttccgtaataaatccgttgaatgatatgaatgcaatgaacaggtgaatgcgtaatcaaacaagggagtttgtcttacagctgcaaatgcctagaatgataaataagaaaatgcctt

SEQ ID NO: 367122 - DNA, 916 bp, Homo Sapiens
ataagataaaaaatatataaaaatttatctaataagacaatacggtggaatcggtccggaattttcgggatgctctgcggggccacccgtgcgccccttcgccgtccgctgactccgccctcccgcctgccgacccggccgccaaccttcccccggctctgtcgctcccaaggctttctgcagccctccgtgctccaggccgcacacctgagggtgggacccccggaggccgagccggtgtcggatcaaactcggagaccgagcagggcccaaaccgggaccggagtggggacgggcggaggaagccaagaggctcgagaccgaggctcgcccacccctcggcgccgccggaccctgcgccactgggggaatttccttcccgacttcccgcgcggccacagccccagctccgtccagcccccgctcccggccccctgggcgggagagtgagccccgagactccgcccagccccgggggtcccgggcccccgttcgaccccagcggagccctcccggctgcgttgctcgtgcccctggctgcatcggggagcgcgggatcacccggccctgtccccagcggtgtcggagcgtgggctgcgggacgggggcaccgcatgccattgtacgcccagcggaggccgcgccccggagccgaggcagtgactgacagcgagccgggggaggaagcagcggcacgacagatagggctaggaggcgagatgtgggaaaaaaatgcggagcccggggattacacacaaaccccggcgatggcacatggcccttaaattagggagaaaagggtcttgaaagatacgaccggggacatacacccgagattccgccctaggggctacagaatcgccagcacgcagccgaccgccagcaagccagccgatgtcagatacggtcactacac

SEQ ID NO: 367123 - DNA, 943 bp, Homo Sapiens
caatgagctgccacaactgctccgacccccaggtcctttgcagctccgggcagctgttcctgcagcccctctgggaccacctgaggagctgggaggccctcctacagtcgcccttcttcccggtcatcttctccatcaccacatacgtgggcttttgcctgcccttcgtggtcctggatatcctgtgctcctgggtgcccgccctgcggcgctacaagatccaccctgacttctcgccatccgcgcagcagctgctaccttgcctggggcagaccctctaccagcatgtgatgtttgtgttccccgtgacgctgctgcattgggcccgcagcccggccctcctgccccacgaagctcccgagctgctcctgctgctgcaccacatcctgttctgcctgctactcttcgacatggagttcttcgtgtggcacctgctgcaccacaaggtgccctggctgtaccgcaccttccacaaggtgcaccaccagaactcgtcctcgttcgcactggcaacgcagtatatgagcgtctgggaactgttttctttgggcttcttcgacatgatgaacgtcacactgctcgggtgccacccgctcaccaccctgaccttccacgtggtcaacatctggctttccgtggaggaccactccggctacaacttcccttggtccactcacagactggtgcccttcgggtggtacggggggtagtggtgcaccaggacctgcatcactctcaactttaacctgcaacttcactcccgaactttacaccactgggacaaatactggcaacgctgcggactgcatcttgttcccaagcggcgatgtgctgcggtgggtggcccaagaatcggatgctgtgcctttcaacttgattgagaaaacctgaacaaatatttttaaacaatacttttgctaatgtactatgaaaactactaact

SEQ ID NO: 367124 - DNA, 926 bp, Homo Sapiens
  misc_feature (814)..(814): n is a, c, g, or t
  misc_feature (873)..(874): n is a, c, g, or t
gcgacggaaggttgcagaggcatgtggggcgccgaccaagtggaagctgagccaccacctcccactccccgctgccgccccccagaaggacgcactgctctgattgtgcccggaagggttcaggagctgcccagcctttgggctcggggccaaaggccgcaccttcccccagcggccccgggcgaccagcgcgctccggccttgccgccgccacctcgcggagaagccagccatgggcgccgccggctcctccgcgctggcgcgctttgtcctcctcgcgcaatcccggcccgggtggctcggggttgccgcgctgggcctgaccgcggtggcgctgggggctgtcgcctggcgccgcgcatggcccacgcggcgccggcggctgctgcagcaggtgggcacagtggcgcagctctggatctaccctgtgaaatcctgcaagggggtgccggtgagcgaggcggagtgcacggccatggggctgcgcagcggcaacctgcgggacaggttttggcttgtgatcaaccaggagggaaacatggttactgctcgccaggaacctcgcctggtcctgatttccctgacctgcgatggtgacaccctgactctcagtgcagcctacacaaaggacctactactgcctatcaaaatgcccaccacaaatgcagtgcacaagtgcagagtgcacggcctggagatagagggcagggactgtggcgaggccaccgcccagtggataaccagcttcctgaagtcacagccctaccgcctggtgcacttcgagcctcacatgcgaccgagacgtcctcatcanatagcagacttgttccgacccaaggaccagattgcttactcagacaccagccccattcnnttgatcctttctggaggcgtcggctgggcggatctccaactccagggctaga

SEQ ID NO: 367125 - DNA, 1026 bp, Homo Sapiens
ggtccggaattcctgggatgcggcgtcgctcccacggcgcccagggtacccccgccgctgtctgcctgtcttcctccattaccgcgcaggcttggtcaccgcattaaggcattcccgctctccgcggaactgctctgccgtctcggcggtgaaagtgtgagagggtccgtagttgggtcaactttgactcctcacgcctgcccggatccttaagggcctcctcgtcctcccggtctccggtcgctgccgggtctgtgcgccggtccgcgcccgccctcgctctgccatgggcgcttccagctcctccgcgctggcccgcctcggcctcccagccctggccctggcccaggtggctcggcgtcgccgcgctaggactggccgccgtggccctggggactgtcgcctggcgccgcgcatggcccaggcggcgccggcggctgcagcaggtgggcaccgtggcgaagctctggatctacccggtgaaatcctgcaaaggggtgccggtgagcgaggctgagtgcacggccatggggctgcgcagcggcaacctgcgggacaggttttggctggtgattaaggaagatggacacatggtcactgcccgacaggagcctcgcctcgtgctcatctccatcatttatgagaataactgcctgatcttcagggctccagaacatggaccagctggttttgcctagcaagcagccttcctcaaacaaactccacaactgcaggatatttggccttgacattaaaggcagagactgtggcaatgaggcagctaagtggttcaccaacttcttgaaaactgaagcatatagattggttcaatttgagacaaacatgaagggaagaacatcaagaaaacttctccccactcttgatcagaatttccaggtggcctacccagactactgcccgctcctgatcatgacagatgcctccctggtagatttgaataccaggatggagaagaaaatgaaaatggagaatttcaggccaaatattgtggtgaccggctgtgat

SEQ ID NO: 367126 - DNA, 1090 bp, Homo Sapiens
ggtctgctgccgctggaacccgggaggccaggccaggttgttatggaaaaatgtggtggcaaggccagtcttttgggcaccagttcccccttctttttttcggccagatgatgcagacattgtccattgcgctggagctccttctggggtggccatctggatacaggggttttcatgttgcggatggctcggcgagacatgatggcatctgtcacagctttcttgaactgtctcatgcccaggtacatgggccggaatggcaaagagtgggaaaggtgtgcaccttgatcatgatggtcatgaaggccatgtacagcagaaccttggatgaagcctgtaaacagctctgtgtagagcatgtacacagccttgttgtcccaggggttctcactctggaggtccacggagtgcagcacatacttgatgaagatggtgagcaccatcgtcatcaggatggcatactcaaagccaaacaccagctgcacagaggccccacgggtcaggatgctgtgataggcgtggctgacgaagaggaagtccaggatgcccaggaggaacataagagagacaatgcggcagtgaaagagccaggagatgttggggctgcgttccataaagtccacacggtcctcagccagccagtggaaacatttgaggaagagaagaagagtgaagagtgcaacaaagcgggggctgaagtcatcccgaaaaacggtgaaggccagacaagtctctgtgacggcgtaccaggaacgttccagaaggtgctccatctctgctgccctcagttgcccaaagaacaccttgcccatcaccttgcccagaaggaagacaaggacaaaggcctggatgtacaggactgccatgctggggctggacttggtcaggtacaccacagtggggtagaactggtgtttgaggtagtaggcgtgagccaccacagccccggtcagcgccaggctggccgccatcatcactgccgtgcggaacattgccctggcccggagaccaggaacccagcgccgcgagaccgcacaatccgcgcgactgcggctgcccctccgatcccgaaaattccggaccggtccag

SEQ ID NO: 367127 - DNA, 938 bp, Homo Sapiens
  misc_feature (911)..(911): n is a, c, g, or t
ggggtgcatgcgggtcttcgtagctcggtcggcatctcatcagcgctgggatcggttccagagtcagactctcgtggatgcggccgtcgtacgtgccttgtcgcattctcgatcctgttggctcccctttctttagctttggtgtcgtcttcccccgtttctcatgaggaaattgtccgctaccgcggtacagtcgaagcgttgacaaagaagggggacgatcagcatgacgatggccagcttcaagtctgggttttcaatgggattcaacagggccaccttttgtccactgaagtattaggaggacgatgaagacgacagacttttcaaaaatcatgatcacgatgtaaagagcgcactgcccgacccaggctccacactgcagagggtctccatattcgccgaagcgcagggactcccactgctgccactctaccaggacgctgacggcgcgcacccccacgtagatgagcagcatgcccacagtggcgtccaggaggaagttgatgaggtacagtgaacaagggtcctcttcagtgagatctgctaggtatacatttgcaaagtggatgaacagcattcctatggcttgtttggaagtgtctaaaaaccatatcctccacggacgtctttcatgctttggttctctgaagcgtttgagcattaacgtgctgaaggccacgacgccgagcagcccctgcaggaagatgccgaagctgtgcatgagcgcgccgctctcgcagcggcccgccccggacgcgactgtggagggcggcccgcctggcagtccccggctcgcgttcccggcggggccctgcatgacaggcctcgcgggaggggcgcgagggcccagggcaccgacccggcctcgctgcctgccggcgcagcgccgccaaacccgcagccatccnttaactccagggcgtaccagcctgctt

SEQ ID NO: 367128 - DNA, 755 bp, Homo Sapiens
gcgccgccgcgcgctggagctagagatggatttgcagccgctgcaagtgtgtggaagggccgtgttcgtgttggcaaagaaggtcggctgctgagcccagggcgtgtctcccggaggcctgtgggctgccaggatccccacctctctgcaatgggctgcccaggctgaccagccggttcctgctggaagctcctggtctgatctggggataccatgtccaagccccccgacctcctgctgcggctgctccggggcgccccaaggcagcgggtctgcaccctgttcatcatcggcttcaagttcacgtttttcgtctccatcatgatctactggcacgtagtgggagagcccaaagagaaagggcagctctataacctgccagcagagatcccctggcacgactgacaacccccagaccctaccatccaacccaccatactacctacgctgcgacaaccatgggacgaagaccgaaacactcgatcgtcactagatccgagagaatacgccggctggaacgaatgcgggcccagggacacgtgtatacttcaaaacgaagccacaatgctacgcagacgccatatggcgcgaaacacagcgcgtcgggggtgatgcaacaaccgtccttatctctaggaacttcaccgcataggtcagcggtatcgcgatcctccccgtcagcagctctccccaactgtctccccgatagcccacaccggccgcgctcacgtcggccacacccctcccgacagcaa

SEQ ID NO: 367129 - DNA, 1117 bp, Homo Sapiens
cggtccggaattcccgggatggaaccgctccttcaggcctgaatgtggcggctgcctctgcgaaatggacggcgtgggaagagaatggcttctgcaaggaaagccagccgtcccatgcgtgatgtttttggtgacttcagtgatgtttccttggaagattcaacgaatggaagaaatcagaaacttccagatcagtagaaatcttaccaaaatagcacctggtcataagcagatttctaaaaagaaaccaaactctagatgagaaacacttactcctgaaagagaaccctgtgctcgggagtggacccaggcttgcctcatgtagaccacccaccactgcctccaggatccgagccaatgccgcactcatgaagctggcccagctggaaacccggatcatgaatcggaagctgcagaggaatttgtctgacacggaatctgactcaatgaccgccgatgctggtcttccaaagagagctgacagaatcctctctgggcggtgcactcgaactcgcgtcccagaacacagacaaaacttcccagaatcaagcccgtgaacttcctgtcaccgaaaataatgcacagaacgcgaaggtcagtaggtatctaaagaagaaacaagcacctgttgacaacaacatatcccctgaagcacctgctgggcaacagagaggactttgcaaacccccaaacagaaagaacctgctagaacatttgattctccagacagtgacgaagaagaaatgaaagtattgctaggaagcttgatggactcttctagagaaaaaaaccgaatcaaggcttcagcagcgctaaacgtcagcgaggaagaagaaagaaaactattttcgagtttagaataaatattttatcgccttgacggtctggctccagctgtcagtgagaactcccgatttgaaacaggaagagaaagtgctcagagacaaaaaacagctggcaaaatcttcagagccgaagcgtcccactggggcaggatgccccaaggccagccccaggcgaggagctggggcatcccagggaaaggccggccctttggcaaaggggggatgaaaaacagggtcctcgggaccatttccgggggccggctcggtttctg

SEQ ID NO: 367130 - DNA, 1359 bp, Homo Sapiens
  misc_feature (1270)..(1271): n is a, c, g, or t
  misc_feature (1291)..(1291): n is a, c, g, or t
  misc_feature (1327)..(1327): n is a, c, g, or t
ccgcgcatgcgcttcttctgcctgcagcagagaacaggacagaatactccgcagggctccgttggcttctccacgagtgacaaccatgttttcccagatagaagaccggagccctgctcctttgcgatccgccgagggctgcagagagcatcctcatccatttgggcacccctgcccaggaagagcccggccataccctttccggactggatccttaagaggtgaattttcttccgtggattccgatttgctccgtctgaccagcctaggcaatccagcatcgcgtggtaccagtgccgctgggcacactggcttcacgccggctccgcctcaccagcaagcgcattcccaggtggtcaggctcaggatggaccatgagctttcaaaaaggaacacaggtggaaatcctcaactatgctgccatctgaataagtgtttctttgtagatgcacagagtcaaggaaaaattacatccctgcattatgtaatgtaccaacaacgcacttacccactgtcttaatctaggtcattcttgaaagcagagcctgagacaaaggtagacacattcctatttatgagtctaacacccaggagcaggactgagcgatagggcgagtgaactgccggaaacagggaaactaagtccgagcaaaccagatactgctcttatcaagtggtccacccctattaatggctacataatgcagaactttctcaggattcttcttaaactttatctcagaactgtctgcctcacgcagaaaggagaagtatttctccatcagcaaccacctcctgtgtgttgagggctgctcctttggggcattaacccactgcctccaccaccccaaccctctgggctgcaaagagctagctgacagtccagctggtaccttagcatcacacattgctgcatcagagaggtcttaagacaggaagctagagtcttggtgcatgctcgaagtgagacggtgtcagcacagagcagggtaaagtcttcccgttaactcttcaccagagctatgactggaatcagaggttgaaaagatgtgagactgtacccaagaagcatcttataagcctacgtaatatactgttagactcatcgaaatctatttcctcccttctttataatcaaaacttcagtgtccagaataaagttggcagaagggttaaattggaaagttaaatgtactagaaggtgtacatttataagttttgaccttgagtcgtgtttcaagagaaagtgacattggaacttggaaatttnnaaaatgatctacttgaaaantttgacatgcatagaatatagctatcgtctatcttntgtatctagaacatcgtgaatgtttgtgaaaa

SEQ ID NO: 367131 - DNA, 1493 bp, Homo Sapiens
  misc_feature (72)..(72): n is a, c, g, or t
atcctttctgccaacttggccctgcccacacagggttctgaagtgcttgccagacttggcctgagctgcagnaaggagggcctggaagtggggcttcttgagggttgtaaatggcccacgtgcccgtcatagtgccctactgccacccaggtagggggtggtcccccgtggatgtcgagacacatgacgcccgctgttgctgctgaacatgtactcagggaaggctgggttcttccaggctgtagagcagcagcatgccccggctctgcttcatgaagtcataagagccatatcccactgcaaacagatccctgtactttggattccagcagagggcagtgacggacaggcgcttggctttgtcattttggaacttccagagcggcagcagggtacccacctggtcccggtattcatcagcagcatcgtcatagtacttaaaatcttgagcaatgtcatcatatgtattctggttgaccatccgctccatgatcttagcagcttggggacaatttgatgagatcatccagtctgagacttccatagaggtcagcttcctcatgggccatcttccctgattttttagcccactggggtctttgcccttctccttctctttggtcttttcccgcttcctcaagttcctctacataggcatcatagatctcccactgattggctgtggctgaaaagtttgtccggggaggaggctccgtctggcattctcgatcccggacagggttgttgtaggtctgtgaggccctctcactgaagttgaactggttagtgagctttctctccttgggctgcttaggagtcatcaattcttcttcagtcactttttcagctgccccagctgcaggcacatctgtttgactcccaggctcagtttctaactccttgggctcttcgtcttcttcgaggtttcctgtttctgaaatcaccttgacagactcctgagaacctgccactaattcatcgcggtaatgctgccgccgtccttcatctgagtctttggggatcaggttcccaacctgggtgtagtgaactgccagttggttcacaaagccaataggcttgtatgtgccttctttgaagctgtacctgacaatgttctggggtgcgtgtgggttgttggctgtcaaaatccgagtgaactcctcctttaactccgcatcggtcaactccagctggtcagggggtctaactgtggctttggattgggcccattcatctgtgccttctcccacttcagtccctgaatcttcatcctgcttatgaggctgtttatggggagccttcgcagaagcaggaatcatctcaacccctggagagcctacaaaacgctccctcgtctgaagacaaaaagtttgtccgtctccttgaccacacacaagaaatctggactctcttccacttcagttaccagtcgcaacggttctttagggacagccgtcgttggggtccccgtgccatcccgggaattccggacc

SEQ ID NO: 367132 - DNA, 892 bp, Homo Sapiens
  misc_feature (294)..(343): n is a, c, g, or t
cggtccggaattcctgggatcaccatggggcgcccactgcacctcgtcctgctcagtccctccctggctggcctcctgctgctcggggaaagtctgttcatccgcagggagcaggccaacaacatcctggcgagggtcacgagggccaattcctttcttgaagagatgaagaaaggacacctcgaaagagagtgcatggaagagacctgctcatacgaagaggcccgcgaggtctttgaggacagcgacaagacgaatgaattctggaataaatacaaagatggcgaccagtgnnnnnnnnnnnnnnnnnnnnnnnnnnnnnnnnnnnnnnnnnnnnnnnnnnaatacacctgcacctgtttagaaggattcgaaggcaaaaactgtgaattattcacacggaagctctgcagcctggacaacggggactgtgaccagttctgccacgaggaacagaactctgtggtgtgctcctgcgcccgcgggtacaccctggctgacaacggcaaggcctgcattcccacagggccctacccctgtgggaaacagaccctggaacgcaggaagaggtcagtggcccaggccaccagcagcagcggggaggcccctgacagcatcacatggaagccatatgatgcagccgacctggaccccaccgagaaccccttcgacctgcttgacttcaaccagacgcagcctgagaggggcgacaacaacctcaccaggatcgtgggaggccaggaatgcaaggacggggagtgtccctggcaggccctgctcatcaatgaggaaaaacgagggtttctgtggtggaactattctgagcgagttctacatcctaacggcagcccactgtctctaccaagccagtagtgggtcagccagtagtggg

SEQ ID NO: 367133 - DNA, 865 bp, Homo Sapiens
  misc_feature (765)..(765): n is a, c, g, or t
  misc_feature (781)..(781): n is a, c, g, or t
  misc_feature (806)..(806): n is a, c, g, or t
  misc_feature (814)..(814): n is a, c, g, or t
  misc_feature (823)..(823): n is a, c, g, or t
  misc_feature (840)..(840): n is a, c, g, or t
acttgacaaagctatactttaatgttaccaaactatatgaaacaaagccatatatggtcacaataccactatctttaatgagcattgtatattttatatgcaacagtgctcagcttatgtttaccatgtgcaaaatcaacgtgtctttaatgacttaaaattaacttttgcaaacaattctaaatacaggtggtctttcaagtagtaaaaccacaaaaggcagttttctatctatggtcatcttttctccctaaaagttaattttatataaacaagacttcaaaagtaaatcacattttttcaggtgcagacatccttgtgggtgggaaagaatttaaaccttttttatatttattaaaatgttctaagaattttcttaaacattgcacaaagtttaatgctgtagttttatttttgtgaaatgtagatgcgcatacaagagctaagcaaaatagaagagcatcgacataagaaaagttcaggtatctaatattcgtcttaatagtctattaacttgtgaaagctaagttaatggaaatattattccaaatctatgagaacacttggtgtatcagggcaaagctttgtaagatgtttttgtaactaagaccaaaatcgaagatagagctgctttattttcttggtttaaaatcttcctttattttagtagtgatgagatgctgattgtgtacagaagaatttgagagggggatttttaaaaactgacttaacacaccccggaaagggcagctaacagctatattntatataaattttccgncccaaactcctgtttttttaaactnccaactcnttaaaaggnccaccagggttttaacnggaatggattccactttcccccttg

SEQ ID NO: 367134 - DNA, 750 bp, Homo Sapiens
ccgaaaaacacgttctaggcgccgggattccagatacctgggaaatagagtgcacgcagcgttgagaggcctcgcgcttggcttctcctatcactgaggcgcagaggtgctgtggacagcccagacccacacggcgcccgaggtgaaacagaaccctcagtctccctatgaggccactggcactctcggctgtccccagagctctccgacttagagctgaatgcaaagtaagcgctcgaaatgcagaagtagccggggccgcccacggcacctgcctcgctcggggcgagagaagacgccaggctgaggtcccagcgacctcaggcaccagctccgaaggagggcggggagaccgcaaaggggaagtgcccggagggccaacggcccccgcgcaccctgcgcccctctgaagcgcgccgcctccccgcgccagggactgggacctgcctctggggaatccgcctagaagacggcggcggattggggtcgggcactctccagggctgtcaggccctccccagccctgcacctgccgcgccgccccagctcgccaggaagtctcagagaccccaggggatgtggtgggagcgccttctcatcgcgggctcaaaaagaaggaaggacgcccccaggggtcggcagaacggaggactagctccaaagccacaacctcactacggacccaaggcaggccggctggggctccgcgcctacacggccctgggcgggggtccggcgcccgggagcccg

SEQ ID NO: 367135 - DNA, 870 bp, Homo Sapiens
  misc_feature (409)..(462): n is a, c, g, or t
ctaggttctgaagcttctgagttctgcagcctcacctctgagaaaacctctttgccaccaataccatgaagctctgcgtgactgtcctgtctctcctcgtgctagtagctgccttctgctctctagcactctcagcaccaagtaagtctacttttgcagctgctatttcgagtcaaggtgtaggcagagtcctttttttctattcatggctggcaaacagtgggatctggggatgggacaaaaggcagctaggaagattgccatgtagtctgctgctaaatgtagagtctagtagatattcagtaacattcaagttcctattttcttaagaattagcaaccagcagaggaaaacgatgggctggaagtcagactgttgaattggctctgcctttaattatttgttcaannnnnnnnnnnnnnnnnnnnnnnnnnnnnnnnnnnnnnnnnnnnnnnnnnnnnngtgcgatgtgttctgagactgaatccagttccaatcttctagatttctttctcgttcttctctgaagatccactattcagaataagactcctgctcatgttaggtgggaatggatacaagggaccatattttggggttctggtagctccacagggatgctcaatgaagatgcaaaattagaagtcaaaataaacagctcccatgggcagtgttgatctcaccctggcctttcctttcagtagggctcagaccctcccaccgcctgctgctttatcttacaccgcgaggaagcttcctcgcaacttagtggtagattactatgagaccagcagcctctgctcccagccagctgtggtgtgagtatcaacccctggctgacctgggaggcaagggtgagggctggatttt

SEQ ID NO: 367136 - DNA, 671 bp, Homo Sapiens
gggacaggacacagctaggttctgaagcttctgagttctgcagcctcacctctgagaaaacctctttgccaccaataccatgaagctctgcgtgactgtcctgtctctcctcgtgctagtagctgccttctgctctctagcactctcagcaccaatgggctcagaccctcccaccgcctgctgcttttcttacaccgcgaggaagcttcctcgcaactttgtggtagattactatgagaccagcagcctctgctcccagccagctgtggtattccaaaccaaaagaggcaagcaagtctgcgctgaccccagtgagtcctgggtccaggagtacgtgtatgacctggaactgaactgagctgctcagagacaggaagtcttcagggaaggtcacctgagcctggatgcttctccatgagccgcatctcctccatactcaggactcctctccgcagttcctgtctcttctcttaatgtaatctcttttatgtgctgtattattgtattaggtgttatttccattatttatattagtttagccaaaggataagtgtcccctatggggatggtccactctcactctttctctgctgttgcaaatacatggataacaccgttaattccatgtgttttcataataaaactttaaaataaaatgccccccccaccaa

SEQ ID NO: 367137 - DNA, 963 bp, Homo Sapiens
  misc_feature (481)..(493): n is a, c, g, or t
cattcaaggtgactttaatcccccgtgtttccaaattttaatgctacaaggacctcctgcaaacaattttttacatccagtccaggtaataggaatgaggactttaatatatagctctattctgctggccacggacacggttgcgcttaacccccctgtaattctcccagtcaccttttggcgaagtgcccacaagcgcaagagccggattcatacacaaggtcaaggagtttgtagagaccatggcccggcccaacacagtggtatacagcccctgttctttaccttatagaattcacccagataatgaatacttatggccacacctggtggtaggtgcccgcatgcttccagccacactcgggaggattgaggccggagaatcgctttaaatccaacggaaggtggatcttctggtgaactgagatcatgccacatgcactcccacgcgctgggcaacagagcgagactccatcttccnnnnnnnnnnnnngcttatgctttaccacattaaccttgtcatctggagcaatgacactgactttttttctggaaaacatacctatctctttgctttcagcagtgtatttcaacactcagcttgaatctagagatagagccatctgtcatcaaacatgttataccaccaaattttttcttttattaaacaaactgatggttgccaaacaagaagtcaggtaatctgacttttcagaggcagggagtttttatttttggcttctgtaatggaatttcaccaagtttttaaaggtattaactttattaacctgtaacattcatcattttaaaggagtatataaaaactgtcaaaatgggtcagaaacaaagtttgcgatgctcataatcatcttcagcagtggcaacatttaactttttgagtcagtcgcaacagactggcaatataactaacacaatacataacgataagtgttgttcttgata

SEQ ID NO: 367138 - DNA, 815 bp, Homo Sapiens; identical to SEQ ID NO: 98677

SEQ ID NO: 367139 - DNA, 1160 bp, Homo Sapiens
tggaagaagggagtgagactgctcagagaggcaggattcctgctgactccagggggacacctggcacctcagcttcctttcccacttctccaggctgcatggaggggtgccgggcaggggcctcctggaagggaacctcctgcagcctcaagcaccaggtcatgacatgacatctatccctttcccaggtgaccgactcctgcaggtggatggagtgattctgtgcggcctcacccacaagcaggctgtgcagtgcctgaagggtcctgggcaggttgcaagactggtcttagagagaagagtccccaggagtacacagcagtgtccttctgctaatgacagcatgggagatgaacgcacggctgtttccttggtaacagccttgcctggcaggccttcgagctgtgtctcggtgacagatggtcctaagtttgaagtcaaactaaaaaagaatgccaatggtttgggattcagtttcgtgcagatggagaaagagagctgcagccatctcaaaagtgatcttgtgaggattaagaggctctttccggggcagccagctgaggagaatggggccattgcagctggtgacattatcctggccgtgaatggaaggtccacggaaggcctcatcttccaggaggtgctgcatttactgagaggggccccacaggaagtcacgctcctcctttgccgaccccctccaggtgcgctgcctgagatggagcaggaatggcagacacctgaactctcagctgacaaagaattcaccagggcaacatgtactgactcatgtaccagccccatcctggatcaagaggacagctggagggacagtgcctccccagatgcaggggaaggcctgggtctcaggccagagtcttcccaaaaggccatcagagaggcacaatggggccaaaacagagagagacctttgggccagttccttgacacattctcctgagtcccaccctcatttatgcaaacttcaccaagaaagggatgaatcaacattggcgacctctttggaaaaggatgtgaggcaaaactgctattcagtttgtgatatcatgagacttggaagatattccttctcatctcctctaaccagactttcgacagatattttctgagcaccttctctgcatgtctgcagtgctgtg

SEQ ID NO: 367140 - DNA, 1094 bp, Homo Sapiens
ggcgggggggaagtttaaatccccaggagggggtttggaaaaaggagcccacgttcctggggcccgtgggtatgggaaaagcctgggttcccagggaggccctggcttaggggcccctgcctgggtacagccctgggcagagcacttggtctcaccatccggtacgaaagccctggccccaccagggaggtagagcagcgggcgcaggagaagcagttgtggtgccagtgtcggtcttcaaaggacacatacttgcctccaccgagtcctacgatggggcgcttgcagctgctgcacttaaggtgcaaagagttctccaaaacaggccacacagtagggatcttcatcccgggaggtgaactgctgccctgccaggggcgtctggcatccggtacagaccagacattctcgatgccacggctgatcacggtatgtcactccaccctgtgtcagcgtcttgctgcagcgggcgcagcgaggagcaaacttgttctcatagcagggcacgcagtagtgagcacccttgtcgggcacaaaagaacgggagcccagtggctgttcacagccactgcacaggaagcagtgctcatgccatgtctggcctccatattccagcttccgggacccaggcatgacagtctccccacaagcggagcactgcgaggaaaacgcactgcagtagcagtcattgcagagcagctcactgtcctggcaggtgaagggttcatcggctagtgagcgctggcagcggcagcagcggaagcagccctcgtggaaatggcggtcttcatagaacagctccctcgagtcatgcccgataagctgctggcactcagcacaggtgttggcaaaggtattgtcatagcagggcacacagtaggggccgctgtctgtctggatgtacttgcgtccatacagggactcgttgcattttgcacagtcaaatgactcgctcatggtggcaaggggagagaaccctgcgggccgggccaagcgggggccgagcgagctgccggcgaggctgccgactgcagacggaccgtgtgggcgagtgggagcgcggccccaacccctccccgaggaagtgagcgcgg

SEQ ID NO: 367141 - DNA, 963 bp, Homo Sapiens
ggccacacagtaggatcttcatcccgggaggtgaactgctgccctgccagggcgtctggcatccggtacagaccagacattctcgatgccatggctgatcacggtatgtcactccaccctgtgtcagcgtcttgctgcagcgggcgcagcgaggagcaaacttgttctcatagcagggcacgcagtagtgagcacccttgtcgggcacaaaagaacgggagcccagtggctgttcacagccactgcacaggaagcagtgctcatgccatgtctggcctccatattccagcttccgggacccaggcatgacagtctccccacaagcggagcactgcgaggaaaacgcactgcagtagcagtcattgcagagcagctcactgtcctggcaggtgaagggttcatcggctagtgagcgctggcagcggcagcagcggaagcagccctcgtggaaatggcggtcttcatagaacagctccctcgagtcatgcccgataagctgctggcactcagcacaggtgttggcaaaggtattgtcatagcagggcacacagtaggggccgctgtctgtctggatgtacttgcgtccatacagggactcgttgcattttgcacagtcaaatgactcgctcatggtggcaaggggagagaaccctcgaagcgggcggcgggagcggggagcgcgcggcgcaggcggggccagggaaccgggcgccgcgtccctcggcaggctcctacctgcgggccgggccaagcgggggccgagcgagctgccggcgaggctgccgactgcagacggaccgtgtgggcgagtgggagcgcggccccaacccactccccgaggaagtgagcacagggcaccagcccacagcccggaccacacgcaccccggcacccccagcccgccgcgggggccagaccccgcacccacctcctttcgccgccatcggcccgccccctcctccc

SEQ ID NO: 367142 - DNA, 903 bp, Homo Sapiens
  misc_feature (128)..(140): n is a, c, g, or t
cccctggaccctcagagcataccgtctgcaagagacactatcatcctgttgtgccaaatgaagagctgtagagaaaggttcattgccctgtccaaggtcacgtagcaagaaagcagtagtatgagacnnnnnnnnnnnnncttcatccgtaaactgaggtaccatatatctaaatctgtactgtgctaagatgggaagggaactgaaacacataaagaaattgggcaggggataaaggagaggaagtagatgatttaggggtgggaaggaaaagagacccttttagggaacaggaaagagaataattgagataaatgggaagggaagggaaagattaaggtggagggaaacaattattagtatattagtatctagatagaaagaactacccacgatagaggagaatgagattttatagcattatatgagtcattcttcgtttcttccatctcattaccctccatcaaattagtcaccaaatccgtgaagttctttactgttttctcatcatcattcacataggagtcgccttataggatggacctcatcatctctcacctggcccacagcagccatccgtttctaggcacacactactaagtccaactcactcataatcaccaaagggattccagcatgattctgggtgtcattttactggctttatttatctagtacttcagccagataatcaataatgtcgtggaccttaatgaacgtaagtcatgtcccatataagtggagccaagcttcttatcaagcttaaattcttatacacacatgtttgatccattgtacaatttgggactactggaaagaacataatttatcctcaaatggtgcaaatccaaagctacgcttaaggacaggtattcggctcttgtccttaacaactgaaaatgg

SEQ ID NO: 367143 - DNA, 1097 bp, Homo Sapiens
  misc_feature (1004)..(1013): n is a, c, g, or t
gtgggtggcagcaagcactcttctagcccagagaagtctgttccaggacgggctctttcaggagcagctaaagtcaggggccatgtccaccatgtgatagaaagacaagatggtcctgaaattctccgtgtccattctttggattcagttggcatgggtgagcacccagctgctggagcagagccctcagtttctaagcatccaagagggagaaaatctcactgtgtactgcaactcctcaagtgttttttccagcttacaatggtacagacaggagcctggggaaggtcctgtcctcctggtgacagtagttacgggtggagaagtgaagaagctgaagagactaacctttcagtttggtgatgcaagaaaggacagttctctccacatcactgcggcccagcctggtgatacaggcctctggtctaactttggaaatgagaaattaacctttgggactggaacaagactcaccatcatacccaatatccagaaccctgaccctgccgtgtaccagctgagagactctaaatccagtgacaagtctgtctgcctattcaccgattttgattctcaaacaaatgtgtcacaaagtaaggattctgatgtgtatatcacagacaaaactgtgctagacatgaggtctatggacttcaagagcaacagtgctgtggcctggagcaacaaatctgactttgcatgtgcaaacgccttcaacaacagcattattccagaagacaccttcttccccagcccagaaagttccctgtgatgtcaagctggtcgagaaaaagctttgaaacagatacgaaactaaactttcaaaacctgtcagtgattgggttccgaatcctccctctgaaagtggccggggtttaatctgctcatgacgctgcggctgtgggccacctgagatctgcaagattggtaagacagcctgtggctccctcgctccttcctctgcattgcccctcttctccctcttccaaaaggagggaactctnnnnnnnnnnaaggaaggggaaagcttgctacaccctctgtggcccccccgggaatggccaccaactgggattctaaccccaaattattggata

SEQ ID NO: 367144 - DNA, 1143 bp, Homo Sapiens
  misc_feature (978)..(987): n is a, c, g, or t
ggggtttaacccacatctcgtggtgaatattatgtaagaccccgcttgtcccagagtgtgactcttctgcatagtggcgatccaatgggtgtcggtgccacagagtatgctgctcactgtggcgtgcacaacctcctgatgctgcacgtatctcgggaaacagactggtttttcccacgatgtgccatacactagtgttgtgtggacgaggatggggatgggctttattatcttgtttggactatgtcaacacaatcttggtcgacgagcattgatacgtgtttgcccattagtcgcggccgatttgccattctggcagcggtcgctcttgtgtccccatcgactttggtgatgccttcttccacctcttgagggtgctctatgtatgggccctgtgcgtcttaatgggctcccacgtccttcttgtagtgtacatgccctcgtcgtcggtcttctctagtgggggtctccgtcccggtgcctatcccgtgagccatggcgattgtcctggggacgtttctccttccatcgcttctccggacgctgatctcccgtttgtctttctccgttggtgcagctcgtcattgcgcgtgcctgtggctcctgctgagagctgtctcatgtacggctcgtgcaccctcgggcgtccccttggtcgggtggtggtgggtcatgttggctccatcgtccgctccctctcgggccctctggtgcgggtggttgtcggttcctgacggtgctgcgcatggtcctccgatgcgcccccgcgtcagtcaggttgcgaaggttggcgctgcggctgggctaggttcggggtcgtgggggtggagaaaggtgtactgggaggaacctgcgcgcggaggcggggtccggggaaggagtgggtggaggctgtcagacccgaaaagaggacggagagaagggaacccaagttcctttttccctggaaaaggagtcacttttctgagttttcaaagnnnnnnnnnngtggctcgaatgctgggagtcggaaggagtcggaggccgggctgagctgaccatacagtctcaggacactgccgaggattgtacggccgcctcaggagcgctggggcggaagcgcagcgggcaccggacccgtgtggcggtccgctcgcgagtgta

SEQ ID NO: 367145 - DNA, 1059 bp, Homo Sapiens
aagagagggaggaaggagaggagctccataagcccagacaagggcttgagagcagacaagggcttgagagcagacaagggcttgagagctggccaagcagtttctctcagcttctgtgttccagcccctctgtgggaggagagaagggcaggaccacaagcctgccagaggctgcggcctacagccggggagaggccagcccggcctacagtgcggacacaggacagaggggagccaggttctttgcacggaccaatgctgagagcagaccctcggagcagccgggttggaagtgtctctccacagtcaccagacagatccaggataggatgggcagcccagtgcaccgagtgtcagtggggggatacctggagcaggcaaatgcacccccgacatagagagcgagaggtatatgcagtccttggacgtggaacggctcaccaacatccttgatggaggtgcccagaacactgcactccgcaggaaagttgagagcatcatccacagttacccggagtttagctgtaaggacaattatttcatgacccagaatgagcgttataaggctgccatgcggagggcattccacatccggttgatagctcggcgcctgggtcggttagaagatggtcgtgaattaggctacgcttacagagcactttcctggagacgtggccttaaatatacacagagtcttcgtgagagccctcaggagcctgggctcagaaggagcagattgccaacatgggacccaactctgcaaaaacatccagatcatcgcaacgtatgcacagacagagttgggacatgggacatatcttcagggcctggagactgaagccacctatgacgcaggcaccaggagttgtgatacacaggcccacgctgacatgcaccaaatggtggctggagacttgggacggtcagcacccatgccctggtccaggcccagtgatctgctcaggagccaggcggggcatgcacgctttattgggccaatcggagtcttcaggaccaacccactgccaggaatcatcatggggacatcggaaccaagag

SEQ ID NO: 367146 - DNA, 1026 bp, Homo Sapiens
atggttgtggcagacttgcagatcccgtgttcccttgcctggaagattttcatttgggctgtagacgaaagtgcggtcccaggttaattttcatttgccaggacagaagttacaactagtttggtctgtcaccctttgccccatttagagtatatgggtcccctaaaggatagccccatgccattcaacgtcaccaccctgtagtcatcgcccctacaactagtgggcagaacatgaacacaacgttgtggtggtataaatgtgtttccgttaagcccagggattacaagtcaaaggcttacaaagggggaaggactagccaggtgtggctcggaggggactcctagccaactggaaagttaactggtgagtaagacaatgacatgctcttagggtgtctgctactcagatcctcctcagttaagtccccctgcacaaagctgggtcaggtcctactgcttgcccagatccttcagatcattcaaaagttacccgaattctggattttcatgcaaatctcccaatttttaaaaatgttggcatccaaagttcagaatgttttaaccagccacactgtgtgggcccagggaaaacagcccaaaggccaggtgaagctgcagattttcaactgctgccttggcctctcccagagccccttaagtcctaagaaggctcagtcaacacactggcactcgtttcatcccactggttgagaaagcaagtcttagcaaagtaatgggggagtcttaccaaaactgcaaaggaaaaaaatatgataccatgaaattagaaattcactgcatttgaaatgaaaatgacttatttctgtacttctataactcacaaatttagcagacatcatttagacatttttgtagtgcatacagatttaaatctggaatttcatggtttgtaaatcactatgagatactagctataaccatgagcaatattacgggcagtaaatgttgatttctatttcgtttcttgaagttttgtgtggttcatttttaaagtgagattcaa

SEQ ID NO: 367147 - DNA, 769 bp, Homo Sapiens
  misc_feature (117)..(117): n is a, c, g, or t
cacccaaccgagggccttgccatggtataatccccagccacttttgggaggcccaggtggggaggaatccacttgagccccaggagttcccagacccagcctggaccaaccatggcnaaacctcgtctcctgctaaaaattaccaaaaatttatcccaggcatggatgatgtgtgcctgtagttccacctactcgggaggctgaagtggaaaagatcgcttgagcccaggaagtcaaggctgcagtgagccaaaatcctgccactgtactccaaccttcactgaattcatttagcaactcttccttggtccaattacatgacgttattagaaaaaagccttttactttcaacaccctggagagagatttcacatattgcttcctcttctcaattgcattgtcaggattaaggcttatggcatcaaaagtccctttgtcaatacaaatatgaaatccagacagctgtgtggagagattcaaaaagtcttctacctttaacttaatgttagataaaccttctttttctataatacttccagaaagctgaattgcagaaggagagtaatcaattccagtaatattagagaaaccaaattttgccatttccagttccaatatcaagcactgaagcatccagtggaatcttgtgtttctgcatccaccttattagtcgattcatactctcttctccaaaccagatttcacctgtatctccatattctcggaaagtttgcagttctctctcatagacagcatcccaatgctcgcg

SEQ ID NO: 367148 - DNA, 875 bp, Homo Sapiens
agcgaaatgagctcgggcgctgacggcggcggtggcgctgcggtggcggcgcggtcggacaagggcagtcccggggaggacggtttcgtcccgtcggcgctggggacccgcgagcattgggatgctgtctatgagagagaactgcaaactttccgagaatatggagatacaggtgaaatctggtttggagaagagagtatgaatcgactaataaggtggatgcagaaacacaagattccactggatgcttcagtgcttgatattggaactggaaatggtgttttcctggttgaacttgttggcaaaatttggtttctctaatattactggaattgattactctccttctgcaattcagctttctggaagtattatagaaaaagaaggtttatctaacattaagttaaaggtagaagactttttgaatctctccacacagctgtctggatttcatatttgtattgacaaagggacttttgatgccataagccttaatcctgacaatgcaattgagaagaggaagcaatatgtgaaatctctctccagggtgttgaaagtaaaaggctttttttctaataacgtcatgtaattggaccaaggaagagttgctaaatgaattcagtgaaggttggagtacagctggcaggattttggctcactgcagccttgacttcctgggctcaagcgatcttttccacttcagcctcccgagtaaggtggaactacaggcacacatcatcatgcctggataatttccgtattcttagcagagacgaggtttgccaatgtgtccaggccggtctggaaactcctgggctcaagtgattctcccactggcttccaaagtgctgggattataccatgccaggccctca

SEQ ID NO: 367149 - DNA, 1094 bp, Homo Sapiens
  misc_feature (759)..(759): n is a, c, g, or t
  misc_feature (803)..(803): n is a, c, g, or t
  misc_feature (814)..(814): n is a, c, g, or t
  misc_feature (1021)..(1021): n is a, c, g, or t
gtggaccggtccggaattcccgggatcgccactccgcgcccgctatcctggctccgtgctcccacgcgcttgtgcctggacggaccctcgccagtgctctgcgcaggattggaacatcagttaacatctgaccactgccagcccaccccctcccacccacgtcgattgcatctctgggctccagggataaagcaggtcttggggtgcaccatgatttcaccattcttagtactggccattggcacctgccttactaactccttagtgccagagaaagagaaagaccccaagtactggcgagaccaagcgcaagagacactgaaatatgccctggagcttcagaagctcaacaccaacgtggctaagaatgtcatcatgttcctgggagatgggatgggtgtctccacagtgacggctgcccgcatcctcaagggtcagctccaccacaagccctggggaggagaccaggctggagatggacaagttccccttcgtggccctctccaagacgtacaacaccaatgcccaggtccctgacagcgccggcaccgccaccgcctacctgtgtggggtgaaggccaatgagggcaccgtgggggtaagcgcagccactgagcgttcccggtgcaacaccacccaggggaacgaggtcacctccatcctgcgctgggccaaggacgctgggaaatctgtgggcattgtgaccaccacgagagtgaaccatgccacccccagcgccgcctacgcccactcggctgnaccgggactggtactcagaaaacgagatgcccccctgaggcctntgagccagggnctgtaaggacatcgcctaccagctcatgcataacatcaggggacattgacgtgatccatgggggggtgggccgggaaatacatggtacccccaagaataaaactgatgttggattatgaaaagtgacgagaaaagccaggggccaccaaagcttggaccggcctggaacctcctttgaacaccctggaaagaagcctccaaacccgnagaacccaaggcacctcccccactttcaatctgggaaacccgcacggggaaacttccctgaaccccctgggac

SEQ ID NO: 367150 - DNA, 910 bp, Homo Sapiens
tgggggtataaccacgtgctcctacctcccactcacactacaggggtttggcagagccctgatggacttggttgactgtctcgtcatcttctggatcccaagccccaggcatgatgcctggcacatggtgggcttgcaatcgatatttgctgaataagaactccaaagaccagacgtgcacaagacacatagccccgccctccaccagatgcagccttttagagattcaagcttgtgaattacctccccaacatgaggagcaattggtattttatgcaaatatctgacacctgaatctactcctctgactgcattcaccttctttacccagactgtaagtcagcgataacactgtctcatagtaagggtcctcagacactcacaggcacctcagccttaaggcagtgagctctggatgggattcagagacccagttcaaacctaggtttcaacatgagtgatctggtgctaggcccagcctcagtttccccacttacgtggtagagatgtagatgccctttctgtcactacgcagctcctccctggcctgggtgcctcctcccagggctcatcacacagggtcaaggagaggggaggcctcgcatgatccactgtctacagagacccagccgggcatgcaggtgccccccttcccctctgtgctccaggctactgcctgattgcccatgaaaagaaggcttacctctggctggaaacgcctgaggcagcggattttggtgtgagtaagcaattccaggggcattagggggaatgcaggctcgtctggagcgcataaagctgcactgggttcgattcaaaaggaggaggaagcttgggctttctcaggggccaggcatgcagccccaatattaaatccctgcgaaagaatgtcttcatctttatggataga

SEQ ID NO: 367151 - DNA, 732 bp, Homo Sapiens
ttcactgatgagtcggcatgctaagtcaaggaagagtttctccacattatcagattccttggctgaggtctccagataatacatgtcctgagcttctgagaattcttcagctcgctgctgggaaacctctctcctttcagccaggtcaatcttgttgcccactaacaccagtgatgaccttgttgctggcatattgttctatctcccgcagccactcaggaaggcaacggaaggattcctcacaggtaatgtcataggtgaggatcaaggcattggcgcttcggtagtaactctgggtaatggaccgaaatctctcttgacctgctgtgtcccagatctgtagctttactttttcaccattaatctccactgtcttaatcataaaatcaactccaattgtggctccttgacctggggggaaaagaccctgagtgaatcttcggacgaggcacgtcttccccacaccagcgttgccaattaaaacaattttgaacaggaaatcataatcttccatactcatttacacagctggtttgggatttttctccccaccccaggcataaacagaaatggatgtgcgaatgagtcacgcacgcaagggaaggtctgcgatgtcctgagtccaagggctggagtcagtccctgccctggtgctgctgctacacttagctcagctggagcgagcggcaatcgcaagcccagcagcagcagggggtggagagaccgtagcac

SEQ ID NO: 367152 - DNA, 958 bp, Homo Sapiens
tgaggtgtttccggaagatacatgggtttgacctggtataagttggaaggtgtaacagttttatatgctttgtgttgggtgtgttaaattttgtgtacttcttggtggtttagttttttgtcaagtcttgttttggaatattgccttaaatgttttgaattttatgattagtgaaggcttgtattcagtgtttgcccaagtaatattatatgcttgtaataaaagcaaaagaaaagcttaagtgaaagtgtttctgggctggaaatggtattacatagatcattttgtatgagcatgagagatgacttgctcatgggatgagcaatgctgtgggtattggatggaccactcaggcagcctggccgcacacacacacatgcatgctacatatgtgtacgctcagaccacatgcctgcacatatgtccacacaccagcccacggctcccttcctcaccccagccctccccactcccaggttaaccaatgtcccgatttgcttcaggcggcatttgtaaactgtcaccctgcttgcaaaccctcatttaaattggtccagcatttgctaccagagtttaggccacaaactttgtaaagctcagtttgtctccttgcagaaagaggttgctgcagttatggagctggttatgccaaggaaatgatacggctaaagaaagaacttactgattcccataggtgtgtcaacatgacaaatgaatgttccatctccctacgacaatttgctgcccctccccaaaaaaagcactatggccaaaatttcagtttgtaaaggttaagtaaaatacaacaattctgaaactcttaagagaaccagaattggtaaggaaaggagaatgaccaaaattatattctcacaacctaaagcagtaaactttaaaaataggttcagtcttagacttgacttaattgacttaggctgggcatagtggctcacacctg

SEQ ID NO: 367153 - DNA, 417 bp, Homo Sapiens
  misc_feature (366)..(366): n is a, c, g, or t
  misc_feature (388)..(388): n is a, c, g, or t
atgcagaattcttaaagaatgaactggacaatgtcagagcccagctttcccagaaagggatgaggcactgaatccaagggcccaagttcttctgctgatggatggacaggcctttccctttcctccgccctctacccctgctccagacaaggagaaacgagacagccaggtcatcatcgacactctgcgggatacgctggaagaacgcaatgctactgtggtatctctgcagcaggccttgggcaaggccgaggatgctgtgctccacactgaaaaagcagatgaagtacttaggagcagcagcagggatgagaccaaacaagcacaagagggaggcccgccggttcaggagcaagatgaagaccntggagcagatttagctttttanttccaagggccagcgccctttaggttgga

SEQ ID NO: 367154 - DNA, 1121 bp, Homo Sapiens
  misc_feature (188)..(200): n is a, c, g, or t
ttaaagcctggtttaaaatggagacttataggtaattggggaagtttttgttaagccccccctttgggggaaaaggatttaattgggttccaaaaaaaatatggggtcccaaaaggggaaaatatttcccttggggggccccatttttttggggttaccaagagccccccttcttgggtaaatttttnnnnnnnnnnnnntggtttctggctttccatgccagggggtgaaaactttttgttgaagggttccatccacttaaaagtttcaaaccatttggattagaaaggcccggtttattttttctcaaatccaaaattccagatcactttaagtcattttcaaagcttgggccctagtacttaagcagggacaaccgaccaattcatttagcaaattggttagtatatatatgtgttaatgaaattactgctatgagagagttcttaagtgataatttagtaagataattcacataacaatgtctttaaaaattaaacatagtttccaaaaattcacaagcaatttagtcaaatattaaaggttagtttcaataccactagtgcataaagtctaaaaacgacctttaaagtaaaatgtaaagtaaaagtgaccttaaagtaagactattcattttaaatttcaatattatggcttttcagaagtataagtgaataactgctctgcattaaatcatgctacacaggaaaagatctacttcaactaacaaaataatacttcagtattttaaatgcaaaggtattagtttcaaaacacagagtcatttactctcaattgaacacttccaaatcaataaatactaattttgtctataaaatgtacaagcccaaaggactgaaaatagtgtgttttgttaaattaattaacatgacccttaggctttgtttacccattcatttttttggctctcaaagttagtatcaaggtcaatttcatttcattctgaatgtaatgatcccaaaatttaaattaatagactcagaaccaattgccaggattccggaccggaccagctgtagtgggggggatggtaccgctgtggggcgcgggtggcttggtttggagtaggtcgcgcgtacgcactttgtgggtacatttat

SEQ ID NO: 367155 - DNA, 736 bp, Homo Sapiens
  misc_feature (545)..(630): n is a, c, g, or t
  misc_feature (690)..(690): n is a, c, g, or t
  misc_feature (700)..(700): n is a, c, g, or t
tataaatgaaataatgctgtagagatgctttttggtattaagtggatatactgttattcttaaagatgtttgaaatgaatatacctttctaaatatctttttaaaataatacattaaatgatactgctttagaattcatgaactgcatctcatgagaatatgtagagatgacgtaggcaggtaaagtaaaacttcaggttgaatatcctatgataatttaaaaatgacaaaatagtgtggtgaataatagagcttgagcactttaaggcaccatagggaccccttcaatgtaatgatgacagtgctgaggtgcagagaagttaggtaatcagcccaagccactactctaaggacagaccctatctacttttcctaatttgtcagaagactgcctatgatactactaataaaaagtcctatgaaattggtattgtcattattttacaaataaaataatcttcaatttttgtttcctctatgcatgggttacttagtattttgtaatttgaatttcaagcataattaaaaagaaatcaggtatctannnnnnnnnnnnnnnnnnnnnnnnnnnnnnnnnnnnnnnnnnnnnnnnnnnnnnnnnnnnnnnnnnnnnnnnnnnnnnnnnnnnnnatcttttgttgatctctacactggattgtattctctcttttaatctatggaaagtttaangattttttcntgatactaccaaattggtccagtttttttaaaatac

SEQ ID NO: 367156 - DNA, 1063 bp, Homo Sapiens
  misc_feature (602)..(611): n is a, c, g, or t
  misc_feature (991)..(991): n is a, c, g, or t
  misc_feature (1011)..(1011): n is a, c, g, or t
  misc_feature (1029)..(1029): n is a, c, g, or t
ttaaacccaaaccccctttaaggcatgttggtctcaaggggatttgggattgaagcacagctttctgttgaggaaacctaggtgtcactttttagaacattaagaagaaagttgtagggtgggcttttccatttaaaggaatgtgatgatcctaggttctgatgagtgataggtggtctccgtttataccctttcttctttggcacctgtaagttcgggtagtggccatcttacattctcatgtcctgctggaagtgcctagttgcctgcaaagccagctaaggcttattatttcaaaagaagattatttaaaacatgagtgacaggtagtcagaagagaacaaaaggacgcaagatactctatagccaagtcagcttggaggcaggatgggttgctgagtgaagtcgccgctcacttttggattcttatggactgtgagttagtcttccctctacacggagtcacaggaagggtataaatgcatgttcctgaggtgccctcccccaaagaatgtacctgcactcaaaccaggatctgtttttgctgttttaatcataaatagactagttagtagaagacttttgaagaacaaagtaaaacnnnnnnnnnncattaaaagatgtcccagaggaaaggccctgtgcagccagtatattctaatgactgcctggaccatgtcctaatatggtggttttaagttgttggccaaaatcctttaaagacatacgaaacatctgccaactttttagcgaacttaacaggtttcactgacgttttcctcaatttttgaatttaggtggggatttgctttcatgtcctgtttcaaaaaccaagtgtctcttgacagcccactgggttcttcctgtcctcttggctctagtctgtatcaggaaaggcaggaatgactgtactttggttttacaaacaaccacctggatagggacgggacactccacggaggtaagggaaagggcacgtggcccttggagntttgaatggggaggcaggcntttgggagggggggcagnccactggccctttcgaggggagaggcagtttttt

SEQ ID NO: 367157 - DNA, 1347 bp, Homo Sapiens
  misc_feature (1060)..(1060): n is a, c, g, or t
atcaggccaaatcggccgagctcgaattcgtcgagagcggatcctggccgctgagcgcagcggccttggccgggctcagctcgcgtcctgccgcagtccctccgccgctagtcggagcgagcgcgagtgaggagacccccgccgggccactggcacttgcttctgcggcgagtcccacccacgaccgcagcccagcaactcgcaaacgcaacctgaagcctgggctgcgcagtgtgggagggcttcgcgatcttgggggacccattccgaacttgcagaggaccgtagctctcctggcctggagagtgtgaacaggattgtggactcttccaagattcacaatgatatggtgaatccaaagactggaaccaaaaagatttactcagtgctttagttttaacaacagtaaattgtctaccaacacccatcatggctaaaagtgcggaggtcaaactggcaatatttgggagagcaggcgtgggcaagtcagctcttgtagtgagatttctgaccaaacggttcatctgggaatatgatcccaccctcgaatcaacctaccgacaccaagcaaccatcgatgatgaagttgtttccatggagatactagacactgctggtcaggaagataccattcagagggaggggcacatgcgatggggggaaggctttgtgctggtctacgacattactgaccgaggaagttttgaggaagtgctgccacttaagaacatcctagatgagatcaaaaagcccaagaatgtgactctcatcttggttggaaacaaagctgacttggaccactccaggcaggttagcacagaagaaggagagaagctggccacagaattggcttgtgctttttacgagtgctctgcctgcactggagaagggaacatcacagagatattctatgaattgtgtcgagaggtgcgtcgccggaggatggtgcagggcaagacgaggcgacgcagctccaccacgcatgtcaagcaagccattaacaagatgctcaccaaaatcagtagttaggcagcccagctgaggtggaacaacttaattnggaaacactcttccccttctgttcccctttcaaaaataaaacaaaatattgcattctttgtttggattccgagaaatgtctgggctttcccattgttttctggccctctaataagtttggggagtttttgccgtgtttttatgcaattttcagtgcttaaaaattttctttcctttccccgcttggaataaaaaaacactcctaaatggccattttgaaacatggtaatccccccgaaaaattcctggaaaaggaactgggttttaattggttaagaccctattttc

SEQ ID NO: 367158 - DNA, 2443 bp, Homo Sapiens
  misc_feature (236)..(274): n is a, c, g, or t
  misc_feature (1602)..(1635): n is a, c, g, or t
  misc_feature (2221)..(2221): n is a, c, g, or t
  misc_feature (2250)..(2250): n is a, c, g, or t
  misc_feature (2318)..(2319): n is a, c, g, or t
  misc_feature (2372)..(2372): n is a, c, g, or t
  misc_feature (2376)..(2376): n is a, c, g, or t
  misc_feature (2413)..(2413): n is a, c, g, or t
ctgggccgcggctacccagagtcaggccacggagcttaggagaccttgggtcagctctgcaaaggggtgtttactgaatgcttctggtatctgcagccccgctggggttcggacagggggtctggaatagggcttcacaactacagcagggctaggaccctcttgggctggaaggagctggagaggcctctgcaagctgtcacaggctcttggtgctggcactggctcaggctttnnnnnnnnnnnnnnnnnnnnnnnnnnnnnnnnnnnnnnnggacaggcacccccttggtggccttcacagtttcaccttcaggctcaaagctggctctgcaggggacatgagaggcacaccgaagacccacctcctggccttctccctcctctgcctcctctcaaaggtgcgtacccagctgtgcccgacaccatgtacctgcccctggccacctccccgatgcccgctgggagtacccctggtgctggatggctgtggctgctgccgggtatgtgcacggcggctgggggagccctgcgaccaactccacgtctgcgacgccagccagggcctggtctgccagcccggggcaggacccggtggccggggggccctgtgcctcttggcagaggacgacagcagctgtgaggtgaacggccgcctgtatcgggaaggggagaccttccagccccactgcagcatccgctgccgctgcgaggacggcggcttcacctgcgtgccgctgtgcagcgaggatgtgcggctgcccagctgggactgcccccaccccaggagggtcgaggtcctgggcaagtgctgccctgagtgggtgtgcggccaaggagggggactggggacccagccccttccagcccaaggaccccagttttctggccttgtctcttccctgccccctggtgtcccctgcccagaatggagcacggcctggggaccctgctcgaccacctgtgggctgggcatggccacccgggtgtccaaccagaaccgcttctgccgactggagacccagcgccgcctgtgcctgtccaggccctgcccaccctccaggggtcgcagtccacaaaacagtgccttctagagccggggctgggaatggggacacggtgtccaccatccccagctgggtggccctgtgcctgtgccctgggctgatggaagatggtccgtgcccaggcccttgggtgcaggcaacactttagcttgggtccaccatgcagaacaccaatattaacacgctgcctggtctgtctggatcccgaggtatggcagaggtgcaagacctagtcctctttcctctaactcactgcctaggaggctggccaaggtgtccagggtcctctagcccactccctgcctacacacacagcctatatcaaacatgcacacgggcgagctttctctccgacttcccctgggcaagagatgggacaagcagtcccttaatattgaggctgcaccaggtgctgggctggactggccatttttctgggggtaggatgaagagaaggcacacagagattctggatctcctgctgccttttctggagtttgtaaaattgttcctgaatacaagcctatgcgtgacnnnnnnnnnnnnnnnnnnnnnnnnnnnnnnnnnngagagaaacacggacacaacgagccaagcaaaaaaccatacccgcgtgcgacaaccgctacaacaaaacgcgcgaacgacctaatgcagccacacgaccatttccgtgggcgtccggtaacagatccgcaaaaaaagccaatcaaaactctcaggctgggggcgccggcgccgccgtataccgccaacatcgcctttgcccgtaacactgcgcccctgctgcgggtctttagtaacacacactcagcgccttttgacgatccgccgccgccctaaatatatgacggccgggatgcgagtacccaccacacttttcctctaagacgccacacccccacgcgccgccacatccatcgatggtgtttcatctccctgccacttcatccccagaaaaaacacacgcccccgcggggacccttccctcggaccacgaacagtggtagacggcacgcccgcaccccgcacgcccgctcactatcggtgcgagcgcgtcctagagagacgagacatttgacgctactcagcgacgaccctccctctgagagccaacgtacgatgcagagaacctatcctgccaatacgaagancacaccgtcatctcacgaccgatatctanagcccgcatctgcgtataccgcagcgcgcacgggcgcagcatgtactgaaccgacgtcggttgacatnnacagtatctcgtcgagtgcgacacgaatgatatcacatcctatcagtaccccncctncgcgacgcgtcgatatctcttctctgcttcgtctgancactatcatacaacatatatgcactccgcc

SEQ ID NO: 367159 - DNA, 830 bp, Homo Sapiens
  misc_feature (16)..(16): n is a, c, g, or t
ggctttttaccccggncgggtgcgcgatactcgatataatatcaagtatgataggcaatcggcagctcaatcgtcgaacggcgctctggcagcggctgcagcgggtgctcggcgccggctcatggcaactgagggcgagaagcaatgtcaggctgactcggaggaggcaggcgagcagttctcgaagagggccggagcctggaacggctcctcgtcgtagggcgcgggcagcgcgaagatctcgccgccgtactcgaactcttcgtaggccgcgggcacgaagccgcgggcatcgggcaggagctcggccggggcgcgcagggagcgctccacgttgcccagcggctccgccggagagggctcgaagtccatctccgggatggcctgcaggggcccggccagcgccttcacgtcctgctcggccgcgcagaactgcgtcggtgccagaaggctctcgggccgctcgtgcttcctgccctccagctcccagtcactgggcttcccgggctgcatgctctccatcaggctttgctgctgttggcttttcttcactgggggcatcagatgtctttagggggaaaacagagtacaaaagagctgtgcttacggccggttagtgcaggcctctcgcctgccggcgcccctcggggccgcgctccgaagcgcctgtgcatgccaactcccgagctccacaaacttccactaaggcgctcccacgaacccccgttcccaggcggagagtggacaaggcagtccgtcgagcggaggcccgaaggtattgtctgagcttctgggaaatggcctgcgggccagtggactgtcatcacccc

SEQ ID NO: 367160 - DNA, 426 bp, Homo Sapiens; identical to SEQ ID NO: 264749

SEQ ID NO: 367161 - DNA, 762 bp, Homo Sapiens
ctgggagccttagccgcggggcttgagaccaggcagcctgcgttcgccatgaagcgacccaaggagccgagcggctccgacggggagtccgacggacccatcgacgtgggccaagagggccagctgagccagatggccaggccgctgtccacccccagctcttcgcagatgcaagccaggaagaaacgcagagggatcatagagaaacggcgtcgagaccgcatcaacagtagcctttctgaattgcgacgcttggtccccactgcctttgagaaacagggctcttccaagctggagaaagccgaggtcttgcagatgacggtggatcacttgaaaatgctccatgccactggtgggacaggattctttgatgcccgagccctggcagttgacttccggagcattggttttcgggagtgcctcactgaggtcatcaggtacctgggggtccttgaagggcccagcagccgtgcagaccccgtccggattcgccttctctcccacctcaacagctacgcagccgagatggagccttcgcccacgcccactggccctttggccttccctgcctggccctggtctttcttccatagctgtccaggctgccagccctgagcaaccagctcgccatcctgggaagagtgcccagccctgtcctccccggtgtctcctctcctgcttaccccatcccaggcctccgaaccgctccccttcgcagagccacaggcatcatcctgccagcccggaggaatgtgctgcccg

SEQ ID NO: 367162 - DNA, 1852 bp, Homo Sapiens
  misc_feature (1763)..(1798): n is a, c, g, or t
tttgtaaagcgagatatgtaaatagcgaccatcatggctccttgtatcccccatgggttctccatgttaaccatcctgtatggaccgcccatgtgtgttctgacaggcagcttctttaatagtgagagtatgaaagaagtctttgccaggcctaacttctgtgaagaagtttgctaataattggggacccacatgctgcaaaaaggaggcattacccagtacgactactccggacccttgaaatgtgaaaatatgtcagaccatactcttaacacgttgtgcatatctgtgttggtttttaaaacctggcctgtttcttatttggttctttcagcttaaagcatatttaaaataagacttttatcactttttaaaagaaagcttggctgtcctttggcgaacactaacaatttacaatggcatggcctttgagaaaacagaagtcattttacaaattcacaatgttcctctgatttcaaatggatgccccatttaaaataaaataaaataagaagcacaacctctagcatcatttgtgttccaacaatttacaaaaagaactcacagggtttgtaaataagtaagagaatgtaagtttataattagaaaaatggcagtttatagaccttccctcacattccaatagggcatttagagcttcaggaaccctgtgggtttggaaggtcaaatataattggagggttggtcggttgaaagctgactgtacacgtcgaggcattgatgtacgttgtgtaaccgtcggtcatgatgccataaccttcatggattccaccaaacacatggagcttgggccggactcgcctctgaaccgtgtttaacagctccacacagcccactctttgaagctcctttggaacccagtctcgaaaacctagaggaggtccatgtgtcatgagtatgtcaatgccctcagggatgaggttccacttgtccagcagagactgacctctgggtaggttaaagccccatccattaaaccacggggtcccaaggtgcaccgtatatcctgaatcccttcactgttacctccgaatcttgtaagtaaatactgtttgtcaggagggactgaacattgtcaaagtcctctggtttcaattgggacacagaggggaaacggtagtagtcctgtttaacaaggtctgccatgaattccttatcaaatgtcagttcatgattcccagcaatcactattttatattcatatggcaggtttcctaaccagtcattaaacttcttaacctctgagggcagtcccagctcggtgaaatcgcctgtgtggagaaggatgtccccataaggcatctggataccatctgttctggagcgtgtgtctgagatgcagacaaaccgcgtgtggcccgctggttttggagtgtcatatgggatggggtcgaccatatgtacatgtggaggctggaatctgctctggttgatgttgtagtgcgtgaatgcctgggtggggtttgagctgtactcatccaccgttatggtaactttgccttgagaaggaatcccatgtgccatccttcctccctataggcatgagcaattcacaactttacagagcaaaagatggaagcaggcatggtgcgtttcagccaacctctgaatccaaggatctactcatcaataccgctgtgcatttctttcccgggctgcgctccggatcccggggatgccttcagcgcccggcgagcaggcgatccatagccgagcggcccgagccggctggaggagcgctnnnnnnnnnnnnnnnnnnnnnnnnnnnnnnnnnnnncagaaccttcgaccccggagcctcgtgccgaattcgccacccaggcctcgctcc

SEQ ID NO: 367163 - DNA, 878 bp, Homo Sapiens
gcacagccggcgctcgttccagcgccctcgcgcgcgccgccgccctgcgctgctgaagctggcgtcgctgccgccctcgtgccacgcaccgccgcacgcgctggagcaggaggagacgccgctgtgacgccgccggcgggaagggtccgcgcgccatggctggccgctcgcgccctttcccaccgctgccgggaaaccgaggctcgccccaaacggatttgcgtgaaaccagcccaaggttccgggcccccccaaccgagccccgcgcccggggactgactcggggaccgactcagggacctcccgagcgccaggactcagggcccgacctgcagcggctgcaggcccagcgcccgcaagcggcctgggccgagcgccgtttccaggccctcgccaggtctttgaactgcaggtaaagtggcaggaacgtcttccgtctgctcagcgtttggggatttagactcctaaagccagtacctgccccgtttcccccccaggttccgtcctgcccgcgcccggtctcagggtggcggccccggacacggcccgtccccacagacgaggtctccggcctgagctgtcgcacctggcgcggaggtcgcccggggtgccctggctgggtgagaggtggcctggcgggcggagcttgccaagaatcacggccagtccttaagtggatggtggggcccagcagctgctctgtcccccttaacaaaccagggggcatggaggggcccagggcaccgcacccctaccaggctcaggccctccaaggagaacctgctgagacccctgagcctgtcctagacccggacccttgaccctttccaccccttccaagcgtccagggcgaggcttggacagactccatggactcg

SEQ ID NO: 367164 - DNA, 1212 bp, Homo Sapiens
  misc_feature (944)..(1067): n is a, c, g, or t
aaccagacattcactcctgcagagaaatgttgccctgggagaaaaagaaatatataaagataggctatcacccttcttttgctgcagtactaagcatagcaagaaattagaatcatttacattggaaatttgaaaattccctttatatacacaactttactgtgtataaataaaaaatatttattaatgcagtgatgtccgtcagttgttttaggaatggcttctgcaattagaaaaatagcttgctagaatgtaaatgttctgttactggtaaatgtactgcacacattcattggacgttaaaacaagtgagtagccttttttacctgccagcagcatggctgtgtgcagccactaggctgaggacaataaattaccaaaaattataatgtaccgagctgaaaatgctcagtacattatgtggcatattctgggatgtgatgaggaaatctcattgccatttggggacactgacatcccaggaagtaatccacaactgctttgcaaaagcaaagtgactgctcagatgaacagagcagagtactcactcactatggtggcatcagctgcaaagcgaaatgaactgtcccatgatcatgttgatggttttctagatactgccaacatgttagctctttctgatgctgatgagtttcaaacacgaacagacacccttgatgtgggtttgctaagaacatagaagaacaggaagaaaagttgccaggttcacacatcccaggaaaaaagaagcataaaaagcattagcagtcagtgactgatgataatgctgcaataatgggaatggtttggtttctaaaccaaattatttctaacatcaaatcatttatggctttgtttctaaagcaatggagtcactaagtttgtgaactgtaggagaacaccatcaagatcgaatcctgtgttaagcagaaggtaaaaccagnnnnnnnnnnnnnnnnnnnnnnnnnnnnnnnnnnnnnnnnnnnnnnnnnnnnnnnnnnnnnnnnnnnnnnnnnnnnnnnnnnnnnnnnnnnnnnnnnnnnnnnnnnnnnnnnnnnnnnnnnnnncttctttttatttagcaaggggtgggggccttgaaccaaattgccttggggccccagcaattttgagggctggtgggtgagccttgtgatccacacccacttggcggttcccaaaccctggggttgaacagggggccaagaaacc

SEQ ID NO: 367165 - DNA, 542 bp, Homo Sapiens
  misc_feature (399)..(399): n is a, c, g, or t
  misc_feature (498)..(498): n is a, c, g, or t
  misc_feature (503)..(503): n is a, c, g, or t
  misc_feature (508)..(508): n is a, c, g, or t
  misc_feature (515)..(515): n is a, c, g, or t
tgttctgttactggtaaatgtactgcacacattcattggacgttaaaacaagtgagtagccttttttacctgccagcagcatggctgtgtgcagcactaggtgaggacaataaattaccaaaaattataatgtaccgagctgaaaatgctcagtacattatgtggcatattctggatgtgatgagaaatctcattgccatttgggacactgacatcccagaagtaatccacaactgctttgcaaaagcaaagtgactgctcagatgaacagagcagagtactcacttcactatggtgggcatcagctgcaaagcgaaaatgaactgttcccatggatccatgtttggatgggttttctaggatacttgccaacatgtttaggcttcttttctggatgcntgatggagttttcaaacacggaacagacacccttggatgtggggttttgctaaggaacataggaggaacagggaggaaaagtttgcccgggttcacacntcccnggggnaaaagangcttaaaaggctttagccgttccgttg

SEQ ID NO: 367166 - DNA, 800 bp, Homo Sapiens
  misc_feature (13)..(13): n is a, c, g, or t
  misc_feature (40)..(40): n is a, c, g, or t
aaggctagtgtcntgggttaaaccccgcggctcccgtggnaagtccgggatggcggctctgcaggcagtgctcctcgggcgtgggtctgcaggagagccggacagggcagcggcggcactaccggctgcgattgcgcagagctgaagaagcccctgaccattgaagaggtggcccccgccccgtcgggcctcacgaggtcagagttgatgtccatttctgtggagttaactttggtgatattttgatctgccgtgatcaatatcaggaaaggccccatcttcccttcacacctggaatggacttttctgggacagtattggagacaggcacagatgtcaggacagttaaagagggagatagagttattggcacaagaaactttaattgtatggctgaagaatgcgtcactgaccagaaggacctgtggcagattccagaaaaggtctccctataagaagctgctgtcctccctataacttatggcactgcgatttttgctcttgagcattgggcccgtacccagcctgggtaatatagctgctgctggaagtgacgagaagtgcaagctggcgatgcacaggggtgcgcagtccagacgtgaactacactcagggcagcctgaaggatgctgttaggtagctggtgcgcgatggcggggtgaatgctgccatcaaaatgtgctcactcaaattggcttcacagcctggtggtggtattgagagagttattattttatttactaaacagtaactctgaataattaagaccaacctgtgtcttatggagtcagagatgtgca

SEQ ID NO: 367167 - DNA, 821 bp, Homo Sapiens
ggctggtactggtctggagtgtatgggatccgccgctgccatggcggcagctccgccgctttccaaggccgagtatctgaagcgttacttgtccggggcagatgccggcgtcgaccggggatctgagtccggtcgcaagcgtcgcaaaaagcggccgaagcctggcggggccggcggcaagggaatgcggattgtggatgatgatgtgagctggacagctatctccacaaccaaactagaaaaggaggaagaggaagatgatggagatttgcctgtggtggcagagtttgtggatgagcggccagaagaggtaaagcagatggaggcctttcgttccagtgccaaatggaagcttctgggaggccacaacgaagacctaccctcaaacagacattttcgtcacgataccccggattcatctcctaggagggtccgtcatggtaccccagatccatctcctaggaaggaccgtcatgacaccccggatccatctcctaggagggcccgtcatgacaccccggatccttctcccctcagaggggctcgtcatgactcagacacatctcctcccaggaggatccgtcatgactcctcagacacttcacccccaaggagggcccgtcatgattctccagatccttctcccccaaggaggcctcagcataattcttcaggtgcatctcctaggagagtccgtcatgattcaccagatccctctcctcctaggcgagcccgtcatggttcctcagatatctcttccacccagaagggtccaatagcaagtcccctgacacatctaggaggactcttggctcttcaga

SEQ ID NO: 367168 - DNA, 1480 bp, Homo Sapiens
gctggtccggtccggagtttaggatccgcccccaggacgcgttgttcgctgccggagtttggggtggcaaggaccgggcgcacggctgagatgcgctgccctccagaatgcgagcctgtgcacgcgcctgcggaggggccacactccctgcagcgtccgcgatgcgctgttcccgctggcgctcggcgggcgctcccctgggcacatcgaggctctagtgaccgcattatgaattagtcctttccttttctcctcatgtgattgcagcgagcgctcgtcttgtttgtaaatcgtgctggcaagccccgttttaaccaactacgaatttcatttcggaatgaaaaaggagacgcactttcggacagggcagcggttgccgccggtccttcctctgagctaccggtccctagaaggaagacctgccttcgaccgatctggaaatgagtcccagctgcaagcccagggcggcggaagccccacgggccgagccgaagaaagacgaggcgggggacggggagcgtagtgccgcgtgccgggacccacaacccctttcccctgggcgctcttccccgagcggacaggaaaaagctctcctttgccgctgcccatcccccagggcccaagcgatgcttcctaaccgcgtggacgcagcttgatgggggagaaagagctctgggagcagggcttagagcctcgtctcgcctcctgccaactcggtccggcaaggttccgaacctccctgagcctcagcttcctaatctggcaaacatgacgacaaaagtccttctcttttaaggttggtgcaaaaattaaatggccctttactgtatatttagagcacctggctcacggattagtcacctcgctcctgggctcaacagtgttcactgggtccttacagcatcacactgggatccttaagggcaaagaccaaaattagacctagcttaattcctggtgtgcaagtgctaagtgttatgaaatgagtgagtgacaggatgatccagctatgagaaataggagagagtttgcggtgggatagagactgtaccttctttttgtataagatgtttggcagttggggataacttaccggaagcaagcttaagatgcacacgaaatcctgaccaagaggatgtagaaattagatatatggccaagaatcagagaagcaaataaacagatctcaaataaaatgtttagttctgaggttagaggtgggatatcagggtaaccaggcaaaataactgatacaataaataactacattgacaaatcacttctctcaacaacacatttcacaaaaatcactttatttataactgcaagattttcttcaaacccagttctggctattacaagctcaaaaacttatcctgctctggtgggcaacatttgtgactcatgctgtgttaacaaagacctgtgttagaccttgacgtcgaatatggggatgctactgacctaaaggagaagttcc

SEQ ID NO: 367169 - DNA, 895 bp, Homo Sapiens
  misc_feature (18)..(18): n is a, c, g, or t
ggctgtacggtcgaggangtagggatcccagccccatgtggtgacctctttgtcaagagctggggaacgggccagcctggggaggtaagactgcatcactcccctcctctcccttcctgtgtggcccttgtgaatcagcctccccactctccttggtcattctcaagagtatgagagacagagctccaggcatgtcccatccccatgcacatgtggtaacacacacctgtatcacacatgtgcttacatttccactcacatgcacctctgagcctcccttgctgtcttggacctgtctgttgggtttagtccgtggacatttcagagggagatccccctcccatttaactgtcctcacaggcccttgcctaggatggatgaccaacactgcactcaatgagccagcctctcttttgggggaatcaagcatttgcttcctctagactacagcagggaaagggaggagaaatctgatgtctcaactggcacatgaagcccattcttggaactatgcaaagggcagaggctgggagtttggacgcttagctcctacccctgtcctacctcaccggggcactttcagggtccagggcctctgaagtctctaggcctatatgggacaatcaattctgactgagctcccccattcccctcgggtgaggatgactgttatttttgtagctgagaacgtggaatcccacgggtttttactgcccttcacccaacctctcccacctccaccccacaatgaatgtatttattgtgagaatggctacacttctttaggaatgcccccacttacaaccaggtgggtggaacaggcatgtgacagagtggggagcctgggctcagctcctccccctgccgttggttaataaacaccctttttcccccc

SEQ ID NO: 367170 - DNA, 765 bp, Homo Sapiens
  misc_feature (106)..(106): n is a, c, g, or t
  misc_feature (379)..(379): n is a, c, g, or t
ttaccggatcgagccccgagagctccgcgcacctgggcgccatccgccctggctccgctgcacgagctccacgcccgtaccccggcgtcacgcgcagcccgcggtngctcgcacagcctgagactcatctcgcttcgaccccgccgccgccgccgcccggaatcctgagcacggagacagtctccagctgccgttcatgcttcctccccagccttccgcagcccaccatgggaaggggcggtagtgagtggccttttaccaaagggaccggcgatgctctgcaggctgtgctgggctggtctcgtacagcttggctgttgcttgtttgctcggctgcctgctctttcctgagggaagggcggccaagcccgcagggagnaccccacgggcccaccagcctttctgggctcccccaacaccccgtacacagccggtgtacaaccaaacacacagtgtctagcgcctctctgtcccctgacctagccgacaccgacatcttcttgacctatcgtcactgacgaaatttctctatcttgctggacgacctatcaggctgtatccaaggataccttcttgctcctggacatcaagtaacagcctggtcacgtggagcgacgatgcggctaatccgcagcacgatggggcagggaggggggaatgggcaaagggccggcgagatgaagcgggaagaaccaccaaagggtggcgagaaccagaataccccagcccagcatgcatggctatcgagagtaggaagaaacaaaa

SEQ ID NO: 367171 - DNA, 1128 bp, Homo Sapiens
cgggcttgtatatcggtttcgcgcctgacagcagcagagatccttttgagtgtatagaccaaggaaacatccgcccttccgatagtctctcgactgcaagcatgctacttaacgtgtgagtttccatagtgccatcccaggtccaaggtcgggagatatttccaccaccactgtacggggtttgcactgtgggaagaaccctcctccactcgatgcagtgatgctcagtgttacagccagtaacgtgtatgcccagcacaaagggcgttggctgctctctcgttattaaacacccggatctgatcgaatcctgcacaaattcccgctgaccatacggtgagtaataagatgcagtcttctgagcatcaccaaaatcatagaccacagggatcaccgggccattgtcagtccaacacgtccctgatccatatttcactggatatttctggtagatgccaaacagattatgtcccagtgtctggaggaagccagtgtccgtgcggtacctcagcagggagctgtttctccagtgctgcatgggggacttattgggcacgtgccagatgcccaggtccttggcctggatgtcgtagtagccagggttcttgtagtcatcgctcgtggccgcctctgcagatccaaaggtgttgtagttggcccagttgccgtccccctctgggtagactgctttgctgccctgctgactggaccagcgatcgcccaccgtgcacttcccacgcatgtcattctcatgcacgctggccaccagggtccagccgccacccccagaggtcatgtcacagaaggtctggtagataacaccattctcagtgcggagaaaatacaggccatcaaatgcactaggacattcgtctttgatttccttgcagcttctgggcagagatggagacgaagaacaggtccattccttgaagtaagtattagcctcatctgtactccatcctctggtggtcgctatgagaaacagcaggaagctgagttggttcattgtaatcttgtctgagtctcagctgcactttccttgggtacagagagctccttcactccctccctccactgcgccctggagctcaacagagtgcagctttctccaaaaacgctcctccc

SEQ ID NO: 367172 - DNA, 1139 bp, Homo Sapiens
ggctggtacggcccggaagtagggatcaatcatggatcaatagctatgttggagaaggaattgtggctgctccagctactgggcatttgtctggtccagttcatgtaatctcccaacaccccatgaagcaaggcttgttaatcctattttactgaaaatgaactaagactcagagagataaagctgtgcccaatgagccttctttctgccctccagatccacggtgctaattccccttccgatgacctaatgattctgagcttggcaaaggtcttatctcccagctcgcccaggcccagtgttccaggaatgtgacctttgctgcagcagccgctggagggggcagaggggatgggctggaggttgagcaaacagagcagcagaaaaggcagttcctcttctccagtgccctccttccctgtctctgcctctccctcccttcctcaggcatcagagcggagacttcagggagacagagcccagcttgccaggcactgagctagaagccctgccatggcacccctgagaccccttctcatactggccctgctggcatgggttgctctggctgaccaagagtcatgcaagggccgctgcactgagggcttcaacgtggacaagaagtgccagtgtgacgagctctgctcttactaccagagctgctgcacagactatacggctgagtgcaagccccaagtgactcgcggggatgtgttcactatgccggaggatgagtacacggtctatgacgatggccgaggagaaaaaccaatgccactgtccatgaacaggtggggggcccctccctgacctctgacctccaggcccagtccaaagggaatcctgagcagacacctgttctgaaacctgaggaagaggcccctgcgcctgaggtgggcgcctctaagcctgaggggatagactcaaggcctgagacccttcatccagggagacctcagcccccagcagaggaggagctgtgcagtgggaagcccttcgacgccttcaccgacctcaagaacggttccctctttgccttccgagggcagtactgctatgaactggacgaaaaggcagtgaggcctgggtaccccaagctcatccgagatgtctggggcatcgagggccccatcgatgcc

SEQ ID NO: 367173 - DNA, 466 bp, Homo Sapiens
  misc_feature (349)..(349): n is a, c, g, or t
  misc_feature (446)..(446): n is a, c, g, or t
ggcgtcgaagggcttcccactgcacagctcctcctctgctgggggctgaggtctccctggatgaagggtctcaggccttgagtctatcccctcaggcttagaggcgcccacctcaggcgcaggggcctcttcctcaggtttcagaacaggtgtctgctcaggattccctttggactgggcctggaggtcagaggtcagggaggggccccccacctgttcatggacagtggcattgtttttctcctcgccatcgtcatagaccgtgtactcatcctccggcatagtgaacacatccccgcgagtcactgcagagagtggatggtagtgagtctccagcagcagggggcancccagcccacccacctgggctctgaaacacaccttggggctttgcacttcagccgtatagtcttgttgcagcagctttggtagtaagagcagagttnttcacactgggcacttcttt

SEQ ID NO: 367174 - DNA, 668 bp, Homo Sapiens
gcgacggggcggggcgcggagccccagccgagcctagccctgcccggccccggaggacttgcaacactccgaggccaggaacgctccgtctggaacggcgcaggtcccagcagctggggttccccgtcagcccgtgagcggccatgtccaaccccagcgccccaccaccatatgaagaccgcaaccccctgtacccaggccctccgccccctgggggctatgggcagccatctgtcctgccaggagggtatcctgcctaccctggctacccgcagcctggctacggtcaccctgctggctacccacagcccatgccccccacccacccgatgcccatgaactacggcccaggccatggctatgatggggaggagagagcggtgagtgatagcttcgggcctggagagtgggatgaccggaaagtgcgacacacttttatccgaaaggtttactccatcatctccgtgcagctgctcatcactgtggccatcattgctatcttcacctttgtggaacctgtcagcgcctttgtgaggagaaatgtggctgtctactacgtgtcctatgctgtcttcgttgtcacctacctgatccttgcctgctgccagggacccagacgccgtttcccatggaacatcattctgctgaccctttttacttttgccatg

SEQ ID NO: 367175 - DNA, 1782 bp, Homo Sapiens
  misc_feature (1189)..(1253): n is a, c, g, or t
  misc_feature (1295)..(1340): n is a, c, g, or t
cacgatatgacccgcctaaatgtacttcaggtaagaaggacactgacatgatatcttactgatcaaatgtagtcagtaggtatatatgaacttttttctctgtgaagaaaagctattaataagtttgacttaataggcctatagtatgcacatactggccaagattctaaatggattattcagcggttctgtttttgtggaggtgcttattctcatttctccaaagccttaagattcctgggaatagaggaaatgttgctgccaccagctttgctggtgaatttcaaagagaataggtgtttgctgtttgatttctagtgaccttttggcgagctctgatttataggtagaacatttgtgtttcttttcattttgaggccaggtggtagagtggaaagactgggagctgtcaggaaaccaaggcttggatctccactctgttatgtaccagctggggcaaatcagggcccattcccaactcctttaaaatgaaaggactagacttggtctttaagctcccttccgattctaacatttggtggtagcaggattgtgcacaaagctcctaatttagagaaagatctgggttttagtcttttctcctctatcgccgccttaccggttgtacaacattggaccagccattctccccaaggcctcggcattttcattgttaaatgggaacactcctaattcacactgttgctgtgaggattacatttggtaatgaatgatagaatgctttgtacatggaaaaggactatacctttcttttttaactacaaaggcgaacatgtaaccctctacctgtgggcgcacatttgctgtggtgttaacgttccactggtagcgcccaacctcccttcattcaagcacattttacgggcctacagggaaggttttcttcctgtcctctcctaagacttgtttatgttcatcatctcttctatactagagctgcagtcttacatttgcttacttcctgacatccacccccaccccagtgatttctccccatctccacctctatattatttgaactaaatgaattcatgaatgaacaaatgagtggatgaatgaatggtaatggataatggggctatggaaggtcataatttaaaggcactatcttcattctaaacaaacaatctgaaattaaattaacttacaatgattcaaaaaaacaaannnnnnnnnnnnnnnnnnnnnnnnnnnnnnnnnnnnnnnnnnnnnnnnnnnnnnnnnnnnnnnnnaaagaactacacaccgccggggggacaccccccaaattaccnnnnnnnnnnnnnnnnnnnnnnnnnnnnnnnnnnnnnnnnnnnnnnacaaagcgcgcgcgcccctcacacaacacccccgcacgacagggccagcacttcataacacacgcctcccgaccgcgacacacgccactcacccgagccaacccctgccacaagaacaccccaacccactgcgcgggaacaaaaccgagagcaaccaacccacctcaataattgaagccacccggaggcaaaaccaacacacgcccaggggcaccacggggacaacacagccgccacactcgacgccgcagacacaaccccccccgacgcactccccacaacacacaccgccgccagccaaccacccgacacacgcgacgccgccacgacacacgagcgcacgccccgacccccacgcacgcccccaacagccacacgccaacacgactggccacaccacacaccgacaccgaccccagtacccaagacacacgacgaaaca

SEQ ID NO: 367176 - DNA, 735 bp, Homo Sapiens
  misc_feature (95)..(158): n is a, c, g, or t
  misc_feature (260)..(273): n is a, c, g, or t
  misc_feature (671)..(671): n is a, c, g, or t
  misc_feature (707)..(707): n is a, c, g, or t
  misc_feature (718)..(718): n is a, c, g, or t
tccttaacaaaaaaaagtagagccagatgtatctttttgggtcccaggcaggagactggagaatctgggtcactgtaatctggcagactggctgnnnnnnnnnnnnnnnnnnnnnnnnnnnnnnnnnnnnnnnnnnnnnnnnnnnnnnnnnnnnnnnnttttaatagaaaccacatcacttcatttgttacagcgaataattcaagagggtcccagaaagctttttcatccacagaattacagagcgagactccgtctcnnnnnnnnnnnnnntcgcattccgtctaaagcaagctacaaaatgtgattatttatgtcacgatatgacccagccataaatgtacttcaggtaagaaggacactgacatgatatcttactgatcaaatgcagtcagtaggtatatatgaacttttttctctgtgaagaaaagctattaataagtttgacttaataggcctatagtatgcacatactggccaagattctaaatggattattcagcggttctgtttttgtgggaggtgcttattctcatttctccaaaagccttaagattcctggggaatagagggaaatgttggctgccaccagctttgcgggtgaaaattttcaaagagaaatagggtgttttgcctgttttgatttccaagtgaacctttttgggcgagcncctgatttataggggagggaaccatttgtgttttcnttttccatttnagggccggggtgggtag

SEQ ID NO: 367177 - DNA, 479 bp, Homo Sapiens
  misc_feature (14)..(14): n is a, c, g, or t
  misc_feature (49)..(49): n is a, c, g, or t
  misc_feature (118)..(118): n is a, c, g, or t
aacaatggggtaanggaaggatagaaagcctttggtaacaagggaaaanggactataccctatctttttttaaactacaaaggcgaaacatggtaacccctcctaacctgtgggccgncacatttgcctgtggtgttaacgttcccactggtagcgccccaacctcccttcattcaagcacattttacgggccctacagggaaggttttcttcctgtcctctccctaagacttgtttatgttcatcatctcttcctatactagagctgcagtcttacatttgcttacttcctgacatccacccccaccccagtgatttctccccatctccacctctatattatttgaactaaatgaattcatgaatgaacaaatgagtggatgaatgaatggtaatggataatgggctatgaagtcatatttaaaggcactatctcatttaaaaacaatctaaataaataactacaatgataaaaaaaa

SEQ ID NO: 367178 - DNA, 541 bp, Homo Sapiens
  misc_feature (454)..(454): n is a, c, g, or t
  misc_feature (531)..(531): n is a, c, g, or t
acgatatgacccaggccataaatgtacttcaggtaagaaggacactgacatgatatcttactgatcaaatgtagtcagtaggtatatatgaacttttttctctgtgaagaaaagctattaataagtttgacttaataggcctatagtatgcacatactggccaagattctaaatggattattcagcggttctgtttttgtggaggtgcttattctcatttctccaaagccttaagattcctgggaatagaggaaatgttgctgccaccagctttgcgggagatttcaaagagaataggtgtttgctgtttgatttctagtgaccttttggcgagctctgatttataggtaggaacatttgtgtttcttttcattttgaggccagggtggtagagtgggaaagactggggagctgtccagggaaaccaagggcttgggatcctcccactctgttnatgtaaccagctgggggccaaatccaggggccccattccccaactccttttaaatggaaagggactaggacttgggnctttaagctc

SEQ ID NO: 367179 - DNA, 1029 bp, Homo Sapiens
tggtaggacttttgcttttgaggttttcagggcccctagtgggcctgtgttattggtgtccccggcagtgtccggattccaccttgcatcacccgcccctcctggttcctgtcccccatggattgtggccctagtttctgtctgcctgtgctttggtcgctattaccagctgctcagtttgtacataggtatatccagctaaagtgacttgctcgtccccttaacagagagaagaggggacaaatttggttgtgaagtaaacaaggaacacagccggctaaactctccaggggcaggtaaagcccctgctgggctcagaagcactatagaatttgctgtacacactgaagtgggcctgtgtcacacaggtatttcttggtcctctggagagcagaggactcactcagctctttgcttcatgcctcgctttaatggtagtaaacacttaaccagtggaatagtctgactgctggtactgatggcatcagaagaaaacaggttaacaatcaagtagtgaaagcactatattctagtcattaactcaacggagccagtctcaactctgctgggagcacccacaggtctctgtgggggagacagggactataacagggaggcagaattcaggttggcttgacaacacaccttaggaacatgtgctaaggggctaaggaggcatcagctgtcttccttattctaccagggctgaaaatcggagtcacttaggaggcagcatgagaacagtggcacaccaccagtgaggcacatgttgcctttttgtctttaagcaacaccttagacagggcctgaacctgggtgggggcactggatgcctgaagtaagtaagttttctcagtggggcagtctcataaaatcaccaggacattgaccacctgacctcccctaactagtgctggccaaggcctgagagttcacagaacctgctaggtcttaagagccaaaggaaggaagtggttgagggccaggaaagagaaggaatgtcaatcccaaaatcccggccgtaccagc

SEQ ID NO: 367180 - DNA, 1014 bp, Homo Sapiens
  misc_feature (299)..(307): n is a, c, g, or t
  misc_feature (969)..(969): n is a, c, g, or t
tgtgggggaggacgcgcgctcgcgcgggattttcaagcgtaggcccccgggaactcgagctgccatgagcctctgggtggacaagtatcggccctgctccttgggacggctggactatcacaaggagcaggcggcccagctgcggaacctggtgcagtgtggtgactttcctcatctgttagtgtacggaccatcaggtgctggaaaaaagacaagaattatgtgtattctacgtgaactttatggtgttggagtggaaaaattgagaattgaacatcagaccatcacaactccatctnnnnnnnnncttgaaattagcaccattgcaagtaactaccaccttgaagttaatcctagtgatgctggaaatagtgaccgagtagtcattcaggagatgttgaaaacagtggcacaatcacaacaacttgaaacaaactctcaaagggattttaaagtggtattattgacagaagttgacaaactcaccaaagatgctcagcatgccttgcgaagaaccatggaaaaatatatgtctacctgcagattgatcttgtgctgcaattctacatctaaagtgatcccacctattcgtagtaggtgcttggcggttcgtgtgcctgctcccagcattgaagatatttgccacgtgtaatctacctgtgtgtaagaacggaaggtctgaatcttccttcacaactggctcatagacttgcagagaagtcttgtacgaaatctcagaaaaagccctgcttaatgtgtgaagcctgcagagtgcaacaatatccttttactggcaagatcaagaaatccctgagacagattggggaggtgtatctgaggggagactggcaaatggctatggtcacgtcagcaaattcccagaaaggctccttgtaaggtccgtgaaagggctgtatgagcttctaacttcatggtattcctcctgagattataaatgaaggagccttnttcttcagaactggtaccttacattgggactgaccacttggaagg

SEQ ID NO: 367181 - DNA, 1086 bp, Homo Sapiens
gtctgtatgattccatttattccctatgtccagatacaagcaaatccacagagacagaaagtggatgagtggttgccacaggctggggaagaggaaggacggggcttaggaccctgggcggggccagggccgggtctccttagggcccgccccagcgaaggggcggggcgcagatctgtttccctcagactccatctgcccggggccgctaagggagcgcaaggtcaagttcgccttggccccgcctccagctcaggtactagggggtctagacctgaggctgcccgggccggaggcagccttgagtcccgagaccaaacgtcgtttccctctcggacctcgggcgccgggccgcgcgctgaccgacagcccctgctaggcccagcaggtcccctagtcccccgcagtcccccgagactcgccgagcgccgttgctgagccctgcaaatagcagctacctgcttcagcctagatcctgccatgaagcggactgctgctccctggctcccactctgatctgcttttcactcttgccttgtctcccaattaataagcagggtggcccactgcaacacggtgtggatgtgcctgaccaagatgaagagccgaactacctgtggtgctcctggcctgtggcctcctttaaccccatcacccaacatgcacctgcgcatgtccgcaggtggcccgacgactcaccctacccacaccggcctgtaccaggtcctcccggctatcctctctccctgtcaacgacacctatgggcacgaccgacctcgccgccttctcatccccgcgtggcccatggcccggctggccctgcccgcacctccgactgcctcctggttcggcccttggcgcccgtgaccccgcccccgtggcctggcccccgctgcacggtgctgccgtctcttccccgtctcctgcctcgcatctccggctcccttcgccgtgccgaccctggcaacgcccctccctcctcaccctgcccctcgtcctacgcgcgcttcctcggcgcccgctcgagcccctgccccgccgtcctgccgcctcccctcccggcccgcggcgcgctgccgccgtct

SEQ ID NO: 367182 - DNA, 1206 bp, Homo Sapiens
  misc_feature (68)..(105): n is a, c, g, or t
acacaccccacccggggatgatacgactcactatgggcgaattggagcgcatttttgtgcgcggccgnnnnnnnnnnnnnnnnnnnnnnnnnnnnnnnnnnnnnnatcaggccaaatcggccgagctcgaattcgtcgagagcgggtagctgtcgctttccggccaacacagaggtgcctgaaggctggttggggtggtgaggcccgaggcagctcttgttcagcttctggaatttctgagcagccctcgtcagtacaagatggaccccgtagtcttgagttacatggacagtctactgcggcaatcagatgtctcactattggatccgccaagctggctcaatgaccatattattgggtttgcgtttgagtactttgccaacagtcagtttcatgactgctctgatcacgtcagtttcatcagccctgaagtcacccagttcatcaagtgcactagcaacccagcagagattgccatgttccttgaaccactggacctccccaacaagagagttgtatttttagccatcaatgataactccaaccaggcagctggaggaacccactggagtttattggtctacctccaagataaaaatagcttttttcattatgattcccatagcaggagcaactcagttcacgcaaagcaggtagcagagaaactggaggctttcttaggcagaaacaggagacaaactggcctttgtggaagagaaagcccctgcccaacaaaacagctatgactgtgggatgtacgtgatatgtaacactgaggccttgtgtcagaacttctttaggcaacagacagaatcactgctgcagctactcacccctgcatacatcacaaagaaagaggggagaatggaaagatctcattgccacacttgcctaaaaagtagctatctgacgtattattgcgaccttttggggggtccctctttctggccttccccatttggtggattggtgcaaatctcagtgcctgaagggaagatgccagtagaagaaagcgttaatacctctttttcctggaaagaatattctcccctgggttaatacccatggaaaggttctaccttataccccgaatggggggccacatgtgtcctgtgaaaaaatcttggcacatgtgtccccaatactttcaaccactatttgtgacactttttacacacggggtccgtcaaaaatccacataggggt

SEQ ID NO: 367183 - DNA, 887 bp, Homo Sapiens
  misc_feature (787)..(823): n is a, c, g, or t
cacctctttagcaccttccggaagccatgccttcattagcaccaatcggcccccttgtacaccgtgcaaaaatcaaagagccattcgttctgttaagaaaaagcctggggcagtcaaaatatcgtactatagcgcctgatgaaaggtagacatatcataaccactgggatccactgtttgtgccaaaaaacttgctgagattgaagtagtgtattttctagaagccaaatattgaataaatctctcatttgccatgcaccatgagattgatgagttgtcactaaagcccttaaacacaaccacccagctactgttttgttgcccgctcaaagagagtgtcggccatctgaggaatattaacacttggtctcgttggtagcctggatcaaatagtccaggtgctttttcttggggcccattacttcatgagtagtggctttgcagaccgctcttgctacagcagagcctgtaacgctgtactgagcggcggcgatccgatccgtgagcgtttggcccgacatcttctgtggtcgcgtctaccgcctcctcttcccgcccctgagacggcgccgaccgccagcaggatgagcggagcccagggccgccgagggaagccgcgccaggtggaatgtgtgccgaccgcgcagcagccccggtgcccccgggcgcaaagtctccagacactggccgggccccgctcctcagctccgcggtcccggcgcccaccgccctggcacctggccccccgctctcgacgaattcgagctcggccgatttggcctgattnnnnnnnnnnnnnnnnnnnnnnnnnnnnnnnnnnnnncgccagccaccgcgtaatcgcaggcccaagacagcagggcggggtggatggggtgcgcgtgggg

SEQ ID NO: 367184 - DNA, 1652 bp, Homo Sapiens
ggctgtactggtctggaattttgggatcggctcagtaccccggttccggcgctgccgggtctcggttcgggttcgttgccccggtgccgggaccgggccggtctctccggccgccccagccgggcgcagcagccggaggtgtcgggaccctctggacccaccctagcgggccccgccggcggtcggcctccggtccgggctcccagtcgcgccgtcctcgccgccccatggagtcccatgtgcgactactcgatgtacttcccggccgtgccgctgccgccgctgcgcggagctggcaggggatccgggccggtacctgggctgctgccccggcgcaaccatctgtacttgggggagactgctccgttttctgctggtgttgcgctgccgtgggcggtagcaggggtccggcaccgggggcggccgggcttgggctccagaggagcctgggcagaactggcaaccgccctggccgccctggcctcggtcagcgccggaggcgggatgccggggggcggcggcgccggcgaacaggattcggagcccccaggggaggggatcctggcgggtggggggtcggtccgaggctgcagcccccttctcacccacggcccgggccctgctacctcagggggagcgaccacgctgcctgtggaggaaccgattgtgtccacagatgaggtcatcttcccactcaccgtttcactggatagactgcccccagggacacctaaggccaagattgtagtgactgtgtggaagcgggagattgaggcaccagaggtcagagatcaaggctacctgcgattgctgcagacccgatctcctggggagacattccggggcgagcagagcgctttcaaggcccaagtgagcacgctgctgactctgctgccccctccggttctgagatgccggcagttcactgtggctggaaaacacttgaccgtgctcaaggtgctgaacagctcctctcaggaggaaatctccatctgggatatccgaatcctccccaacttcaacgccagttatctacctgtcatgcccgatggctctgtgctgctggtggacaatgtctgtcaccagtctggggaagtctccatgggctccttctgccgcctacccgggacctctggctgcttcccctgcccgctgaatgccctggaggaacacaacttcctgtttcagctgagagggggtgagcagccccctccaggggccaaggagggcctggaagttcccctgattgctgtggttcagtggtctaccccaaagctgcccttcactcagagcatctacacccactaccgcctgcccagtgtccgcttggaccgcccgtgttttgtgatgaccgcttcttgtaagtcccctggtccggaactaccaaacggtttcactgtccacctacacccctggttttaacaatcttcaaagaatttccttggcttgtgaggctccgtgggggaaccccctaacccttccccagggcttgggaaagcactcttttgtggagcaggacccccccgtgtcttttcgaggcctgccccggaaaatccgtgatatttgcacaagaccccctttcaaaaaacttggtggtttttcccccggaagagcccaccgccgtctccctctttacgggcggcccgttccag

SEQ ID NO: 367185 - DNA, 1307 bp, Homo Sapiens
  misc_feature (1213)..(1213): n is a, c, g, or t
attatatgtacgagggtagcagtgtgtgggatgaggttcgatacagcgtatttattgcttgtcatgtaaattaaaaaccttgtatttaactcttttcaatccttttagataaaattgttctttgcaagaatgattggtgcttattttttcaaaaatttgctgtgaacaacgtgatgacaacaagcaacatttatctaatgaactacagctatcttaatttggttcttcaagttttctgttgcacttgtaaaatgctacaaggaatattaaaaaaatctattcactttaacttataatagtttatgaaataaaaacatgagtcacagcttttgttctgtggtaacctataaaaaaagtttgtctttgagattcaatgtaaagaactgaaaacaatgtatatgttgtaaatatttgtgtgttgtgagaaatttttgtcataagaaattaaaagaacttaccaggaaggtttttaagtttagaaatattcatgccaataaaataggaaattataaatatatagttttaagcactgcatcagtgggagttcttggcttatgttagtttatgttagtttattatgaaaacatcaaagatttttttgactatattatcagttaaacaaaaaggagtcagatttaatttgttttttgaagcactttgagaaattaattttaattaacttaatgagcaaatttttattactactttatgttcaataccaggttcttttcatttctctggattattttgcaaatcattggacagagaatttgggaatataaatctgtaacaggtgtttgacaccagtaggtctctttatttctgggaaatgtgtacctgtactttctgatatacagtgttcctaagtaaaaatcaattcaggggatttgtatagtgtctataggaaagtagcccatgtcttgaaatatgaaaaggaatctgaaggtcatgaaaagtccagtggagaaaatctcaatgcttactgttactactaattgattcctactagtttccaggtttggggggatattgtttcaatgacgctccttaagactgttgattgcccataggttccaaataggaaattaagactcatggaacatttttaggaaagtaggattgttttctcctggttctctaaggaactacttctgcagtcttacatagtctcatccttgtttgttgtggtgcagtcgaactcctcaggcgtttngaaagcatgtgggagaccttcttccacacccacccatacccccgttcactgcgtctggaggtcttcaacagtgaagtagggcagcccacacagc

SEQ ID NO: 367186 - DNA, 461 bp, Homo Sapiens
  misc_feature (272)..(381): n is a, c, g, or t
gggccctggttaaacccggccccccgcgggtatggatcttcgctggactagacggtaccagctgctggagtgctgcaggcaggcactggcataggttgtcaacgagccccatcagccaaatgaattatttacaagttttcaagaaaggagactgcaggcagctgttggaccagacagaggatagaagcctccaggagaaataggcagtttttcaagggtttcctggtattaatgagttcatccatgaacatgtattttgatacaatttaacnnnnnnnnnnnnnnnnnnnnnnnnnnnnnnnnnnnnnnnnnnnnnnnnnnnnnnnnnnnnnnnnnnnnnnnnnnnnnnnnnnnnnnnnnnnnnnnnnnnnnnnnnnnnnnggaagacgcagggaaaataaacataaataaataacaataagtaatgagtaagtcaaggaacaaacaactaataaaaatcg

SEQ ID NO: 367187 - DNA, 938 bp, Homo Sapiens
aggatatcaggtgatgaagttcagtatggagatgtgcctgtggaaaatggaatggcaccattctttgagatgaagctgaaacattacaagatctttgagggaatgccagtaactttcacatgtagagtggctggaaatccaaagccaaagatctattggtttaaagatgggaagcagatctctccaaagagtgatcactacaccattcaaagagatctcgatgggacctgctccctccataccacagcctccaccctagatgatgatgggaattatacaattatggctgcaaaccctcagggccgcatcagttgtactggacggctaatggtacaggctgtcaaccaaagaggtcgaagtccccggtctccctcaggccatcctcatgtcagaaggcctcgttctagatcaagggacagtggagacgaaaatgaaccaattcaggagcgattcttcagacctcacttcttgcaggctcctggagatctgactgttcaagaaggaaaactctgcagaatggactgcaaagtcagtgggttaccaaccccagatctaagctggcaactagatggaaagcccgtacgccctgacagtgctcacaagatgctggtgcgtgagaacggggtgcactctctgatcatagagccagtcacgtcacgtgatgccggcatctacacatgtataagctaccaaccgagcaggacagaactcattcagcctggagcttgtggtagctgctaaagaaagcacacaaaaccccctgtgtttattgagaaagctccaaaaacacaggaattgcttgatgcggtacccagtgcgggatggaatgtcccgcaatgggaagtgcccccacctcagaatattttggaaaccccttgctaatatcccaccccaaaccccttggccgggcccctttcggccctcaagaagcttttcca

SEQ ID NO: 367188 - DNA, 970 bp, Homo Sapiens
ggatgcgactggcgggtgggagtggaggcaccggctggcgggcgggggtacaggacggggcaggggctcccgctccaggttccttgaagcacttccgaccgcgaagcccggcgcgagaagcgagctaacccaagagccaacaacgagcgcggagagggcagcggactgagcggagccgccggccagagcgggctcggagcccgggtctccgccactcgggacccggctaggcggcggcgggggcggcgatgttccactgcatccccctgtggcggtgcaaccgtcatgtggagagcatcgacaagcgccactgctcgctggtctacgtccccgaggagatctaccgctatgcccggagcctggaggagctgctgctggacgccaaccagctccgcgagctgcccgagcaatttttccagctagtcaaattacgaaagcttggacttagtgataatgaaattcagcggctccctccagaaatagcaaacttcatgcagctggtggaactagatgtgtctcgaaatgagattcctgaaattccagaaagcatttcattctgtaaagcactgcaggtagctgacttcagcggaaacccactgactaggttgccagaaagctttcctgaattacagaatttaacatgtctttctgtaaatgacatctcactacagtctctacctgaacaactattgcgcaacctttataacctggcttcactggaaactgagaacagaaatcttcttacatattcttcctgactctcttacccagctgcgaagactagaagaacttgatttaggaaacaatgaaatatattaatttgccagaatcaattggagccctcttacatctaaaagatctctggttggcatggaaatcaactgtcagaattacctcaggaaataggacatctgaagaacctgctgtgttagatgtctctgaaacaggttggacagacttccgaagaaac

SEQ ID NO: 367189 - DNA, 1475 bp, Homo Sapiens
  misc_feature (873)..(1172): n is a, c, g, or t
ccttgaagcacttcctgaccgcgaagcccggcgcgagaagcgagctaacccaagagccaacaacgagcgctggagagggcagcggactgagcggagccgccggccagagcgggctcggagcccgggtctccgccgctcgggacccggctaggcggcggcgggggcggcgatgttccactgcatccccctgtggcggtgcaaccgtcatgtggagagcatcgacaagcgccactgctcgctggtctacgtccccgaggagatctaccgctatgcccggagcctggaggagctgctgctggacgccaaccagctccgcgagctgcccgagcaatttttccagctagtcaaattacgaaagcttggacttagtgataatgaaattcagcggctccctccagaaatagcaaacttcatgcagctggtggaactagatgtgtctcgaaatgagattcctgaaattccagaaagcatttcattctgtaaagcactgcaggtagctgacttcagcggaaacccactgactaggttgccagaaagctttcctgaattacagaatttaacatgtctttctgtaaatgacatctcactacagtctctacctgaaaatattggcaagcagaagacaactagctgacacctgttcagccagcaagttggtgttattctgaaatgtacactgatgtttaatctttatgccattagacttgctaattaaaaattctgcccttaaactctcaggaggcagaagaagacaggaagccctcaatacactctaggtgtatggtatcagttgcagagaaaacagtggtattttattgtgaatttcatgcatgtacaattcacttttgctgtatcaagtgtcagatatttatnnnnnnnnnnnnnnnnnnnnnnnnnnnnnnnnnnnnnnnnnnnnnnnnnnnnnnnnnnnnnnnnnnnnnnnnnnnnnnnnnnnnnnnnnnnnnnnnnnnnnnnnnnnnnnnnnnnnnnnnnnnnnnnnnnnnnnnnnnnnnnnnnnnnnnnnnnnnnnnnnnnnnnnnnnnnnnnnnnnnnnnnnnnnnnnnnnnnnnnnnnnnnnnnnnnnnnnnnnnnnnnnnnnnnnnnnnnnnnnnnnnnnnnnnnnnnnnnnnnnnnnnnnnnnnnnnnnnnnnnnnnnnnnnnnnnnnnnnnnncgtttgccccccctacacaaaaaaatcttaaatatagtagctgtttaaacacccaaataacactgtcctcctcttgctcctcaggatgtctggagtttaattcccttattactctcccttccattcattcttagtctgcagctgcctagaatggttctcctttctagcctctgatttcctacccctctcctttttcccatttggtgtctttttaacaagtcttaatcttgagatcacatatttattaaccaaagtgtcctcttacccttaatgtactatttaatggaaagtttatttcgaaaa

SEQ ID NO: 367190 - DNA, 1829 bp, Homo Sapiens
  misc_feature (1408)..(1466): n is a, c, g, or t
  misc_feature (1618)..(1618): n is a, c, g, or t
  misc_feature (1620)..(1652): n is a, c, g, or t
  misc_feature (1755)..(1756): n is a, c, g, or t
ggaattcttccgatggctgccccgcaggtgcgcgcggccggggctggcggcgactctctccaccgggccgcccgggaggctcatgcagcgcggctgggtcccgcggcgcccggatcggggaagtgaaagtgcctcggaggaggagggccggtccggcagtgcagccgcctcacaggtcggcggacgggccaggcgggcggcctcctgaaccgaaccgaatcggctcctcgggccgtcgtcctcccgcccctcctcgcccgccgccggagttttctttcggtttcttccaagattcctggccttccctcgacggagccgggcccagtgcgggggcgcagggcgcgggagctccacctcctcggctttccctgcgtccagaggctggcatggcgcgggccgagtactgagcgcacggtcggggcacagcagggccggggggtgcagctggctcgcgcctcctctccggccgccgtctcctccggtccccggcgaaagccattgagacaccagctggacgtcacgcgccggagcatgtctgggagtcagagcgaggtggctccatccccgcagagtccgcggagccccgagatgggacgggacttgcggcccgggtcccgcgtgctcctgctcctgcttctgctcctgctggtgtacctgactcagccaggcaatggcaacgagggcagcgtcactggaagttgtattgtggtaaaagaatttcttccgactccccgccatcggttcagttcatgaatcgtctccggaaacacctgagagcttaccatcggtgtctatactacacgaggttccagctcctttcctggagcgtgtgtgggggcaacaaggacccatgggttcaggaattgatgagctgtcttgatctcaaagaatgtggacatgcttactcggggattgtggcccaccagaagcatttacttcctaccagccccccaatttctcaggcctcagagggggcatcttcagatatccacacccctgcccagatgctcctgtccaccttgcagtccactcagcgccccaccctcccagtaggatcactgtcctcggacaaagagctcactcgtcccaatgaaaccaccattcacactgcgggccacagtctggcagctgggcctgaggctggggagaaccagaagcagccggaaaaaaatgctggtcccacagccaggacatcagccacagtgccagtcctgtgcctcctggccatcatcttcatcctcaccgcagccctttcctatgtgctgtgcaagaggaggagggggcagtcaccgcagtcctctccagatctgccggttcattatatacctgtggcacctgactctaatacctgagccaagaatggaagcttgtgaggagacggactctatgttgcccaggctgttatggnnnnnnnnnnnnnnnnnnnnnnnnnnnnnnnnnnnnnnnnnnnnnnnnnnnnnnnnnnntcacctaccacatccagcctacacgtatttgttaatatctaacataggactaaccagccactgccctctcttaggcccctcatttaaaaacggttaactataaaatctgcttttcacactgggtgataataacttggacaaattctatgggnannnnnnnnnnnnnnnnnnnnnnnnnnnnnnnnngagacggagtctcgctctgtcattccaggcttggaatgccagtggcatggatctcgggctcactgcaaacccccattctcccaggttcaagcgattctcctgnnctccttcctggagtaactggggactacagggggctcaccaccacaccccaggccaaattttttgggatttttt

SEQ ID NO: 367191 - DNA, 784 bp, Homo Sapiens
cggtccggaattcccgggatgcaagggcactccgcggccacctgagtggcttcgcggattggctgaacgctgaggctctggccctgaagtctgtgtggctagtgtcaggtagctggagagggatggaggcagagtcaggggctgctccttcccccacccgccctcactgctgccagtgccacacgcgcggtttgcagctgcagatctggcactggcgcaggatggcggagcttcctttggatggcctcagggccgcagagcgcacagcccacctggcctcaaggtccgctcctcttggacatctctctggatcctgggcccgggcgctgggcactctgtatccacacggatgaaactgagcggctgctggcggggcccgtcgcctgattttgccgcctgggggtctggcctcaggatccacgctactgcgggggcgggcctggtctggagtgtccagtcacttactgccggtgcaccacgtctagactgcagctgcggctccgatgccggcgtcagctggcgggcctggtacctgatgtcctcagggtcaagtgcatcgcccgcccacttgagaagttgctctgacttggcctcctccaagaacgcaggggccaccagggcaggctctttgtggtaaccgggatggtattgagcagcaggttttcaccctggtgccactgctgtgcggactgcctgacttgggcgcccagcactggcatcagggtcacgtgcaggtgtgtgtgcgggtagggttaaggcccccgtaagatcctgctagagtcac

SEQ ID NO: 367192 - DNA, 1793 bp, Homo Sapiens
cttgtggggcttttgccctgtgatcccctctttgttcgtcatgctgtctttagatcttggtggttttgatcgttttctacccttctcgatatcgcgtgacattgattgaatccaaaagtctgggtcgtgactctctttggggggtccctgtgtcgtgggacctcgtgctctctctctggtaatttgctttggtctcgggctagccactaggtaccaagctagtggtgaaaattctaaagggttttacattttccttcggcccaggtcgtcttcagtcctaggtaatctggccttttgaagtgctttcctttcaaagtctctggtactctcttccatagctcgggggattctctgtctttgttagatattcggcgacctgcgttcctatgatgtgattttctcttctctcatgcgggctctccagcgcgctcccggtcacttgcccgttctgtgcgttaaccctttagtgtctgcagtgctgacgaactggaactggatttgcgggttccttgggtagggggcgtgtcaggatcggattatgagggggtgcagctgtagggctaaggagaagatgagcttggggggccctgaggaggaggggagtcaggattaaccgaggacagggtcgcagcgggggcatggggaggacgggcccgagagcgccgctcctccccaaaagctaggatttggagcctcacgttctcccgcaaaacgagccctgtgggtgccaggccaggggcggctcccaggtgtggagggggcaaggtacgggcgtctgccgtcgctaagtgcccccttccacttaaggcacaccttcgcctccgattccgaaccgcccggggacagaggcaagtggcaaagcagggagggcggaggactctgccaccctccctcaggatgcctgagggccccgagctgcacctggccagccagtttgtgaatgaggcctgcagggcgctggtgttcggcggctgcgtggagaagtcctctgtcagccgcaaccctgaggtgccctttgagagcagtgcctaccgcatctcagcttcagcccgcggcaaggagctgcgcctgatactgagccctctgcctggggcccagccccaacaggagccactggccctggtcttccgcttcggcatgtccggctcttttcagctggtgccccgcgaggagctgccacgccatgcccacctgcgcttttatcacggccccgcctggcccccggctcgccctatgtttcgtggacatccgccggttcggccgctgggaccttgggggaaagtggcagccgggccgcgggccctgtgtcttgcaggagtaccagcagttcagggagaatgtgctacgaaacctagcggataaggcctttgaccggccatctgcgaggccctcctggacccagaggttcttccatggcattggcaactatctgcgggcagagatcctgtaccggctgaagatccccccctttgagaaggcccgctcggtccttggaggccctgaagcagcacaggccgagcccggagctgaccctgagccagaagataaggaccaagctgcagaatccagacctgctggagctatgtcactcagtgcccaaggaagtggtccagttgggtgaggccaaagatggcagcaacctctgcttcagcaaatgattgtgtaaccctggggcacttgtccctctctggacctaattcaccgatttggaagtttgtagccctagctgatactcaatggactaggcctcctcacttgtcaatagtgtttccaggctgggcgcagtggctcat

SEQ ID NO: 367193 - DNA, 1072 bp, Homo Sapiens
aattcccgggatattaaaagaggctctttggaagtatatacattattaacataatgtgtacaagtccttttgaaatgacaactttaatgggtttcagctcttttatctagagcttgagataattcaagctgagtttttcagggcatatcacaacggcaaagtgttcagcagtgggatatcaatgcttatttacattttcctactgctatttatataaaatgttattccattcagaggatgccttttatccccacattaaagcacagatcattaagcaataaaaaccaaattgtctgtcattcaaattataactgcagttatttttgcatggtaagagtgaggtgctaattttgtgtgagatgaactttgtaaactactttgggaaatgttctttggaagtaaggttttttctcctttagtcttatgcttccacttttgtctcagattcacaatccattaaaacatggggaaaaaagaaaaggtaaaattgagagacttttgttagaggagctatttggaatgaaccaacatttcagattttccaaaatgtaagttaggaagtctccattgtctctgcattaacaaaatacactgttactatcttaatctcaagagtgtcattacagtgagaatctcatttaaaagcataccagtgaaattaatagcagtgcttatcaaagaacactgaaatctgtgagaatctttctaggagcattcttttcttcttttagttccaagttccagggtatttttcattcctagtaggtttatatgactcacagaatgtggacttttttcctgtttggaggatttttgtaatgtaagtatcggatagctgcaccacagcatgcataaattgcacatttgttttactttctttatagaatatttaatttcaaaaatataatttatgccaaaaaaagcatacctttcaattttgctacttggttgatttagcacaaaatgcaaagtcttggggcagagagggggagtgaaaaaaattttataggtaattgttacaaaaatacctgtcagaaaccctaaagctgcattgtaaaacaaatggtgtaaa

SEQ ID NO: 367194 - DNA, 1031 bp, Homo Sapiens
agtgtaggaagaggcactgctgagggggcgcgaggggaacggaggccagagctgcgctgacagcagccatggcgagcggcagtggagacagcgtcacccgtcggagcgtggcatcacagtttttcactcaagaggaggggccgggcatcgatggcatgaccacctcagagagggtggtggatcttctgaaccaggcggcgctgatcaccaatgactcaaagatcacagtgctcaaacaggtccaggagctgatcatcaacaaagaccccacactactggacaacttcctggatgagatcatcgcattccaagcagacaagtcaatcgaagtgcgaaaatttgtcatcggcttcatcgaggaggcatgcaagcgagacattgagttgctgctgaaactcattgcaaacctcaacatgctcttgagggacgagaatgtgaacgtggtgaagaaggctatcctcaccatgacccagctctacaaggtggccctgcagtggatggtaaagtcacgggtcattagcgagctacaggaggcctgctgggacatggtatctgccatggcgggggacatcatcctgctattggactctgacaatgacggcatccgcacccacgccatcaagtttgtggagggcctcattgtcaccctgtcaccccgcatggctgactcagagataccccgacgccaggagcatgatatcagcctggaccgcatccctcgtgaccaccccctacatccagtacaacgtgcctatggggaagaagggcaaggcagcccttgggagcagctgcttaaagttcatgggggcacccctggccatcctccctcccattcaacctgtaccacaggggctggggcttccctttgccaaatatccgcccgcccggaagaccattgttccatggtcttgaaggtgattccacggccctattgaaaacttctgggattggccaaacctgtgccccccgaacccttggcccaaaatccgccaggggtggaaccaaggtgggggcgcttaaaaaaatctctt

SEQ ID NO: 367195 - DNA, 967 bp, Homo Sapiens
  misc_feature (424)..(471): n is a, c, g, or t
  misc_feature (721)..(731): n is a, c, g, or t
  misc_feature (768)..(768): n is a, c, g, or t
  misc_feature (835)..(835): n is a, c, g, or t
  misc_feature (936)..(936): n is a, c, g, or t
  misc_feature (945)..(945): n is a, c, g, or t
aggaagaggctctcagtccccacctgtacaacaacggaaaggtgtgtggccacacgaagaagccaaacgccgtggcctcctgcagagctggggcttctgtggagaatacttcgggttattacatgggttattcaaatcctgggtcctgagctgctgtttccaatcatgaagaaaaacagtgaatccagtgaacagggattctccaagcagtcatttcagggagctcctgctgaccccgccactcagcagtgcactccccggatcacagcagggcgtttacatagaaagacgttttggtcttcgattagctccgatgctttgcacttgaagttgcaaaagatctgtggcactgaacagtgaaggtggcttccggcacactccccgctgccccggaagagacatcctttgaccctctcagcaagtnnnnnnnnnnnnnnnnnnnnnnnnnnnnnnnnnnnnnnnnnnnnnnnncaaaattgccagtgttgtttaggcaatgtaacatttaccggctgtgtacagcaaacaagctattttttagaaaccgacgtttcagggaagagggaagagagccgcggggtcctgcccgtgattactatgaatgtattgctgttggaggacatctcgatccaaagaacagccgttcctgtgcggcccttcgttgccctcctgctttcattttttaaagaaatcttgagtgcttgagggccttggaactgannnnnnnnnnngttccagccaaattagcagtgtataaatggcacctangtaagagcagagctgcggctcggtgacttgatacttggggcagcccgatgctgtgtgtggggcaggngaagcatccttactggagaggcagggcccagccattgggcacctctgggaaaggggagggggacccatgaggcagcccagcccctgtgcagggggcgactntgcccacgncaaggcagcgcttcccagtcgg

SEQ ID NO: 367196 - DNA, 987 bp, Homo Sapiens
  misc_feature (348)..(430): n is a, c, g, or t
aattcccgggatgcgggaaggaggaagtttcaaagccagcttgacgtggttgtggccgttgggcgagatgaagctacactgtgaggtggaggtgatcagccggcacttgcccgccttggggcttaggaaccggggcaagggcgtccgagccgtgttgagcctctgtcagcagacttccaggagtcagccgccggtccgagccttcctgctcatctccaccctgaaggacaagcgcgggacccgctatgagctaagggagaacattgagcaattcttcaccaaatttgtagatgaggggaaagccactgttcggttaaaggagcctcctgtggatatctgtctaagtannnnnnnnnnnnnnnnnnnnnnnnnnnnnnnnnnnnnnnnnnnnnnnnnnnnnnnnnnnnnnnnnnnnnnnnnnnnnnnnnnntttaaaaggtttcctttcagctatgagactggctcatagaggctgtaatgttgatacaccagtttcaacgctcacaccagtgaagacttcagaatttgaaaactttaaaactaaaatggttatcacatccaaaaaagactatcctctaagtaagaattttccatattccttggaacatcttcagacttcttactgtgggcttgtccgagttgatatgcgtatgctttgcttaaaaagcctttaggaaattagacttgagtcacaaccatataaaaaagcttccagctacaattggagacctcatacaccttcaagaacttaacctgaatgacaatcacttggagtcatttagtgtagccttgtgtcattctacactccagaagtcaccttcggaagtttggacctcacgcaagaacaaaatcaagggcactcccctgtggcagttttggccagcttccaggaactttaagaattttaaaacttgaacgaataatggaatgtgatttcaattttcccttggcaggaattaggaacaacttaattaaaaccccttcgcc

SEQ ID NO: 367197 - DNA, 968 bp, Homo Sapiens
aaccaccgctgccagctgcgcgctcgggggaaaagacgttgcgcccccgccgactgccggtttcccgggcgcgagcccggatccaggtggtcagtcccggtacgcaaccacggcgagaacccggccctgctaagggagaagggaagccgtttcccgcgggcttcatacagacacggtgctaagacagcccgagtcgcggaccagtccaacaggcaggcagatcagtgggcagcccgcgtgcgcgaggaccccgatggcggcgccgggtggcgggaaggaggaagtttcaaagccagcttgacgtggttgtggccgttgggcgagatgaagctacactgtgaggtggaggtgatcagccggcacttgcccgccttggggcttaggaaccggggcaagggcgtccgagccgtgttgagcctctgtcagcagacttccaggagtcagccgccggtccgagccttcctgctcatctccaccctgaaggacaagcgcgggacccgctatgagctaagggagaacattgagcaattcttcaccaaatttgtagatgaggggaaagccactgttcggttaaaggagcctcctgtggatatctgtctaagtaaggccatttccagcagtttaaaaggtttcctttcagctatgagactggctcatagaggctgtaatgttgatacaccagtttcaacgctcacaccagtgaagacttcagaatttgaaaactttaaaactaaaatggttatcacatccaaaaaagactatcctctaagtaagaattttccatattcctgggaacatcttcagacttcttactgtgggctggtccgagttgataaagcgtatgcctggttaaaagccttgaatttgcttgggtccacattttaaagtccgcttaatgggaccatacttcgattactgagcacctgggctcgtgccggccccccaaccggtgcccacaagcccgttcc

SEQ ID NO: 367198 - DNA, 1521 bp, Homo Sapiens
  misc_feature (362)..(444): n is a, c, g, or t
cgaggacccgatggcggcgccgggtggcgggaaggaggaagtttcaaagccagctgggcgtggttgtggccgttgggcgagatgaagctacactgtgaggtggaggtgatcagccggcacttgcccgccttggggcttaggaaccggggcaagggcgtccgagccgtgttgagcctctgtcagcagacttccaggagtcagccgccggtccgagccttcctgctcatctccaccctgaaggacaagcgcgggacccgctatgagctaagggagaacattgagcaattcttcaccaaatttgtagatgaggggaaagccactgttcggttaaaggagcctcctgtggatatctgtctaagtannnnnnnnnnnnnnnnnnnnnnnnnnnnnnnnnnnnnnnnnnnnnnnnnnnnnnnnnnnnnnnnnnnnnnnnnnnnnnnnnnntttaaaaggtttcctttcagctatgagactggctcatagaggctgtaatgttgatacaccagtttcaacgctcacaccagtgaagacttcacaattggaaaactttaaaactaaaatggttatcacatccaaaaaagactatcctctaagtaagaattttccatattccttggaacatcttcagacttcttactgtgggcttgtccgagtcgatatgcgtatgctttgcttaaaaagccttaggaaattagacttgagtcacaaacatataaaaaagcttccagctacaattggagacctcatacaccttcaagaacttaacctgaatgacaatcacttggagtcatttagtgtagccttgtgtcattctacactccagaagtcacttcggagtttggacctcagcaagaacaaaatcaaggcactccctgtgcagttttgccagctccaggaacttaagaatttaaaacttgacgataatgaattgattcaatttccttgcaagataggacaactaataaaccttcgctttttgtcagcagctcgaaataagcttccatttttgcctagtgaatttagaaatttatcccttgaatacttggatctttttggaaatacttttgaacaaccaaaagtccttccagtaataaagctgcaagcaccattaactttattggaatcttctgcacgaaccatattacataatagaaccatctatccgaaagagattaatggtaaacatggtgggagacactcccctggcagaagttttttaaaaaaatggttacttaagcaacagattaataagtctttttatgaaaaaatttaaaaaattgcaaatagggccatcccagatcccggaccaaaggattccatagggctctcatatcattccattcatctctgccaagatttggatacccgcaaaaatttgtgtttggggaagattctgtctgaactctttccttcagggaactcctccctggatctgcattccggttgccccacactgggggccttaagtagaaaaaattggggggggacctgaaccccccaataagcccctgaattccgggc

SEQ ID NO: 367199 - DNA, 795 bp, Homo Sapiens
  misc_feature (542)..(624): n is a, c, g, or t
cccgggcgcgagcccggatccaggtggtcagtcccggtacgcaaccacggcgagaacccggccctgctaagggagaagggaagccgtttcccgcgggcttcatacagacacggtgctaagacagcccgagtcgcggaccagtccaacaggcaggcagatcagtgggcagcccgcgtgcgcgaggaccccgatggcggcgccgggtggcgggaaggaggaagtttcaaagccagcttgacgtggttgtggccgttgggcgagatgaagctacactgtgaggtggaggtgatcagccggcacttgcccgccttggggcttaggaaccggggcaagggcgtccgagccgtgttgagcctctgtcagcagacttccaggagtcagccgccggtccgagccttcctgctcatctccaccctgaaggacaagcgcgggacccgctatgagctaagggagaacattgagcaattcttcaccaaatttgtagatgaggggaaagccactgttcggttaaaggagcctcctgtggatatctgtctaagtannnnnnnnnnnnnnnnnnnnnnnnnnnnnnnnnnnnnnnnnnnnnnnnnnnnnnnnnnnnnnnnnnnnnnnnnnnnnnnnnnntttaaaaggtttcctttcagctatgagactggctcatagaggctgtaatgttgatacaccagtttcaacgctcacaccagtgaagacttcagaatttgaaaactttaaaactaaaatggttatcacatccaaaaaagactatcctctaagtaagaattttccatattcctg

SEQ ID NO: 367200 - DNA, 1033 bp, Homo Sapiens
cgccaagcttggcacgtggccgcagtcgatgatggcgttgtaggaggcgtttaccgagccgaagtagtactgggtctgtttcatgacgcagctgctctcgcgcgtctcggggctcccctcggcctccgcggggtctgcgagggcccagagcgcctcagctccgcccacagaccctggcaaggtctccggcctccctcagtcgtagaccccaccctccccatggagtcgtcttagctcagattggggacccggacttgaggaggcgcctccaaagccctacctacctgcttggaaccagctgtggtagatgaggccgtagagaagctgctggaacagggacctgcagcgcacgggggagccgagtgcaggtggtcagcagaggacgatgccatgccctacttctcttctgaagccctcccggccagggagcaccttctctacccacctcccgctcaggactcaccaggcggcagcagaggtccaccaggccaggttaaggaaatctgcaacggtgggctgcagtggagagaggggcgtggactgccactgctgcccctcgccctaggtcacccccagctttatcaaatgtcagagcaccaagaatcctccatcatcaatgaggacacagaactgggtgatgcctacgtgttgagatcctggtccctccacacacgctctaccaagctgctgcgtgatgcccgtgtccaagatcaggttgtgcagaaggaagttgttgccctggaaaaggaggggaggggtgggggtgggggcatcttcttgcagctccttgcccaccctcacccccacccttaaagctccaccaggagcctcctccatgacctggccctggcccaggcccagcccttagcttgtgcctgcttatttccacacctgcccggcctctgggttcctctgggctggccccatgctgcctgggcactgcccagagccagctgccctgccaggcactcacactgcttggagtctggagtcactttctccatgagctcaataaagtttttcaggaactcgg

SEQ ID NO: 367201 - DNA, 675 bp, Homo Sapiens
  misc_feature (596)..(607): n is a, c, g, or t
cggtccggaattcccgggatatttttcctatgtttccctctttgttcagaagcccagatgcatttttataactcagttttaaaaactttaaaatagttaccttgccttttaggatgttcttatcccacccataatgagagttgaaaggggatggatagctgctccccatgcccttcccactttttggaataggccgtgagggtgtgaggaagaaggctgtcttttgtacataaggacaaaattgtttgttttacataaattttgttacatatttttgctaatggctttgtatgtaacaagaagcgagttgccaaactacctgttgtacttttgaattttctgattgaattacagactgcgaacaacggctttcagaatgagggacttccatcagactctaatgataatagtagcacaaattgaaaacttccccaaagctttcacagaatattttctcataataaaatccaagtgaacagataattagaagaaacccttttccttcagggaaccaagcaactctattttagtactgacatgcattattttcactgtgaattcacttttttattgcatgttcagatgtccctctttgnnnnnnnnnnnngtaacattaactgcaatgatgttcttcctggaattcatgaaaatataattaaaacacatttttaaacc

SEQ ID NO: 367202 - DNA, 998 bp, Homo Sapiens
  misc_feature (854)..(896): n is a, c, g, or t
  misc_feature (921)..(930): n is a, c, g, or t
ggaatatccgggatccgcggcgctcgggctctgcagccttctgctgctgctcgcgcccgggcacgcgtgccccgcgggctgcgcctgcaccgacccgcacaccgtggactgccgcgaccgcgggctgcccagcgtgccagaccctttccccctggacgtgcgcaagctgctggtggccggcaaccgcatccagcggatccccgaggacttcttcatcttctacggcgacctggtctacctggacttcaggaacaactcgctgcgctcgctggaggagggcacgttcagcggctcggccaagctcgtgttcctcgacctcagctacaacaacttgacccagctgggcgccggcgccttccgctcggccgggaggctggtgaagcttagcctggctaacaacaacctggtgggcgtgcacgaggacgccttcgagaccctggagtcgctgcaggtgctggagctcaacgacaacaacctgcgcagcctcagcggggccgccctgggcgcgctggcccgcgctgcgcttcctgcgtctggaacgggaaccccctgggctgggcgaacggggaatttcgccccacctctttctcctgggatcccaggaagaacgccttcccaaaactggcccccaaagggccctttgatggaaaaatccccagggggttccccttggcccccatggggaagaaagcccaggggaggggaatatttcccccttggcgcggggaaacccttgtcccgggaagggccccaacctttttcacgccgaaagggggaaagggtttccaagccccttgggtcaccctttccccaagaaacaccccttggggaaacccatcacatttttctccctnnnnnnnnnnnnnnnnnnnnnnnnnnnnnnnnnnnnnnnnnnnccacatttaatatcctcccacagannnnnnnnnncccggtggcccaccttggtggggggggcaatgggccccttcctcacaaaggggtgggcgcccaccccc

SEQ ID NO: 367203 - DNA, 906 bp, Homo Sapiens
ggtccggaatttcgggatccacggctaagaagagagaggcaagggcaggagtgaaggagagagctgaagcctggggctccgagatggtcagaggatgggagacggggcagtgaaacaaggcttcttgtatcttcagcagcagcagacgtttggaaagaaatggcgccgcttcggcgcctcactgtatggagggtcggactgcgccttggcccggctggagctgcaggagggcccggagaagcctcgtcggtgtgaggctgcccggaaggtcatccgcctcagtgactgcctgcgggtggccgaggccggcggagaggccagcagcccccgggacaccagtgccttcttcctggagaccaaggagcgcctgtacctcctggcggcccctgcagcggagcgcggcgactgggtgcaggccatctgcctcctggccttccccgggcagaggaaggagctctcggggccagagggaaagcagagccggccctgcatggaggaaaatgaattgtacagcagcgcagtcacagtcggcccccacaaggaatttgctgtgaccatgagacctacagaagccagtgagaggtgccacctgcgggggtcctataccctccgggctggggagagtgccctggagctgtggggtgggcccgagccagggacccagctgtacgactggccctacaggtttctgcggcgctttgggcgggacaaggtaaccttttcctttgaggcaggccgtcgctgcgtctctggagagggcaactttgagttccgaaacccggcaaggcaatgagatcttcttggccctggaagaggccatctctgcccagaagaatgctgcacccgataaaccgcaaacggagccagccacaatccccgctcgctggccccggcctgatacccctg

SEQ ID NO: 367204 - DNA, 761 bp, Homo Sapiens
  misc_feature (70)..(184): n is a, c, g, or t
cggggggggcccgcgcggcggccgcccccctgcccccctaggtggtaacggtccggaattttccggatcnnnnnnnnnnnnnnnnnnnnnnnnnnnnnnnnnnnnnnnnnnnnnnnnnnnnnnnnnnnnnnnnnnnnnnnnnnnnnnnnnnnnnnnnnnnnnnnnnnnnnnnnnnnnnnnnnnntcttgccccagaagctgcgggcacatccacgcctgaaatgcggcgctcagtcctggtcaggaacccaggccacaaaggcctgagacccgtttatgaagagctcgactctgactccgaggacctagaccccaatcctgaagatctggacccggtttctgaagacccagagcctgatcctgaagacctcaacactgtcccggaagacgtggaccccagctatgaagatctggagcccgtctcggaggatctggaccccgacgccgaagctccgggctcggaaccccaagatcccgaccccatgtcttcgagtttcgacctcgatccagatgtgattggccccgtacccctgattctcgatcctaacagcgacaccctcagccccggcgatccaaaagtggaccccatctcctctggcctcactgccacccccaaggtcctggacaccagggcccgcgggtgattcagagacacgaaagacaagccagcaacaggacaatacatccgtgacacggatatgaggggaagagaaaaaagacactagcaacagaagccgaggctaacaaaagaaaggaagcag

SEQ ID NO: 367205 - DNA, 1102 bp, Homo Sapiens
ggtccgaattcccgggatcgcggagtgcacacctgctggtacgagcaaaagtagccgacaggccagagtttccagtttcggtggcttcgtaggcttttagcttctgaaatccgctaaaagcggcggttcattcatcttcaagtacctagcctgactggtagggctgctcagacattccgaaacatttcgacctggggaggggggcggcggtgaaagaatactttctgtagagagtgcccctcgcgtcgcccctgctttgaaggctttatgtattaacggaatgccgaacatttgtgtcctacttgctgacagcgcacaggatccttctaacagtatttctcaagtacttaacaaaaagatgaaaacttgaagtccaagccgtgctgctgattccgtctcacagtttaaagactgtccagaaactttaagctttcaaaactgtacattttaaaatcctgtgcgtttatcttcattttgctgggcagaaagccaaagtactggactgcctggttcagggctgaacgcctagtacacctgctaacttggagcttcagagccatggcaaccaaggagtcaagagacgccaaagcacagttggccctctcctcatcggccaatcagagcaaggaagtgcctgaaaacccaaactatgctctcaaatgtactcttgtgggacacacggaagcagtgtcatcagttaagtttagtcctaatggagaatggctagcaagttcttctgctgataggctaatcataatttggggagcatatgatggaaaatatgagaaaaacactctatggtcataatttggaaatatcggatgttgcctgctcatcagattccaggccgtcttgtttctgcctcagatgataaaactctaaaataaggggatgtgagaactggaaaatgtttgaaaacactgaaagggccccgtaaataatggccttttgggtggaacttctattccgccattccaaccttaatatccccgggatttttttgatgagaatgtaaaaaattggggaagggggaaaacgggaaagggggcttccaaaacttgggcgggccccattctggaccccaatttccggcgggtaacat

SEQ ID NO: 367206 - DNA, 515 bp, Homo Sapiens
ggagattgacgcggcagtgcacacctgctggtacgagcaaaagtagccgacagaggaggtttccagtttcggtggcttcgtaggcttttagcttctgaaatccgctaaaagcgccgggttcattcatcttcaagtacctagcctgactggtagggctgctcagcattccgaaacatttcgacctggggaggggggcggcggtgaaagaatactttctgtagagagtgcccctcgcgtcgcccctgctttgaaggctttatgtattaacggaatgccgaacatttgtgtcctacttgctgacagcgcacaggatccttctaacagtatttctcaagtacttaacaaaaagatgaaaacttggaagtccaagccgtgctgctggattccgtcttcacagtttaaagactgttccagaaactttaaagcttttcaaaactgtaacatttttaaaattcctgttgcgtttatcttcattttggctggggcaggaaaagccaaaagtactgggactggtt

SEQ ID NO: 367207 - DNA, 1402 bp, Homo Sapiens
  misc_feature (367)..(385): n is a, c, g, or t
ggtcggaatccggatgattattagaattaattccaggggaaaactggtgaatctttacattacctggtgtgttccctaacattcaaactgtgcattggccatacccttaggagtggtttgagtagtacagacctcgaagccttgctgctaacactgaggtagctctcttcatcttatttgcaagcggtcctgtagatggcagtaacttgatcatcactgagatgtatttatgcatgctgaccgtgtgtccaagtgagccagtgtcttcatcacaagatgatgctgccataatagaaagctgaagaacactagaagtagctttttgaaaaccacttcaacctgttatgctttatgctctaaaaagtannnnnnnnnnnnnnnnnnnaagatgatacttttgaaatgcaggatatgatgagtgggatgattttaaaaacgcctctttaataaactacctctaacactatttctgcggtaatagatattagcagattaattgggttatttgcattatttaatttttttgattccaagttttggtcttgtaaccactataactctctgtgaacgtttttccaggtggctggaagaaggaagaaaacctgatatagccaatgctgttgtagtcgtttcctcagcctcatctcactgtgctgtggtctgtcctcacatgtgcactggtaacagactcacacagctgatgaatgcttttctctccttatgtgtggaaggaggggagcacttagacatttgctaactcccagaattggatcatctcctaagatgtacttactttttaaagtccaaatatgtttatatttaaatatacgtgagcatggtcatcatgttgtatgatttatactaagcattaatgtggctctatgtagcaaatcagttattcatgtagggtaaagtaaatctagaattattttataaaaattactcattgaactaattctactatttaggaatttgtaagagtctaacataggcttagctacagtgaagtattgcattgcttttgaagacaagaaaagtgctagaataaataagattacagagaaaatttgttgttaaaaccaagtgatttccagctgatgtatctaatattttttaaaacaaacattatagaggtgtaatttatttacaataaaatgttcctactttaaatatacaattcagtgagttatgataaattgatatacccatgtaaccaacactccagtcaagcttcagaatatttccatcaccccagaaggttctcttgtatacctgctcagtcagttcctttcactcccaattgttggcagccattgataaggaactctatcactatagggttagtttttcttttggttccaagaacatcaatggaaagcgggcggtcatggtaactggggta

SEQ ID NO: 367208 - DNA, 767 bp, Homo Sapiens
ggggggaaaactggtgaatctttaacattacctggtgtgttccctaacattcaaactgtgcattggccatacccttaggagtggtttgagtagtacagacctccaagccttgctgctaacactgaggtagctctcttcatcttatttgcaagcggtcctgtagatggcagtaacttgatcatcactgagatgtatttatgcatgctgaccgtgtgtccaagtgagccagtgtcttcatcacaagatgatgctgccataatagaaagctgaacaacactagaagtagctttttgaaaaccacttcaacctgttatgctttatgctctaaaaagtacttttcaattttcctttctaagatgatactttttgaaatgcacgatatgatgagtgggatgattttaaaaatgcctcctttaataaactacctctaacactatttctgtggtcacagatattccccccattaattgggttatttcgcccccttcacttttctttttacccccacccttcgttccttgtaacccctaataaactctctgtgtaaacacctatctctccgctgggctggggtaccaacgattacaacgcttcttttaccctccatgccgttttccattccccttccctcctccccctttctccctcgtgctcctgggtccgatcctccccacccctcaacggcttataagacctctcaccatccccaacgaacatcctccttcctcttaccccattccgtggaaacaggagcgcgaaatccttct

SEQ ID NO: 367209 - DNA, 456 bp, Homo Sapiens
agaggtatccccgtatctctaacattagtgaagtttgcatgctttgaagacaagaagataagtgctagaataaataagattacagagaaaatttattgttaaaaccaagtgatttccagctgatgtatctaatattttttaaaacgaacattatagaggtgtaatttatttacaataaaatgttcctactttaaatatacaattcagtgagttttgataaattgatatacccatgtaaccaacactccagtcaagcttcagaatatttccatcaccccagaaggttctcttgtatacctgctcagtcagttcctttcactcccgattgttggcagccattgataggaattctatcacttaggttagttttctttgttccagaacatcatgaaagcggcgtcatgtactgtgtattcttatgaatggtttctttccatcagcataatgttagagata

SEQ ID NO: 367210 - DNA, 800 bp, Homo Sapiens
gggcgcttgcgcagatcttcaaagcagaaggtcgcgcttggaggaagtggcggctttgagtccggtggcccaatcgctgttactacttctctgaagctcctctcggctgcttgccgagacaccctgccgccaagatgcctcgaattatgatcaaggggggcgtatggaggaataccgaggatgaaattctgaaagcagcggtaatgaaatatgggaaaaatcagtggtctaggattgcctcattgctgcatagaaaatcagcaaagcagtgcaaagccagatggtatgaatggctggatccaagcattaagaagacagaatggtccagagaagaagaggaaaaactcttgcacttggccaagttgatgccaactcagtggaggaccattgctccaatcattggaagaacagcggcccagtgcttagaacactatgaatttcttctggataaagctgcccaaagagacaatgaagaggaaacaacagatgatccacgaaaacttaaacctggagaaatagatccaaatccagaaacaaaaccagcgcggcctgatccaattgatatggatgaggatgaacttgagatgctttctgaagccagagcccgcttggctaatactcagggaaagaaggccaagaggaaagcaagagagaaacaattggaagaagcaagacgtcttgctgccctccaaaaaagaagagaacttcgagcagctggcatagaaattcagaagaaaagacaacaggaagagaggactcgattataatgccgaaatcccatttgaaaaaaagcctgccct

SEQ ID NO: 367211 - DNA, 584 bp, Homo Sapiens
aaactgaaagccggaccccaggccgccgcgctgccgcccggcctccccgccagcgcgccaccatgggcagtcccggtttccccttgtaaagatggcggtgagggatcgctgcaacctttagactaatgactgtccgaaacatcgcctccatctgtaatatgggcaccaatgcctctgctctcggaaaaagacattggtccagagcagtttccaatcaatgaacactatttcggattggtcaattttggaaacacatgctactgtaactccgtgcttcaggcattgtacttctgccgtccattccgggagaatgtgttggcatacaaggcccagcaaaagaagaaggaaaacttgctgacgtgcctggcggaccttttccacagcattgccacacagaagaagaaggttggcgtcatcccaccaaagaagttcatttcaaggctgagaaaagagaatgatctctttgataactacatgcagcaggatgctcatgaatttttaaattatttgctaaacactattgcggacatccttcaggaggagaagaaacgaggaaaaacaaaatggaaaattaaaaaatggca

SEQ ID NO: 367212 - DNA, 1256 bp, Homo Sapiens
  misc_feature (397)..(427): n is a, c, g, or t
tttcaaggggttcactgttcgggggtgaaaaatatatttggaaaaagctttttaaaagaaaaggttataattaggctttaaccatcatttccatttaattctgggcacacaacggcatcttgaaaagtaaaaaatacatcttgccaattttctgctattggcagttttcaagagaaagagaagtgtggggcagacagacctgtgttcagttactagctttgtccaaaattgtgttggggctggtcaattacttttggttgctgggagtaagattaaattaaataatgcatattttaaatgtacagcatgggcactcaataaatgatatactttaccttatttattcacatgaaagtaatagcaaaatatcacagttctatgttgtggtacaatttgnnnnnnnnnnnnnnnnnnnnnnnnnnnnnnnaataatgtgttttgaaaaattgcactttttataaataaatccttcagcaggtttaaatatttcctaataaaacttagtgcctactataccctgattttttaaaaaaaggcctaaaatatgataaaaatggtcagtggttaaggacttttggttttcctttgtgctattgatataaaaataatggctttatttaaggcttagtaagtgattatttgtagttgccctgaaccaaatcattattctcaatgttgcactcagttgaaagagacctactaccttgaatgaccatcatagagaaatgcccatgatattctgttaatataattgaaccaatcataccctcctttttgattgaagtaaaggttccattgggtggcatgtggcagttcagcttgtctcccaataacaatgactcatatacacaatcacaaatcaatttttcctcatgctaaatatgtgatgtttggaatatactggattcctgaaaattaaatttatattttcacaaggaatagactattctagactagcaatgcttatatccctattcttggattgttttgtttccaactctgactatctaacaagttcatccttccaaatttgactcaaaaacccctcctccagtaaactttgcctaaccaaagttcacacccctccatttatgtcccttacacgcatgtataatgtacattaacttgcatacactattatttatattttgtgtgctttcgacttttagttataatgttgtctttgactttttttagcctccacagtgtttagcgctgtgctacacatgtatatatgtggctgtgtgtgtttgcat

SEQ ID NO: 367213 - DNA, 687 bp, Homo Sapiens
gctctggaacgcctccctcttgccttccccttttggggacagatcccgaagttcgagcatccctcggataggccgggtgtcaggcctggtctctcaggcccgtccaggcccatcttgacgattccaagaccacgccccttgagcaagaatgccatcccctctgggtcccccatgcctgcccgtcatggacccagagaccacccttgaggagcctgagactgcccgcctccgcttccgagggttctgctaccaggaggtggcaggtccccgagaagccctggcccggctgcgtgagctgtgttgccagtggctgcagcctgaggcacactccaaggagcagatgctggagatgctggtgctggagcagttcctgggcacactgcctcccgagatccaggcctgggtgcgcggtcagcggccaggcagtcctgaggaggccgctgccctagtcgaaggactgcagcatgaccctgggcaactgttgggctggatcacagcccatgtcctgaagcaggaggtgctccctgcagcccagaagacagaggaaccacttgggagcccccagccctcagggacagtggagtcccctggggaaggtccccaggacaccagaatagaggggtctgtccagctcagctgcagtgtgaaggaggagcccaatgtcgatggacaggaaagtgcgaccca

SEQ ID NO: 367214 - DNA, 908 bp, Homo Sapiens
  misc_feature (420)..(472): n is a, c, g, or t
ggtccggaattcccgggatgagagagaaaggaatgctgtcccgcggttaacacgcacgtggagggaagacctgggttttagtcctgtctccatcaacctcaagaaatgggacctcatggaagggaggggaggcaatgccgaggatgtgctcctgagcaggtgccacaattcttcacctgtaagattgctgacagaaaagtgagacctcctccaccccaaggtctcctaagagaatgctgctagccaaaaaaagatctgctgataattgaggaagagcatctttaaaaagacactcaactacatttcagaaacataaagatctaagtgttggctctacaagggaagaaataaagagaaagaactttttttcctcctacaacaggtctagacaacgtcatacaaggagttgcacgcatatcnnnnnnnnnnnnnnnnnnnnnnnnnnnnnnnnnnnnnnnnnnnnnnnnnnnnntgatgtccatttatcagcccagaaatgtactggatactggtttagttcagcctgtaggtgctgggaagaaattccgacaaatccaagtcagttgcaaaaagggaaaactccagacatatcacccaatgaacttgtaagaaagcatatgagcttccctgaacagattttactccaggtttgcagcccgcaagatttaagatggggccatgaggttaaatcttgtaaactcagaagtgttcacgctactgcatccctaaactctgtaactctctacatactctttaaagcagtgtttctctgcatctttcattccatagccattgtccacctgatccaaaatatcctaagttttttcagtggtttggaagcagggttttccaattttttgtgtatacagaaaaagggggggtgtgttgtgaaaaaaataaggtattag

SEQ ID NO: 367215 - DNA, 1072 bp, Homo Sapiens
  misc_feature (182)..(182): n is a, c, g, or t
  misc_feature (259)..(259): n is a, c, g, or t
ccggaaccctcccgtgtagaaagattggggttagtcaaagctggcaggttcccccttgaatgggacaaggccaagccatccccagcccacgggccttgaactgtccaccacgttcatggaagccaaagtaacgcccccccaagaggaagaatcacgggccaatgttgttgggcgttcttctnccttgtagaagtagagcagccaagcagaacagaaatgatctccaccagcatgtacaaaaaggaaaaggccagctcancgaggtgcctggtgacattctcgcctgtcatcttctcgtgactgttgggtgcgaatgtcaccagcaggtaggtacccacgacagccaaaccgcagccaacaaaggacaagacgtagcgcctcagaaagtctttcggtttccacttttccttgatgaatatgattcctatgatggcactagctatcacagaaactgcgctgaggggcacgatgagtgacagcggcgcgaaggcgtaggaggcgaacacactccagctcgcccagaagcatcaggaacaggcccagccaccatgtcttggtcttgaaataggcccggggatccttggagcctgccaggcggatgtggcagtacttctggaggttaagtgcaatgctgaccacgaggtgcccgaagatcgccaagagggcgccaatcaggttttccttgtaggagaaggaggcctcgcttacggcgctggagctacttgtgggaggcagctgctgcagcttcagggctgcgctgtgggatccgtccatggtggtctagtggcgcatcccacagggcctggcctaggaggtggagctgctgctaggcggggcccaggccagatgccatctctccttgtggtgttcacctccctccagcagccgtcacttcctcatgacaaaagaatacttcaaggctgttttggcagatttacagccttctcctcagcttcactcagagaagtgccaatttccgtggctctcccaggcagacagagaggggtgtgttttccagttcttgcggtgctcggcggcgtctcctctaaggcccacctatcacctcgtgcca

SEQ ID NO: 367216 - DNA, 1119 bp, Homo Sapiens
  misc_feature (129)..(192): n is a, c, g, or t
  misc_feature (195)..(302): n is a, c, g, or t
gattctttggattagaggagcgggatcacggcgctgggaagcgctcggcagcggcggccacatgcgtgcgcggcggcgcctcctggactcggcctccggcccccggcccccggctccatgcgctagccnnnnnnnnnnnnnnnnnnnnnnnnnnnnnnnnnnnnnnnnnnnnnnnnnnnnnnnnnnnnnnnnccnnnnnnnnnnnnnnnnnnnnnnnnnnnnnnnnnnnnnnnnnnnnnnnnnnnnnnnnnnnnnnnnnnnnnnnnnnnnnnnnnnnnnnnnnnnnnnnnnnnnnnnnnnnnaataataaacggacttgccatcctgcaaagacctgaggaaccatcctttttctcagagtcctctcaagaaaaagaagtctctgcaacttggagcaatctctaagtagctgtctgagccccctggaagagggctgttgtgggcagctgcattcagtgtgagcaacctggagtgggcctgtcctcctgctcgttcccaggttcaggcctggaagagggagttggaggcatgagagaagccactgtggggagagcacctggttcttccaaggctcggggcatgtgtggtccctggctgacttgggtgtcctctggtgtgtgcggtcagtcttcttctgactgtggatgccaaaggggaggcccttatctcttagcgcatgactcatctcttcgcgcatgactcatctctttgtgcatgactggatttattctcagcgtgtcatggtgggtcctgtgcagaactgagctcaatgaatatttgctgatttcagggagtgtgttaagcctaggatgctacctcctgggaaagccctggagaggaaggatagttaagaattcatatttaaccagggaaggcctggcctttgccctcctttggctacagggaaggcaatctctaaggttctgggaagtcagggcctcatagggggtctcctttattggcctggggggtcttggggcccggggggaaaccggttctggtctctcaaaggggcttggggaaaaaaagggccaccccctggtggcccacaatttggaaggaggctccccccaaaagctttgggaacccccaaggccgggggggaacctttcccttggg

SEQ ID NO: 367217 - DNA, 1103 bp, Homo Sapiens
gaaaagtctgactccagccaccggccttcaaggcacggctttttattccttcggctggtcggcctctcgcccttcagctacctgtgcgtccctccgtcccgtcccgtcccggggtcaccccggagcctgtccgctatgcggctcctgcctctagccccaggtcggctccggcggggcagcccccgccacctgccctcctgcagcccagcgctgctactgctggtgctgggcggctgcctgggggtcttcggggtggctgcgggaacccggaggcccaacgtggtgctgctcctcacggacgaccaggacgaagtgctcggcggcatgacaccactaaagaaaaccaaagctctcatcggagagatggggatgactttttccagtgcttatgtgccaagtgctctctgctgccccagcagagccagtatcctgacaggaaagtacccacataatcatcacgttgtgaacaacactctggaggggaactgcagtagtaagtcctggcagaagatccaagaaccaaatactttcccagcaattctcagatcaatgtgtggttatcagaccttttttgcagggaaatatttaaatgagtacggagccccagatgcaggtggactagaacacgttcctctgggttggagttactggtatgccttggaaaagaattctaagtattataattacaccctgtctatcaatgggaaaggcacggaagcatggtgaaaactatagtgtggactacctgacagatgtcacggctaatgtctccttgagactttctggactacaagtccaactttgagccccttcttcatgatgatcgccactccagcgcctcaatcgccttggacagctgcacctcagtaacaaaaaagctttccagaatgtctttgcaccaagaaaacagaacttcaacattcatggaaccaacaaacactggttaattaaggcaagccaagactcccaaggactaattccttcataacaggtttttcaataatgccattagggaaaaggggggcaaactcctcctccccaatggatgaaccttgtgggaaaaaaacggcccaagagggctggaagttcccttggggaaactc

SEQ ID NO: 367218 - DNA, 867 bp, Homo Sapiens
  misc_feature (715)..(726): n is a, c, g, or t
ggaattcccgggatatttattctagaagaaaattttcatagaagaaaatgatttatggccaaagttacagaacattcatcttttagacttagccttagaatatcattggaaattacttggcttgaatttggttcgtttttatctttatggattatgtaccagggctattaataatacttaaaccccttattttgctatggtggttagatttttttattccttttcaattagtgctattaattattacatggtcgtattcatgcttattacagatgaactatttttagtgccagtgtaaaggattaagaataacattcaattagttggctatttcaggctttattgtacatggtaatgtttcagggagtgtgatttggtctagaatatatccagatccttgtaattatgatattgggttatgacaggattctattatttttagctatgaatggtgcttatttttccctatattaggaatgttaatatttggattatcagagtccatgttataaacagaatttacccctatgcaagacaaattccctaactgtgcaacattttccatgagaattaaaagttgtgtgttaaggggaaaaaccctctgaatgtttttatgtgtaagtgcctaaagaaccgtagaaacagtaccatcaaaagctcttataaaagaaaaactgattgaacattagccagaaacaaaaatattgatttacannnnnnnnnnnnggttgctgggactgaataccctaaaaactaagagatgtgagtggggaaaatgtctaattgataagaaagttgatttatattatatttacatgcatcttctaagattgcctttacagtagccaatcagaactttaaaaaaaa

SEQ ID NO: 367219 - DNA, 1331 bp, Homo Sapiens
  misc_feature (1232)..(1232): n is a, c, g, or t
  misc_feature (1243)..(1243): n is a, c, g, or t
  misc_feature (1258)..(1258): n is a, c, g, or t
  misc_feature (1279)..(1279): n is a, c, g, or t
  misc_feature (1288)..(1288): n is a, c, g, or t
gtagcgaggcctgggtggcgaattcggcacgagggacacgctgaacaggcacagaaatgaataaaagtcgctggcagagtagaagacgacatgggagaagaagccaccagcagaacccttggttcagactccgtgattctgaagacaggtctgactcccgggcagcacagcccgctcacgattccggccacggtgatgacgagtctccgtcaacctcgtctggcacagctgggacctcctctgtgccagagctacctgggttttactttgaccctgaaaagaaacgctacttccgcttgctccctggacataacaactgcaaccccctgacgaaagagagcatccggcagaaggagatggagagcaagagactgcggctgctccaggaagaagacagacggaaaaagattgccaggatgggatttaatgcatcttccatgctacgaaaaagccagctgggttttctcaacgtcaccaattactgccatttagcccacgagctgcgtctcagctgcatggagaggaaaaaggtccagattcgaagcatggatccctccgccttggcaagcgaccgatttaacctcatactggcagataccaacagtgaccggctcttcacagtgaacgatgttaaagttggaggctccaagtatggtatcatcaacctgcaaagtctgaagacccctacgctcaaggtgttcatgcacgaaaacctctacttcaccaaccggaaggtgaattcggtgtgctgggcctcgctgaatcacttggattcccacattctgctatgcctcatgggactcgcagagactccaggctgtgccaccctgctcccagcatcactgttcgtcaatagtcacccagcaagaatagaccggcctggcatgctctgcagtttccggatccctggtgcctggtcctgtgcctggtccctgaatatccaagcaaataactgcttcagtacaggcttgtctcggcgggtcctgttgaccaacgtggtgacgggacaccggcagtcctttgggaccaacagtgatgtcttggcccagcagtttgctctcatggctcctctgctgtttaatggctgccgctctgggggaaatctttgccattgatctgcgttgtgggaaatcaaggcaaggggatgggaaggccacccgcctgtttcatgattcagcagtgacctctgttgcgggattcctcccaagatgagcaataacctgatgggcttnagacatggctnggaaagatcaagttntggggaccttaaggaccacgnaattcgttnaagggcagttacgaagggccacgtgaaatgaagtaacggctta

SEQ ID NO: 367220 - DNA, 1459 bp, Homo Sapiens
  misc_feature (31)..(31): n is a, c, g, or t
aattcccgggatagtgtatccacagggaccntggcggcacgaaatatcctcttatcggagaagaacgtggttaaaatctgtgactttggcttggcccgggatatttataaagatccagattatgtcagaaaaggagatgctcgcctccctttgaaatggatggccccagaaacaatttttgacagagtgtacacaatccagagtgacgtctggtcttttggtgttttgctgtgggaaatattttccttaggtgcttctccatatcctggggtaaagattgatgaagaattttgtaggcgattgaaagaaggaactagaatgagggcccctgattatactacaccagaaatgtaccagaccatgctggactgctggcacggggagcccagtcagagacccacgttttcagagttggtggaacatttgggaaatctcttgcaagctaatgctcagcaggatggcaaagactacattgttcttccgatatcagagactttgagcatggaagaggattctggactctctctgcctacctcacctgtttcctgtatggaggaggaggaagtatgtgaccccaaattccattatgacaacacagcaggaatcagtcagtatctgcagaacagtaagcgaaagagccggcctgtgagtgtaaaaacatttgaagatatcccgttagaagaaccagaagtaaaagtaatcccagatgacaaccagacggacagtggtatggttcttgcctcagaagagctgaaaactttgggaagacagaaccaaaattatctcccatcttttggtggaatggtgcccaagcaaaagcagggagtctgtgggcatctcgaaggctcaaaccagaacaagcggctaccagtccggatatcactccgatgacacagacaccaccgtgtactccagtgaggaagcagaacttttaaagctgatagagattggagtgcaaaccggtagcacagcccagattctccagcctgactcggggaccacactgagctctcctcctgtttaaaaggaagcatccacacccccaactcccggacatcacatgagaggtgctgctcagattttcaagtgttgttctttccaccagcaggaagtagccgcattttgattttcatttcgacaacagaaaaaggacctcggactgcagggagccagtcttctagggcatattcctggaaagaggctttgttgacccaagaatgtgtcctgtgtcttctccccagtggttgacctgatcctctttttcattccattttaaaaaggcatttaatcatggccccctggctgcgggtctcacccattggctttagaacaaagacgttccaggaaatgggcccatctccaagaagtagccgacctggggaagctgaacttctgtaacttagaaaaacccggcagtaatttccaggggtgcaaaagggaaagattgggggattaacca

SEQ ID NO: 367221 - DNA, 893 bp, Homo Sapiens
  misc_feature (847)..(847): n is a, c, g, or t
  misc_feature (870)..(870): n is a, c, g, or t
ctcacctgtttcctgtatggaggaggaggaagtatgtgaccccaaattccattatgacaacacagcaggaatcagtcagtatctgcagaacagtaagcgaaagagccggcctgtgagtgtaaaaacatttgaagatatcccgttagaagaaccagaagtaaaagtaatcccagatgacaaccagacggacagtggtatggttcttgcctcagaagagctgaaaactttggaagacagaaccaaattatctccatcttttggtggaatggtgcccagcaaaagcagggagtctgtggcatctgaaggctcaaaccagacaagcggctaccagtccggatatcactccgatgacacagacaccaccgtgtactccagtgaggaagcagaacttttaaagctgatagagattggagtgcaaaccggtagcacagcccagattctccagcctgactcggggaccacactgagctctcctcctgtttaaaaggaagcatccacacccccaactcccggacatcacatgagaggtgctgctcagattttcaagtgttgttctttccaccagcaggaagtagccgcatttgattttcatttcgacaacagaaaaaggacctcggactgcagggagccagtcttctaggcatatcctggaagaggcttgtgacccaagaatgtgtctgtgtcttctcccagtgttgacctgatcctcttttttcattcatttaaaaagcatttatcatgccccctgctgcgggtctcaccatgggtttaggaccaaagacgtttcaaggaaatgggctccatcctcaaaaggaagtaggcagtacctgggggagctgaacacttnttgtaaaaactaggaggattaanccagggcaatgtaaagtgttcgg

SEQ ID NO: 367222 - DNA, 1217 bp, Homo Sapiens
tcgcatcttgatggtcccgggagaggaaggggcctggcccggggcggagtgtggagagaggaggaagctcctgccggctgagcgggcctggaggaagtgagcagcggggctcctgcctcccggcctggtccccgaagaccccagaagaacccggaacttgcttccattcggaatccagggaccaccctttgcactcagtaggcctttgttttcctgcgtggaaagcggttgggcttgggaggcgatggagccggagttcttgtacgacctgctgcagctccccaagggggtggagcccccagcggaggaggagctctcaaaaggaggaaagaagaaatacctgccacccacttcccggaaggaccccaaatttgaagaactgcagaaggtgttgatggagtggatcaatgccactcttctccccgagcacattgtggtccgcagcctggaggaggacatgttcgacgggctcatcctacaccacctattccagaggctggcggcgctcaagctggaagcagcaggacatcgccctgacagccacaagccagaagcacaagctcacagtggtgctggaggccgtgaaccggagtctgcagctggaggagtggcatggccaagtggagcgtggagagcatcttcaacaaggacctgttgtctaccctgcacctccttgtggccctggccaagcgcttccagcccgaactctccctcccaaccaacgtccaggtggaggtcatcactatcgagagcaccaaaagtggtctgaagtcagagaagttggtggaacagctcactgaatacagcacagacaaggacgagcctccaaaggacgtctttgatgaattatttaagctggctccggagaaagtgaacgcagtgaaagaggccatcgtgaactttgtcaaccagaagctggaccgcctgggcctgtctgtgcagaatctggacacccagtttgcagatggggtcatcttactcttgctgattggacaacttgaaggcttcttcctgcacttaaaggaattctacctcactcccaactctcctgcagaaatgctgcacaacgtcaccctggcgctggagctgctgaaggacgagggcctgctcagctgccctgtcagccctgaagatatcgtgaaacaaggatgccaagagcacactgcgggtgctctatggtctgttctgcaacacacgcagacgcgcctaatggaccg

SEQ ID NO: 367223 - DNA, 1034 bp, Homo Sapiens
aatcgagctcggtaccattaggcgcgtctgcgtgctgtgtgtgttgtggggagcagcgggctgtcccagtgtttgccataagctcctctgaagatcaaaggtgtgttcttccctagctggcttagtgacggtttgcgtcttcataatctgtaacttctttagggcagggtctctggtatctatttaattctggaaacataattgaaatcttaggtactgtagaaacttagtaccaacaaagatcaggcacatctccatgaaatgccatgtaaatgtgttaaaatcacattcattcagacggagggaaagtgcgtgataaaatagaaacaccaaggtattttaaaaagacatttggtttcaagtttaagagtaattggggcaagatgaagttgctgttttgtggcagaagcccttcaagcctggcccactagcagacgaatttgcagccaggagtccctggcttcctctccatagtctaacccttgggatggcccctgaatgcctgtgacttgcccatcctcatgggcactcggcacgttcgctgtcagggtccatgtgctgagttcgctagcggagttttttccctctcatttgaggacgcagaacgcgcctaataggcgcgttctgcgttcactttctccaaaggacgtctttgatgaattatttaagctggctccggagaaagtgaacgcagtgaaagaggccatcgtgaactttgtcaaccagaagctggaccgcctgggcctgtctgtgcagaatctggacacccagtttgcagatggggtcatcttactcttgctgattggacaacttgaaggcttcttcctgcacttaaaggaattctacctcactcccaactctcctgcagaaatgctgcacaacgtcaccctggcgctggagctgctgaaggacgagggcctgctcagctgccctgtcagtccctgaagatatcgtgaaacaaggatgccaagagcacactgcgggtgctctatggtctgttctgcaagcacacgcagacgcgccttatggtaccg

SEQ ID NO: 367224 - DNA, 2086 bp, Homo Sapiens
  misc_feature (55)..(55): n is a, c, g, or t
caggaagccgtagctaagtggggggaaacagatgacatgagggggagcaggtgcnctcatcatcaagaatgggtctacatttgcactgaaataccagtatagtacgtacacagtgtgatgggagagaatcgagtattacatgcatagacaatagtgatgaacaagtctgtaagctagaatatactacatagctaatagaacacggaggtattatgtatgagcgatacgagccacgtatatttgtggatatagaagagataggttatagttaaaagacaaaacaagaaatcgtacataaaacttaatggataatatgataagtcggtctaaataggagtgaaagtgggaacgtaaaggtgaagagtaggagagaataatgaggatgattaatgttgatgcggggtgttgaaatttcaatgaaggaatatgtgagtggggttatagtagggggagtaaaatagctgtgggggacacctgggagcaatattagtacaatttttagaagaagtcaaatgggaagtctgcaagacttgtggtagattagacaagggataaattttgggatcacaccatgtcaaagcagggactaaaaagcgggcaaggcctggctacaaagtttagtctgtgaagccacgatgcaagctggttctgagtctagagacagggcaggcttcagatgggtcacgtaccagtgggttagtaacacccacaagggcctggtttctttccaggcttcatctctgccttccactgagtcgacaccatcctgagcctctttcctagaaggtgtgctccaggaaggcagagatgtttaagattgttcaccctcattcccccagggcctggcacaggtgtttcacaattatcttcgccctgggggcggaggggaggggcccaccacggccttatttccgcgagcgccggcactgcccgctccgagcccgtgtctgtcgggtgccgagccaactttcctgcgtccatgcagccccgccggcaacggctgcctgctccctggtccgggcccaggggcccgcgccccaccgccccgctgctcgcgctgctgctgttgctcgccccggtggcggcgcccgcggggtccggggaccccgacgaccctgggcagcctcaggatgctggggtcccgcgcaggctcctgcagcaggcggcgcgcgcggcgcttcacttcttcaacttccggtccggctcgcccagcgcgctacgagtgctggccgaggtgcaggagggccgcgcgtggattaatccaaaagagggatgtaaagttcacgtggtcttcagcacagagcgctacaacccagagtctttacttcaggaaggtgagggacgttaggggaaatgttctgctcgagtgtttttcaagaatcagaaacccagaccaaccatcaatgtaacttgtacacggctcatcgagaaaaagaaaagacaacaagaggattacctgctttacaagcaaatgaagcaactgaaaaaccccttggaaatagtcagcatacctgataatcatggacatattgatccctctctgagactcatctgggatttggctttccttggaagctcctacgtgatgtgggaaatgacaacacaggtgtcacactactacttggcacagctcactagtgtgaggcagtggaaaactaatgatgatacaattgatcttgattatactgttcctacttcatgaattatcaacacaggaaaataattcccctgtccgcattcacttgggtcctggtaccctgggcaaaccctcttaaagggaagttacacctggctaggagcctaccgcaccccccggaacgaagccctcccggtaactgaaaaaagggcatcaccttgttatctacccaacaggaggctttagtaatattttcttaccaaagaaacaaaatgggatctttttttctctcggaaccttttttaaaacaaaggtggccctcataacctagacccattaaaaccccctcttcccctctctcaggtatacaaacccagcctctaaaggcggcgtcaaagaactattctccctaaattaaacttttttgcgcgaacaaaacccccttattta

SEQ ID NO: 367225 - DNA, 1683 bp, Homo Sapiens
  misc_feature (97)..(97): n is a, c, g, or t
  misc_feature (225)..(289): n is a, c, g, or t
tccccttcccctaccacctccaacaaagacccaatagccgaaaaaccccggatggtaccggtccggaatatccggaatccgcggctggccggccggngttgccgccgacaatgagcctccataaaagggagcggcggggggcaggggccccggattgagccctccccgcccgggctcccgacgcgccgaggtctcggggaggcccggacgcgccggtcgcaggcnnnnnnnnnnnnnnnnnnnnnnnnnnnnnnnnnnnnnnnnnnnnnnnnnnnnnnnnnnnnnnnnnctattccggccaggaggcgggaggcggttgccggctgcgcgccgaagcctgcgcgccagtcctccggccactgctatcgcccacggccgcaccatggccctaaaggccgagggcgccgcactcgactgcttcgaggtgacgctgaaatgcgaggaaggggaggacgaggaggaggccatggtggtggccgtaattccgcggcccgagccgatgctcagagtgacccaacaggagaagaccccaccgcctagacccagcccgctagaggcaggcagtgatggctgtgaggagccgaagcagcaggtgtcttgggagcaggagttcctggtgggcagcagcccaggaggcagcgggcgggcactgtgcatggtgtgtggcgctgagatccgggcaccctcggccgacacagctcgctcgcacatcttggagcagcaccctcacaccttggacctgagcccttctgagaagagcaatatcctggaggcctggagtgaaggggtggccctcttgcaagacgtgagagctgagcagccgtccccacccaactcagactcgggccaggatgcccacccagacccagacgccaacccagacgctgccagaatgccagccgaaatcgtcgttctccttgactctgaggataacccatccctcccttaaaagggagcaggcccaggggactccgcccccttcgagcttcctgctgtccctgccacagagccaggaaataagaagccccgtggtcagagatggcaaggaacccccaggggaagagccagtcagaaagaaaagaggcagacctatgaccaaaaacctggaccctgacccagagcccccatcgccagactcgcccacggagactttcgcagcaccagccgaggtccgacacttcactgacggcagcttccccgccggcttcgtcttgcagctcttctcccacacccagctcaggggcccagacagcaaggactcacccaaagacagggaagtggcagaaggaggccttccccgggcggagagcccctctccagctccccctccggggctccgcgggacactggatctccaggttatccgcgtgcggatggaggagcccccagcggtcagcctcctgcaagactggtccaggcacccccaggggcaccaagcgtgtggggagccagggacacctcagactggcccacagtttctgtcagaatccagcaccacgtgggcaggggagcccggaaaaaggggaatggagtgtaaatttcttgcctttccctggggaaggaagggaagggaattaaggcaacctccccccggggggtttaatactccaaagcttccttgggctcacccaccctgggggggaaaaaattaaaaacccgggtcccggggcagggaggggggct

SEQ ID NO: 367226 - DNA, 1264 bp, Homo Sapiens
  misc_feature (1115)..(1115): n is a, c, g, or t
ggtccggaattctcgggatcggtggacccccagctggcagagcctggggcgggggcctgaggtggcgtggaccgcttcttcccccgcggtcgcccgggctggcgctcgcgtgcccatcgctgagatagtgggaggtggagtgggaaccgctagctttgcagaacgcagagtccctcctcaccctggcggtcccggtgccctggagtgcagtcgcggaatactgttcagcggctcgggtggttttccttgcgtcccgccacgcggcggctcctcactaaaaggctgccttctccccacagctccaggtccgagaggagccgcaccgtcgggttggagatcgcgcgcaagggtggcctctgggtctgcatctgccccgcatcggccacaggaaaagcctggtccctaggcacggtcgtggttcgagcttttcggtctctcgcacattgaggtattcgctcagcccaccacgttgccctcggggtaattaggccccagcccgcagcccaatgatggcgtcttactggcccggagcccatcaacgaaaaggctcctaagtgcggcgcatcgctgtgttcctccctcccctcgggattatagtcgccccctgcgcaagacctgcccgtttgccgccatacggcaaatgggcccgccggcgaacggcccggaaccccccctccccacagaccgtccacttttttcttcgcacccattgtacccccgacccagccaatcgccgcctcccatccatctttatactcttcgagtggatcccactgcagcctccccacctgaaaccgaaccgccgaccccgcccaattttctcgcggcccatcgaacgtgggcgactacgtgccctcctgacctcccccctattatcctctcgcgcccacgcacccggttgcaaactcgtgacacgccccccgcctcgtgagcggacaccccaggagggacgagcagaggatcgttggtgttttccgccgtcccctacgaaagtggaacgctaacatcctgccgcgagcgcccaatcttgacagaaacgtgaatactaaaacggcctagcacccgccgtgacgatatccatataacgcgccgggcaatacctagaatgacgaagnacgcgctacacgtcgcccgcagacataatggcgcctctcccgcacacacagccccgggggtcgcatacaaaagcgcggcgccggaccgtcgatgtccctcgctcttgagggggatggcgtcgtgcagcctcactatatgcaatccgcgt

SEQ ID NO: 367227 - DNA, 1301 bp, Homo Sapiens
  misc_feature (945)..(945): n is a, c, g, or t
  misc_feature (1030)..(1038): n is a, c, g, or t
ctaattgggcgggagggaaaatggcctttaatgcccctttttcgccccccctaaaaaattgcttttcctcccaaggggcagccggggaaggcctttagaactatttagttccgtttaaattattaaaggtttccccgggcaaaattttccattttcccttaaaaggccccattaggggtgtccatttccttgaacaagaaccaaatgctgaagaaaatttccagggtagattttaattttagaaagggtttctttttttggggacccaaaggaaacttagatcttccattggtcgggtatgggcaagataatggtaacccctcaggatcaaaaccacatgccagttagaaacttgatcccagaaatgatgctcagtgttgaaaccccaccattaaacaagcaaccaaaaacccccactctaaccagaggcatttaagcctctcccctgaagttcctgtttcccaccagtttacgacccttaatgttactgcatgtatggttgcatatttgagatgattaaaaataaaagactggcttaaaagcacctcctcctctagtgtgtaatttacatacaaactaaagattccttctgacgtcctaggaaccccatttgttaccgtttcatgtgtaagcaccattgaaccaatttttaaagcacatttgcagttatcaaatgtttagtgtgtcctcaagtttcattgatttctttgcctttaagcaagaaaagagtaaagtgtattattttcccctgcttcttatcatatctgaattgtcaaaaaatgttaattttggaagtgcttttaatcactattttccccaacagactagaatggctccatgaaatttgacaattaagtaaggaaatctttatccccaaaagaagcacgtatcttaccctctaaactgcatgcaaagtaagggtctgtgtgagagtattttccccanaactcctaatggacatggcagacaatgtgtagaaaaatctgagttttgaactgaccaacttcaagtcttttaaaatctttgggcnnnnnnnnntatcatgtagcagttaaaaaaattattgacttacaaattatagaaaagatatgttatctacaatatatgccaggtgacccattaaatttaaaaaatgtgtgcgaatgagtaactacattaaaactaccatcttggatcttggtgctttccaaaattctgaaatcactattaaggagggaccataccagatttttttgttgttcttttccttggagaatggggaagaagttggaaagagaaggaagtaaaccttcactctttgg

SEQ ID NO: 367228 - DNA, 433 bp, Homo Sapiens
ctggccaagggcgtccactagacaactctatcccttgcgctgaagctcaatcgtgctgagggagagctttcttaatattacttgtgttgctcttagcccttctctgggttaggatctgtcagcatttctatgataaactcctattctcaaaggtttttaatttgaccataaaaatgtgccccaggctgaagtttgctatacagggctgtaccaaagagtcaaggtttacttccttctctttccaacttcttccccattctccaaggaaaagaacaacaaaaaaatctggtatggtccctccttaatagtgatttcagaattttgggaaagcaccaaggatccaaggatgggtagttttaatgtagtttacttcattcggcacacatttttttaaattttaatgggggtcacctgggcattatatttgtaggat

SEQ ID NO: 367229 - DNA, 1293 bp, Homo Sapiens
  misc_feature (74)..(74): n is a, c, g, or t
  misc_feature (97)..(97): n is a, c, g, or t
  misc_feature (129)..(129): n is a, c, g, or t
  misc_feature (133)..(133): n is a, c, g, or t
  misc_feature (503)..(555): n is a, c, g, or t
  misc_feature (827)..(864): n is a, c, g, or t
  misc_feature (1083)..(1126): n is a, c, g, or t
cgctgatctccattgtacaagagcgtttattatgggctacagagagcgattcatcgtggatgtgtgacgggcgnccgcttgtctcaccgtgggcggncggatgctcacgttaggggagagggttcaganaggncgtacatagtcttttgacatattagaagttgaagggccgtagatgaacatcacctttgtgggcgtctttgatctaccatgtgggtgaccccgcggatacggcgatggcggtgcgcggggtgttgtcttgctgcaagctagggcgagtgagtatggacggagctggcgtcgtatcgtctcgcgacacccggaagggtgaatacgatgtgtgtggtggtccgcggggggagcgcgatagggccgtgtgaccaccgagaggatcgtgtcgaacaggggaagggtggagacagtggcggtcatcggtcggtggcctatcgaggcgtcgcggggagcttgatcgggctacatctgggcgcgggtgacgagtggcnnnnnnnnnnnnnnnnnnnnnnnnnnnnnnnnnnnnnnnnnnnnnnnnnnnnntagttatgcgcgcctaaactgggcggcgcagagtgagtgactagattccggaacagggcggcttttatggtcatgataaggtgccgggcgtagggaggagcgtaaggtgactctggtgagcggaggcgggaagcaaccgatctcagacgggtggtgggtggacaggtagcggaaaaggcgggccggacgtggcctgggccgtgggaccgggcgtgtggcgcgaacacggacggaataaaaagccggcttttgaaagaatgtgtcagtggcgnnnnnnnnnnnnnnnnnnnnnnnnnnnnnnnnnnnnnnccacccatgaatatgctaccagaagaaaacaaactacggaagggcttttccagtacgaagaactcatatctcaaccatctacttcaggacttggaatttaagcagtaaaataatatattataaaaatgtttataaaatagcagcacactctgtgaaacattacagctaggtactgtcaacgtgaataaggatggatgactttagcttcttagcagcgcnnnnnnnnnnnnnnnnnnnnnnnnnnnnnnnnnnnnnnnnnnnntgagagacccttagattgttttccgtcttcaaccctcatactatgaaacaaggcagaatctgtgtataaaataattcttcaaatagccctgttctgatttttcttttttacttaaaaaggcaaatattttaacaaatagcttcattacctgtcaattacaattgtgc

SEQ ID NO: 367230 - DNA, 1093 bp, Homo Sapiens
ggtccggaattcccgggatctcgccgcagccgccgccggtccgcgcggcctcgggtggccggagctcagcctgcgcgcgccgcgccctgtgtctccgggtggggcagaagactcgccccttgaacctcccgcggggactctccgtggtgtggcggccctggggctctttcttaatagccccggactgagtcccctccagtcgaggaccctctcctagtccactgacgagcggtggacacctgccgctgtatctcccccaaaccgagtccttgccctgctgcctcctcatacccacacggcggcagagaccttcaccatagcgttcgctcaactccagaaccttccgacctccgctagttcctgcgggcctttgcccgcttcccggtgcaccctccccgggagacacctcagacccccgacagcctgggcaggctcggtgcctgcgggtgcgttcctgatcacccctcccctcttccctccccctcatcctccattcccttgttttcaccctctgtcctctgcccgtcactccccttgtcacctcttggagccccctcctaaccagcggccagtgggtttcccataccccaggatgtgagcctctttaacctgtaatgctgtggctagcccttggcccctttcctgccatggagaaccaggtgctggtaattcgcatcaagatcccaaatagtggcgcggtggactggacagtgcactccgggccgcagttactcttcagggatgtgctggatgtgataggccagggtctgcctgaagcaacaactacagcatttgaatatgaagatgaaaatggtgatccaattacagtgagaagtgatgaggaaatgaaggcaatgctggcatattattattccccgcgaatggaaccaccaagtaaatggacagtttataagagcctctgcagaaattttccaagagccctgcagccttcctggggaaagggaacatacctgggcctgaaaggtggataactcgggcccgggacccttcttcacacagcaggcccaagaagtcttcagatttccctttcaaagcaaaaagcttttaaggaagcctttcttgcttgaactgg

SEQ ID NO: 367231 - DNA, 1242 bp, Homo Sapiens
  misc_feature (41)..(77): n is a, c, g, or t
aaatcactatagggcgactcgggtgaacgcggtggcggcgnnnnnnnnnnnnnnnnnnnnnnnnnnnnnnnnnnnnnatcaggccaaatcggccgagctcgaattcgtcgagagcggggggggccggggctgggtggcagcggccatggaccgcttcgtttggaccagcggcctcctggagatcaacgagaccctggtgatccagcagcgcggggtgcgaatctacgatggcgaggagaagataaaatttgatgctgggactctccttcttagtacacaccgactgatttggagagatcagaaaaatcatgagtgttgcatggccattctcctttcccaaattgtgttcattgaagaacaggcggctggaattgggaagagtgccaaaatagtggttcatcttcacccagctcctcctaacaaagaacctggcccattccagagtagtaagaactcctacatcaaactctccttcaaagaacatggccagattgagttttacaggcgtttatcagaggaaatgacacaaagaagatgggagaatatgccagtttcccagtcattacaaacaaatagaggaccccagccaggaagaataagggctgtaggaattgtaggtattgaaaaggaaactggaagaaacacacgaaaagaaactgacaaaaacatttctgaggcctttgaagacctcagcaaactaatgatcaaggctaaggaaatggtggaattatcaaaatcaattgctaataaaattaaagacaaacaaggtgacatcacagaagatgagaccatcaggtttaaatcctacttgcttgagcatgggaatagctaacccagttaccagagaaacctacggctcaggcacacagtaccacatgcagctggccaaacaactggctggaatattgcaggtgccctttagaggaaccaagggggaataatgtcactccacggaggtgtactgcttaataaacccgaccttcaagaatggaattgctctcaccaaaaaattattgaatgcctgcaagatgctggaaacacctgaaattacctcctaaggctcccgggtggtttgaacagggcggccatggtaatttgagcttttgctttcccaaaggaaaagggaatggggggcctccggccctggaaaacagttttccaaaaaggggatcctctaaacttcaaaaaaattggtctaactttggggggaaagtctgggccctcccaacccaaagaaagggt

SEQ ID NO: 367232 - DNA, 1467 bp, Homo Sapiens
  misc_feature (137)..(137): n is a, c, g, or t
  misc_feature (208)..(208): n is a, c, g, or t
  misc_feature (312)..(312): n is a, c, g, or t
  misc_feature (436)..(597): n is a, c, g, or t
  misc_feature (670)..(679): n is a, c, g, or t
cgccggttggggtaggggcttcgtgcggggatggcacattaggcggggccaacccgtcgtggggcaccagccgcgacgtgagactgcgcctgcgcgcgccgaagcaagggtgaaataaggtggagggaggtgccttnagataggggctgaggcgcactcgggtctccgagaggcggcccgcgatgggacggggagtgaccggcccggnccgcgggttgctccgtcggtactccgtccggggtgcggcgcgcgtcctgttagcgcaatcggggggcgtatgttcgcccccgcgctgacagggggaccgtagcnttcaatagccttgcgagggaggcctcagcgtatgcgcgcggggtgccgcaaacgcagatacccgttgcggaacgggcgggggatgcgaacggggcgggggcgctgccgcggcacctgtcgcccnnnnnnnnnnnnnnnnnnnnnnnnnnnnnnnnnnnnnnnnnnnnnnnnnnnnnnnnnnnnnnnnnnnnnnnnnnnnnnnnnnnnnnnnnnnnnnnnnnnnnnnnnnnnnnnnnnnnnnnnnnnnnnnnnnnnnnnnnnnnnnnnnnnnnnnnnnnnnnnnnngtcctcgggcccgaatcgcgaaggcggaaggggaacgtggtcgctcgcagggggaaccggagcggagagggcnnnnnnnnnntgagtctccatacggcagggggctttgccggtctggctccaggtgctgcgagagtcagagggagccggggcagataggttcgtcgtgattgcgcgcgggcaagaagtggcaaaacgggggtcggtagagggccggaaggcacagggatatgcatgggaggcgggcgcaacgggcgggcgccaggagagtgtccgcggaggcgcgggcattggcctgatgcaggccgcaggtgtggagggcaaaaggaggcgagccaggaggggcaggtcagcgggacgggcagggccgcgccctcggggcacgagtggcagcgcgctggctcttcgcccgcgggccacggctcgggagcgcagggggccgacggctccgggacagtgggcagcgcgctgggtgccgagggctccggggccagggcagggaccgggccggggccggacccggggcccgagccctggcggagctgcagcagctcggacagcgtgtggttcttgcggagctgaaggccgtcggggaagggctcctggcacagcgggcagcgggccgcgcctccgggtccgccggctccactcgcgccacgatgcggccagagcgcgcccaggcaggcgagacagaagttgtggccgcagggcagcgtcaccggctcccggagtggctctaggcagatggggcagctgaagggtccactgccgtccatgactccgcggccgcccagggcgccgccgattgtgctccggcctgggagggacaagggccgttcgcgccgccctcgtctcgattcgccacccagc

SEQ ID NO: 367233 - DNA, 1125 bp, Homo Sapiens
attcccgggatcggagtggcggcggcatttcctggtgtctgagcctggcgcggaggctatgggcagccaggaggtgctgggccacgcggcccggctggcctcctccggtctcctcctgcaggtgttgtttcggttgatcacctttgtcttgaatgcatttattcttcgcttcctgtcaaaggaaatcgttggcgtagtaaatgtaagactaacgctgctttactcaaccaccctcttcctggccagagaggccttccgcagagcatgtctcagtgggggcacccagcgagactggagccagaccctcaacctgctgtggctaacagtccccctgggtgtgttttggtccttattcctgggctggatctggttgcagctgcttgaagtgcctgatcctaatgttgtccctcactatgcaactggagtggtgctgtttggtctctcggcagtggtggagcttctaggagagcccttttgggtcttggcacaagcacatatgtttgtgaagctcaaggtgattgcagagagcctgtcggtaattcttaagagcgttctgacagcttttctcgtgctgtggttgcctcactggggattgtacattttctctttggcccagcttttctataccacagttctggcgctctgctatgttatttatttcacaaagttactgggttccccagaatcaaccaagcttcaaactcttcctgtctccagaataacagatctgttacccaatattaccaagaaatggagcgtttataaactgcaaagaggctaaactgacttggagttttttcaaacagtctttcttgaaacagattttgacagaaggcgagcgatatgtgatgacattttttgaatgtattgaactttgggggatcagggggggtaaggatataggggaatattcctgggctcccctgggggccagaataatttttccagccaataaaagggaagtttttaaaaaaatttttgccaagggggctggaaaaaggggaaagggatgccccctttcaaaaataggggggaacgctccctgtgggcttccctgccaatctttggggagtccccgggttcaaattggggccctgttttgggcccgcctggacacaatcctag

SEQ ID NO: 367234 - DNA, 975 bp, Homo Sapiens
  misc_feature (891)..(891): n is a, c, g, or t
ggtccggaattctccggatccaggtgcttaggagaacatgcagtagaacttttcatcaaacaaatggaacacgtcacagaattttgctaacatggacaactctgcacagaaaaatgaacgcactggcaaacatcccagacgtgccagtgaagtacagaaagaatgatatcccaggacctgggttctacaatgttattcaccagtcaccggtgtccaacagtgtctcattgtccaagaaaggaacttgcatgtttccctcaatgtgcgcccgattggacaccatcgtttctaaataccctgcagcgaacgcatacactatcccatcggattttatttccaagagagactttagtaattcgtgttccagcatgttccagttgccaagctttatgaaagctctcaagtttgaaactcctgcaccaaactattacaatgcctctgtctcttgctgcaagcagagaaacaacgtctgtactcgagccgggtttatgtcaaaaacccaaagaggatctttcgcttttgctgataaaggacctcccccagggcattatgatatcaacgaatcccttgtgaagcagtcgccaaatacattaatgtcttgttttaaatcaaaaaccaaccgtggatttaaaactgacgtcaacaggcccgggacctggttattacaaccccaggtgattgcacaaaagttccaaaaaagactctttttcccgaaaaaccccatcctggaacttctctgctcagccttcgcctctgcctccgaaagcaacctttcccaggtcctggtcagtatgagatcgtggactacttgggccccccgcagccatttcatctctagggcatcattcgtgtccaaaaccacccggtgggacaacgggggccgccttcagnccgggcctgccctgggccccagctaggtaacaggccagaagctttcccgggaagagaggccctttccttctaccaccgagggcc

SEQ ID NO: 367235 - DNA, 903 bp, Homo Sapiens
cgcggacggcggaaggtggactcgcgaatgttaggcctgtgggtgccatagcgaccgggaggttgggctggccagattcagctgccgggaccggaccaggtgcttaggagaacatgcagtagaacttttcatcaaacaaatggaacacgtcacagaattttgctaacatggacaactctgcacagaaaaatgaacgcactggcaaacatcccagacgtgccagtgaagtacagaaaggccaaggagcagtgaggacgcttcctctgtcctgaccgcgcctcgtccaggctgctcccagaatagttttgctgtctccttcctgcctggcaagaatgtctttactatcatctccttccttttctccgggacagcctgtttaaggttttactgctgcatatccaacacaatcctccattccttttaaatctcaagcttcagtaatcccagaatcagaaaaaaaaggattcaatagtcaagccaagagatttcctcataagaagaatgatatcccaggacctgggttctacaagtgttattcaccagtcaccggtgtccaacagtgtctcattgtccaagaaaggaacttgcacgtttccctcaatgtgcgcccgattggacaccatcgtttctaaataccctgcagcgaacgcatacactatcccatcggattttatttccaagagagactttagtaattcgtgttccagcatgttccagttgccaagctttatgaaagctctcaagtttgaaactcctgcaccaaactattacaatgcctctgtctctggctgcaagcagagaaacaacgtctgtacctcgagccgggttattgtcaaaaacccaaagaggatcctccgctttgcttgataaaggacctcccccaggcatttgatatcacgaatc

SEQ ID NO: 367236 - DNA, 967 bp, Homo Sapiens
  misc_feature (483)..(621): n is a, c, g, or t
  misc_feature (943)..(943): n is a, c, g, or t
ggtccggaattcctcgggatgacccccaagccctaccgagggggactcactctctgcttagccagggggcgtctttcaaaaggtgacctccatgctgtgctgtcgtgggtgtgagacgtgctcatggccttccactgccatctctcccttatctgatgcctaaagtcacgatggggacagagctacccaggggccagccatggggtgaccagccacctgagggtcagtcacctgtggagagcaggcacctgtgaagaccaggcacctgaggactggcgcctacttcccactttggccctacactggcacagagcccctctttattcatttctcatgctgagcatggcacacttctggcctctgggcatttatggatttaagaccaggatggtatttcagaagcttcccacttccttcctattctaaccgagtgcccagctcctttgctgatcatggaaagacccttaataattaggcctgcannnnnnnnnnnnnnnnnnnnnnnnnnnnnnnnnnnnnnnnnnnnnnnnnnnnnnnnnnnnnnnnnnnnnnnnnnnnnnnnnnnnnnnnnnnnnnnnnnnnnnnnnnnnnnnnnnnnnnnnnnnnnnnnnnnnnnnnnnnatctgctgtatccctgaaaaagtctcaatcaacatgcatgttccactcttggagttccctgttctgagggccagccacgtcctgtgtcctggagcttagccctcagcagctcccttcagcctgggcgccgcctgggtcccaaacgtggcagctgctcttccagtctcggggccgaggagggcagggagctcagtgactgagagtcttgtgtatcacatgtcttgagtgtcctggagccaacggtgtcactgggaaaaacaccaggccccaaagatcgaatcagagacgtggctgcgtgtttgcgattgtagccaggcccttnagtgtcatcaaaggagcactgggg

SEQ ID NO: 367237 - DNA, 1096 bp, Homo Sapiens
  misc_feature (713)..(741): n is a, c, g, or t
  misc_feature (840)..(848): n is a, c, g, or t
ggtatgcactctcttattatcatcattattattattccctggtcatgtctggtcctttcctgatcccccttcacaactccttgccccagggtggctacgcgagctcagcttgctccacacgccccccacccgtcacaccctcggcaccctcaccacccgcaacacacaccacactccttgccttcccctgatccagatatcctctcagtgtcaagttgccctgcgctttatcgaaatgaagaggaggaagaggccatttacttctctgctgaaaagcaatgggaagtgccagacacagcttcagaatgtgactccttaaattcttccattggaaggaaacagtctcctcctttaagcctcgagatataccaaacattatctccgcgaaagatatcaagagatgaggtgtccctagaggattcctcccgaggggattcgcctgtaactgtggatgtgtcctgtggggttctgcccgactggtgtaggtctgacagaaactaaggagtatgatctccgagtcccgcaagcaaaggtgtacaatggcattttggagaaatcctgtagcatgaaccagctttccagtggcatcccggtgcctaaacctcgccacacatcatgttcctcagctggcaacgacagtaaaccagttcaggaagccccaagtgttgccagaataagcagcatcccacatgacctttgtcataatggagagnnnnnnnnnnnnnnnnnnnnnnnnnnnnngcctttttaagaagaaatctaagtgaactggctgacttgatggaatcatggttcaaggggcatctggaaactattatcccccaccctccaatccccacnnnnnnnnnggttaaattttaggaatgtaaactcccatggggggtttcccaggccgggatgccatagtgggaacatccaaaagggccacctggctactggctggcttattaaggggcctatattatatccaatttcttcaagccaggttattactggaaaaatcctttgaaatggggaccggtttaaaggccattttctggcccaattaatttcccggttttggtcctccaggggggttattgggaacattttttgg

SEQ ID NO: 367238 - DNA, 473 bp, Homo Sapiens
  misc_feature (23)..(23): n is a, c, g, or t
  misc_feature (30)..(30): n is a, c, g, or t
  misc_feature (115)..(115): n is a, c, g, or t
atggtaacactttgcttgcaggnactgaangatcatacccttagtttctgtcagacctacacagtcgggagaaccccaagacacatcccacagttacaggcgaaatcccctcggnaggaatcctctagggacacctcatctcttgatatctttcgcggagataatgtttggtatatctcgaggcttaaaggaggagactgtttccttccaatggaagaatttaaggagtcacattctgaagctgtgtctggcacttccctgaatgaaacacaaacaaaggtacaaattttaaatcagtatgttcttaagagtactagcagacattctaactaaaacaactttcattgctttttgaaatttaaaagagggaaatgatatgattctatatacatttcagcaaaattagaacattacttctttaaataatatggcttctcaaaactcaatgctggatttttaacataaaccataat

SEQ ID NO: 367239 - DNA, 497 bp, Homo Sapiens
  misc_feature (22)..(22): n is a, c, g, or t
  misc_feature (29)..(29): n is a, c, g, or t
  misc_feature (89)..(89): n is a, c, g, or t
taaccacttggccttgccgggnactgaangatcaatactccctaagtttcctgtcaagacccctacacagtcgggaagaaccccccaangacacaccccacagttaaccaggcgaaacccccctcgggaggaacccctcctagggacaccctcatcctcctgaatatcctttccccggagataatgtttgggtatatcctcgaggccttaaaggaggagactgtttcccttcccaatggaagaatttaaggagtcacattctgaagctgtgtctggcacttccctgaatgaaacacaaacaaaggtacaaattttaaatcagtatgttcttaagagtactagcagacattctaactaaaacaactttcattgctttttgaaatttaaaagagggaaatgatatgattctatatacatttcagcaaaattagaacattacttctttaaataatatggcttctcaaaactcaatgctggatttttaacataaaccataa

SEQ ID NO: 367240 - DNA, 1473 bp, Homo Sapiens
  misc_feature (1053)..(1065): n is a, c, g, or t
tccgccgacgcatccaacacagcatgcgcgccccccgctggtaccggtccggaattcatacgatatggtgtcagggactacaacctttttccttctgtgaccagccccggattcaggctgtactaataccaggtatattatggaatttagtataaaggccaatctgtcctgaagtccatctaatgtgatgaatcactgaaagtctcagaaagacctggttagtgtatgttctcatttaccacaggcctaccagccctgggcacagcagcttcatggcaagacataaaatgacactcaaaatccttcagatctggaaaccggctcagtattaaccctacctttggttgtcctgccctacctgctctgttagtttcttgttgcttgaactgtcttctgtcttatttcccttcctttctgtgttcctcttcacctctcttgttcccctccccgctgctctgtagtcatgttggtcctttcaggcacctctgtggcatagctcccctttggtaagttttcttaattgtcatagattaactgagtttcctggatgctaatttcacactttcggttggaggagatctccattgttcccacccctccgggccaaatgggccccaggtttccaaggaaggagcaatctgtgactcctaaaatgggttggggccctgccagagttaaagcagtgactggagggtggactggggggttgcagcatctttagacctagatctgtctaactctggggaggcacattgacatttccattacacacagcactgctgcggtgccagggacctagcgcagggcttttggtaatccataaaatggattctgagactgcgacggcaaggctgtcctgtcccccaagcaccccaaggaatccttgccagacagccacacttttggaagaaaggtcctgcaggggagcaagcctgaagcccttttgtttctttgaaacctccgggggaaggcagaaaagtccccctcgccaacccaattcaatggccgttggggaacctggatttagggggaccaatcctttttattctcgtnnnnnnnnnnnnnccaacccccagtgttggcctattttttcccaaccaactttttggaaccagaaacggggggtttagcggcctttcttgaaaatgaaaaacacccccacaaatgtaccttggccaacccctgtccaagaaaagccacaagggtcccctcccagaaggattttggggcaaaaaaataaacaaatattgggccaagaaaagggtgtggggttttctttttgggggggtccactttttaaccccacacccttggcacagcgccttgggttggtgaaacaagcgcagacgcccaagatgtgggttccttggtggaacccacccccagaggtgggcatttttgtgaaacaactgcgcctcgttttgttttcccccaatgagaccaactttttttgtttattctccacaacttttg

SEQ ID NO: 367241 - DNA, 411 bp, Homo Sapiens
cgtcgggacccacttactcgtccaccgagggcttcggaggagccgggttctggcgcgcgagccccgacgccccctccagcgatcgcagggcggggacgggggccgaggggagaatgcaggagaaaagcgggccggggcgacggggaacgcaaagcttttaaattagtaatcaaacgcagtaaaacggagcaaaaccagcccggactcgcgtccgaactatcggcgcgtgtgccccgagatccaaggaagtcgtgtggaaaaccgcagccgccgccccatcttcggccccggctggggcgggagcagcagcgcgacgcgccgcgacgcaggggcagggtggggatccaaagaattccggcccgctaccagctttttgttttaacagtacggaccaatcacgccgcgcgtagc

SEQ ID NO: 367242 - DNA, 1690 bp, Homo Sapiens
tttcttgtagacatttcgatcaccatgccagagtgaattttgggaggaaggacacttgcggccaagcccatgactggccagcacagagaaaggggatagtagacaagcttagatacatcatgtcaccaaaactctaggaagagtcatattcctactgaggaggtggaaaagcggccagtgcagttctgaagatgaccctggagaatggtgaggattcatcccgtccacatggctgttgggtggggatgggaaatggatgaactgggaattccactgaattatgggaagaaacttttgttcaatcctggtcctctccctcagtgttgcctagaaaagaagttcttgaaggcgctgttgtagttcttcgttgaaagccgtatagatcagggggttaaagaaggagttggagtagccaagccacaggaagatgcttttccagatggcggggatgtcacaggagcagaggggactgatgagctcggtgagaaagaaggggatccagcagagcacgaacacgccaatgaggatgcccaccatgagggcggcccgctgctccttctgctcccgccacgtgtccccttctggctggaaggtgacggtggcgtggcggaccgtgaacaccatctggggctgtttggcagagtccttcacctccacagcttcggatatgggtgagacgctattggtcttcctggagcccacgcggaacttggcagccttgtagatcttccagtacacgaagagcaccacacagagcggcaggtagaaggcgcctacggtggagaacacggcgtaggaaggctcgcggcttacctggcactcctcgctgccctcagagtacgtctctccccagccaaaaagcagcggggccagagagatgacagcggagagtgcccaggtgagcgcgatcatgacgttggagacgcacttgcgggtgcggagcgtgtattccatgtggcgcgtgatggaccagtagcggtccagggctatggccgtcacgttccagatgctggccgtgcagcaaagcacgtcgcacgcgatcaaaagctggcacagcctccgacctagctgccagcggcgccaggacagctcgtgcaccaggctcagcggcatgaccagcgcggccaccaggacatccgagacggccatggatgccaccaggttgtggggcacgcggtggaaggtgcgtacacggaggatggtcgccagcaccagcaggttccaggcgaacgtcgccgccaccagaaagcccagcaagagtaaaacaagtatcaggagaatgcactgagaaaagagaaagtcctccactggaacctagaggacgggacaacatcattaaataccggattattcacagggctgtttcaaacaccacttaaaaacagctgatggtgactgcctgcatgcagagcaactgtgcatggccccaatctggaacggcaagcttgtgcttctttaaggcaaatcaccttcttgaggccatggaactaatgggagatgagatgtaaactatgaatcctcttctctggaacaagttctgcatctagtctcagggcctgttcatctggaggaatggatgaactgtgttgcccacaggcgggcctcaatggatctctatgaatcttgaaaggcattatgggcttgtgattatattccctactgattccccaggccacagctgtctgtatga

SEQ ID NO: 367243 - DNA, 1476 bp, Homo Sapiens
  misc_feature (1203)..(1203): n is a, c, g, or t
  misc_feature (1210)..(1210): n is a, c, g, or t
  misc_feature (1255)..(1255): n is a, c, g, or t
  misc_feature (1422)..(1422): n is a, c, g, or t
ggtaccggtccggaattcccgggatcgcagcgagtggcatcggccccgcccccagcccgtgctcgccggtgtcgggtcctaagtccctcggtcttgggttcccggagaggtgagtcggctgcaggtgggtgcggggcgccgggctgttcggggtaccggtgtcgcagtcgccagtccgagctcacaccgggcgtggagttcagctgcgcatcgggttgcggcagcttcgccaggcctggggctggctgggccgcggggccgccctggaggccggagccactgggcctgcggcgcctcggcagcgagcagccgctttgctcgcgtgcaggaggctgttcgctacctcacacccccggctggcgctgtggcctcgcttagctctaccgtttagcacccggcgacatgcacccggtcggtttccgccaggatgcgggagagttggggcaagctacctgcgacagcttgaacttttcctagggattccgctccacccgccggttagagcgtattgctcattaaatccgagacctgtgtgcttgctactgaaataaaagaagtattttttccccagagtccttttaggacgttatgacttttctcctttgcaagactgcaaaaaactgacaagaagacaaaactcttcccactcccagggaccgcgttgtcttgagtttggctagtaaaggctagcaagtgaggctttgtctctgcatcccgttccccctaacatcctcagagaaccttcgtttctagaatctttctagtattcagagacttctccagggtcatgatcccaaaggcttaacccgtttacaaggagagagttgtctcctgacgcccaaaatggcagctaaaatggagataactttaagctccaacactgaaagcttcctccaagcaagagagacacataatagccaaactagaagagaaacggggccctcctctgcaaaaaaactgcccagatcctgagctctgccgccagagcttcagacgcttttgttatcaagaggtgtctggaccccaagaggcgctctcccagctccgacagctctgccgtcagtggttgcaacccgagctgcacaccaaggagcagattttggagcttctggtgatggagcagttcctgaccatcctgcccccggagatccaggctcgggtcaggcatcgatgtccaatgagcagcaaggagattgtgacccntcgtggnagattttcacgaggcatccagaaaccaaagcagtggggtggccgntttggatggcaggggcaaaaaggggctcctgggagaaaaactgggatctccaccttgtggaaaacagggaaactggccagaacttttcacacggcgagacctccctagggaggaagattcttccagggagagagccttcttccaggcaggaggccttttccccgggnaaggggagccttaattggaaccgggcttggaagccccccccattcactgggggg

SEQ ID NO: 367244 - DNA, 814 bp, Homo Sapiens
gggagagcttcaaaacagcccggcggcctcgcctcgcacccccagccagtccgtcgatccagctgccagcgcagccgccagcgccggcacatcccgctctgggctttaaacgtgacccctcgcctcgactcgccctgccctgtgaaaatgttggtgcttcttgctttcatcatcgccttccacatcacctctgcagccttgctgttcattgccaccgtcgacaatgcctggtgggtaggagatgagttttttgcagatgtctggagaatatgtaccaacaacacgaattgcacagtcatcaatgacagctttcaagagtactccacgctgcaggcggtccaggccaccatgatcctctccaccattctctgctgcatcgccttcttcatcttcgtgctccagctcttccgcctgaagcagggagagaggtttgtcctaacctccatcatccagctaatgtcatgtctgtgtgtcatgattgcggcctccatttatacagacaggcgtgaagacattcacgacaaaaacgcgaaattctatcccgtgaccagagaaggcagctacggctactcctacatcctggcgtgggtggccttcgcctgcaccttcatcagcggcatgatgtacctgatactgaggaagcgcaaatagagttccggagctgggttgcttctgctgcagtacagaatccacattcagataaccattttgtatataatcattattttttgaggtttttctagcaaacgtattgtttcctttaaaaaagcgatcacgacgaaagcaaaagcccgaaggaggacgacaacaagag

SEQ ID NO: 367245 - DNA, 1112 bp, Homo Sapiens
  misc_feature (92)..(92): n is a, c, g, or t
tggacagcccaccaagtgcgttgtcgtttcagaagtgcacatggcgggcaactacattgggggccccggtaccccggaggggcgttaaggtntgtttctcccgccgtccgcccataggaaaggaggagggtatggcaggacgtggacgcaaattgttgccaacgggtgttaccccccgccttgaaggggtgtaaaagaggggcccaaagacgtggccccctaaagcccccaacaaaacttagggcccagtcaggcttgaagccaaaacccccccaggggggcagagaaagggcccttcggcgccaaaaattgttacttgaccaatgctcagcctgggcagcccatgatgaagaacatccaggatggggtccaaggaggaagtactgggacaggagtgaggcatcccgtgtcaaaggtgaggagggcagctgtgagcagtcctgccgagagggacttggacagatccagtacagtgaggtaggcaaaggggaccagccaggagccaaggaatgcacagaatcctctcattcccatgtagctgtgatgctcatatttatccccaggcttctggaacaaaaaggtaccatcatatccactcaggtagccagcaagacctatcagcatctttcccaggggcgggtgcacatcaaagaaaaatgtacggttgatatagtaacttcccatttttccaaagtgagtctcatcccaacagatgtgcggcggctcgtccaagcggtggaagcgggtggcgaaggacagcagcgtcaccaaggccagcagggcccaccagccgaccgcctcgaagcgccgtgagccccaagcaggccgtttggggcttcgcgccacagcctcagcggccacgtcccggcctgcggccctagcagcctgggggccacagcggcccctccggggacgcagctcggactctgccaggcctccgcccgtggccggcggcatcttccccctcctctgggtcgccctccggcccggaggcacactttgtctgaccagccgccccgccaaggagtcacaagagggcagctcggggtaccccgggaaatgcaacgcccttcactgcagcggagcgcggggccccggctcggggcggggcg

SEQ ID NO: 367246 - DNA, 1158 bp, Homo Sapiens
  misc_feature (21)..(21): n is a, c, g, or t
  misc_feature (31)..(31): n is a, c, g, or t
  misc_feature (63)..(63): n is a, c, g, or t
  misc_feature (74)..(74): n is a, c, g, or t
  misc_feature (81)..(81): n is a, c, g, or t
  misc_feature (93)..(93): n is a, c, g, or t
  misc_feature (540)..(549): n is a, c, g, or t
ttgtactgtccaacggaaatnaccctggganccttttagggggaatgccctttccggttattnaacctgggaanatcctanttttggcctacngggacaaacctccttacccctaaccccaatatattatttgaccagattccaggcatgaagtaaaacgtcgtcacttttcccttagtgcttttctgaaggaatttaaagacggaattttaaacggcccattgcaatattttcaagtggctctcataccaagtccccattactgtttgttaaatttcagtacgtcttaaagtactacttataaacaaatgaaactcagagaaactgaatcacctggaagagaaaaatccattatggtcccatgtggagtgaataatgatggatcagcaccctttctctcatgttattgtataagacgagacttttgggccagcagcgattgggcagcttttaaattcttaactgaaaagagtaatgcaatacagggattattcccaataaaattaacttttatttaaaagcaagagattttacttagcnnnnnnnnnncaaagtttgattttatccccttgaaaaaaaatctcttcactttaaagtataaaggtttttaaaaatccaattgcaaaatgtattatttttacaactatcgaaaaggcataaaagagaacatactatttatggctgaagggtatagccaggctaatgtgcacagagggaatcaataaataaaactctttttcatttcagtaagaaatcagattgtaagtttaatggctccattatagataccaccgtgtaatagaagacttaagtcaatgaaatctaatcagtgtgtcatttctcagcggccattggtgacttaaaattaagatgaggcagagccaaaatggaaaacagtcattttgttgtaggtataaacacatgaacgattcagaaaattattcatctcagctgccatgcagcatggacattaacattatggattgatagcactagtctgatccgctcaaggaaaataataagtcctattatacttaaggatgttgggttttacacagctcatttcatttttcactagaaagccagttatgaaagagagctggcctaggcatcccggccctgagtcctaggcccagtctccaactggaaaaccttagg

SEQ ID NO: 367247 - DNA, 1112 bp, Homo Sapiens
  misc_feature (405)..(522): n is a, c, g, or t
  misc_feature (1087)..(1087): n is a, c, g, or t
atcaggccaaatcggccgagctcgaattcgtcgagagcggggacaaatctgtgagaggaccacacacatactagtttcgggccaaacaacacgtggaaaggtgcatgcattctactctgcattggagttgccagagtccttcagagggaaagggatggttctgtgtgcactttttctggaagttcggactcatttctttgacccaaatgttccagagacactgcagccattcttattaacaaaaaataagacaggagtttccaaatgctccttcccttttggatcgcagcttttcttcaactagtgacaaagcttttgcgcctatttcctgcaggatgttggaactgccccgcactggtcatattaggcactgtcaattgctatgctgacttttagggggttagnnnnnnnnnnnnnnnnnnnnnnnnnnnnnnnnnnnnnnnnnnnnnnnnnnnnnnnnnnnnnnnnnnnnnnnnnnnnnnnnnnnnnnnnnnnnnnnnnnnnnnnnnnnnnnnnnnnnnnagcctttcgcatttttgtttgagaattacaccactttctggagtctgcagccttcctggagctgcaagagggcaagagaagagagctccacctctgagggagtgtctgtgatgacctgcactattcgtgtgccagctgggagagggaatgcacatttttaaaaatcccttcaattggtccacattaaaatccccaagagcaatttgcagggataatctggtcgttaaagtacccatcctcttctgcctacacacaaagcatgcattcccagctgcatctgcctctagtccattatggagacccatttctaagaggagatgggaggtcaacctctaacagccaagtagcgaacatgtatactgtaaaattaacctagaaaatcagaagaaaaatccaatttcatgctttcgaatgaatgcccacattttgtactgtcaacgaaattatcttggagcttttaggggatgccttttcgttattaactgaggacatctagttttgctacagggacaaatctcttacctaatccaatatattatttggacaggttcagggcatggaagtnaaaacgttcgttcacttttccttag

SEQ ID NO: 367248 - DNA, 491 bp, Homo Sapiens
  misc_feature (400)..(400): n is a, c, g, or t
  misc_feature (462)..(462): n is a, c, g, or t
  misc_feature (468)..(468): n is a, c, g, or t
gtggaaaggtgcatgcattctactctgccttggagttgccagagtccttcagagggaaagggatggttctgtgtgcactttttctggaagttcggactcatttctttgacccaaatgttccagagacactgcagccattcttattaacaaaaaataagacaggagtttccaaatgctccttcccttttggatcgcagcttttcttcaactagtgacaaagcttttgcgcctatttcctgcaggatgttggaactgccccgcactggtcatattaggcactgtcaattgctatgctgacttttagggggtttttgtttgtttgaaaaacagggtctcaccatgttgcccagggctggtcttcgaactccgggactcaaggcaatcttcctgcctcagcctnttcaagcagctggggactgcagggggtgtgcccattcaattaagccctttccgaattttttntttgangatttaacaaccattttttggaa

SEQ ID NO: 367249 - DNA, 1166 bp, Homo Sapiens
  misc_feature (1048)..(1120): n is a, c, g, or t
tccggaattctccggatgcgctcctgcaggcgccgcttgtgctgttgctggaaagcgagctcgctgtagaccggccgcgacaccatgtagctgcagctgtactcggggagctgcggcggctccgacctgccgcctggcgctgccatgacctgcgagccagaggacagcgaggagggaggacacgcggtaagcgaggacgatcggaggggaagagcgaggaacagaaagaacgggatcacctgttagctgcagccaggcccccctgcaccgcgagtctggtccgcgtcctgcagccctcggcgctcgcgacaagcgccccacggcgcgcacggccagcctgcaggggggcacctgagaaccttcgggtctcgtggcctgcacccgctgcccggggttccccaaacttgaagcgagtaagccccctgctctggggggcttcccgagttccacccaggtcccctatggcccgcagccagggcgctgtccgcgttctgaaatctcccccaaaccgaggggctggggcaggggccaaaggcgcttgcaaggctggaaggggacactgagattccctccctccccgcacctgacccgggacgcagctccaggtgcgcactggaggagaggtgcagacccccgggccaggcgtggaaccgtcagggcgcgctccgcgggtccccaagaggcggacgctgcaggcacattcccgcagctgtcgcagccctctcggggggagaactttcagcttattgagcaagtctctcccctcgtcctggtttccgagcagcctgttcgctctcggcgtctccaaaagaaagttgaacttgccccctgcccccctgaatcggggcccacttaaaaatcccattcccaacccttgagggccccccccgggaagggaaaccccgggccgggcggggtgggggatttttttggggggaaaacctccccgtgctttggtttggcccccccgcccggaaagagcccccggggaaaaaccccttcccgggggttttataaaccgtcctccaaaaagaaaagggggacaccnnnnnnnnnnnnnnnnnnnnnnnnnnnnnnnnnnnnnnnnnnnnnnnnnnnnnnnnnnnnnnnnnnnnnnnnnttttttccccccgcggggtcttttttttggagaaaagaaaaacccg

SEQ ID NO: 367250 - DNA, 902 bp, Homo Sapiens
  misc_feature (718)..(811): n is a, c, g, or t
agcgggtagaccggccgcgacaccatgtagctgcagctgtactcggggagctgcggcggctccgacctgccgcctggcgctgccatgacctgcgagccagaggacagcgaggagggaggacacgcgggaaggaataaactggactacatggaaatcaagactagaagagagggaggaggagctggagctatcctacctcatcagtgttttgtcttctgttgggatgaactttgttaaaactaatgcatggttaagatgaaaggcagaaggaagggtttgataaaccagaacattctcgcctgattgttagtgttgctgaagtaaatacagaagaggctccaaaatacagacctctgtacatcaaccttccgtaatccacctgccttgcatatgcagaccatgacaattctacgagctcctggaaacagaactcagaacgcctccccagagaaccctgatgcaaattctctgaaatggtagtcagcatgtgcgttttcctgagaagtgaatgagtcaacagctttcaacagatcttcaaaggcttacttcacccaatgaagttaagaaccactaaagaagaaacctaaaaggaaaatccaggtcatgaactttgcaatttttattcacatacagagaagaggggaggaatctcttgtgtatgttttacttatgtataccactggttcttaataaagggctttttttgcctccagaggtnnnnnnnnnnnnnnnnnnnnnnnnnnnnnnnnnnnnnnnnnnnnnnnnnnnnnnnnnnnnnnnnnnnnnnnnnnnnnnnnnnnnnnnnnnnnnnaagtttgctatcactccaaggttttgcatgcgacttaaactgtacatttattaatcaattgctacatgtactaaaatatgtatctctctcc

SEQ ID NO: 367251 - DNA, 1013 bp, Homo Sapiens
  misc_feature (263)..(273): n is a, c, g, or t
gggtccggaattcccgggatgggagtttctggattctttatccggaatttaagggccgccggagggctgtcgcttctgcagtgcgtaggagcggccggggcgggaggctccgcggagccgaggcgtggagaataagaaagccttgagttttgtgaaaaaccggagaagagaaactaaaaggacagtagaaaaggcttttccagtttgcataatatttccttcatggatactttttcatagcattattatgtgatgtgagaagnnnnnnnnnnngaagtaacatggattttatactacagaatcaagagaattggcttataggaaaaattgatttataaaaagtggtacaggttttcatagataaccatgacaacatcccatatgaatgggcatgttacagaggaatcagacagcgaagtaaaaaatgttgatcgtgcatcaccagaggaacatcagaagcaccgagagatggctgttgactgccctggagattgggcaccaggatgatgccaatacgtcgaagtgcacagttggagcgtattcggcaacaacaggaggacatgaggcgtaggagagaggaagaagggaaaaagcaagaacttgaccttaattcttccatgagacttaagaaactagcccaaattcctccaaagaccggaatagataaccctatgtttgatacagaggaaggaattgtcttagaaagtcctcattatgctgtgaaaatattagaaatagaagacttgttttcttcacttaaacatatccaacatactttggtagattctcagagccaggaggatatttcactgcttttacaacttgttcaaaataaggatttccagaatgcatttaagatacacaatgccatcacagtacacatgaacaaggccagtcctccatttcctcttatctccaacgcacaagatcttgctcaagaggtacaaactgttttgaagccagttcatcataaggaaggacaagaactaactgctttggtgaatactccacat

SEQ ID NO: 367252 - DNA, 1062 bp, Homo Sapiens
  misc_feature (697)..(762): n is a, c, g, or t
  misc_feature (765)..(765): n is a, c, g, or t
  misc_feature (767)..(771): n is a, c, g, or t
  misc_feature (774)..(787): n is a, c, g, or t
  misc_feature (1000)..(1011): n is a, c, g, or t
ggaattcccgggatccgcgatgtccggggccggcctagccgcggtggtgagctgcctgcgcccgcagcccggcgaggagccgcagacccatgagacgttactatttttataaccactagacaacgcaggttgccgcatacttctttatttgtgtagacctcgctcttgccctgtttgaagagcctgagttgcttcccctgcctttcttggccacctcaatagcagaagtactctgcctgactgcatactttggcagactggtacattttgcaaaagtcactcctcaaatggttttctggaaggatacaaaagacatctgcaccatggtaaccacagtggcgagtgttcattgtagtacctgtaagagtttatgaccaaaggcaggagccatgaagaaaaaagactcaatagatttgcttttgatgaaacaacaacacttccatacagtgaacgccataagcacaactgcaagcaaaccgcaaactgaagaacaaatagggcaaaatgtggcagtgcagacatttcagcatatcaagagcacttccaaattacaggaaaaaaaagatatctcaatagataattttgctgaagataagtgaaggcaactcataagggaaaaatatgtaaaatggccgataggaaagatgtttaacgtcactaattaaaattatagaataaaacgaccataaaatacccnnnnnnnnnnnnnnnnnnnnnnnnnnnnnnnnnnnnnnnnnnnnnnnnnnnnnnnnnnnnnnnnnncanannnnnaannnnnnnnnnnnnnccgccctctaaaattccccccccggggggggcccaagttttaccgggaccccacgttttttcttgggaaaaagggggccccccattagggggggccgcttttttaatacttgggcgccgggcgcccgcttttttttaacacgccccgggggcggggggaaaaacgcggtcaccgtgggggaatttttgtgaaaggggacccctttctctcttnnnnnnnnnnnncactatattggggaaacactcctccctccccaggaattttttaaggcgccc

SEQ ID NO: 367253 - DNA, 2079 bp, Homo Sapiens
  misc_feature (899)..(929): n is a, c, g, or t
  misc_feature (931)..(1187): n is a, c, g, or t
  misc_feature (1723)..(1723): n is a, c, g, or t
  misc_feature (1729)..(1729): n is a, c, g, or t
  misc_feature (1734)..(1734): n is a, c, g, or t
gggcgcggagcacccggcaggggctgacagcatggcctcgcccgacccgcccgccaccagctacgccccgtccgacgtgccctcgggggtcgcgctgttcctcaccatccctttcgccttcttcctgcccgagctgatatttgggttcttggtctggaccatggtagccgccacccacatagtataccccttgctgcaaggatgggtgatgtatgtctcgctcacctcgtttctcatctccttgatgttcctgttgtcttacttgtttggattttacaaaagatttgaatcctggagagttctggacagcctgtaccacgggaccactggcatcctgtacatgagcgctgccgtcctacaagtacatgccacgattgtttctgagaaactgctggacccaagaatttactacattaattcggcagcctcgttcttcgccttcatcgccacgctgctctacattctccatgccttcagcatctattaccactgatgcacaggcgccaggccaagggggcaaatgctctttgaaagctccaattattggtccccaaaagcagcttccaacgtttgccatctggatgacaaacggaagatccactaaaacgtccacgggattaacagaacgtccttgcagactgagcgatgacaccacactttgtttggacatttaaaattcactctgctgaactaggaggaagcttttcttttgcctgggaaaaacaactgtctcttggaattatctgaccatgaacttgctcttctagacaactcacatcaaagccctcactccactaatggagaatcctagccccactaatgccaagtctgttttgggggattttgcctcacctatgggcttccctagagtaggtctaggggaatactcagtctgatcnnnnnnnnnnnnnnnnnnnnnnnnnnnnnnngnnnnnnnnnnnnnnnnnnnnnnnnnnnnnnnnnnnnnnnnnnnnnnnnnnnnnnnnnnnnnnnnnnnnnnnnnnnnnnnnnnnnnnnnnnnnnnnnnnnnnnnnnnnnnnnnnnnnnnnnnnnnnnnnnnnnnnnnnnnnnnnnnnnnnnnnnnnnnnnnnnnnnnnnnnnnnnnnnnnnnnnnnnnnnnnnnnnnnnnnnnnnnnnnnnnnnnnnnnnnnnnnnnnnnnnnnnnnnnnnnnnnnnnnnnnnnnnnncgggctggagccacccgggcccgggctctggattcccttccaattgaaataggtgcgtgtccatggcctctcagattttaaccccacctgttgccgaccccgtgccccctggcaacttatctacccgccctcgggatcgcaaaaggccccgaccccccgcacatttgcgcggggatagactgacccggcccgcacgacgcgcgataatcaatagtagcgacaaaccggcgagagctgatcactctcccgcccaactggacacatttcggttgagacccggcgggggtaagcgcgtggtccgggcctcacagtgatggccgtgtgctgtgcgccgccgggaaaggctcgcggagaggagcgacggtgacacgcgtcgctgtgcggtctgtggagcgttcacgccacggacgcgcgcgggtgttgttgagagcggccaccggtgactgccgcgtggtgcgccgggatcgtaggtgccggtgggcgcgcagatgcgccgtattagcggcatcccgccggggtataaacccccctcacgncccggnctctntgtagtacgcgccgtatgatcaccacgatcgagggccgaataagaggagacgcgcggccatcgcacgagtcgatgtacatggaatacatgaacaactcgctcagacgacaccgcgtaggacgaagcacatacaaaaatgttatcttcgccgctcgcatcgtcatctacaattacgcagacgatcacagaactccatctgcactcagagattcacatgcgcgacgcgagacatgccacgcacgccatcgtctctcgctagtggtgcgcccgcttgtatataaatatacacacgcacaagacgcccgtatactgtcctcttcgccgccctgttagtgcagtactacg

SEQ ID NO: 367254 - DNA, 1738 bp, Homo Sapiens
  misc_feature (89)..(97): n is a, c, g, or t
  misc_feature (1622)..(1658): n is a, c, g, or t
aggggggaatattccctcccttttcgaaaaagggtttataaagcctaaagccttggttaaaggtcttttttccagtttcgggtttgggnnnnnnnnnttcttaggggtccaaagttcccccgccaaccagtccagggggggaaattcttggaaaatttttggggagttattcatgggccagttatccccttgaattggacccaaaccaaccaaaaaaaaggggctattaccttgtcttgttggcgggttatgggggaggcccacaggctatgaattgtctttgaggtgaggtcacaaggtggaaaggaccttcaatatctaccataggggtgttccctgtatccccctctggctgacctctgcggtggtgccttcaagctagagcgggttgtggcccattcttctggtgctttgtgtttgggtcgcatagctgttatcataagtctcataggtctggtcatcatattcacccccgtagccatcatcataaccatattcttcataagcttcatgggctggaggaggaggtgccctgtatcctggcactgttggtgccccccgggctcgaggggtagggacacctcttgctacaggtggcactggaagcgctccacgggttacagtgcttccccgaggggtgagaacacctcgtccaggtggtgggggaggaggaatggcacccccacggccccttgaagaagctgtgggagctattctgatccctctgcctctaatacctctgccacgaccagagtcctctgagccatttaagtaagataattcacgtagttgttcctgacgaatttcatcattgtagtcaggaaccaggaattttttaatctcttccaatgcatgactcatacgtgaataagcttccccaggtggagcaaacacttcaattaatacatgaagctcatcactcaagtgggcatatttggcttccccactcttccttagttcttcttccttagctttatctctcattgatcctttgcccaggatagacattttagcacctgtttcttcctgtagcctcttcaaggagtttcctcttggtccaagcaatttccccacaaaattgaactttggatactgcttgacaggaatcagtactctttctgagagctttatgtttttgttgctgatgacatcaagatacttcttttcttcgtcttccttttttccatcagaaccttgaaacttttcaatttcttctgccaaaaggcgcgacgcatgcacaaaagatggatccaggctatctttctctgccatcagctcaggcaaatatttctcctcttccatagcgcggacttcggattgtccccgggcgaagcgcgaggttccgctcgctcggacgcaggcagggtcttggggcagcgcctggctcccgcgctgctcctcctccgcgcggcgagggatctctgtgcgtcctcactggcccatgcacccagcacctgcgactcccgccgtcgggctgcgtggccccgcgcccacacctgcccgtcccttccgtcgtccctcgctcgcgcagagccccggctcacaccagtggccttaactggagaggcgggaacaggacgcccgctctcgacgaattcgagctcggccgatttggcctgatnnnnnnnnnnnnnnnnnnnnnnnnnnnnnnnnnnnnncgccggcacaccacgacaaaaaacggcagcctcccaaattttcggccccttaataggttgagttcgtatatacattcccc

SEQ ID NO: 367255 - DNA, 1038 bp, Homo Sapiens
  misc_feature (898)..(959): n is a, c, g, or t
gggtccggaattcccgggatggttcctgactacaatgatgaaattcgtcaggaacaactacgtgaattatcttacttaaatggctcagaggactctggtcgtggcagaggtattagaggcagagggatcagaatagctcccacagctccttcaaggggccgtgggggtgccattcctcctcccccaccacctggacgaggtgttctcacccctcggggaagcactgtaacccgtggagcgcttccagtgccacctgtagcaagaggtgtccctacccctcgagcccggggggcaccaacagtgccaggatacagggcacctcctcctccagcccatgaagcttatgaagaatatggttatgatgatggctacgggggtgaatatgatgaccagacctatgagacttatgataacagctacgcgacccaaacacaaagtgtgcctgaatactatgactacggtcatggagtaagtgaggatgcctatgacagctacgcaccagaagaatgggccacaacccgctctagcttgaaggcaccaccgcaaaggtcagccagagggggatacagggaacacccctatggtagatattgaaggtccttcccacctgtgacctcacctcaaagacaattcatagcctgtggtctccacataaacagcaacaagacaagtaatagtccttttttttggttgtttgtttctattctacggataactgctcatgattactcccatatatttctagaatttccctctgtactgttggcgtgacattgacaccaatattattttacaaaacagaatgaaaaagacattaccaagcataccctataaacctttcagtaggaggaaatttctcttgggttggtttttccattcctgcggggaaacacctttnnnnnnnnnnnnnnnnnnnnnnnnnnnnnnnnnnnnnnnnnnnnnnnnnnnnnnnnnnnnnnaaacacaatttcttgagcgttctcccatcccaccctcaatttataaacccttttggctttaaagggcggttgttttacc

SEQ ID NO: 367256 - DNA, 1255 bp, Homo Sapiens
  misc_feature (545)..(554): n is a, c, g, or t
ccccaaaaagccccacccagatttgggttatcaacagcccttccatttggggctgtggtggaggtcagtgggctttctatgggtggacgcaggaaccttaaagaacaaacccgttttctaagttggggacttgtctgtacatcgttcaaaaatgaaacttataaaatgtcatttgtttgaaaggatacccaaaattcacaacattttgtgaaacaaagatcaaggaaagcatcaaaatactgaagtagggagcacaagcctagtccagtgaaacaaactagattagcttgttacttgatgtaacacaagttacataaggttacacatttattagtaatttgcatatttaaacctttttttccactgaagtatcctcaagcacattaattagctattgaaggaacaaaggacatacataggaactcatctctgatgaagagtagctttatgtcagaaaggagaaggctaatgaatttttaagattccaaacagtggcaagaaagttcaaaggaaattgcagtaaaattgtacaatgttcaagttgnnnnnnnnnntggctctgaattacagcattcagttctatgctcaaggtatgtattagctaacactgcagttgtcagaggtgggaggcccctgagaaatgctgagaatgccaggcaccccagttctgagagccaccctagctaaactcaaagcagcattcttgagattttagcaaaaggctccgccccaagccacaaaaagatcccaatccaatcttttcagctttatcctctaaaaccttttgtcagatgagatagcatttgtgtttcccaggaggagaaggttggggaagaaaatgaagatagcttacatacagattttggatgacccgctaatctttccccttcctaggtaagtgaaaacagataaaatgtttctgggcagcccaaaggtttaccacctgtttcactagaatggccagtctgtgtaaagaggctataatgacgaaagcattttccctgcagggagaagctagaaacaaatgggtcttcctatacatcagtctgccaaatgcagcctctctcaatctatataagttcacctcgaaatacatattaagtactgctgtcatcattgttttaaacagagcgtctttcatttttttaatagtgactgattctatcggcaagggaacaaaagggtgagaaagggagcttcctgcttgctgagttttctagctattttcattctggttattttcatccgccagatc

SEQ ID NO: 367257 - DNA, 1265 bp, Homo Sapiens
  misc_feature (995)..(995): n is a, c, g, or t
ctgctaaatgccactgtggaggagaacatcatctttgagagtcccttcaacaaacaacggtacaagatggtcattgaagcctgctctctgcagccagacatcgacatcctgccccatggagaccagacccagattggggaacggggcatcaacctgtctggtggtcaacgccagcgaatcagtgtggcccgagccctctaccagcacgccaacgttgtcttcttggatgaccccttctcagctctggatatccatctgagtgaccacttaatgcaggccggcatccttgagctgctccgggacgacaagaggacagtggtcttagtgacccacaagctacagtacctgccccatgcagactggatcattgccatgaaggatggcaccatccagagggagggtaccctcaaggacttccagaggtctgaatgccagctctttgagcactggaagaccctcatgaaccgacaggaccaagagctggagaaggagactgtcacagagagaaaagccacagagccaccccagggcctatctcgtgccatgtcctcgagggatggccttctgcaggatgaggaagaggaggaagaggaggcagctgagagcgaggaggatgacaacctgtcgtccatgctgcaccagcgtgctgagatcccatggcgagcctgcgccaagtacctgtcctccgccggcatcctgctcctgtcgttgctggtcttctcacagctgctcaagcacatggtcctggtggccatcgactactggctggccaagtggaccgacagcgccctgaccctgacccctgcagccaggaactgctccctcagccaggagtgcaccctcgaccagactgtctatgccatggtgttcacggtgctctgcagcctgggcattgtgctgtgcctcgtcacgtctgtcactgtggagtggacagggctgaaggtggccaagagactgcaccgcagcctgctaaaccggatcatcctagcccccantgagttttttgagaccacgccccttgggagcatcctgaacagattttcatctgactgtaacaccatcgaccagcacatcccatccacgctggagtgcctgagccgctccaccctggctctgtgtctcagccctggccgtcatctcctatgtcaccactgttgttcctcgggggccctcctgccccctggccatcgtgtggtacttccatcccagaaatacttccgggggggcgtccaggggacctgcagcaactgggatgaacccacccc

SEQ ID NO: 367258 - DNA, 1800 bp, Homo Sapiens
  misc_feature (1711)..(1711): n is a, c, g, or t
  misc_feature (1715)..(1715): n is a, c, g, or t
  misc_feature (1725)..(1725): n is a, c, g, or t
  misc_feature (1756)..(1756): n is a, c, g, or t
cggtccggaattcccgggatgtttccgcagggaggcggcggcagctgcggcggggccggtctgtagcctttgctgagtcaacactactcacagtgaaagtgatgccttttctccatttgcacaacatgagtgtgacgtggttagccagaccaggagctcaacctcatgtagaatccagtccactgctctgatgccgaaggggaggcagaaagtgccacacttggatgcccccctgggcctgcccacctgcctctggctggaattagccgggctcttcttactggttccctgggtcatgggcctggcagggacaggtgggcctgatggccagggcacaggggggccgagctgggctgtgcacctggaaagcctggaaggtgacggggaggaagagactctggagcagcaggcggatgccttggcccaggcagcagggctggtgaatgctggacgcatcggagagcttcaggggcactacctctttgtccagcctgctgggcacaggccggccctggaggtggaggccatccggcagcaggtggaggctgtgttggctgggcatgaagctgtgcgctggcactcagagcagaggctgctaaggcgggccaagcgcagcgtccacttcaacgaccccaagtacccgcagcaatggcacctgaataaccgacggagcccgggcagggacatcaacgtgacgggtgtgtgggaacgcaatgtgactgggcgaggggtgacggtggtggtagtggatgacggagtggaacacaccatccaggacattgcacccaactatagccctgagggtagctatgacctcaactctaatgaccctgaccccatgccccacccggatgtggagaatggcaaccaccatggcacgcgatgtgcaggagagatcgcggctgtgcccaacaacagcttctgtgccgtgggcgtggcctacgggagccgcatcgcaggtatccgggtactggatggacctctcacagacagcatggaggcagtagcgttcaacaagcactatcagatcaatgacatctacagctgcagctggggaccagatgacgatgggaagacagtggatggcccccatcagcttggaaaggctgccttacaacatggggtgattgctggtcgccagggctttgggagcatctttgtggtagccagtggcaacggaggccaacacaacgacaactgcaactacgatggctacgccaactccatctacaccgtcaccataggagctgtggatgaggagggacgcatgccctttctatgcagaagaatgtgcctccatgctggcagtcaccttcagtggtgggggacaagatgcttcggagcattggtgaccactgactgggaccttcagaaaggcactggctgcacttgagggccacacagggacctcagctgcagcgcctctggcaactggcatgatagccctaatgctgcaagtgccgcccctgcctcacgtggcgtgacgtccagcacatcattgtcttcacagccacccggtatgaggatcgccgtgcagagtgggtcaccaacgaggcaggcttcagccatagccaccagcacggtttcggcctcctcaacgcctggaggctcgtgaatgcagccaagatctggacatctgtcccttacttagcatcctacgtcagtcccgtgttaaaagaaaacaaggcgattccgcagtccccccgttccntggnagtcctgtgnaatgtcagcaggatggacctggagatgtcanggctgaagaccctggagcatgtggcagtgacagtctccatcact

SEQ ID NO: 367259 - DNA, 1881 bp, Homo Sapiens
  misc_feature (57)..(57): n is a, c, g, or t
  misc_feature (156)..(156): n is a, c, g, or t
  misc_feature (223)..(223): n is a, c, g, or t
  misc_feature (248)..(248): n is a, c, g, or t
  misc_feature (294)..(294): n is a, c, g, or t
  misc_feature (303)..(303): n is a, c, g, or t
  misc_feature (317)..(317): n is a, c, g, or t
  misc_feature (336)..(336): n is a, c, g, or t
  misc_feature (461)..(461): n is a, c, g, or t
  misc_feature (604)..(605): n is a, c, g, or t
  misc_feature (670)..(670): n is a, c, g, or t
  misc_feature (679)..(679): n is a, c, g, or t
  misc_feature (717)..(717): n is a, c, g, or t
  misc_feature (765)..(765): n is a, c, g, or t
  misc_feature (796)..(796): n is a, c, g, or t
  misc_feature (813)..(813): n is a, c, g, or t
  misc_feature (846)..(846): n is a, c, g, or t
tcggggggagggatggggggtctaccatgccggacacaccacgacgccgggtagttnttggcggggaccattatagtacgtatgggggggcgcaatattacgcgcgcgtgccaatcacacaatccccacagtggcgcaacaaaacacccgggtggncgcctgattacgggcgcgaaagacaaagggtcagcatggggggatgaacctgttcgtgaatcgtggngcttatatacataaaggatgaacgngtggaaagaacgaaaagcggggggcgaggcatagtggagggcggcnaaaaacggnatcgacccagaatngtgagggccctggcgccgntatgacccccataggatggttggcgggacgcgaatgagccaccgtcactgtggccacacgggaggagactcgcgggggcaagccaatcccttacccagttagagagtcgccgggcaaccatttgngtagccgaaaggaaacacttggttggattattgcagatctccagttgcggggttggaatatgtgagtaattggttcgatcatatgcctgccacggggaagccggggtaacaagggaagcgaaacggtaggactaaaaaatttnnatgggcgcgcgtgggtgggcgggcacggcaaaatccataaaaactcgaccggggctgggccgtcngggggcaanaagcaacaatactccgtttaaggagagaattggagagnctcgggctgaaggcgtgacagcaacacggcccaaagtggcgcccgccnacatccagggggggcggaattacaggcgtgnttgcaaggagggtggtngccagtgagggtggtggtgattcaagtttactngcatagtaacctcctgccacggctgcgcgaatgcatcggcgcggataccacaacagtaggactctactagcggggcatccctcactcacccatgtgttcacgcaggcggggttagcaggcgtacggtgacggatatgtagtatggagggtagacgaggggaagcacggtgtgtgacacactgagtctcctgaagagaagtgctgcatgaagacgagggcgacaggggcggggtaatgagataaaacaaaggggggcctgtggcatgctgattaaattatctgggcggcgcgggcgccctgaataggaaaatgagtaaaggacccgggggacgggtcctgtctaagcgataatagcatttctagaagcggggcggatgagataggacgtgaaagagcggcggggcgagatccagggaaagtcatagaaagggtggtctgagcccgtgacccacggggggcgggtcccacaacacacacgggtccgggcgcggtgaatgataacgtcgatggctccgggttaccacgaatactgaagggccaggcccgctcgacctgccgctagcgagctgatgcgctcctgggggcaggtctggcagcagtgtcccggcagcgggcgcaggctgcccacaggccggggttgggcactctggtttgatgttcttgcagctgaccctgccagggcccctggtacggcgaccccactgaggcgcctcgcaggcgcacagcacgcagcgcatcaccccgaatggctcccctaggtccgggtgccacgtctcagtccaaggcatagaccttcccgccgaaggtgcagcctgccgctccccgaacgggcagcggctccttctcagaacggatgggcagcaccggggggctctgggccggcgccgcgggccggccgggagccgagcagcagcagcccgaggagcagcagcggggccggcggaaccgggaggctcggcatccatccgggatagtccggcccggcgcggccgggttccgacgaagaaggggaggggtaggaaaggaaagtaatat

SEQ ID NO: 367260 - DNA, 1269 bp, Homo Sapiens
  misc_feature (179)..(242): n is a, c, g, or t
  misc_feature (1177)..(1213): n is a, c, g, or t
tcttcccctaaaacctagaagggaaagattttggcttccagattcccctttaaatttaaacgcccgggaaatggggtgttgcccaaataactctggccttgttttaaggggaagttctttgggaagcctttggaaatttcctgaaaggcccaggcccattctttttactaaggaaagtnnnnnnnnnnnnnnnnnnnnnnnnnnnnnnnnnnnnnnnnnnnnnnnnnnnnnnnnnnnnnnnncccttcttctgtagggggtttccattcgtggaagctggagatcagcgttagctgtaaaatgagatggctgagcagatgtgccacctctgaccatggttggaactgaaccctggcaatcacgtaagcctttagcagctctcaagcttgctctcagccctctcagccctcagagggaacacagccatggctataagcaagaggatgagtaaggcctgggcgctgcccagagctagaaacccaggccccgggagggagagcctgacccacttccacacataggagaggaagaggcccaggccgcctgccagcagcacagaggacacagccaggaagcccactgccagccgccacgctctctcatcactgttgcactgggctaggaggagaggctggggggcaaagagggtgaggaccagggacccgtacacgccaagcctggccaggcccaggccaacccgaggcacccccagggcttccagctcagggaactggtgacactgtagggtgctggtgtcctcattccacaggcagaagttatagaagccgattctcaggttgggcaggtcagtgaggttgccagcctcccagagaagagcgtataacatcaggcagatgaccacaatcacgaggactatgatgctcatgaacagcagctggtcgcgccaccgaggccttgggccggccatctctactgccctctgccgggggacagaaaggaggtgcagagaccacaggaacactcatgaaaaggagaagcaggaaatcagggttggttgtttgaatcttccttctcgctggctttctaatgtcagactccagaaaggaggagtggaagggaaatggcaggcagatgcagtcctgagctggtgcccccttgccttcgcagtcgtacctccgctctcgacgaattcgagctcggccgatttggcctgatnnnnnnnnnnnnnnnnnnnnnnnnnnnnnnnnnnnnncggccgccaccgcggatgaactccagttcgccctatagtgatcgtatacaggtccg

SEQ ID NO: 367261 - DNA, 1266 bp, Homo Sapiens
  misc_feature (542)..(551): n is a, c, g, or t
  misc_feature (568)..(576): n is a, c, g, or t
  misc_feature (787)..(796): n is a, c, g, or t
tcccgggatttaagagctggccaatgacttttgaatatggtttgtagaagatgcctttcttcctgtttggttcattgtattgtattacgttaagctctactagggtaatgaaggctctacttttcactttttaaaagtggacaaaagagtgtgattttctttttccaaaaattcctgagtatcaagacgtgcaggtcatgctttggagcctatgcactgtacacaaaggcaaaaccctatgactttggcatcatctgccattgatgtccagcctctgacatgctctttgatttgttaaatgttaaatgagactttaaggctactagaaactagtaattaagtttcttaatggactgagtagccacctacttgtccggctagaatgtttgttgatgtatgagtttagattaacactcaaaagcactaggacagatgtacatagaaggtgcctactcattgtattttgatgatttcattaacaggtaaataaaagttaatactcccttacaatcccccaatcaccccgttttcccctttcgttnnnnnnnnnnattaccgccaaaacaannnnnnnnncccctttcaaaaatttcctcttagggggcgcccaagcttttcccttatcccccccttttttggcccaaacgggcgtcccccccatacggttttgttattaaacctctaagcgcctttggcttttccctttttataaattccgcccccccgcggaacaaaccgtttatcttttggggatctttcgccacaacggaaaaattccccttccccnnnnnnnnnnccaaaaccaacccgggaccccctcgcctccccgtaaaggttctcaataacttccttaggcggcaaatatatatacatcctccttccaccctgatatatacccgcgccccgccgacctatccgccggtttattattctttccgcccgcacttacacccaatatctcccgtttttagccgcgcgccccgtttatttctgtgtgaacacactcttcatcctatcgcgtgcgcgcctcgctttgcgcgctttcccacgcttgtgttcccgtatcctctctatacaacactacagcgcgccccccgcggtgtttctattctatatgcgccccccgcttatcttccctttttctcacgcctcctgtacgctctatataacgctgtagactcgcgcccccgcttattacacatctcttgttatgcgccgcgctcgtcttgcatattttgttttcccacaccaccaccctctccgccc

SEQ ID NO: 367262 - DNA, 389 bp, Homo Sapiens; identical to SEQ ID NO: 264812

SEQ ID NO: 367263 - DNA, 961 bp, Homo Sapiens
ctctgcctcttttcctcccgctcttctcgttacccaccgccggcaccggtccggaatttcccggatcgggaacatggcgactcccgctcgtgccccggagtcaccgccgtccgcggatccggcgctagtagcggggcctgccgaggaagccgagtgcccgccgccgcgccagcctcagcccgcgcagaatgtgctcgctgccccgcggcttcgagccccaagctcccgaggacttggcgcagcgaagtttggtggagctgcgggaaatgttgaagcgccaggagagacttttgcgcaacgaaaaattcatttgcaaattgcccgacaaaggtaaaaagatctttgactcttttgccaaactgaaagctgctattgcagaatgtgaagaagttagaagaaaaagtgaactgtttaaccctgttagtttagactgtaagctaaggcaaaaagcaattgcagaagttgatgtgggtacagataaggcccagaattctgacccgatacttgatacttcatcactagttcctggatgttcctctgtagataacatcaagtcatctcaaacctcacaaaaccagggacttggacgtcctactcttgaaggtgatgaagagacttcagaggttgagtacacagtgaataagggcccagcttccagcaatagagacagggtaccaccttcatctgaagctagtgagcatcacccgcggcatcgtgtttcaagtcaagcggaagatacttccagcagctttgacaacctgtttattgacaggttacagaggatcaccattgcggaccaaggtgaacaacagtcagaagaaaacgcaagtactaagaacttgacaggcctttccagtggggactgagaagaaacctcattacatgggaagtgctagaaatgcgagccaaaaaccccgtgcccccagctgccgtaattttaaacccatgtggtacccttttc

SEQ ID NO: 367264 - DNA, 1445 bp, Homo Sapiens
gatgatgtttcaatatggcagcttagaatttgccacatacgggtccccaaaactggtcacctgaggagatactcctggtcctacatacaatgacctgcagaaacctcagatcccaggagagtaatatagggttctgttcaaaagcaacagcccctgtgtcttatgtttaacttacaacatctgcacagtatttgttcccatggaagaggcataaggggctgtaatgactgacctctgtcaatcagcccaagcagaggtgactagaagacactaagcagcccagcctcccacatacctgccctgggcccagtcccacctgagtaagtctcctggcccgcatcttctctgaccatctcagagcagaaccgagagctcacttttccaaactgtttctaactgaccagggtccaaaaggcacagcatgatctcctcccacagccctcctcacagactgaagagtggaggttccctctttgggtcttccaaaatcacagcataatggtgaggagaggggtgggagagtgggactttccaaggaaggaacctcagagtcaacaactggagcccacacttctaaatggtccttttcttcactgggaggcggtgagggagagctcctcctacccgatcttggaagaaagcagcaactcttaggctggtctcctttagccaggtgagaagagctctgcctctcttcctgggcccagccacagtttgacatagcatatcgaagaatggcatcagacacagtcatggtacttcggccctggacacaggcttctatctcaggcaccgagagctggctttgcaggaataggtgcaactggctgtctgacaggagaaccacactctgcaggaccttttcaaggaagtgctgcagaccttgtcgtcgcttctcaatgaactcatctgaggtgccgaagaaggttgacttcccaggaagttcaggaacaggcaccaaaccagcatttctctgtagctgctttctcagccacacgaactcacggtagcggcgccgcacacaggaagtcttggcagtaaaggctttgctgttggtatggaggaatatcttataatccacataagagttccaggagccctcattctgcactcgggggtcctgaacacgcactgtaatcacctcctcctgttcttggttctccgacatcctacaccaaaagcccattggaaggaaacatctgagaacagcaccagctccccacagcgacaccgcccgcgccccaccatatagccagatcacggcttctccttccgggtgagtcgccggtgccccggtgcacgacgggagacgccccaatcccgggtgcccgggacgccccgcccctacaggcccgggctctgagtgggattcccgcttccgaataccgcggctccgctggcacaaggccccggactggagtcggatcccccctccactcacttgg

SEQ ID NO: 367265 - DNA, 1353 bp, Homo Sapiens
  misc_feature (225)..(234): n is a, c, g, or t
  misc_feature (455)..(463): n is a, c, g, or t
  misc_feature (1316)..(1316): n is a, c, g, or t
ttatgatttcttggcagtgagtcgcgcggaaataatgggttctataaaaacaagagaaggagggattgagtagcggggggcgggagaactatagataaaaaacgtcaaccggcgagagtcagagggttgatacaaatggacgggtggggcggtcgaaaaagaggaaaagcgggtgcaaaggggtgggtaagtaagagaaaaagggcgcggggcggaaaaaaaaannnnnnnnnnaagatagggcggggcataaattggacgcctggcgcgggcgggcaaatggctacatctagggggcgaggggccaaagcgcgacaagggcgggctcgttctgtggaaggaagcgtggggaagcggagaagatgtaggaagggatttgcggagcccaacgggaagggggccccgaggtaggcattcgtgtgaggcgcagggcacgaacagagggaagcaccgcnnnnnnnnnaatctgacaagaaaagggggtggggttcaaaaatttgaagcaaggggggggtaagagaaaaaagcagcggggccataaggggaagaaaacacgggggaaccagtggcccccgtggggggcgggtaatagggaaaggggtccgatcacccagggcaggtaggggaggggatggacaggccatgtgtcgcacaggtacgggaaggcaatagcgagccgcggggcgtgccaggcaggcaatgccagcagcccagaagccaggacgagcaggaatggggcaggcaggaatatcagcgtacccaggtggcaatcgtatggccagcccacagtgggcgggagcagcagggtcaggagcaggcgtagcaggacagtggtggcccagggcatgggtcagcagccggtgcactgggagagagaaggggcttatgtgccaggttagtggccccaacatccaaggctgtcccaggtgtgccaggttgaaggttacgctacaccagggccacctgctgagcccacctcccctccccaggagccagtcttcccacagccagcacttaatcattggtggaagggaccaaggacttccaaacaactgtggctacgcctctgtggtattaaacagaatacactggacgtgccactcagtcttttcactgacaacccgctacagagcactcactatgtcccagacaccatgaaggtactctgcttctgtatttactaaatcatacctgggatgagagcatgaaatggcctgcttcaatcctggagctaccccattccctcaagctgtgtgaccctggtcaaatcacttaacctctctgagcatcattgggggtcctcaaatacaaattgnaggagttattattgggaaacaggtgctcagctgaggt

SEQ ID NO: 367266 - DNA, 434 bp, Homo Sapiens
ttgcgggtgatctagaggatccctaggctgtggaagaagagtatgtggtttaaagaaaatattaagtaaatgagactgagatggtacctatgatggaaaattctgggctagttgactttaggatggagatgctgtgtcatgaaaatcagatttgaaatcatgttcttaaaaatcagcttgtcactttcttgttgggagtacagagaacgagtcttatctccttttagttggaactggaatattatgtgaattaagggatgcagggaagctctctcctcaacacccaacatacatcttcttggggactgtatctttgtgttcatgtatccccagtgtctgacatagtagaagcgcaataaacagctgttaaagaatgaatgaatgttaaatgagatttttcatctacttgatactactgccacgagggtgactca

SEQ ID NO: 367267 - DNA, 1144 bp, Homo Sapiens
  misc_feature (104)..(112): n is a, c, g, or t
ggggggaaataaaaagaggctgggggccgaacaatcactttggtagcaatgtgaagttgtggaaggcttttctggtacataaatttaaatgccagaggacaaannnnnnnnncccgtttttttaattattgccgacaagagcaaagggaccctccggaggggaaaaattattaacttaacttgggtagcccaagaaaagcctattttgggaagaaagtgcaggagggaaccccaatgccaacacatatgattattagtagggtttgtccatcaagataccaatatctccctcccagcagtaactcagaatcacagttatggaaatgttagagctggaagagacccttagagatcatctggctcaacaacttcattttatatgtctactatagtctccagtcaaaaattctgcaatagcagcaggaagctctgttttaataattaaaagataagatgacatagctccaatattctgaattattatggtgcctgccaccaccaactttccaggtaatccaaatgcaaagagtccaagatcttcataagatgttacagctccacagagaattttacaaagattgaaggaattcaatcaacggaagacaggtgagtcaatgtgcaggcagaaccatgaagtagttagttcatgggcccaagtaggctgtctgaatacacatactaagcagaagatggactgagtaagaagccaggagagcaactgtcagcagcaagaagctaaatccaaagacaccggtattagccataacataagctaagccaaggatgccacttcccatgatggcattcatcaaattaaacactgataaaccaaatgaaacacctggggatcgctgtctgtgaagttcgttgcttagcaacggactcaactcttcggcctccgcttcttcaggctgctggacagagacataccagccccgctcagcgttgaagctcccccaggacgcctccatgctgctctccagctgactaccagttccatctacgagcctctacccctgcctgcgctccagtcgtcggtcgcgccagaggcggagctttgagcccggcccttccgcattccgtacttcacggccacccaggcctcgctaccttattacacccagtggggggttaaacataggcc

SEQ ID NO: 367268 - DNA, 1196 bp, Homo Sapiens
  misc_feature (899)..(899): n is a, c, g, or t
  misc_feature (1056)..(1056): n is a, c, g, or t
agcggaggtccaggggtagaggctcgtagatggaactggtagtcagctggagagcagcatggaggcgtcctgggggagcttcaacgctgagcggggctggtatgtctctgtccagcagcctgaagaagcggaggccgaagagttgagtccgttgctaagcaacgtaagtgggctgtgttcgcttccccgcgctgacgccctccggcttccctcaagtgcctgccaaataagacccagaaaaggaggaccgcaccgggacaggggagatgctggagcctgaaccctgggggatggggtctgaaggcagccgccgagattcagatgagattggcgcagttatgaacgtgatagcagcctagcatactctagaaagaaaagatgaaaagcgtcgggtggaagagatgcagcgttgagtggaagctgcgaacatgatgggatgagcggccctaggattatgtactcactgctgaacttcacagacagcgatccccaggtgtttcatttggtttatcagtgtttaatttgatgaatgccatcatgggaagtggcatccttggcttagcttatgttatggctaataccggtgtcttggatttagcttcttgctgctgacagttgctctcctggcttcttactcagtccatcttctgcttagtatgtgtattcagacagcctacttgggcccatgaactaactacttcatggttctgcctgcacattgactcacctgtcttccgttgattgaattccttcaatctttgtaaaattctctgtggagctgtaacatcttatgaagatcttggactctttgcatttggattacctggaaagttggtggtggcaggcaccataataattcagaatattggagctatgtcatcttatcttttaattattanaacagagcttcctgctgctattgcagaatttttgactggagactatagtagatattggtatcttgatggacaaacactactaataatcatatgtgttggcattgtgttccctcttgcacttctttccaaaataggctttcttggctacccaagaagntttatcattttttcctttaggatgctcccttggctccttgggggaacatatttaaaaaaatgggtcccctcccctttggtccctcttggacctttaaatttatcggtaaaagaaaaaggcttttccccgaaatttttcaa

SEQ ID NO: 367269 - DNA, 874 bp, Homo Sapiens
ccgcgacctgttggtcgtcccccgtctttcttgtattccacaagctggtaccggtccggaatttccgggatgccgccgccgcgtcctctcagccttgcgctccgcccgctgcctctgccgccgcagcgcagagccgggcgcaccggccccgcagcctgcccactcttcgggccgcgtgccggctgcagccggcatggggggttgctgagagcgagcactcctttcctctggcacctcccccggctactggccactggactctggccagcgaggctcggcccctctggcccccagtctggcgcctggcacggccctctactctgctcctccagctctgagcatcgtgtcttcgccgccccccccgcccgcgcctgggatacctgggtcccccggcgacccctaggagaggggcgcgggggggcatgaagccgctggagaaatttctgaagaagcagacgtcgcagctggcgggccgaacggtggcgggaggtcccggcgggggtctggggagctgcggtgggcctggagggggtgggggacccggcgggggcggcggcccagccgggggacagcggtcgttgcagcggcgtcagagcgtgtctcgcctgctgctccccgctttcctccgggagccccccgacgagccggggctggagcctgccctgaggacggcacggcggagagccggcgggggtcgcggaggagccgggcagcggggggcctgctggctgcagctggacggagtgtgccggggcccgggcctctcgggggcacggggggccccatgagcgtcccgttctccctactccatctgacgagctgtccccaaggcgagccctttacttcgccggccttgggccctctggttcgccca

SEQ ID NO: 367270 - DNA, 808 bp, Homo Sapiens; identical to SEQ ID NO: 98656

SEQ ID NO: 367271 - DNA, 1127 bp, Homo Sapiens
  misc_feature (910)..(911): n is a, c, g, or t
attgctgcttgctgccccttgggctggggataatggaagttctttcccttcccaactctttccagacccaagcactctgggactcactccatagtccaggagttccaggttccggattatgttccatggcagcagtccaagcaggaaaccaagccatctactctgcctccagtccaacaagccaacagccttcatacaagcaaaatgaagactttgactagggtccaaccagtgtttcacttcaagcccactacggtggtgacaagctgccagccgaagaatccaagagaactacatagaaggcggaagttggaccctgggaagatgcatgccaaaatctggttaatgaagacgtcgctcaggagcgggagggccgctctgcgagagctccgaagccgtgagaacttcctcagcaagctcaaccgggagctgatcgagaccatccaggagatggagaacagcacgaccctgcacgtgcgggccctgctgcagcagcaggacaccctggcgaccatcatcgacatcttggagtactcaaacaagaagaggctgcagcaattgaaatctgagcttcaggagtgggaagaaaagaagaaatgcaagatgagctatcttgagcagcaggcagagcagctgaatgccaagattgagaagacccaggaggaagtgaacttcctgagcacttacatggaccatgagtattccatcaagtctgtccagatctccactcttatgcgccagctgcagcaggttaaggacagccagcaggatgagctggatgacctcggtgagatgcgcagaaaggtcctggaatccttgtccgacaagattcagaagaagaagaaaaaaattctgagttctgtggtggcggtgagtagccagttgctgtgtgggagcggggatccaggtnntacccccacccggcctcttcccatcctctgcctcaggcccactgcaaccccatcgggctctaccatggtctgctgcccaggagaggcacctgggggccaaaactccttcttcctccacgggaaacccagcgtccctatgaagaggctcctcctacaaaaaatgtgggaaaaccagggactccctgaaatgcatgcaaaggttccaaaaaaatgccg

SEQ ID NO: 367272 - DNA, 1148 bp, Homo Sapiens; identical to SEQ ID NO: 98659

SEQ ID NO: 367273 - DNA, 672 bp, Homo Sapiens; identical to SEQ ID NO: 89244

SEQ ID NO: 367274 - DNA, 941 bp, Homo Sapiens; identical to SEQ ID NO: 98661

SEQ ID NO: 367275 - DNA, 806 bp, Homo Sapiens
  misc_feature (722)..(722): n is a, c, g, or t
  misc_feature (733)..(733): n is a, c, g, or t
  misc_feature (739)..(739): n is a, c, g, or t
tggcctccgtgatgtgcacccggccgggtactccggctgcctccatccggttggccagggacacgtcgtgggaccacacgtcatactgccacttgcgcagcccgatgaccccgcacagcacattccccgagtgtatgcccacacgcatgttgatgtccacgcccgtggcctcccgcacctgcttgatggcctggcacatgtccagccccatcttcacgcagttccgggcgtgggtaggcagcgacacgggcaggcccgatacacagtagtagcagtcgccgaggatcttgattcgcatgcactcgttggccttggcgatctggtcgaacttgccaaagagctcattcagcaccaccaccagctccttgggagaacagtcgctggccagctgcgtgaagcccacgatgtccgcatagaggatgctgacattctggtgcctcttgacgtagaggctgtggaagttgttgtcaggcatgcagcgacggtcaccatgctccttgagccgttcgatgatggccagcttcatgcccatggagatgtgggccggaagcactgacagcagcaggttctcctgctggcgcttctcgatgcgcagcttccggcggatctggatgcacttcacagtgtaggtgaagaggtcccgggacgcatcctgcatttggtgcttgtggaaggcgcctgtcaggttcccacacaggaagatgactgcgttggccagcagntgcagccccancccggnactgggtgtcgtgaagcctcccattaaagaaccgagcaccagactgggctgactccacacgcagttc

SEQ ID NO: 367276 - DNA, 832 bp, Homo Sapiens; identical to SEQ ID NO: 98665

SEQ ID NO: 367277 - DNA, 542 bp, Homo Sapiens; identical to SEQ ID NO: 98666

SEQ ID NO: 367278 - DNA, 1008 bp, Homo Sapiens
cggaacatccgtgtccgctctgtgacaggcgtcggcttctacatgcccatggggaggatcaaggggaccctgtcatcaaggttcctgatggtggacggtgacaaagtggccactggatcttacaggttcacctggagttcctcccatgtggacagaaacctcctcctgctcctgacaggacagaacgtagagccctttgacacggagttccgggagctgtacgccatctccgaggaggtggacttgtaccggcagctgagcctggcgggcagggttggcctccattactcctccactgtggctcgaaagcttatcaaccccaagtacgccttggtgtcaggctgccgccacccgcctggggagatgatgcgctgggctgcccggcaacagcgggaggcgggcggcaacccggaggggcaggaggagggcgccagcggtggcgagtcggcctggcgcctggagagcttcctgaaagacctggttacggtggagcaggtgctgccccccgtggagcccatccccttgggagagctgagccagaaggatggcaggatggtctctcacatgcacagagacctgaagcccaaatcccgagaggcacccagccgaaatggcatgggagaagcggccggggggaggccgcccccgccgggcgcctcagcagcaggctcttcagttcgccgagccaagaagcctgcgaggcccaatggccatggcccagctctgtctccaccgagacctctgaagtggagttcctgacgggggaagagggccaacgagaattccagtgctgacatctcaaggtaaaacaagtcccagttctaggcaaggcctagcaactggtggtaattacctgagctgcgggattggtggtgggccaggaagtgtggattgcttggctgccttgccctgtgctgtggagagcgcatgttcgacactggaccggttggacatcagaggcgactggcttttgcctgaacatggtcctggcctaggacgctggatcca

SEQ ID NO: 367279 - DNA, 525 bp, Homo Sapiens
ctccgtgaggcggtactggcgcgtgaaccgcatgccgcacgcgtcgcacgcgaagggcttgaggcccaggtggctgcgcatgtggcgcgtcatggtcccacgctgcgtgaacttcttcccgcagatggtgcatgggtagggccggggtcagccagtgcgtcttctcgtgctgccgcagcgtggccgggtccttgtagctcttgtcgcacgacgcgcagcggtagggccgcagcagctctcccaggccacccggagccccggcgaccttgtccccgccgcctccaaaaagggggccctaggccggcggccccagcggccacttcggccgcctcggccctgccgtacagcgcttcctcctcctccacgtgagcctccacgtgcgcgttcagctgctcagagctggggaagcccttgccgcacggaatgcacacgtacaggttgtcaccgaagctctcgggctcgccataggccaggtgcgggcatgggtagccctcgaggtggccgccaggcgggctggggtcctcg

SEQ ID NO: 367280 - DNA, 820 bp, Homo Sapiens; identical to SEQ ID NO: 98668

SEQ ID NO: 367281 - DNA, 1267 bp, Homo Sapiens
  misc_feature (308)..(325): n is a, c, g, or t
tcggcgtgcggcggagctgcggctgctcctgctgctggggggagcggcggaggtggccgccttgcgcctccctggacttcccaagtgggggcagagcagtcgctcgcgggagacgtcagttagaaggcattgggaaagagggaccttcaaactcctcctcggcgtctcctctcctcccccttttggcccctgcctttggagaaagtggagtgtggcgcttggttgtcgttatttcttcggactgcttcgcggtgcacggattcagcttctgcccagtggggctttcagctgtttgcgcgtctctctgnnnnnnnnnnnnnnnnnnggcacacctctgtctacgatgaggaaaggtctgcgggcgacagcggcccgctgcggactgggactgggatacttgctgcaaatgctcgtgctacctgccctggccctgctcagcgccagcggcactggctccgccgcccaagatgatgacttttttcatgaactcccagaaacttttccttctgatccacctgagcctctgccacatttccttattgagcctgaagaagcttatattgtgaagaataagcctgtgaacctgtactggtaaagcaagccctgccacccagatctatttcaagtgtaatagcgaatgggttcatcagaaggaccacatagtagatgaaagagtagatgaaacttccggtctcattgtccgggaagtgagcattgagatttcgcgccagcaagtggaagaactctttggacctgaagattactggtgccagtgtgtggcctggagctccgcgggtaccacaaagagccggaaggcgtatgtgcgcattgcatatctacggaagacatttgagcaggaacccctaggaaaggaagtgtctttggaacaggaagtcttactccagtgtcgaccacctgaagggatcccagtggctgaggtggaatggttgaaaaatgaagacataattgatcccgttgaagatcggaatttttatattactattgatcacaacctcatcataaagcaggcccgactctctgatactgcaaattacacctgtgttgccaaaaacattgttgccaagaggaaaagtacaactgccactgtcatagtctatgtcaacggtggctggtccacctggacggagtggtctgtgtgtaacagccgctgtggacgagggtatcagaaacgtacaaggacttgtaccaacccggcaccactcaatgggggtgccttctgtgaagggcagagtgtgcagaaaatagc

SEQ ID NO: 367282 - DNA, 952 bp, Homo Sapiens
  misc_feature (726)..(726): n is a, c, g, or t
ttccaagatcatccttcacccgaggtcctgcccaagcacaggccagatgcaagaatggggaaaagtctggtcctgatctccaagtctcaacatcctatcagtgactctgctccctgaccacacatcggaagggctggatgaccccaatcaaaagaaagaacaaggactctggttacccttgcctccacccatgtgtcataagagtaggctacagaggtgaccaggcctggcagttgaaatctctggaagagggaacatgtggggactactcagaggcaaagaggagctgctcctgcctccatggttgctggccactcccaccaactactcttagggaggctaagcagtctctgttttgcttccatggctcaaataataccctgggtatgcaggacccactataccttgcatttgctgagtacacctagagagcttggctgtttccaaaaacaatcagggtcataaccatccatgcagacatggaggctcggctgaaccaggactcctcactgtctacctgagagaatgagcacccctcatccatctcagcatcaacacaatttccagggacctcaggtctacctcaggactgaacgccacacctcaggattcctcctccttgaatctgagactggctgcccattctgagatggggatgaaggtaagatgccgcatcaccaggcacgccgcccctgacagctgccttgataccagctctctgtgganaaccccgaggagtggatctggagaacagctgggcctctcactcaggacttctctcctggaagaacaggcagggcgtaaaactgaggatgattcccctaatgcgttctgcttgggcttatggaggagctggtccttccttacagccttgggggatggacttggccacactacaactcccatgagccctgtgagagggccgaatgtctatgccaagagggccgggggg

SEQ ID NO: 367283 - DNA, 605 bp, Homo Sapiens; identical to SEQ ID NO: 98681

SEQ ID NO: 367284 - DNA, 792 bp, Homo Sapiens; identical to SEQ ID NO: 98683

SEQ ID NO: 367285 - DNA, 994 bp, Homo Sapiens
gggtgctatagacgcacaaacgaccgcgagccacaaatcaagcacacatatcaaaaaacaaatgagctcttattttgtaaactcattttgcggtcgctatccaaatggcccggactaccagttgcataattatggagatcatagttccgtgagcgagcaattcagggactcggcgagcatgcactccggcaggtacggctacggctacaatggcatggatctcagcgtcggccgctcgggctccggccactttggctccggagagcgcgcccgcagctacgctgccagcgccagcgcggcgcccgccgagcccaggtacagccagccggccacgtccacgcactctcctcagcccgatccgctgccctgctccgccgtggccccctcgcccggcagcgacagccaccacggcgggaaaaactccctaagcaactccagcggcgcctcggccgacgccggcagcacccacatcagcagcagagagggggttggcacggcgtccggagccgaggaggacgcccctgccagcagcgagcaggcgagtgcgcagagcgagccgagcccggcgccgcccgcccaaccccagatctacccctggatgcgcaagctgcacataagtcatgacaacataggcggccggaaggcaaaagggcccggacggcctacacgcgctaccagaccctggagctggagaaggagttccacttcaaccgttacctgacccgcagaaggaggattgaaatagcacatgctctttgcctctccgagagacaaattaaaatctggttccaaaaccggagaatgaagtggaaaaaagataataagctgaaaagcattaggcatggccgcggcaggaggggccttccgtccctgagtatctgagcgtttaaagtaactgagcagtattagcggatcccgcggtagtgtcagtactaaaggtgactttctgaactccccttgtgttcttcctgtgagaagccggtcttgttgccta

SEQ ID NO: 367286 - DNA, 933 bp, Homo Sapiens
tcgagtgtcccataatagaggccaacttaaatctcggcacggtaaactgtgatccagatctgttctactgaagaattataaacagtgtcacattcagtctcccaaaagtccctttcatcgtcctgatagagtaatggtatccaggcttctgttactcccctgagaatttttccttgaagaagaactactgggtacactgggacaatgaatcatgtctctggatgaatcgctgagatgagtttgtaagatcaaacatagatttgcttagcccaggggaaccgggaagtttgttcgtccttaaatcacaaaccgatccatacagtctcgtcacttctgaacggggaggaaagcgtcgactcaaatcaggtgaaatgtgctgatacatatagaatgggttatacacatcatagctaggtccgtgctgggatgaactggaaagttctacctttcgatctccaaaagatgctctggcagatccttcaagttcttccagatgtgaaggagtttcttgtgtcctgggttgaatgtaagataacttaaacttgggcaccacaaatggtacttctttgccatcagatggtaatttggaaagcaaataatcctcagtacagccaagctgaggctttacagaaacagaagtcaatggaggtacagagatagtagcattttgactatttgggactgctgctttaaaatctctttccacagaaaagttgtgtttttctgtttcaccatagaaacatcctccacagcaactctttataaattctgttgccattacattcaatttccaatatccagcaaaagacacaaacttccaatcttaatattaatctgctggaggcagtgggcgctctgctgtcgccgcctgcgggaactgtgactccggtcacctcgcgcggccgcgcctcgaggtcctgcctttcccagggc

SEQ ID NO: 367287 - DNA, 915 bp, Homo Sapiens; identical to SEQ ID NO: 98685
  misc_feature (874)..(874): n is a, c, g, or t

SEQ ID NO: 367288 - DNA, 708 bp, Homo Sapiens; identical to SEQ ID NO: 98687

SEQ ID NO: 367289 - DNA, 1271 bp, Homo Sapiens
  misc_feature (982)..(983): n is a, c, g, or t
  misc_feature (1144)..(1144): n is a, c, g, or t
  misc_feature (1194)..(1210): n is a, c, g, or t
cctggcctccacagccttcgggagctcccagacccagtgctgagtgaggaggtggtggagggcattgctgctggcattgaggcagccctctgggacctgacacaaggcaccaatggccggtacaagaccaagtatcgcagcctgctgttcaacctgcgggaccccaggaacctggacttgtttctcaaagtggttcatggagatgtcaccccctacgacctggtgcggatgagctcgatgcagctggccccccaggagctggcccgctggcgggaccaggaggagaaaaggggaccgcagatgttcatggactgcagcccacaggccctgcccatcgcatcagaggacaccacggggcagcatgaccaccacttcttagaccccaactgccacatctgcaaggactgggagccctcgaatgagctgctaggctccttcgaagccgccaagagctgcagggacaatatcttccagaaagccctaagccaaactcctatgcctgctccagagatgcccaaaaccagggagttgtctcccacggaaccacaggacagggtccctccatctgggctccatgtgcctgctgcacccacaaaggccctgccctgcctgccaccctgggaaggtgttctggacatgttctccatcaagcggttccgggccagggcccagctggtctcgggacacagctgtcggcttgtccaggctctgcccaccgtgatccgctcggcaggctgcatcccctccaacattgtctgggaccttctggccagcatctgcccagccaaggccaaggacgtctgcgtggtcagactgtgcccacatggggcccgggacacccagaactgccgcctgctctactcatacctcaatgataggcagcgccacgggctggcctctgtggagcacatggggatggtcctgctgcccctgcctgccttccagcccctgcccaccaggctgcgccctttggggggcccanngtctggaggtcactcactcaagtctgttgctggctgtgctgcttccccaggaagggcttccagacacagcagggtccaaccccctgggtttgggggaaagttttcaaaagaatggtctcctttcaccaggtaaaggtgggaggaaagagatacctatcagnccagaatgaccaggggagggcccgaatgggtgcccccttgaaaggggcannnnnnnnnnnnnnnnnaggaagggtggccctgggcaacccaaaaacccccgggggccagggggggcaaataataatc

SEQ ID NO: 367290 - DNA, 971 bp, Homo Sapiens
cccgcgggggcgcggccagcgccagagtagatacctgtcccgcccgccgcggccagcagcctcggaggaagccaggcaaagagggccggcggagaccaggtccgcgccggaggaagccgcgcccggccgaggccccggaccctgcgccccgagctccacggcaccatggccccgaagctgctgctcctcctctgcctgttctcgggcttgcacgcgcggtccagaaaggtggaagaggatgaatatgaagattcatcatcaaaccaaaagtgggtcttggctccaaaatcccaagacaccgacgtgactcttattctcaacaagttgctaagagaatatgataaaaagctgaggccagatattggaataaaaccgaccgtaattgacgttgacatttatgttaacagcattggtcctgtgtcatcaataaacatggaataccaaattgacatatttttgctcagacctggacagatagtcgccttcgattcaacagcacaatgaaaattcttactctgaacagcaacatggtggggttaatctggatcccagacaccatcttccgcaattctaaaaccgcagaggctcactggatcaccacacccaatcagctcctccacggattcggaatgacgggaaaatcctttacactttgaggctcaccatcaatgctgagtgccagctgcagctgcacaacttccccatggacgaacactcctgcccgctgattttctccagctatggctatcccaaagaagaaatgattatagatggcgacacaaattcagtggaggccagttgaccagaaaaccatggcggcttatcagctttgacttcattggggcctcagaaaacccacagaaatcgtgaccacgtctgcaggttggcaattcctgaaagaggccaggtctcaaagcccgggagcctaggcatatgtagtcatatcttatgtcagcctttgggcccggaca

SEQ ID NO: 367291 - DNA, 1222 bp, Homo Sapiens
acccttgactgcccgccgggttactggggcaagcactgccccacccaccccagttggctcagaactcgcagaccacaagacgcttttctccacaagccctgtcattccacttgccattggtgaagatctccacacagtcctctgacccgccatacatcgttagggctcccctggggcccagttggaatagaccagggactctcctgtgcgggtaggtgaacttgccctctgtcttggaatcagtcatgctcatggaaagcagcctcgttcttagctacgaccagctgttgcaaggcggcattctcagcggcagagcgtggagaggccaactgtccaccagcctgtgtgcacagcagctgtgcctccgtaaatggttttacaaagcctgctgtcttgaaaatcttctccccgacactttggccatttgggaagagctcaactttcttatactgagagaaagcagcctggaggtgctgtacttgtccctgtaaggcctcaacctgctgcctcagagaagcaacatctggaagcccactttctccctttgctcctttgtctccaggaatgcctttgtcccccttcaatcccgggggtcccctggcacctggacttccctggggacccatggctccagcagaccctgctgcccctgcgtttccagggactccacgctcaccagggacacctcgctctcccttagggcctgcgaggcctcttgcccctgccgagccctgcatgcctggggcacctacttctcctttgggcccagcttctccttttgggcctggcttgccctgaggtcctatgttcccctgcttccccaggggaccttctcttccagctggaccaggcacaccgggaggtcctggaggtccacttggcccagtgtctccctttggtccaggttctccaacagagccattgtcccctttgggcccaactgggccagcttgtccaggcatccctgcttgccctgcagctcctggcaaacctgggtcccccttctcgccccgagggccctctctcccatcccgtccatcgcgaccaggcaggccactctccactgagctacacatgaccagggtgcaagcactgggcattgttctgtgggagtaggtcttcatttctgcttccaggtagcccaggggctgtgtgagcaggaccagtgcagagaggaggaagagcagcatggcaggtttctttttgttaggccccaggagct

SEQ ID NO: 367292 - DNA, 736 bp, Homo Sapiens
  misc_feature (430)..(520): n is a, c, g, or t
  misc_feature (547)..(640): n is a, c, g, or t
ccagactcagagacggaaccagagacgggccagagcatccccctcctccaccatgaaactcgctgtcaccctcaccctggtcacactggctctctgctgcagctccgcttctgcagagatctgcccgagctttcagcgtgtcatcgaaaccctcctcatggacacaccctccagttatgaggctgccatggaacttttcagccctgatcaagacatgagggaggcaggggctcagctgaagaagctggtggacaccctcccccaaaagcccagagaaagcatcattaagctcatggaaaaaatagcccaaagctcactgtgtaattagcatttagaagctgaagatccccaactgctccagcctctgccgctgccatgctttgagtccacgcccaccagccttgctctcttcaataaaccacaagcatcnnnnnnnnnnnnnnnnnnnnnnnnnnnnnnnnnnnnnnnnnnnnnnnnnnnnnnnnnnnnnnnnnnnnnnnnnnnnnnnnnnnnnnnnnnngaaccgacgcgagggcgaggcacaggnnnnnnnnnnnnnnnnnnnnnnnnnnnnnnnnnnnnnnnnnnnnnnnnnnnnnnnnnnnnnnnnnnnnnnnnnnnnnnnnnnnnnnnnnnnnnncccgccgcatgaggacagaagccacagccactagacccccgcacgacaccggccggaccaccaccacacagcccgcagcgccacacagagagccag

SEQ ID NO: 367293 - DNA, 1228 bp, Homo Sapiens
  misc_feature (38)..(38): n is a, c, g, or t
  misc_feature (116)..(116): n is a, c, g, or t
gtagaggagtctagcagggttgatcggagtggaaggtnggtgaatatatatgcggggtgcgccgcgagtggtcatcctcttgacgggtattcgccgggcctatcggcagctgttgnttcggtggcactcgtggaagacaatgttcatagaagatagaaaagttttttcctagtatacagaggaaaagggtttggagagagaggttgaccattgggggcggggttgctttaaattcggccaggggttgtttcccatgcgggggttttttggcccttgtgtccagcaagccctcagggaggggaagtccaggagtctctcagggcggggttttgggaagtaagttcaagcctttgcccgtgtcctggcccatccttccttgcttccccaccagcggaacagcagcattcccgaacatggtgaagagggcacaggtggatggccagcagcagccccgacgctgccaatttccggcagcgaccacgcggatgcaatcacaaggtcttcttcatcatagaggagttctgcagcaggaagaagggacggagaagccggcggatccgcaggggctcatgacacacgagactcagggacacggtccagtccaccagagacaccaccagcaccacgaggtagcccagcagccaaaggtttttctggaaatgggcccacccgaacaggtaacccttcacagagaggtcggccgcaaagaccagcaggcagagcacctcgacactctcggtcaggccgcagggcggctcccagggggcagcgcggtagcgcacgtccgccgtgctggtgagtgaggatggggtctcgataaaagccaaaaacaggatcaagaagatggtgaagctcaaagtccgttggcatacgttcgagtaataccgtcggtaaagccacatcgagctggcatccacccggtggttgatggagcggtactgaatagcatcttcgatgaagaccacagcctgatcaatgcagaggtcccacctggccgcggcaccagggccgacttggatgctgcggtaagtggtcagccccgccggccagtcgccgccaccgccgcgggccccgcccagcaggggctccgactccgcctggggttccgccatccagcagcccacgcgctggacccgaccctcagaagctcaagccccgaaggcgcccagcttcactgcgcaggcgcggagaccccgtccctggcgttcttgctgacgcgcgcacggca

SEQ ID NO: 367294 - DNA, 833 bp, Homo Sapiens
tcctggcccaccaccctgacggaccccactttggccgcaatcacatttaccaagggacattggagctccccacaccactcattgctgcccaccagctatacaactacgtggctgatcacgccagctcttaccacatgaagccattgcgaatggcccggccagggggcccagaacacaacgagtatgccctggtgtcggcatggcacagttctggctcctacctggactctgagggacttcgacaccaggatgactttgatgtgtctctgcttgtctgtcactgtgctgcaccctttgaggagcaaggagaggctgagcggcacgttctgcggctacagttcgtcgtggtgctcaccagccagcgagagctcttccccaggctcactgctgacatgcgccgcttccggaagccacccagactgccccctgagccagaggctcctgggagttcagctggcagccctggggaggcctcagggcttattctagcgcctggaccggctcctctgttcccaccactggctgcagaggtgggcatggcacgagcacggctggctcagctggtgcggctggctggagggcactgccgtcgggacaccctttggaagcgcctcttcttgctggagccaccggggcctgatcgactgcggctaggggggcgcctggccctggcagagctggaggaactcctagaagcagtccatgccaaatccattggggacatcgagccccagctggactgcttcctatccatgacggtctcctggtaccagagcctgatcaaagttctctaagccgtttcccccagagctgtcgccatttccaaagcccag

SEQ ID NO: 367295 - DNA, 931 bp, Homo Sapiens
tggatctcacttaatggctgagggctccaggactcaggcccctgggaaagggcccccactcagcatccagttcctgcgaagcccaggtatgaaggcttgaagaggcagcagaggacccaggcccacctcctggtgcttccaaaaggaggaaacacacctgctcctgcagaatcgatggtcaatgctgtttggattaacaaggagagaagaagctcactgtccctggaagaggcagattctgaggtggaggggaggctggaggaggctgcccagggctgccttcaggcccccaagtctccatggcacacgcacctggagatgcattgtttggtccaaacctccccccaggacaccagtcatcaagtacatcataggggcaagcttgtgggatctgaccaaaggctccctcctgaaggagacacacacttgtttgaaaccaatcagatgactcagcaaggaaccggaatcccagaggctgcccagcttccatgccaggtgggcaatacccaaacaaaggcagtggaatctggcttaaaattcagcactcaatgtcctctttccataaagaacccacacaggtctggcaaaccagcttactatccatttccccagaggaaaacacccaggatctcccaagctgcccggaacctgggcttatatggctcagcgtgaagctttctattctgccagatgtcttgaccttgaggccacctatggccttatagaagaaccaaggaggcagagccacaacgaggtctctagctatgagcaagaactggactaacctaattataggaattgtgggagacgaacttcacaatggtaacatggttttacccttccaataagaagagacttcccagaccaaattgcccacagtttaggatgaagaggactgtctggtcagtgcagccccattctgacattacta

SEQ ID NO: 367296 - DNA, 795 bp, Homo Sapiens; identical to SEQ ID NO: 98695

SEQ ID NO: 367297 - DNA, 705 bp, Homo Sapiens; identical to SEQ ID NO: 98698

SEQ ID NO: 367298 - DNA, 872 bp, Homo Sapiens
agtggatgggggttgtgggagagaggcagctgggagacaggcctccctctggagttcatagctgagttgctgtccaaatcagtggtccctagaatctataaaacaaagctgagaacttcagaggtgcatccagagaagccacactccaaaaggaccacttccagacgccatgcggcaaaccctaccgctgctgctgctgacggtgctgcgccccagctgggcagaccctccccaggagaaggtcccgctcttccgggtcactcagcagggcccctgggggagcagtggcagcaacgccaccgactcgccctgcgaggggctgcccgccgcggatgcgacggccttgaccctggcgaaccgcaacctggagcgcctgcccggctgcctaccgcgcacactgcgcagcctcgacgccagccacaacctgctgcgcgccctgagcacttccgagctcggccacctggagcagctgcaggtgctgaccctgcgccacaaccgcatcgccgcgctgcgctggggcccgggtgggcctggcggggctgcacaccctggacctcagctacaaccagctggccgctctgccgccgtgcaccgggcccgcgctgagcagcctccgcgccctggcgctcgccgggaatccgctgcgggcgctgcagccccgggccttcgcctgcttccccgcgctgcagctcctcaacctctcctgcaccgcgctgggtcgcggagcccagggggggcatcgccgaggcggcgttcgctggagcaggatggcgcgcccctggtcacgctcgaagtcctggatctcagcggcacgttcctttgaacggggttgagtcagggtgggatcagagacctgccgaagctcacatccc

SEQ ID NO: 367299 - DNA, 1258 bp, Homo Sapiens
  misc_feature (1015)..(1015): n is a, c, g, or t
  misc_feature (1203)..(1203): n is a, c, g, or t
ctctgtagcaatgcagctgacctcgggaaagatgccatggaagtgcctgaagccgggatgataagtgacagtgagctgcagcacatctctgattctcccatcatcgatgggcagcagcagtcggaaaccccacccccctcagacattgctgacattgacaacctggagcaggccgaccaggagagggaggtgaagaggcggaagtacgagtgcacaatatgtggacgcaaatttatccagaaaagccactggagggaacacatgtacatacacaccgggaagcctttcaagtgcagcacttgtgacaaaagcttttgcagggccaaccaggctgcccgccacgtgtgcctcaaccagagcatcgacacttacaccatggtggacaaacagactctggaactctgcacatttgaagaagggagtcagatggacaacatgctggtgcaaacaaacaaaccctacaaatgcaacttgtgtgacaaaacattctccactcccaatgaggttgttaaacattcatgccaaaaccagaactcggatgtttttgccctagacgaagggcgatccattctcctgggcagtggggactcggaagtaacggagcctgaccacccagtgttagcttccatcaaaaaggaacaagaaaccgtcttactagactgaatgtcacttatctttttaaaaaactctcatttttacaaagactatcttccctccctttccctgaattcagaactgtagttctccatggcatgatacaaacaggtccttgttctcttctcctcttccccttttccacatcccagccccacctctgtaaaggctttgtgcattataaacctggaatgtatcgactttctttcaggggatattggaaagataatggtcattatacttataaactcaaattttgagaggttttagattattcagaagcatacttggaactaatgaagggtatataataaaacaactggaatccaatttggtaagctaaaattatgactttccctgngtaaaaagtcttctcagaaaaaaatgtcagaaaataacagcgtgctgcttagaaatacggctgggctctgtactatgcaaaatctagaaagtgtgggggaaaactttaaacccaagaaaaccgttcttagtattccatcccttccaggtgtccttactttcaggattgcatcccttttgaggattatngtcccactttaagaagaaaaatcatccagtttaaagaaaattctactttttaacc

SEQ ID NO: 367300 - DNA, 842 bp, Homo Sapiens; identical to SEQ ID NO: 98702

SEQ ID NO: 367301 - DNA, 746 bp, Homo Sapiens; identical to SEQ ID NO: 98703
  misc_feature (19)..(19): n is a, c, g, or t

SEQ ID NO: 367302 - DNA, 740 bp, Homo Sapiens; identical to SEQ ID NO: 98704

SEQ ID NO: 367303 - DNA, 1349 bp, Homo Sapiens
  misc_feature (129)..(129): n is a, c, g, or t
  misc_feature (140)..(140): n is a, c, g, or t
  misc_feature (719)..(810): n is a, c, g, or t
acagcacacacatacacacacagagagcatttcaaggccacagctccacccctgccatgggatgttaatgtggcagggggtggggctcattctgttgggaggtcaaattaccaatgccaaggacttcangattttgtttntatttttattttttcttctagcttttcagaagatggaaatgagacagttgagtccaaaccccaatgctgacagccatatgcatttgaaaatctatctagattacagatgggcatttattactggcagtggaaacaccagatagaagatcttaggagaggcccagaaatgcatcaccttgtcatgacaaaagagaaggcagtagagtagggatagttacaaatgcatccatcttaattattttcaataggcttgtaaatcttatcgatggaaggagaaaggagacaagatgtggaagaattgacatgtatcccaccataaaatggtagaagatgagttttcaatgagtagtcatagttgaaattttacaaccaaagctcccatttgattgtaatcttgccaaaatataatggatgtataaatgaacttggggtataagcaataatatccactagtgttgttatcagctactgtaaccaagtggctggttcatttggttgatgctgattatggcctttaaccatggtggtttgttgtgtgttttttatttcacaaaaagccaataaaattgtttagctatnnnnnnnnnnnnnnnnnnnnnnnnnnnnnnnnnnnnnnnnnnnnnnnnnnnnnnnnnnnnnnnnnnnnnnnnnnnnnnnnnnnnnnnnnnnncacaagagtgggggcggggcgagatcgaaaagaaaggcccccagagagggcgcaacacgagcagcggcgacaacaccacggtttattgcaactaaaagtggggaccctagaatgtggagtggtacgacttttgatgacgggctggcgagagcgggcggctggatatgtaacacgcatgtgtatacagcagtgtgacaacaaaagcagtatcgaggaggagcagactacctagttgagaagaggaacaataaccatacctgctcggagctagggatgggcgcaagaactaaaccgtacggttggagaagccaaaacgccagacaggacgagagagcagtactgaagaatgaagctgtccgtcgagcagggaaatacaaaaaaacaacgcgcacgcagccgagcgactagcagtagtgaggcggtagcacaaacacaaggacgaccgcatacgagtcgaccggcgcgcgcaaggcaagaaggtttactgctgcctctacgtcgagagagagtgcagtacacaggagagaatcacgtatgcc

SEQ ID NO: 367304 - DNA, 982 bp, Homo Sapiens
ctggctcacttgaacgcggcacaaggaggcagcaatctgtgcagaagggctcagggcggcatggacacgggttcactgctgtagcagggactaggctctcggagatggcgacatgggtgatgcagtctgggatctggtccatgctgagggcacagctgcggatggagtcccgaggcggggcagcgacgtactggtggggcagccatcgctgcgggttgaccctgtcagcagggagcccatcggtcatggtgacgcttgcgccgcttcatgtggctgcccttggggcctgaggggctgacggggctagcaggcttgctactcccctgtcccaggccatagctggcctcgaggtagcgcagtgggaaggtgcggttcaccgggcagtagatgatggcaccactctgctctgacacagccttgcggctgcccacatgatagcgcacgagggcgggcacgtggtcaaagctctcctgctcaaacaggtactggatgtgtgtgtagctctcgcctgccttcaccaccaccttgttgatcttgaagtgcaaggcctggttgcgccagcggcacgtgagcacatagtcgcccaggctggtgagtgagtcccggatgaggaagtcgccgttgcgttgtaccaaggtctccgagacctctcgggggatgcggccatggtaccaggcatggctgcggagatccgtgctgctgagtttgagctcctcctccaattccttgtggagtttctctggcgatgagtccaggatgtacttctccttggagaacttcacatagtcgctgccagcctctggctctccagcagccctgcactcacttcctagggtagagtgacccagtcacggccactgcccagctgactgcggagccactgccggtgctagagggctacagaattgattctgcccccagggtggagagcctggagaggccagaggccagagacggctgtttttccttccttcctcctgag

SEQ ID NO: 367305 - DNA, 1168 bp, Homo Sapiens
cggtccggaattcccgggatggagtccggcactgagctctgcagctcagtggcccgagaaaggcaggagccgctgggtttaggaggtccccgggttgccggcggcgacagcgggggaagcatgactgctgtgggccgaaggtgccccgcgctggggtcccgaggggctgctggagagccagaggctggcagcgactatgtgaagttctccaaggagaagtacatcctggactcatcgccagagaaactccacaaggaattggaggaggagctcaaactcagcagcacggatctccgcagccatgcctggtaccatggccgcatcccccgagaggtctcggagaccttggtacaacgcaacggcgacttcctcatccgggactcactcaccagcctgggcgactatgtgctcacgtgccgctggcgcaaccaggccttgcacttcaagatcaacaaggtggtggtgaaggcaggcgagagctacacacacatccagtacctgtttgagcaggagagctttgaccacgtgcccgccctcgtgcgctatcatgtgggcagccgcaaggctgtgtcagagcagagtggtgccatcatctactgcccggtgaaccgcaccttcccactgcgctacctcgaggccagctatggcctgggacaggggagtagcaagcctgctagccccgtcagcccctcaggccccaagggcagccacatgaagcggcgcagcgtcaccatgaccgatgggctcactgctgacaaggtcacccgcagcgatggctgccccaccagtacgtcgctgccccggcctcgggactccatccgcagctgtgcccctcagcatggaccagatccccagacctgcactcacccatgtcggcccatctcccgagagccctagctccccctgcctacagcactggaaacccgtgttccatggccgccccctggaagccccttctggcacaggcattgccctggcctccccctgtcgcccggccggttccagtggaggccccagcctgtggtccccgggaagtggccccaaaagaaccccaggggggaaagtccaacaaggggggcccccaaaaccagggccccttccaaaaaacccttgggcaaaggccctccccccggtaaaccatttacttccggcagcttaaccaggggac

SEQ ID NO: 367306 - DNA, 1183 bp, Homo Sapiens
  misc_feature (1135)..(1143): n is a, c, g, or t
ggtccggaattcttgggatgccccgccggccaccgcccccccacaccgtcccggccccggcagcctggccccaccatgaccgagcggtgcagcctgtggagtgccctgtcggccgccgcctgctgcttctaccgcggctccttcgtgcaggtgcagttctccaaggagaagtacatcctggactcatcgccagagaaactccacaaggaattggaggaggagctcaaactcagcagcacggatctccgcagccatgcctggtaccatggccgcatcccccgagaggtctcggagaccttggtacaacgcaacggcgacttcctcatccgggactcactcaccagcctgggcgactatgtgctcacgtgccgctggcgcaaccaggccttgcacttcaagatcaacaaggtggtggtgaaggcaggcgagagctacacacacatccagtacctgtttgagcaggagagctttgaccacgtgcccgccctcgtgcgctatcatgtgggcagccgcaaggctgtgtcagagcagagtggtgccatcatctactgcccggtgaaccgcaccttcccactgcgctacctcgaggccagctaatggcctgggacaggggagtaacaagcctgctagccccgtcagcccctcaagccagcaaggccagccacatggaaccggcgcagcgtcaccatgaaccgaaggggctcacgggctgacaaaggtccccccgcagccgatggctgcccccaccaagtaacgtcgcctggccccggcccctccgggaattccatccggcaaactgtggcccctcacaacgggaccaaaatccccagaactgtgcactgaccccaagggcgctcccgtactccgaagagccccctatccttccctggccttaccgccacgcccaaccgcggggacccatggcccgccccttgtgagaccccttcggggcctctcccctttgcctgggccgcgccttttgtcgacacgcccccgatctcccttgaaatcattacactgttgtgtcccgcggaaacccgccccccacggaccccacgcgggggccgagaccaccatagaggtcgcgcctctgcccagagcagggtgcgcgagcaccactagtcaaatacggcgnnnnnnnnngtggaatcctcgccctcgcaccccacataataatcccccc

SEQ ID NO: 367307 - DNA, 1144 bp, Homo Sapiens
  misc_feature (1068)..(1079): n is a, c, g, or t
agggaccccaggttcggggaaagaccagtgttggagagtacacaagatggcaagtggaatagacagggacctgcctgtaactcccgactgaccatctgtggagttcttgagaggcatttagccatgggacagggagggacggctcttttgcccttcgcctcccatcctgaggctccacttggtctgtgagatgctagaactccctttcaacagaattcacttgtggctattgggactggaggcacccttagccacttcattcctctgatgggccctgactcttccccataatcactgaccagccttgacactccccttgcaaaccatcccagcactgcaccccaggcagccactcttagcattggccttcgacatgagatggagccctcccttattccccatctggtccagttccttcacttacagatggcagcagtgaggtcttggggtagaaggaccctccaaagtcacacaaagtgcctgcctcctggtcccctcagctctccctctgcagcccactgcctgcccagtgccatcaggatgagcaatcccggccaagcataatgacagagagaggcagacttcggggaagccctgactgtgcagagctaaggacacagtggagattctctggcactctgaggtctctgtggcaggcctggtcaggctctccatgaggttagaaggccaggtagtgttccagcagggtggtggccaagccaaccccatgattgatgtgtacgattcactcctttgagtctttgaatggcaactcagccccctgacctgaagacagccagcctaggccctctagggtgacctagagccgcccttcagatgtgacccgaagtaactttcaactgatgaacaaatctgcacccctacttcagatttcagtggggcattcacaccacccccccacaccaatgggctctggctttctcccttttcattaatcccattcaccccaaatatttccattaaaaattatcccgggcccaggtccttaggaatatggtccctggcggtggggcccaagggtaaatcccctggaacgtttggaaaaannnnnnnnnnnnccccgaagccttatggtcccttcatcccggggaaaaatggggggaattaaggaaaaccttgggtg

SEQ ID NO: 367308 - DNA, 530 bp, Homo Sapiens
  misc_feature (351)..(393): n is a, c, g, or t
gttaactgcttaaatcatctttattcagctcaggggtggggtggctgggagcatgaacttcaggtccaggaagatgggtttggatccagtctttgccatttgctctctgaaataacactcaaaacatttcactcctctaagcttcagtgtccttataaaaaattgggtaaacaatactggtcccgtgacattgtgtaaagattgaatagtacataataaactgtattaaaagattttgtcaaggtgtgtggcacatggtatgtgctcggtcaatagcctttgtgtgtagtaacggctctggtagtaattttgctagctggagagatggtaataattgtgacagcaacaagnnnnnnnnnnnnnnnnnnnnnnnnnnnnnnnnnnnnnnnnnnnaaataaataaatatccccaagagtcaccgggtactgtgcccaccccaagacacatcctaagacctggcacatgttaattttaatgattatctgggtgaatgtattaataaaaggggaaagtggagccggtggcatgg

SEQ ID NO: 367309 - DNA, 1531 bp, Homo Sapiens
ggccgcattgctgtcccaaggaatccagaggaaaatgaggccattgcaagcttcgtgaagaagtacaacacatatgcctatgtaggcctgactgagggtcccagccctggagacttccgctactcagatgggacccctgtaaactacaccaactggtaccgaggggagcctgcaggtcggggaaaagagcagtgtgtggagatgtacacagatgggcagtggaatgacaggaactgcctgtactcccgactgaccatctgtgagttctgagaggcatttaggccatgggacagggaggatcctctctggccttcggcctccatcctcaggatccacttggtctgtgagatgctagaactccctttcaacagaattcacttgtggctattagaactggaggcacccttagccacttcattcccctgatgggccctgactcttcgcccataatcactgaccagccttgacactccccttgcaaaccatcccagcactgcaccccaggcagccactcctagccttggcctttggcatgagatggaggcctccttattccccatctggtccagttccttcacttacagatggcagcagtgaggccttggggtagaaggatcctccaaagtcacacagagtgcctgcctcctggtcccctcagctctgcctctgcagcccactgcctgcccagtgccatcaggatgagcagtaccggccaagcataatgacagagagaggcagacttcggggaagcctgactgtgcagagctaaggacacagtggagattctctggcaccctcagctcgcctctgcagcccacggcctgcccagtgccatccaggatgagcagtaccggccaagcataatgacagagagaggcagatttcagggaagccctgactgtgtggagctaaggacacagtggagattctctggcactctgaggtctctgtggcaggcctggtcaggctctccaggtggtcagagggcccagtggtgccccagcacggtggtgcccaagccaaccctgtgactgacatgtacgattcactcctttgagtctttggatgccaactcagccccctgacctggaggcagccggccaaggcctctagggaagagccccccactgcagacatgacccgagtaactttctgctgatgaacaaatctgcaccccacttcagacctcggtgggcattcacaccaccccccatgccaccggctccactttccccttttattaatacattcacccagataatcattaaaattaacatgtgccaggtcttaggatgtgtcttggggtgggcacagtacccggtgactcttggggatatttatttattttccctgagcctatatcttcatctgtgaaatggggataaaaatacttgttgctgtcacaattattaccatctctccagctagcaaaattactaccagagccgttactacacacaaaggctattgaccgagcacataccatgtgccacacaccttgacaaaatcttttagtacataataaactgta

SEQ ID NO: 367310 - DNA, 790 bp, Homo Sapiens
agcggagtatcgaaactgagagctcctgggcaggctcggcagggcaggcagctccaggagggcttcgaaccgtggccaacagttccagtggactgcgtggacccgtgagctcaggagcctcagacgcctccctggagagccaagctggtgttcgaggtggcgcctccagggtccaccctgctgcccaacagccccgcggccaccagagggccgtccctggcccggctgtgtgccctggtggacctgtgtctgggctgctcccgctgcacccagcggctcaatgaaagcacctacgtcctccgtagggtggagcatgactgctcccgcgagatcctgctggcccgctttaagcaggccaccaagagcaaggtctggcgcgtggtgggctgccggcccaccttcccaaggcccctgtgctaccaagtctgccactactacagccctgggctcggctgccggcgccaccgaaaccggtgcacctttgcccgcagtcgcgaggaggccctggtctggaccttcgagcgtcagcacaacctccagcgcctatggctgaaggcggaggtgcagggcagcggggccagggaggggcaggccgggcggccgacgccatccttacgggagtttgggcggccgcttcgagcttgctttgcttccctctgcttcaggcgctgtcccccatgcattctgtcgcgtggacccccaggggcagtggccctggagcacggaggcctgcccgtccctcctggcccacggtgagcgcccgagggccgccgcaagcaacagattcggg

SEQ ID NO: 367311 - DNA, 896 bp, Homo Sapiens; identical to SEQ ID NO: 98711

SEQ ID NO: 367312 - DNA, 851 bp, Homo Sapiens
gtcagaatcaagatggcgggatccaggcaaaggggtctccgggccagagttcggccgctgttctgcgccttgctgctgtcactcggtcgcttcgtccggggcgacggcgtgggaggagaccccgcggtcgcgttgccacatcgccgtttcgagtacaaatacagcttcaaggggccgcacctggtgcagagcgacgggaccgtgcccttctgggcccacgcggggaatgctattccaagttcagatcaaattcgagtagcaccatctttaaaaagccaaagaggctcagtgtggacaaagacaaaagcggcctttgagaactgggaagttgaggtgacatttcgagtgactggaagaggtcgaattggagctgatggcctagcaatttggtatgcagaaaatcaaggcttggagggccctgtgtttggatcagctgatctgtggaatggtgttggaatattttttgattcttttgacaatgatggaaagaaaaataatcctgctatagtaattataggcaacaatggacaaatccattatgaccatcaaaatgacggggctagtcaagctttggcaagttgccagagggacttccgcaacgaaaccctatcctgtccgagcaaagattacctattaccagaacacactgacagtaatgatcaataatggctttacaccaggataacaaatgattatgaactttgtggccaaagtggaacaacatatgattatcgcgtgcacaagggcatttggaatatctgctgcaactgggaggtcttgcagatgaccatgatgtcctttctttctgactttccagttgatgaacctggaaagagcgccaacagataaga

SEQ ID NO: 367313 - DNA, 748 bp, Homo Sapiens
ccatccatgcatgggaaaagggctttagtatagtttaggatggatgtgtgtataataaataaaatgataagatatgcatagtgggggaataaagcctcagagtccttccagtatggggaatccattgtatcttagaaccgagggatttgtttagattgttgatctactaatgtttttcttcacttatatttgaattgttcaatgataggacttattggaaattggggataatttctgttgtggtattaaataatattcattatttaaaaactcatcttggtattgagttagtgcattgacttgccaatgaattgacataagcccatatttcattttaaccagaaacgaaaactagaaaatgttactccctaaataggcaacaatgtattttataagcactgcagagatttagtaaaaaacatgtatagttactttagaaacaacttctgacacttgagggttacccaatggtctccttcccattctttatatgaggtaaatgcaaaccagggagccaccgaataaacagccctgagtacatttgtaatcttgggctccatgggaatgtccttgattaagatgaaagaggaatggactgatgtttctattacaagatcctataatgctaggacttctacacagcttagaacaatggttggagcttcattctttgagcagaaagactcaaatattatttcagtcacttgtagcaccattggatgtgggtgcacacttggcctaaaatacc

SEQ ID NO: 367314 - DNA, 1351 bp, Homo Sapiens
  misc_feature (991)..(1004): n is a, c, g, or t
  misc_feature (1340)..(1340): n is a, c, g, or t
ccagtccaccgagcggacacttcacaattctggcgtgcccgaagtgtgcagagccagaagatgcgatccgcacaaccacgctgggaaggaagcagatgacaaaagacgatggccaccaaccatgatgaaggtgatggctctcttgatcttggcaatgccggtccatttgtctctgccgcaggctcccagataattctgcgctgagcaagaacaggaatgatgcccaggggcaggaaggaactccagggaggaacatagcttcgtgccaccggaaggtatggcagatgctgaagctgatgcacacatttgcagggccattctggatcagcaacttcttcttcaggaggtggactgttaggccaacagtgatgccccacagaaggcaagagatgatggctgctgtccaattggagatcttgttcagggcgtggtggggatggaccacccggaaatacctgtctaccgccaccaccgtgaggaagatgatgctgccctggcggttcatggcaaacatgaagagcaccagccggcaagggatgtccccaaacttccagtctgaacgccgcacatagtagtccatcacgaacggcaggcagatgatcagtagaaagtcagctactgccaggttgaacaggaaaatccggctggatttccaggacttgaggtggaaacagaaaatccacagggcaaggccattgcccagaagcccaaagataaactccagccccaacaccggcggcaacaccttggcaatgaagtcatctcggaacacacagcagttcttcttgtctatttccagaaagtgatcctgcagatggtgccgattcatgagtgcagctagtgagtccgatggagcgcctcgcctagtgaatgctccagcaaagtggcgtgtgtttgtatggtgaacgtgtggttccgtgcctgcctttatgtcatgtcagggtgttgaaatagatgactgaatggttatcaggaaactacgaaatctctnnnnnnnnnnnnnngccagcaaggctcttatgcaacctgctgtttgcataaacaaatagtaaaaatcccctgggcatacaggaacccacgaaatgtcttaaatgtaaaggataagtttaggcaagccgactgtcattcgaaaatcagtgaaacatgaaggacatccctttggaaggctgggtgcttgtatgccaactgagtactcaacgttgcagaattaattcaccgtcatctgcttggccgctcatgaggaattagatgatcttcgaacttcctcccagctctcacactacatgattctaaaccaaagtccgcggctactcgggcagattctaaagggcagcctcgcnggattttgatc

SEQ ID NO: 367315 - DNA, 704 bp, Homo Sapiens
gctttccaccgagtatgtgtttattctctctccaggaaagcaggtcaaaagaaagttagcaggatcgagtgtcttcttccttagaaataggttctggtagcttctgtgcctgggtagcatcagaccagtgggagtaaaccgagtgttaagtgtcaaggtgagaaagcctcacattctctcaagacagttgctctaggagctgagttgctggtttggaagtgtggagattgcatttctggcttctctcaatggcttgtgttgaggactctgggtgctcctggccctaattgtgcaccctgatccccgtgcttggagctaggcctggtggcgtgctctagccctctcagttaccagctctttggagaaggatcaaaattcagatggaatgtgggatgggtaataggtgagagtagaaacccttccctccaggaggcccccgctgactcccacagaaacccacctaccataagatgtcttcaggtggccttgtccaaggatgggggtcaggcattttatatcaagggtgctctgaacatattttattttttaaaaaaactatgtttgtgaattttgcgtatactggcaagcttttgaaaatgtatttaattttgtattgtttaccaatgatttatttacaagatatttactcaaataaatggagctgcttacaagcctgttgacatgtgtggcttgcacaacacgtt

SEQ ID NO: 367316 - DNA, 435 bp, Homo Sapiens
  misc_feature (14)..(14): n is a, c, g, or t
  misc_feature (62)..(62): n is a, c, g, or t
aactcctgggtgcnccccggcccctaattgtgccacccctggatcccccgtgccttggaagnctaagcccggtggccgtgctcctagcccccctcagttacccagcccctttggaagaaggatcaaaattccagatggaatgtgggatgggtaaataggtgagaagtagaaacccttcccctcccaggaggcccccgctgactccccacagaaaccccaccctacccataagatgtccttcaggtggcccttgtcccaaggatgggggtcaggcattttatatcaagggtgctctgaacatattttattttttaaaaaaactatgtttgtgaattttgcgtatactggcaagcttttgaaaatgtatttaattttgtattgtttaccaatgatttatttacaagatatttactcaaataaatggagctgtcttac

SEQ ID NO: 367317 - DNA, 481 bp, Homo Sapiens
ggggtgcagacatgagcaaggctcaaggctgtgcaggcacataggctggtggccttgggccttggggctcagccacagcctgacacagtgctcgaccttgatagcatggggcccctggcccagagttgctgtgccagtgtccaagggccgtgcccttgcccattggagctgccgtgcctgtgtcctgatggcccaaatgtcagggttctgctcggcttcttggaccttggcgcttagtccccatcccgggtttggctgagcctggctggagagctgctatgctaaacctcctgcctcccaataccagcaggaggttctgggcctctgaaccccctttccccacacctccccctgctgctgctgccccaagcgtcttgacgggagcattggcccctgagcccagagaagctggaagcctgccgaaaacaggagcaaatggcgttttataaacttattttttggaagaaagagacaaacagat

SEQ ID NO: 367318 - DNA, 1275 bp, Homo Sapiens
ctctggaatcttctccatttctccctatcactcaatttcattttaatcatggacaccttgcgtttgctgctaacagtgtgtgtatgtcaccctctttatatctggttttcccacttgtctgaagctctcctgatcttagaacctggagctgcagattcctccatgtcagctcccatcacggccccaaagacagagtcacttggttgctgagtcacttggttgctggaaaaatcttggggaaagctggtataagctacacactgacctgtccccagtgtttccaggtaatgacttggcactccagagaaagttttcatgctgttgcgtgtgactggctcacaagtcgcaagcacctggcatgcagcgtcagcccttgcccaatcgggacgtaggcgtagtcctcttcacagaggccacgttgcagccccaaggcctcaccatgttgcgttctatcatagaaacccattttctcgtggtcattgataaagctgcttatatagatagtctatgatcgctggcatgccttggtttcctctcccttccctctttcccaatcctggtttcctaacctcctcttgtagtaattctcaacgtcaactgcaaagtccgcaagaatatcggaatggtaggatgctgtgcggggagctcgaggctgaggccataatgcacgtgcttcggttctgctcatcaggggacacgctcccttactcatggcagctcatgtattgattgtcacagagccccccgaatactctgatctatagtgacatcactgtaggtgtcataaattgtgaagaaacctgctttgtaagtactatttataggtttttctgttatagcttgcaacgctagttttaaaatacatgaggattttatgaaagcctttatacagacatttataggaaacgtcattctgtgattttaggcgccatttaaattgatacccacttactttataaaaaagatgctttttgcctggatagagccttatagtctcaaaatatcttcatatattgccatccgatccaataaatttcttacttttacaccgcgagatcattccgccataccggatacaccctccccttctctccctcgcccttcgggcctttacggaaaagttcttttagacacccttccgcttctggaccactaccgggacaccgcatagggtctgtctgaaaatcttggtccagacagcgatgcttcccttatgcactatttcccgggttcttcgaccccccgcggtttgtgcgatttctctccccccgcagt

SEQ ID NO: 367319 - DNA, 363 bp, Homo Sapiens
aagaatgaggaggaaggagagagtaaggatgaagaagatgaagatgaggatgggggccagaaaccagaaggagagccacaagcaggataaagggactgaggacacctatggtgaggtggaggaggagccactggatgaggcccaagatgatgacctagatgagctgatggagatggagccgacctttgttcacgcgtcatcgcagacttctggccccacaagtggttaccacgccgaaaacttcctgggtgcatcacctcccataatacagcctagcagacggaggaaccagaatcgagtcccacttctggaaggccttccaggcaccaattcaccattctctctccactcccggggatcctc

SEQ ID NO: 367320 - DNA, 976 bp, Homo Sapiens
  misc_feature (737)..(737): n is a, c, g, or t
ggactgtaagaatatgtctccagggccagtgtctgctgcgaatcgagtcccaccttccaagtcctggcatctcaatgcatctgggaagctacctgcattaagtcaggactgagcacacaggtgaactccagaaagaagaagctatggccgcagtgattctggagagcatctttctgaagcgatcccaacagaaaaagaaaacatcacctctaaacttcaagaagcgcctgtttctcttgaccgtgcacaaactctcctactatgagtatgactttgaacgtgggagaagaggcagtaagaagggttcaatagatgttgagaagatcacttgtgttgaaacagtggttcctgaaaaaaatcctcctccagaaagacagattccgagaagaggtgaagagtccagtgaaatggagcaaatttcaatcattgaaaggttcccttatcccttccaggttgtatatgatgaagggcctctctacgtcttctccccaactgaagaactaaggaagcggtggattcaccagctcaaaaacgtaatccggtacaacagtgatctggttcagaaatatcacccttgcttctggatcgatgggcagtatctctgctgctctcagacagccaaaaatgctatgggctgccaaatttcggagaacaggaatggaagcttaaaacctgggagttctcaccggaagacaaaaaagcctcttcccccaacgcctgaggaggaccagatctcngaaaaaagccactaacgccctgagccagcagcagccaccagtctccacaagtgagctgaaaaaggttgtgggcctttatgataacatgccaatgaatggcaatgatctacaagtgcggaagggtgatgaacattaatctgggggaaagaacttaccagggggggagaagaccgcagaaaaatgggcgggaggctacataccatgaaaacaggcacggaaggaaaaacccctgaaagggt

SEQ ID NO: 367321 - DNA, 1137 bp, Homo Sapiens
  misc_feature (962)..(970): n is a, c, g, or t
  misc_feature (1085)..(1085): n is a, c, g, or t
tgcgcgggcactcagtgagcccgcgtgccattgtggtgctggtgcggccctagccctggctgcggagctgctgcgcgagcggtgggctggctgaccccgagggacccccatgcgcagcggtgtgcgtgcgatagatccttggagtgagacggcctggactggctgctgtggctgcctggctgatgggacgatgccctgcgtgcttgcagggcttgtgactccactgactgtagatcctagtgctgtgccatgctgcaggagcctgcagtggcccaggattcaccagcaggattgacaagtgagcttgcagattgcggacgtggctgctgagaacctctacagagccaccagctaacaaccgggtgagagagacggtcgccctggagctgagctacgtcaactccaacctgcagctgctgaaggaggagctggaggagctcagcggtggcgtggaccctggccggcatgggagcgaagctgtcactgtccccatgatccccctgggcctgaaggagaccaaggagctggactggtctacaccgctgaaggagctgatctcagtgcactttggagaggacggcgcctcctacgaggcagaaatcagggagctggaggccctgcggcaggccatgcggacccccagccggaatgagtcgggcctggagctgctcacagcctattacaaccagctgtgcttcctggatgcgcgcttcctcacccctgccaggagccctcgggctcctcttccactggtacgactcgcttactgggggccccgggccagcaggggggccctgggccttcaagaaaggcagccgatctctttcaacgtcgggggcccctccccccgccacattggggggcgcggccaggaaccgcctcccggcaccgaaggggggcccgcccgcgctatgggaaggccttcccaaaggggccgctggggggcctttcgcgccttcctnnnnnnnnnaacttcctccccggccctcgaaaccccgcacctgtacccccgttatcccccccggcggccatcgggaggcatgttcatgaaagggccccccggccccaaacaattggggttggtngtgagggcatccttctaacaccctggccgtccatggtgacccccccagaact

SEQ ID NO: 367322 - DNA, 1093 bp, Homo Sapiens
cggtccggaattcccgggatcaagcaaccggtaaacgccgccgtttgaggagcaccgggtggattggacgcttccccagagacccagaagcagaaggagcggacccaggcagccggcaccatggagattgtgtacgtgtacgtcaagaagcgcagcgagttcgggaagcagtgcaatttctcggaccgccaggccgagctgaacatcgacatcatgcccaaccctgagctggccgagcagttcgtggagcggaacccagtggacacgggcatccagtgctcgatcagcatgtcggaacacgaggccaactcagagcggtttgagatggagacccggggagttaaccatgtcgaggggggctggcccaaggacgtgaaccccctggagctggagcagaccatccgtttccggaagaaagtggagaaagatgagaactacgttaacgccatcatgcagctcggctctatcatggagcactgcatcaagcagaacaatgccattgacatctatgaagagtatttcaatgacgaggaggccatggaagtgatggaggaggacccttcagctaaaaccatcaatgtgttcagggacccccaggaaatcaagagggctgccacacacctctcctggcaccccgatggcaacaggaagttggcagtggcatactcctgcttggattttcagcgggcacctgtgggcatgagcagcgattcatacatctgggacctggaaaaccccaacaagcctgaacttgctctgaagccatcgtctccactcgtgacgttggagttcaaccccaaagattcccacgtactcctgggtggctgctacaatggacagatagcctgctgggacacccgaaagggcaagcctggtggcggagctatccaccatttgagtccagccaccgagaacctgtgtatggcaccatctggctgcagtcgaagacgggcaccgagtgcttctcagcttccacggatgggcaggtcatgtggtgggacatccgaaagatgagcgagcccactgaaagttgtgatcttggacaatcaccaagaaggaacagttggaaaatgccttggggggccatctccct

SEQ ID NO: 367323 - DNA, 1011 bp, Homo Sapiens
  misc_feature (111)..(223): n is a, c, g, or t
cagctgtttcctgtgactttaaccttaccttccccagacaattgagctgaacctgtatctgcgacctctgactatgtgaagatacggtgggaagatgactgaccgcaagannnnnnnnnnnnnnnnnnnnnnnnnnnnnnnnnnnnnnnnnnnnnnnnnnnnnnnnnnnnnnnnnnnnnnnnnnnnnnnnnnnnnnnnnnnnnnnnnnnnnnnnnnnnnnnnntccatgagagcaagcatctttgtccgtttggctcactgttggattccctgttttaaaaatatcacccggcccagcaaaaagtttggaaaccttcatctagaaagtggtctagcaaagtgtggtccatggatgagtttgatctgcaaactgcttgttattggttcatgacaaggtctaccaattgcattttgagagctcagataagcagagagcaatgcaatttgtcacagaaggatgattatgtatatgcactgtcatgtctatttccatgcctaactcaaaggagacacaaggagaaagtgagctcagcctggataaattggagattgtgatgacttctaggaagcctcaggaacagagaaacaaagacaacactggcctgctgctctctgcaatggtgggacccttgtgggataactgttttaggaatgaaggtgtctaccctctctagaaatgaaaatgcaagttaggctgtggttaagtattggatggaggcaaaaagaaactgacatattttcttcttttcaattgtttgattcaccctgaagggcatggctgcttaatttttttctccagagataggtggacagataaagacaggaaagtaacatccacagactgccctctgtgaaggtgacagtgatgaaaggaatgcttgatctgaacactggtaaataaagtgaccgcatatttccctagccaggagagcaatctggctcaaaagaaacgagaacaatgacattactgccaggctgctcctaagcctttggctattctgttcagtgcac

SEQ ID NO: 367324 - DNA, 713 bp, Homo Sapiens
aagcgacctccctgacggaagcgggcgctgcgcgccagggcatcatcgtccaccaagtatggcacgatcaccgcacgggggtatctggggcacaagctgaagtcctcgttcacctcgctcagccgccacgcgttggtctgcagcgcagggaggagagaggccaggtctagggcacccagggagtgacctgtccccgcgcctcttccaggcccggcgcttccaccttcccgggcccctacgaccgcgcccacttcgcgagctactctcttgcagtagagttcgggcgggaggaagtgccaggagtcgcccaatctcaggcccttgggacggtagaataaagggaaggaggtgatgactgattccagtgaggacagcgtccggagacggaagtcaggggctctggggagggtcggaattgtctcgcccgcgccctttccagcccctcagtcctgtagcttcagcttcggcctctccaagtaccccggaccaccctgcatccccctgccatttagctgcggctgcggagcctctttgaacagaagcacctttttattcccctctacgcgagacagggagagcttaaagggctcgggagctccctcggcacaacctcgatggagcgggcgatgcccagcgtcgcttccgcgccctctatttccagctgcagcactcgcagggtctttacagcacagggtgatggtgcccgagtcact

SEQ ID NO: 367325 - DNA, 695 bp, Homo Sapiens
ggagtgctctgcagatgtcccaagaaggcgcatggaagtccttctgacccatattgtcttcaaaacagtcgtaggaaggatggagaagcctggcctggcactggctctcaggaaagtcattgatggaattcgtgtgtctgtgtggggctcactgtgagtggggggtgacttcctttgagtaggatggacatttccccctgctctaaaaggagagtcagttcctcgttctctaatatacagttacctgactgacattgaccgcatcgccacaccatcattcgtgcctacccaacaagatgtgcttcgcgtccgagtgcccaccaccggcatcattgagtatccatttgacttggaaaacatcatctttcggatggtggatgttggtggccaacgatcggaaagacggaagtggattcactgctttgagagtgtcacctccattattttcttggttgctctgagtgaatatgaccaggtcctggctgagtgtgacaacgagaatcgcatggaagagagcaaagccttatttaaaaccatcatcacctacccctggtttctgaattcgactgcgattgtattctcgaacaagaaggatcttttggaagagaaaatcatgtactctcatctaattagctatttcccagaatacacaggaccgaaacaggatgtcagagctgccagagactttatcctga

SEQ ID NO: 367326 - DNA, 912 bp, Homo Sapiens
  misc_feature (894)..(894): n is a, c, g, or t
gctccaggagccggctgagcgcgccccgcggggggctccgcagcccttacaaggaatttggtggcgcttggggtggccccgcccgccaggctccaccggcccctcctccccgcggggtggcagcccgctggacgcggggccgagggcgcggacgccgacgggtccggggccgcgcgctccagtggatatgcctgcatcccgctcccctgggccccgacgggcgggcgcactgcgccggggcccaccggccgcagacctgcgtggccgtccagggcgtcgccatgtcctcggtgtttggaaaaccccgcgcgggcagcgggcctcagagcgcgcccctcgaggtcaacctggccatcctggggcgccgcggggctggcaagtctgccctgaccgtgaagtttctgaccaagaggtttatcagtgaatatgaccccaacttggaggacacctacagctccgaggagactgtggaccaccagcctgtccacctgagggtcatggacactgcagacctggacacccccaggaactgcgagcgctacctgaactgggcccatcccttcctggtggtgtacagcgtcgacagccgccagagctttgatagcagcagcagctacctggagctgcttgccttgcacgcgaaggagacacagcgcagcatccctgccctgctgctgggcaacaagctggacatggctcagtacaggcaagtcaccaaggcagagggtgtggctttggcaggcaggtttgggtgcctgtttttcgaggtctctgcctgtctggactttgagcacgtgcagcatgtcttccacgaggcagtgcgagaggcacggcgggagctgggagaagagccccctgacccggccctctttcatctccgaggagagggccttnccaaccagggcccgttaa

SEQ ID NO: 367327 - DNA, 618 bp, Homo Sapiens
cgctccggcgccccagccccactatcagtgtccagcgtgctggttccccagagcacagctcagcatcacactgacactcaccctgcccctgcccctggccagagggtactgccgacggcactttgcactctgatgacctcaaagcactttcatggctgccctctggcagggcagggtagggcagtgacactgtaggagcatagcaagccaggagatggggtgaagggacacagtcttgagctgtccacatgcatgtgactcctcaaacctcttccagatttctctaagaatagcacccccttccccattgccccagcttagcctcttctcccaggggagctactcaggactcacgtagcattaaatcagctgtgaatcgtcagggggtgtctgctagcctcaacctcctggggcaggggacgccgagactccgtgggagaagctcattcccacatcttgccaagacagcctttgtccagctgtccacattgagtcagactgctcccggggagagagccccggcccccagcacataaagaactgcagccttggtactgcagagtctgggttgtagagaactctttgtaagcaataaagtttggggtgatgacaaatgtt

SEQ ID NO: 367328 - DNA, 1141 bp, Homo Sapiens
  misc_feature (362)..(401): n is a, c, g, or t
  misc_feature (798)..(798): n is a, c, g, or t
  misc_feature (844)..(844): n is a, c, g, or t
  misc_feature (967)..(967): n is a, c, g, or t
  misc_feature (971)..(971): n is a, c, g, or t
  misc_feature (1022)..(1022): n is a, c, g, or t
gggtgggaagagtccggaatttcaaggatggtttgggctccagccccatcccggccccctcgcgccgctgcggctgctgcgcggtgaggtcgtgacaagtcacagctaacttgccctccgcgccattccacgccaccaggaagcgcagccggtgcctctcgggatcggcgaagaggccttgccggaccggcgcccaaccctccaggctgtcgaacagctcgacctccatagacaatcagcagaagcgagccgtagactcagcgggcgccggcatgatcacaaagactggcctgatgaggagaatatatcaaggagaaacgtaacgagcagaggttcgattatccgtaacgagagtagtactnnnnnnnnnnnnnnnnnnnnnnnnnnnnnnnnnnnnnnnntacaacgaagtagcatggcgggggcagcgggcgcgaaacagagaaccaggaggataatgcgatatggtgaaaaacagatgtcgagttcaagaacaatttatctatatctacgtgtcgttccaattttttgaatggaaataaatgaaggtatgagtacaagtaatagaatatgctaatgtatgtggttaggatgttgatatacatctaatccctaataaatagtaaaaaacatacatacataagagagaagaataaaaagggaggagttaacacgaagagcgaaaagtgtatggtgggaaatgcaagggcagtaaggatgagatattggatttttgtttgatgctaatctcgttggtttatggatttacaaaaagatgatagaggaggagaacataanatatgcaaacgtaagaaaaaaacacaacgatagaagcagagaatantgagaaaatgtataagatgagctcgcgaattcacctagtcgtctaataccaaattgagtctggtgtgatgtatttctgctctcgttctgtggctctgtcagaagctatacgtgagaaccatanattnttgtgtgtctcaatagtatatattcttctatctaaaggttacagtaataanaggtgcttagcggtatgttgaatgacgttatagaagaatagtgcgggacggaggggacgggggagacgcgatgcggacgcctgccgatggcacacataaacacaaaaaacacaagcgcg

SEQ ID NO: 367329 - DNA, 842 bp, Homo Sapiens; identical to SEQ ID NO: 98731

SEQ ID NO: 367330 - DNA, 1094 bp, Homo Sapiens
tagccttcctgtgtcttcccacccttagtcccaggcatctgactaccgggaacctcaggcagagtccgggagccccccagcccgtccaggagccaacagagcccccgtcttgctggcgtgagaatacattgctctcctttggttgaatcagctgtccccatggctgtgccctggagccctgagcaccagctgcagaggctgcaggtgacccggaagctgctggagatggaggagcaggccgccttcctcgtgggaagcgccacccctcgctacctgtacctggccagcaaccacagcaacaagtggggtcacccccggggctaccgcatccagatgctcagctttgctggagagccgctgccccaaaacagctccatggcgagaggcttcagctgggagaggtaccagctggcttgtgaccccagcggaaggaggaggagcccagtagcagcagcgtttcaatcagaatgacccttgggcccccactgtggatttcagtgacttcatcaacaatgagaccattgctggcaaaggattcggtggcctgggtgacagctggttttctgcatatcccacatgcagaggacattcctaacacagtgactgtggggaacggcgtgggcttcttcctccgaccctataacttctttgacgaaagacccctccttctactctgccgactccatctacttccgaggggaccaggatgctggggcctgcgaggtcaaccccctagcttgcctgccccaggctgctgcctgtgcccccgacctccctgccttctcccacgggggcttctctcacaactaggcggtcctgggatggggcatgtggccaagggctccagggccagggtgtgagggatggggagcagctgggcactgggccggcagcctggttccctctttcctgtgccaggactctctttcttccactaccctccctcgcatccgcctctgagccaggagcctcctgaccctgtgatgcctgacacaggggacactgaaccttgttgatgccagctgtactgagttctcatccacagaggccaaggcatccaagccctggaagcccgtgggcgagggtttccctag

SEQ ID NO: 367331 - DNA, 1643 bp, Homo Sapiens
  misc_feature (518)..(559): n is a, c, g, or t
gctggaccggtccggattccccggatgcatatcccaatgcagaggacattcctaacacagtgactgtggggaacggcgtgggcttcttcctccgaccctataacttctttgacgaagacccctccttctactctgccgactccatctacttccctctttcctgtgccaggactctctttcttccactaccctccctcgcatccgcctctgagccaggagcctcctgaccctgtgatgcctgacacaggggacactgaaccttgttgatgccagctgtactgagttctcatccacagaggccaggcatggcccagcctggagccgtggccgagggcttccctagatggttccctttgttgctgtctggctttcccgaatctttttaggccacctccaaggactctaaaagggggctattccctggagaccccagagtagggttgccagtcctgcaagtccatagctgagctggaaaggatgcttctgctcacattccctctcatccaggtcctttcctnnnnnnnnnnnnnnnnnnnnnnnnnnnnnnnnnnnnnnnnnngttcctgccttctcttctatcctgcaatttctcccgaatcctgaggggatatccctatgtcccagcccctggtactcccccagccctcagttttcagtcaagttccgtctcctctccagccctatggaagtctcaaggtcacgggacccctaatcagagtggccaatccctgtgtgtcgttcccttgtgtctgttgcttattgggagtaggagttgctcctacccctgtcctggggctgggtgtgtttcaggacagctgcttctgtgcatttgtgtctgcctgcctcatgctctctatagaggaggatggtcatcgtgacagcagcagctcaagttagcatttcaagtgatttgggggtgcaatgataatgaagaatggccattttgtaccaggggctctgtattctgcaacagcctgtttgggaggctggagtggaaacaaaggggtgggcatcaaagatgaagaagcaaaagcccctacaactccagccacccagccaggaggggctgtccaatcacattcaggcatgcgaatgagctgggccctgggtgaggtgggggtctggcctagtggggaggggcctggctgggtggggcagggcctggcctggtccaggcttgggctccattcccatcactgctgtccctcctgaggtctggattggggatggggacaaagaaatagcaagagatgagaaacaacagaaactttttttctctaaaggactggttaaatcaattctgatacagccttacaatacaatagtatgcagctaaaaaataattgtatgtctttatatactaatatgtaataatcttcaggtgaaaaaggcaagccacagaaatgtgtatagcgcacttcccatttgtgtttcagaaaggagtagaatataaacacataattgcttatgtatgcctattcagaataaatgggtaacactgattacttttgggaggggaaccagtaggttgaggacaggagagggaagggtcttaacacttacaccctttttgtacattttgaattttgaaccatgtgactgtattacctattcaaaataaacaataaatgggcccaaacagg

SEQ ID NO: 367332 - DNA, 864 bp, Homo Sapiens; identical to SEQ ID NO: 264781

SEQ ID NO: 367333 - DNA, 739 bp, Homo Sapiens
gtatctttcgctgtgacgagctacggcaagaatctgtatatcgcagactgtacacgatagaattccgtggttgctctcgatcttgcaatttccaacggagaccggatgcttcccaaccccacgatagcagacccggctgtatggcgatcaccatcggccctgtctcagatgtccgcaaggccataactactgctcagtgaacaagtggcggcgctgcacccacctatgcttggccaccccatgggagcaggacctgccgttgccctgacaacaccttgggagttagactgtagtcgatacggaaatgaagacaagagtgccttatttcctttccgaagtatttcactagcatacactctacttgaagtcaacttggtccagattgaaaagtgtcctctggcctgaggtggccactaggcccagacccagcccacgcctgagcccctaacaactttgccctcactgttccccaaaactatgcaccctggacttctctaatagaaaagtctccacccctacacaaggacaaaaccctccaccctacccccaacctcagacagacttatacacccctgagtgaggattacatgcccatcccaggtgtcctaggaccttttgccaattactagccccccagtggtgaacagaactcccaaattttgagttgcacccttacacctgtggctttatgagctcagcctcgctttgaggtacccaccgtctgtcagtcacttgacta

SEQ ID NO: 367334 - DNA, 1237 bp, Homo Sapiens; identical to SEQ ID NO: 98734
  misc_feature (1089)..(1089): n is a, c, g, or t
  misc_feature (1123)..(1123): n is a, c, g, or t
  misc_feature (1171)..(1171): n is a, c, g, or t
  misc_feature (1189)..(1189): n is a, c, g, or t

SEQ ID NO: 367335 - DNA, 300 bp, Homo Sapiens; identical to SEQ ID NO: 98739

SEQ ID NO: 367336 - DNA, 1557 bp, Homo Sapiens
caaacactctgctccagccattaatggactccttgtttcttgacattctccatagcctcttggcaatctattccccgggctatatctggagtgttcccctaattttggaaaccgaattacacttttgccgtgattaaagtgactcagtggctattccttgacctaggtttacaagatgccacaggaggtagcacttgagtgacttcagcttcactctcccattacattccttttcatgttccttgttcagctatactgctcttcttccagatctaggaacagatgtcctttctcacctcagggtcttcacaattacctttctttctatctgaaacacaatgcttcttagccacctcaacacctgctattcattctggtctccctttaaacatcatttccccaggtaggactcctctaatcccactattaggaacccctggtctaagtgcccatgaaacactttttcttgtactcgtcattaattgttcaatgtctgtctatgctgctaacctggaatctcacctgaggctggggcctgtcagtcttggttactcatgtgtcctttgacacatgcatatgcacgctcaacacatatatgttggatgactctacaatttttgcagtcatcctgtagtagggaacatacgattgaccttgaaataagttcagcaatgaaatgggctttccctgttttctcatgtgtcattgaaagcatctctgttgcccaacctcctctgttctttatgttgaaaacatgaaaaattccatgacatgatatttgatatggaaagtcacctgaggaaatcttctttccaaagttggactgttatatccctggaaaaatattaacttataagagaaagtttcattaaagatgattcccatagcatatggtaaattttccagaagtatttcgtccatgtgtgttttatttggtgccccaatgacacttgttcctttcaaaagaggagcaagtgctcttttattcattatctcatgggttaaattagatattggtgtatacacaaccattaaagaagagatactaaatttatctacccttcccagattctgaggagccattccaggaaactggacatttctcatggaactggaaaacagagcaatacacagtcctaaaagtattgagaggcccccattccaataagctctctcttttcatcctccatttcttaagaaaattcttgcacagaagtgctttggtctgctgatacacgcttttctgtttcatattcatttagcctattcgctgaaggagaaagtaatcatggtggaacacaactgtcaggaaaataataaaaagcactctagaaacactgtcaaaaccagttctctgtttgtctaggtaacgattacaacttctttattgctgcttcttcattttttcgtttaaatgggtgcctactccagcagctcttacacagcctggtttctgaaaaggggtgtagccagaccaagctgtacatgatgaacttgttttgttttctgtgtctctttctccctaagccaattattctgcaaggaaatgactgttcc

SEQ ID NO: 367337 - DNA, 1023 bp, Homo Sapiens
  misc_feature (960)..(960): n is a, c, g, or t
cgtcactagcagtttctggagctacttgccaaggctgagtgtgagctgagcctgccccaccaccaagatgatcctgagcttgctgttcagccttgggggccccctgggctgggggctgctgggggcatgggcccaggcttccagtactagcctctctgatctgcagagctccaggacacctggggtctggaaggcagaggctgaggacaccagcaaggaccccgttggacgtaactggtgcccctacccaatgtccaagctggtcaccttactagctctttgcaaaacagagaaattcctcatccactcgcagcagccgtgtccgcagggagctccagactgccagaaagtcaaagtcatgtaccgcatggcccacaagccagtgtaccaggtcaagcagaaggtgctgacctctttggcctggaggtgctgccctggctacacgggccccaactgcgagcaccacgattccatggcaatccctgagcctgcagatcctggtgacagccaccaggaacctcaggatggaccagtcagcttcaaacctggccaccttgctgcagtgatcaatgaggttgaggtgcaacaggaacagcaggaacatctgctgggagatctccagaatgatgtgcaccgggtggcagacagcctgccaggcctgtggaaagccctgcctggtaacctcacagctgcagtgatggaagcaaatcaaacagggcacgagttccctgatagatccttggagcaggtgctgctaccccacgtggacaccttcctacaagtgcatttcagccccatctggaggagctttaaccaaaagcctgcacagccttacccaggccataagaaacctgtctcttgacgtggaggccaaccggccaggccatctccagagtccaggacagtgccgtggccacggctgacttccaaggagcttggtgccaaatttgaagccaaggntccaggagaacactcacgaagtgggtcagtgggaacagcattgaggcacggctggcggcccgc

SEQ ID NO: 367338 - DNA, 932 bp, Homo Sapiens
cgcgggcctccccagcccggccggccctcccgcgggcggcactcgggcaccgggctcgccgggaccagatccgcgagcccgtcagcctgcgccatgggctgcgacggccgcgtgtcggggctgctccgccgcaacctgcagcccacgctcacctactggagcgtcttcttcagcttcggcctgtgcatcgccttcctggggcccacgctgctggacctgcgctgtcagacgcacagctcgctgcccagatctcctgggtcttcttctcgcagcagctctgcctcctgctgggcagcgccctcgggggcgtcttcaaaaggaccctggcccagtcactatgggccctgttcacctcctctctggccatctccctggtgtttgccgtcatccccttctgccgcgacgtgaaggtgctggcctcagtcatggcgctggcgggcttggccatgggctgcatcgacaccgtggccaacatgcagctggtaaggatgtaccaagaaggactcggccgtcttcctccaggtgctccatttcttcgtgggctttggtgctctgctgagcccccttattgctgaccctttcctgtctgaggccaactgcttgcctgccaatagcacggcaacaccacctcccgaggccacctgttccatgtctccagggtgctgagccagcaccacgtagatgccaagccttggtccaaccagacgttcccagggctgactccaaatggaccgggccaggcacccggagtgtcctatgccttctggatcatggccatcatcaatcttccagtgcccattggctgtgctgatgctgctgtccaaggagcggctgctgacctgctgtcccccagaggaggccctgcttctgtctctgatgagcttgccttggaaaacacagcctctgagaaggaagatgcttctccatgccca

SEQ ID NO: 367339 - DNA, 731 bp, Homo Sapiens
taggtacgataaggcatgtgatccatagcatttcgcccttagtgatgaactgggcaagaactaatgcatgatttgaagtcttgccaacttcaaacatccgataaatgctgaaaaattcacttacgcccaccaggccaccatgttaatggaggtcacagtaggactcttgagaaatgaactcctgggtttcagggtcatacgtggctgtggtttccaagcctcgaaggtgagttccatgacccatctctgtctgggcataagtgccaatgattctccaagttccaggcgggcatgaagaagcgctcctgctgctccgcagttgcctggtgaagcaaggtgggcaggaacatgcccaagtgaagatccagaggctcaggccgccctcggtgcacaaaatttttaaaccacataatttcatcagggtcagcgatgccaaactccctcatcttcttcaccatgatggcacttttcctgacagccacctcataacgctggctgcgagtgaggaagttcaagtcctcatgctggaagtctgggtcgttcaggatcatgttctcgatctctcggcggcgccgggttttctcggggctgccgtccaggactgtgtgtaagcagctccgggccgaagctggcggaatcccgctccactgcgcaggtccgggttcatggcgacgaccagctggcagcgaagtaagcaccgaccgaggtggcagtgacaatctaaatccccc

SEQ ID NO: 367340 - DNA, 1482 bp, Homo Sapiens
  misc_feature (1160)..(1160): n is a, c, g, or t
cggtccggaattcccgggatgaacgacccagacttccagcatgaggacttgaacttcctcactcgcagccagcgttatgaggtggctgtcaggaaaagtgccatcatggtgaagaagatgagggagtttggcatcgctgaccctgatgaaattatgtggtttaaaaaactacatttggtcaattttgtggaacctgtgggcctcaattactccatgtttattcctaccttgctgaatcagggcaccactgctcagaaagagaaatggctgctttcatccaaaggactccagataattggcacctacgcccagacggaaatgggccacggaactcaccttcgaggcttggaaaccacagccacgtatgaccctgaaacccaggagttcattctcaacagtcctactgtgacctccattaaatggtggcctggtgggcttggaaagacttcaaatcatgcaatagttcttgcccagctcatcactaaggggaaatgctatggattacatgcctttatcgtacctattcgtgaaatcgggacccataagcctttgccaggaattaccgttggtgacatcggccccaaatttggttatgatgagatagacaatggctacctcaaaatggacaaccatcgtattcccagagaaaacatgctgatgaagtatgcccaggtgaagcctgatggcacatacgtgaaaccgctgagtaacaagctgacttacgggaccatggtgtttgtcaggtccttccttgtgggagaagctgctcgggctctgtctaaggcgtgcaccattgccatccgatacagcgctgtgaggcaccagtctgaaatgaagccaggtgaaccagaaccacagattttggattttcaaacccagcagtataaactctttccactcctggccactgcctatgccttccagtttgtgggcgcatacatgaaggagacctatcaccggattaacgaaggcattggtcaaggggacctgagtgaactgcctgagcttcatgccctcaccgctggactgaaggctttcacctcctggactgcaaacactggcattgaagcatgtcggatggcttgtggtgggcatggctattctcattgcagtggtcttccaaatatttatgtcaatttcaccccaagctgtacctttgnaggagaaacactgtcatgatgctccagacggctaggttcctgatgaaaagttatgatcaggtgcactcaggaaagttggtgtggtggcatggtgtcctaattgaacgacctgcccagtcagcgcatccagccacagcaggtagcagtctgggcaaccatggtggatatcaacagccccgaaaagctaacccgaagcatataaactccgtgcagcccagattagttagaaattggctggcaaaaacctttcaaaaaagaagtggattcccagaaaaaaggcaagggaggtaacctggaaaacctaaactttccggttggaccc

SEQ ID NO: 367341 - DNA, 2733 bp, Homo Sapiens
  misc_feature (1735)..(1748): n is a, c, g, or t
  misc_feature (1825)..(1825): n is a, c, g, or t
  misc_feature (2042)..(2042): n is a, c, g, or t
  misc_feature (2089)..(2089): n is a, c, g, or t
  misc_feature (2118)..(2118): n is a, c, g, or t
  misc_feature (2258)..(2258): n is a, c, g, or t
  misc_feature (2283)..(2284): n is a, c, g, or t
  misc_feature (2345)..(2345): n is a, c, g, or t
  misc_feature (2349)..(2349): n is a, c, g, or t
  misc_feature (2351)..(2351): n is a, c, g, or t
  misc_feature (2403)..(2403): n is a, c, g, or t
  misc_feature (2711)..(2711): n is a, c, g, or t
tccttcgttcgcgtttctggcctgcgcgttgctgctatacgctgcgtcttcgtcgtctctcctccttcttcttctctcctttgtgatcgctcgcttccccccctgtgtttccatctttttcttgccctctattgtgtttcgcccctcgtgcgtgtctctctcttcccttctctcgtcgtcttccttgtgtttctcccctttgtttaccctcctgggcgccctttcgtccctacttctcttattatggtgtcgcgtctctccctgtctgatgatttccctggtggtgtctctgctccaccattttcccggtcccttgtcacgccgcgtctccttcacatttttggcgccctctctagatctaccgcgcacagtatcccaggctacgcgtcacccatgtacatcccgcggttgtaacacccctacgcccaattgtcggttccaactgttacgtccaacccaaatggccaagtccctttcttccccgcacgttattaggcacgtcggcacgccctccacccgggccttcctctcggccttatgaccaatccttgactgtcccagagcattccaggtctccctaaccatggagcttcgtgcttgacgtgaggctgagcctggtaaccaagtttcgtctatagcgcagctttgatggcatccatcgcgcctggggcctaccctgctcctggtcccgtggatcgcggccaccccccagctattgtctgggcattggttgcaggaagggcgccctcacccagccccgtcttcagcgtctacctcagccaaccagcagggctccagcggggggaccggtcgtctttgggggtgtggatagcagcctgtacacggggcagatctactgggcgcctgtcacccaggaactctactggcagactggcattgaagagttcctcatcggcggccaggcctccggctggtgttctgagggttgccaggccatcgtggacacaggcacctctctgctcactgtgccccagcagtacatgagtgctcttctgcaggccacaggggcccaggaggatgagtatggacagtttctcgtgaactgtaacagcattcagaatctgcccagcttgaccttcatcatcaatggtgtggagttccctctgccaccttcctcctatatcctcagtaacaacggctactgcaccgtgggagtcgagcccacctacctgtcctcccagaacggccagcccctgtggatcctcggggatgtcttcctcaggtcctactattccgtctacgacttgggcaacaacagagtaggctttgccactgccgcctagacttgctgcctcgacacgtgggctcccctcttcctcttgaccctgcaccctcctagggcattgtatctgtctttccactctggattcagccttctttttctggactctggactttctctaataataaatagttcttctttaaaaaaccaggacccaggataacatccctcacgcagatcataaaattggccttcacaacgaggtactatagagtccttctcaacaagcgagggggcggtcttaacaaaacatcccggaagtgttttatacacatccaatagccttatttttttcgggcaagagggcccctcacagggtgcgcgcgaacaacctacccacataagcgggccaatctagtttcataaagggtttagtagtggagaaaaacagcctcttcatttgatagatacctgtggcggagcggacacccnnnnnnnnnnnnnnctccggtgtgcaagccaaccatatatttgcgcaactaaaacaataatccaccgacgaggaaaattattatctacggnctcgctaccacggggggcacagactcacagaacaatgctctttctcatatccacagtcgataataagtgaagcagcaagtatgctagacatgactctcctcgcctctataccaaccataacaatacatgtgttagccacggagttcgtctctgtgagccccagtccttagttgttttatgtctttccaccctccatactcatccctcctctacaccncccgccccctattttgtatcgcccgccccgctatctcgcccaaaacntagcctccttccccccttcttctttacanttcttctaaaaaaacaaaacccaatttcagcggatgacgcgccaaatttcctaaattatcccgcaaaccgttcaatattgagggttcatcagccgcagttccccgggactactattatagtcgtctgataacccgccgtnccacaccatatggccactcatttcnnagcccagttgacccccccctcaccatcaaacgcctatctacgccgaagagagaccgacccncatncncggggccctttaggcccctccgctatttctccccggcgtactacggcatttnaacgcctctttaaagggaggttaaacgcgactaccggcatttccataccggctcgttttcggttttcccactttttttcttctacattgccccgtataacccttcgaaccccaatttctaattacccctcgctccgtttcttctttctaaccacgcagcacccaccccccgtaaagcggagacgagtatatggccgatctcaaaggagtaacccgatgcacgcctttgcctgcctctcgtgtatagcgcctcgtgttaaccgcggcgggagaatggatctcgaacgcatgatgccggcgcgttggganagccctgttgagagagtaaaag

SEQ ID NO: 367342 - DNA, 908 bp, Homo Sapiens
atggggcaccagtgagcagagaggtgccggtgtgcacgatgcctggcgacgctcaggactccagccggaggcctgccgccgatgaggactcggtcggaggccaacctgccagtagagttcctgggtgacaggcgcccagtagatctgccccgtgtacaggctgctatccacacccccaaagacaaccgctccccccgctggagccctgctggttgctgaggtagacgctgaagacggggctggtgagggcgccctcctgcaccatgccctgcatagctgtggtggcctcatccacggacagagcagggtaggccaggcccatgatgccatcaaactgcgcatagacgaagttggtaccaggctcattctcactcaagccgaactcctggttggggacctggatgctctggacagtcagggtgtcatagccaaagaagccggtgaggctgccactgccatactgcagggagaaggtctgcccattggtggagtaggtggacgactcgctggggttgaagcgggagtgactggtgcaggcctggctctggcagtagacagagggcacccacaagttggaggagccggtgtcaaaaaggaccaggaagttctggggtggagtcccgatgctgatctcaccaaagtaggcagcatccatgtaggccatgggctcgtaggtcacgctgaggtcaccaaagcggtacttccaagcaggatcatacttgtgggtcctcaggaactcccccagcaagcccttctccttcatggtctcacggatagacttaaatttcttcaggggcactttgaccactgctgcctccaagagctggaggcagaccaagaccaccaccatccacttcatgatgctggtccccaactggccacagaggaagagcagctctgagttctgc

SEQ ID NO: 367343 - DNA, 946 bp, Homo Sapiens
ggaaaggacagcggagagcagggcagagcctgagcaggcaggtcacctccaggtgggcgggagctaccactcagcaccatgagcaccgccacaggcccagaacctgccccaaagccaagcgccaagtctatctatgagcagaggaagcgttactccacagttgttatggctgatgtatcccagtacccagtcaatcacctggtgacgttctgcctgggtgaggacgatggcgtgcataccgtggaggatgcctccaggaagttggccgtcatggatagccagggccgagtctgggcacaggagatgctgctgcgagtgtctcccgaccatgtcacgctgctcgacccggcctccaaggaggagctggagtcgtacccactgggcgccatcgtgcgctgtgacgcggtgatgccacccggcaggagccgctcgttgctgctgctcgtgtgccaggaacccgagcgcgcgcagcccgacgtgcacttcttccagggcctgcgcctcggggcggagctgatccgagaggacatccagggggctctgcacaattaccgctcgggccgcggggagcgcagggcggcggcgctcagggccacgcaggaggagttgcagcgcgaccgctcgcccgccgctgagaccccgcccctgcagcgccgcccgtcagtccgcgcagtgatcagcaccgtagagcggggcgcgggccgcggacgaccccaggcgaagcccattcccgaggcagaggaggcgcagaggcctgagccggtggggacctcgagcaacgctgactcggcctccccggacctgggtccccggggtcctgacctggcggttctgcaggcggagcgggaagtggacatcctgaaccacgtgttcgacgacgtagagagctttgtatcgaggctgcagaagtcggcggaggcggccagggtgctggagcaccgggaac

SEQ ID NO: 367344 - DNA, 704 bp, Homo Sapiens
ggtccggagagaccgggccgcgcgcttttccgttcctgagcgcccttgttcatttctgggtgaaagggacccagaattgtgcaacaggtttgggcgttagtccttattttccagcgggtctcttttgccagcgtgcaggaaccagatgtggctccctgctctcggggcgagtcccgcgtccagcgcccgcgactggcgtcctttgtgtgaccggtgaccggccctgtcggaattaaggaagttcactggagtaaaatggaggcctcagtaatatacccattctgaagaaaaaactagccttcctttcaggaggaaaagacagacggagtggcctcattttgacaattccattatgcctcgaacagacaaatatggatgagctgagtgtcaccttagactacctactcagcattccaagtgagaagtgtaaggctagaggatttaccgtgattgtggatggcagaaaatcacagtggaatgtggtgaaaacagtagtcgtaatgctacagaatgttgttccagctgaggtgtcccttgtttgtgtggtaaagccagatgaattctgggataagaaagtaacgcatttttgtttttggaaggagaaggatagacttggctttgaggaggatattttgtaaaacttgattttggatatcagcgacatactgcagtgaacactgcaagataatataacctatgatctt

SEQ ID NO: 367345 - DNA, 814 bp, Homo Sapiens
  misc_feature (272)..(272): n is a, c, g, or t
gactgctgcactcctgcctccacgaggcaaacacctctttcaactcccgtgggaagacacagtaggagttgatgatcttgcagaaggccagctcgcagcacatcttgaggttgccctggtgctctgggaggtcagcggccgagcacttgctgggatccacttcgcagttctcatctgactcatacagcgctttgatgaactcacctagggcgtcctgcaggtacttctggcccactagcttgaggtactcctcaatggccttggtggccagntgtgttctcccggaagatgaggtgctcgttgtccccgcagcggtccacctctgacatcatcaggtctgtcaggaagtccttcaccttgcccgtgctctgcaggatgtgcaccagggcagatgcaatctcctccttggtcttggcactgaggatgggctcgagggctgcacacagccccaggtagtggttggtgatgtgctcagcgaactctttgtacatctccatgggcaggatggtgatggtttggtagcgcgccttgatgcggatcatgggtccagggcccttgccgcccttggggttgggcgtcaccaccgggtaccacttctccacgaactgccgcccggccaccgaggcagcaggtaggctcaccaggcccaggtaactgttgcgctccttcttcttcttcttgtcggtctccccggtacaggtggacagtgaccgtgcgcagaggcggcaagttgtggaactcgaagtgctcgccccagaaaacattgtccgtcttgagcttgcccgtggtgcgggcataagagcacatcgtccag

SEQ ID NO: 367346 - DNA, 876 bp, Homo Sapiens
ggtacccagatgggaaggaaggagacagccgcgcgcttcactccatttgtcacctcatgcatggaccatactctgggtttgagatcattcttcattgaagtttgtaaaaataggttgaaattgtaaagctccatgatcattgctatatgtagatatatttcaatttaagcaaaacaagctgcaagttattccctggcatgctcaaaggattttcgtgcttttcacttaatagtccaaagtctcttaaattcctgctgcagacatcaatagcttatctatattctcaaacaccaaaaggaaaagttgaatcttgctctctttggtatactaatgtagtggtatgctaagctggctcataccaacttagaaaagctgattgtaaaattttcattttgacagctggttattaaatgcagccattattaaaaatcaaatcatacaaacttataattaaatcaattacatttaaaacaaaggtaataaatattccaagcatatcacttcctaatttgatcttgatgctcttgaggtaatttacgtccatggtacctgtgtggtggaattactatatatgatggtgtgctactgggcaccttgtctcaactccactcttcgtgatagcatgttggtagcttgaaatcagcctggtggggagtattaccatggacactggcaaaagctacagattcccggagagccaggggttaaacatttaacagcatacccactgctaataatcaagggctaactggtccagaaatcgcccaggagaatgaaatggatgttccatttttttctactgacattgactagcatataaaaggtatagaaacagcactaagactttctgaaaatacctaatgaaaattttacatc

SEQ ID NO: 367347 - DNA, 1298 bp, Homo Sapiens
  misc_feature (946)..(946): n is a, c, g, or t
cttgtgtcggctcacagcttttctttcgctagctcattgttcaaggtccgcgtgtgttttcggactcgcttcccggtttctctctgccggcgttttttgtcccacctctcctttagtacgtttccgctcgcccgcgcgcttttccgtgttccctgcttgtttcctggtcatgtgtgaatttccgctaggccgtgcgatgaatgtgtttaccagctcgtgtcctcgtcggggatgcttcccccttgccttccatggggcccgccgttgtctcccgtttggtgttctgctggggtctccagttcttgaaatgcgcttgccccaggtgtcatcgttttcctctgtagctggcgttgtgctcgttcttttcgttgtccttgggtggcctggttgctttcccatggggggtctttggccccttattcatccggtcaaagggagttcggaaaagggcttcctgcactgaactccagtagtaactggttgtcaacgtaagactggtttatcacttccttcctgggaatgcctggcgttgtcccgtgcccaggaactttcccatgctgctttgtggtcaagcttgtccccctgtggatcattagtccctactgtggtctgtcactgctaccaccaggtctatctcctgtgtcagccccaccctctaggcgcttggctgtggactctgcttcgtgcatctgtagcccagagcctactgcctgtacatggcctagctgcgtctatctgcaggccccaaggggattctgtcttctgttctcgtcctcagactgcgtcaagcagtaagcagcatgtaaaaacattaccgtgacttcagagcattgtctgtacagtaacttaaacatgatcctgagttatctgtattctgaactttcgttaattgagaagaggcaatgaaatcactacagaatgaaggaacatcccttgaggtgacccnagccaacctgtggccagaaggagggcttgtagccttgtaaacagacacgtgaaagcattttaggtgtgatgaagtaagggtgggacagaggaggtagaaaatcaattcaatctgtcgcatcattcatggttctgttaatattgatgctcagtgcattggccttagaatatcccagcctctcttctggtttgctgaatgctgatgtaagtaagcatggtggaacattgttaggggacatatatagtgatccttggtcactggtgtttcaacattctggaaagtcacatcgatcaagaatattttttatttttaagaaagcataaccagcaataaaaatactatttttgagtct

SEQ ID NO: 367348 - DNA, 999 bp, Homo Sapiens
  misc_feature (495)..(668): n is a, c, g, or t
cgcacagcctggctgcttggagtcctcgcttctgctcatgcgtcttggccttacaaccgggagtctcggctccggcctgtgagctggtctatgactagatccccgctaccctttttcccccgacagcatgctgcctgctggccattggcccataggggcgtgtcacgcttgtggttcgtgggagctgacccgcgtggtttgccatcggcgacacagcccgacaaggtgggcacctaccagctggcctattggtcgccaagcaccatggcattccgttctacgtggctgcccccagctcttcatgtgacctccgtctggagaccggcaaggagatcattattgaagagcgaccgggccaggagctgaccgatgttaatggggtccggattgcagcacctgggattggagtttggaatcctgccttcgatgtcaccccccacgacctcatcactggtggcatcatcacagaactgggggtctttgcccctgaggagnnnnnnnnnnnnnnnnnnnnnnnnnnnnnnnnnnnnnnnnnnnnnnnnnnnnnnnnnnnnnnnnnnnnnnnnnnnnnnnnnnnnnnnnnnnnnnnnnnnnnnnnnnnnnnnnnnnnnnnnnnnnnnnnnnnnnnnnnnnnnnnnnnnnnnnnnnnnnnnnnnnnnnnnnnnnnntaaataaaattttgaagaggctagaaccccgcacttgtgccttgagcttactgacctcaacaccctggttccactaaaactttatttacaaaattatgctgccggtctgcaggatgtagtttaacaatttgattattttggatattaaaatattttttaagtcttgaaaatattgtttactattaccaaagtttttgaaccttcttaaattctgtaccagaggtgagtgccacaccctaacctagtctgagtttttatgtgtaaagatcataaaacgttgtaagttttctaaaacacataagctctcaataaacgttagcttatcattgtc

SEQ ID NO: 367349 - DNA, 1084 bp, Homo Sapiens
gggctgctgcagatgggcatttataacggccagctttttaacaatctggggctgtgttgcttctatgcccagcagtatgatatgactctgacctcatttgaacgtgccctttctttggctgaaaatgaagaagaggcagctgatgtctggtacaacttgggacatgtagctgtgggaataggagatacaaatttggcccatcagtgcttcaggctggctctggtcaacaacaacaaccacgccgaggcctacacaacctggctgtgctggagatgcggaagggccacgttgaacaggcaagggcactattacaaactgcatcatcattagcaccccatatgtatgaaccgcattttaattttgcaacaatctctgataagattggagatctgcagagaagctatgttgctgcgcagaagtctgaagcagcatttccagaccatgtggacacacaacatttaattaaacaattaaggcagcattttcgctatgctctgattcgttccttagacctacatatgttcttatgaacgcagcacttatgcaaggggaaaaaagcactatgtctgtgtatgtatgtatatagtgtaatacgtatattttaacaaacctgtccttgatattagttaaggtgacacataagggtgacacagaatgtgtaactgcaaagtttcatagtaatagtaactttataaaataatattataaaatacaggatttaaacctttcctaaatagatcctgaaagctggctctcacattatatagtagactgtttgtgtataactgtttacaaaacatgtttggtgaatttcctcaatgttcttataaatgtacattttttaagtcctgaagctgactcttagccatcatgtagcttaaggagtctgaaatctgccattaaaactgcacctttaagccaggtgtggtagcatgtgcctatagtcccagctacttgggaggtggaggtgggaggattataaatagagactttccttaagactttaaaaatgtatttaaaactattttttattaaatactttgtgatttcctattaagctttaaaataaatcattgtgtaaaac

SEQ ID NO: 367350 - DNA, 1208 bp, Homo Sapiens
gctatccttgtgctcgcctctctcccgtccctccctcttctccccccctatttcttctccctgctttgctttgtcccctcctgctgccgacactctctctgtctctcagtctcgtagcgcgggcccacgactttgtctgttcttctcccttgtattcctggcctcttctctcggtctctttttcttgtcccatcttcttccttcttgtcttctcttcgcttacttgttgattttattccctttcttgcccctccctctttgttgtctgagtgtccccttatttggtcggcccctctcgttctccttccgtccacatctactcgctctgcacactacgctctcacctgcctttgattctagtctatgtctttaagactgcccatcatgctaagacacctgacaagatgctgcacacgacttcaaagcatcctgtatgtctattctcgtctgcacaacgcgattacctactccaaccggtgtcaccttaagacgaacacttattctgttcatacttaaggctatacacgctttgttcagtcataccatcgctggaatgcagtttttatcgagagcgtcacttgcgactgcacaatgatatgcacactaggccatggccaggtatgtctgttccattcgtgtatcttggtaaccttcagttcacatgtaccatgtacggcatatgatttctcatttatctgctggtgagactattattgccctacggtctgctttcagactattcccaaagtaatgaacagttggatcagcacatggatgttctatctgtatacatgtggaatatgtggagcaaaatttaatttgaggataagatatgagatcacattataatgcctaagcatgttgaaaaagaacctgagtgatgtttcgtatctgtacctaatgtttagatgatagcagataaaaccaccaaagcaaaggatatgagctatttaggaattgattatataagatgatttgttagaaacaaatgttcaaggcccttttaactttaatatttttgtttaggattttaagtatctacatttaggtattaaatgtttatcatttttgttgtttcttaatagaattatttgtttttagtttttcttagctatgattaaaatttttaaatgtagactacaagcggttgttacccattcaatgactattaaactttagtttttcatcaataaggtgatgacttcact

SEQ ID NO: 367351 - DNA, 1147 bp, Homo Sapiens
  misc_feature (31)..(32): n is a, c, g, or t
  misc_feature (70)..(70): n is a, c, g, or t
  misc_feature (648)..(725): n is a, c, g, or t
gcgggtttccctacacggaaaaggcgcggcnntcggaaatctccgtgaaatctactatctatgatcctgnctgcaacccctctccccagcttggcgcagtcgaggggggcgatgctctctgcccatcccagctgcaccctagctccctgctccagggatgtgagcacccactccctgtgctagttagtgcctgattctctggggggggcctcagtaatgggcccccccaacccctttctctggtacagtgctgtctgccctggctgcctcccttaaccctgacttctaagccatcaatttcatgttatttattattgccctatgtggggtggggagggaacctctcgggtctgcacatctccccttccctaacagttcctgttcttgacttgaagagaattgacccgtgggggactccccacctccccaacccagactttggagcgggtgggagttgtaagacaaatcaaaatacggatgacaaagaggatatagccgtgtataccccagggagaggaggcgccgagttctgatgggagaggtacaggttgggttctctgcctaccattgctgtctctgacttccagagctcaaccccctcctttctcccagtggtgacaagatatcaataaacttatttttaatacnnnnnnnnnnnnnnnnnnnnnnnnnnnnnnnnnnnnnnnnnnnnnnnnnnnnnnnnnnnnnnnnnnnnnnnnnnnnnnggggggggcgggcgaagaaaagaatctctcctcaacgggaggagggagcaaacagacaccaagcagcgaagcagccagcaagtatgtggagcgaaaacagagggggctccctcataatgagagcgagggatatattatataagcgacgcgacggaggcggcgccgaggcttaataaacagacccggcacggaaggggggagcaaacgacgcaggagaaagagcgggcgccaaaacctgtggagagggagagaacaccccacaaccaaatgagggcgagagagggcagaccacacaaggaggtggagaaaaaacacaaaccaccaccgagagaacgagaagaacaaacgcacgcacacgcggggggagaacaaagaaacagcaacgagagaaagaaaaggaagcgcggaacacaggaggggag

SEQ ID NO: 367352 - DNA, 918 bp, Homo Sapiens
ggggctcagggaagccaagtgacaagtccaaggtcacgaagactttcttggagcccgaaacaccaccctctgctcctccttctcctgtcctggcccaggcatcctaggggctgaaatcctggaaaccgtgggctggtgtgagaaggttagcatgctcagagcagagaagggctctccccactgcttcgtgactccagggccagaggccatgcagtcccagaaaccccaatcctagctggggcaggtccagagtccaagccctggtgggtagaggccaagcagaagacctgaagtggactcttgcttcccctagtagtgttttcagtgccaagaagctgaaactgtgagctggagttggggagaggtctggaagaggaccatctgggatttctacagcctgggtacccatagccacaccaaggcttctgggagattctgcagggtcagctttccaggctgttcccaaatagctccctgcctccccagctgcccctaaagccacagcagaagagccattcatctcactaaacagaaaaggaagaggaaagaatgaggaaggaccctgtgcaaggttatttgcaggcagggatgggcttgtaccctgacagcacccacgcgtgtcgtggccacgccaggcccgtcatacacgcgctcagagccccatcgctaaagcagttcgcctgcagtgtgctcatgttggatctaggctagacaagcaagaagaagcagggccgcatgaccgcggtggaagttcagtctttggtgtctgcttccaagagggggttttacactctgattcacaggaccaagcagctctgaggcgggtgggggagagaaaccctggctcttcacccaggtttcacacacatgtaaatgaaacactatgttagtattaacacactcgctggatacagacta

SEQ ID NO: 367353 - DNA, 1177 bp, Homo Sapiens
  misc_feature (167)..(167): n is a, c, g, or t
  misc_feature (977)..(977): n is a, c, g, or t
  misc_feature (1056)..(1057): n is a, c, g, or t
  misc_feature (1064)..(1064): n is a, c, g, or t
  misc_feature (1078)..(1091): n is a, c, g, or t
  misc_feature (1093)..(1104): n is a, c, g, or t
cggaagccgtgcgcgctggcctaaggcggggctcttgaggtgcggtcctagcacggacagatcagtgggcttgtgaggagtgcaattcgcaccgtggcggcgggctctcttgctttggactacgaccggcaccatttccctttcagtcccggcttgaatggtgactntggagcctcaatgtcaataccggcctcagcacccagggtcaagccactgatctggattggagtctgtcacagagaagttctcccacagccgcgtggagatcatggtaaggccaagggcagggtaagaaacagtcagtggccaacggtgtggagatatctgtgcctgtacccagcgatgccgactcccccagattcaagaccagctgtgggcagtcgtccaagtatgtgcctggagagaaacgtcgtgatctggagtattaagtctttcccggggggtcaaggagtacttgatgcgagcccactttggcctccccagtgtggaaaaggtaagaggtggagggctcggcctccccatcggggtcaagtttgagatccgcctaccttcaccgtctctgggatccaggtccgactacatgaagatcacttgagaaaacgtggttaccaggccctcgccctgggttcgcatacatcacccagagtggcgattaccaacttcgtaccagctagaagggagaagagatgggggcttgaacacgggggcttccttacagccccggatgcagattattagagggagaggcaggtgacggtgctagtgtgtgtctgtgtgagggcaggtcctggagcttggcagtttcttgctcccagcaccgcagccccttccgtcacctcttccttattccactaggactgggagagaaactctctactgcgttccctcggccctttggagctttccccatacctcctgattttatactgaagaaatagaagaggggcttgaagtccccctcgcgagtgccttcttgncattacctgccttagcgggtggtgcgggtccctccttcacgccgctgaagcccagaggtcccgctggcccctcctctgnnattttangatggtcagtaaannnnnnnnnnnnnnannnnnnnnnnnncctgttcggccggcctccggccctcgaagaagcttttctagaacatttcgttttgggggcgcggggcccaatc

SEQ ID NO: 367354 - DNA, 812 bp, Homo Sapiens
tgccaaaaactaaagaaaaataatcctcaggcattccagattttgtcctctacctttgtggactttacagacattggagtggattactgtgatttttctgtacaatcaataacatacaaattatagagttagatgataaaggccaagtggttcgcatcaacttcaatgaacgcaactagggacacaatattttgatgtacctgttgaaagagttcagcctttttatgctgctctgaaggagtttgttgacctcatgaacagcaaagaatccaagtttaccttcaagatgaatccaggtgatgtgattacttttgataactggcgcttacttcatggccgacgtagctatgaagcaggaactgagatatccccgccatctagaaggagcttatgctgactgggatgtggtcatgtcaaggcttcgtatcttaaggcagagggtggagaatggaaactgaagtcacctgtagataattttaataagattccaatgaccatattttgtgagatatggcacattattcacagaccatgatctttgtgatttacatataatttccttaacaatgaacatgtaacttctctcacaagagtactctttactttgtaatcatatacaatgtcaactttttagatgtttcaccactcttttgcaaataaagcatcctttctgctctgttgcatgcctgctctaatttcttttgcccatatatgagtatctccagaatgtctacaaatagtttttgtagcaaatgaaaatttcttcaaataagccttttgtttcaaataaaacttgtctcaaaacatgcttc

SEQ ID NO: 367355 - DNA, 718 bp, Homo Sapiens
gctaggcccctctcaccaggctgccctaccgtgctcagtgctgcctcatggtgcaaagtggttgctgagctccacgtcatcgcttcagccagcagaaggaggaaggagaaggagaaagacgtgaccccaccatctagggcatttgccttccgaccccccgagctaggacattgtgtgttttattaataaggaaaagaagagaacacgctagcggagtgcctcccgctgatccaccaggatgaacttggcagaacggacaggactctgggcttcccagttaatggagtgttgaactggtggggatctaggggttctttaagtctcactctgtacttctcagaaggggaaactgatacccaagtcagtggctgagctgtggcccaggctcggcctctgcctgctgtcccagagctctgtcctggcaccagctactggtgaaggcagagcttgcagcagtcacagccctgccagaggacaccctggggaacccccgctgtaatgggccacacaacttcccggctctgcttacccagtcctgcttcctctgcagggaagctgcaggcccattctgcccgctccctggcacagggtaagccgtgtctgactaccgcccaggatccatccatgacacccactaggctgagggcttggaggactggagtctagagggcagccaggatgaggctggaaaatattccatctcaatctactactatcc

SEQ ID NO: 367356 - DNA, 1226 bp, Homo Sapiens
  misc_feature (566)..(688): n is a, c, g, or t
gctgggagtccggaggtttcatcttgtgatggtttcggttcggctctcaaatggagggtatggctacgttgaagacagctggggctgccgcacgcctcggggttactgtcgggcacccggcgggcggggccggcgctggggcgggggagggcttcctcgccctcagaaaccacattcgcagaaacgtttttaactggcaaggtttcgagttcccaaccacagcaccctcagtgatggttttcagaagaccttgttagctcctctcctccagagacccatccttcgctgacatcccaccgatttgggagcaggaaaaaacagactcctgcaaaatacctcttcttccagtgccctgtacccctctctacttacttcgagtccctgcagtccagcaacaaccccaaacgagtgaagggaggagacataggtttgtccaggctctgccaccgacgggtgatttgggatgagtccttctccagtatcatttatcttcaactgtaaaacattgagggttagtccgaatgatctccaaacgcttcagcattaaagttaggtgatgaatcctnnnnnnnnnnnnnnnnnnnnnnnnnnnnnnnnnnnnnnnnnnnnnnnnnnnnnnnnnnnnnnnnnnnnnnnnnnnnnnnnnnnnnnnnnnnnnnnnnnnnnnnnnnnnnnnnnnnnnnnnnnncaacacagctacttattgattggagacacgcacgcacactcaccctctccttcccttgacctcagtcgaatcctcacttttactcagcctcactacctccatccacccctcacatcattccccttccttccccaccaaaataatcatattagctaccaacagtgatccactgcagtaccacctactcacaaacccacacactaatgctcacacatcagaaccaacaatgacatacactcgccgttctctattgcaacctcagaccaattacatcataacctaacatactatccaaaaaaacaacaacacaatcgacgaatactacactacacattaaatctcgacaaccaaaaaatacaaacaaccacaagatctttgtcttactcacaccaacaatcacatactacatccactcctgtctacacaccaaccaacaatatacacatacgataaagacgattccacgaacacaaaaaacagcaacctaccacatccaggctgtatataatcacaagcatacctatcgacatacactccc

SEQ ID NO: 367357 - DNA, 1243 bp, Homo Sapiens
  misc_feature (402)..(402): n is a, c, g, or t
tttgcctggtgatgcggggcggatttcgcgccgcccggaggtgtcgtcggcggtgtcctggcagcagtcggcgggttcaagttcgaagtttgaggcgcgctgcagttgcgcaagcccgggcgtccggtggatgaagcgcgcatcccttgccgcgcagcagtaacaggttgatgagtacgcggccgctggccgggacgcgccgggcagtagctgcgccgcaaccgtcctcgcccagggccaccgactgctcggcgggccacgaagcgctcgaagacgtcggtgcaccagcggcggccgtcgcgaaccagcagcttttcgggcggtggcgcccaggcacaaagcggttgagcacgcccacgccataggtgagcggcgagcggcggacccgcaccacgcccggcnggcctggccaaacagcaccgcgcctttgaggatggtgaggccccacgtcgtgcgggaccacgacacgcagaccgcgggcgcccagcgccgcctgcaccgcgtgctgcagcaccgctgactcggcgaagccgcccactaggaacagcagcttcacaccctgcacctccggccgtgccagcagggcctctatgtgctggatgatcccgctgacggtgggctgaaagagctcgttcatggcttcacaagacattcggagcatcccctgtgaggaccacttcacgaagttcacgctgctcctgcgcagagcggtctccacgttgtggccccgctgcttgcggtagaagtcaatgaaggagaagggcagcgagatgttgagcgcccctgcacggtgtgggccagcagtgcgcttgcgagcctcgaaggcgatggtcagatctacccaggctgccggccgttgccttttgaaggtggcgatgaagtcctcgccgaagatgcggcacagcagctgctcgaaggccaggtccacgcccaccgcgccataagggcccccagatgccttgtagagctccttgagggtgccatggggctgctccagctggtgcaccgtcaggtccacggtgcctccgccgcagtcggccaccacgtagcggtctcctgcttgcatctctgcccacagctctcctacgcctgactccaccaggaacgtgcggctgtggcgggaccttcgcagctgctcccgagcctgacggaagctggagtcgatggagcggcgctcacccaggcgcccaccacctggggcccggccactcaggtatcccaggaatccggaccggaccagccg

SEQ ID NO: 367358 - DNA, 1342 bp, Homo Sapiens
  misc_feature (1269)..(1269): n is a, c, g, or t
  misc_feature (1289)..(1289): n is a, c, g, or t
ggcgccgcgcgccgcacttccgggtgccattgcaggatgcagaaagcctcagtgttgctcttcctggcctgggtctgcttcctcttctacgctggcattgccctcttcaccagtggcttcctgctcacccgtttggagctcaccaaccatagcagctgccaagagcccccaggccctgggtccctgccatgggggagccaagggaaacctggggcctgctggatggcttcccgattttcgcgggttgtgttggtgctgatagatgctctgcgatttgacttcgcccagccccagcattcacacgtgcctagagagcctcctgtctccctacccttcctgggcaaactaagctccttgcagaggatcctggagattcagccccaccatgcccggctctaccgatctcaggttgaccctcctaccaacaccatgcagcgcctcaaggccctcaccactggctcactgcctacctttattgatgctggtagtaacttcgccagccacgccatagtggaagacaatctcattaagcagctcaccagtgcaggaagggcgtgtagtcttcatggagagatgatacctggaaagaccttttccctggtgctttctccaaagctttcttcttcccatccttcaatgtcagagacctagacacagtggacaatggcatcctggaacacctctaccccaccatggacagtggtgaatgggacgtgctgattgctcacttcctgggtgtggaccactgtggccacaagcatggccctcaccaccctgaaatggccaagaaacttagccagatggaccaggtgatccagggacttgtggagcgtctggagaatgacacactgctggtagtggctggggaccatgggatgaccacaaatggagaccatggaggggacagtgagctggaggtctcagctgctctctttctgtatagccccacagcagtcttccccagcaccccaccagaggagccagaggtgattcctcaagttagccttgtgcccacgctggccctgctgctgggcctgcccatcccatttgggaatatcggggaagtgatggctgagctattctcagggggtgaggactcccagccccactcctctgctttagcccaagcctcagctctccatctcaatgctcagcaggtgtcccgatttcttcatacctactcagctgctactcaggaccttcaagctaaggagcttcatcagctgcagaacctcttctccaaggctctgctgactaccagtgggcttntccagagccccaaggggggnaagggcggacaattgccgacttgtgatttgcttgaggttgcagcagtttcctt

SEQ ID NO: 367359 - DNA, 1028 bp, Homo Sapiens
  misc_feature (223)..(255): n is a, c, g, or t
ggtttctgtgagagctcaagccacaggagccacaagataagaggagtgtggctgcagaacccaggtggcagtgactttcctcaggccccttactcctgacctggacgaggccggggcttcctcaaggaggctctctgactgccacccctgcctgcctgcccggccctgcacaacatgcagccctccggcctcgagggtccctggcacgtttggtcggtggccnnnnnnnnnnnnnnnnnnnnnnnnnnnnnnnnnccagcctgtaacctgtgcctacaccacgccagtgcccccccagagccctcaccacgctgggcgcccccagagccctacaccatgccgggcacctacgctccctcgaccacactcagtagtcccagcacccagtggcctgcaagagcatggcactgtggccctgattgcgggacttcccgctcgtggacggcacaacgacctgcccctggtcctaaggcaggtttaccagaaagggctacaggatgttaacctgcgcaatttcagctacggccagaccagcctggacaggcttagagatggcctcgtgggcgcccagttctggtcagcctatgtgccatgccagacccaggaccgggatgccctgcgcctcaccctggagcagattgacctcatacgccgcatgtgtgcctcctattctgagctggagcttgtgacctcggctaaagctctgaacgacactcagaaattggcctgcctcatcggtgtagagggtggccactcgctggacaatagcctctccatcttacgtaccttctacatgctgggagtgcgctacctgacgctcacccacacctgcaacacaccctggggcagagagctccgctaagggcgtccactccttcttacaacaacattcagcgggctgactgacttgggtgagaaggtggtgggcagaaattgaaccgcctggggcattgatggtagacttatcccatgttttcagatgctgtgggcacgggcgggccctgggaagttttcacaggcacctgtga

SEQ ID NO: 367360 - DNA, 1083 bp, Homo Sapiens
  misc_feature (633)..(643): n is a, c, g, or t
  misc_feature (742)..(802): n is a, c, g, or t
ggaccggtccggaattcccgggatgtcaagatgcaagcaccagccttcagggacaagaaacagggggtctcagccaagaatcaaggtgcccatgacccagactatgagaatatcaccttggccttcaaaaatcaggaccatgcaaagggtggtcattcacgacccacgagccaagtcccagcccagtgcaggccgccctcagactccacccaggtcccctgctggttgtacagagccatcctgagcctgtacatcctcctggccctggcctttgtcctctgcatcatcctgtcagccttcatcatggtgaagaatgctgagatgtccaaggagctgctgggctttaacaagggagctttggaatgtctcaaactccgtacaagcatgcgaagagagacagaagagaggctgggattccgttcagcagagcatcaccatggtcaggagcaagattgatagattagagacgacattagcaggcataaaaaacattgacacaaaggtacacgaaaatcttggaggtgctgcagaaaatgccacagtcctcacctcaataaatgagaggacattgtggcagccaaagccacaacttggaagatggggctgcacctgccaacgaagacgggaaatgannnnnnnnnnnagcctagtgtgaacctgcccctcgtcccacgtatagaaaaacctcgagtcatggtgaatgaggtgtctcggagttgcctcgtgtgtgtgtacacctgcnnnnnnnnnnnnnnnnnnnnnnnnnnnnnnnnnnnnnnnnnnnnnnnnnnnnnnnnnnnnnccgtgtgtgttgcatttttgcaaagggggggacattttcagtggtatctccccaaaaaaggtggatggaatggattagggactgaaaaagtcacagtggaatgtgggcatggcatgccctggggtcatgggggacttaatgttgagtcctcggcatggtcaccgttggggtgggcctgtggtcttaaaacacctcccagcaaaaaggtccccccctttaaaaggggggggtgctttggtggaaactggcttttggaaccggggccctcggttctcccccgg

SEQ ID NO: 367361 - DNA, 1342 bp, Homo Sapiens
cagtcctgcaagctacggagtcactacagggagaggtctcatcactagaaatagccgaagaacctgcagcctcaaccagcgttaaggaggacgtgccgtttctagggagtcttagtcggggctcaccagcttcctgcattttctgaccggctccaggaatagaaccaaaagaagctgaacaaggaagcagcgcggcaccaagaaaagcagaagtcggggccttggaggcgtgactttcccctcgggtccaggtagggcctggagctgctgcaagtgccgcctgtgctggggaagggaccatgtggctgccttgggctctgttgcttctctgggtcccaggatgttttgctctgagcaaatgcaggaccgtggcgggccccgtggggggatccctgagtgtgcagtgtccctatgagaaggaacacaggaccctcaacaaatactggtgcagaccaccacagattttcctatgtgacaagattgtggagaccaaagggtcagcaggaaaaaggaacggccgagtgtccatcagggacagtcctgcaaacctcagcttcacagtgaccctggagaatctcacagaggaggatgcaggcacctactggtgtggggtggatacaccgtggctccgagactttcatgatcccgttgtcgaggttgaggtgtccgtgttcccggcatcaacgtcaatgacacctgcaagtatcactgcggccaagacctcaacaatcacaactgcatttccacctgtatcatccactaccctgtttgcagtgggtgccacccacagtgccagcatccaggaggaaactgaggaggtggtgaactcacagctcccgctgctcctctccctgctggcattgttgctgcttctgttggtgggggcctccctgctagcctggaggatgtttcagaaatggatcaaagctggtgaccattcagagctgtcccagaaccccaagcaggctgccacgcagagtgagctgcactacgcaaatctggagctgctgatgtggcctctgcaggaaaagccagcaccaccaagggaggtggaaggtggaatacagcactgtggcctcccccagggaaaggactttcactatgcctcggtggggttttgattctaacaccaaacagggatagctgctcaaaaggcctccgggagggagaaaccagattccggattacagtggtgataaagaaagacatagggctttttgttcctgccttcgcccatcgggagctcctcctgggggccccagggaagtcccagggacaggcttccctttataccctgggccccaaggtccttctttcagccctggcccctcgaacaacaggg

SEQ ID NO: 367362 - DNA, 2411 bp, Homo Sapiens
  misc_feature (1674)..(1674): n is a, c, g, or t
  misc_feature (1810)..(1810): n is a, c, g, or t
  misc_feature (1812)..(1812): n is a, c, g, or t
  misc_feature (1890)..(1891): n is a, c, g, or t
  misc_feature (1908)..(1908): n is a, c, g, or t
  misc_feature (2356)..(2356): n is a, c, g, or t
tggggaagtggctgcatcgccacccaagggaccctggactttgccagacgtcagggttgagaggagccactagcaccatcccagagctgtcagcaccggcctcagcccaggcggctctctccctgagcttcctgtaccctgaccctctccagcctcagacctgagacagggctggacaaggaagcagagagcagaagaaaagcagaagcgaagctcagatctgctgggaggagattacattttgtcccctcctggggtcttgcacagtggcaggtgacattcgtgttacaggaatgactgccagggcctgggcctcgtggcggtcttcagctctgctcctcctgcttgtcccaggctattttcctctgagccaccccatgaccgtggcgggccccgtggggggatccctgagtgtgcagtgtcgctatgagaaggaacacaggaccctcaacaaattctggtgcagaccaccacagattctccgatgtgacaagattgtggagaccaaagggtcagcagggcaaacaggaatggccgagtgtccatcagggacagtcctgcaaacctcagcttcacagtgaccctggagaatctcacagaggaggacgcaggcacctactggtgtggggtggatacaccgtggctccgagactttcatgatcccattgtcgaggttgaggtgtccgtgttcccggccgggacgaccacagcctccagcccccagagctccatgggcacctcaggtcctcccacgaagctgcccgtgcacacctggcccagcgtgaccagaaaggacagccccgaacccagcccacaccctggctccctgttcagcaatgtccgcttcctgctcctggtcctcttggagctgcccctgctcctgagcatgctgggtgccgtcctctgggtgaacagacctcagagaagctctagaagcaggcagaattggcccaagggtgagaaccagtaacatctgctgtccatcaaggccctgtgctgcaacagagcccctctggggggactggaatgacctcctgaccactccctcccgggctgctctctccacatctcctggaatcctttgtgagcctccttcagccttttccctgtgcccgatcctcatgtgtcacatgtgaacctgacggacatggacgccctgagctgtgagtccacgtctcatgtgcaacgccccggccagctaatcctcgggccggcaagcaatacctctgagtgcccggatgccctccctgcacccttccatttctccaggagcctggcactgcttcctccacccgttttcacgggggacaagcaggggctagggactccgcctgcaccctttgccaccataatgggcccaacactccctggggtccaggagtggaagaattaatgcggctgctttccacttttgctgagtggtggccgatttccatgagtgctcttcaaaacctgttaataaaatggacaaatggtgtataggcttgggggaatggtcgggaggacccacccacccgaaaacccgcagtggttgccgagggtgtgccgcgcgagcccactaacggacgaaacaagaaccggcacctacaactaaacccccgctactgtcacagtgatacggagggtgtggtgtagagggtgagagagtaaaaggagagagaggttccacagacncaatagggtgcaggggcctgttgcccgcggcacgggccggcatgaggagggagaaagaaaagcagccaagaagttggtttttttcgtggttgaagagtaaaatggggggagaaagaccggaagggacgaccaaggntnaccccctcacgagaaagttgcgtaaaccgccacttccctggaccagtttccccccacccgaaggacaccccaaacttnntcctataggttcgaccngcagacgcaacagctggaagggtgtggaaccggcgggggcgcgccaccactcaccaggtgaggtcttgaataagggaacggggggccgtcttcccttcaacatggatacacgtttactttaggggtaacttcaagtagcccttggcggtaggcggaggggaaggactgtgtgacgggttttcggaggggagttctactgtattaccgagccggacgtcacctgccctccgccaccacggcatcccccaatctaatacacacaccccgcgacgattctaaccacaacccgtgcccgaggacgacgcgcatccccgcgccttgtatggcggtgtgaggatgtaggcaaaaagggttgctcatccttactcctgtactgtcgggtcgcggacggcttaccgcgccaccactcatttgtctgcgtgtaaatgagtagaaagatggtgaagcnagacgggagggggaggggaatggaatgtggtgggcccccccttaattactaaacc

SEQ ID NO: 367363 - DNA, 1224 bp, Homo Sapiens
cccatccaggcacctctcagcacagcagagctttccagaggaagcctcaccaagcctctgcaatgaggttcttctgtgcacgttgctgcagctttgggcctgagatgccagctgtccagctgctgcttctggcctgcctggtgtgggatgtgggggccaggacagctcagctcaggaaggccaatgaccagagtggccgatgccagtataccttcagtgtggccagtcccaatgaatccagctgcccagagcagagccaggccatgtcagtcatccataacttacagaaagacagcagcacccaacgcttagacctggaggccaccaaagctcgactcagctccctggagagcctcctccaccaattgaccttggaccaggctgccaggccccaggagacccaggaggggctgcagagggagctgggcaccctgaggcgggagcgggaccagctggaaacccaaaccagagagttggagactgcctacagcaacctcctccgagacaagtcagttctggaggaagagaagaagcgactaaggcaagaaaatgagaatctggccaggaggttggaaagcagcagccaggaggtagcaaggctgagaaggggccagtgtccccagacccgagacactgctcgggctgtgccaccaggctccagagaagtttctacgtggaatttggacactttggccttccaggaactgaagtccgagctaactgaagttcctgcttcccgaattttgaaggagagcccatctggctatctcaggagtggagagggagacaccggatgtggagaactagtttgggtaggagagcctctcacgctgagaaacaggcagaaacaattactggcaagtatggtgtgtggatgcgagaccccaagcccacctacccctacacccaggagaccacgtggagaatcgacacagttggcacggatgtccgccaggtttttgagtatgacctcatcagccagtttatgcagggctaccctttctaagttcacatactgcctaggccactggaaagcacggggtgctgtggtgtactcggggaagcctctattttccggggcgctgagtccagaactgtcataagataatgagctgaataccgagacagtgaaaggctgaaaaaggaaatccctggagctggcctaccaccgaacagttccccgtaattcctggggtgggctaccccggactttgcactgggctg

SEQ ID NO: 367364 - DNA, 1321 bp, Homo Sapiens
gagctcggtaccctactgttccacagcgagagagatgggaccttggcaggagccaatgtagggcaggtagcaatagaaagtgactagaggtgaaggaagagcaatgaagtaccataaatcacacagaacaagtggctcactgcttttctcctctgagttcattaacgtccagtaactgtccacagggcatgtgcccatactgctcaatgcagagctgagtaggtggaacaggctcccaaagctagaaatccaagtgacagcaaccagttcagaggccctgggaataaacagggtccaagcagtgcagataaaggcagtacaatctacagtatcatttgcttggcttacaagtagtgtgaaggatgacctcgtagcatgtgatattccagaacagcatgaaggtcatatggaagtggagaagcatacccaccaccgtctcaatcttgaggttgagagaactgaatatccaaaggaaacagggtgcagaaaagtcagcaaaaacaaagcacaatagaaggcatactcattgctgatgcccaagcacaggtccagcagaaggtggtaggagaccttgtgcaggagtatccccaagggcaaatgttaaccagactggaacccaaagggcctggggatctctacaggctcccttagcgggcgacgtcgggctctacggactccttcacgcaacaggtagtattgcagtggatttggccacagatcctctttaataatctcagcaattttgtcggactctggaaggctgtggtctgaaaaccaagtgaagaagctgcagatgaggtcttggtttctgcgaatgaaggaatggggttcatgccccctgcgccatataattggagtagaaagagacaccactcggccggaggatcttacctcatattccttgacaatcagcttgtttctgaagtaggggtttcttctaaagaagaacttgaacttgcaaccggttctagggtgtctgagttccttcacctctaaattggttatgtaccttaacatctctgcatcttggcccctaatcatggcggacaactgggggtggtttcgaaaagcagtcatccagaagcccgggatattctgaatgatgtagttcctccgctccaggtagtgtcgacgcatccgcccaaacttgtgctccagctgttggaaggccctgtcggcctgagcattcacagtgtccagttccagctggatggcctccagagggtccatgcggagagcctcatgcaaagccaggcccttcttcctctatcgcctcctccacgaagggggatgacataagatcctgtagacacctcacgac

SEQ ID NO: 367365 - DNA, 462 bp, Homo Sapiens; identical to SEQ ID NO: 98781

SEQ ID NO: 367366 - DNA, 1412 bp, Homo Sapiens
ggcctgggtggcgaatacggcacgaggcggagccgccggaggtggagtccgccccccggacccccgaactcctgtgcgtgcccctccatggtgctctaggctgtggagggcaaggccagtccccgggagcagggtgaggaaggggcccccacgcagccctgctgtggattggcgggaggaccccaggctgggccaacccagcagcccgcggccaggagcgggcatcccaatggggaaatcggccaggaggggctggggaagctggtgccttcgcccgcgccccgtgagctttacctccgtgcgacaagagcggtggctccgggcggggcccacgcagctggagcctccatctctcctgcgggaccagagcaccgggaagacctgaccgagacccaacgtccctgcccccgatctggggctctctgcaggccccaacttctgcgggactctccagtgggagcagcaagggttctcaggaacaacccctatacaaaccgggacagaggcacctcactactccttctgtgccccaccttctccactgaccctgccggagtgcagcacacacgagcaagcatttcaataaatcgcttgaagtggggaacatctgtactcggttaaagaaaccaccaggaattgggaactgcccggtgaagatcattcaccagctccagcaacaattgactgcacctgccatactgcaggtcgccgcagcatcaagaagctgtatactatgggaaaccgggtgccaccgtgctcaaaattagagtggcacggcctgagaatctggtcgcgcttacccggccctgaaattgatcgcccccttcctccagttggatcccgcccacagcgccgggtactggtgaaagacccccacagggtttgccctaagccacgacgagcgcggtcggaaccactaagtgggtggagaattagtttttcgcgccgcccaaaaacagatacgcgatatatcagctataataaagaataccccaacgcttattgttcttcgcccttttcccccgagaacccgatattaccacgtcccccgccgactccgcaccggtcaagcgacacaagtcgagatgtagacagcgaggccccttatatttcattccccctcgttgcaagctcagcaacgaacgggtgaaaccgcgataaagaccacagtagatacatccttctaacgattttttatactgaatgcttactctttagtagtattatccactgtcctttgcttttgtcttatttataaaggtaaatactacagcccccgtcgtgggaagagacgcattggaggaatataaatccgaacgcatcatacagagaaagcacaaaggagctcgtctcagcatatttccaatcgccattatacgcaacagagaacagtacatcattccacttcgcgg

SEQ ID NO: 367367 - DNA, 1320 bp, Homo Sapiens
gggatttgaaatggaagaaccttattaattcagtaacatttcactgtttatattgcttagtgaccgtagactaccagatcggaaactttttcctgcgcatgcttcgaaggtaattacggtatagcatgacactaatgactcgagcctgaaattgttttgaaacgatgtagtagagaatcacatccagacacgtgctgaggttcatgaggaaggtggtaaaggctccccagggattgtaactgttctcccccgttcccagcatcaggaaagcgaaacagatgtggaagggcataaagcagacgagcacctgcaccagcagcgtgatgatgatccttatggacttctccttgactttgggtttcagcttagacgtcctgccgtgaaggagattatgaataatgaccaagtagcacccaatcatgatgaacaaaggaatcaagaaaaaaaatgtcagtcgagtgaggttcagcacgttcacagcttttagatagatgatgtcagaaatcttgaggcaggtggcgggagtggagtctttatctgggtctttatagaccagtagcagaggggtggtcgtggtcagggtcattatcccagactcccacacacgccagcacggctttgcacgtgtttttaagttctattggcgtacttcggctgtacaatggccatgtatctgtcagcactaatacaaggcaagaagccataaaccaatgcttgggtaaaacactgtgagagctccaagaatctgccagcaagtactctccaaatgcccattcatcttctgcataatgatacacttcgaaagggtaaagtcattataaatatgcaagtccagctacatgccacattcatcatatagatggttaccctggttctcttcttggtggtacaactgaaaacccataatgcagtgatgcttaactatcaatccgattatgaagatacagctatagtagacaagggctgcaattttgtattcatctggatgtcgagctgcttacaaaggcgacaggttgatcttgattgttccagggtgatcattctctacagcttgtctggtagccatgatacttagaaactcctgtccatccaaagtactgtgtgagagatgagcacttctcttccagcacttccatcttcctggtcgagagggatatctgttgagttgcttctcgttaagaagtagactctttgctggaatactgtgctatgtgtatagaaatgttgtattttgtcattagactcttttgcttgctcctcctaagatagtcttccagtgtaacgcttcggcgtcggagttggtgactgggctgactttca

SEQ ID NO: 367368 - DNA, 808 bp, Homo Sapiens; identical to SEQ ID NO: 98784

SEQ ID NO: 367369 - DNA, 825 bp, Homo Sapiens
tgaaaaatttaacatttggtctggcaagagaatacagccaactcacttcaaaacctctcagctgaagctcccacccccaattggaaattctgttcctttttgtcgtagttcaaaagacaataagccccactcatcgtttttaagctacagaaatcacaggttgctgaccagccaataaactggttgctttgggtgaggtgctctccctgcctcgtggcttgcaggggaggttgacgtcagaatgatatcaaacatagatgtctcagcagcagttatgggagctgggagagatacaagctaacctaggacaaaagttacgtacagatgttaaaatcccttggccctatgattattccaactacaggccattatgaaaagagaagctcacacgaaatggacaatgacgccactcaagaatgggctagaattgtaagtaatatactatcgtttaagaagatgaagtgcctgggaaaggatcagctatcactcatgcgacttcctccttgtagtaagccttcctgacaacgcagaagttggaaaactagaaaactgtctgttccagactcctgtatagctagtattctggatgcaaatctgattacaccagttaagaatgcaggaccacaagatatggaaggcagaaataaagcagagccccagatggcctagtagcctattcagcagatttcagcgttgtacacaagtatcatgcacatgtcagtatcagtctccagctggtgactgctttctcaggtcgtgacacgagtgcctcgcaggattgacgatgcagcaggttgtgccttttggtgagcccctagcagcgtc

SEQ ID NO: 367370 - DNA, 683 bp, Homo Sapiens
gcctggcggcggcggccatggggcctggcgctgcccgcctggctgcagcccaggtataggaagaatgcgtatctttgcatctattacttaatccagttctgtggccactcttggatatttacaaatatgacagtcagattcttttcattggaaaagattcaatggttgacactttttatgctatggactgtgatgcgacttgccaatccgtatctctcctggaactgctgcacatatatgtggcattgagtcaaaccatcttctcccaaggttttgcagctcacagaaagaataatcatccttttgtggtgatcaccagtcaagaggaagtccaagagaaatatgtgggtgtgtttattcgtctttggaatctatggatatggttaggtacacttatagcatgttatcagtcataggaatatcctatgctgtcttgacatggctcagtcaaacactatggatgccaatttatcctttgtgtgttcttgctgaagcatttgccatctatcaatcgctgcttatttgaatcatttggcacttattccaccaagctgccctttgacttatccatctatttcccatatgtgctgaaaatatatctcatgatgctctttataggtatgtattttacctacagtcatctatactcagaaagaagagacatcctcggaatctttcccatt

SEQ ID NO: 367371 - DNA, 837 bp, Homo Sapiens; identical to SEQ ID NO: 98788

SEQ ID NO: 367372 - DNA, 770 bp, Homo Sapiens; identical to SEQ ID NO: 98789

SEQ ID NO: 367373 - DNA, 268 bp, Homo Sapiens; identical to SEQ ID NO: 98790

SEQ ID NO: 367374 - DNA, 914 bp, Homo Sapiens; identical to SEQ ID NO: 98791
  misc_feature (30)..(30): n is a, c, g, or t

SEQ ID NO: 367375 - DNA, 883 bp, Homo Sapiens; identical to SEQ ID NO: 98792

SEQ ID NO: 367376 - DNA, 751 bp, Homo Sapiens
gccgcctggccgggcgtagacgcggtggctagagcccgcgcggcgctggaagcgagtggcggagcggcgggacctcggcggactcgccatggaggaggagggtgtgaaggaagccggtgagaagcctcgtgggagcacagatggtgtgacaaggctggctggatcaagaagagcagtgggggcctccgtgggtttctggcaaagaccgatatctgctcctctgccaggcccagctgctggtctatgagaatgaggatgatcagaagtgtgtggagactgtggcagctgggcagctatgagaagtgccaggaccttcgtgccctcctcaagcgaaaacaccgctttatcctgctgcgatccccagggcaacaaggtcagcgactatcaaattccaggcaccctaccggggaggagaaggaatcctggatcaaagccctcaatgcaagggattaaccgaaggccaaaaacaaggctttcgactgaggtaaaggtggacaaaagctgcgccctggagcatgtgacacgggaccgggtgcgagggggccagccgacgccggccaccaacgagagtccacctgaaggacgtggccacgtgcagcgttctgacgagtcttctgcgcctggatcttgcatgtcccggacagtgggccaccagctgtatgcccacagcaactcatgtcagtgaagcccaacctcgggagacagcccgggccctcatgcctcctaccaaagcatatccctagcaacttga

SEQ ID NO: 367377 - DNA, 868 bp, Homo Sapiens
gctggagtgaggagctgcagcctggcacccacgtgcctggcctccatccccgggccgctttcgcgtggaagaaggtggcggtgcacctttctgctcagcagatggaagcacgagtgcagagaagggtgccagtgagctagaggggtctttgggtgaagcaagcacaatagaaatccccccaggtgagtccttgcaagccagggctgcaaggatcctgggcattgaggtggcggtggagtccctcctgccgggcatccggagagcgggacagaaccagcctgctgagcccgatgcaagtgcctgcaccccagagtccccccaggaagagttgctatctcgcccagcaccggcagatgtccccagggtgtccactgatgccttttatggcaggaggaagtgcggctggaccaagagccctctctttgtaggggacagggacagtgccaggcgggctcctcaggcttttgagcactcagatgtggacggggttgtcaccagcacagaccctgtccctgagcctgagcccagccccttggagtccaagttcttcgaacaaaaggatgtggaaacaaaaccacccttcaggtccactttattccattttgtagaaagaaccccaagtgtggcaggctctgaaaagagacttagaagcccttccaaagtgattgaaagtttacaagagaaactggcctccccgcctaggagagcagaccctgaccgcctgattgagaatgaaagaggtgagctcaagtgtcacgcgatgagagtcctgaagcttcaggaaatgccgactccaggaggacgccgacggcattggaaggccacacaaggggccaggcgggctccggggaggccttggtgttcctgg

SEQ ID NO: 367378 - DNA, 726 bp, Homo Sapiens
tgaggagagtgaggcggagccgcagcaggagaaccgtgctcactgcagacaggaggatgtgggcttccgcggaaacagcccggaaatgagggttgagccacagccaaggatgtgggtgccggagagccctgtgtgtaggtcgggaagaggtgagagtaagtctgagagctggagtgaggagctgcagcctggccacccacgtgcctggcctccatccccgggccgctttcgcgtggaagaaggtggcggtgcacctttctgctcagcagatggaagcacgagtgcagagaagggacacctggaggttagcaacggaatggacgagctggcaggtagcccatttcctgtgacgagaatgtcttcaagatcaagtgacgcaaaaccactgcccgcgtcctatccagctgaacctagggagccccaggaaagtccgaaaatcaccagtgctttcagctctgtgaaaccaagtgaagcggtccctcggaagtttgacagtggtggagagaggggggcagggctcccactgtccctgtctaacaagaaccgagggctctcagctccagacttacggtctgtggggctcacccctgggcaagaacagggtgccagtgagctagaggggtcttagggtgaagcaagcacaatagaaatccccccaggtgagtccttgcgagccagggctgcaaggatcctgggcattgaggtgccggtgggagtccctcctgg

SEQ ID NO: 367379 - DNA, 719 bp, Homo Sapiens
cgcagcgcccgcctccgccggagcccgcgtcctaggcctggctccgcctgcccgagacccgcccagcctgccccgctcatgccgccagagaagatgcggctgctcccggaatggttcctcttgctctttggcccgtggctccttaggaaggccgtcagtgcccagataccagagtccggaaggccgcagtacctggggctgcgccccgccgcggccggagcgggtgcccccggccagcagctcccagagccaaggtctacggacggcctaggcgtgggccgcgcctggagctgggcctgaccgaccaaccacacgggggcgctggcccgggcaggggcagccggtggcgttgcccgcgcagcgcaccaagaggaacgccgtccatcaaggcggcgcgcgccaaaaaagatctacggctggggggacttctacttccgggtgcataccctcaagttgtcgctgctggtgaccggcaagatcgtggaccatgtgaacggtaccttcagtgtgtatttccgccacaagtcgtccagcctgggcaacctcagtgtcagcatcgtgccgccctccaagcgtgtcgagtacggaggagtctggctgcccgggcctgtccccccagcctctgcagtctacgctcgccctggagggggtgcttcctgggcttggggcccccgcttggggatggcagcagcagcggcgggccgggcttgggggctccg

SEQ ID NO: 367380 - DNA, 836 bp, Homo Sapiens; identical to SEQ ID NO: 98804

SEQ ID NO: 367381 - DNA, 886 bp, Homo Sapiens
  misc_feature (151)..(185): n is a, c, g, or t
ggaatgtagtgcctgacagttcaggctttcaaaagctcgctggaccagggtgcacggtcagagataatgggcacagagaggttcaatccagactctgaatgtcagcagttgtgcacctagtttgcattgactctcatctgagatatgaccnnnnnnnnnnnnnnnnnnnnnnnnnnnnnnnnnnncactaatatgtatagtaaccctgttctcccttgcacacgagcctcctcacactttcaatcatcttctgtttcgttcaatgtgtgtgttaggagcacgactcccgctgacctcgtcccgtctactgtgaaacagccaatgtaaggattcccactggcaaagcaaatctccaaggatgtgggcaggttggccagggaaaactgtgcagagaattcagcataatgatacagaatccaacagcgtggggttcacaagacaaaggagtccctaggagaggccagtgagtccccaaacagcagagaccctttcgaccgaggaacacaacactgggagccgagctcctacggaaatgtccgaatcaaaacgcgtgactctccaaagaatgccccattttcctgactgcttttccttttccacatttgaagtcctacatggaaaccttcagtacaccaacagataaatcagtcttaaagctaggtgtcaatgtgttcactccgacaacgtgaaggccaatttgaacattctgacatttctattaccaacgccaatctaaaatgtgaaacagagaaaatctgccacaattgaataggaactgaaatatcaaataataaaataagtactatcgtttcaaaaatatttttatcaaataagtataagtaaaagtaaacatgattttcactttgaatttgttacataaactacc

SEQ ID NO: 367382 - DNA, 832 bp, Homo Sapiens
  misc_feature (155)..(224): n is a, c, g, or t
gggactttagttgggagctgcgcgccgcgctcagttactggagagctggccgcgcgccgccgcctcccgcacgcttgcacgcgggcccggcttcggggttttgggttcttactccaagcggcggggaggagggggagccccggacacactgtggnnnnnnnnnnnnnnnnnnnnnnnnnnnnnnnnnnnnnnnnnnnnnnnnnnnnnnnnnnnnnnnnnnnnnncttgccaccttcagcccccccgcgaacgcccaaggtgcacacatcttgaccaactcagcagcaaggtggattttctttgtgtttaaagaaaaaaaatgtccctgtgtctgtagagatgatttgcagttcagcccggctgaagctgaccgaatgagactatgggctgtgcctccgccaagcatgttgccactgttcaaaaggaagaggaagcccagaaagggaaaaactaccccaaccggagatgtgttcgcgccgacgattcgcgggtccggaccagggcgcagaggtcacatacctggatcgacggcggggcgacgcgagggggcgattcgtcggtccggcttcccgagcgagccttgcatataaaggggcgcctgcgccgggggaagccgcgaccgaccgcacaccggtgtgggcgcttatgactggccctcccgccgcaatcgccggccccccgccccaccgcccgcttcccgagccctgtcgtcccgtttttgcgccatccgcgcctgttcccggcgccgttctccgcttgcggccgcgccgctccatctcttgtagtgtgcgcccgccacgggtagggccgcccggtgttgcccggcgctgcc

SEQ ID NO: 367383 - DNA, 964 bp, Homo Sapiens
  misc_feature (727)..(804): n is a, c, g, or t
agcaatattcctttgcaagttcattaagaaacactgtaatttaatggggcgtacaatatggaacgatcttcttttgctatagtgctgttcgctgaatagaaccgacctttgcaaagatttcaactggggtgtaacctatttacacagtagtagctcctggtttgagtggtaaaattggtgctatgtgatatcctcttcttccgaacagtaatcccgacccttttcaattttttcatccagcattctgaagaattcttgttggctttcagagatgtgcatgtttgctctgggttgatgaactaatcccggaacctctttattagttttaagtcttacatttgagctggcacttttttccaagttttcttggttcctggctgctattttctgctcttcttctgccccatttttcatgtatttgacctcttcccactggtttgatcctatactcatcgccaaacacatctccgttctggtagtttttccctttctgggcttcctcttcattttgaacagtggcaacatgcttggcggaggcacagcccatagtctcattcggtcagcttcagccgggctgaactgcaaatcatctctacagacacagggacattttttttctttaaacacaaagaaaatccaccttgctgctgagttggtcaagatgtgtgcaccttgggcgttcgcgggggggctgaaggtggcaagcctcccgcccccccgcccctgnnnnnnnnnnnnnnnnnnnnnnnnnnnnnnnnnnnnnnnnnnnnnnnnnnnnnnnnnnnnnnnnnnnnnnnnnnnnnnccccgccgcttggagtaagaacccaaaaccccgaagccgggcccgcgtgcaagcgtgcgggaggcggcggcgcgcggccagctctccagtaactgagcgcggcgcgcagctcccaactaaagtggaaagaagcagcggccgcggcggccgcggcacggaa

SEQ ID NO: 367384 - DNA, 368 bp, Homo Sapiens
  misc_feature (128)..(158): n is a, c, g, or t
ctttaaacacaaagaaaatccaccttgctgctgagttggtcaagatgtgtgcaccttgggcgttcgcgggggggctgaaggtggcaagcctcccgccccccgccactgtcctcctcgtcttttttctnnnnnnnnnnnnnnnnnnnnnnnnnnnnnnnccacagtgtgtccggggctccccctcctccccgccgcttggagtaagaacccaaaaccccgaagccgggcccgcgtgcaagcgtgcgggaggcggcggcgcgcggccagctctccagtaactgagcgcggcgcgcagctcccaactaaagtgtgaaagaagcagcggccgcggctgccgcggcacggaacgtccccccggaagtccgctc

SEQ ID NO: 367385 - DNA, 1075 bp, Homo Sapiens
gggactcgggtgcctggggcagacgaggccggcttctccgcggacagctagggagagtgtcctgggtgtcagccagaacatgtctttcaacctgcaatcatcaaagaaactgttcattttcttaggaaaatcactgtttagtcttctggaggctatgatttttgccttactcccaaagccacggaagaacgttgctggtgaaatagtcctcatcacaggtgctggaagtggactcggaaggctcttagccttgcagtttgcccggctgggatctgttcttgttctctgggatatcaataaggaggggaatgaggaaacatgtaagatggctcgggaagctggagccacaagagtgcacgcctatacctgcgattgcagccaaaaggaaggagtgtatagagtagccgaccaggttaaaaaaagaagtcggcgatgtttccatcctaatcaacaatgccggaatcgtaacaggcaaaaagttccttgactgtccagatgagcttatggaaaagtcatttgatgtgaatttcaaagcacatttatggacttataaagcctttctacctgctatgattgctaatgaccatggacatttggtttgcatttcaagttcagctggattaagtggagtaaatgggctggcagattactgtgcaagtaaatttgcagcctttgggtttgctgaatctgtatttgtagaaacattttgtccaaaaacaaaaggggatcaaaaccacgattgtgtgccccttttttataaaaaactggaatgtttgaaggttgtactacaggctgtccttctctgttgccaattctggaacccaaatatgcagttgaaaaaatagtagaagctattctaccagaaaaatgtactggtatatgccaaaagtggtataactcatgagggttccttaaaagctttttgcccctcaagaacgggatgcttaatagctgactatttggggcatccttcatgcaatgggaaggcttttgttgacccaaagaaaaagctcctataaaccaactctatggcctaagagcctctgaatacccgggggtccataaggggaatttt

SEQ ID NO: 367386 - DNA, 1645 bp, Homo Sapiens
ccaggttgattagtaaggaccagcatctccggtagtccaggaggcccaaagaaggttcgcagagggtcatggcttagggtatcgctatgaacagagtgaacaggaaccgagacaccaagtggaaatggagggtgatggcatgtagatggctgggtccagtctaattgttcttcatcgtctcctggatccagtccacatatttgcagactttcgtgtagacaccaggctttcgggtgatcgcacacggatcctggccccaggagataatgccattgaagagactggttacagaccagagggcccccggagtcaccctggcaggagtccttgccccctgtcctgcacgctggcacacaccatggtgtctgtgatgttgccggggtaggcgttctcacacttctggtgctcaatgatggtgatgttggcgcatcgcaaggtgtgaggcaggcgtaactgggggctggacgtgctgccccagccggaaatgaggcagctggtgccagcagtgacacagcgtgaggagagggtgaggggtcgcacagcccaggtgataggagactggcgatgccatcttcaccagcatgatgtcattgcggtggtctttgttggggaggctgttgttgaagccggggtgggggaaggactcagtggctgtccagggtctgctcacagccctcctccttctggaggttgtgctgccccaggtgaactatgtagcggggcttgaggccagtgggctgctgtccaggagccatctgggggcgatgagcgtcgcccccacagagtagcccgcgtcttctcgaacagggctgcctgccagggactgggagtgaggcttgcactcgaaccccttgatgatcctgttctctccccctacaagccctgttgccagagcaagcaggattaactgcagaatcctcatggcctggaggggggaggagcgggccccaggttcctaggctctggggctggggctctgggggcccagtggcggcggagacggcagtggcggcagctacagcaggtaggctgggttggagcgccaggtgccaggcaccaggcaggcgggctggcaggggggcggccctgggcgggcccaggatgactggcctccaagccctgccttaatgccccggggcggggtgtgtgtgagggccctccccggaggcctctgaggcactggctgcctgcctgtgccacctctccaagcccctcttctccctgtgtctcagcctccctctgtctgtctgtctgtctgcagccttcctttccctgccctgagtctctgaatctgtgtctcgttctatgtgtcattccctgtcattcagtaattctgactttgtgtgatttttctctttctgtccctatgtgtctgtctgcctttctctgtcctcgtccctgtctccatctccactcttctctctctgtctggctctgtgtggccctttctctaattccttctatctttgtgtctctcagtcagtctctctgactgcatctctggcaatttgtcttgaaatccctcttcttccatctaatctccgtctctctttttcctcccgtcccagccactccctctccacagccccagcccaggtgggcccctggcctcccctaggccgctccatcccgggaattccggacc

SEQ ID NO: 367387 - DNA, 1080 bp, Homo Sapiens
  misc_feature (809)..(809): n is a, c, g, or t
gggtccggaattcccgggattggtcaggggagagaggggaggaaagccaagggaagggacctaactgaaaacaaacaagctgggagaagcaggaatctgcgctcgggttccgcagatgcagaggttgaggtggctgcgggactggaagtcatcgggcagaggtctcacagcagccaaggaacctggggcccgctcctcccccctccaggccatgaggattctgcagttaatcctgcttgctctggcaacagggcttgtagggggagagaccaggatcatcaaggggttcgagtgcaagcctcactcccagccctggcaggcagccctgttcgagaagacgcggctactctgtggggcgacgctcatcgcccccagatggctcctgacagcagcccactgcctcaagccccgctacatagttcacctggggcagcacaacctccagaaggaggagggctgtgagcagacccggacagccactgagtccttcccccaccccggcttcaacaacagcctccccaacaaagaccaccgcaatgacatcatgctggtgaagatggcatcgccagtctccatcacctgggctgtgcgacccctcaccctctcctcacgctgtgtcactgctggcaccagctgcctcatttccggctggggcagcacgtccagcccccagttacgcctgcctcacaccttgcgatgcgccaacatcaccatcattgagcaccagaagtgtgagaacgcctacccccggcacatcacagacaccatggtgtgtgccagcgtgcaggaagggggcaaggactcctgcncagggtgactccggggggccctctggtctggaaccagtctcttcaaggcattatctcctggggcccaggatccgtggtgcgatcacccgaaaagcctggtggtctaccccaaaagtctgccaataatgtgggactgggatccccggaaaccatggagaaacaatttagaatgggaaccaccccaccaaaggccaattaacccctcaatttcccaccttgggggggttggggtccctgggtcacctcccgggtaattaaggaaacccctccc

SEQ ID NO: 367388 - DNA, 1120 bp, Homo Sapiens
cgcggcgactctgcaccacgcaggggaagagaaagcaggagccgtccagcacggaggaaggcgaccatggccaaggagtggggctacgccagtcacaacggtcctgaccactggcatgaacttttcccaaatgccaagggggaaaaccagtcgcccgttgagctgcatactaaagacatcaggcatgacccttctctgcagccatggtctgtgtcttatgatggtggctctgccaagaccatcctgaataatgggaagacctgccgagttgtatttgatgatacttatgataggtcaatgctgagagggggtcctctccctggaccctaccgacttcgccagtttcatcttcactggggctcttcggatgatcatggctctgagcacaccgtggatggagtcaagtatgcagcggagcttcatttggttcactggaacccgaagtataacacttttaaagaagccctgaagcagcgcgatgggatcgctgtgattggcatttttctgaagataggacatgagaatggcgagttccagattttccttgatgcattggacaagattaagacaaagggcaaggaggcgcccttcacaaagtttgacccatcctgcctgttcccggcatgccgggactactggacctaccagggctcattcaccacgccgccctgcgaggaatgcattgtgtggctgctgctgaaggagcccatgaccgtgagctctgaccagatggccaagctgcggagcctcctctccagtgctgagaacgagcccccagtgcctcttgtgagcaactggcgacctccacagcctatcaataacagggtggtgaggaccttccttcaaattgaggctgctggatcttgccctcttcaggaaagcaaacctaccatgggagagcttggttccttgcctccttctggtgctccttactccaagtctatttcatttttccacactgagcaatgaatgtgagagatgtggtcaccaagatctaagttacttgttgaaagaaagttactttcgacaagatctaatatgaaagcatagatttcacatttgatctctgtaataatcatctttcctataaaagtagcatttccggtaaagtttcaaagaa

SEQ ID NO: 367389 - DNA, 1002 bp, Homo Sapiens
  misc_feature (860)..(860): n is a, c, g, or t
  misc_feature (864)..(864): n is a, c, g, or t
  misc_feature (903)..(903): n is a, c, g, or t
  misc_feature (916)..(916): n is a, c, g, or t
  misc_feature (920)..(921): n is a, c, g, or t
tagctgcagcaggaattctggcgaagtggctggagctggggccccagcgggccccgggggccgcgggagccagcaggttgcgggggctgcgctccgcccgggccagagcgcaccaggcaggtgcccgcgcctccgcaccgcgggcgacacctccgctgggcactcacccaggcctgtgcctgctcacaacctgagcgcagggccccggagggagaccaggaaagccgaaggcggagcagctggaggcgaccagcgccgggcgaggtcaagtggatccggagccgcagagagggctggagagagtctgctctccgatgactttgcccactctcttcgcagtggggacaccggaccgagtgcacactggaggtcccagagcacgacgagcgcggaggaccgggaggctcccggccttgcgtgggcatcacgtgccctccccccatgtccgtggaacacgcagacatctgggtcaagagctacagcttgtactccagggagcggtacatttgtaactctggtttcaagcgtaaagccggcacgtccagcctgacagagtgcgtgttgaacaaggccacgaatgtcgcccactggacaacccccagtcttcaaatgcattaggagaccctgccctgggttcaccaaaggccagcgccaccctccacagttaacggacggcaggggttgaccccacagccagagagcctctccccttctggaaaagagcccgcagcttcatctcccagctcaaacaacacagcggccacaacagcagctattgtcccgggctcccagctgatgcccttcaaatcaccttccacaggaaccacagaggataagcagtcatgagtccctcccacggnaccnccctctcagacaacagcccagaactggggacctcacagnatccggcctccancaanncgcaggtgtgtattccccaggcccacggcggacacactgtgggctatctccaacttccactgtccctgctgggtgggctta

SEQ ID NO: 367390 - DNA, 852 bp, Homo Sapiens
agcggagttccagcagtccgcgagctgccgtcggctccgcggggggggcgggccgggcaccccggggcgcggaggagcgctcctcgcttctctccttcccccctgccgcactccgccggaccctcccgccggcccgcgccgctgcactcgccctctcctctcgccccccggcaaacctttcggcacccatccccggccgcgttcggcccgttattcgtgcgtggctcaagctgcggaccacagtccggcccaaagggagttatcacagaacctgccggggcatgcacggatcaaggacattgcgggaatctggaagacatgtcggacacgaatcacgttctggctccggccttttcgattacgacactgattcgaaaggttgcctgctgtgccaaggaccagtaggaacatctcgctgggccctcttgaagagtgtgggccatgggaaccaaataatggtctgcggagcgaagcaaaggcggggcgggggagaacatgcccctggtttgctccgggccgacacgatcaagagatacgaggccgatttcgccgcccccgggaactgtcgatgccgtgaccgggcgcgactcactagaccgacgcggaaaaccttgcacatggtacctacgccccgcgaacacacgaacggacgcggggacgccagtggaaggcaggcgttacgcgcagcaacggagtccgtcgcgtctagcagcggtaaccgggaaagcacagcgtgcggagtccatgacactgttggcgacctgcaaacgatcgggacgcgtcacttactagccaaccggtgaagggagcgcgatcgcaagtgggcgagggaagccaaagtacagagacata

SEQ ID NO: 367391 - DNA, 1020 bp, Homo Sapiens
gggtatattctgtaggttttcaggaatgcctttggaatctggattcagaaaatagataccaatggtttgtgcgattagggtagtaaagtagggcacatgctgtgtagcctctggctatgtcctgagaccccaggaagtgcaggaacagcctttcagctcacccatggctgctgtgactcctaccagggctttcttggctttggcgaaggtcagtgtacagacattccatggtaccagagtgctcagaaactgcaagataggatatgcctcaccgctcagctactccttgttttaaagttcagctctttgagtaacttcgtcaatttcgtgttcaggacacttgggttgaattcagtaagtttcctctgaagcaccctgaagggtgccatccttacagagctaagtggagacgtttccagatcagcccaagtttactatagagactggcccaggcactgaatgtctaggacatgctgtggatgaagataaagatggtggaataggttttatcacatctcttatttctcttttccccttactctctaccatttcctttatgtggggaaacattttaaggtaataaataggttacttaccatcatatgttcatatagatgaaactaatttttggcttaagtcagaacaactggccaaaattgaagtcatatttgaggggggaaatggcatacgcaatattatattatattggatatttatgttcacacaggaatttggtttactgctttgtaaataaaaggaaaaactccgggtatatgtatagatgttcttcacttatagacatcttctttgctttcctttggccttgggggaggaaggggagaagtgctcttttccacttgtgggagtctcccattggaaacataaatcctatagtcccaggaaggattcagtcccccagtggctttcccatccaaagaagaaagagtttgagtttcttaaactctgctgttctggccacttactcccactagaacaacccagggacaaggtgccaacatg

SEQ ID NO: 367392 - DNA, 859 bp, Homo Sapiens
gtcaagccgcacacgtcttgctctcattatctgcaatgaagaatttgacagtattcctagaagaactggagctgaggttgacatcacaggcatgacaatgctgctacaaaatctggggtacagcgtagatgtgaaaaaaaatctcactgcttcggacatgactacagagctggaggcatttgcacaccgcccagagcacaagacctctgacagcacgttcctggtgttcatgtctcatggtattcgggaaggcatttgtgggaagaaacactctgagcaagtcccagatatactacaactcaatgcaatctttaacatgttgaataccaagaactgcccaagtttgaaggacaaaccgaaggtgatcatcatccaggcctgccgtggtgacagccctggtgtggtgtggtttaaagattcagtaggagtttctggaaacctatctttaccaactacagaagagtttgaggatgatgctattaagaaagcccacatagagaaggattttatcgctttctgctcttccacaccagataatgtttcttggagacatcccacaatgggctctgtttttattggaagactcattgaacatatgcaagaatatgcctgttcctgtgatgtggaggaaattttccgcaaggttcgattttcatttgagcagccagatggtagagcgcagatgcccaccactgaaagagtgactttgacaagatgtttctacctcttcccaggacattaaaataggaaactgtatgaatgtctgtggcgcaggaagctgaaagaagatccttcggtaaaggggttccggacttatgtctggtgactactaaacttttgtgaaatattaatctggtag

SEQ ID NO: 367393 - DNA, 1030 bp, Homo Sapiens
  misc_feature (526)..(527): n is a, c, g, or t
  misc_feature (530)..(564): n is a, c, g, or t
  misc_feature (594)..(754): n is a, c, g, or t
  misc_feature (802)..(850): n is a, c, g, or t
  misc_feature (892)..(940): n is a, c, g, or t
ggacacaagaagggtaggagagaaaagccatggccgacaaggtcctgaaggagaagaaaaagctgtttatccattccatgggtgaaggtacaataaatggcttactggatgaattattacagacaagggtgctgaaccaggaagagatggagaaagtaaaacgtgaaaatgctacagttatggataagacccgagctttgattgactccgttattccgaaaggggcacaggcatgccaaatttgcatcacatacatttgtgaagaagacagttacctggcagagacgctgggactctcagcaggtccgatacctggaaattagcttagtacacaagactcccaattactattttcttccttcccagctcttcaggcagtgcaggacaacccagctatgcccacatgctcaagcccagaaggcagaatcaagctttgctttctagaagacgctcaaaggatatggaaacaaaagttgcagaggtgccatgttcagaatacaataataaagtggagtgaaagatatannacnnnnnnnnnnnnnnnnnnnnnnnnnnnnnnnnnnncacaaaccaccaaacacaacaaaccacaannnnnnnnnnnnnnnnnnnnnnnnnnnnnnnnnnnnnnnnnnnnnnnnnnnnnnnnnnnnnnnnnnnnnnnnnnnnnnnnnnnnnnnnnnnnnnnnnnnnnnnnnnnnnnnnnnnnnnnnnnnnnnnnnnnnnnnnnnnnnnnnnnnnnnnnnnnnnnnnnccccccacctctcaaacaaatactccttacattccttcctaccttcannnnnnnnnnnnnnnnnnnnnnnnnnnnnnnnnnnnnnnnnnnnnnnnnatttaaaacaccccccttaccaacacaacatttcacatttcnnnnnnnnnnnnnnnnnnnnnnnnnnnnnnnnnnnnnnnnnnnnnnnnnttctcacctatacaaaccctagccgcggccgtgcttccaccctacacctttcccctaagtctcccccgctgataccccttccccccaccg

SEQ ID NO: 367394 - DNA, 1051 bp, Homo Sapiens
gtctgtagggatcccagctggggaaggtgcaggggcctgggagactgcctctccgaagcggtgaaaccctcacccttccgtccctcccagccaccctccctaaaacttcccctgacagagggtggcagccccaggctctttgcataatcctgtggcttcgctgtcttcacccagcaccagcggacagggaagggcagagaaggccaccatggcgacactcctctcccatccgcagcagcgccctcccttcttgcgccaggccatcaagataaggcgccgcagagtcagagatctacaggatcccccgccccaaatggccccggagatccagcctccatcccaccacttctcccccgagcagcgggccctgctctacgaggacgcactctacactgtcttgcaccgcctgggtcatcctgagcccaaccatgtgacggaggcctctgagctgctgcgatacctgcaggaggccttccacgtggagcccgaggagcaccagcagacactgcagcgggtcagggagcttgagaagccaatattttgtctgaaggcaacagtgaaacaggccaagggcattctgggcaaaagatgtcagtgggttcagccgacccctactgcctgctgggcattgagcagggggtaggtgtgccagggggcagccccgggtcccggcatcggcagaaggctgtggtgaggcacaccagtccccgaggaggagacccaccgtcacgcacggtcatcacccagacactcaaccccgtctgggacgagaccttcatcctgcgacgttgaggacatcacctaattgctaagcctttcactcttggacatgtgggaccctgtcaccatctgttggacctcttgtcccgactcgcaacgcccttggggctgcctccacgtccctccctgcattgcgcctttctgccccggactctttcccctccctcgccctctctctctccgtctatctggcctcgtgtcctatctttcctgtcggacccctctggcccctcgatctcttcctcgacccttccgcttgcccccctcttgc

SEQ ID NO: 367395 - DNA, 1089 bp, Homo Sapiens
tgatcatcatagatgcgggcagtgaagatgcacaggctcacgtgtttgttttgtgaaatgaatttagccatttcctggcacagctgaagcaggggctccaggaggtgaagcaggtaaccctgtagtcctggtccaggtccagcttccaaaagggaatcacgtccaggaagcacagctcttgcatggcggccttcaaggaaaccgttgttttaatgtggagcctgggttgcatagaaagcccctgcgctggttctagcaggactccaggtgtcattgtgcatgcgctccacctcatgacacaggtaagtctcatgccgtcctctgacccaaggttcattgttaaagttgaaagtgaatgtgggtggatccatcgagtgtctgagaatctcccccagcatgatgtgcagtaatatataatatttaggcagattattccaaggctcaaatagctctctttggctgtacacgaacttgctccaacagtgctgaaattcgtcataattcatgatcttcatggtggcacgcggaccgtctcttttctgacacaggctgcgaagcgcctcctggtaatctgggtcccagaagtagtagaggcgggcaacaaagatggtcagggtaaccttcgggtcctcggccaggaacgtggccatatcccttgtacactttgtgcaggggctccaggatatgtaccaggtgacctcatactcctggtcacgatgcagcttcctccacttgctgaaccagtggaagaatctcatctctgggtggtacttaagttcggaatacacctggcctcgaaagatctttgcgtccaaagggggccttgagggaccctttgttttcacttcgtagcacagccagacggtattccgacgagaaaggatgggtctattataaaagttgtaggagaatgtgtctcgatacattcgctccactgtgtttctgaagtgaggcttcatccttggccggctagtcccgactaagatctttgtctggagcaccagggtttcactttctgctccaagcttctggttttaggacagccctccctaaagtgacctcccagggcctcgtagtcatggcccctcc

SEQ ID NO: 367396 - DNA, 947 bp, Homo Sapiens
gcagtactaatgtatgccaggtgagtccacgaaccacgtgcccagtttgcccgcagcccgcttgccggaaggcaatgtccgtggcaactgtctgggcttcaagctcgttgttggtctcagccatagtagaaacagtggcactcccctgcagctctgtggctgccttgcatctcagctctccgctcggtccttgttgaaccggacggaagtcatcccactgtctggagtgtgctggacacatcaggtaacacgtgtggggtcaaccttcagcgagatgtttggggatctgaggttgagagagagacagcctctgtcgatctctagtgtctccattttgccccgatggtcggagttgagctgctgttggacttcctgcaagaggcagagctgctcgaaggcctggctgaccttctgttgcaaggccttcttggtggcctcgatgacctccacctctttatgcagctcatcctccacagggtccttcaccacatcaatgtctcgccggctttcccgcagggtcaggcactcaatggccacatccagaggcaggttcttggcctgcaggttttgctctgctgactccttcatctgtgtcagggcatcgatctcggcatctaaatctgtcagacacttgtccagcatctccttccaccggttgacagtatcaatcctctccaccagtcgagtcctgttgtcatgttcatcccaaatggtctggttgttggtctcgttgcggagcacccgggcctcctggcggatctgatgggaagcatctcgctgcagctgggcattggtggatagcaggtagctgttagtgtgccagtcgggcagctggaagcgccgacttggcttgacgctcagcgtggccatggcacagaaaccagaagggtcagaaacccctaggcctgttcacagacaccacctcctttcccgcttcgctctccgcg

SEQ ID NO: 367397 - DNA, 2486 bp, Homo Sapiens
  misc_feature (2014)..(2014): n is a, c, g, or t
ggcctgggtggcgaattcggcacgagggccccactccctgccgagacgcctgccagaaaggtcacctatcctgaaccccagcaagcctgaaacagctcagccaagcaccctgcgatggaagctgcagatgcctccaggagcaacgggtcgagcccagaagccaggatgcccggagcccgtcgggccccagtggcagcctggagaatggcaccaaggctgacggcaaggatgccaagaccaccaacgggcacggcggggaggcagctgagggcaagagcctgggcagcgccctgaagccaggggaaggtaggagcgccctgttcgcgggcaatgagtggcggcgacccatcatccagtttgtcgagtccggggacgacaagaactccaactacttcagcatggactctatggaaggcaagaggtcgccgtacgcagggctccagctgggggctgccaagaagccacccgttacctttgccgaaaagggcgagctgcgcaagtccattttctcggagtcccggaagcccacggtgtccatcatggagcccggggagacccggcggaacagctacccccgggccgacacgggccttttttcacggtccaagtccggctccgaggaggtgctgtgcgactcctgcatcggcaacaagcagaaggcggtcaagtcctgcctggtgtgccaggcctccttctgcgagctgcatctcaagccccacctggagggcgccgccttccgagaacaccagctgctcgagcccatccgggactttgaggcccgcaagtgtcccgtgcatggcaagacgatggagctcttctgccagaccgaccagacctgcatctgctacctttgcatgttccaggagcacaagaatcatagcaccgtgacagtggaggaggccaaggccgagaaggagacggagctgtcactgcaaaaggagcagctgcagctcaagatcattgagattgaggatgaagctgagaagtggcagaaggagaaggaccgcatcaagagcttcaccaccaatgagaaggccatcctggagcagaacttccgggacctggtgcgggacctggagaagcaaaaggaggaagtgagggctgcgctggagcagcgggagcaggatgctgtggaccaagtgaaggtgatcatggatgctctggatgagagagccaaggtgctgcatgaggacaagcagacccgggagcagctgcatagcatcagcgactctgtgttgtttctgcaggaatttggtgcattgatgagcaattactctctccccccacccctgcccacctatcatgtcctgctggagggggagggcctgggacagtcactaggcaacttcaaggacgacctgctcaatgtatgcatgcgccacgttgagaagatgtgcaaggcggacctgagccgtaacttcattgagaggaaccacatggagaacggtggtgaccatcgctatgtgaacaactacacgaacagcttcgggggtgagtggagtgcaccggacaccatgaagagatactccatgtacctgacacccaaaggtgggggccggacatcataccagccctcgtctcctggccgcttcaccaaggagaccacccagaagaatttcaacaatctctatggcaccaaaggtaactacacctcccgggtctgggagtactcctccagcattcagaactctgacaatgacctgcccgtcgtccaaggcagctcctccttctccctgaaaggctatccctccctcatgcggagccaaagccccaaggaccagccccagacttggaaatctggcaagcagactatgctgtctcactaccggccattctacgtcaacaaagggcaacgggattgggtccaacaaagccccattgagctcctggcgggaatgcaacgaggcggccacttccctggctctttcctccagaaccctggctgctttatgcccttcctaagcctactggtgccttggccccggacgcggaagggcaaccccgcagtcagacncacgcgccacccacgtcagaaccaatctgtacacgaccccctctggctacgcagcagtaagcagattcctttccaacctttcgccattgctagaccacactacacaaaaataaacacacaacagattatattcaacctccgctgaaataccactagaggagaccgacgctcacattcacaatcaccacctcagatgtactgtccgccctctcccacggtgtactaggtatactactcgcacgatttcgtgagtcgaagtcctatatgccaagttcttaacgtatgtcgctctgtagattttatgccctgctacaatatagacaacagaacatatgcctaaagcgaagcatctccttaccaatatgacgactgctaacccgcgagtctgcactcccccagacatcataatcagtctctcgatccacactctacttaatttatgtctctcatccccatagtgtaaagtagtctg

SEQ ID NO: 367398 - DNA, 705 bp, Homo Sapiens
agcgggggggtgcagttctgagtcccgcccggcgtgcgcggagcggggcagccagcagcggaggcgctggcgcgcagcacacccggggaccatgggctccatgttccggagcgaggaggtggccctggtccagctctttctgcccacagcggctgcctacacctgtcgtgagtcggctgggcgagctgggcctcgtggagttcagagacctcaacgcctcggtgagcgccttccagagacgctttgtggttgatgttcggcgctgtgaggagctggagaagaccttcaccttcctgcaggaggaggtgcggcgggctgggctggtcctgcccccgccaaaggggaggctgccggcacccccaccccgggacctgctgcgcatccaggaggagacggagcgcctggcccaggagctgcgggatgtgcggggcaaccagcaggcccgtgcgggcccagctgcaccagcatgcagcatccacgccgccgtgctacgccagggccatgaacctcagctggcagccgcccacacagatggggcctcacagaggacgcccctgctccaggcccccggggggccgcaaccaggacctgagggtcaacctttgtggcaggtgccgtggagccccacaaggcccctgccctacagcgcctgctctggcagggcctgccgcggccttcctccattgccagcttcacgcacctgga

SEQ ID NO: 367399 - DNA, 898 bp, Homo Sapiens
agcggaggggttggaatcggtgggtggattgccagtacatttgcaccgtgtcctagagagcctctatgcatttcaactctgattctccttcaccatctacgcgcagcccacaaccgcaggaccccacccctggctctgaatctcccatgtcctggcgccaagcaggtgagtcagcctaggaggaggaagggcttccggaagccaagcccatgctggggtggtgagaaacaactgtcctatgcaaggaggtgcctgagcaccccctgatgatcaagctggagccccctcacctccccgaagtgtgctggaggaaaggccagaaagaggcagcagtcttcacccactgaggctgagtttctcactcatgccaagttttacataagctggggaccatgtgcttcaaggctagaggtcttggtgggcccagggccttggaggggcctggatgaccaaggggtccgtggcttaggccctggctctgcatggggaatcttgggaaggttggaagcccacagcccctactgagaaaggagccacgggccagatcttttgcacaaatcctgcctgtgctccttgactgtctctccccaccggggtcacggtgaccaagcaggcaggagactccatccgttcacaggactagcatcctgggagggccctggcctgagcgagctgctgcaggggaccctcatgctgcgatggttggccactcagcagccttttctctgtggagcagggatgacatttgagagccacaaagatgggcaggaaaaacaaaggccacacagaggaagctgaaggcagaaagagatgcggagaacgtgggagaaactcggctgtgcttgtggggggccctgcacggacatcagctcctgaaggggtgaagaaagggtccctg

SEQ ID NO: 367400 - DNA, 824 bp, Homo Sapiens
tgatgggacctcagaagatgggttgcccagctgcgacaaagcgccactccaggggcgaagctgtctcccaccgacgtgctgtaggtcacaggtcaagctcggctggtcttccccaggggcgtgctcagcggctctgtgggtaccttcacctccacggccagccctggggccggggaccagagggaggtgggaacccaaattccagtgatctggagggtcagggcccacccccgggcatctatattggaagctgggggctccctccccagagcacaaccctctccgccgtcaagccaacccctcccttcccaaaacctgaggtttccgggaggggccgggtctttgtgggtaaaagagccggaaccgggccaggtaagagggtgtgtgtgtttagcagagaaaggaaaacactagccctgcggtggggtggttcaggcctgtgccgcggagaggcccaactcgctcagccggcttgggggtctctctcctacgccctccgggccttggacaccccctctccggcctcacctcaggcgccttagggccctggcgcccacggcagcctcatctggcctggcggggacagagtgggtccgaggagccggggaagccaggcctatgccccccagccctcgccgtggtcccgcccggcccctcctcaccactcaggcacaggaagcctagcagggccccgcagagaaagggccccgggagctcggccatggccgcgtccggccgtcctgtcctgctcctgccaggtgggcggtcaaggtcggtctgggtgtcgggcagggaagggagcacccaagggcagccgcccgggc

SEQ ID NO: 367401 - DNA, 1437 bp, Homo Sapiens
tggtcggtccgtgcgcggtgggcgacccgtgtgtgagtcgtgctgttttcgagtatgtgcgcgaggggagcgtttcgctgtagttgtactgtgttgtgcgcgggcgtctctggggctgagcgtcttaggggtgtttcgtacgtgtgtgtgcggggacgttgtgctttgggtggtgttgcggaggtgcaccaagtcctggagcgggcccttatgggtgccagggtatggtggtgtggctgtgacctggtgggcccattggatgtgccatgggccagcgtggatggtcgttgccaggggtggttcctgttgggatggtccattcgtggggacatggcagtacttggtttacggtactttgggtgaggcggccggaaggtgcagtttggcacgttgggcgagggtgcttcgagtttgggatgaggcgagttgtatgtccgagggttggtctgtcacagggcgctgcgtggagctcatccggcagagtcatcgtatgccttcgccgtgcacggcgctggtgtttcaggccgatggtacagagggtctctgagcagctcctcattgttggttgccggacgtccagcagcacagggaggcactgtctgcgggttcacccctccgcatgccgtgtacagggccagctttgccccacagggatgcccatgccgtagcagcccaggtctcccaggcccaggatgcgctccccatcagtcaccaccacggccttaatattgtcttctggccaagaattcagcattgttgcaagatgacctttgtcatgaatggtgatgaacagtccacggggcctgcggaaagtcaggccatagtgctgacaggccagccccacggtaggcgtgtacacgattggcatgaacttctccacgtccgaagtcagcactcggtagaagagcttctcgttccggtcttggagtgtcatgagaatgatgtacttgtccaggtcactctgctgccgctcgtaatatctcatgattcggaggagctggacgtcctggctcagaaagcagggcgggattaggccgtggattccaagctgcagcctttcttcaagggtaaaggccatccccttgttgagatgagggttcctggtgacatcgtatccgcgcttcttcaggggcacagggcgcgccgggccaggcttggagtggcagccttgggcgggcgcggtgggtgtccagcgcgggagggcgccgcaggcccggcccggccagggagccagccgcgtgcctgtccccagcgcggcacccatggtccttggcagacctgcgctgctcggggagctgaggtctacgcggtcccgctgcggagcaggcggggtgaggagctgcggtctgtgagtcctctcccgccaatgggtggaccgcgctggcggccgcgagctcgcggagctggtgagttcctcaaagagcggtcccacccgct

SEQ ID NO: 367402 - DNA, 1641 bp, Homo Sapiens
gaagctgggcggggggccgagacgggggccgggacgacggctgggtgcgccggggtcgccagctcctcgcccacctccctccctgtgggagaagaggaggaggggaagtgactgcggagttgatgaactttgcacatccagaaacgccattttgattccttttccggaacaagtttgcatctctcctcggtctctccctgaagcccaccggtccccaacgcatcatgccagggagccaagcgtcctgcccgtgcgttgctccgactgtgtgttccaggagtggtggctctgaggtgtgaccctgcccacgtttgggcccagccaggttcagacccccaataaggagggcagcttgataacacaatagaaaacagtgtcaacgagtactaccaagagaagaagacaagaggtcaacacagactcattttctactccgtgtgaatgatagctacagcaggggaaagtttcatagtctatcagtgggtcagaaaatggagttttatagcagaggcttcttagaagcttaaacccctgtcccaatgacgtcaagttcgcccgctggcttggaaggttcagacctatcttccatcaacaccatgatgtcggcggtcatgagtgtagggaaggtcacagagaatggcgggagcccccaggggatcaagtccccctcgaagcctccaggaccaaatcggattggcagaaggaaccaggaaacgaaagaggagaagtcttcctataactggcccctgtgtgagaagattgcactacccagcaccagctgaccatgcacattcgccagcacaacacagacactggaggagccgaccactcatgcagcatctgcgggaaagtcactgagctcggccagctccctcgatcgccacatgctggtgcactctggcgagaggccttacaagtgcactgtgtgtggccagtcatttaccaccaatgggaacatgcacagacatatgaagatccatgagaaggaccctaacagtgccacagccacagcccctccatctcctctgaaacgtaggcgattgtcctccaagaggaaactgagtcacgatgccgagtcagagagagaagacccagcaccagctaaaaagatggtagaagacaggcagtcaggtgacttggagaagaaagctgatgaagtctttcactgcccagtatgtttccaaggagtttgtttgcaagtatggactggagacccccatggaagacccattcagataaccccactaagatgtgacattttgttggggccacttttcgaacacattcgaggactggctgggtcacaacggggcttgttccacaaaccaacttccccagggattgcaatgggccagaaccttttcatacagaaaccaccccttgaaatttctggctggggttcccacgactttaggaatttccgggactttttcccgggaagaaaggttccctccccattttctcaaggcctgggtggccaaaaaatacctggcgggaggtgcttccacagcgacacacccgcgctttttcctgcccaaccctgtggactacggctggtcacaaaaataacacaaaaaatctcgcgcggctctctgtgccgagggcctgtagatcaaaaggatcatggaattggccacgggg

SEQ ID NO: 367403 - DNA, 1576 bp, Homo Sapiens
  misc_feature (290)..(318): n is a, c, g, or t
  misc_feature (1149)..(1149): n is a, c, g, or t
  misc_feature (1287)..(1287): n is a, c, g, or t
  misc_feature (1380)..(1396): n is a, c, g, or t
  misc_feature (1487)..(1487): n is a, c, g, or t
  misc_feature (1531)..(1531): n is a, c, g, or t
ccgccgtcctccccttacggccccccaacaaaagggtggtaccgggccggaattcttcgatgagggcctgtgaacccaggtatgacagcaggatcctgaagcccatgcaggctctgaaccacgcggccatccagaaggggtgagataaatgttggggaaaccatccccgacccctgcgagccccaggagcccaggctgccgcctcctgcctcctacacccctcccccccacagctggccctggaggctgctggagctggggttaccccgtggggaccctcatgctctttnnnnnnnnnnnnnnnnnnnnnnnnnnnnnacaagcgtgaaaccaactgaccggattgacagatgcaggtgcgcgggaggcggaggtgggggtggtgcccgcataccatgggttaatggtcctggcaggggctccacaggggaccccgggtcagatgcctctgtaacatggggaccggcaccgcggcagcttgttccaacgaatcgcgatcgcccctggtcgcaaccactcctttctggacaggttaagccgcacaagtccctggcaagagagcccggcggggctgcgttcgcgtacggcttcctttaaccgcccatagaacccggccccccgggcggcccactgtctttccctggcccgcagaatgcccagtcgccgccgcctacccctctgtagccgccaccgcgccaacgcagcggccgccgtttctcccactataactgccccgcccacggattgatgtcagggctacctctctccattgtcaggcacgcactaacgccacgggacccgcctaacccgtctaacaccagggagatgggtatctcacgacgcttgctccgcccccggcgcacgcgtacgttacaccgcgacctcactcccggcatcctcgtgatacacccggacccccgacccgacctgccatcgtgccgccccaaacacgccccgcaaccgaggctgaacaccctactcccagcgcgaacgttcatccggatgtgacgtgttggcccaccgtggacattgcgagacgcgtggtttgtgaggcgcaggaaccgtctcgggcggccgcggttaggctagagccatcactatctcttacgcacgactcgcctcaatgccggccgcacaatctctgtgtgntggccctacgcgtcacacccgttacgtgaagagtatgtagtatagagctctactcgcacgaacctcaggcgaagataaactgaacgacggaccaggatagaaggttggtctacggggtaagtggaatgcccaccccgnccccccgatgcgacggttgctccgtccgcgcatcacgtcccatatctctacactacgtccacgttcgacggctcccccacacagataccactnnnnnnnnnnnnnnnnntatacttccggtggaaacgctggtggggcgagcgccgacgcctagctttacacgatcacactgctatcgcccattctgcaacaaagtgctntcgccacccgccggttctcctcgaccccccggctagggaggccnccgcccctttcgaactcctgcgacgcgagccgcactccgtcgggt

SEQ ID NO: 367404 - DNA, 644 bp, Homo Sapiens
  misc_feature (180)..(221): n is a, c, g, or t
  misc_feature (486)..(486): n is a, c, g, or t
  misc_feature (611)..(611): n is a, c, g, or t
atatactgccggcgccctcggttctcctctgtcgctgttataatataacggccgtcttctctaattttggggcgcctcccttggtgtaccacaaaaaaacgcttggggtgagaggcggcgtaatcgtatgtgggcgcccccctccggggagtgatatttctttaatgggggccccccccnnnnnnnnnnnnnnnnnnnnnnnnnnnnnnnnnnnnnnnnnnatccagcataaacctatctgtgtttaataaaagaagggaagagaaaggccacacatacgctttcataagcacagaaaacttctggaaggctttgcgaaaaagagccgactggcagcttgcgggaggcctttacccttcaacggactccagactcctgtactcttttttaaccataagcatgggttgcttttatgtattttttaaaattaatgttgttttaaacaactttgatttaaagatggtggggaaaagacctttggtcgtntgtcccctcaaacactcacaaaactataaggcgaaaaacaggaactcaaaccttgggatactatgagggatccatgggcctccagccccagcaggtgagggctgggcaagcagtcgaggcagggnctcccagcctggggcgcaggattttcccccggg

SEQ ID NO: 367405 - DNA, 941 bp, Homo Sapiens
aaagaacaacatatctcaggttgtctaagtgtttttatgtaaaaccaacaaaaagaacaaatcagcttatattttttatcttgatgactcctgctccagaatcgctagactaagaattaggtggctacagatggtagaactaaacaataagcaagagacaataataatggcccttaattattaacaaagtgccagagtctaggctaagcactttatcctatatctcatttcattctcacaacttataggtgaatgagtaaactgagacttaagggaactgaatcacttaaatgtcacctggctaactgatggcagagccagagcttgaacttcatgttggtctgacatcaaggtctttggtcttctccctacaccaagttacctacaagaacaatgacaccacactctgcctgaaggctcacacctcataccagcatacgctcaccttacagggaaatgggtttatccaggatcatgagacattagggtagatgaaacggagagctttgcagataacaaaatagcctatccttaataaatcctccactctctggaaggagactgaggggcttcgtaaaacattagctcagttgctcatttctatgggattgcttagctgggctgtacaagactgaacggcatcaaataaactcaaacgtatttttaaattttattcgataactagagaaacttcggctaaccaacctgttctttcttgagtgtatagccccaatcttgaggtaacttgctgcttctgcacttcatatcccatatttcctattgttcactttattctgtagagcagctgccaagaattttattctgctgttcttatgctgctaaagaaaggaactaagtcaggatgttaacagaaagtcccataaccttgaatcttagccaggaataatccagtcagctaagacctgttacttcctcagtga

SEQ ID NO: 367406 - DNA, 894 bp, Homo Sapiens
gtcgcgagatgctgctggggaacccgaaaaaccacatctccaagatgaatgcctaaataagttaaactcagccattccagtgtgttcagtgatggtctagaaacccagatctccaccctgacgctgtggtggctgcggtggtttgcagaaggcgaggccaggggagacacactgcagccggctcgctgctgcacgctgtgaacaaaaggtcctggtaccaggctggtctcaggcacgtgaaaaaaataccagtaacaaacctcacatttagtttatgtaaaaatgcaggagaattctcagaaatcccctcggagggacggtgcacttgcgggatgaaagcgacgtctctttccaacggaaatggcaaagaggcaaaaaggaaagctgcaccagcggaggccaggtgcctcctgctagcaggtgctgggggtgctggcaggaggaggcgcggggcttcagtgggacacctcccaggccggcaagtgcacctcggtgccctgagccttctgtggggcctctgctagaactgctgggtgaggcgcctgtaatgacggtaacaccttggttctcgggaagatacagggccaagctccaaggccacgagccactgtgaactcaaaccctatcaggtcgccgccctgttgcaatccgaaacctttcttctaacttctgcagcgcgagaagcagagaagggtaccaccggagccttccctcttccacgatttgccacccggacatcccattcccagcagtggacctggctcgatgtcctgacccctgacttgcagttgcctgccgagccgggcaatccacatcgactcgacctgcttccacgccggtctagcgcggtcactgctgatcttggccgccacagcacgctgtcgcctgcgcaca

SEQ ID NO: 367407 - DNA, 799 bp, Homo Sapiens; identical to SEQ ID NO: 98835

SEQ ID NO: 367408 - DNA, 1366 bp, Homo Sapiens
caaaatcccaggcagcatggacctcagtcttctctgggtacttctgcccctagtcaccatggcctggggccagtatggcgattatggatacccataccagcagtatcatgactacagcgatgatgggtgggtgaatttgaaccggcaaggcttcagctaccagtgtccccaggggcaggtgatagtggccgtgaggagcatcttcagcaagaaggaaggttctgacagacaatggaactacgcctgcatgcccacgccacagagcctcggggaacccacggagtgctggtgggaggagatcaacagggctggcatggaatggtaccagacgtgctccaacaatgggctggtggcaggattccagagccgctacttcgagtcagtgctggatcgggagtggcagttttactgttgtcgctacagcaagaggtgcccatattcctgctggctaacaacagaatatccaggtcactatggtgaggaaatggacatgatttcctacaattatgattactatatccgaggagcaacaaccactttctctgcagtggaaagggatcgccagtggaagttcataatgtgccggatgactgaatacgactgtgaatttgcaaatgtttagatttgccacataccaaatctgggtgaaaggaaagggggccgggggacaggagggtgtccacatatgttaacatcagttggatctcctatagaagtttctgctgctctctttccttctccctgagctggtaactgcaatgccaacttcctgggcctttctgactagtatcacacttctaataaaatccacaattaaaccatgtttctcacttttcacatgtttcatagcaactgctttatatgactgatgatggcttccttgcacaccacatatacagtgcgcatgcttacagccgggcttctggagcaccagctgcagcctggctactgctttttactgcagaatgaactgcaagttcagcatagtggaggggagaggcagaactggaggagaggtgcagtgaaggttctctacagctaagcctgtttgaatgatacgtaggttccccacccaaaaacagggctttctgccctgaaggacatccttcccactcccctggctccacatgagcccatgcatgccttagcaaatccaagttgccagagctcttttgctccaaggaattgaagaaaacttgggagggtgaaaatggggaaaatgggaagggttttggaaggccaaaagctgaaaaacagggggttggaaggaatttccctggaatttaaaaagaacaacccttttacccatacccccattaaagggaaaaattgaaattgccagggggccccaaggggaaaccccctt

SEQ ID NO: 367409 - DNA, 1020 bp, Homo Sapiens
ctactgtggatcctgccctccctgtggcttctcctgcttggggggcctgcctgcctgaagacccaggaacaccccagctgcccaggacccaggaactggaagccagcaaagttgtcctcctgcccagttgtcccggagctccaggaagtcctggggagaagggagccccaggtcctcaagggccacctggaccaccaggcaagatgggccccaagggtgagccaggagatccagtgaacctgctccggtgccaggaaggccccagaaactgccgggagctgttgagccagggcgccaccttgagcggctggtaccatctgtgcctacctgagggcagggccctcccagtcttttgtgacatggacaccgaggggggcggctggctggtgtttcagaggcgccaggatggttctgtggatttcttccgctcttggtcctcctacagagcaggttttgggaaccaagagtctgaattctggctgggaaatgagaatttgcaccagcttactctccagggtaactgggagctgcgggtagagctggaagactttaatggtaaccgtactttcgcccactatgcgaccttccgcctcctcggtgaggtagaccactaccagctggcactgggcaagttctcagagggcactgcaggggattccctgagcctccacagttgggaggccctttaccacctatgacgctgaccacgattcaagcaacagcaactgtgcagtgattgtccaccggtgcctggtggtatgcatcctgttaccgatcaaatctcaatggtcgctatgcagtgtctgaaggctgccgcccacaaatatggcattgactgggcctcaggccgtggtgtgggccacccctaccgcagggttcggatgatgcttcgatagggcactctggcagccagtgcccttatctctcctgtacagcttccggatcgtcagccaccttgcctttgccaaccacctctgcttgcctgtccacatttaaaaataaaatcattttagccctttc

SEQ ID NO: 367410 - DNA, 675 bp, Homo Sapiens
tggtatgctgacatttaaacaggacaaaacttgtagaacttcatggaggaacacggagtgacccaagaccgaacatatggctaccatagaagcacatgcagtggcccagcaagtgcagcaggtccatgtggctacttacaccgagcatagtatgctgagtgctgatgaagactcgccttcttcgcccgaggacacctcttacgatgactcagatatactcaactccacagcagctgatgaggtgacagctcatctggcagctgcaggtcctgtgggaatggccgctgctgctgctgtggcaacaggaaagaaacggaaacggcctcatgtatttgagtctaatccatctatccggaagaggcaacaaacacgtttgcttcggaaacttcgagccacgttagatgaatatactactcgtgtgggacagcaagctattgtcctctgtatctcaccctccaaacctaaccctgtctttaaagtgtttggtgcagcacctttggagaatgtggtgcgtaagtacaagagcatgatcctggaagacctggagtctgctctggcagaacacgccccttgcgccacaggaggttaactcagaacttgccgctctcaccatcgacggcaattccagtctctgtggacaaaatgacccaggcccagcttcgggcatttaatccc

SEQ ID NO: 367411 - DNA, 781 bp, Homo Sapiens
  misc_feature (129)..(167): n is a, c, g, or t
gggacaggtcacaaagccctggggcttcccctgccagtcctggtgaggacagtgtggtcactatctcagagagacgaaaaatgaatattctgtcatttcagactaaagctactcacccagctcacactnnnnnnnnnnnnnnnnnnnnnnnnnnnnnnnnnnnnnnngggggggcccctaaaaatttccccggggggcccaatttgtttccccctttttttgaaaagggggcccctaatgagagactacgatatatataaagcaagaggcaaggggcgcgcgttttaacagagttgctgcgttggggaaacacagtgtgacctgtgggggatatctggtggtgaggagggaccccttaatttcgtggggggtgttgaaccattagttgcggaccaacattaacttaacagaaaattaaagagcttcagaggggaacattattaaaacatctttgcagggtgttctatatgctggtctcaccagaggactaattagtgactagcaggacatagaaaaagtttgggggataaccggggagtttttgattttatgaaacaatttttttcccgggggtagcttaggtgtatataaaatgggtcatgcatataacagatacaataccacaacaaattcagaataagagagaaaaatacgatcgagagaaatataataaaagtagaatagtatatgaagaacaataaagagaaactagtatatgataatagatgtgacgaataagataaaagaaacaacaaaagaaaacaatagggagaaaaatcaa

SEQ ID NO: 367412 - DNA, 1038 bp, Homo Sapiens
  misc_feature (457)..(457): n is a, c, g, or t
  misc_feature (720)..(720): n is a, c, g, or t
  misc_feature (781)..(781): n is a, c, g, or t
  misc_feature (892)..(892): n is a, c, g, or t
tcccttgcggccgccgcccattggcgccgaggtccccgacgtcaccgcgacccccgcgaggctgcttttcttcgcgcccacccgccgcgcggcgccgcttgaggagatggaagccccggccgctgacgccatcatgtcgcccgaagaggagctggacgggtacgagccggagcctctcgggaagcggccggctgtcctgccgctgctggagttggtcggggaatctggtaataacaccagtacggacgggtcactaccctcgacgccgccgccagcagaggaggaggaggacgagttgtaccggcagtcgctggagattatctctcggtaccttcgggagcaggccaccggcgccaaggacacaaagccaatgggcaggtctggggccaccagcaggaaggcgctggagaccttacgacgggttggggatggcgtgcagcgcaaccacgagacggcncttccaaggcatgctttcggaaactggacatcaaaaacgaagacgatgtgaaatcgttgtctcgagtgatgatccatgttttcagcgacggcgtaacaaactggggcaggattgtgactctcatttcttttggtgcctttgtggctaaacacttgaagaccataaaccaagaaagctgcatcgaaccattagcagaaagtatcacagacgttctcgtaaggacaaaacgggactggctagttaaacaaagaggctgggatggngtttgtggagttcttccatgtagaggacctagaaggtggcatcaggaatgtgctgctggcnttttgcaggtgttgctggagtaaggagctggtttggcatatctaataagatagccttactggtagtgcaatagttgacttttaaccaaccaccaccaccaccaaaaccagntttatgcagttggactccaagctgtaaacttcctagagttgcaccctagcaacctagccagaaaagccaagtggccaagaggaattatgggctaccaggattaatttcctgggggaagagtggctcccccattggattgaaaaagt

SEQ ID NO: 367413 - DNA, 1043 bp, Homo Sapiens; identical to SEQ ID NO: 98845
  misc_feature (991)..(991): n is a, c, g, or t
  misc_feature (1004)..(1004): n is a, c, g, or t
  misc_feature (1007)..(1007): n is a, c, g, or t

SEQ ID NO: 367414 - DNA, 772 bp, Homo Sapiens
ggcaagccacccgcgcctgcgggctcttgggcgccacggaaaggctgcgccaccttgtgggacctctggccgaggcgccacgcgacagttgagacgccagatgtgagttgaggtgccagacgtgagttgaggtgccagacgtggcggcgttgggtacccaggaccctcggacgggtctgctgcggcttgctgggggtccactccagaccctgttcgcctgggtatcaccagtggagtttgcagaacagcaaagattgctgcttgctccttcctccagaagcttcttcccacagtggcatcaacctgattgatgtcagccggaactctcctgcatgaggtgtctggcgacccctgatgggaagtctcacccagtcaagaagcacgggactggaaggggggcctccttacggaggcagactgactgtcccttagcagagctggtgcactgtattggaggaataaccctccttgggatcagctggtctcttcagagccagcaggcaggaaagattaagtctgctgaacctcggaccatggccgccgctcccccgaggtgctctgtcccagggagattagagttcttgtctgtaagcccctgactgtagctactggaattcctgcagggatgccctccaggtgaggagggatggcttcgggtcccacctaggaagcagtctggccacgatctgcaacagccactttgctgcgtagtggggaattccacccagtccaaacctcctagtctccttagcactgtcaggggaaaacctcc

SEQ ID NO: 367415 - DNA, 492 bp, Homo Sapiens
  misc_feature (400)..(400): n is a, c, g, or t
  misc_feature (455)..(455): n is a, c, g, or t
aagcttcttcccacagtggcatcaacctgattgatgtcagccggaactctcctgcatgaggtgtctggcgacccctgatgggaagtctcacccagtcaagaagcacgggactggaaggggggcctccttacggaggcaggactgactgtcccttagcagagctggtgcactgtattggaggaataaccctccttgggatcagctggtctcttcagagccagcaggcaggaaagattaagtctgctgaacctcggaccatggccgccgcttcccccgaggtgctctgttcccaggggagatttagagttcttgtctgttaagcccctgactgttagctaattggaatttcctgcagggattgccctccaggttgaggagggatgggctttcgggttcccancttagggaagcagtcttggccacgatcttgcaaacagccacttttgcttgcgttnttgggggaatttccacccagttccaaaacttcctagt

SEQ ID NO: 367416 - DNA, 883 bp, Homo Sapiens
cgggactacagctgcgcggtggggacggcccgcgccggaccggtccgcctgaccgtgcgcggtgggtacggggtgatgtggaggctgggcactgctttgggcgcgagacttgcggagctgtcttccccggaccctgatgaccgcgcgtgcttctagaaagggggcgtggagggggcgtgaccggtaactgccctctgccccgccccgctcacgccccgggctccgccccagagcgtactgtggcggtactctccgagctgcggtcggtgagcgcccgcgaaggcgacggcgctacgttcgagtgcaccgtgtcggaggtcgagaccacggggcgctgggagctcggaggccgcccgctgagacccggagcccgcgtccgcatccgacaggaagggaagaaacacattctggtgcttagcgagctgcgcgccgaggacgccggtgaagtccgcttccaggcggggcccgcccagtccctggctctactggaagtggaggcattgcctctccagatgtgccgccacccccctcgcgagaagaccgttctggtgggccgccgggcggtgctggaggtgactgtgtcccgctcggggggccacgtgtgctggctgcgggagggggccgagctgtgcccgggagataacgtatgagatgcgcagccacggccccacccacagcctggtcatccatgacgttcgacctgaggaccaaggcacttactgctgccaggccggccaggacagcacccacacacggctgctggtagagggcaactaggagaacctaaccaggccaggcgggtgcccttggacagcttggaaggcgtttgcccttaccctgggcaggggtagagagacaaggaacaataaaagtgctacagctc

SEQ ID NO: 367417 - DNA, 1211 bp, Homo Sapiens
  misc_feature (824)..(835): n is a, c, g, or t
cattcttgctgctcagatcaaagtagacagacattgaccacagtaatctccggaagtttgtcgtcactacttcggtggtatttcttagaccacaaatgagaattgataaagcctccaggatcttgtgtcgcccacttcaacagaacttcgcttccattgataaacaatttcttcacgtggatagccataactggagaactccaagggggcaggagtgttcatccattggaaagttgtgcaattgtaattggcactcagcatcaattgtcaaccttagggtgtagagcactcgaccatcattccaaattctcagcatcctgttgggggtggtgatccagtgtgcatcagcttttttggaatttctgaagaaagtgtctggaatccagattttccccaccatgttgctgttcaatcggaggactttaatggtgctgttaaatttcaaacgtctgtcataccacgtttgcgcaaaaaatatatcaatagtgtattccatattgatagcgttcactggaccaatgctattcacatacatgtctgtgtgaattaacgttggcttcactcctatatcaggccgaagtttattgtcatatccttccagcaggttgtttaagatgacagtgacatcaccctcaggaacttttggagtcaagacccatgttttgttagaagcataatcttcatagtcatcatcagatttctggctagtgaagccagggtagagcgacagcaggagcagaatccacaccgtcattttctgtgaaaatacaggagtcgagtagactgagcttcctgtgctccatatatttggcgaactcatcgcnnnnnnnnnnnnccttctctcgcctcttgcctcttggttgcagaagaatccctcccctttgtattattcttatgcttatgatctgatggtggctccccccacctgcctctagtaggtccttcactggggagatggattgctaccagattagggaattaatattcagggggcagagataagatcagcaaaaacgcttgcagataccatcaaagcgtcactctggcagcggcttccaagtctgggggagtaatatcatcgaggcagggggagggtacaaggagagactcatacggagacaaataagggagagggaaagacacgcacactcgtgtatactcatgcccctcacacttacgcgttctcccctgggtccatctctttggggtta

SEQ ID NO: 367418 - DNA, 1030 bp, Homo Sapiens
ggcctgggtggcgaattcggcacgagggtggaaaccgcggccatggcggcaccgcggcaaatccccagccacatagtgcgcctcaagcccagctgctctacagactcgtcgttcacccggacgccggtgcccaccgtgtctctcgcgtcccgcgagctgcctgtctcgtcgtggcaggtcaccgagccgtcaagcaagaatctgtgggagcagatctgcaaggagtatgaagctgagcagcctccctttccagaaggatataaagtcaaacaggagcctgtgattacggttgcgccagtagaggaaatgctttttcatggcttcagtgcagagcactattttccggtttcccatttcaccatgatctcacgtacaccctgtcctcaagataaatcggaaacaatcaacccaaaaacatgttctcccaaagaatatttggaaactttcatctttcctgttctgcttcccggaatggctagcctgcttcaccaagcgaagaaagaaaaatgttttgagaggaaaagaaccaaattcattgcctgtgattttctgactgagtggttatacaaccaaaatccaaagagggcaggggagccattcacagaatttttctccattccatttgtggaggagcggctaaagcaacacccacggccgccaatcccactctcgctcctgctgacagaagaggaagcagccctctacattcaatccttctggagagcctgtgtggttcgctgtgatcctgagattcaagaactgcgtcagtggcagaagaaacttcgcgaggccaagcacattcaccagcaagtcaaaattttctgggccaagcaagaacaaaaagtgaaatgcaaaatggaggacgatgcagtacctgcagccaagatgaaaattcccatcatcttaaccatagctaagacgtatctttgcccattcgagcacaagttaccttgtgcaaggaaaatgtccaaatgatgctctctctcttgtgatttctttaacaagacttggaacatgtgcaaaatggaat

SEQ ID NO: 367419 - DNA, 711 bp, Homo Sapiens
gccgccatgtcggaggcgcgtggagagccagggtccgggcctgaggctggcgcccgattcttctgcactgcgggtcgcggcctggagccgttcgtaatgcgagaggtagcgggcgcggctggcggccacgcaggttgaatatatttcaggaaaggtaattttcaccacctgttctgatttgaatatgttgaagaaattaaaatctgcagaaagattatttttgctgattaaaaagcagtttccacttattatttcttctgaaaaatatttaatgaaatgcaaagacttataaatgaagatccaggaagttggttgaatgccatttcaatttggaaaaatcttcttgaacttgatgcaaaagagaggaaaaactttctcagagagatgataaccaactaaaaagaaaagtgggagaaaatgaaatcattgcaaagaaattaaaaatagaacaaatgcaaaagatagaagagaatagggactgccagctggaaaaacaaataagagaagaaactctggagcaaagagatttgaccacgtaaaagcgaaaagtttcaagaagaagaatttcagaatgacatagagaaagcaattgatactcataatcagaatgacttgactttcagagtatcttgtcgctgcagtggaactattggaaaggccttcactgcacaggaggtacgacaagtaattccaattgctatcatgaaacac

SEQ ID NO: 367420 - DNA, 930 bp, Homo Sapiens; identical to SEQ ID NO: 98356

SEQ ID NO: 367421 - DNA, 716 bp, Homo Sapiens
  misc_feature (22)..(22): n is a, c, g, or t
  misc_feature (85)..(85): n is a, c, g, or t
  misc_feature (100)..(100): n is a, c, g, or t
  misc_feature (562)..(562): n is a, c, g, or t
  misc_feature (633)..(633): n is a, c, g, or t
aaaccgccccggtggaaataanggctttgtttccgcccctcgttttccctggtgaatgggaatcttctggtggtgaacaacatangccatcccccgtgangctcgaatcaaatccggacacagtgacagcgcgggagatggaacgactggagatgtactacgcccgcctaggctcccacctggacaggtgcatcatcgcaggcctcgggctgctcacggtgggcggcatgctcttgtcggtgctgctcatggtctccctgtgcaagggcgagctgtacccccggaggaccttcgtccccggcaagggctccaggaagacctacggctccattaacctgcgcatgagacagctcaatggggatgggggccaggccctggtggagaatgaagttgtccaggtctcagagactagccacaccctccagaggtcttaagaactagcccaccttatctggctgctttagctccagtgctacaaggtccaccccctgctcccgcccacctgacccctgcaaaggccctggggttttaaactgagctcaacatagggccttgtggaaanaagtactgggtgcctggagggagagctccgggcccagcccatgccccacacgggcaagcagcccactgatnctgttttgtagctgaggttttgcatacggatttgtttggaggatggcttctgctgctaaaaatacaaaagtttggaaaccgct

SEQ ID NO: 367422 - DNA, 830 bp, Homo Sapiens
tccagtagataggccttgagctgcaggtacacgctggtaatgtgctcggcctccggcgcccgtcatcttgggccttctccagccggttctccaggttccgcatggtcttggccacctccgtgtgttctgttttgcgcctccgccatgctccagaaggcgcaggctgtgcttgcagctggagctcctccagccgcctctgccgcaacaccacctggtgccgcagggcgttctgctgcttcaccgtctccctcagccggtggtctaggtgctccagggcctgtcctgtcctgttcttcaggtatggcttctcccacttccattcgcgaatcactgcctggaccactttctcatctcccttgagcaggtccagcagctttagttccagtgccttagtctccttgcggagctgactgatggtctcctggttcttcttgatgttccactgagagctctcaaaaaaagccttccggtcaccctctaacagttgtatctttttatgtaactcagccacctgagagtgcacagagggcttccctgcacctctgtggaaggatcctcccttggaacggcctggggtccacgcctgggctgtgcccttgcctcggaggtggctgggtttgcccgaagcctccctgcccttgaccctggaagagggcgtcgaagcctggtcctgaggaggcagggcgttggcggaggccgccctgcacagaggagatgtcatgatggggttggggctgaaggcccctaggggttacgggggataactaggagtcagtcgcccctgtcagggatccgtcagctcggattcctagggctctgaaaaatccgct

SEQ ID NO: 367423 - DNA, 1488 bp, Homo Sapiens
  misc_feature (13)..(13): n is a, c, g, or t
tatattttttttnttgttttctcggcgacgtcccctcgtcaacactatgattggtaccggtccggaatttccgggatcttggccagagccggggagctgggaggggtctaccggggctcgactctaggagttgggctgaggatttccacccgatcctcgaacctccggcccatctcatggacgcccctcccccttcaaacaccctcccccacatttattcccgcgtctgttttaaagatgggtaaactgaggcacagggagccggaccggggagcactgacagaaccagaagcaggttctgcctcccgtcccctcggagggccgacttgccccttctgggtttcgacgggggtctcagatacgaggaggcccagctggaagccacctgagggtgtcccccgctaagatgcgcaaatgggaaaagcgaggccggggttggggaaagaacttgcccgagccgcagagcgcgtcagccggggaggtcggggcgggggcgaccccgcgcgaccgaggatcgggtatctgggcccggcgcggagcctgcagggcggggccgcggcgcgtgctgatgacgcagtcggcgcggcggcctagcgacgcggttactagggagcggcgagccgagacggctacatggacgccactatcgccccgcaccgtatcccccccgagatgccccagtacggggaggagaaccacatcttcgagttgatgcagaacatgctggagcaactcctgatccaccagcccgaagatcccatccccttcatgatccagcacttgcatagagacaacgacaatgtgcccaggattgtaatattaggtccacccgcctcagggaaaacaacaatagcaatgtggctctgcaaacatctgaacagcagtctcctcaccctggagaacctgatcttaaatgagttttcctatacggccaccgaagccagaaggctttatctgcaaaggaagacagttcccagcgcgctgctcgtccagctgattcaggaacgcctggctgaagaggattgcatcaagcagggctggattctggatggcatccctgagacgcgtgagcaggctctgaggatccagaccctggggatcacacccagacacgtcattgtgctgagtgctccagacacggtcctgatcgagagaaacttggggaagagaatcgaccctcaaactggagagatttatcacaccacctttgactggccacccgaatctgaaatccagaaccgtctcatggtgccagaggacatctcagagctggagacggctcagaaactgctggagtatcataggaacatcgtcagggtcattccctcctaccccaaaatcctcaaagtcatcagtgctgaccagccatgtgtggacgtcttctaccagggtctgacctatgtccaaagcaacatcgtactaatgccccgttcaccccgagggggtgctgctgctcgggccttgtgggggcagtggggaaaaagtctg

SEQ ID NO: 367424 - DNA, 935 bp, Homo Sapiens
agcgggcgggctccgcgccgggcccagatacccgatcctcggtcgcgcgggtcgcccccgccccgacctccccggctgacgcgctctgcggctcggattcctcttctcctgtaaatgaccacagaggaagacaatgaatgaggtgaaagaatcccttcgcagcatcgagcagaagtacaagctcttccagcagcagcagctcaccttcaccgccgctctggagcactgcagggagaacgcccacgacaagatccggcccatctccagcattggacaggtgcagagctacatggaacactactgcaacagctccacagaccggcgggttctgctcatgttcctggacatctgttcagagctgaataagctctgccagcactttgaggccgtgcactctggcaccccagtcaccaacaacctcctggagaaatgcaaaaccctcgttagccaaagcaacgacttaagcagcctcagagcaaaataccctcatgatgtggtgaaccacctcagctgtgacgaggcccggaaccactacggcggcgtggtcagcctcatccccctcatcctagacttaatgaaagaatggatcgcccactccgagaagttgccgcgcaaggtgctgcagcacgtgagtgagccccaggcgcaccaggagagcaccagggggagcccgctcgtcctgcccaggccataggggacccaggcccaggtgccactaaacacaagtgtagaccggtcacaaaagccagctcaaaaccaggcgaatgttcaaaaaccaccctgggatggcctcctggtgggacaattgttacttccgagcccaggaagctcccggtggggggaaagccttgcctggtgtaaattggggatatacctgggtatgggccccttttttcacctgggttccccgtgggaccctggcacttattatacca

SEQ ID NO: 367425 - DNA, 1070 bp, Homo Sapiens; identical to SEQ ID NO: 98861
  misc_feature (445)..(458): n is a, c, g, or t
  misc_feature (831)..(846): n is a, c, g, or t

SEQ ID NO: 367426 - DNA, 1488 bp, Homo Sapiens
  misc_feature (1379)..(1379): n is a, c, g, or t
  misc_feature (1408)..(1408): n is a, c, g, or t
  misc_feature (1441)..(1441): n is a, c, g, or t
gaaaataagtgaagatgaaagtagtggacttgttacaaaagtggctcaggagaaattggatcagaaacaagtgacaaaaaggattcattttatacagattcaagtagtatcttaaactacagagaagattcgaatatactttcatttgatagtgatggtaatcaaaacatactttcaagtactttaactagtaaaggaaatgaaaccatagagtccatctttaaagctgaagatttgcttccagaagcagcttcactctctgaaaacctggatatcagtaaagaagagacccccccagttagaacacttaaatcacagtcatctttaagtggaaagcctaaggaacgttgcccacccaacctggctcctctctgtgtttcttataagaatatgaaaagaagctcttcacaaatgtcattggataccatttcacttgacagcatgatattggaagaacagttattagaaagtgatggaagtgatagccatatgtttttggaaaaaggaaataaaaagaactcaactacaaattacaggggcacagcagaaagtgtgaatgctggtgcaaacctacagaattatggtgaaacttctccagatgccatcagtacaaattcagagggtgctcaggaaaatcatgatgacctgatgtccgttgtggtatttaaaattactggtgttaatggggaaattgacatccgaggggaagatacagaaatctgtcttcaagtgaaccaggtgacaccagaccaattaaggcaatatcagccttccggcattaccctttgtaatcgtccagttggttccgatcagaaagctgtaattcattccaaatcctctcctgagatttctctgagatttgaaagtgggcctggtgctgtaatacactctttacttgcagaaaaaaatggatttctgcagtgccacatagaaaacttcagcactgagtttcttacatcttctcttatgaatattcaacattttttggaagatgaaactgttgcaacagtaatgccaatgaagatacaagttttctaacacgaaaataaatttaaaagatgatagtcccccggagtagtacagtatcccttgaaaccagctcctgtaactgtacatattgatcatcttgtggtagagagaagtgacgatggctcttttcatatcagagattctcacatgcttaacactggaaatgatttgaaagaaaatgtcaaaagcgattcagtgctgctgaccagtggaaagtatgatctgaagaaacaacgcagtgttcacgcaagccactcagacaagcccaggggttccttggccttctcagtcagctaactttcctggagttctcctttggacttcacttaggggaacagctcatgggaagngaatggaatcttctttaaacagggaactnggcttaaaagcttaaaatgggctctttgccggngggttcactttgggaaaaaggatgctctttctttccatccatattat

SEQ ID NO: 367427 - DNA, 582 bp, Homo Sapiens
  misc_feature (530)..(530): n is a, c, g, or t
  misc_feature (542)..(542): n is a, c, g, or t
  misc_feature (549)..(549): n is a, c, g, or t
agctggtcctggtagtagaggtgctgctcccgcagttgcaccctgagggtggccagatccttgacgtccggtcccaggcagtgcgccgcggtcagcacccactgggggtggatgagggagcccccacagaagtgcatccagtatcggtcgcggactctcaggctcacctgccagggccacttgctcctgggggcctcctgacccccaacgatacccactcgctgcagggcctggactggggcaggggccgcgtaggcccggctcgccaggacgggcagcgccagcagcagcagactcagcatctggggagcaaggaggagcatcgtgggcctggccgggcctcacagggcagggctgggggctacagattgtggggtgaagaatggagctgggacggggggaccgggctgggtccaggcctgcaggcctgggtcttcgtgctctgagtctgaggctgggccactctgctccaggtgacgctgatgtcagggtctctgagagggggcacttccctggggggaaagcccgtngcgtgcaaccgncgtaggnttacggcttctgtttgtaataatacaatacccc

SEQ ID NO: 367428 - DNA, 1054 bp, Homo Sapiens
aagcctggacaggcttgaacaccagccggcgggtgctcatctccggaactcccatccagaatgatctgcttgagtatttcagctggtacatttgttaattccggcatcctagggactgcccatgaattcaagaagcatttgaatgccaatttgaagggtcgagacgctgctgctagtgaggcagacaggcagctaggagaggagcggctgcgggagctcaccagcatgtgaatagatgcctgatacggaggacttctgatatcctttctaaatatctgcctgtgaagattgagcaggtcgtttgttgtaggctgacaccccttcagactgagttatacaagaggtttctgagacaagccaaaccggcagaagaattgcttgagggcaagatgagtgtgtcttccctttcttccatcacctcgctaaagaagctttgtaatcatccagctctaatctatgataagtgtgtggaagaggaggatggctttgtgggtgccttggacctcttccctcctggttacagctctaaggccctggagccccagctgtcaggtacttatacgtccgcctggatggcacgatgtccattaagaagcgagccaaggttgtagaacgcttcaatagtccatcgagccctgactttgtcttcatgctgagcagcaaagctgggggctgtggcctcaatctcattggggctaaccggctggtcatgtttgaccctgactggaacccagccaatgatgaacaagccatggcccgggtctggcgagatggtcaaaagaagacttgctatatctaccgcctgctgtctgcagggaccattgaggagaagatcttccagtgtcagagccacaagaaggcactgagcagctgtgtggtggatgaggagcaggatggaaaacgcccctttctctctgggcgaattgaaggacctgtttatcctggatgaagctaccctcagtgacccacatgacaggttggcctgcccaacgttgtgtcaacaaccggtagaatccggccacccccctgagggtttgactgccctttcaaaccg

SEQ ID NO: 367429 - DNA, 1463 bp, Homo Sapiens
  misc_feature (743)..(745): n is a, c, g, or t
  misc_feature (760)..(760): n is a, c, g, or t
  misc_feature (1062)..(1067): n is a, c, g, or t
  misc_feature (1069)..(1095): n is a, c, g, or t
  misc_feature (1097)..(1110): n is a, c, g, or t
  misc_feature (1113)..(1124): n is a, c, g, or t
  misc_feature (1126)..(1129): n is a, c, g, or t
  misc_feature (1131)..(1141): n is a, c, g, or t
  misc_feature (1143)..(1153): n is a, c, g, or t
  misc_feature (1155)..(1373): n is a, c, g, or t
  misc_feature (1388)..(1388): n is a, c, g, or t
  misc_feature (1391)..(1392): n is a, c, g, or t
  misc_feature (1426)..(1426): n is a, c, g, or t
  misc_feature (1440)..(1440): n is a, c, g, or t
gggaactcaaactaaccaacccactgggagaagatgcctgggggtccaggagtcctccaagctctgcctgccaccatcttcctcctcttcctgctgtctgctgtctacctgggccctgggtgccaggccctgtggatgcacaaggtcccagcatcattgatggtgagcctgggggaagacgcccacttccaatgcccgcacaatagcagcaacaacgccaacgtcacctggtggcgcgtcctccatggcaactacacgtggccccctgagttcttgggcccgggcgaggaccccaatgagccgccccccaggcccttcctggacatgggggagggcaccaagaaccgaatcatcacagccggggggatcatcctcctgttctgcgcggtagtgcctgggacgctgctgctgttcaggaaacgatggcagaacgagaagctcgggttggatgccggggatgaatatgaagatgaaaacctttatgaaggcctgaacctggacgactgctccatgtatgaggacatctcccggggcctccagggcacctacccagatgtgggcagcctcaacataggagatgtccagctggagaagccgtgacacccctactcctgccaagctgcccccggcctgctgtgcacccagctccagtggctcagctcactttccctgggacattctcctttcagcccttctgggggcttccttagtcatattcccccagtggggggtgggagggtaannntcctcttctccaggncaggcctccttggactcccctgggggtgtcccactcttcttccctctaaactgccccacctcctaacctaatccccccgccccgctgcctttcccaggatcccctcaccccagcgggtaatgagcccttaatcgctgccttcaagggagctgattgtagccccctcattaccgccaccccctcctccctgatccgccaggcccacttactgatataattcttcccatgcaagaccccgccacccccccgccgcgaacgctgagaatacgcagcaacctgctgccgccttgcccccaaatttnnnnnncnnnnnnnnnnnnnnnnnnnnnnnnnnncnnnnnnnnnnnnnnccnnnnnnnnnnnncnnnncnnnnnnnnnnncnnnnnnnnnnncnnnnnnnnnnnnnnnnnnnnnnnnnnnnnnnnnnnnnnnnnnnnnnnnnnnnnnnnnnnnnnnnnnnnnnnnnnnnnnnnnnnnnnnnnnnnnnnnnnnnnnnnnnnnnnnnnnnnnnnnnnnnnnnnnnnnnnnnnnnnnnnnnnnnnnnnnnnnnnnnnnnnnnnnnnnnnnnnnnnnnnnnnnnnnnnnnnnnnnnnnnnnnnnnnnnnnnnnnnngactcccgccgcccncgnnggagagacgggggcgcccggcaggtggccccggncacgccggcgccanaagaccccggccgacgcagaccg

SEQ ID NO: 367430 - DNA, 886 bp, Homo Sapiens; identical to SEQ ID NO: 253391

SEQ ID NO: 367431 - DNA, 1224 bp, Homo Sapiens
ccagaatgctggagcgtaggtgaaaggacaaaagccagacacatttcaacatgagggacccactgacagattgtccgtataataaagtatacaagaacctaaaggagttttctcaaaatggagagaatttctgcaaacaggtcacatctgttcttcagcaaagggcaaacctggaaattagctatgccaaaggacttcagaaactggcaagcaagctgagcaaagcattacagaacacgagaaaaagttgtgttagcagtgcctgggcctgggcctcagagggaatgaaatccacagcggacctgcatcaaaaacttggcaaagcaattgaattggaagcaataaaaccgacttatcaagtcctaaatgtacaagagaagaagagaaaatcacttgacaatgaagttgaaaagacagcaaatcttgtcattagcaactggaatcagcaaattaaggccaagaagaaattaatggttagtaccaagaaacatgaagcacttttccagcttgtagaaagctccaagcaatctatgactgagaaggagaagcggaagctcctcaataaactgacaaaatcaactgaaaagtcggacaaaggaagatgaaaattactaccaaaaaaacatggcgggttattctaccagactgaaatgggaaaacacactagagaactgctaccagagcattctggagctggagaaggaaagaattcaactttaatgcaataacgtaaaccagtaccagccaacatatttctcttttgggccaaaccctgaccactatgccacacgcagattcactgtgccatcagcaagaatgacattgaaaaagatatccaggctgtaatggaagaaactgcaattttatctacagaaaacaaatctgagttcctgttaacggattacttttgagaagatcctaacagtgcaatggattaaagagagacgaaagtctttactaaaaccaaaattattgagactgcagaaagacattgaaaaagcctcaaaagacaaggaaggcctgggaacgaatgcttaaaaacgtactccaggcacctcctcctttctctgatgccaagagccatgaaagaaaccccagcgttaaagggaggagaaccaatttgaaactagacccttttgggaaacgaaactccctacaaactggttcttcaatgttagcgcagaaccttgagcaaaaaaccttcaaccccagccattccttggt

SEQ ID NO: 367432 - DNA, 929 bp, Homo Sapiens
gtgtttccgagtggagctgcgagaagaggcgccaccccgtgagatgggcttattccacgtcaggggtcaatatctagggtccaacaggtcccccagcctgcagccactcatccgccgtagatcaccagcttggacttcttagtgtcttttctcggtgtagaccacggcagatatgtgactcccggggtgtggtaggaccccgtaagtgatgggaatgtcccaggctaccactccagagcctggccgtaattccaggatatataagtcattcaggtaccttggaatgttgttctttgggtcctcgctatcattggccagacccccaaacaggtagcatttgttgcccacaagggagaagctgtgcccgagtcgaggacacggagggggcccgtttattgggcgtctttgctttgagtctcttccactcccaccggctcgcctggagttcgtagaggtcattgctgtatttcccatactccaccatcccaccaaacaccaggaggcgagtcccgtcacacacgaagccataggctgcacacccagggggaatgtcccccctcacggctgggatgaaccactggttggttgccgtgttgtacacgtgcagttcgtccactattccctcgttgccgccgccaaacaccacgatgagctccttgatggccacggcgcggtggccgtggcggggccgtggcaccggacccgaccagcccaccactcgcttccagcggggctgcagaagcaccgctggcaagttggcgggcgacacggccgaagccatagttccgggaaagggtgcggtggggagaagtcaacaagcgggaagggagcccctcaattcctttcacacaccccctttcgtctaaggcagctctcacggagaagcggtttctcacacagcggtagacgactccatggagccgccatct

SEQ ID NO: 367433 - DNA, 1059 bp, Homo Sapiens
tggtttcccccatcggagacttcatcagttttggtagcaatcctgaaggaggcttttcctgggctcactggtcccccaagagcgcaattagcctcttgcagcctttaatcccgggaatctcaggcccggcttggggcaggctcagaccattgaaaggcccggttccccctgttgcacacggcttcgtaacacgagtgatgctttcggtttgccaactcaacgtttctcttccagcaagcactgcccacattagggatcccgaaagctgtagacgtcactggctgtggaggcctttccggttttacgttaacaaacagttctggggacaagtagcccagggtgccccctggctccccggaccctgtccctgactgtgagcctccctgaaatgtggacaggccaaaatctgccagcttgacgtgcagctctgggtccagcaggacgttggatggcttgaggtcccggtgcaggagcaccgggttctggtcgtgcaggtaaaacatcccaagcaccacttctttcagcaggcggcaaaggagcggccagggccgagggcactgggactgcagcagccccgacaaggagccgttctccatgaatttagtcaccagagccggcttgggatcttggtcccagttcaccttctcgataaccccttctaggcgcagcacgaattcgttatccagacttgccatggccttgacctccctggatatcgccttcgagtttacgatcttgaccgccacatcgtagccccacttcctatgttgcgcccggaacactgtgccgaacccgcctttgccgacgagctcctggttctccagttcctcgatggacaccaagggggcgggggcaccgctgggccataacttgacgcacgacatcaggctggaaggtgccagggggcctctggaaattgcgagccgtaggagatggagtgacttctggggcttggtcctttcgcagagaggggaaggggtctgtctgtgcaggggtcagtctctagaccaagacggtgagtctactttccggggttgttaccatcccgggaattccgga

SEQ ID NO: 367434 - DNA, 1179 bp, Homo Sapiens
tgtggtgagtagtttgcgcaatttctgcgtccctaggagttgtttcggtggtgaatcgtggatggcaattcggtccacatatccccccgttcatcgggacacaaattctgaacgattatgggtccccacaggactagattctggatttcttgaaaatgtactaaaggaattttatcaatgtaaggatatggcctacttttcccaactgatgtcgtcatcaactgttaaaagaggttaatgtggcatagaaaagtacatgttcgttttagaaggtagatttctgataggtactacaaatagttctttgattataagataacagatgtgaggagtcagttggactatttggaataatgacacttcatttgtgttatacttgatacttggtgaagacctgaaagatacttagtattaaagaagcttttacattgtaatataaatgatattcacctcaaaagagtaaaaataatgctttatatatgaagtgaacttgttggcagtgcagttttaaaactaaactcttcatcttcagaaaagatttgggatagaaatttgtgagccatgttgaggaaatcaacagttgcattttatacacttattttgaagttaatttttgaaaataaagcccttttcatgtttacaagatccaacagatgaatacatatggtaacaataagttttagtcttaatcttgaccttttcacaaagaaactcttctactcaggaagtggtctgttatacaatattgttttcctgtctgcatgggatgacagattttaagctgatgtggcaagctgcagatctagaggttgtagcagaacttcagagaagcatcacgatgatacagatcagcaagagacatattaagatgagacagaaattgataaatagattctgtagcttttgacgtgcttgttgaggcatttcaatggttgaggctcttcttatagctgagcgagtgaggtattggactttctccatgataccagcaggacaggaagtctgaagttttaagtggtcgagagaaagataaaaagctggcagccaaatatgagataactgtcttcttttaggtagccttggcagctgtgatcatcacagtatagagtattgtgttgtatgaagtcttacgggtgtttagctggggagttttctgactctgtcacccagtttatgccc

SEQ ID NO: 367435 - DNA, 671 bp, Homo Sapiens
tggtacacaggccggagcagctggctcccaggattcagcggggccaggatgatgtagttggggtcagtggggacagtggcacgggacagtgcagtcagggtgtgctggcccccgcgcttggccacctcggtgtagcgctcccagccgccgagcagcagcccatcagagctgtcacataccaggtggcagctgtggcgctgctcaggccgtgcctggaccccatgggtgcagttcttctcccgtttgttggggggtgactggaggtcatgtgtcgacttgcaggaggcccgccgcaggaccccgccatctggtcctggcttgacctgggggaccatgcgccacacgagtaggatgatctcactggggcagctccggatctcgtgggccagctccacacatttccagtgctccacaggcctctcattcagctgcagcaccgtgtccagctgctgcagccctgcccgttccgccggacccccggaatccacggcctggactcgaactggagagtcgcagcagatggtgaagccaaagccgtcctttccacctcgggatggtgatctggcggtagcggcgctcacgagcacaccttgcagagcccattgaagcggttcatggctgcgggtcctgcctcggctgccgccccatgaaaacccagctctcccccagca

SEQ ID NO: 367436 - DNA, 1402 bp, Homo Sapiens
  misc_feature (440)..(512): n is a, c, g, or t
  misc_feature (862)..(872): n is a, c, g, or t
taggttctctgcggacctctctaattagctaccaggtatccagttacaccagatgaccttcctgctccccaaactcagcccacgtggtctgattgcagtgccattgcccagaggtcccctccacctgggatgcccttccccctcatatccacttgtccataagcctagttatctttaagagttagttcatctcgtgcctctcagagggacaaaggggacagagacctgacccggtcaggggtggaggtcataggttgggttctaggccccctctgggtgcacccaatttgccctgcatgtaagttccatgaggacaggccctgttgtcattctccacttccacccttgtcttcccaggccaagcacaatacttgcatatggaagacacccaataaacatctgtgtccaagaaattcataataaatagataaaaccctggnnnnnnnnnnnnnnnnnnnnnnnnnnnnnnnnnnnnnnnnnnnnnnnnnnnnnnnnnnnnnnnnnnnnnnnnncaagaggggagggccccgacataaaagtactcccctacggggcacccacagagcctgcaccccccccgctactattagcatagcacgtggcgaccacctatggcgagcgcagcgcatgatcaatcggcagagcctcgcacggccagcgcagcatgaaaccaaccaccataccagaaggagtagcgaccacagcataggcgcccaccccagagcaaaatgaatctcgggggaaagagaaccccaaccatcacccctgggtgcgtcgggtccactcacacaactgtgggggtacaacaacagtcaccaccacaccaagacaacagaacacaccccgacccccgccagcgagnnnnnnnnnnngaaacaaggaccaaaacagcgcgacgtcaaaagcgggcggcaacaccccaccaaggaagggttacaaaacacggccaccgggcgccctggggaacgacgctagccgtcaccaccagcgccggccctgctatgactcgcgcacaacacaacctactctaccccccccgaggggcacccagccagcaaaacaacaccatacgatgaagacagagccactcatgcgacctcaggcgaagggcccaagcggagacgcgcgcgtagagaccaacgcacggggaatgaacacgccaacgaacagtgtacccaggcgaggcggcgtgcctcgtaggactccgacgcggcggggagcgcaccgacataagaactcgatcgaacgcgggaggggaagcatggcgatggagaggatgaatgactgatcgatgacagacaagccgcccagagcagcgccacgaggtacaaccgccgccgacagtcacggacagcaccaccaggcgcagctgacgccgcgccgaccacacgaccacagcaca

SEQ ID NO: 367437 - DNA, 850 bp, Homo Sapiens
ccttcctctgtcagaatggccaccatggtaccatccgtgttgtggcccaggcctgctggactctgctggtctgctgtctgctgaccccaggtgtccaggggcaggagttccttttgcgggtggagccccagaaccctgtgctctctgctggagggtccctgtttgtgaactgcagtactgattgtcccagctctgagaaaatcgccttggagacgtccctatcaaaggagctggtggccagtggcatgggctgggcagccttcaatctcagcaacgtgactggcaacagtcggatcctctgctcagtgtactgcaatggctcccagataacaggctcctctaacatcaccgtgtacaggctcccggagcgtgtggagctggcacccctgcctccttggcagccggtgggccagaacttcaccctgcgctgccaagtggaggatgggtcgccccggaccagcctcacggtggtgctgcttcgctgggaggaggagctgagccggcagcccgcagtggaggagccagcggaggtcactgccactgtgctggccagcagagacgaccacggagcccctttctcatgccgcacagaactggacatgcagccccaggggctgggactgttcgtgaacacctcagccccccgccagctccgaacctttggtgagagaaggggcttcagacggtgggtgacgagctgagccagggtagacggtgcctgaccttggggtcctgagagtgggggtacccggacctcaacaggcttctgggaaggaaagccccggcactgggccaggttggcccggaagggaggccagccgtgggatctttgacgaaggccgttcatggc

SEQ ID NO: 367438 - DNA, 1397 bp, Homo Sapiens
  misc_feature (66)..(66): n is a, c, g, or t
gggaaaagagccccacaccgcccgccccccaggcaccttctcctccgcctcctccctaccaaccanccccccaacacaaagcggctggtccggtccggaattcccgggatctggaaacttcaaaacgtttaataagagtcttcaggatgggtttgaactagacaagctagaaatttctttagaacaccagctctagcatgcatctcccacttttggctttcctggagaggagcttgaagaggtggttctgcagacagccacagtgatactcaggaaaccagaggaatggatttgacttttctgctaggattctttgttatagtttctccctgagttgtaagaggcatggaaatatacatgaaactgaagaacctgcaaggaagggaagtggaactttccatgctgagtgaaaactaaccaagtggcagttgtgactgaaaacactgaaacctaccacgtccagattcactggattgggggatagaggaacggtcacagctagggagaaagaagtgataccggaaaagaaaacctaaatgaagagaatgaggatgactgcacagtagatggccacctctacctccacagaggcaaagtcagcctcgtggtggaattatttttttctttatgatggttccaaggtaaagcgaagaaggcgatccaacaagagctggcatttgttacttttatccttcccagaccctgctagaccaacaggagttgctttgtggacagattgctggcagttgtcccgctgtgtttctgacatttctgactctcctcctactcttgttcgtctgagaaaactgaagtttgccataaaagttgatggagattacctttgggtgctgggctgtgctgtggagctccctgatgtcagctgcaagcggtttctggatcagctagttggattctttaatttttacaatggacctgtttccctagcttatgagaactgttctcaggaagaactgagcacggagtgggacaccttcatcgagcaaattctgaaaaacaccagtgatctgcataagattttcaattccctctggaacttggaccaaactaaagtggagcccctgttgttgctgaaggcagcccgcattctgcagacctgccagcgctcgcctcacattctcgctggctgcatcctctataaaggactgattgtcagcacccaaatcccgtcctccctcaccggcaaggtcctgcttcaacgaacaggacctcaggagcagagactccctacgggacggggatgcccccgacaggaacatgggagcggcaatgtccccgacatgtccagattatccctggtatagtgaacaaagaagaagcccatagtctccacgaggatccctgtggaaccacgctgaaaaggtctccatgcatctcag

SEQ ID NO: 367439 - DNA, 1051 bp, Homo Sapiens
attataaaggcaatggacttcggtgttctgctatccctgaaaattctgtgaaggaagtcctcagagcacctgggaccatcaaagacagaatcaagaagttgcttgctcacaaaaacagcatgaaaaagaaggcaaaaattaaaaatgttaccccagaacccaccagggctcctacccctaaggtgaacttgcagcccttcaactatgaagagatagtttccagaggcgggaactctcatggaggtaaaaaagggaatgaagagaaaatgaaagaggggcttgaggatgagaaaagagaagagaaagccctgaagaatgacatagaggagcgaagcctgcgaggagatgtgtttttccctaaggtgaatgaagcaggtgaattcggcctgattctggtccaaaggaaagcgctaacttccaaactggaacataaagcagatttaaatatctcggttgactgcagcttcaatcatgggatctgtgactggaaacaggatagagaagatgattttgactggaatcctgctgatcgagataatgctattggcttctatatggcagttccggccttggcaggtcacaagaaagacattggccgattgaaacttctcctacctgacctgcaaccccaaagcaacttctgtttgctctttgattaccggctggccggagacaaagtcgggaaacttcgagtgtttgtgaaaaacagtaacaatgccctggcatgggagaagaccacgagtgaggatgaaacagtggaagacagggaaaattcagttgtatcaaggaactgatgctaccaaaagcatcatttttgaagcagaacgtggcaagggcaaaaccggcgaaatcgcagtggatggcgtcttgcttgtttcaggcttatgtccagatagccttttatctgtggatgactgaatgttactatctttatatttgactttgtatgtcagttccctggttttatgatattgcatcataggacctctggcatttctagaattactagctgaaacaattgtaatgtaccaacagaactatcattgtacga

SEQ ID NO: 367440 - DNA, 1062 bp, Homo Sapiens
cggtccggaattcccgggatctggtggtgagcaggacggtgcaccggacggcgggatcgagcaaatgggtctggccatggagcacggagggtcctacgctcgggcggggggcagctctcggggctgctggtattacctgcgctacttcttcctcttcgtctccctcatccaattcctcatcatcctggggctcgtgctcttcatggtctatggcaacgtgcacgtgagcacagagtccaacctgcaggccaccgagcgccgagccgagggcctatacagtcagctcctagggctcacggcctcccagtccaacttgaccaaggagctcaacttcaccacccgcgccaaggatgccatcatgcagatgtggctgaatgctcgccgcgacctggaccgcatcaatgccagcttccgccagtgccagggtgaccgggtcatctacacgaacaatcagaggtacatggctgccatcatcttgagtgagaagcaatgcagagatcaattcaaggacatgaacaagagctgcgatgccttgctcttcatgctgaatcagaaggtgaagacgctggaggtggagatagccaaggagaagaccatttgcactaaggataaggaaagcgtgctgctgaacaaacgcgtggcggaggaacagctggttgaatgcgtgaaaacccgggagctgcagcaccaagagcgccagctggccaaggagcaactgccaaaaggtgcaagccctctgcctgcccctggacaaggacaagtttgagatggaccttcgtaacctgtgaagggactcattatcccacgcagcctggacaacctggggtacaacttctaccatcccctggggctcggaaatggccctccattccgcaaaggcttgcgaccacatgcccagccttcatggagctccagggggggaaggaattgggccgggaaacctcccgggcggaaaatccaaaacccggggcccccggaaaaaattcgaaactccaaacgcccaaaaactggggaaaacccccacaaggggcctttccgggggccccatttcgggggaggggc

SEQ ID NO: 367441 - DNA, 846 bp, Homo Sapiens
taggacctcattatgaccatgatctgcaagaaagatgctttttcaatgtcttttaggcctgaatatggtaggaaatcatgaagcacccaaagactcaggatctcacttcgtatttggagtggccattctcctatgcacacacacccttgttttgttgccctctccaaaatcaagtcttcaccccttcagttcatatcgccttcgttccactcttcaccatgggaaactcccacagtgtttccactgtttacagattcctttctctcacgtcagcgcaggcaccctttcacttactctgtaaccatcaggacttccattacattctgtgactttgcacatcttcatcccagtttttaacagggatatatatacgaccatcatataaacttgtgcggcaatcctgccggcccaccagaactgtctcacattctttaatttctattgccttcagtcttgacgttcatttatgttttcaagtgaatctttcctgtctctttcccaaaaaggcagaaggaaaagaaccaacattctaatttgatgatgaacacagtgatttctgaaatacgttcagagaatgaaggaaacaggctggctctcttctacgtcgctaggatgtgggtcaacctctgaataaagaggtgggggttgaaaccggaattcctgtatacaggcaaacacaggacagcacacttctccctcacagttagggggttgagggtaaggaggaatgtgtctagagaattcttcctctgataccacatctgcataatttggtggtgcttcaggctgctctggcagggtcagtgtcaaccagctcatatccagaagtgccatgggtgcggggat

SEQ ID NO: 367442 - DNA, 820 bp, Homo Sapiens
atttaagcacgactctgcagaaggaacaaagcaccctccccactgggctcctggttgcagagctccaagtcctcacacagatacgcctgtttgagaagcagcgggcaagaaagacgcaagcccagaggccctgccatttctgtgggctcaggtccctactggctcaggcccctgcctccctcggcaaggccacaatgaaccggggagtcccttttaggcacttgcttctggtgctgcaactggcgctcctcccagcagccactcagggaaagaaagtggtgctgggcaaaaaaggggatacagtggaactgacctgtacagcttcccagaagaagagcatacaattccactggaaaaactccaaccagataaagattctgggaaatcagggctccttcttaactaaaggtccatccaagctgaatgatcgcgctgactcaagaagaagcctttgggaccaaggaaactttcccctgatcatcaagaatcttaagatagaagactcagatacttacatctgtgaagtggaggaccagaaggaggaggtgcaattgctagtgttcggattgactgccaactctgacacccacctgcttcaggggcagagcctgaccctgaccttggagagcccccctggtagtagcccctcagtgcaatgtaggagtccaaggggtaaaaacatacagggggggaagaccctctccgtgtctcagctggagctccaggatagtggcacctggacatgcactgtcttgcagaaccagaagaaggtggagttcaaaatagacatcgtgggtgctagctttccagaagggctcca

SEQ ID NO: 367443 - DNA, 1151 bp, Homo Sapiens
agcggacgggggtcgagctgggcgcgcagctcgcatggggtgagtctatcccgtctgtgccgccccgcgttccccggctgtgcaacaggctgtgtgctgtgagcactgtgtctgtcatctacacacctgtgagctactcttcgtacgtatacagacacagtgctacaggaccatgtggtagaaggaacgacaggccgacacagagcgcgtgaggaggtcacgcctcgggtcgtgtacgcttgcgtggccgagccctttgatgcgccacgctgcgcctgctgcgcacgagaatacggtcgtattcgacacgcagctcagcgctatcgcatgcgcggtcagcaaacctagtgggtgccatgtctttacttacagcagtgacaggacttccatccgcaccatctatacttcattgcataatgagctgaagaaggtggtgactggccgtggtgccctgggtgggactgttcctcacgtgtgaagaactcctttcccacctgtcagagcagctctgcttctttgttaaggctcggatggagatagcagacttctatgagaagatgtacaccctcagcacacagaagttcatcaatgctgaagagctcgttggccttttggatgccatcatgaaaaaatacagctccagatttcaccacccaatcctcagtcctttggaaagcagtttccagctggaagttgacgtcctgtgtcatctcctgaaagcccaggcccaggtctcagagtggaagttcctcccaatctctggttaatttacacaagtgcgcacaccaaactgcagacggttgggacaggatctttgagaaacaggcgggagaacaagaaaacatctgtatggaggggcagtctcagaaggccgtgcaacctccacaccttttcctttggctgataaaactcgaaaaagcaatgcttctggcccaagatttagtgttttaatttcacatgaagaggctccggaaggccgacgagaggacctgtggtacagcaacatgaacaccgttgacacggcaaagctaaccccagagatatgtgggaaacggataccaagtttcaccgaaaaattgcgggcggcgaagtgtgccataatattgacacaaggaaggtatggaagagtcaagggaggggattcgcgcgcc

SEQ ID NO: 367444 - DNA, 1056 bp, Homo Sapiens
  misc_feature (314)..(333): n is a, c, g, or t
gaccagacctcctcaatcattccatcagccacccaggactcaacagcagaacctcagaggactcagctgaaagaggttttcactcgagcactaaccacagagaaatgggaagtgccatcctgctgtcatacgcagccgatggctgggtaggactaaatgcccttctgtggtgagatgaaccaagacggcagatgggggaataacatcagtgagagagagattacgaatggatccttgtattgcagatcaaactgggttgtctcttctcaaaccacccaggcagtttctgaatgtcccaagataggggtaggagnnnnnnnnnnnnnnnnnnnncaggagacggtgggtaagaaaacctaaaaggcacaatgaggcaaaggcctaagatggaggctggctttgggatctgaaatccggccacaatcctccttgttttacctcaagtccaagaattgtcaaaaagaaaacccagaagggctattcattctaaattttaaaatcttgttcttcctggcctaccaagtccttgtgttttctttctaggcgcccataaatacaaccccattacagttctatttggctaataatttacagaacatttaaaataccgggtaggtgaacatctcttcatggcttttgtgtaagggcctgaagcgaagagaaaaacaactgattggagattcctatctggcgccttctccagggaaactgacaaccagagaaatctgttgctaggatttctaggacatctggaaattccctttttgttctttctcaacaatataaaatggtatattcgcaaacctatctgaatcacctcaatctaggccactttgaaaatttcatttaaaaatgtaatcacagatttttaaactaattacccaatttgcaaacaaatcccagctacttctggtcttgaacatggagcaaaggtgtgtcagtaaggccaacattcttaggttgacagagacaggttaacacattggctggcttcatttaccccctgccacgccccacactgagctggatgatttgatgggaagagagggtccccac

SEQ ID NO: 367445 - DNA, 875 bp, Homo Sapiens; identical to SEQ ID NO: 98882

SEQ ID NO: 367446 - DNA, 1169 bp, Homo Sapiens
  misc_feature (895)..(903): n is a, c, g, or t
  misc_feature (1028)..(1043): n is a, c, g, or t
tggtgggccagatgtactgctaccccggcagccacctggcccgggtcgctgactgcgggcggctggctgctggccctggtgctggccctgctggtcgggccgttcctgagcggcctggcgggggcgatcccagcgccggggggccgctgggcgcgcgatgggcaggtccctccagcctcccgcagccgctcggtgctcctggacgtctcggctgggccagctgcttatggtggacggacgccaccctgacgccgtggcctgggccaacctcaccaacgccatccgcgagactgggtgggccttcctggagctgggcacaagtggccaatacaatgacagcttgcaggcctatgcagccggtgtggtggaggctgctgtgtcggaggagctcatctacatgcactggatgaacacggtggtgaattactgcggccccttcgagcatgaagtcggctactgcgagaggctgaagagcttcctggaggccaacctacactggatgcacgaagagatggagtcaaatccagactcaccttactggcaccaggtgcggctgaccctcctgcagttgacaggccctggaggacccctaccaaagccgtgccgagcttcccagctgggaagctcaccatcaaacccttggggttcctcctgctgcagttctctggggacctggaaaaccctgcagctggcccctgaacaagaccaagatcaaacccttctctgggctctgggtctcctggttcttgccctcatcccgcctgctccctgggcccagagtgaacctcctgggttgccccacaaccgccttggaaacaactacccagtaccatgcctgcggtgtcctctccataaggtactggggctccggcttccctcgggaaagggccccctnnnnnnnnnacctcaccccggctgggcttccctcgggccgaccaggtctggggcctttcctcccttccctaacccccgggcgcacccactgttgtcctcccccggggaacgggactttcctcaccgttcccctnnnnnnnnnnnnnnnntcctcgcgcccacacccttggggaagaacccaacctgtgttggggccaaacccacggaaaacctcccgccccccgtgggtggtaaaaactaatggcgtgtcccgaccccccacgcgacattttttc

SEQ ID NO: 367447 - DNA, 1131 bp, Homo Sapiens
  misc_feature (1043)..(1079): n is a, c, g, or t
ctgggtattcaatcatacctggatatggtaaataacgtcttcaatcagcagcgacacagtctgaattagacgtagagggtacactgtccaagtttatttgtgttctctttggatttatgctgtatatttccattagtccttgttacaagaactgccattcttcagtggagttttgccacgttgactgtccatcagaagctctagtaacactatgtatgtgtgcttcaaaaccaagcaccaaggccgacatgctctggcatccaccaattcatgtgtaccttatatattccaaagccaggatcaataagacgggcacgagctgatgtagatggctgattggaaggtcctaccctcggagctttctttactttaggtggactattagaacagggtttagcctcaatctgtgtagatgtgccaggaagatgatcagggtctgggcgaactagcagctgaattatatcattcagtccaacatcataatcaaataaggtatatccattttccaactgcttgccccggtagaagaggcgctggcattcgggccgcacgtcgaacagcgcccacacccgctcgcgcagctcctcaatcgtggctttgcgagacacgtcctcaatggtgcacgtcttggagccatcaatggtgcgaacctgtatccacatcttggcgcctagagaggaaccggtcccctttgtctccccctgagctctgggcgccgcgccccgcccggcccgcgccgctttccctgcggctcgggccctcagcggcaggcgggcgagcgcgcccaccggaccgaccggacgccgggcccgacaggcggcgacgactctcagcgcgcgcgcccgactagccgacttgaggagagacgaccggaaccactctgaggcgctgccgcagacaccgcctcaaagataggaagaggccatgtctgcgccgcgcagagtgtttacttatagagctggagctcccacatggaggtcacggcgccaagccggatctcgcccgctctcgacgaattcgagctcggccgatttggcctgatnnnnnnnnnnnnnnnnnnnnnnnnnnnnnnnnnnnnncgccgccaccgcgataagctccggttcgccctatagtgagtctatacatccg

SEQ ID NO: 367448 - DNA, 1476 bp, Homo Sapiens
tgtgtcaattctgaaatctgtcggtgcgtatagccgtgtcgtctccgtaattctcctgttctggtctggtcttaattcaattgcaaccctggaaccagctacattctctggaaaataactttttgtaggtgtaaagaatgccccagcctgacatattcaaggtctgtcagaacaggcaggcacagacacaaggcccctccttaggggactgctggggccagtcccacacggttattcccacggtcaaagactgagtaaaactgtcgaatgaagacatcccccaggatccagaggggcccagctggagggtggatgtcaagtccttgaaagccactgctgcagaactgcattccatccacgaagtccagtagggtgtaggcagttgggctgagggtataggggactccgttaatggtgaaggtgacatccggcatgacgttaaggttggcacactccacagcatattctccatccacgggggctgccccaatggcgttttgcagctgcttaatcttgtcggaagggccagtgatgagggaagtccctgtgtccacaatggcctggcagccctcggagcagaacataacagtgcctcccacctggatgttatccagtgcaatctgccagtaagcttgcttggtgactgggacccaattcaggctcccagagaaatgggagtggtcgtagcctccaaaaatcagctcgctccccgcaccaccttctgggttactgctcatgtagacagaaaacatcggcaagtccaccaggttctgagccatcatgttgtcaaatactggagtcactcctcccacagccaaggaggggtatcccaggcccagaattccatcaaactctgcatccacaaaggtctggcctggctctgtgacactgtctccaaactgctggccaaccacggttagtccttccacagagacttggtcggctccaatgatcccggacaagctcccggttccatactgaatggagaaagattgacctggctggctgtatgtgctggactgggaaggctggaacctgctgtgcgtcttgcaggctgggctagtgcagtacacagaggggacccagaggttggaggagccagtgtcgaagatgacagtgaagttctgtggtggggagccaatggagatagtgccgaagtattccatatccaagtagttgatgaggggttccttggcactctggtccattgagcaggactcggtgaactggatcatgtccaaattatgggatttccagaactcagagagctggctccgtgcccgcagcttcttcttgagggacggatgcctcctgaggggcaccctgtgaagggatccttgggcctctcccagctccaggagcaccagcagcaaaagaaggagcgttttcattgtgagtccgaccagcagcttctcccttgccccctcctttcttctctccccgagggcagtgggaacggactttccctaactctca

SEQ ID NO: 367449 - DNA, 1338 bp, Homo Sapiens
cggcgccccaccggctcccgcgcgcctcccctcgcgcccgagcttcgagccaagcagcgtcctggggagcgcgtcatggccttaccagtgaccgccttgctcctgccgctggccttgctgctccacgccgccaggccgagccagttccgggtgtcgccgctggatcggacctggaacctgggcgagacagtggagctgaagtgccaggtgctgctgtccaacccgacgtcgggctgctcgtggctcttccagccgcgcggcgccgccgccagtcccaccttcctcctatacctctcccaaaacaagcccaaggcggccgaggggctggacacccagcggttctcgggcaagaggttgggggacaccttcgtcctcaccctgagcgacttccgccgagagaacgagggctactatttctgctcggccctgagcaactccatcatgtacttcagccacttcgtgccggtcttcctgccagcgaagcccaccacgacgccagcgccgcgaccaccaacaccggcgcccaccatcgcgtcgcagcccctgtccctgcgcccagaggcgtgccggccagcggcggggggcgcagtgcacacgagggggctggacttcgcctgtgatatctacatctgggcgcccttggccgggacttgtggggtccttctcctgtcactggttatcaccctttactgcaaccacaggaaccgaagacgtgtttgcaaatgtccccggcctgtggtcaaatcgggagacaagcccagcctttcggcgagatacgtctaaccctgtgcaacagccactacattacttcaaactgagatccttccttttgagggagcaagtccttccctttcattttttccagtcttcctccctgtgtattcattctcatgattattattttaatgggggcggggtgggaaagattactttttctttatgtgtttgacgggaaacaaaactaggtaaaatctacagtacaccacaagggtcacaatactgttgtgcgcacatcgcggtagggcgtggaaaggggcaggccagagctacccgcagagttctcagaatcatgctgagagagctggaggcacccatgccatctcaacctcttccccgccccgttttacaaagggggaggctaaagcccagagacagcttgatcaaaggcacacagcaagtcagggttggagcagtagctggagggaccttgtctcccagctcagggctctttcctccacaccattcaggtctttctttccgaggcccctgtctcagggtgagtgctgagtctccaacgcaagggacagtacttctgatggtaccggctcgatctatata

SEQ ID NO: 367450 - DNA, 1146 bp, Homo Sapiens
ggtaccggtccggaattcccgggatcggccggggataagagagcaagaaaatgaagctcaagagcctcctgctccggtattacccgccaggaattatgttggaatatgaaaaacatggagaattaaagactaagtccatagatttgcttgatcttggtcccagcactgatgtcagtgcgttagtagaagaaatccagaaggcagaacctctactcacagcttcacgaacagagcaagtcaaacttttgatacagaggttgcaagagaaactcggccagaacagcaatcacacgttctatctttttaaggttctcaaagcacatatattgccactgactaatgttgcacttaacaaatcgggctcatgctttatcacaggaagctatgatcggacgtgcaagctctgggacactgcgtctggagaggagctgaacacgctggagggccacaggaatgtggtttatgccatagcattcaacaatccttacggtgacaaaatcgccactgggtcctttgataaaacttgtaaactctggagtgtggaaacaggaaaatgttaccataccttcaggggtcatacagcagaaatagtgtgtttatcatttaaccctcaaagcacattggtggcgactggaagtatggacacaacagccaaattgtgggacattcagaatggcgaggaagtttacaccttaagaggacattctgccgaaatcatctccttgtcatttaacacctcaggagacagaatcatcacggggtcttttgatcataccgttgtaatgtgggacgctgatactggaaggaaggtaaatatcttaattggccattgtgctggagattagcagtgccctcatccaatggggattgctctctaatattaactgggctctatgggacaaaacctggcaagctgtggggatgctacaaatgggaaaatgtgtgggcaaccttacagggccttggatgatgaaatacttagacggctggcttttgattaccctgggaaaactttattgcaaacttgcttctagctggtgggaacagccaagaattttctcagggctggcccccagaaaaagggctttggccaaatttggaaagggcttgaaaggggaaaatttcaaaaaatttctttttaacccc

SEQ ID NO: 367451 - DNA, 1028 bp, Homo Sapiens; identical to SEQ ID NO: 98887
  misc_feature (206)..(290): n is a, c, g, or t
  misc_feature (944)..(954): n is a, c, g, or t

SEQ ID NO: 367452 - DNA, 847 bp, Homo Sapiens
  misc_feature (718)..(718): n is a, c, g, or t
  misc_feature (760)..(761): n is a, c, g, or t
  misc_feature (786)..(787): n is a, c, g, or t
cggaaggccggaggggcagtccgccgcgggggcgagcgcgcatgcgccttcctgggacccacggcaggcgcgaatcccagcggccggcgggcggcggggatacttctacatagacataatcaagttttgactattgggaaaccaagcatcattaaaattctctcaaactcctaagtgcgaagaatcgataacatttcaagaagtgataacatttctctgaacaagaaaagaagtgattgaccacgttttaaaagtactctggcactggtgctgtgttttcttcccctccctaaatttgaagaactatggagaaatggtacttgatgacagtagtggttttaataggactaacagtacgatggacagtgtctcttaattcttattcaggtgcgtggtaaaccgcgctatgtttggtgattatgaagctcagagacactggcaagaaataacttttaatttaccgggtcaaacaatggtattttaacagcagtgataacaatttacagtatgggggattggattacccacctcttacagcttatcatagtctcctatgtgcatatgtggcaaagtttataaatccagactggattgctctccatacatcacgtggatatgagagtcaggcacataagctcctcatgcgtacaacagttttaattgctgatctgctgatttacataccctgcagtgggttttgtactgggtggttgcttanaagaaatctccactaaagaaaaagattggctaatgcattatnngcatcttggctgtatcccaggcctnntattcttatagactatgggacattttttcaatgggaaacttttacccacggcctttgccc

SEQ ID NO: 367453 - DNA, 878 bp, Homo Sapiens; identical to SEQ ID NO: 98888

SEQ ID NO: 367454 - DNA, 1455 bp, Homo Sapiens
attggtgggtggagctttgtggtccggggcaaacgtggctggggggtgtagagggtgggggccctctgggagggaaagccttgtagaaggttcctgttgggacttggaggacggcggcgccccaaaccaggtgggagtggcgccacaaggtggttgcacccatcagcggggcattggggattctacccagcggggtgcgggtgatccggcccggccactagggggtttcgcaaggcccgccaccgcgggaccggcccagagcgttcgcccaaagcgaaaggcgtccaggcagctgctctcagcgggggcccccgccggggctgcctgttaggccgtagcgctctagcgcctcggccacgagctcgcgcgccgtggagcgcaccgtggccagcacgctcttgtagttggcgcccgatgccagtccggcgccgaagatctttgaggacccccggaggcgccgtggcgcgggtagccagcgggggctcgggggccacgcccgccgccagctccggcagcttcttctcgctggcccagcgctgcgcgccccccggggtcccagggcctcctgcgccgctggaccccgtggtcccggtccccgagccccggaagagctgggagatgcgcttggcgcggctaccggaggctcccccggccgccttgacagcgcccactcgccgcagctccacgtgcggcgggggcggaggtagcggctcgctgctgcggctccccgtgtccgacgaagaagacttgacagaggctgcgctgggccagcgccgccccagcttcgccagctgcttcctgggggaattgatccacaggcccacggggagatgaagcttcccgaagcgggggcttccgccctccttccgttcaccagacagcatggcccctgcttcgggtccggcacacccggaggccctggctccactggcctgggtcagttccactgctcttgcatatgccacggctcccaacaatgagtgggggacaggaaaaggcaagaggaaacccggcaggaagagcggggaggaggcgtcctatgaggagaccaggcctgggggaggagatctgggtagggttggccgtgccccattccttgattctggaattgcatcgcagtcagttggtcccctccaggacccaagggtcccggttttctgccgttcctccctcaggccggagcccatccccagacctctcctctcggggaaccaaaggctagaatcagtcccgtcccggggagtgaggcagatgcttagacaacaagataaatctttattgttgcctcgaatctgtggcttttcttttgggacctgggtttgctcggcaactccactgccaaggccaaacagtgaggatttgatgaaatcgatcacgttccttcgacgaaatatcgcaaaggtaaggccggttatcagtgatagggagccgcagcatcagcacccgtgaaatgaa

SEQ ID NO: 367455 - DNA, 846 bp, Homo Sapiens
ccaatggtaccttccccgttctgccaaccggtgggcatccaggatgttctttcttgctcctgccttgttcacaccttggtatatcgttccaggcgcccttcgtggcggatgccccgtacctccttgaccccttgggctagctgttccgaggagtttccgcggagcgggtatattgctgtcttccgtatccctgcgctctccacactgggtctgctccctcggatccgtcccgctccgtcctcagatctccacggatggctgcccacccaagtccctctgctgacccccgctccatatctccgggagccctcagtctggttcggctcgcgggcgaccggaagctccggactgatggtatctggttccgcccgccgcctcttccagccggagatctcggcacaggcggtcggaccggcttgccacgccgcacctgcccgcgagggggctgcgccaggcccaggccgcagccgactgccgcgctctctgcccccgccactccgccatccccggactgcgctcacctgtctgggccgctggcctgggaggcgggggccggcgggagccaagccgaggaaagggcggagcggctctccgggcgcgtcatcggagcaccatggcggagctaggagctggcggcgacggccacaggggcggcgacggcgcagtgcgaagcgaaacaggtgaccgcacagcggggatagtgggggtcccgtcgggcaggggacggcgagcggggccggcgggctggcaccgaaatcacccggcgccggcagccccctccccgcccgcgcgccgcggcccggaacaaccggcctgcgcgccgcgcacctgctccgagagcccgct

SEQ ID NO: 367456 - DNA, 1163 bp, Homo Sapiens
gtaggaggcagggaagcagcctctgtctccagtctctgccctttgaaacaaaagggtatgtcttttctctcttcagcccccaacccagtggaggcccggcttgggacattgttcacttcccctcgcttcccctctagaagccccctttgccatccctgcaccttgtttcgggtgatgcccgagagggagctgtggccagcggggactggctcagaacccgtgacccgtgtcggcagctgtgacagcatgatgagcagcaactccacccgctctggatctagtgatagcagctacgacttcctgtccactgaagagaaggagtgtctgctcttcctggaggagaccattggctcactggacacggaggctgacagcggactgtccactgacgagtctgagccagccacaactcccagaggtttccgagcacgcccataacccaaaccactccccggggaggtccagaggagaccatcactcagcaaggacgaacgccaagggacagtaactgagtccaagctcatcccaccctcctggagccccaaggcctaggcctcaggtctggctcctacagacatccctagcgaatatccacattgccagaagccagaacttcaggaaaagcaccacccaggctagcagtcacaaccctggagaaccggggaggcttgcgccagagcctgagaaagaacaggtcagccagagcagccaacccaggcaggcacctgccagcccccaggaggctgccttgacttggacgtggtgctcatccctccgccagaagctttccgggacacccagccagagcagtgtagggaagccagcctgcccgaggggccaggacagcagggccacacaccccagctccacacaccatccagctcccaggaaagagagcagactccttcagaagccatgtcccaaaaagccaaggaaacagtctcaaccaggtacacacagacccaggctcctcctgcagggtttgcctcagaatgcaagagctgaagatgctcccctctcatcaggggaggacccaaacagccgactagctcccctctaaaccctaagccccggaagctgcacctaatattgttctgaaagagcagcgaagcagttttccacagtgacccccagcactggttgtccgcacactgaggctgccc

SEQ ID NO: 367457 - DNA, 966 bp, Homo Sapiens
ggggtttttaaaaaccaggcttcacaaattcaacctggagaggcagtgcccccccctcccagggagaacgaggaaccgccaggaggacagtctacctgcaccaccggcaaaccagagggcccaaggccagggccgtaagcccctgggagtacactccccttaaagagtccaggggacaacagtctgtgttgtgaaggctgggagctaaatataaccaaagcatcctggtacataaaggggaatacttcagtggctgagaaagagtgaaccgggttgtaaatgctttcatcctgtgtctcataatctgggcgtctgcaggtctggcctttgagtggtgaaatcccctggctgttagcgagggggcaggcctgcatgtgaagggcgtcgtaggtgtccttggtggctgtactgagaccctggtaaaggccatcgtgccccttgcccctccggcgctcgcctttcatcccaatctcactgtaggcctccgccatcttatctttctgcagttcattgtacaggccttcctgagggttcttccttctcggctttccccccatctcagggtcccggccacgtctcttgtccaaaacatcgtactcctctcttcgtcctagattgagctcgttatagagctggttctggccctgctggtacgcgggggcgtctgcgctcctgctgaacttcactctcaggaacaaggcagtgagaatgacaccatagatgaagaggattccatccagcaggtagcagagtttgggatccagcaggccaaagctctgtgcctctgtaatcggcaactgtgcctgcaggatggccgcggtgaaaagcgccttccacttcatcttgtcctttccctcagaaagaggctgggaggcagaggctgaggcagcggtggccgggacggttaggagaaaaggagtctctgctggttttattctgcagctacctccccaggaagtggaggac

SEQ ID NO: 367458 - DNA, 536 bp, Homo Sapiens
tggtgaggcctgcattctctggggccaggctcagcctccacctttggcaggcgtctctgccttgcgcatcgtctggctgccagcttctgctctgccacctccagcagctcctgcaggagtcgggccttctcctcacactggcggtgcagggactccttgttggccagctcattctccagcttgtcattgaggtcatggatggatgttgcctcacgctgagcagccaggtagcgcttctccagtgtagtaatccgctcttccatgtcctccttctgggccagagcctcccggaggtcccgctgatgcttgctgctcagctcctccgacttgatgaggtcccggcgggccgtgcccaggtcctcctcgagttcagtcacggttgttgttagggtgaccagtcgctcccgggcctggctcaactcaaagttctgcttctccaggagctcctgcagctcctctaaacggcccgtatcctccttccacggttgcgttggcccgccgtgtatcctctagagtcgactctgctattgacatgt

SEQ ID NO: 367459 - DNA, 1558 bp, Homo Sapiens
tctcttctgacttgatgcaggcacagatttatcaagctcctcagtcaacaaacacatcaccggaagaaacatggaaggaaaggaattttaaaaggaaataccaagtctctgtgcaaacaaagccttgtatattcatgttggcaccaatctactgtgagatttatgaagaaaaacaaattgcggacaactctctatgtacacttacaaatgcctcagttgatgcttgtgggctgtttgtcagcgttctgtgataatgaacacatggacttctgtttattaaattcagttgacccctttagccaattgccaggagcctggatttttacttccaactgctgatatctgtgtaaaaattgatctacatccaccctttaaaagcattgatgaattaattagaactttagacaacaaagaaaaattgaaaaagaattctcagtaaaagcgaattcgatgttcaaaacaaactacaaagagacaagacttctctgtttactttctaagaactaatataattgctaccttaaaaaggaaaaaaatgaacagcacatgtattgaagaacagcatgacctggatcactatttgtttcccattgtttacatctttgtgattatagtcagcattccagccaatatgggatctctgtgtgtgtctttcctgcaagcaaagaaggaaagtgaactaggaatttacctcttcagtttgtcactatcagatttactctatgcattaactctccctttatggattgattatactttggaataaagacaactggactttctctcctgccttgtgcaaagggagtgcttttctcatgtacatgaatttttacagcagcacagcattcctcacctgcattgccgttgatcggaatttggctgttgtctaccctttgaagttttttttcctaaggacaagaagatttgcactcatggtcagcctgtccatctggatattggaaaccatcttcaatgctgtcatgttgtgggaagatgaaacagttgttgaatattgcgatgccgaaaagtctaagttttactttatgctatgacaaataccctttagagaaatggcaaatcaacctcaacttgttcaggacgtgtacaggctatgcaatacctttggtcaccatcctgatctgcaaccggaaagtctaccaagctgtgcggcacgaataaagccacggaaaacaaggaaagagaagagaatcataaaactacttgtcagcatcacagttactttggtcttatgctttactccctttcatgtgatgttgctgattcgctgcattttagagcatgctgtgaacttcgaagaccacagcaattctgggaagcgaacttacacaatgtatagaatcacggttgcattaacaagtttaaatcgtgttgctgatccaattctgtactgtatgtaaccgaaacaggaagatatgactatgtggaaatatatcaaaatttctgcactgggaagctgtaatacatcacaaagacaagaaaaacgcatacttcctggtcttcaaaagatactactggaattaaaggcctcgagtgaacc

SEQ ID NO: 367460 - DNA, 823 bp, Homo Sapiens
cgctagtggaagaagatggcggaaggcggagcggcggatctggacacccagcggtctgacatcgcgacggctgctcaataaccgtcgctccggaaaggggacacctggtacctagtcgatagtcgctggttcaaacagtggaaaaaatatgtaggctttgacagttgggacaaataccagatgggagatcaaaatgtgtatcctggacccattgataactctggacttctcaaagatggtgatgcccagtcacttaaggaacaccttattgatgaatgggattacatactgtggccaactgaaggttggaataaacttgtcagctggtacacatggatggaaggtcaagagccaatagcacgaaaggtggttgaacagggtatgtatgtaaagcactgcaaagtagaagtatatctcacagaattgaagctatgtgaaaatggaaacatgaataatgtggtaactcgacagatttagcaagagctgacacaatagatacaattgaaacaggaaatacagacaaaatcttcagtatgccagatgaaaaggagaccagactgtggaacaagatacatgagtaacacatttgaaccactgaataaaccagacagcaccattcaggatgctggtttataccaaggacaggtattagtgatagaacagaaaaactgaagcatggaacatggccaaggggtccttctactcctaaaaagccactaagagcagagttgctagtgaacagtttaatttccacatacgtcacagaaagagagctaagggctctggttatcatccacagactgaccagtcaaccctaaataac

SEQ ID NO: 367461 - DNA, 776 bp, Homo Sapiens
ccctcatccacctacatcaggcaactggagagcaaagtgaggctgctggagggtgacaacctacgcgcaaagcacgcaggactccgtgatgaattccgcacgaggcccaaaggctgcacgatccctcatccacctacatcaggcaactggagagcaaagtgaggctgctggagggtgacaagctcctcgcacagcaggcaggctccggagagtaccgcacgctgcggaaaggcttctcgccctaccactcggagtcccagcctgcgtccctgccgccctcctaccaggactccctgccagaacgtcctggaggtacacgagaatctggaccggcagctccaggacagctgtgaggaggacctgagtgagaaggagaaggccatcgttcgcgagatgtgcaacgtggtctggagaaagctgggagatgcagccagctccaagccctccatacggcagcacctgtctgggaaccagttcaaggggcctttgtagggccactcttctgtggacgtggactggccctgacatgggggtccccagggggagtttcaggccccagacacgggcaggaactccagacccagaccctgtcttcttcctctgtggtgaactgtacataggacgctgcccgccctggaccagactgccatgggtccgatgcactggaccaagacgacatctccgcctcatacaccagcaactgggaagacgagacgctgcgactgttcctgcggcaaggggccggacgctctttcccctcttgggcctgggtcccg

SEQ ID NO: 367462 - DNA, 730 bp, Homo Sapiens
gggcactggctctccagtgagctggaccttctgaacctcagctgtgttctggggcttggcaagcactcggagccagatatccacgcccctgctgccctgcgggaacgtgacgaacaggcaggtgtagttgccttcatcctctacgcgcaacccgaacatcctcagcgaggcattccgcagctccgcgcccagtctggctgccacgaattccagccgtttggactccgaatagctggggccctgcgtttggtggaagacggccatgctgccagattcaccatgccagcgcccaagtcagctgtgacacatgcgtcacctccatgttgggcacctgtaggtagcagggcagcgtcacggagtcgcccaagaagccgggcacctgggtgggcgcctgcacgacgacgtccccggttcctgggggtggccaggacagcaccagtagcgccaccagcagcagcggccacgcggcggccatggctcgggccatgccagttgctccgagcagctgggcctcccgcgggcgtctcctcgcttcccggcgccagctcgctctgccgcggtcgctgcgagtccagctcccggagctcaggtcctggaatccccggggggccgctcctccagtgcctggggtgggaaggggaatacccacttcttcaagctccagacaagcgactggagcggatgtggagacgacggccagtcccgccagcgcgggtggaccacccccgct

SEQ ID NO: 367463 - DNA, 2372 bp, Homo Sapiens
gccggagcctgcctgggaagccgcagccactaccaagggccttgcgactgacgtggcgacgttcacccaatggggccgccccagtgcagggagtgacacggggcttttgaccaccacacacggccccgaagaagccccacgcttggcaatgctgcagaatgagttggaggggctgggggacatcttccaccccatgaatgcggaggagcaagctcagctggctgcctcccagcccgggccaaaggtgctgtcggcggaacaggggagctacttcgttcgtttaggtgacctgggtcccagcttccgccagcgggcatttgaacacgcggtgagccacctgcagcacggccagttccaagccaggacactctggcccagctccaggactgcttcaggctgattgaaaaggcccagcaggctccagaagggcagccacgtctggaccagggctcaggtgccagtgcggaggacgctgctgtccaggaggagcgggatgccggggttctgtccagggtctgcggccttctccggcagctgcacacggcctacagtggcctggtctccagcctccagggcctgcccgccgagctccagcagccagtggggcgggcgcggcacagcctctgtgagctctatggcatcgtggcctcagctggctctgtagaggagctgcccgcagagcggctggtgcagagccgcgagggtgtgcaccaggcttggcaggggttagagcagctgctggagggcctacagcacaatcccccgctcagctggctggtagggcccttcgccttgcccgctggcgggcagtagctgtaggagcctgcaggcccggcgcggggtcgccctgctctgtccagggaggagctgcctcagaactttctccccgcccccaaacctggatcggttccctaaagccctagacctttggggctgcagctggctgagcgccgaggggctgcggaggcagtgaccttcttaactgagccaccccacgccctgctccgggcctgcctgcatctcccacctcctccccagcgctgcctgcccctctcggagcctggggtcactcagaccaccagccaagagccttcccttgaagtccccaagcaagcactgcaattaggaaagagaaaaagcagcgtgcccagcctggaagggcatctgtttgccccgctagcaacccttttatatctagcagggctcttccagtcctgcagcacgggcccccagctatcagcggtgcaggcagtgctgtggcatcccaggctccgggcagctccgttctcatgctgaaagtgggtctccggccttagcacacacaccttgagggtcttaagaaccacattccctcatagtagaaagtactagaaaaagcgacactgccatcatcatcccaaggcaggctgctactgcctttgctgacccccggggtggcctcacggtggggacaaagctgccaggagccacagcagccacagctggggctttgcaccagcctggcttgagactgagcagtttgcagggggtggggggtgcaaaaaacaagcaaacaggctgctgctgcctccagctgcccaccacaggcctgccccaggcacctggggctctgaggcccctggggaggctgggcccagcagctgcccctggagaacacagacaaaggacttccccgcagggaactgtgccctatggagggatcagacagggctgggaacagccacagaggctgcgtgcctatggcacagcccttcctccgccgcacactccccctgggtcctcaggcccacccaagcgccgggctgcagaggaagcggggctggggaggctgcaggcatcagagacactggtggtggcggacccggccgccgggccccgtgctctcaggctagcccaggtcgtggaggctggcaggctcaggtcgggtgtgagacgtgccgtggctgcgctcagtccagcggggaggagccgttcagcccggcctccccaggaagccatatccccactcacccggtaagagaaccttgtcgtcccctttccatgctctcctaggacacgagcccaggaaccccagacccagggggaggaaagggtggaggggccccaggggtcaccatgtgcaccaggggcccgtgaaggggccgggggcattcaagctcagcctcttgaacccgggggaaacctgggcacgggcaaaggactgccctcaggggaaccgggcccttgaaaaaggggaacggggtccaggaagccctttcccaagccctttttccctcagccccgaaaaacccatggggccatttcggaagggctagggatggcccagaacccaggccccattttgccggaaaattaaggggccccagtggacc

SEQ ID NO: 367464 - DNA, 1116 bp, Homo Sapiens
gcacactccccctgggtcctcaggcccacccaagcgccgggctgcagaggaagcggggctggggaggctgcaggcatcagagacactggtggtggcggacccggccgccgggccccgtgctctcaggctagcccaggtcgtggaggctggcaggctcaggtcgggtgtgagacgtgccgtggctgcgctcagtccagcggggaggagccgttcagcccggcctccccaggaagccatatccccactcacccggtaagagaaccttgtcgtcccctttccatgctctcctaggacacgagcccaggaaccccagacccagggggaggaagggtggaggggccccaggggtcaccatgtgcaccaggggccgtgaggggccggggcattcagctcagctctgaaccggggaagctggcacggcaaggactgcctcaggtgacgggccgtgagaggggacgggtcaggagccttcccaagccttctcctcagcccgacacccatggccatcggaggctaggatgccagacacagccatttgcagaaatcaggcacagtgactgcagctcacgtccagccaaccaagcatggggccgcagctcaggaagtcccttcccgccacaccacagcctaattcttactgggacggaggcaactcgggctaccctggggcaggacgacaaaacacgagacgcccctgtgggaagaggcacttcggagcacggggtgtacttggcttgggaaccgtgcccacctgtacagccccccttatgcctgagtggaaggaaagatgaacccccccacggtgggaaggggaaaccttgttccaaatactcacaaccgcgccgtataggctgaaatgagccttgggggtgaaggcccagtgcttgggcccccttaaagcggactaggcttcccgtggaaacgcctgggtagaaccccctgggtctggttgcgggtagcgcctgattcctatagggtaaaaggccctgtgactctctaatagcccctgccaaggaaataagagccgccgacgatgaagcccacctgctcccttctcacctcactcgagttaacaacttgtcatacacacgacttcacgtgctagtgaccacaccg

SEQ ID NO: 367465 - DNA, 867 bp, Homo Sapiens
cgccaccgcccagctgcccaggagcccagccaggactggccatactgccaccgcacacgtgcacacacgccaacaggcatctgccatgctggcatctctataagggctccagtccagagaccctgggccattgaacttgctcctcaggcagaggctgagtccgcacatcacctccaggccctcagaacacctgccccagccccaccatgctcatggcgtccaccacttccgctgtgcctgggcatccctctctgcccagcctgcccagcaacagcagccaggagaggccactggacacccgggacccgctgctagcccgggcggagctggcgctgctctccatagtctttgtggctgtggccctgagcaatggcctggtgctggctggccctagctcggcggggcctggcggggccactgggcacccatacacgtcttcattggccacttgtgcctggccgacctggccgtggctctgttccaagtgctgccccagctggcctggaaggccaccgaccgcttccgtgggccagatgccctgtgtcgggccgtgaagtatctgcagatggtgggcatgtatgcctcctcctacatgatcctggccatgacgctggaccgccaccgtgccatctgccgtcccatgctggcgtaccgccatggaaagtggggctcactggaaccggccggtgctagtggcttgggccttctcgctcctttctcagcctgccccagctcttcatcttcgcccagcgcaacgtggaaggtggcagcggggtcactgacctgctgggcctgctatgcggagcccctggggccgtcggacctatgtcacctggattgccctgattggtgtcaggggccctaccg

SEQ ID NO: 367466 - DNA, 1219 bp, Homo Sapiens
  misc_feature (634)..(657): n is a, c, g, or t
  misc_feature (659)..(663): n is a, c, g, or t
  misc_feature (665)..(665): n is a, c, g, or t
  misc_feature (667)..(668): n is a, c, g, or t
  misc_feature (670)..(671): n is a, c, g, or t
  misc_feature (674)..(675): n is a, c, g, or t
  misc_feature (677)..(677): n is a, c, g, or t
  misc_feature (680)..(682): n is a, c, g, or t
  misc_feature (688)..(688): n is a, c, g, or t
  misc_feature (690)..(690): n is a, c, g, or t
  misc_feature (1180)..(1180): n is a, c, g, or t
ggtccggattccgggatagacgcccctcccagcgttcctggccttctgaattccatacagcctctacagccgtcccgcgttcaagacttgagcggagcccgatattctccctgaccttagcgttctggactctgccccaatcgggtccagagaccacaccactaaccatccccaactccatggggttcgagactccatcttggtagttctgtgcctccccccagaccccgcccctggggaaatagcctcacggggttggctgttccagactcaggttccagaacagccctcggcctccgaggctccccgcctccactctagttctagatgagtgggaggcgtgcccccctcctccagtacgtcccgctgctgtgctctggggatttctgggatatatggaggattctttccccagaggctcccaatcagcttttgttctagacttccccatcccgaagccatcacttctccccgcagcccgcctgccgtgcatggctcctgtctggctcggacccaccccaactctccccagtgcctgccactctctgggactctcctcctcccctcctcttcccttagcctctcccacccggccacagctgctggagaataaatttgggatgctgatgctgannnnnnnnnnnnnnnnnnnnnnnngnnnnncncnncnncannanggnnncccggngncgaaggatcacctcaaggggaccctgctttcccgaaaccaggctctcttgggaaggggggcctacaataagcaaccggactggtagtctaagcccgccggcccccgggttttccactcctcgggaggggggcccatttgttaggcataggaaaccttttttgtgagggggccgtcacttctttgtgggctgggccttttcgttggtaccaacgtctcccccccgcacgattttaaaaactcttttacggttacatccacaaaatttgctacgaggcaataaacctgtgttagagcccacccgcctcctcttttttgtgtcgctttctagacgatcttccctttactgccgttttgcctaccttccccatccctatttctgcacattccctctttcttgcttgaaattacaagtgtgtcacaacctatacgatcctcagtgtcgcgtgagcccttccctcggggtggccctccgggcaaccccaccacgtngggttgggcataccattcaagcccgttggcccgcctata

SEQ ID NO: 367467 - DNA, 503 bp, Homo Sapiens
  misc_feature (24)..(24): n is a, c, g, or t
  misc_feature (53)..(53): n is a, c, g, or t
aacaccccaaagttccagccctcnaaaaggcagcagaatgccctttgggaaanttttttaaagtaaattgaagttatatagaagtttggtaagaagaagcagttgtttctctcttttctccctcatttcatggaggtgttaatgatcatggctggccgtgatgtacacatgggctgattttcattttttcagtttcatagctgagaaattcagctttgttttagttgaatcatcatattggaaagcagacattgaaagttttcttttctatctttgttatgaatgtgctatggccccttttggagacttctattgggtaatattctatgtgagagaaggaaacttggtattaaatgttgtggaaaataataatgatgataataataaagtatatgctgcaatggtgtactggccaatcagattgcttgggagaagaaaagtctatgcaaatccaacgataaaaaatttaattgcttatcgaataaaacaggactgtgccaata

SEQ ID NO: 367468 - DNA, 798 bp, Homo Sapiens
ctccttccaagaagagcagcaaagctgaagtagcagcaacagcaccagcagcaacagcaaaaaacaaacatgagtgtgaagggcatggctatagccttggctgtgatattgtgtgctacagttgttcaaggcttccccatgttcaaaagaggacgctgtctttgcataggccctggggtaaaagcagtgaaagtggcagatattgagaaagcctccataatgtacccaagtaacaactgtgacaaaatagaagtgattattaccctgaaagaaaataaaggacaacgatgcctaaatcccaaatcgaagcaagcaaggcttataatcaaaaaagttgaaagaaagaatttttaaaaatatcaaaacatatgaagtcctggaaaagggcatctgaaaaacctagaacaagtttaactgtgactactgaaatgacaagaattctacagtaggaaactgagacttttctatggttctgtgactttcaacttttgtacagttatgtgaaggatgaaaggtgggtgaaaggaccaaaaacagaaatacagtcttcctgaatgaatgacaatcagaattccactgcccaaagggagtccaacaattaaatggatttctaggaaaaagctaccttaaagaaaggctggttaccatcggagtttacaaagtgctttcacgttcttacttgctgtattatacattcatgcatttctaggctagagaaccttctagattgatgccttacaactattctgttgtgactatgagaacatttctgtctctagaagttatctgtctggatcg

SEQ ID NO: 367469 - DNA, 890 bp, Homo Sapiens
  misc_feature (846)..(846): n is a, c, g, or t
gggatcttgagactcgctaagcgtcccagccgcatccctcccgcagcgacggcggcccgggacccgcgggctgtgaaccatgaacacccgcaatagagtggtgaactccgtggctcgtgcagcctccctctgcctcccgcccgacccgggatccccaggacccttctgggcggcaaggggagctgagccccgtggaagaccagagagagggtttggaggcagcccctaagggcccttcgcgggagagcgtcgtgcacgcgggccagaggcgcacaatgtgacatacaccttgatagcaccaaatataaaccgtgagaaatgagatacaaagaattgcggagcaggagctggccaaacctggagaagtggaagtgagcagaacagagctaagaccggttcacctggtgcccagacggctaggtggaagccagtcagaaactgaagtcagacagaaacaacaactccagctgatgcaatccaaaatacaagcaaaaggctaaaaagagaagaaatctgtcacgaatcaagaaggaagctgaagaagcttgaactccaaaaaatgaaggcaattcagagagagacgagccataaactggagcagaaaacaagacttccccaaacccttagaagagaagcatttagagagcctcagcaataacaaaccgctcgagtccttgagcaaacggaacaccgaattcgcccagacagacacggcctggtcaaaagtgctggttggtgggccctacaatccttcaacatggggcccagaaacctgggggttaaaggagcattcccgtcagagggcgggatgcacccgggtgagccccgccattataagagagtagnttctgtggtggggcgccgcccttccgcccttccctaaaaaaatc

SEQ ID NO: 367470 - DNA, 865 bp, Homo Sapiens
ccggctgtgtgagaggtcagcagaggggcggtctgcggggacaacaatggcggggttctgggtcgggacagcaccgctggtcgctgccggacggcgtgggcggtggccgccgcagcagctgatgctgagcgcggcgctgcggaccctgaagcatgttctgtactattcaagacagtgcttaatggtgtcccgtaatcttggttcagtgggatatgatcctaatgaaaaaacttttgataaaattcttgttgctaatagaggagaaattgcatgtcgggttattagaacttgcaagaagatgggcattaagacagttgccatccacagtgatgttgatgctagttctgttcatgtgaaaatggcggatgaggctgtctgtgttggcccagctcccaccagtaaaagctacctcaacatggatgccatcatggaagccattaagaaaaccagggcccaagctgtacatccaggttatggattcctttcagaaaacaaagaatttgccagatgtttggcagcagaagatgtcgttttcattggacctgacacacatgctattcaagccatgggcgacaagattgaaagcaaattattagctaagaaagcagaggttaaatacaatccctggctttgatggagtagtcaaggatgcagaagaagctgtcagaattgcaagggaaattggataccctgtcatgatcaaggcctcagcaggtggtggtgggaaaggcatgcgaaattgcttgggatgatgaagaagaccagggatggttatagaattgtcatctcaaggaagctgacttcatagttaggcgatgatagactactagtagaacacattattgataatcctcgtcatatagac

SEQ ID NO: 367471 - DNA, 1059 bp, Homo Sapiens
cgcccggaggaccagtcctgaaggacttgtacctcagctggggaaccgtcctagaaagagatggccactatgctgtagctgccaaatgctatttaggggccacttgtgcttatgatgcagccaaagtttggccaaaaagggggatgcggcatcacttagaacggctgcagagttggctgccatcgtaggagaggatgagttgtctgcttccctggctctcagatgtgcccaagagctgcttctggccaacaactgggtgggagcccaggaagccctgcagctgcatgaaagtctacagggtcagagattggtgttttgccttctggagctactgtccaggcatctggaggaaaagcagctttcagagggcaaaagctcctcctcttaccacacttggaacacgggcaccgaagggcctttcgtggagagggtgactgcagtgtggaagagcatcttcagccttgacacccctgagcagtatcaggaagcctttcagaagctgcagaacatcaagtacccatctgctacaaataacacacctgcaaacagctcctgcttcacatttgccatgacttgaccctggcagtgctgagccaacagatggctccctgggacgaggctgtgcaaggcgctccttcgggcggtggtccggagctatgactcagggagcttcaccatcatgcaggaaagtgtactcagcctttctccctgatggctgtgaccacctaagagacaagttgggggaccatcaatcccctgccacaccagctttcaaaagtttggaggccttttttctttatgggcgtctgtatgaattctggtggtctctctccagaccttgcccaaattccagtgtctgggtaagggctggtcacagaacactctctgttgagccaagccagcagttagacactgccagcactgaagaaacggaccctgaaacttctcagccagagccaaacaggccttcagaactagacttgagactcacagaagaaggtgagcgaatgttgagtacttttaaggagctcttttcagaaaagcatgccagtcttccaa

SEQ ID NO: 367472 - DNA, 532 bp, Homo Sapiens
cagagcaaatgttttattaacagatttttctccagtagtcttgaaaatctcccctgggggagaaaaactggcaaaagggggcctgagggttgttggaagaaatgaaaagtacataggatgctattttgaagaactgatttgtcagaagccactttattttaacaataatgtgactgcacctggcacatgagacaggctctgggcctgtttctcaatgttgtgaaaagcaggacagtcagttcccatggagtagattacagcgtgttggacaaggacattcccccgcgtgaaggcacactccatggagccagtggggccaccattcacggtgtgcaagctgtggccttggagagaacatgggcagggcttccccagcctctactataccccagctttactccattgatcacaacaatggcacttttttcttttggtgcaatatttccattttccaattgagcctagactttgattttataaaaggaaaagagaatatctatatatgtaaatattctgcatgtgagtgtatgtg

SEQ ID NO: 367473 - DNA, 1069 bp, Homo Sapiens
ggaattcccgggatgccctcctgccggctcagctgctggaggtcctcagcacacccacgcccttcatcattggggtcaacgcggccttccaggcagagacccaggagctgctcgatgtgattgttgctgatctggatggagggacggtcaccattcctgagtgtgtgcacattccacccttgccagagccactgcagagtcagacgcacagtgtgctgagcatggtcctggacccggagctggagttggctgacctcgccttccctccgcccacgacatccacctcctccctgaagatgcaggacaaggagctgcgcgcggtcttcctgcggctgttcgctcagctgctgcagggctatcgctggtgcctgcacgtcgtgcgcatccacccggagcctgtcatccgcttccataaggcagccttcctgggccagcgtgggctggtagaggacgatttcctgatgaaggtgctggagggcatggcctttgctggctttgtgtcagagcgtggggtcccataccgccctacggacctgttcgatgagctggtggcccacgaggtggcaaggatgcgggcggatgagaaccacccccagcgtgtcctgcgtcacgtccaggaactggcagagcagctctacaagaacgagaacccgtacccagccgtggcgatgcacaaggtacagaggcccggtgagagcagccacctgcgacgggtgccccgacccttcccccggctggatgagggcaccgtgcagtggatcgtggaccaggctgcagccaagatgcagggtgcacccccagctgtgaaggccgagaggaggaccaccgtgccctcagggccccccatgactgccatactggagccggtgcagtgggctgcatgtcaacagcgcccggcgggttggaagtttgtgcgcactgcatctcctaacggggtttgagggggaaaatggcttgaggcccaaaaactgctcccacccccggttggagggcccctttaaggggggaaagcttccccccccgctgcctcgccccaggagctgcaccctgcatgtgacaccaaaaaacc

SEQ ID NO: 367474 - DNA, 1096 bp, Homo Sapiens
  misc_feature (59)..(84): n is a, c, g, or t
gtggtaccggtccggaattcccgggatgctggctgggaagatggcggcgggagcctggnnnnnnnnnnnnnnnnnnnnnnnnnnggagcgaaccaggggtgtccggggtgcgcggtccagggccggggccgggccatgagcgcgccgtcctcgagtccccgagccgcggagcccgcccgcgcccctcgggccgccccgcgtccctcgccatggcgcggctcgcggactacttcgtgctggtggcgttcgggccgcacccgcgcgggagtggggaaggccagggccagattctgcagcgcttcccagagaaggactgggaggacaacccattcccccagggcatcgagctgttttgccagcccagcgggtggcagctgtgtcccgagaggaatccaccgaccttctttgttgctgtcctcaccgacatcaactccgagcgccactactgcgcctgcttgaccttctgggagccagcggagccttcacaggaaacgacgcgcgtggaggatgccacagagagggaggaagagggggatgagggaggccagacccacctgtctcccacagcacctgccccatctgcccagctgtttgcaccgaagacgctggtactggtgtcgcgactcgaccacacggaggtgttcaggaacagccttggcctcatctatgccatccacgtggagggcctgaatgtgtgcctggagaacgtgattgggaacctgctgacgtgcactgtgcccctggctgggggctcgcagaggacgatctctttggggggctggtgacccgcaggtcatccagactcaactggccaactcgctgcccgtcacaccgctgacaaccgtggccctgcttcttccgccagctaggcatcaccaaccggcttggctttggtccggggcccccctctccggaccacaaggtccccctcccggtccccggagtttccagcggctttcccaattgcctttagggggccttcctggccctgccgggattccccccccaaatacagcttctccccaaatgggcccattccggggccggtttcaattgtgccgggaggtccttccccaacccccctgtgcctcttccc

SEQ ID NO: 367475 - DNA, 1328 bp, Homo Sapiens
  misc_feature (1247)..(1283): n is a, c, g, or t
gcgcacaggcgccagccaggcggtgcagcgtggccccggaaagcacaaagccaccgccgcccgcgtaggccggataggcgggcaggccgtacacggcctcggggatgtagtacttgctagcccgcgtgcggatgggccgcgcatgcacaattacgtcaccagcaagcaggtcttgcgccgggtcccgcggcgccaggaactccaggagatttcccacgttcacgaacacatctgcgtcgcccttaaaaacgaagcgcacgtcggggcagaaagctgaggcccaggctagaaagtggatctccttgagcgttaggttaaaaaaggtgtcgtcgaaggcccagagcaggatgtccgcatacgcaaggctctcggcccgcagcagggcgcgccagtgggttcgcgcgccctccccaacttcgtcggccccgcccgagcctgcgcccctgggcacgcccagcaagaacacgcggcgcaccagcgccccctgcacgcgaccctccgcgccccacgtctggcgcacggccttggcgccgctcgaagtcctctgccaccgacttgacagcaataagcaggtccgggcggccaccgggtgcgccgtcgccgcggcacttgtgcggctggttaatgagcagtggaaaccgccgctggtccttggcgcgcaaatagcgggcgaagtcaaagggtcccgtaggcgtggccggcgccggtgtgtccccttcgtaggccggcggggctgcacccgcgtctggtaactggaacgcgcggggtccggggctgggcctcggtgccgccctccctcgccctcgcggcgcgctcgccgtcggggccgcgccgtcgcgctgcgcatagagtaagaggcccagggaggcgccaaggagcagcgtgagcaatgcgtccctgcgtaggcgcagcctcctcctcatctccgcgcggcctgcgccctccctcccctgtaagggtcgcagtcggcagcagggggcagcgagccccgccctccccagctgagggggcgggaggccacgccccggggggggctccagcgaccgacggttgagccccttgcgttgttctcctcctcccggccgtgtcgcaccgccgggaccggcagcgctcggccctcggaagtggcgcagccccggacgcctggcctccggggctcagcgcagggtccgaggggccgccatggaccgggcccgagccaaatgcccgctctcgacgaattcgagctcggccgatttggcctgatnnnnnnnnnnnnnnnnnnnnnnnnnnnnnnnnnnnnncgccgccaccgcgtaagctccagttcgccctatatagtctataca

SEQ ID NO: 367476 - DNA, 1391 bp, Homo Sapiens
ggaaacacaacctatttgtgggagtttcttttagatctacttcaagataaaaatacttgtcccaggtatattaaatggactcagagagaaaaaggcatattcaagctggtggattcaaaggctgtctctaagctttggggaaagcataagaacaaaccagacatgaactatgaaaccatgggacgagctttgagatactactaccaaaggggaattcttgcaaaggttgaaggacagaggcttgtatatcagttcaaggatatgccgaaaaacatagtggtcatagatgatgacaaaagtgaaacctgtaatgaagatttagcaggaactactgatgaaaaatcattagaacgagtgtcactgtctgcagaaagtctcctgaaagcaccatcctctgttcgcagtggaaaaaattcatcccctataaactgctccagagcagagaagggtgtagctagagttgtgaatatcacttcccctgggcacgatgcttcatccaggtctcctactaccactgcatctgtgtcagcaacagcagctccaagttcgtgtggcaatgcaggtacctgttgtaatgacatcattgggtcagaaaatttcaactgtggcagttcagtcagttaatgcaggtgcaccattaataaccagcactagtccaacaacagcgacctctccaaaggtagtcattcagacaatccctactgtgatgccagcttctactgaaaatggagacaaaatcaccatgcagcctgccaaaattattaccatcccagctacacagcttgcacagtgtcaactgcagacaaagtcaaatctgactggatcaggaagcattaacattgttggaaccccattggctgtgagagcacttacccctgtttcaatagcccatggtacacctgtaatgagactatcaatgcctactcagcaggcatctggccagactcctcctcgagttatcagtgcagtcataaaggggccagaggttaaatcggaagcagtggcaaaaaagcaagaacatgatgtgaaaactttgcagctagtagaagaaaaaccagcagatggaaataagacagtgacccacgtaatggttgtcagtgcgccttcagctattgcccttcctgtaactatgaaaacagaaagactagtgacatgtgaaaaaataaaatagcagctccaccatggacttcaggctgttagtggcagtaactgacataaacatttgcaaaggaagccatcaagaaaagtcaaagaagactttaaaacattttttatggttattccaaaaccattttgaccttactggaaataaattaacctatccccctgtttcggggggaaaagaacctccttatggggaatgttgaagaaaaactgccctctttacaaga

SEQ ID NO: 367477 - DNA, 878 bp, Homo Sapiens
ccattcaatagctcctccgtgctcaattgccgccgccctaattcagctggaatctcaccatatcgacaatctgaccaagtctccatcaaatagatggctcgttcctcaataagatctatgatacctttaagattaccctccaaagcccatgggtatctgcataaacgctgcattatgatttagtttagacctcatttgctgcagggccctggctgggttggagcccattcggtccaatttgttaataaaagttagaaacggaacgttgtagcgcttcatctgacgattgacagtcatggtctggcactgtacccctccaacagcacagagaacaaggactgcaccatccaacactctcagggccctttccacttctattgtgaagtccacatgcccaggagtatctataatgttaatattgacatctttccacatggtgtaagtggctgctgactgaatagtgattcctctttgtctctctagttccatggaatccatgacagcaccaactccatctttacctttcacctcatgcatctttgcaattctgccagtgtagtaaaggactcgttctgttaatgtagttttcccagaatcaatgtgagctgagattccaatatttcgtattttttcattaggaatcacccctgatgaagaccatcggcaggccttccaattaacctgcttcctctgccagcctagggaggcgggggcccttccgcgccccagagccgcgacggctgcggctcccaggagtctcatggcaagcgcagagcacgcgtcaaagtcccgtggcgccgggtgggttcagctgccggtaacgcaccgggaagcggtcaaagtcacgccggcagccaatgttgtaagagcactccgct

SEQ ID NO: 367478 - DNA, 1330 bp, Homo Sapiens
  misc_feature (1248)..(1248): n is a, c, g, or t
ccgggggaaagagggtggcgtcccggggaagcccgcagccgccgccgatgtcgctgggactcggaagtgccgaaagaggggtgttgggaactcgcggcgcgcgtgaacgttgccgtcgccgccgcccgggacagcccggagaaactctcagcgtaggcatcgggaaccttcgtgccaaggagccatgctgccccgatgggaactggcactttacctacttgcctcactaggcttccacttctattccttctatgaagtttacaaagtctccagagaacacgaagaggagctggaccaggaatttgagctggagactgacactttatttggaggattaaagaaggatgcgaccgactttgagtggagcttctggatggaatgggggaagcagtggctggtgtggcttctccttggccacatggtagtgtctcaaatggccacactgctggcaagaaagcacagaccctggattctcatgctctatgggatgtgggcctgctggtgtgtgctggggacccctggtgtggctatggttttgctccataccaccatctctttctgcgtggcccagttccggtctcagctcctgacgtggctctgttctctcctcctcctctccacactgaggctgcagggtgtggaagaagttaagagaaggtggtacaagacagaaaacgagtactacctgctgcagttcacgctgaccgtacgctgcctctactacaccaacttcagcctggagctctgctggcagcagctgcctgctgcatcgacctcctactcctttccctggatgctggcctatgtcttttattatccagtcttacacaatgggcccatcctcagcttctcggagttcatcaaacagatgcagcagcaggagcatgactccctgaaggccagcctgtgtgtcctggccctggggctgggccgccttctttgctggtggtggctggccgagctgatggctcacctgatgtacatgcatgccatctacagcagcatccccctcctggagactgtctcttgttggaccttaggaggactggcgttagcccaggtgctctttttctacgtgaagtacttggtgctctttggcgtgcctgctctgctcatgcgcctggatggactcactccacccgccctcccccgctgcgtgagcaccatgttcagtttcacggggatgttgaagggatttttgatgttgggactgcataatttcttaatcagggatgtgtacattcccantggggcgggttccccagcatgggcctggctgggggacactgttttttccaccgcgaatgaacatttggcattttgtggagct

SEQ ID NO: 367479 - DNA, 888 bp, Homo Sapiens
cgggctggaactggcaggcaccgcgagcccctaagcacccgaacaagctgagtgtgcaggactgagtccccaccacacccacaccacagccgctgaatgaggcttccaggcgtccgctcgactggcccgcagagccccgccgtgggtccgcctgctgattggctgcccccagccagtgctgcttacctgccacggactgcgctgccatggggcaaccctgggaacggcagcgccttcttgctggcacccaatatgaagccatgcgccggaccacgactgtcacgcagcaaagggcacgaggtgtgggtggtgggcatgggcatcgtcatgtctctcatcgtcctggccatcgtgtttggcaatgtgctggtcatcacgagccgatttgccagagttcgagcgtctgcagacggtcaccaactacttcatcacttcactggcctgtgctgatctggtcatgggcctagcagtggtgccctttggggccgcccatattcttattgaaaaatgtggacttttggcaacttctggtgcgagttttggacttccattgatgtgctgtgcgtcacggccagcattgagaccctgtgcgtgatcgcagtggatcgctactttgccattacttcacctttcaagtaccagagcctagctgaccaagaataaggcccgggtgatcattctgatggtgtggatagtgtcaggccttacctccttcttgcccattcagatgcactggtacagggccacccaccaggaagccatcaacgtgctaatgccaattgaaaacctgcatgtgacttcttcacgaaaccaagcctatgccattgcctcttccatcgtgtcctctacggtaccctgggtgatcatgagtcttgactaatccaaggg

SEQ ID NO: 367480 - DNA, 527 bp, Homo Sapiens
ggacagtcagcccttgtaggtagctcctacatgagtgccctggaagttgggggccttgtaggcagcatcgcagctggctacctgtcagaccgggccatggcaaaggcgggactgtccaactacgggaaccctcgccatggcctgttgctgttcatgatggctggcatgacagtgtccatgtacctcttccgggtaacagtgaccagtgactcccccaaggatgttgctttctggactctggctcttcaccctctcgcggagctcacaggctttacagagcatgagctctggatcctggtattgggagctgtatttggtttctcctcgtatggccccattgccctgtttggagtcataagccaacgagagttgcccctcccaacttgtgtggcacctcccacgccattgtgggactcatggccaatgtgggcggctttctggctgggctgcccttcagcaccattgccaagcactacagttggagcacagccttctgggtggctgaagtgatttgtgcggccagcacg

SEQ ID NO: 367481 - DNA, 801 bp, Homo Sapiens
cgcgcgcctctgccgtttgcagcccgcggcgctttcccctccgcggttcctccccgaggccgcccccagtgcccaagcttccgcggctccgccgaccacggtgccgcgccgactgggaactcgccacgggcgtagtcccctgcaaggcctgggggccggcgaggccgcagaggcgggatgggcctgagcccgggcgccgagggggagtacgcgctccgcctccctaggattcccccagacccctcccgcaaacccgcctcgcgaaaccgacggtaccgggccccaaggaccagccgcctgcgctcagacgttcagctgtgccccactcaggtctaaatagcatttccccccttgaattagaagaatccgtgggattcgcagcgttggtccagctcccagccaagcagcctccgccgggcacattagaacagggcagaagcatccagcaaggggagaaggctgtagttagcttggagaccacacccagccagaaagcagactggagttcaattccaaagcctgagaatgaaggcaagttaataaagcaagcagctgagggaaaaccaagacccagacctggagacctgattgagatttttcgaattggctatgagcactgggccatctatgtagaagatgattgcgtggtccatctggctcccccaagtgaggagtttgaggtgggcagcattacttccatctttagcaatcgggccgtggtgaaatacagtcgtctggaggatgtgctgcatggctgctcctggaaggtcaataacaagctagatgggacgtacctgcccc

SEQ ID NO: 367482 - DNA, 1318 bp, Homo Sapiens
agcacagtcctctgagctgcacggagactcgcaggccccggaactgtcgcccttccaggatgtggctccctgctctggtcctggccactctcgctgcttccgcggcttgggcagggcatccgtcctcgccacctgtggtggacaccgtgcatggcaaagtgctggggaagttcgtcagcttagaaggatttgcacagcctgtggccattttcctgggaatcccttttgccaagccgcctcttggacccctgaggtttactccaccgcagcctgcagaaccatggagctttgtgaagaatgccacctcgtaccctcctatgtgcacccaagatcccaaggcggggcagttactctcagagctatttacaaaccgaaaggagaacattcctctcaagctttctgaagactgtctttacctcaatatttacactcctgctgacttgaccaagaaaaacaggctgccggtgatggtgtggatccacggaggggggctgatggtgggtgcggcatcaacctatgatgggctggcccttgctgcccatgaaaacgtggtggtggtgaccattcaatatcgcctgggcatctggggattcttcagcacaggggatgaacacagccgggggaactggaggtcacctggaccaggtggctgccctgcgctgggtccaggacaacattgccagctttggagggaaaccaggctctgtgaccatctttggagagtcacgcgggaggaagaaagtgtctctgatctagttttgtctccattggccacagaaactcttccaccgggccatttcttgagaagtggcgtggccctcacttcttgttctggtgaagaaaggtgatgtcaagcccttggctgagcaaattgctatcactgctgggtgcaaaaccaccacctctgctgtcatggttcactgcctgcgacagaagacggaagaggagctcttggagacgacattgaaaatgaaattcttatctctggacttacagggagaccccagagagagtcaaccccttctgggcactgtgattgatgggatgctgctgctgaaaacacctgaagagcttcaagctgaaaggaatttccacactgtcccctacatggtcggaattaacaagcaggagtttggctggttgattccaatgcagttgatgagctatccactctccgaagggcaactggaccagaagacagccatgtcactcctgtgggaagtcctatccccttgtttgcattgctaaggaactgattccagaagccactgagaaatacttaggagggaacagacgacactgtcaaaaagaaagaccg

SEQ ID NO: 367483 - DNA, 788 bp, Homo Sapiens
  misc_feature (739)..(740): n is a, c, g, or t
  misc_feature (752)..(752): n is a, c, g, or t
  misc_feature (765)..(765): n is a, c, g, or t
  misc_feature (776)..(776): n is a, c, g, or t
ggccagccgaaagtgtgccccgtccagccccccagggagcccaggggttggcgggcactgccaaacagcctcacatccccgaactcctcactcacagcaaggcccccatcaggccctgggcccacccagcaggggccctccagacccagcatggaggctggggccaggggctcccaagcaggacccaacgagaagctgtgcacagccccaggcaagtagtccgtcaccaggaggcggttgagggcatccacagccagccctcggggagacaggaaggtgcccactgtcacccagtggcccccggggtcccgggctgtgtgctggagtgcatggacagccccatggatgggatcgctgaccaccacaagccctgacgctgtcacagccacgtcctctggaacgaaggccccgctccccggagtgcggcagggcaggaggcagatggggcgtccctccagatctagcacgtggacacagggtgcagccccggccgtgaggaagagcaggccatcgggggagcagtgcaggccccggggccctcccacagcccctgcgggcacccggatccacccaagcagccgactgccggagcccgtgagtctccagtggtccagtgtgagtgcagacactgagcagcagtccagtcagtccgatcacgttcagctctctgcactgtcacgctgggctgcctgtctcctggctgtcggctgtgctaatcgactcggcgtcactgcttttnnttacaagcccanggtggtttctaanagttgtcagcncaaattaggcca

SEQ ID NO: 367484 - DNA, 786 bp, Homo Sapiens
  misc_feature (148)..(252): n is a, c, g, or t
cggagccgcgcggtcgaggagggagcgcgggacgccgagcccacgcgcgcctgccgggacaagtggagacgaggccggcgagcggacgccccgaggtggcgaaggagctgtggccgggtccccttcttatccagcccgagacactgcnnnnnnnnnnnnnnnnnnnnnnnnnnnnnnnnnnnnnnnnnnnnnnnnnnnnnnnnnnnnnnnnnnnnnnnnnnnnnnnnnnnnnnnnnnnnnnnnnnnnnnnnntactggtagttaactctcaaggagaaatttcacggttgagcaccgaaaagaaagtggtcatgaacaggaagtatcaacaattatcttaaattgggtcaagaagggaagtatcgcgtctaccacaatcaatactccactaattcatttgctttgaataagcaccagcacagagaagaccatgataagagaaggcatcttgcacataagttctgtctgactccagcaggagagttcaaatggaacggttctgtccatgggtccaaagttcttaccatatctactctgagactgactatcacccaattagaaaacaacatcccttcatcctttcttcatcccaactgggcatcacatagggcaaattggatcaaggcagttcagatgtgtagcaaacccagagaatttgcattggctttagccattttggagtgtgcagttaaaccagttgtgatgctaccaatatggcgagaatctttaggacataccaggttacaccggatgacatcaattgaaagagaagaaaaggagaaagtc

SEQ ID NO: 367485 - DNA, 1180 bp, Homo Sapiens
ccaaacagaagaccccaaggcggagggccctggggctggactcctggcccccaggaggttgttctgagcttaccctgtggacggattggagggtggacctctttccccgcaagggtcaagagggagtgggggatggtgggaaggcaatctggccaggagaagctgcgcgggagactcccgccatccccagtcccaccatctcagccccgcggcctcttcctccctggagacagccaggatcccgggagtggcccaggatcccgggaaatgcaggggagggggtggcatctttcctcttcaggcgcgggcctggcccagaggcgacaggaagccaggacgccggggattgtctctcgcaaccgcagcccagccccagtccgggaggaagttctgccgggcgctctccgccggtgcctcactggttatagtgctatacaggaaacctggcagcgccggagccgcgcggtcgaggagggagcgcgggacgccgagcccacgcgcgcctgccgggacaagtggagacgaggccggcgagcggacgccccgaggttggcgaaggagctgtggccgggtccccttcttatccagcccgagacactgcgctccggtgggcgtccctgcgctgggaatccctctcggagtttttccaggcccggccgggttgctccgggaaaggccctgttgggggaggtgggcccggagctggcaggtctacaatccggttggaagggctcgcagttgggtgattcagggtgccaagtgaccatccccgcgaactgggaacgcccgcactagacaaccagccccagaccggcattcccagagcctgcaggcgggagggacagcagggactccgggacagcaaatccccgggggagaagggaagggggaaggcgggaccaggggaggcccaccctccttgggactccgctagcgaccagaccagagccccttcagacgcaggccttcctggctccggaccccggcttactgctccggtcctcgtcccaatgccccccaaggtcccaagaagaggcattcaggtacctacctcgccccgcccagacgcaagctacattgggtattgggtgacagcactcctgagcgtcgctgtccctattcgctgccgttgccagctccgattccgcgaaacctctccggcaccacctcggaagccccg

SEQ ID NO: 367486 - DNA, 954 bp, Homo Sapiens
gagtatggatattagtgatagtcttatcactatttttaaaataatatctttcccttagctgaccctaatactgaaggactgcagactttctgaagatgtaaacttaaaggagtttaaaacatgctgagtctgcctttaaattaactattagtaatacagtgtgaccacataatctgttaaagctatttagaataatagcttataatgtgttaaggcaacttgaataacagtgtagggttcacttcagtatagacttttccctgataactactttaaatgctatgttaccccaattttttcatgtactagaagacaagaatgttgttatgtaggattatgcagagtgaaggtgttctatacacatagaaaagcccaatgatgatcaatttgaaacttgagatcccaattttaaatactaccaaacatagtagacttcatctgtgaaatcaatgcccagagatcagttattcctgaagatcaaaataagaggagtcatttgaaatgggttgcatcatgtagtaggacttgttaatataagttccttttcattgaaccttccctctgtccccagatgagcattcctaggcagagaagaaacgtgccttgtttctggtaacagtacttcctctagaaccttatctctgttttatagaaaagcagagcatttagcctcccaataggcagttttatggctccaggatatatatagtggagtttttagaatggcacttccggtctgggaggcagtacttcataacctgttttttacttaaatgaaagatgacttacaaggaattgtctggaacatggctgacaggcatcatgctacagcatattgcagtgctattgccatttttaaatgtgcagcttccaataggctctttacagagctatttagaagggcattattttaaatatagttggagattacggaaaaaactattaggattccac

SEQ ID NO: 367487 - DNA, 484 bp, Homo Sapiens
  misc_feature (35)..(35): n is a, c, g, or t
tccatttgaaaaagggttggccaccatgttagtanggacctggttaaataataaggtccccttttccattgaaacccttcccctctgtcccccagatgaagcaatccctaggcagagaagaaacgtgcccttgtttcctggtaacagtacttccctcctagaaccttatctctgttttatagaaaagcagagcatttagcctcccaataggcagttttatggctcccaggatatatatagtggagtttttagaatggcacttccggtctgggaggcagtacttcataacctgttttttacttaaatgaaagatgacttacaaggaattgtctggaacatggctgacaggcatcatgctacagcatattgcagtgctattgccatttttaaatgtgcagcttccaataagctctttacagagctatttagaagggcattattttaaatatagttggagattacggaaaaaactattaggattcca

SEQ ID NO: 367488 - DNA, 2200 bp, Homo Sapiens
aggcctcccgtgcactcgtgcgacgctggcccgtggtggctgggtgcagcgcaccgagcgctgccgctgcccgacgccgcactgtgcagagcactcaccccactcgccagccacccagcgggccggggggcagcggcgcaagttgcagcgcatggtggccggtggcttggcggcgggtgagcagtgcgccggggacagcgtggcgcggtggtctgcgctcttgcaaaggaccacgcggtggcggaggcccggcccgcagctgggggtgcactcagaccagtcgagggccgcccactccggagggcaagtggggccgtggcaggcctccagtacaggtgggcgcggctgcgggcatgcgctgtcgtccagcgccttctcctccgcggcagagacgcggcgctggcacacgaccgagcggctgcgcacgcctgcatcgcagctgcggctgcagagcgaccagttccctacaacccagtctggagggcaaggctccgtgttgcaggcgcgctgccttttgggcagcttgctgtgggcactgcagtagtggggggcgaccgcggagctgtccagctggttgcggcactccaccgcctgcacctggctaccgcctgcacactgggccgagcacttggtccagggcgcatagtgccaggagtaggggggcagcgagtcacgggcgatgggggcattgaagcggtagcggagggcaggcagctcggtccgggccagcaccatgacgatgagagatgcattaatcgtcccagggcttcgaggctctggacctggtctggcccctgtcgcagttgaaaggtggtcccagctagaggcagacggtggggctggggggtcccaggcagcccctccagcagcagggactcctggtctcccttcagggccaagtgactgagagagaggttcagatcctggatgaagatgtggacggagcctttgggaatccagacgacatcctcgtacccggccccaggtgaggctgggctgaagacgccctcgatggtctcgcaggcacttgccgtcaccgccacacactctggcacttgtcctcccgcaggtcggaccccaggactcggtcgcagcccacgtgcttgcattcgccactgacgcaaatgtccaccgtgtctggacggcagggtgtcccgtccaccacggctgccgccctctccgtgtagaagttgaagccttccgctaggcacgtgagcgagcaggccttcacgccccctccccggtacgttttccacttgtagaatttcccacggaaagggatgctgtcaaattcagaacactgcacttctctgaagtcctgggagccagggggacagtcatccgtgttgcaggagcggtgccgccttctctcacccagacagtacttgcccccgatggttggcctggggctgtcgcagtgacggctagaagaggacacgccgccgccacaggtccggctgcagtcgccccatggagtccacggcccccaggctccgtccacaccctctgggcgcgacccaaaggggacacagacccgtttgtagcaccaccccttgtcgatggtgtgcgtctggcacagcgtgccctcggcggccgggatgctgttggtgatgcaccggttgctcttgctcagacaccacagctcgctgcagacctccccgtatttacactgacgcgatttgactccatgctgaaagcggcattgctcatctgcatcgtaggcttggcccggtgccactgtcgggtacacaaagtcctgtctggggggccggttgttcaggcagagccccaggcccgagtctagaaagctggtgatgtagtcacggctgcaggatgaccacacgaatgggttggtcttcatggtaatgtgggcagccatgagcttggctgggtcctgaccacgggccccacagctgtttcccacgccgtcatggttcatgccgaatctggggaaaggggtgtcggctctgccgggcgctgagggacccgcccagctcctcccctcctccccctcttgtgtgccctggcctcacgtgtgcccgatctcgtgggcaatggtgaacgctgtggccaggccaatgtcctcattgacgctgcagattctctcgcgctcacacattccgcccaccggggccaggcctagtgtccgcagggtttgttctgtagagcagagtcatagcgggaatcccggaatccgacc

SEQ ID NO: 367489 - DNA, 1021 bp, Homo Sapiens
  misc_feature (66)..(120): n is a, c, g, or t
  misc_feature (861)..(861): n is a, c, g, or t
  misc_feature (933)..(933): n is a, c, g, or t
  misc_feature (971)..(971): n is a, c, g, or t
  misc_feature (977)..(977): n is a, c, g, or t
cacgatgtctgcatgccggccggctcggcggtgaactccacgcactcggccggctcgggggtctcnnnnnnnnnnnnnnnnnnnnnnnnnnnnnnnnnnnnnnnnnnnnnnnnnnnnnnntagaggacgctgtcgtgcacgtcgggcagcaggacggacagcgcccacccggaggaaagcctgacagatgagacttcgcaaggtgagaactcccttcgctccacacgcagcggaggcagctgcagggcgccgaccttccctgcctcattgcgccccctcctcctccagatgcgctctggggggccctcccgatggctgtggggaggtcagggctggacaaagggaatccaaaaagcccacccggtgcactgagtaggtggcaccgacgggggaggggaaggcgggacacaccccaagacccctgcccctcattcccgtccctgcatagatcacccagcaaccaggacacccctccaggccaggactacagccaggactgtgtatgcagacgtggccgggcctggcggcctgccctaactggaaaggaggccaagcctcgcacctaaggctgggctggcacctccgctgagccagctctgggtctgcaggggttgtggggggctctctggcaactggaccatgagttcctgcaaccccttcctgtgctctccttgcctgggggagagtgaggagagactggctattctgctcacggtgtccttggtccccgacctctggatggccatgtctccgcccccccacggagtcaccacccagcctcacgaattcctggtcatcttgaaaaacccagtgcagtggtcaggaccccacaggatctcaggggctctgccagagcccggncgccagcggttcaggcccccaccaactgtggttcacggttgcacctccgttccccgggcatgggaggggccntggaccccctaacaaccagcttgtttggggcccttggnagggtnttgttggagggcttttggcaattgggcgcagagaggtttggggg

SEQ ID NO: 367490 - DNA, 1761 bp, Homo Sapiens
agtcatcttcatagctgactctagaggatacacggagggccagcgcaccgtaccatcatcatcgacgccaacgcctgcatctaccacctcatcctccgtaaggcctcggaactgggaatgacctcagcgggggacaagaacatcctcaccaccatggacttccccatcctgcatctggacgggattgaggaggactcctccaacatcctgggcttctccatgttcaacacgtcccaccccctctaccctgagtttgtccgcagcctcaacatgtcctggagggagaactgtgaagccagcacctacctgggccctgcgctgtcagccgccctgatgtttgacgccgtgcacgtggtggtgagcgctgtccgagagctgaaccgcagccaggagatcggtgtgaagcctctggcctgtacatcggccaacatttggccccacgggaccagcctcatgaactacctgcgcatggtagagtatgatgggctgaccgggcgggtcgagttcaacagcaaagggcagagaaccaactacaccctgcgcatcctagaaaagtcccggcagggccaccgtgagattggggtgtggtactctaaccgcaccctgggccatgaatgccaccaccctgggacatcaacctgttcgcagacacttgggccaacaagaccctgggtggtcacaaccatcctgggagaacccatacgtcatgcgccggcccaacttccaggccctgtcggggaacgaacgcttcgagggcttctgcgtggacatgctgcgggagctggccgagctgctgcgcttccgctaccgcctgcggttggtggaggatgggctgtacggggcgcccgagcccaacggctcctggacgggcatggttggcgagctcatcaaccggaaggcagacctggctgtggccgccttcaccatcacagctgagcgggagaaggtcatcgacttttccaagccctttatgaccctggggatcagcatcctctaccgagtgcacatgggccgcaagcctggctacttctccttcctggaccccttctcccctgctgtgtggctcttcatgcttcttgcctacctggctgtcagctgcgtcctgtttctggctgccaggctgagcccctatgagtggtataacccacacccatgcctgcgggcacgcccccacatcctggagaaccagtacacgctgggcaacagcctgtggtttcccgtggggggcttcatgcagcagggctcggagatcatgccccgggcgctgtccacgcgctgtgtcagcggagtctggtgggccttcaccttgatcatcatctcctcctacacggccaacctggccccttcctcaccgtgcagcgcatggaggtgcctgtggagtcggccgatgacctggcagatcagaccaacatcgagtatggcaccatccacgccggctccaccatgaccttcttccagaattcacggtaccaaacgtaccagcgcatgtggaactacatgcagtcgaagcagcccagcgtgttcgtcaagagcacagaagagggcattgccgcggtacctcaactcccgctacgccttcctgctcgagtccaccatgaacgaataccaccggcgcctcaactgcaacctcacccagatcgggggactcctcgacaccaagggctacggcattggcatgccgctgggctccccgttccgggatgagatcacactggccatcctgcagcttcaggagaacaaccggctggagatcctgaagcg

SEQ ID NO: 367491 - DNA, 714 bp, Homo Sapiens; identical to SEQ ID NO: 98918

SEQ ID NO: 367492 - DNA, 963 bp, Homo Sapiens
  misc_feature (23)..(23): n is a, c, g, or t
  misc_feature (33)..(33): n is a, c, g, or t
  misc_feature (90)..(90): n is a, c, g, or t
  misc_feature (123)..(123): n is a, c, g, or t
gcaaaaaggcttggagagagttntatttcagtnacttcaaaatacaagtaggctattattttcctttggaagaagaaaccagaaaaaaancttcctgcgtgtaacattgtgacaaatttcagnttatataacacataacacaggataaatggctgtagcattaatttttttctccagttacattcctttatactaaaagactagtattaaatcttagaagaaaatttcaattgttcttacggtgttacatattaaacacaaaagcaatttattattatttgggtacaacgtgaacctcagtatttgctcaaatgtagaaaaggattccttaatatgctgagaaatatccttagataaatccaactgtgaaaatatagaaaactccttactgtaattactgggaaccacaaagttaatttttacagggtagaaaaactccacaaaaatggagattcatacttaaaaccttcttttactgatagaacattctttctggtattataaaatgaacaaaagtgtacagatatgggcttggggctagataatatccatagaacccgccattttaagcaataaaaattggcatgtgggtgcatgcctgtaatccctgctacttaggaggccaaggcaggaagactgcttgaacccaggagttcaagactagcctgggcaatgtagtgaggccactgtcgctcaagggaaaaaaagacatgtttttaaacacacttctaataaaaagaatttttaaaaccaacttttttgcttctagatagtctcaatgccttggatttaaaacatgactccttcttgatacaatgaattataaaagcaaactagttccacatattaattatacgttcaagtctagttcctaaaaagtcatttctctttaacctttcttacctatcaatcaatcattttcatataatctaatgtctaaggactccaaatattggtacgggg

SEQ ID NO: 367493 - DNA, 818 bp, Homo Sapiens
ttggcacaggcgggccacaggcatccagcagggtgagcagagccctcacgaactggaccatgccgcaacagtggctggcgagcttcgctcactagcatttcaaatagtttcagttgctcagcccgccgttcctcgaccccatccccaagctcatcccattgcagctgccatgtcaacacacgggtcagcagatcctcgtgcagagcaaactccagcaggggcccagggcctgtgggggccgagggaactgcacggtcctctgccagcagtgtcaacatctggtaagtgtggttgcgcacagcactgagatcgtctgcacccccaggagctgcccgagggccttgccgctccaggattcgcaccacctgggaccagtgattcttgaagaccatgaggcaggtctcgggatcagccatgactggggtttggagattggccccttgaggtatacggtgcccagggccccgggaggccagtctgctcagccaattcatcctctccatgaggcaggctgggcaggactggcagccagaggcctacactctgaggatttgccagctggaggttttctccacttgtgtctccagtctgcttcatccggtctgtaggagccagtagctgcccatggagccagaggttataccaggctggaatggcaagcccagaggtcactggccagtccagatttctaaatcgttcactcacggaacgccgaacctggccgggcccggttgctgctgcggtgttaggtgagttcaggccgccgccatcgcttctcccgctctcgacgaattcgagctcggccgatttggcctgat

SEQ ID NO: 367494 - DNA, 701 bp, Homo Sapiens
tcccacaaggggaaacctggttacagcagctgatctgagatcctgttctctggccctttgtagacacccttcctcttcctcatttcttcctctttcttttccaagagtccccaaagctgtgtgcaacttctcacgatacctttaactactcccgacactgagttcaaacagtgtttgaactgtaagtaattctttatccactggcccctgagcatgcatgccaaatggtctgccagccgtggctttactactcccgtatgcttggtagagcaggccaaatgcagtactgccccacaccaagaaaagccccccttcttcaaccttcatcattccttcagctcccatctgcttctggcaccagaatagttgaaatctaaggaggctagaatagtgtattacaatgtggggttctgaaaatatgattgccaaatttacagcctcatttcaaagcaagccacgctcccctctcaccctcaaacatagacgcagcaacatcaaccacaccaccagagcagcaatagcacagactaaatattaaactggtgcaaaagtaattggggactcttggaaaagaaagaggaagaaatgaggaagaggaagggtgtctacaaagggccagagaacaggatctcagatcagctgctgtaaccaggtttccccttgtgggaagtgttgtttcttgctggccagtgtggagagag

SEQ ID NO: 367495 - DNA, 1075 bp, Homo Sapiens
tttgtcctccaatcgcctcttccgacctgttgaccagggccagccggcagagggctgggctcgctcaacgaggctcctctcgcacctcctggagctttcaggcttctttccgttgcagagaagctttatgggccattcgttcggcatccccgggggcaggtgccgtgcgcggggaagaagaggatttgactgcggttctccacccccggcgcccacctccaccccggtgcgcgcgctcttccaggctcctgctggtcccacttgccaggagttaggtctcaggtcagcctgagctcctgagacgcccaggcccggaaagacacgtaggggaaaccatctgctcacttctgtcctgtccggaagggatccctttctgacgggaaagaaaggcggtgagtcctgtcctgttgagtaggcggaagagagatcaaagggaagacaagaaaaatcctgggaggtttcaggatctaaagttgaccatgaagtcaacctaacctcctctggaggtcctcccagtcctcccgtggctgtcgaagctaaacaagcactggccttgagataagcaatgctgaagcacttgcagctcacccattaccataaactgactgagccctccctacacaagccataactacagctttgattggacaagagactgatttcagtaacttccccttgataagagaccactggccgtgggcgggttctggacagtttacagaagctatgcacttgattgcctttgtgtccctgcttcaccttttgaagcatagggcctaattataatgtatttaaatgttgtctccaccccaaagtgaacatgggttgcatgtaacaggcatgtttactcagcatgcatgcagcaggatcccttcacaaatattcagagctccccctattccctgttgaatatgtatatgtggccagccagatcaacgtaaatcactattcgccctcccctccctggaaacctacttttcgggtttcagcaggaagctatgcctcccagtctgtcagaatggccacttgcaggctgtaaccctttataaaaaaataaagtctcctttctaaattt

SEQ ID NO: 367496 - DNA, 1132 bp, Homo Sapiens
ctcatctgtcagaggagatataaccccagattccagccttactgtctcattggcgcgcctaatcttagaaactacaatacccatgaggccactgggcaaggataggcctggttaaggactcagccgcccgttgccttctgggagttgtagttttattacataaaattgccagccgaggatagggaaaacagtatttactagcctcggggaacctcggaatctgcatctcagccttctccattcccgaatcccggagaccctgctgtcagcctcttccttcccctggtcttatctccctcctttcccaggacccaggggtccgtggtcccccctgccctcaccaacgacccccatataggcatcctcattaagcgacagttcctggaaatccttcacggcattctctaccctttccatcatggctttgtgattgcttcgcatccaggtggccaggcaggtaatctttctgccagggactttagcgccagcacgacagacgggtcacatatgaacacacccctcggcaggaagcaagcaaaccggccagcgccgcacacaggagggtaaaatgcggccccattgcagccggcgcgcacagttcccgaagaccgttaggaagggtgctctcaccccaaaccgagagcaggagaacgcagatttctagaactgaggaccccactaacacttaagcgagactccatgcggtcctctagacctagggggcccttgttcacccttccccaaaactaacgggcttccaatttgcagggcgcacacttccgcttagaaaaaggagccccgatgcatcctgaacagtgatgcaccctaaacagccgctccccgaccttgattcccgatttgtggcctctaacactagggttcattgaggagcccggtccaggttctgagggcttttaaagaggaagccggggtcatgaccacctacgctaattttcccaggggtaaaatcaaggattgtgttggggacgagggtaaggttggttgcgtgaaatcgagagcttttcgacggggtctgagtcacggacgatcccctctccacaaggaactcctgaaaccaccccctccgagcttctcacgtaggggcccgaattcctttatagatattccatcc

SEQ ID NO: 367497 - DNA, 785 bp, Homo Sapiens
aaaacaggaaataaatacgaatgaaactgagctctaagcagcatgtaacctggcctgcatccaggaaatagaggacttcggatccttctaaccctaccacccaactggccccagtacattcattctctcaggaaaaaaaacaaggtccccacagcaaagaaaaggaataggatcaagagatacgtggctgctggcagagcaagcatgaattcgatgacttcagcagttccggtggccaattctgtgttggtggtggcaccccacaatggttatcctgtgaccccaggaattatgtctcacgtgcccctgtatccaaacagccagccgcaagtccacctagttcctgggaacccacctagtttggtgtcgaatgtgaatgggcagcctgtgcagaaagctctgaaagaaggcaaaaccttgggggccatccagatcatcattggcctggctcacatcggcctcggctccatcatggcgacggttctcgtaggggaatacctgtctatttcattctacggaggctttcccttctggggaggcttgtggtttatcatttcaggatctctctccgtggcagcagaaaatcagccatattcttattgcctgctgtctggcagtttgggcttgaacatcgtcagtgcaatctgctctgcagttggagtcatactcttcatcacagatctaagtattccccaaccatatgcctacccgactattatccttacgctggggtgtgaaccctggaatggcgaattctgggcgtgctgcttggtcttctgcctccg

SEQ ID NO: 367498 - DNA, 859 bp, Homo Sapiens
ctcttgacgagaagagagaccaaggatggccaagccaggggctgggccagaggtgccaacatggggaaactgacggctcggctcgtgaaaggtgaagtaacttgtccaagatcacaagagctggtgaacatcaagtttggtagctatggcgaaggctgggaaactgcagcctgacttgggctgccctgatcatcctgctgctccccggaagtctggaggagtgcgggcacatcagtgtctcagcccccatcgtccacctgggggatcccatcacagcctcctgcatcatcaagcagaactgcagccatctggacccggagccacagattctgtggagacgtgggagcagagcttcagcccgggggcaggcagcagcgtctgtctgatgggacccaggaatctatcatcacacctgcccctacctcaaccacgactcaggcctttctctcctgctgcctgaactggggcaacagcctgcagatcctggaccaggttgagctgcgcgcaggctaccctccagccataccccacaacctctcctgcctcatgaacctcacaaccagcagcctcatctgccagtgggagccaggacctgagacccacctacccaccagcttcactctgaagagtttcaagagccggggcaactgttcagacccaatggggactccatcctggactgcgtgcccaaaggacgggcagagccacttgctgcatcccacgcaaacacctgctgttgtaccagaaatatgggcatctgggttgcaggcagagaatgcgctggggaccagcatgtcccccaaactgtgtcttgaatccatggattgtgtgaaactggagcccccccatgctgcgggac

SEQ ID NO: 367499 - DNA, 703 bp, Homo Sapiens
cggcgcttggcccagtcccgcggtcctcgtcgcgaccggcccgggccgcaggacgccgcgctcgggggagctgagccacctctccgccaggcccgtgcgagcggtacaaagaaaagagcacttccctgctggggcagaggccaagccagagccctggccccatcacctctctgccctgcttgagtctggaatggacctccctgcctggaagctgcattgcccttggtcctgggcctgcctgccccctgggaaacacaggcagcagccacattggcagtgaagccgtggcagcgtcggcagcagaggatgccccaggccctgaagcgtgcagatggcacctgggcctgggtggtgctgctggccaccatggtgacccagggcctcaccctgggcttccccacgtgtatcggcatcttcttcactgaactgcaatgggagttccaggccagcaacagcgagacctcttggttcccctccatcctcacggctgtgctccacatggcagggcccctgtgcagcatcctggtgggacgcttcggctgccgagtgaccgtgatgctggggggcgtgctggccagcctgggcatggtggccagctccttctctcacaacctcagccagctctacttcacagcaggattcatcacaggtggaaggccccagtgcgcctccaggctggtttcccctcttgccccgcaggcca

SEQ ID NO: 367500 - DNA, 587 bp, Homo Sapiens
agagctgctccggccgcggccctgggagctggaggaaccgcgactcagcaggcatgactggagagggaagtcccaatggtgctagaatggtgctgcagtggcagaagacggctcacaagtgaggtctggaagaacaacagggaagacatccatcatttgctccaaagtgtgcaagtcaaatcctggggagaatcatgataaccctgatcactgagcagctacagaagcagactctggatgagctgaaatgcacacgcttcagcatcagtctgcctttgcctgatcatgcagacatctccaactgtgggaactctttccagcttgtgtctgaaggtgcttcctggaggggcctgccccactgttcctgtgctgagttccaggacagcctcaacttcagctaccatccctcaggcctgagcctgcacctcagaccacccagtcggggaaactcccccaaggagcagcccttctcccaagtcctaagacctgagcccccagatccagagaagcttcctgtgccccctgcccctccatccaagaggcactgccgctcactctcagtgcccgtggacctgtctcgctggcag

SEQ ID NO: 367501 - DNA, 1113 bp, Homo Sapiens
caaacatgaggatgggtataagctgacgtcagacacaggtacggtgccaaaccctgggatctctctctttaactgagagtcagggagggctgattgcttctattctcagaagatgggagaacgtatgctgttagcagaaatgtaagaggcagtaaagaaatactaataggatgatggcagaagctttacagaaaatgttcctcagggatgaattaaggtttttccaaagtaacctgacagcacattatggaaagcaactgggtttgggtgtgggcagtctttagatcaaattctggcagttctgttcattggctttgtaatattagaatgttaatgttcttgaattgcaatgtttttaatgtataaattgtcaaaatgtttttcagcagggttgatgggagacctacagaaaatacatataaatcatcagacatgaagtccagcacatagtaggtattgaataaatggcagctgagtggtcatgtccagaaaatgaacgccaagaagttgagcctggactactaagaatctggctctgcaagaattccaaaaaggagaatggttctccctgataacaaatagtgatgagtaaaaccagacaacattacatatgcctcccccaagtatgtacggtctggaatcaactttggtggttctccttcagcaagaacaaacatgttcccatcgtctgcctccccacatttaattcctcccaacggtcttccctgaacacttcatcttttcagcacatgaaatgacggcagcatcacttgaaggttccaaattccatcacccaaaatatctgcacgcatcacacacacatcacgattcatcagcaattccaccaagcagtcttcttcccccttctgagcctctggtcaccgaacctcgaaactagagctccactgccttagccaaaactgaccgcagaatcaactaacaaccaggtccccacatcaggaccccgacccccgcacgctaattcataagccaactgcctcacccggcacacatgcaccctacccgcgacaacgcagcgctccggggcaccggaccaacgtctacgacccggctctgcacggcccatcacccgaaaccgccccgcccaaaggt

SEQ ID NO: 367502 - DNA, 1827 bp, Homo Sapiens
  misc_feature (1652)..(1652): n is a, c, g, or t
ggagcgaggcctgggtggcgaattcggcacgaggcagacatgcaaccaggacattcgtactgggccctgctcttgatcgcatgctccgccgtcgtggcttcaaactctcaatcatttgaaaacaaccattcaagatttttatttttgcaccagctccggggatgtggggtgtagggctgggatgcgggggtgcagtctgggaaggccttgctgagaaggagacatggagtggaggagggagcctggtggttagtgcagacagtcagtgcgaaggccttgaggcggcagcatctggccaggtgctgtttctgtgcccatctgaccgatgaggaaagtcggggctcggggtggggggcggcacgcatcgtgtaccccactgttctcccagctgtattccccaactccgttctggccctaacctgctctgcttggccccacaggctgaccccgcactacatctacccaccagccatcgtgcagcccagcgtggtgatcccagccgcccctgtcccgtcgctgtcctcgccctacattgagtacacgccggccagcccggcctacgcccagtacccaccggccacctatgaccagtacccatacgccgcctcgcctgccacggctgccagcttcgtgggctacagctaccctgccgccgtgccccaggccctctcagccgcagcacccgcgggcaccactttcgtgcagtaccaggcgccgcagctgcagcctgacaggatgcagtgaggggcgttcctgccccgaaggactgtggcattgtcaccttcacagcagacagagctgcaaggccatgatgggctggcgacagcccggctgagcttcagtgaggtgccaccagcacccgtgcctccgaagaccgctcgggcattccgcctgcgccctgggacagcggagagacggcttctctttaatctaggtcccattgtgtcttgagggaggactttaagaatgactgagaactatttaaagacgcaatcccaggttccttgcacaccatggcagcctctccttgcaccttctcctgcctctccacactccaggttccctcaggcttgtgtccccactgctgcatcgtggcggggtgtcacagaccctctgcagcccctggctgccctggactgtgcagagatgcctgactccagggaaacctgaaagcaagaagttaatggactgtttattgtaacttgatcctcccgagctgtgagcgcagtctgaggtgtgaggacacggcctcctgttggagtcccattttctccatcagggcacgtgggcggcttcctcaagcccggaggagctcccaggcgcacaggggccgccggtaacaggggccgccggccaaaggcccctttccagtcatagcactgaagttgcaacttttttcttgtaattgttttgctactaagataatttcagaagttcagtctattttttcagcggatactgccgccaccaagaatccaaaacctatttttgacttggagagacttgcttttgttggttccgcccgtggagacgacgatagtgtttctgtataataaagtgtctgccggctcgcgggccaggatcctctcggtgggatgggcaccacagacaggaggcccctcaggcccgtgcgggccactgtctgctgccgncctgcccggggtggcagaaatgagttgtctcaggaccccgtcactgcgaacgttggacacttcctctcccttcccctttcctccccaactccccaaaaaactgtggggaggggggaaaaaggaaagggatcccacaagcatttcaggggcaccttggggggctctaaaacccagt

SEQ ID NO: 367503 - DNA, 1128 bp, Homo Sapiens
  misc_feature (98)..(141): n is a, c, g, or t
tgggtggcgaattcggcacgagggcgcggcgcagctcggcgcgcacggcgggagcggcgcgcgagtggtcgggcctggcggctggacgggcgcccctnnnnnnnnnnnnnnnnnnnnnnnnnnnnnnnnnnnnnnnnnnnngcgcggcccgggtccgtaggcggcggggcgccccccatgctgctgcagcccgcgccgtgcgccccgagcgcgggcttcccgcggcccctggccgcccccggcgccatgcacggctcgcagaaggacaccacgttcaccaagatcttcgtgggcggcctgccgtaccacactaccgacgcctcgctcaggaagtacttcgagggcttcggcgacatcgaggaggccgtggtcatcaccgaccgccagacgggcaagtcccgcggctacggcttcgtgaccatggccgaccgggcggcagcctgagagggcttgcaaagacccgaaccccatcatcgacggccgcaaggccaacgtgaacctggcatatctgggcgccaagccgcggagcctccagacgggctgaccccgcactacatctacccaccagccatcgtgcagcccagcgtggtgatcccagccgcccctgtcccgtcgctgtcctcgcccctacattgagtacacgccggccagcccggcctacgcccagtacccaccggccacctatgaccagtacccatacgccgcctcgcctgccacggcctgccaagcttcgtgggctacagcttaccctgccgccggggccccagggccctctcagcccgcaagcacccgccggggcaccaccttttggtgcaagaacccaagcggccccagaatggaagccctggacaggaatgccaatgaaggggccgtttcctggcccccaaagggactgggggaacattgtgcacacctttaaccaggacaaaacagaagactgccccaagtgccattaaaagggccttggttcaaacaagcccccgtggcttgaacgactttcccgaggggaggggggaccccaccaggaaaaccccccgggggccattcccgaaaaaagaaccccgcctttcgcgggggccttttctccccgccccttggtgcttcacccctgtggagtaaacaacccct

SEQ ID NO: 367504 - DNA, 892 bp, Homo Sapiens
  misc_feature (797)..(826): n is a, c, g, or t
ctggaccggtccggattcttgggatattagaaccatatctctcgccgggagtggccgcgcggctccgaagctcccggccggcggctatttaagcgaggcccgccgcatccgctgcgctgtagcctggaggctccgggcgcggggaagtcatgctcgcttcacggaggcaatagctagccggtgtctgtgggaggttatgtttatttgagagttctccatcgggatcgcctggtgtcaccaagtgtccactggtactgaggtttgctgcctgccttcttgccatgtctaacgaagtagaaacaagtgcaaccaatggtcagcccgaccaacaggccgcaccaaaagcaccctcaaagaaggaaaaaaagaaaggccctgaaaagacagatgaatatctcttagcaaggttcaaaggcgatggtgtaaaatataaggccaagctgattggcattgatgatgtgccagatgcaagaggggataaaatgagccaagactctatgatgaaactaaagggaatggcggcagctggtcggtctcagggacaacacaaacaaaggatctgggtcaacatttccctttctgggataaaaataattgatgagaaaactggggtaatagagcatgaacatccagtaaataagatttctttcattgcccgtgatgtgacagacaaccgggcatttggttacgtgtgtggaggagaaggccagcatcagttttttgccataaaaaccgggcaacaggctgaaccattagttgttgatcttaaagacctttttcaagttatctataatgtnnnnnnnnnnnnnnnnnnnnnnnnnnnnnntagagggaagcccagcaaagcaatttgaaaaatggggagttgagccccctaaatggaattctagga

SEQ ID NO: 367505 - DNA, 646 bp, Homo Sapiens; identical to SEQ ID NO: 98930
  misc_feature (120)..(135): n is a, c, g, or t
  misc_feature (633)..(633): n is a, c, g, or t

SEQ ID NO: 367506 - DNA, 657 bp, Homo Sapiens
gtatttggatgatatatttgtatgtgaagatgtattcaacaatatctctgcccttgaagagcttgtatttactaacagagaacaaagatgtgtttaaggtataacatggaggtttaagaaattcttacgtatagtttgagctaagcaaattctcagtcgtttgctttcagttttcatattaaatacacacatactttatttcctctactgtttgtatatctccatcttttattgacctgacataaattgctaaccatagcttcatttaaaaatcaaacaaaatttcctgtgtactttagataatattatttcatttgtctgttatcattacaatatattagtaaaagttgcctgtatatcagtattatggaaaaactcaatctttaaatatcagaaaatgaaagatgtattttgtttcctttagtgtagggtatgtaatacccattagcaagcaagcaattcatttgtttaattcaaagattatatttaactctgttggtgacatcaggaaggccttctttgtcattgtggaataggtcagtgggattattttgggcctggaatgctgtcatatatgtaaccatgttaggtaaaatccttcctttttacttttctcttttcgtatgatgatgatggggtcaaccaaaattgaggatc

SEQ ID NO: 367507 - DNA, 715 bp, Homo Sapiens
gcgaatacaaaatacagttaaaataaaatgtcagcctcctggagtgatcggttacagaatgcagcagatatgcctgctaacatggataagcatgccctgaaaaagtatcgtcgagaagcctatcatcgggtgtttgtgaaccgaagtttagcaatgtgaaaagataaagtgttttggttttgatatggattatacccttgctgtgtacaagtccccagagtatgagtcccttggttttgagcttactgtggagagattagtttctattggctatccccaggagttgctcagctttgcttatgattctacattccctaccaggggacttgtctttgacacactgtatggaaatcttttgaaagtcgatgcctatggaaacctcttggtctgtgcacatggatttaactttataaggggaccagaaactagagaacagtatccaaataaatttatccagcgagatgatactgaaagattttacattctgaacacactattcaacctaccagagacctacctgttggcctgcctagtagatttttttactaattgtcccagatataccagttgtgaaacaggatttaaagatggggacctcttcatgtcctaccggagtatgttccaggatgtaagagatgctgttgactgggttcattacaagggctcccttaaggaaaagacagttgaaaatcttgagaagtatgtactcaaagag

SEQ ID NO: 367508 - DNA, 758 bp, Homo Sapiens
gtgtggagtgtgaacatccacacccatactgtaatgtatttatacacactagtttctgtctcattttcagtggtctccattcctagaaaagtcacaattatccattcctacttgatttcccattaaaagaatattatggtagcagattgtgcccctcattaaaaggcttaatgccaacattttcatagaaatgactacaaacatccatatataggtaaatttaaaaacaatagcaaaaacaaaaacagtggccttcagtaaaattttcaaaacttcttttagtaaatcaatgaagtcaaaatgtcaagtaatcacccaaagttgcatttaataacaaaaggcactacatactgtaccaagtttatcttcaatatttgtgccttacttactttgactataacaaattccaatgagtcagaaagtatttccttcatcaaggtccagttccgacagcattcctgggaaaaatttgaaaggagtttgtacggaatcttcatagatacctgagaagatgagctggagatgtttgcctttttcacactacaaatttttctgtaataaacttgggaattagaggtcaagtttgttgatggcatagcttcctttgcataaagagtatatttcttttcaaagtatatatttttgtaacctaccataaagtccgtaagtgaatacaacgaatgtaattgacataataattgaaaatcattgactatacctaaaatagttctttataattaaataactctacacccaaa

SEQ ID NO: 367509 - DNA, 941 bp, Homo Sapiens
tctgagagaccttcatggccgattgattgggctagcctttcggctccatttgatgttgcccgtagcattgtgcgccatgcagccagcactcgggaccattgtccggcgttccccagcctgtcaggccacggtgcagccggggtcagcccttgcttattcacctggttcaaggccaatccactgcgttcctttccaaggagtctgcagcaacctgagaattgtcaccctggacagcataatggaagacggtctctcccttgtagtcggtgacatccatctgagtgtggcagtactgcaccagctccaccaggatctccccatcacccttgcggcaggccaggtgcaggggtgtgcagccctcctcgttctccgcgcaattggcacagctgatgatacggctgtgatggaagcactcgcggatccctagctccacagccaggtgggccactgaccagctggggtggttacggatgaggtcggtcaggtgctgcaggacctcagtgtgcaggacctgaggggagctctcatagaagggtagcagctgggaagaatactgatggaaattcactagggcgtcagcctccaactccagctggaagagtcggaatccactctgtgagttcctggggttgaccaggacgcagtcccaggtgcggttgggagtgttctggaacagaatcagctgcccttcctcccgaactcggtcactcgaggtgtagtcggctacagccacctccttcacccggaatgggttagagaacaagttggtgacgccactgaaggtattgaccaggcggccaaagaactgcatcttctgcggggcaggtggggaggccccaccgtcttccccctctgtctcagaatcggagacacgaggaatatcccaaggagggtccggcggagacttgggagtccggagcgccgaggaagttggggaacgg

SEQ ID NO: 367510 - DNA, 731 bp, Homo Sapiens
gtgggagatggaggcaggacaaactcgtattgtgcactctgaggggggcagtgaagaaggcgtgaggagggggccaccctcacccctcagatcccgttctccacgctcctttattagagtaacgtattaacccgctcaccgtcacaatcgctcccctccctgtcaacactaatctcaagatagcggggctgctgcaaagggcgggaatgggtggctgggggagcaccaaagcctcaggatttacccccaagcccccagcctgggccagcagcaaccagcttcgttagtcacaagtccatgttcccccaccccattccacctcaccccctccccagtgggggaaaaaaacaccagggaatagctttgtcagagctcatcaacaaagaaaaagaaaaggaggtacagaaagtccctcaatacaacaagttgtctcaaatcgtcacagtgatacagacttatcagaaaccaatgaaacaatacaaattaaatactaataaaataaatactacagaagacagaagaacacaggggaatggagttggggggcgctcagagatctgggattttctcatttctcctcgggaacaggccaaggccatccagggcccaggtttggtcttggtcatgaacaaggaggccagtccaagggaccccggcgccacctcccaccacccccgggacctcttgtcctcagacatggagttcaactttccacccccatcagcaaccac

SEQ ID NO: 367511 - DNA, 937 bp, Homo Sapiens; identical to SEQ ID NO: 98933

SEQ ID NO: 367512 - DNA, 673 bp, Homo Sapiens
agcgggtgtgcgcgcgcccgccagccggctcgcgctggtccggtctcgccccgcagcctcgatctcccgtgacttcctcggccaggccgcctgcgcctctgggaccatgttgcgctggctgcgggacttcgtgctgcccaccgcggcctgccaggacgcggagcagccgacgcgctacgagaccctcttccaggcactggaccgcaatggggacggagtggtggacatcggcgagctgcaggaggggctcaggaacctgggcatccctctgggccaggacgccgaggcagaaaatttttcactactggagatgtcaacaaagatgggaagccggattttgcaaagaatttatgaagctaccttaaagaccatgagaagaaaatgaagttggcatttaagagtttagacaaaaataatgatggaaaaattgaggcttcagaaattgtccagtctctccagacactgggtctgactatttctgaacaacaagcagagttgattcttcaaagcattgatgttgatgggacaatgacagtggactggaatgaatggagagactacttcttatttaatcctgttacagacattgaggaaattatccgtttctggaaacattctacaggaattgacataggggatagcttaactattccagatgaattcacggaagacg

SEQ ID NO: 367513 - DNA, 1076 bp, Homo Sapiens
ctgctctcagtccctgtcctgcgcccgcgcgccccgggagcctacccagcacgcgctccgcgcccactggttccctccagccgccgccgtccagccgagtccccactccggagtcgccgctgccgcggggacatggtcctctgcgttcagggacctcgtcctttgctggctgtggagcggactgggcagcggcccctgtgggccccgtccctggaactgcccaagccagtcatgcagcccttgcctgctggggccttcctcgaggaggtggcagagggtaccccagcccagacagagagtgagccaaaggtgctggacccagaggaggatctgctgtgcatagccaagaccttctcctaccttcgggaatctggctggtattggggttccattacggccagcgaggcccgacaacacctgcagaagatgccagaaggcacgttcttagtacgtgacagcacgcaccccagctacctgttcacgctgtcagtgaaaaccactcgtggccccaccaatgtacgcattgagtatgccgactccagcttccgtctggactccaactgcttgtccaggccacgcatcctggcctttccggatgtggtcagccttgtgcagcactatgtggcctcctgcactgctgatacccgaagcgacagccccgatcctgctcccaccccggccctgcctatgcctaaggaggatgcgcctagtgacccagcactgcctgctcctccaccagccactgctgtacacctaaaactggtgcagccctttgtacgcagaagcagtgcccgcagcctgcaacacctgtgccgccttgtcatcaacccgtctgggggccgacctggactgccctgccactgcccccggcgcatggcccaactacctccgacagtaccccttccagctctgactgtacggggcaatctgcccaccctcacccagtcgcaccctggaggggacatcagccccagctggacttgggcccccactgtccctcctccaggcatcctggtgcctgcatacctctggcagctggcccaggaagagccagcaagagcaaggcatgggagagg

SEQ ID NO: 367514 - DNA, 869 bp, Homo Sapiens
ttctcaccagtatggattctcctggtgtcctcaggttggctctatgattgaagatctttccacagtcaccacattatggttttttctctcctgaatgaattttctgatgcaaaactaggtatgaatgatcgctgaagttttggtcacactcaggacatttgtacacatttttggctccttcccagggagaatcaagaatgttcagaaagtgtgttggttcctaaatattcagagagttctactaatggggtgtggttttcaatgggtaactaaaaggctgatgacccttctcttgtaagtgggagttccactgtaatattttcgcttcagggtttccaactccatcctcagaggatttttctgggtaagggacaaggggtgcagcaatggggtactgtttctaaggcaagctcgtcaagttccatagactctaggcctaactgctgattaatctcaggctttgccttcctctcccatcaaagccgcatcctccaaagactcttttgtaccatctttgctgagggacctctgggcagggtgcagagtcacgcactcctcttgagaaaaatacacagccagatcctcaaacagtattggtccctgggcctcgggcgtcggggggcatggacgccatttggcgggtggggaatgccttcttcaagacgccacagggacttcgtgacaaagcgctccgcggttaataacaggcctcgcgctccctgacaggagctgcagaaagcgacgcccgaccgagacgcgacgaagaacgccacggccactgcaaaactcccacgctctcatgctcctttacgcaggagctgcaggaaaagccgccggaagtgacccgccctcagccctccccgcccgct

SEQ ID NO: 367515 - DNA, 948 bp, Homo Sapiens
ctctggtgcagctggggtggaatctggccaggccctgcttaggcccccatcctggggtcaggaaatttggaggataaggcccttcagccccaaggttgtcctcgaccagtcccgtgccatggcagcccacctgcttcccatctgcgccctcttcctgaccttactcgatatggcccaaggctttaggggccccttgctacccaaccggcccttcaccaccgtctggaatgcaaacacccagtggtgcctggagaggcacggtgtggacgtggatgtcagtgtcttcgatgtggtagccaacccagggcagaccttccgcggccctgacatgacaattttctatagctcccagctgggcacctacccctactacacgcccactggggagcctgtgtttggtggtctgccccagaatgccagcctgattgcccacctggcccgcacattccaggacatcctggctgccatacctgctcctgacttctcagggctggcagtcatcgactgggaggcatggcgcccacgctgggccttcaactgggacaccaaggacatttaccggcagcgctcacgggcactggtacaggcacagcaccctgattggccagctcctcaggtggaggcagtagcccaggaccagttccagggagctgcacgggcctggattggcaggcaccctccagctggggcgggcactgcgtcctcgcggcctctggggcttctatggcttcccctgactgctacaactatgactttctaagccccaactacaccgtgcagtgcccatcaggcatccgtgcccaaaatgaccagctagggtgggctgtggggcccgagccgtgccctctatcccagacctaactgcccgcgtgctggagggcccagggaagtcccgatgtttgtgcacacggtgttgccgaggcatccgtggcttggctctggtaccca

SEQ ID NO: 367516 - DNA, 956 bp, Homo Sapiens
gggaccgcaaaggcggccgcggttctaggaacttgacgtgatggggcttcctgaggagcgggtccggagcggcagcgggagccggggccaggaggaagctggagccggaggccgggcgcggagttggtctccgccgcccgaggtcagccgctccgcgcacgtcccctcgctgcagcgctaccgcgagctgcaccggcgctccgtggaggagccgcgggaattctggggagacattgccaaggaattttactggaagactccatgccctggcccattccttcggtacaactttgatgtgactaaagggaaaatcttcattgagtggatgaaaggagcaactaccaacatctgctacaatgtactggatcgaaatgtccatgagaaaaagcttggagataaagttgctttttactgggagggcaatgagccaggggagaccactcagatcacataccatcagcttctggtccaagtgtgtcagttcagcaatgttctccgaaaacagggcattcagaagggggaccgagtggccatctacatgcctatgatcccagagcttgtggtggccatgctggcatgtgcccgcattggggctttgcactccattgtgtttgcaggcttctcttcagagtctctatgtgaacggatcttggattccagctgcagtcttctcatcactacagatgccttctacaggggggaacaagcttgtgaacctgaagggagctggctgacgaggccctgcagcaagtgtcaggcacgaagggtttcccagtaacgatgctgcattgtggtcaagcacctggggcgggcagagctcggcatggggtgactccaaccagccagtcccacccaattaagaggtcatgctcagatgtgcagaatctcatggaaccacaggattgacttgtgcgtggcatgagctcatgtcagaggcggggatgaatgttgagccc

SEQ ID NO: 367517 - DNA, 1176 bp, Homo Sapiens
  misc_feature (874)..(912): n is a, c, g, or t
  misc_feature (934)..(944): n is a, c, g, or t
gggaacttgacgttatggggcttcctgaggagcgggtccggagcggcagcgggagccggggccaggaggaagctggagccggaggccgggcgcggagttggtctccgccgcccgaggtcagccgctccgcgcacgtcccctcgctgcagcgctaccgcgagctgcaccggcgctccgtggaggagccgcgggaattctggggagacattgccaaggaattttactggaagactccatgccctggcccattccttcggtacaactttgatgtgactaaagggaaaatcttcattgagtggatgaaaggagcaactaccaacatctgctacaatgtactggatcgaaatgtccatgagaaaaagcttggagataaagttgctttttactggtccacttctggtaattcatcctacagatatacttgcaaggagggcaatgagccagggggagaccactcagatcacataccatcagcttctggtccaagtgtgtcagttcagcaatgttctccgaaaacagggcattcaaaaagggggaccgaagtggccatctacattgcctatgatccccagagcttgtgggtggccatggctggcatgtgccccccattgggggctttgcacctcccttggggttttgcaggccttctctttccggagtctcctatggggaacgggattcttgggattcccacctggcagaccttctcctaccctacagaaggcccttccaacagggggggaaaaaaccttgggcaaccctggaaaggaaccttggcttcaaccaacggcccctgcccacaagtgggtccgggaagaaaggggttttccccaataaaaaaacccccgccattggggggcccaaagcccacctnnnnnnnnnnnnnnnnnnnnnnnnnnnnnnnnnnnnnnnacttcccacccaaagcaggttnnnnnnnnnnngattatacagaggggccttggcctgacagataggggggcgaaattcccttgggggaacccataggggagaattggccctctgagggcgggggacattagactcttcttgcgcccaagaggggcaggagggtaagaaatatgattggagcccaccagagtgcggaggtggagtgcccccggcagaccccgcactctcctctctacccccgggacacacccgagtgggggctcg

SEQ ID NO: 367518 - DNA, 993 bp, Homo Sapiens
  misc_feature (912)..(912): n is a, c, g, or t
gggtccggaattcccgggatctgtaactctcccaatcttgaggagtgatccctgtcccagcccctggaaaggggcaggaacgacaaactcaaagtccaggatgttcaccatgacaagagccatggaagaggctctttttcagcacttcatgcaccagaagctggggatcgcctatgccatacacaagccatttcccttctttgaaggcctcctagacaactccatcatcactaagagaatgtacatggaatctctggaagcctgtagaaatttgatccctgtatccagagtggtgcacaacattctcacccaactggagaggacttttaacctgtctcttctggtgacattgttcagtcaaattaacctgcgtgaatatcccaatctggtgacgatttacagaagcttcaaacgtgttggtgcttcctatgaacggcagagcagagacacaccaatcctacttgaagccccaactggcctagcagaaggaagctccctccataccccactggcgctgcccccaccacaaccccctcaaccaagctgttcaccctgtgcgccaagagtcagtgagcctggaacatcctcccagcaaagcgatgagatcctgagtgagtcgcccagcccatctgaccctgtcctgcctctccctgcactcatccaggaaggaagaagcacttcagtgaccaatgacaagttaacatccaaaatgaatgcgaaagaagactcagaagagatgcccagcctcctcactagcactgtgcaagtggccagtgacaacctgatccccccaaatagagataaagaagaccctcaagagatgccccactctcccctgggctctatgccagagataagagataattctccagaaaccaaatgacccagaagagcccccagggaggtgtccangcacacctttcaggacaggaaaggaaagaaaaggaaaaaagatgtatctgggggtcaactccaaaaaggggagaccttaag

SEQ ID NO: 367519 - DNA, 945 bp, Homo Sapiens
ctgtcacacttcatggctcttactccacctctcttgctcctctctgcagggaccatgaccttgggctcccccaggaaaggccttctgatgctgctgatggccttggtgacccaggagaccctgtgaagccgtctcggggcccgctggtgacctgcacgtgtgagagcccacattgcaaggggcctacctgccggggggcctggtgcacagtagtgctggtgcgggaggaggggaggcacccccaggaacatcggggctgcgggaacttgcacagggagctctgcagggggcgccccaccgagttcgtcaaccactactgctgcgacagccacctctgcaaccacaacgtgtccctggtgctggaggccacccaacctccttcggagcagccgggaacagatggccagctggccctgatcctgggccccgtgctggccttgctggccctggtggccctgggtgtcctgggcctgtggcatgtccgacggaggcaggagaagcagcgtggcctgcacagcgagctgggagagtccagtctcatcctgaaagcatctgagcagggcgacagcatgttggggggaacctcctggaacaggtgactgcaccaaaaggggagtggctcaggggctccccttccctggtgcagaggacaggtgggcaacggcaggtttgcccttgggtggaagaactgtgggggaaacaggcagtaatggccaaagtgtggcggggcttggtggccccgggtgaagaagtgttggccgtcaagaaccttctcccccgagggatgaacagtcctggttccgggagaacggaaatcttaacacaggttggccaaaggaaacatctaggttcaacggcctcaaaatgaactccggaatccagcaacagttgggaacaataagcataccagagacggtcctcaaaattttgaaaacaacgtgaccc

SEQ ID NO: 367520 - DNA, 763 bp, Homo Sapiens
cggagagccatggagggagtgatgcgcgctgctggccctgctgcccctcggccggcctggccggcggcctgggggtcacggcgtgcgccgcggccggcgtgttgctctacctggatcgcgcggaggatgaagccaacgcacacgatggtcaacttgctggttctgcaaccaggatacgctggtgccctatgggaaccgcaactgctgggactgtccccactgcgagcagtacaacggcttccaggagaacggcgactacaacaagccgatccccgcccagtacttggagcacctgaaccacgtggtgagcagcgcgcccagcctgcgcgacccttcgcagccgcagcagtgggtgagcagccaagtcctgctgtgcaagaggtgcaaccaccaccagaccaccaagatcaagcagctggccgccttcgctccccgcgaggagggcaggtatgacgaggaggtcgaggtgtaccggcatcacctggagcagatgtacaagctgtgccggccgtgccaagcggctgtggagtactacatcaagcaccagaaccgccagctgcgcgccctgttgctcagccaccagttcaagcgccgggaggccgaccagacccacgcacagaacttctcctccgccgtgaagtccccggtccaggtcatcctgctccgtgccctcgccttcctggcctgcgccttcctactgaccaccgcgctgtatggggccagcggacacttcgccccaggcaccactgtgcccctggccctg

SEQ ID NO: 367521 - DNA, 1096 bp, Homo Sapiens
  misc_feature (820)..(820): n is a, c, g, or t
  misc_feature (879)..(879): n is a, c, g, or t
  misc_feature (960)..(986): n is a, c, g, or t
  misc_feature (991)..(999): n is a, c, g, or t
aaagagcgaggcctgggtggcgaattcggcacgagggccagctgcgcgccctgttgctcagccaccagttcaagcgccgggaggccgaccagacccacgcacagaacttctcctccgccgtgaagtccccggtccaggtcatcctgctccgtgccctcgccttcctggcctgcgccttcctactgaccaccgcgctgtatggggccagcggacacttcgccccaggcaccactgtgcccctggccctgccacctggtggcaatggctcagccacacctgacaatggcaccacccctggggccgagggctggcggcagttgctgggcctactccccgagcacatggcggagaagctgtgtgaggcctgggcctttgggcagagccaccagacgggcgtcgtggcactgggcctactcacctgcctgctggcaatgctgctggctggccgcatcaggctccggaggatcgatgccttctgcacctgcctgtgggccctgctgctggggctgcacctggctgagcagcacctgcaggccgcctcgcctagctggctagacacgctcaagttcagcaccacatctttgtgctgcctggttggcttcacggcggctgtggccacaaggaaggcaacgggcccacggaggttccggccccgaaggtcagagaagcagccatgactgcggggggaggacacaccggatgctcaggcccaggctttgccaggtccgaagcgggccccctctctgtcctgcctcttttcacctgctcacgccctcccacccccaccctaaaagccccagggccctggcccagtcctcancttggccttcaaaagagtcagtctgccctgcctttttttccttttcgggcaccacaggnccaatcccccgaagtgccctgttaaccaactcaccactgctggccaccttctctgggccaatgggccctttcattgggccnnnnnnnnnnnnnnnnnnnnnnnnnnncaaannnnnnnnnaacagggctctggggcccattgggttttcctaactgggcagctcccagggaacccccctttttacccaaagccggttttgctggtctctgaaacccg

SEQ ID NO: 367522 - DNA, 1401 bp, Homo Sapiens
  misc_feature (331)..(411): n is a, c, g, or t
  misc_feature (487)..(515): n is a, c, g, or t
  misc_feature (541)..(574): n is a, c, g, or t
  misc_feature (936)..(1028): n is a, c, g, or t
cagtctgttaagtcgggcgccggggtgttagtgcgtggccgtgtgcgttcgtagtgtgtggaggctcgtagtccgtgtcctcgtccggttgtagagtgttgaacggtcccacagtgcggtcgtcggggggtaaggtgcgtcgggttcggtgctggtacgttcggcgtggtagggggtgtgccgggcgtcggtggtccgtgttccgggtcgtggtctcgtaaggttaggttggtggcgttcgcgtgctgtgcgtccggtgtgggcccctggtggggctctcggcgtgggcttcgcgtcgtgggcgtcaaggggggccccgaactggcgtccnnnnnnnnnnnnnnnnnnnnnnnnnnnnnnnnnnnnnnnnnnnnnnnnnnnnnnnnnnnnnnnnnnnnnnnnnnnnnnnnngtgcggtgtggcgttgcggtcgaagggcgtgtagagaaggggtgcgctcgtggggcgggagcgaaggagggccgcnnnnnnnnnnnnnnnnnnnnnnnnnnnnnagaagcagccgtgcgccgcggcccannnnnnnnnnnnnnnnnnnnnnnnnnnnnnnnnntgagagcgagaggggggacgtgggacgagggcgcgagttgcagcgggcaagtgagcgccatgtgtggtggggccgagtggcgatgggggcggagaaagggccagggccgctgtggaagaggtgtgggtcgcgcgcaggggaggagtgtcgcgggccaggggtggagggcggtgggggagttggcgtggtgggaaggttgcagcaggtgcgcaggcgcatcgcaggctgcaggagggtgcggcggatagggcagagatgcggccgcagtgtgcggggccatggggcagtgagggtggggcgttgggaggcggcggggcgtggagcgcagccgcggggtggggccagtcgcaggggcgtgagannnnnnnnnnnnnnnnnnnnnnnnnnnnnnnnnnnnnnnnnnnnnnnnnnnnnnnnnnnnnnnnnnnnnnnnnnnnnnnnnnnnnnnnnnnnncgagggttgcaggggagcggcgaggcgcgcgcacggggggctccgtgggtggctggcgccagtgtggccggggcgacgtggtgtgccgaggggtgcgagagcagtggcggcgcaagggccgtgggggtgcgctggtggggcgcaaggcccctgcagtcctgctgcggtagtgggcaggtgcctgcagcctgcagaggcagtgacgacaggtgacattgcagcagggcagcctctcgtgcgtgtcgtatgtgaggcggctcccgcccagcgctataaatagacagccgtgatcagagccccaggaatagcagcttgcgtgcctgtccccatcttagagagacatctgacccctggtcccctgtggagccccctg

SEQ ID NO: 367523 - DNA, 1719 bp, Homo Sapiens
  misc_feature (50)..(50): n is a, c, g, or t
  misc_feature (115)..(115): n is a, c, g, or t
  misc_feature (166)..(166): n is a, c, g, or t
  misc_feature (513)..(513): n is a, c, g, or t
  misc_feature (1635)..(1671): n is a, c, g, or t
taggcgccagggaaatgggggtcctccatgccttgtaattccccacgcanggttaaagaaggcccagggccggaggtatcccttggagccctaggccattaccagactttatcanggaacattaagggatgggcttcactggccccaggacctcccctttccaaanctgcaaagggaaaaatcttttttaaattctgtggaaaaagctttttctcctgtgtcaaatttcaccataaaaatatgctgctcctggctgtgcaatctgtagctggaggtgatggctcttataatttctctcaaatacaacacaccatttccctcgactcttaaagaaccgtctcagagtggcctttacttctccacctcttctaccacctctgctgaaagctccaccactgactggtagtgtccaataggcaggatgaggacatggtcatcagataagcctcctttggccagggcaaggtagcaatgtgtgccgatgttgaccaccaaatgtttttccacttcagnggctagcaaggcaaaaccagcaggggtcctggaggctgaggaggtttgcgaggctgctttggatgaggagaagatttgctatctctacctgtggatgaacgcttccttccctgcttttcatttaaatcaaagaaaaactgacaggctgattcttccacaggggcaagaatttgctttcctatggatgcttcctgcccagattttctgtaagggttttcagtgacatccggaggcctgttttaccagttctgctgcatccattagcttcatgggaacaatactgaacgcgtaaagatactttttcttttctggatttccaacatttgccagagctataaaccgggtggcatgctgtgcattttcctgtagaatgatatggtttcgatatggaagcctctcataataggtcttttccaaagcagcaaaatggtatcttggtttcaagcccgtggcaagactggaaaccaaagcagaaccacattttttggtatccacttctccagaagaattcccaaagttccccacacacttgggccatggggatgtgagcaagatatcaacacccttaaactgggaggttgtacacagcatcattctcagagaagacacatccttgggactaaaactataacctggtactggctcatttaaggattctgtcccactgaggtacacaatctgcagccccgagcttccagtgaagatacctttacgacccagataagtaatgttttcagctaattcacatccatcagcatcctggaaatattttactgtttcctggttattagcaccaagcacatatgtctgaataggagctttcttgatgccagtcttatactcctcccattcagcatcttgggtggagccaaagaaatttcctacacacaacagcagatcaaagtttccacttttcttctgaattgcttgaactctattgaataaaatatcaaactttccttcaacatctccacaagccaagaggcgcagcggtttctgtgccatctgtccgaatagtatgggttgcgactgccacctaaaattgggaatgcgaatccgcgttccccggaaaaatgcgaccccgctctcgacgaattcgagctcggccgatttggcctgatnnnnnnnnnnnnnnnnnnnnnnnnnnnnnnnnnnnnncgccgccaccacgataaaccccgggtccccatagtgattcatacatct

SEQ ID NO: 367524 - DNA, 980 bp, Homo Sapiens
cgccagaaagctcagtctcctgctcaaaacaggagcgcagcagccggagggagtggggacaagctcgctgaacactgggcgtctcgacagggaccagagcctgcaggactgttccgagacgctgcggtggcggcggcgccggaggacgcggaggactccctggccacccgccctccgtgcgctctgccaccgggcgctcagcagagaccccgggctgcggctgcacttgctgagtgcctctccccgccgccgcagcccagaggcgcccagcacctggagctcactggagctgagggtccgagctgagcgggctgttgtaaagccgaaaggcgagtcagtgactgggacctctgtcctggtggcgacggagagaaacagtgagcccgaggggcgcgggcacagaactgtccagctccgagaactggggtccgccagccggcggggaaagcagctgagcgcggaggcgagtgagcggacgcgtcccggggtctttgcagtccccgccggccccaaggcaccgactctcggtcagttgggcgcggcagggcgggaggggcgcgccatggaggcgccgggtcgcgccagtatgctccaggccaagtgaagcggtccggctggggtcggcgggacccgcgggccatgtacggcgacatattcaacgccacgggcggccccgaggcggcggtaggcagcgcgctggccccaggagccacggtcaaggcagaaggcgctttgcccgctggagctggccactgcgcgcggtatgagggacggcgcggccacaaagcccgacttgccacctacctgctgctcttcttcctgctgctgctctcgggtggcgctcgtcgtcctcttcatcggttgccagctgcgccattcggccttcgccgcgctggcccacgaccgctcgctgcgcgacgcccgcgcgcctggaagacgcgccggtgttctggggctgagcccggccgccgggggcccgg

SEQ ID NO: 367525 - DNA, 625 bp, Homo Sapiens
tgacagccgtgctatcatcatagcagaaatccgcactcaggtgttgagatacaaggcgagccccagagcgcggatttctgctatgatgacagccgtgctatcaagactaatcaggaccttctcccagaaactccatggacgcacattttctacaatgatttttgggggactcttctaacccacagtggcagccacaagtcctaccggccactctgcactctttcttttcgcctgaaccatgccattggagggttgaatccctgggagctaccatcttgtcaatgtcctgttgcaatgcagcagtcactggtctcttcacaaagcttctccaagatcctcctttggtgattggatactggacattcatggctggcttgatgtttgcttctcaccccattcacacggaggcagtggcaggaatcgtgggacgagccgatgtcggggccagtctcttctttctcctctccttgctctgctacattaaacactgttctacaagaggctactcagccagaacctggggctggttcctggggtcaggactgtgcgcaggatgcagcatgtcgtggaaggaacaaggagtgactgttctcgcaaaaaacaaacaagacatcacaaaaacggg

SEQ ID NO: 367526 - DNA, 1054 bp, Homo Sapiens
agcggaaaagggaaagccagaaaagcagcaaaagcaatggtggcactggagcccctaaggcgccagcgcaaccagagcgcgagcgattggtcggggcgtgtgggggcggtgcgtcttcctcgagaatggatttgattggtggagcgtggaaatggcggctgtagccgagggggcggccggaaagcagcggcggcgtctggggcgctttcgcaacattcagacctcggttgcagcccggtgccgtgagctgaagaggtttcacatcttactccgccccacaccctgggcgttgcggcgctgggctcgttgctgcagccggaccctgctcgatgggcacgactgggctggagagtctgagtctgggggaccgcggagctgcccccaccgtcacctctagtgagcgcctagtcccagacccgccgaatgacctccgcaaagaagatgttgctatggaattggaaagagtgggagaagatgaggaacaaatgatgataaaaagaagcagtgaatgtaatcccttgctacaagaacccatcgcttctgctcagtttggtgctactgcaggaacagaatgccgtaagtctgtcccatgtggatgggaaagagttgtgaagcaaaggttatttgggaagacagcaggaagatttgatgtgtactttatcagcccacaaggactgaagttcagatccaaaagttcacttgctaattatcttcacaaaaatggagagacttctcttaagccagaagatttgattttactgtactttctaaaaggggtatcaagtcaagatataaagactgcagcatggcagccctgacatcccatctacaaaaccaaagtaacaattcaaactggaacctcaggacccgaagcaagtgcaaaaaggatgtgttatgccgccaagtagtagttcagagttgcaggagagcagaggactctctaactttacttccactcatttgcttcttgaaagaagatgagggtgtcgatgcatgtgaacttcgcaaaggttacgaaggccaaaggaaaggtgactattgtgacaggaatccc

SEQ ID NO: 367527 - DNA, 1369 bp, Homo Sapiens
  misc_feature (841)..(841): n is a, c, g, or t
  misc_feature (921)..(921): n is a, c, g, or t
  misc_feature (932)..(932): n is a, c, g, or t
  misc_feature (937)..(938): n is a, c, g, or t
  misc_feature (993)..(993): n is a, c, g, or t
  misc_feature (998)..(999): n is a, c, g, or t
  misc_feature (1026)..(1026): n is a, c, g, or t
  misc_feature (1029)..(1029): n is a, c, g, or t
  misc_feature (1047)..(1047): n is a, c, g, or t
  misc_feature (1055)..(1055): n is a, c, g, or t
  misc_feature (1058)..(1059): n is a, c, g, or t
  misc_feature (1111)..(1111): n is a, c, g, or t
  misc_feature (1123)..(1124): n is a, c, g, or t
  misc_feature (1127)..(1127): n is a, c, g, or t
  misc_feature (1131)..(1132): n is a, c, g, or t
  misc_feature (1135)..(1135): n is a, c, g, or t
  misc_feature (1137)..(1137): n is a, c, g, or t
  misc_feature (1153)..(1153): n is a, c, g, or t
  misc_feature (1163)..(1163): n is a, c, g, or t
  misc_feature (1179)..(1179): n is a, c, g, or t
  misc_feature (1181)..(1182): n is a, c, g, or t
  misc_feature (1185)..(1186): n is a, c, g, or t
  misc_feature (1195)..(1196): n is a, c, g, or t
  misc_feature (1207)..(1207): n is a, c, g, or t
  misc_feature (1245)..(1246): n is a, c, g, or t
  misc_feature (1256)..(1257): n is a, c, g, or t
  misc_feature (1300)..(1300): n is a, c, g, or t
ggcggaagcgctatccgagcaggatgcggttcgtggttgccttggttcctcctgaagcgtcgcagcggcgggagccgtgccgctcttggccaccgaaagcgtcaagcaagaagaagctgcagtacggccttctgcacggaaagcgtctccacccaccccagcttgagccaacggcctgcaggctctaccaagtcgcatccggagccgcacactccaaaagacagccctagcaagtcgagtgcggaggcgcagaccccagaagacacccccaacaagtcgggtgcggaggcaaagacccaaaaagacagctccaacaagtcgggtgcggaggcaaagacccaaaaaggcagcactagcaagtcgggttcggaggcgcagaccacaaaagacagcactacgtaagtcgcatccggagctgcagactccaaaagacagcactggcaaatcgggtgcggaggcgcagaccccagaagacagccccaacaggtcgggtgcggaggcaaagacccaaaaagacagccctagcaagtcaggttcggaggcgcagaccacaaaagatgtccctaataagtcgggtgcggacggacagaccccaaaagacggctccagcaagtcgggtgcggaggatcagacccccaaagacgtcccctaacaagtcgggtgcggagaaagcagactccaaaagacggctctaacaagtccggtgcagaggagcaggggcccaatagacggggcccagcaagtcggggtgcgggaggagcagaccctcaaaaagacagcccctaaacaaggtgggttcccagaagcagccctttcctgggaaaagaccatttcccaagcncccatctcccacccctttctggataaacaagggaaagctcccccaagggctgaacacaaaaccccagctttggctgaacnaaaggggaaangcttnnttctccctcatggctttttcaaaaacccgaaaatctggggggagggaaaaactgnacccnntcattttcttcccccccgcccaggaanggnaaagtttaaaggtccttncaggaagnccnntaactggaagggaatgggtgggaggccccccaaaaagaaagggctttgaaangaaatgaatggnnatnacannggnancccccggaaggggagngggggccttncaccccgggccccccnannggnnaaggaaggnnaaaggggaaanaaggggattggttccccggggggttttcccttggcccnntcccccaggnntgaagggaaaacccccggttggaaaaaggggaaaaccaacctnttttctcgggggaatttcccccacccgggggggttatagccgggaaggaaagaagggaatgtgaacccc

SEQ ID NO: 367528 - DNA, 899 bp, Homo Sapiens
  misc_feature (791)..(823): n is a, c, g, or t
  misc_feature (843)..(843): n is a, c, g, or t
tcagtggccgtggcagaacatgcaggcatccgagtcagtggggatgggaaacggaggggtggagtagtagagaggagaagttgggtgaaagagggacccagtggtcttcccggaggggaggggagctgcgtcgcagccgagtcccctcctccttgtcttatcaggcaaacccacgtcctaggcggcggaagcaactttcgttcacggtgaccaggctgaagccgtcgcatctgattgggactctgggcagaagcacggacctcctggcatcctcgccgtggtcagtctttgcctccctgctctcgttctttgcccctccgcccaccctccctcttataagggctatatctgcagagtcttcagtgagccagggtacctagacgagaggatctttctatacgaaaagccagggtagatttgccgactgctttgcctcactctgaaatccttacggcagtgcatgcaaaggtcggtgaatttcggagtggggtgaaggggcatggggcggtagggagggtggcggctccaactttaaagctctgctagagcgcttggctttcaggtaagcagggactaacagtccttacaagaactctcctgtggtccctgggcagggggctgaccgcatgccagaggagattaggagagcgggagcagagagggagtgtgagagccagggaggccggtacgcagctcagccgtactcgcgactcaaccgcacactgcgagccctggagagggtttgtacagccgctctcgacgaattcgagctcggccgatttggcctgatnnnnnnnnnnnnnnnnnnnnnnnnnnnnnnnnnatgcgccgccccgcgtaaancccagttccccatatatcatcgtcggccggcaggtctttgtttgctgtttgctcga

SEQ ID NO: 367529 - DNA, 1237 bp, Homo Sapiens
ttgaactatttaaccagatttaatagtcaattgattaataataatagattccaagttaaacaaggcatgtatacattaaagaaagcagtacagaaatgtactgtatatgaactgtttacaaaaacatacaaatgttggatggcacaagggatacagtgctaatataaacggattgtttaagctaagtgcttaacataaactgtccatccctataactaacaaagaatatttaagggacatgaaatatttcctataaaaataatgctatatggtgtactttattcagtgtatttttaggtggtattcatatgttcattatttttctcattgattcagtgactatatcttcatcatgtttccattttcatttcttccgaagctccaggaaaatctaacttgctaacaatcattcaaagcgagaagagaggaaagcaggagcagcagcaggaacagcagcattatgggtaccagctgggacagtgtgtgcttgccaggtgtctctcagatacgtgctacctgttcgccagaactggtgctatcagcttacaccagggtaccaaatatctcactgaggtcacttcacagggctgttgaggtgatttttttaatacctctccgctgagcaagagtagagcggcctactggttccaaaactggtgactgattacggttcaaagcagaatatgtagctgccatggcaccctgaacaaaggaaataaaggtagtaacaaaagtgacaatggatagtcacacgtacacaaatacaaaatgaagagttttttcatatgcaaatgtacatagattttatttggttcataatgaaaataaccacactggtcaaatccactgacttaaccaaaactgtagaggccaacatggaggttaaaattatgtatgagagagaacaaagataggctcataacaggcagtcctcacttttctcaggactattcaacattttttccctttgcattcctttaatgcataaaggcactaaagagacaggaaggcatgctctttaagttgggaaatccataagcttaatctgtccttattgatagtgaatacctactcatgtagactgagaggaattcaaaagtcgctcttaaactagttttattactaatatattgatatgccttgagcttttcgaagtcacccactgtaagagaatcccacaacagaactggatgcaggatgaaagagaaaggtgctgggggcatggacagggcttctt

SEQ ID NO: 367530 - DNA, 1061 bp, Homo Sapiens
  misc_feature (873)..(873): n is a, c, g, or t
  misc_feature (925)..(925): n is a, c, g, or t
cggtccggaattcccgggatcatggccaagctcaccctcctcactggctctgcctaccagctgacatgttacttcaccaactgggcccagaaccagccaggcctggggtgcttcaagcctgatgacattgacccctgcctctgtacccacttgatctacgcctttgctggaatgcagaacaatgagatcaccaccatcgaatgggatgacatgactctctaccaagctttcaatggcctgaaaaacaagtaaatgacggaaaacctgagtttcaaatcttttaacctttaaggacagtttaaacaagatcttccacagcagacttcaggctgaaattccaaacaggccaacaagcagaaatagtcaactgaaaactctcttggctattggtggctggaactttggcactgctcctttcactgccatggtttccactcctgagaaccatcagactttcatcaactcagtcatcaaattcctgcaccagtatgagtttgacgggctggactttgactgggagtaccccggctctcgtgtgagccctcctcaggacaagcatctcttcactgtcctggtgcaggaaatgcgtgaagcttttgagcaggaggccaagcacattaataagcccaggctgatggtcactgctgcagtagctgctggcatctccaacatccagtctggctatgagatcccccaactgtcacagtacccggactacatccatgtcatgacctatgacctccatggctcctgggagggctacactggagagaacagccccctctacaaataccgactgacaccgggagcaacgcctacctcattgtggattatgtcatgaactactggaaaggacacagggccccagctganaagctcatggtgggattcccaggcctatgggacactcctttctttcttgacnaacccctccaaaccatgggaatttgatgccccctaccaactgggccctggggcccttggctggaaccccaaaacccggggaaagttctgggggtttctgggggccctaacctaatggaaaatcgggacacccttcc

SEQ ID NO: 367531 - DNA, 733 bp, Homo Sapiens
gccggggcttggatgagtatccccactcccctaaccccactccaacgattctatgtgctaccagcgctcccctatttcaacccaagctggttgaacgaggaaacattcctaacgatgagcagtgtagccggtggagctggacccaagtctccccagctccatgtccactgacaccctgcatgatcacgaaggctttaaagaaccctcactcgagaaagcctcagtattatttttgggatgcctccggtggtaagaagcaccccctgcggttccgaataattcatttcaatgaagacatagtatgaagtgtttagtatgtaccaggcgcctgaatagggtgcacggggtaaagaatgtcttgacaccataggaatcctccgtgcactttgtgaagtctgctgaacatctcgcattgtactggactggatgctgccgcctttgcccctccctcctcctgccagcgtgtcatcgcgcctacttagacgacgacctagctggtcacacaaagagaactatcgtgagatcaatgacgcctttgcaggacttctctcaacgagagttttgaccaagtgtccttctgctgtgtcagatccctcttcccagatcagatcattagaacctcctccagtatcttatgtataatgtgtctagaagtgactttttctattgacgcacagcctgtctctgtcgacccaggtctggagttgctagattggcctgtatcttgtgctca

SEQ ID NO: 367532 - DNA, 848 bp, Homo Sapiens
ccaggaatgaagagcaagcgccatgttgaagccatcattaccattcacatccctcttattcctgcagctgcccctgctgggagtggggctgaacacgacaattctgacgcccaatgggaatgaagacaccacagctgatttcttcctgaccactatgcccactgactccctcagtgtttccactctgcccctcccagaggttcagtgttttgtgttcaatgtcgagtacatgaattgcacttggaacagcagctctgagccccagcctaccaacctcactctgcattattggtacaagaactcggataatgataaagtccagaagtgcagccactatctattctctgaagaaatcacttctggctgtcagttgcaaaaaaaggagatccacctctaccaaacatttgttgttcagctccaggacccacgggaacccaggagacaggccacacagatgctaaaactgcagaatctggtgatcccctgggctccagagaacctaacacttcacaaactgagtgaatcccagctagaactgaactggaacaacagattcttgaaccactgtttggagcacttggtgcagtaccggactgactgggaccacagctggactgaacaatcagtggattatagacataagttctccttgcctagtgtggatgggcagaaaacgctacacgtttcgtgttcggagccgctttaacccactctgtgggaagtgctcagcattggagtgaatggagccacccaatccactgggggagcaatacttcaaaagagaatcctttcctggtttgcattggaaccccgtggttatctctgatggtccatgggatggattatca

SEQ ID NO: 367533 - DNA, 930 bp, Homo Sapiens
gggagactacacccagggaatgaagagcaagcgccatgttgaagccatcattaccattcacatccctcttattcctgcagctgcccctgctgggagtggggctgaacacgacaattctgacgcccaatgggaatgaagacaccacagctgatttcttcctgaccactatgcccactgactccctcaggtgtttccagcgtctgcccctcccagaggttcagtgtttcgtgtgcaatgtcgagcacatgaattgcacgttggaacagcagctctgagccccagcctaccaacctcactctgcattattggtacaagaactcggataatgataaagtccagaagtgcagccactatctattctctgaagaaatcacttctggctgtcagttgcaaaaaaaggagatccacctctaccaaacatttgttgttcagctccaggacccacgggaacccaggagacaggccacacagatgctaaaactgcagaatctggtgatcccctgggctccagagaacctaaaactttccaaactgagtgaatccccgcctataactggaactgggaaacaacagaattcttgcaacccctggtttggcgagcacttgggtggcaggacccggacttggactggggaacctcaggctgggactggaataaatcaggcgggattaataagaacataaagttttccctttggcctagcggtggaatggggtcagaaaactcccttaaacgtttcccgtggttccgggagtcccgcttttaactccccctcctggtggaaagtggcccacccaattgggaagcggaaagggggagccccccccatttccacctggggggagaccaatatacttcacaaaggagaaacccccttttcccggggttgggagttcggcaaaacccgccggcgtaatctcccgggtagt

SEQ ID NO: 367534 - DNA, 1058 bp, Homo Sapiens
  misc_feature (896)..(896): n is a, c, g, or t
ggtccggaattcccgggatcgcggcggcgcggagctcgggcggccgtggcaggaactcagcctcggccgcaggaggcgccgggagcggagccgccgggagtcgcgcaacaggtttccttctccatcgctgcgcccacaggggacgcgcgccctgccgggagaggggcttctcggttcgcactctcgctcccagtccaggcaaaatgaaagaccggctagcagaacttctggacttgtccaagcaatatgaccagcagttcccagacggggacgatgagtttgactcgccccacgaggacatcgtgttcgagacggaccacatcctggagtccctgtaccgagacatccaggacattcaggatgaaaaccagctgctggtggccgacgtgaagcggctgggaaagcagaacgcccgcttcctcacgtccatgcggcgcctcagcagcatcaagcgcgacaccaactccatcgccaaggccatcaaggcccggggcgaggtcatccactgcaagctgcgcgccatgaaggagctgagcgaggcggctgaggcccagcacggcccgcactcggcagtggcgcgcatttcgcgggcgcagtacaacgcgctcaccctcaccttccagcgcgccatgcacgactacaaccaggccgagatgaagcagcgcgacaactgcaagatccgcatccagcgccagctggagatcatgggcaaggaagtctcgggcgaccagatcgaggacatgttcgagcagggtaagtgggacgtgttttccgagaacttgctggccgacgtgaaaggcgcgcggggccgccctcaacgagatcgagagcccgcccacgcgaactgctgcgcctggagagccgcatccgcgacgtacacgagctcttctttgcanaagccggggcttggtggaaaaaagcaggcgcaacccctgaaacgtcatcgaagcttcaaggtaccaaaagagggcccgactacacccggccagggcccagggcgccggtggccggaaagcccctggccattcacaagggagaaaaaaccccttgccgggacc

SEQ ID NO: 367535 - DNA, 1348 bp, Homo Sapiens
  misc_feature (185)..(193): n is a, c, g, or t
  misc_feature (1157)..(1157): n is a, c, g, or t
  misc_feature (1186)..(1187): n is a, c, g, or t
ggcctgggtggcgaattcggcacgagggacgctgcttttcttgctcactgggggtgcctcttcctgggcgcccgccgcctgcatcctgctcgccctgtctgggaatggggccgcccccgggcttgggccggcccggctggggcccccgaggcgcttccgccccgtagtgaccgcctggtgccggnnnnnnnnnaggatgaagggcggcgagggggacgcgggcgagcaggccccgctgaaccctgagggcgagagccctgcaggctcggccacgtaccgggagttcgtgcaccgcggctacctggacctcatgggggccagtcagcactcgctgcgggcgctcagctggcgccgcctctacctcagccgggccaagctcaaagcttccagccgcacgtctgccttgctctcgggcttcgccatggtggccatggtggaggtgcacctgtagagtgaccacgagtacccaactggcgctgctgctggacttcagtgcatgcaccaccgatgatgcgggttgagctgctttattgactcggctgcaccacccggcagtttaacccgcttgaaggagcgtgcttttttttgtgacccaaaggatctttcccgaagatcctctttttataccaagaaatctgcctgcttgcaaaacaaagaaaaccaccccctaaccaacggggtgattgtttttgcctgaattctatacactatcaaccttctttttttctgaaagcaaaactggggtttccacaaagagagcccatacatatccaaaaaaacttgcatctttcccaagggggtcgccccccaatctctaggcgccctcccaacgctctccaaactaactcctttgtaaacccaccggacttatcccgcttatgattcgccaaccagtcgcaaaacactataagaaacccgcagcgagcctacgctgtgccagcgacggacgatataaatgacgaggacattaaaccacccccttccatacgaatctcccctactatcagatgtcctctacccgatgcctctatcaatacacacgccctagttgaacgctaggacaaatagaacataaagaaggcaccacgacgaccgactaccgctaacacaacatagactaccactagaattgcgcgcgacggcccgcgcacgtgatnatatagctgatgtcgggagttgtcgtacnncctcaatcacgcaacccgtacgtccccgcctgttcgacatatacaacctacctggtgacagagaagtgatcctactcatcaccgtacgccaaacatcgtttgatacatacagtgacatgtgactaccgtggcaaccagctcaagctaaataaccccacctc

SEQ ID NO: 367536 - DNA, 653 bp, Homo Sapiens
  misc_feature (25)..(25): n is a, c, g, or t
  misc_feature (38)..(38): n is a, c, g, or t
  misc_feature (114)..(114): n is a, c, g, or t
  misc_feature (443)..(451): n is a, c, g, or t
  misc_feature (549)..(549): n is a, c, g, or t
atctcgttgtcctgtcttggtcctnaaatacgtcggancccaagccaatgggctgaaggaagaaaggctcaatgctgacatcgcaacagcccctgaaaaggccagagccccccnattccctaggcaggcctgtcttgctcgccccttgcatctgggaaagcagtgggcagggtgggctagactcttcccccaggatcctcacagtgggccctgtgggccctggctgctccctcccaaaggtcagaggcaaattggtgaccaagtgaatgtaccagagcgggcaatggcattacatgactgctaacagaaacatggcaacaaccatttcttctccaaggaacataaatagaagatgtgcagaccggcaggggctagtggcagggggctggctgtgcattggttttgatgcctctcagctttggcagccccaaggctggggcccnnnnnnnnncgagggctgatgaggtgacctggagtgagggcggtgcttcgccacccctcaggaaccatacttcagcggctctgcctctgcacattgctcaccaacancacaggctagaaaaccactagctcttcctggagagaacagaacatgcagcctccaccacgtccccagaaacagccgcagacttgagctcactacatcaagacaa

SEQ ID NO: 367537 - DNA, 511 bp, Homo Sapiens
ctcatggcgttcaggcctgacggttgctagggtgacaggtacacaacatggcggcgggatctctaacgctctccttcgagggaccaccacggagatcctagtgcgggaccccgcctcagggaagtggaaagcagggggacaaccttcctgcttctttcttttccgtccagtgtcggcaaggggttgtcaccggcttccgcatccaagatgaagaactataaagcaattggcaaaataggagagggaacgttttctgaagttatgaagatgcaaagcctgagagatggaaactactatgcatgtaaacaaatgaagcagcgctttgaaagtattgagcaagtcaacaacctacgagagatccaagcactgaggcgcctgaatccgcacccaaacattcttatgttgcatgaagtggtttttgacagaaaatctggttctcttgcactaatatgtgaacttatggacatgaatatttatgagctaatacgagggagaagatacccattatcag

SEQ ID NO: 367538 - DNA, 738 bp, Homo Sapiens
ctgcaggacaccctgcaacctaacccgctacaacaaagagctctccatggtgaagatccccagcaagacatcagccaagtaccttgagaagaaatttaacaaatcagaaaaatatatctcagagaacatccttgttctggatatattttttgaagctctcaattatgagacaattgaacagaagaaggcgtatgaagttgctgccttacttggtgatattggtggtcagatgggattgttcattggtgctagtatccttacaatactagagctctttgattatatttatgagctgatcaaagagaagctattagacctgcttggcaaagaggaggacgaagggagccacgatgagaatgtgagtacttgtgacacaatgccaaaccactctgaaaccatcagtcacactgtgaacgtgcccctgcagacgaccctggggaccttggaggagattgcctgctgacacccctcgagtcacccagcactccctccaaacagaccttgaggcccaagacccaggacaaggaacagcaagctcaggtgggatggccccagtgctggaaagaagcaagagccccctatgcacacattgcagactagctgcctagacctcgctccggccacgtccaaagacgacgcatccttgggccccgccgtgcgtccctcttaggagagatgagtcacactctggaactgtccaagaacgaacctgccatcacatctcactgacagatgtat

SEQ ID NO: 367539 - DNA, 549 bp, Homo Sapiens
  misc_feature (17)..(17): n is a, c, g, or t
  misc_feature (477)..(477): n is a, c, g, or t
  misc_feature (491)..(491): n is a, c, g, or t
  misc_feature (497)..(497): n is a, c, g, or t
  misc_feature (535)..(535): n is a, c, g, or t
gaaggcgtatgaagttnctgccttacttggtgatattggtggtcagatggggattgttcattggtgctagtatccttacaatactagagctctttgattatatttatgagctgatcaaagagaagctattagacctgcttggcaaagaggaggacgaagggagccacgatgagaatgtgagtacttgtgacacaatgccaaaccactctgaaaccatcagtcacactgtgaacgtgcccctgcagacgaccctggggaccttggaggagattgcctgctgacacccctcgagtcacccagcactccctccaaacagaccttgaggcccaagacccagggacaagggaacagcaagctcaggtggggatggccccagtgctgggaaaggaaggcaagagccccctatggcacacatttgcagattaggttgcctaggaccttggtttccggccacgtttccaacacgaggcttctttngggccccgccttgnttcctntttgggagagatgagttcacattttgggattgttccangaacgaacttgcct

SEQ ID NO: 367540 - DNA, 1040 bp, Homo Sapiens
gagtcgtactcggcttagacgccagggcctacactccagtcactgtcttacagatgcatgatgggcctgctttctagctaaccaaagcctacgcagcttctcacgtgatatccaggaatcttccctccaggcaactgtcgagggaccttgatgcccttatctaagtccaagccttctgtgttgcatcctgggtctcatcatctccttctcaaggtcttcgcttctgtaactgtcccctctgttctggcagcatcaatttctccctctctcctagatctttccaatcagcagcatgatgaaacacagcattccaccactgaatgccacaatctgcaccatgccataggcgtcttcggaggtgccgggagcagtggctgatgggaggtgtccatgcagtaactttcatgtagaaagatttctgactgcactggcacgctcaatatcctggtcaatccccttaaagaagcccatcagttggccggcctgggcaccggtgcccgcgcctgctctgtctgcctctggcagttccacggtcactgtggtctcggaagacgggctcagaaggggtttcagttctttgtgggtctccatcaggatcccatggtttctcactggaatcttaacagatttcaaagcatataagtcttgttctctgatgaagttgttgactttcttgatatctgcaactttgcagccatactgcagcgccagcttgttgaggctgtcctcctgggccagctcccgctgcagcagcaccacgtcacctgctcccgcctggggaggctggtggacaccgctcttgtggcgctccttgccccggggccgcaaaaccacacggtgagactcttcttcagaagagtcccccgagtccccactgccattcttaaacatgtatacgtggctggtcggagtcccacacacaacagctgggccttggaaggtcttggttaacaattcctcgtgcctcattttcttcactcagcgcccaggctccgccgcgaccggcgaccggcgactcgcgacccgcgacccgcgacccg

SEQ ID NO: 367541 - DNA, 732 bp, Homo Sapiens
tgatgcccaggatagcactcactattatcacacttaagtagtatcttcttgttctggacatttcagatcttataacactggtaacaaagatcacctacgcggcaaatgaaacaaaaggcagccatggccaacatgaagccctttgctgctcttgggtctgtatagcctccgtagccatagccataaccatagccatagccatagccacttccgtagctaccaaagccacttcctccataagggtagcctacactacctcctaaaagggaagttccatagcctctgtcccaggcaagcgtggaggccacacaggcaaagatggcaatgcacatcacaataatgagcatagacaggatccgaatcactcctggaggagaggtccatttgtagaagtgaagaatttcatcttctgggtaaaaagagtaggctggctgagagagcattggtcgaacatgcatctctccaccatatatgtcattgcttggtgcataatgattcggtttgaattcatcaggcctgtaaggaggtggactttcaagaggcctggatgacatggctgattgtcaatggtcagctgatcttcaggatgagcaatgccctttagcttccaagataaaccaatccgctcgccgcaactgggcccgaccctccgggggccaacggtgccagggagcgcgctcacctggcgggcgcacctgacgccgcaccgaccgccagcgctcagccggggac

SEQ ID NO: 367542 - DNA, 912 bp, Homo Sapiens
  misc_feature (14)..(14): n is a, c, g, or t
  misc_feature (882)..(882): n is a, c, g, or t
ggtccggaattccncgggatgatcaccccttctgagtacctctctggctgccaaattgccaggccttcacagtttgattccatttctcagctccaagcattaggtaaacccaccaagcaatcctagcctgtgatggcgtttgacgtcagctgcttctttggggtggtgctgttttctgccggctgtaaagtcatcacctcctgggatcagatgtgcattgagaaagaagccaacaaaacatataactgtgaaaatttaggtctcagtgaaatccctgacactctaccaaacacaacagaattttgggaattcagctttaattttttgcctacaattcacaatagaaccttcagcagactcatgaatcttacctttttggatttaactaggtgccagattaactggatacatgaagacacttttcaaagccatcatcaattaagcacacttgtgttaactggaaatcccctgatattcatggcagaaacatcgcttaatgggcccaagtcactgaagcatcttttcttaatccaaacgggaatatccaatctcgagtttattccagtgcacaatctggaaaacttggaaagcttgtatcttggaagcaaccatatttcctccattaagttccccaaagacttcccagcacggaatctgaaagtactggattttcagaataatgctatacactacatctctagagaagacatgaggtctctggagcaggccatcaacctaagcctgaacttcaatggcaataatgttaaaggtattgagcttgggggcttttgattcaacggtcttccaaaagtttgaactttggaggaactccaaatttggctggtaatattcaatgggtcttgcaaaactctactacttcgncctctctgggctgggaacattttgaaggac

SEQ ID NO: 367543 - DNA, 1018 bp, Homo Sapiens
aaactttaaaaaaatggcagccctttgtgaattacacaactaaaaaaaagtagccccagaataagaagcagctctgaaaagaggaaaaaatataacttaaaatatcttggaaaccaatgtgaatacaggttcaaaagatagttaagagattcattttcataagactacctaagattaaggcttataatatatgctagtatttcaagtttatcactaattactaaacatcaatttacaaataacatgttcaatttttgttcttttatccaaagggaaaattctaggctaaattctatccagtgtgggggagggggactagaaaataaaaaagtttcaaacagttccatgcaaacatcacatttttcaaatggaaaaacttccaactggaccagaagttcatactgctaatgtacttttcattgaaacaatttttagtaagtacaaatacatggcattaaggttcagaacctaatataggcctgacaatcaagtccttattttctggaggaaggcctcaagtccaataaatttccagtaacaatgtttttacaaatcaatttaataataaggggttttaatttccttcatgtttttgtttttagcattctagtcttaagactagattagaagttagctcaattccccaaaaggcaaatggtttttctttgcagtatgaaagaatccacaaaaaaacctcttccccaaactaattcctaataaccaatctgtgcttaagatgtatctttttctatacaatgtaaacggtaacttaggtaaaatgtacccatgaacattaaaactagtcattagaaagacttaactagctttataatttaagttttaaaacataaatatttgcagcttgatcttctgttgacaatgattgtcggagcctagaattcaacatttacaatgtccattcatgcacacaaaacacataccattatcacacaacttactcctcatgtcttaagagaagaatcttccgcttctttaaatctttggcctcccagtcacc

SEQ ID NO: 367544 - DNA, 433 bp, Homo Sapiens
atagatacaattgatctttaattcatatatggaggtaattctgctttctaaagaaaggaatatggcacatggaaccattttattcaccagtggatttacccttagagtatttttagatctgagctgatgacttgtgagagaaaaagggaacagagtaaagccatggaagccatgaacagtaagagactgccgcctggcatggtttcttcttctgcagaagatgaaactgaggagaaacaagacaacatccttcataccaggaatggtcaagataatgcaagaagaaaaaagctttcaaacaaatcagaaggcagtcaacaaacagaaagggggacattccttccctggcagttactcaaaactgaaattgcttattgtgtacaccggggcttgtacttggggaatttaataaaaatgctcattaccaagctcc

SEQ ID NO: 367545 - DNA, 752 bp, Homo Sapiens
gggacagactctctggaaagcctgggagctgaattccggaagatccccacatcgatgaaagcaaagcgaagccaccaagccatcatcatgtccacgtcgctacgagtcagcccatccatccatggctaccacttcgacacagcctctcgtaagaaagccgtgggcaacatctttgaaaacacagaccaagaatcactagaaaggctcttcagaaactctggagacaagaaagcagaggagagagccaagatcatttttgccatagatcaagatgtggaggagaaaacgcgtgccctgatggccttgaagaagaggacaaaagacaagcttttccagtttctgaaactgcggaaatattccatcaaagttcactgaagagaagaggatggataaggacgttatccaagaatggacattcaaagaccaagtgagtttgtgagattctaacagatgcagcattttgctgctaccttacaagcttctcttctgtcaggactccagaggctggaaagggaccgggactggaaagggaccaggactgaacagactggttacaaagactccaaacaatttcatgccctgtgctgttacagaggagaacaaaatgctttcagcaaggatttgaaaactcttccgtccctgcaggaaaggattgatgctgatagaagagcctggacagatgtaatgagaactaaagaaaacagatggctggagatgacatttatccaggggtcacttttgtcagggcccta

SEQ ID NO: 367546 - DNA, 923 bp, Homo Sapiens
gtgcacggacgaaccatggggtcccgcgcacttcgaggggatttatgaccacggtggggcacattacggcagattccatgagagtcctctatttcatatgtgccttccagaacatctcttgtggtattcactacttggctactgggtgcatggtgagtcacccctcgtcatgtctgcaggcacccgcaggctaatgtgagtcaggatgtcttccataatcacgtctaatcggagtttggaggacgaccggggcccatgtcgtcttcagtgccagacaagattatgttacgggctgcagtcgcagaatggtgagatctgggcagctctcaaggtgtacgcaggaacagagagggcagaagcacatcgagtttggcgctatgaatacactggcagtaagaaagagtttccttgtgtggatggctacatatatgaccagaagcacatggaaaagcactgcggtgacccagatggaacctggtctgtgaccgagaaatggcttgcaatgctgagtccagcccctatttatgttgtggagtcctactgggatcggtgacttatggctacttttctgacaggctaggacgccgggctggtcgttgtgggccacaagcaagttacgcatgtttcggtgtcggaatagcagcggcgtttgcagccgattattagcaccttcatggctgctcgcttttttcttgccatggttgcaagtggctatcttgtggtggggtttgtctatgtgatggacttcattggccattgacgtctccggaccattggcgtctgtccatttgcattccctttgtgcagttggaacctgctgggtggctttgacaggatacttgggtcacgggaccggtggcttaaccagatgatcctctccaccagtgactgtccctttatcctgtgctgtaggtgcgcccaca

SEQ ID NO: 367547 - DNA, 1137 bp, Homo Sapiens
cgacctcctccccgcacactttgaacgccgcgcctgaggccagctggcacatgcgcatgcgtgtctctggtgcctgctctccccaccaaagcaagaagcggcgggtacttgaagcggagtgagccggaagtcgctttgcctgcccatttccacgctgtaccggcggaaattcaagcactggaagagaggttccggggctgggctggcctgactgaaggcggcggaatggagacgcggaccgaggacgggggcctcacccgccgccccacgctggcctcttcttgggatgttgcaggcggggccctgacccacagcctcctcctcacccgggccggtctcggccccggtgacttcgactgggaggagctgctggcaccgcctgctccaggtcaggatctggtgattttgaagagaaaccacaacaacaaagatgaaaacccctgcttcctttacctgaggtgtggccctgatggaggtgaagaaatcgcttctattggcattttaagttcagcaagaaatatggaagtgtacttaggagaggagtactgtggaaccagtaggggcaagaatgtttgtactgtcctggatgacagtgaacatgaaaagatcattttgtataaaaaaaatctaaaattggagtcctccacacatgcttgtaaaataaagttgctctcctttggcgaaaggcagtgtgtgttcatcagtaaagttgtggtacacatgagatcagtttttgcaaattcttcaacaaagctctcctgctctaggatcaaggatagaccttgacaaggtccaaaccataatggagtccatggggtcaaagttatctcctggagctcagcagttgatggatatggttaggtgtcagcagcggaattgtatttccattggagagcagcttcagtcggtgttgggcaattctggatacaagcatatgattgggactacaatccctcatctaccttagggacccttaaacaaggttcgtcctcccacacttttttcctttttagaaactgggattgaccatcctggggaacgtggactgaaaaccttacaaactttacatttgattaaaagtacaccaactgccctggttgggagagaattccacccagccttgatggagtgtaaagg

SEQ ID NO: 367548 - DNA, 826 bp, Homo Sapiens
tgatgaaagggtgtgcaaggtgtcaaagatatgagaaatatggagattgtcccggaagacttaaatatataggttctgtagatggaaaagtgggcattcttggattgaagccattttggaatgcagcctgtttactgtaagtagaaggataaatagaaggtaaagcataagtggaaggcccaggtaatccaggtggccactgtcctctctgaatagtaggtctaaaatagagctgtgctgaaaaggaagggctcagaataggagtaactggtaatacaggtgtttttttagtctcgaaactgtcatccagcaatagtttctcaagttcagcttgggtgagcttttctacatcaatatctaatgctcttttttgggaatctgattcaggaaacaccatgagatcataatcctgcttgttataaacctgtgctttttttctggtgctgcttgacaactcaaagcctctctgattgtcagtcacttgtctatccttttgcagttttgctaaagcctctgcttccatctgtaatgcttcttctttgtccacatcttttgctcttgttggttccggatgtgaagatggacattctttaaatccgctgttgctagatatctgagccatgtccactaaaaagaccaaaccttccttcctctatttttttcttgtagcttccaaaatagcaaggcctcaagctgcctgagcctccgcctctaccacaacctgagccgccgaagccgccacagtccgagccatttttcccctcagctggctcagccgccgccgaaagcttcggccgactccacagccagccaagcgcagcacgtc

SEQ ID NO: 367549 - DNA, 1037 bp, Homo Sapiens
  misc_feature (726)..(726): n is a, c, g, or t
  misc_feature (951)..(951): n is a, c, g, or t
ggaattcccgggatgagagcgcctgcgcggctgtcggttgatggggaggtcaggtctgggaaactaggccctggggttttccctgagcaggagcggtgcccgagggcctcaggcgtcagtccaggccctgaatggctggtctccagcggttggcgtcacatctgcctgtgggcgttatgctcccacataatacaacggaagctccagggccccactcagccaagcaagactcttacgaacaaggtgactcttcccagcagtccttgaaggggcacctgaggaacaatttccagaagcagcttttgagcaacaaagagttgattctggataaagtctatactcaccccaaatggaacacccaaacaaaagcccggagctactcctatccccactgtactggaatcagccagcaagatccagaaagtgattcccagggccaaggaaatggtttgttttactcgtcaggccctcaatcctggtatcccaaagccaataaccaggactttatcccctttacaaagaaacgagttggagtggaccgggcgttcccattgaaacccatggtccacaggaagtcgtgcagtacaggtgaggctggcactgatggggaccatacatgtctacccaaagccccctgagccgagagagttttcatctagagaactatggtgtgacggaacaagggcaacttttctgtggtttggaactgttcttgctgccacgcangcggagaaggccgtggcaaactttgacaggacggagtgggtgcagatccgaagactagaagctgcaggggagagcttagaggagggaatcccgaagaaagcagattctcctgaggggaaagctgaagaagacagagggaggacctccgaaggatcccgaacgcaaaaggacagggccagggaaaatgaaaacggagagctaccggaaaattattactcccccggnagcaaagattaaaagggtaataaaaagcaacacccttgttacaaaaccaatccttttcccccccaaaaattttgagtttttgaggg

SEQ ID NO: 367550 - DNA, 288 bp, Homo Sapiens
tcacaagtgcagctgctggcataaagagctaaatattcactcccaatcccttcctgaagccctttctttataattcttctgttgaaatagccatcatattcacagtactaatcacagcatctcacatttactaaaaacttaccccataccaggaacccagagttgggggggctgtgtcagaattatgtaatttacgtgtcccaataatcctagatgcttcttgaccatctagttttgtcaaatgagaaaactgaggttccaaagaagtcaataaacttgtccaaagtc

SEQ ID NO: 367551 - DNA, 738 bp, Homo Sapiens
  misc_feature (88)..(88): n is a, c, g, or t
  misc_feature (600)..(613): n is a, c, g, or t
atgccctacctttgcatggactattctttctaatcaagaggcgtgtgtggcgaacttggggcagcccctggaagtcttgttctttganccattacgtctgcggctgcatcaccagataatgagcttcaccacttgtctgcctcctgtgtccttccgcggggagtaaatgtcacttcagcttgccgcatctctaaataggcaaattttcagtgctcagaaaaggacctgatctttgcacaaagtgctttgatggttgcctgcttgagtcactcccaatcccttcctgaagccctttctttataattcttctgttgaaatagccatcatattcacagtactaatcacagcatctcacatttactaaaaacttaccccataccaggaacccagagttgggggggctgtgtcagaattatgtaatttacgtgtcccaataatcctagatgcttcttgaccatctagttttgtcaaatgagaaaactgaggttccaaagaagtcaataaacttgtccaaagtctgaccgactctgcttgccatgtgacgagtctgtcttagaactgggtcattgccctgcttgcaatgctgtgccctctgcaagnnnnnnnnnnnnnntggtctcctgagctcggtaaggtgctccagctgcctctaccatagcacttcctacatggactgtaacatttctttactgctccaacttctcattaaattgggggctcctcaaagccaaaaataaa

SEQ ID NO: 367552 - DNA, 1237 bp, Homo Sapiens
  misc_feature (579)..(587): n is a, c, g, or t
  misc_feature (846)..(855): n is a, c, g, or t
  misc_feature (1222)..(1222): n is a, c, g, or t
tcgggagtttgaagcttttttcttagtatcactaggtcatccacatgcaagtgttccccagcatgaggctcagacactatctccaaatccttggcatctttggccatttcacagattattttacctggaagttcaaaatttatcacatcaggctaaatatgaagcttttcgaccataacagccgctgtattagataacgaccaatgatttggtcattgttctaaacatgatgctctcggtctttaagctgtcccgttatatttttatagattggatgctatggtcagttacaagattcataccacagcatactagcttttatttgagccatgttagaaaatagggtcaatcacctaagggcaatgcatggcatgttatcaagaatctggcgagatgaattgcctgaaattcataactgagtgtgttaacggaaatcacgtgttgctgacagtgatttactcattgtcctttcgctcaattacctctctcgatatcattaacaacattaaccaatgagaggaaattagattggaaaattcactatacagcattagccactaagaggaaatcggctggagnnnnnnnnnctaatctgaacaaaggtacacagatgcaaatcttaagcagattaagtaagaccatccattctgatctctagggtatatacacccacaggcatagagctcttccacgtggtggaatctatgcaatgatagatattcacactctaaatatgaggtggtgtgtatgtgtatgggtggccacagccatgcttacctatgccatttagttggtcttacttaatctgcttaagatttgcatctgtgtacctttgttcagattagnnnnnnnnnnccagccgatttcctcttagtggctaatgctgttagtgaattttccaactaatttcctctcattggttaatgttgttaatgaattgagagaggtaattgaggaaaggaaatgagtaaatcactgttcagcaacactgatttccgttaacacatcagttatgaatttcagggaattcatctcgccagattcttgataacatgccattcattgcccttaggtgattgaccctattttcttacatgggctcaaataaactagtatgctggtgtatgaatcttttactgaccacaccatccaactataaaaatataacgggacagcttttaaacaaagatcatggcttagaacaatgaaaaatttatttggntggatctaaatacac

SEQ ID NO: 367553 - DNA, 733 bp, Homo Sapiens; identical to SEQ ID NO: 98969
  misc_feature (385)..(530): n is a, c, g, or t

SEQ ID NO: 367554 - DNA, 935 bp, Homo Sapiens
  misc_feature (470)..(521): n is a, c, g, or t
caagttcagcaaggcaacacggagccagccacagcacctgccagtggtcccagatgactgtgcccaaggcccctcagggagccaaggtgcctgccgttcagcttcaattgggtccagttgggcaagtgcaacccccaaagttccccaggctgccctcacgagtgtccacacacatctccagcgtcctcaccagccgaaggtcatccacccgggccagggcatgcagccgggcaggggacaggtactcttccaccagctgctctccaagtctgtccctctgactgccagggcccttgctctgtgggcagggcttgtgcaggccttgccagctcagctcccgcacccggacgctggaggtgctccgcacgaggcccacgggatctgtcccagcccagatccattcacatgtcacctgctggtgttgccccttaaagatgcagacgtctggcggggcgcagtggctcacgcannnnnnnnnnnnnnnnnnnnnnnnnnnnnnnnnnnnnnnnnnnnnnnnnnnnagattgagaccatcctggctaacacggtgaaaccctgtctctatacgtgttcggttgagggcctgcctcgccccagagctgtgggctgcacgtggcctgcgtgctcctctgctgtccacagtcgcaggaggggatgctcaaatatttgtcgaaggaatccgtgaacaggcagatgcacatgtagccacttagaacgttctggccatggcttttatctgttgaccacgtgtggacactgaagatgcatcctctccatcccgtctagagctgcccctgtgccaggcgagttggccggctgagggctcagcctaggtgtccggccctggcagctcggccctgggcgccctccacctccaggcgctgtctcctactccccgctctcgacgaattcgagctcgtccgatttggcctgat

SEQ ID NO: 367555 - DNA, 1169 bp, Homo Sapiens
  misc_feature (967)..(967): n is a, c, g, or t
gcaaccgcacagctgcctcggactctgacttaattccctccgcgtgctctgaatcgcagagaggcaaacccccaaacaaagagccggcagctcgcgtgcggggctcccgggctgcgtcctgccggctgggctgggagagcctggcgccggggcgtcgcggccgagcgctgggcaggcggggactagagggccggcaggaagcctccgtgggcgcaggggcgcgggcctgggctgcccacacgctgaccttccctgggctgggagggaggagcgctggctgcgggcggtgggcggctgggcggccccgggagccgccgctctcagtctctctaggcgcagctcccttcgccgcttccggagcccctggcagggcccagaagccatggcccactataagactgagcaggacgactggctgatcatctacttgaagcatttactctttgccttcaacttcttcttctgggtgagtgaattctgcagacacatcctcttccccgagcactgaatgagcccagccaccttttgtttctcccgggtcacccccttcggagggtgatctctctcccaaccgaagcattaaaggattaacccatggggcggacactcttccctatttcgaacagcaaaaaatgtcacccttctgttaattggagacacccaagtcaaacttgaattgggtgcgcctgcccagtttaaggcaacgggcaaggccttgtgtaacccaacaccggggccaattccgcgaaaatgaagaaaggcgctccctcacaccacttatatgccaaatgacgagggcctgtttgggtgggggcgccataacgaccccgtggctctcctcaaccctatacaggcgtctcccgcccccctccattttcgatggctccaaccaggctaaagttttacgtagcggcacacctacagcggccccttcttttgtccacgagagcgggagacattgccgccnctaacactgttattaacaccccgggatattacccccaacccgcgcaaatagccaactgtcaccgctttttcactgcgaatgaaaactatcctcccacacccccccacggggcactaacaacatcactaaaccgtcctctgcgaagcggacccacctctaactcggctggtatctgtgggagatcgaactccagcctctatct

SEQ ID NO: 367556 - DNA, 1014 bp, Homo Sapiens
tcgatgtgcctcccaacatgacaagctgggccagctttcataatggtgtggctgctggcctgaagatagctcctgcctcccagatcgactcagcttggattgtttacaataagcccaagcatgctgagttggccaatgagtatgctggctttctcatggctctgggtttgaatgggcaccttaccaagctggcgactctcaatatccatgactacttgaccaagggccatgaaatgacaagcattggactgctacttggtgtttctgctgcaaaactaggcaccatggatatgtctattactcggcttcttagcattcgcattcctgctctcttacccccaacgtccacagagctggatgttcctcacaatgtccaagtggctgcagtggttggcattggccttgtatatcaagggacagctcacagacatactgcagaagtcctgttggctgagataggacggcctcctggtcctgaaatggaatactgcactgacagaaagtcatactccttagctgctggcttggccctgggcatggtctgcttggggcacggcagcaatttgataggtatgtctgatctcaatgtgcctgagcagctctatcagtacatggttggaggacataggcgctttcaaacaggaatgcatagggagaaaacataaatcaccaagttatcaaatcaaagaaggagataccataaatgtggatgtgacttgtccagggtgctactctagctttggctatgaatctactttaaaaaccaataacagtgtctttctaggaagcccaaaacacatggagaagttctgagtgttttggccggatagtcccagaatgagggttccagcaacagctggaatcacccatgagatgtgagtgaggaaggctttgagatggtttcagccctagccaccactgacctcataagagaccacaagaatgagaatcacctggccaagcccagcagaccttcagaattcagaaataaaataattcatcttattttaaaag

SEQ ID NO: 367557 - DNA, 897 bp, Homo Sapiens
  misc_feature (126)..(180): n is a, c, g, or t
aataaaacataatacaaataaaaacaatacagcataacaacgattacatagcatttacattatattagggattgcacaagagaaggtatgtaggttatatgcaaatactgcaccattttacataannnnnnnnnnnnnnnnnnnnnnnnnnnnnnnnnnnnnnnnnnnnnnnnnnnnnnncctgcgcatcgttgtctggattcctccagtccctctgaggggtgtgtagcaggtgagaatctaggtctgcggggagaagtggaactccatttttgacaggtgatgccattttttgttttggacatcgtccctctgtagttctttccattcccagtcttgcactctgaaagatacatttacttttcaaataaaactacatctctcatcctaatgattatggaggacttcttgttttcagccattatcacacattgttgctctttactgtgatattggaatgccctgcaggtgaattctttgtcctcctcacattttgctgcacattcttctctgcttcctgcccccagctgcttcttagtgacactgaacagtgaagccccctgggcatttacatagtcatccagaggctctccttgaccttcataatccatcagcatcgtgaaagcacagagggacactgagcagagttctgtgctggcgccaccgcactctgtagcccgaaattggtttttaagtagatcatagccaaagctagagtagcacctggacaagtcacatccacatttatggtatctccttctttgatttgataacttggtgatttatgtttctccctatgcattcctgtttgaaagcgcctatgtcctccaaccatgtactgatagagctgctcaggcacattgagatcagacatacctatcaaattgctgccgtgcc

SEQ ID NO: 367558 - DNA, 1062 bp, Homo Sapiens
  misc_feature (36)..(36): n is a, c, g, or t
  misc_feature (80)..(116): n is a, c, g, or t
ggaattgttacctagcaactcaataaataagagcgngccaccccgcgccgttttttttctggctgtggtgagccgggcgnnnnnnnnnnnnnnnnnnnnnnnnnnnnnnnnnnnnnatcaggccaaatcggccgagctcgaattcgtcgagagcgaagcggagcaccgagccggcaaaggcttgggtgtgagacagcagcggtggcagacaccgcagaagcaaagagcagtgaggctcctgcattcgggtggagcaccatggacgaagctggcagctctgcgagcggcgggggcttccgcccgggcgtggacagcctggacgaaccgcccaacagccgcatcttccttgtgatcagcaagtacacacctgagtcggtgctgagggagcgcttctcgccttttggcgacatccaggacatctgggtggtgcgggacaagcacaccaaggagtccaagggcattgctttcgtcaagttcgcccgcagctcacaggcctgcagggccatggaggagatgcatggccagtgcctcggccccaacgacaccaagcccatcaaggttttcattgctcagtcccgatcatctggaagtcaccgagatgttgaagatgaagaacttacaagaatctttgttatgataccaaagtcctacacagaagaagatctgcgggaaaaatttaaggtgtatggagatatcgagtattgcagcattattaagaataaagtgactggagaaagtaaaggtttgggctacgtacgatacttaaaaccatcacaagctgcccaagcaatagaaaactgtgatcgaagttttagagcaatcttggctgaacctaaaaataaagcatctgaatcctctgaacaagattattatagtaatatgaggcaagaagctttgggacatgaacctagagtacatatgtccccattttgaacaacaactctgaatcttcaagttttgacaagaatgatagccgaggcccaggacgcaatctccaaagcttgtcagtgtatcaggagttccttcactgcagaaacagtttcagcattgagatatagtaca

SEQ ID NO: 367559 - DNA, 1098 bp, Homo Sapiens; identical to SEQ ID NO: 98974
  misc_feature (919)..(919): n is a, c, g, or t
  misc_feature (937)..(937): n is a, c, g, or t
  misc_feature (1002)..(1002): n is a, c, g, or t
  misc_feature (1016)..(1016): n is a, c, g, or t

SEQ ID NO: 367560 - DNA, 577 bp, Homo Sapiens
  misc_feature (238)..(315): n is a, c, g, or t
agcgggccggcccggcccgcgtctcagctgtggggacccgggggcgccgcgactcgcccacagtcggacggcgggaggcggttcctgcagggtccagtcccgggagcacccccaggaggaggggagggtgggagcgcctctctttgagtccccgggtttggtcgctgggatgtgaggaagccggagaggccgcggctggacgcaggggctgaggatccggcggctcggctgcactatnnnnnnnnnnnnnnnnnnnnnnnnnnnnnnnnnnnnnnnnnnnnnnnnnnnnnnnnnnnnnnnnnnnnnnnnnnnnnncgggggacagaagaagaggcccccacagcggcccgaggggctcctctccagctcctggccctccgccacgctcaagaggccgccggcccggcgcggccccggcctggacaggacgcagccaccggcccctccggacgtctccccccaggccttgcccagccgcgcgcgggccccagccacgtgcgccccgccccggccggcaagctccggccacagcccagcgaggaccacctatgcggcgacctcggcgggacgggaccac

SEQ ID NO: 367561 - DNA, 653 bp, Homo Sapiens
gctgctacgaagcctttgacaagcaccaccaatgtcactgcaatgcccgctgccaagagttgggaactgctgcaaggattttgagagcctgtgtagtgaccacgaggtctcccacagcagtgatgccataacaaaagaggagattcagagcatctctgagaagatctacagggcagacaccaacaaagcccagaaggaagacatcgttctcaatagccaaaactgcatctccccgtcagagaccagaaaccaagtggatcgctgcccaaagccactcttcacttatgtcaatgagaagctgttctccaagcccacctatgcagccttcatcaacctcctcaacaactaccagcgggcaacaggccatggggagcacttcagtgcccaggagctggccgagcaggacgccttcctcagagagatcatgaagacagcagtcatgaaggagctctacagcttcctccatcaccagaatcgctatggctcagagcaagagttgtcgatgacttgaagaacatgtggtttgggctctattcaagaggcaatgaagagggggactcgagtggctttgaacatgtcttctcaggtgaggtaaaaaaaggcaaggttactggcttccataactggatccgcttctacctggaggagaagga

SEQ ID NO: 367562 - DNA, 1099 bp, Homo Sapiens
  misc_feature (935)..(935): n is a, c, g, or t
tcccctcctgcaaggccactcaaccatgtgctagctggagtgatctttattcacaatgtctttacaaaggctcctgcaacacagcagcaatggcaatttggcggacttctgcgctgggccagcgtatagctcttactccacactcaccggcagccttacgatggacgataatagaaggattcaaatgctagcagacacggtggctactctgcctcggggacgaaagcagcttgctttgaccagatcaagttctttaagtgacttttcctggtctcaaagaaagcttgttactgtggagaagcaggataatgaaacatttggatttgaaattcagtcttacaggccccagaatcagaatgcctgctcctcggaaatgttcactttgatatgcaaaatacaggaggacagcccagctcactgtgctggcctgcaagctggtgatgtccttgcaaatatcaatggtgtgagcacagaaggttttacctacaaacaagtcgttgacctgatcagatcgtccggaaacctgctaacgatagagactcttaatggaacaatgattctgaaaagaacggagcttgaagcaaagctgcaggttttaaagcaaactttgaaacaaaaatgggtggagtacagatctctgcagttacaggaacatcgtctgcttcatggtgatgcagctaattgccccagtttggaaaacatggacttggatgaattgtctttgtttggacccctgcctgggccaggcccagcccttgtggaccggaatcgattatccagtgagagcagctgtaagagctggctgagctccatgacgatggacagtgaagatggctaccagacgtgtgtgtctgaggactccagcaggggtgccttcagtcggcagacgagtacagatgatgagtgccttattccccaagggagggggatgattnttctgaggaagtcatcttcaagaaaggaaccggaacatcagtaacaccagcagcggatccatgtctccccttgtggggagggcaacttatcaagcatgtttggggacccctgccccggaaagagcaggaaagggaaaagtgtccgaaaagcaaactccttgaaa

SEQ ID NO: 367563 - DNA, 784 bp, Homo Sapiens; identical to SEQ ID NO: 98976

SEQ ID NO: 367564 - DNA, 1084 bp, Homo Sapiens
  misc_feature (551)..(754): n is a, c, g, or t
  misc_feature (1019)..(1030): n is a, c, g, or t
ggcatcttttcttttcctaactgtaggagtgggctttgccaccaggaaagtggctggcatggccaaacctaacatgatcatcagtgtgaatggggatgtgatcaccattaaatctgaaagtacctttaaaaatactgagatttccttcatactgggccaggaatttgacgaagtcactgcagatgacaggaaagtcaaggtgagaaataaggaagtggcacagagtacatgcctggtttctaaatcaccactgctataagaaatcattttatgataaaaggaggaacaccattttatcataagccaaagatccctgaactcctacatctaaactgtgtttccttagatatacagttggtgaatttttccccattttattaagttgtcctcatgttaaaaaagtattattatttttagagacatgttctcactctgtcaaacaggctgccgtgacatggcacaatcatacctcactacagcctccaaatttcctggggttcaagtgtttctcccacttcagcctcctgagtagctggtaatacagctgtgtnnnnnnnnnnnnnnnnnnnnnnnnnnnnnnnnnnnnnnnnnnnnnnnnnnnnnnnnnnnnnnnnnnnnnnnnnnnnnnnnnnnnnnnnnnnnnnnnnnnnnnnnnnnnnnnnnnnnnnnnnnnnnnnnnnnnnnnnnnnnnnnnnnnnnnnnnnnnnnnnnnnnnnnnnnnnnnnnnnnnnnnnnnnnnnnnnnnnnnnnnnnntacatagagtatttcaagtgaattaaaatactataacaatgtaagaagatgtttataaaaatgggaggaaagaaataggaataaccaccccatactactaaccatcgccaatgtaaaattttctttttcataattccttccacaggaaatttgtttccaaattatggtaaattttggtattaaccacctccggggagaataaaccgtattccccataaaatgggggctcaatgtttgggttggtttttttggaaaaacctccaannnnnnnnnnnncccttggtttggccaaaaatatatttcccttggttccattttttaaaaaaatat

SEQ ID NO: 367565 - DNA, 874 bp, Homo Sapiens
gggggtcacagcaccctcctgaaaactgcagcttccttctcaccttgaagaataatcctagaaaactcacaaaatgtgtgatgcttttgtaggtacctggaaacttgtctccagtgaaaactttgatgattatatgaaagaagtaggagtgggctttgccaccaggaaagtggctggcatggccaaacctaacatgatcatcagtgtgaatggggatgtgatcaccattaaatctgaaagtacctttaaaaatactgagatttccttcatactgggccaggaatttgacgaagtcactgcagatgacaggaaagtcaagagcaccataaccttagatgggggtgtcctggtacatgtgcagaaatgggatggaaaatcaaccaccataaagagaaaacgagaggatgataaactggtggtggaatgcgtcatgaaaggcgtcacttccacgagagtttatgagagagcataagccaagggacgttgacctggactgaagttcgcattgaactctacaacattctgtgggatatattgttcaaaaagatattgttgttttccatgatttagcaagcaactaattttctcccaagctgattttattcaatatggttacgttggttaaataaactttttttagatttagaaggtgatgtaatgatgtattcattgtgcttatgatgtatttcttagtcataactgaagtgaaggaaatggggaaatttgccattatttctttggttccgaaatgaaataataacatatttcataataaattccaaggaaaaaggggatatctaatggatttcccctaggtagaaggataacacagtatgttaccatttacctgaataattaaaatccctttcttttc

SEQ ID NO: 367566 - DNA, 793 bp, Homo Sapiens
gggaaaaaggaagttatctggactcaagagggtcacagcaccctcctgaaaactgcagcttccttctcaccttgaagaataatcctagaaaactcacaaaatgtgtgatgcttttgtaggtacctggaaacttgtctccagtgaaaactttgatgattatatgaaagaagtaggagtgggctttgccaccaggaaagtggctggcatggccaaacctaacatgatcatcagtgtgaatggggatgtgatcaccattaaatctgaaagtacctttaaaaatactgagatttccttcatactgggccaggaatttgacgaagtcactgcagatgacaggaaagtcaagagcaccataaccttagatgggggtgtcctggtacatgtgcagaaatgggatggaaaatcaaccaccataaagagaaaacgagaggatgataaactggtggtggaatgcgtcatgaaaggcgtcacttccacgagagtttatgagagagcataagccaagggacgttgacctggactgaagttcgcattgaactctacaacattctgtgggatatattgttcaaaaagatattgttgttttccatgatttagcaagcaactaattttctcccaagctgattttattcaatatggttacgttgggttaaataaacttttttttagatttaaaaaggtggatggtaatgatgtattccattgtgccttatgaaggaattccttagtccatactggagtgaaaggaaatgggggaaatttgccattatttccttggttccggaaatggaaa

SEQ ID NO: 367567 - DNA, 641 bp, Homo Sapiens
gggacagcaccctcctgaaaactgcagcttccttctcaccttgaagaataatcctagaaaactcacaaaatgtgtgatgcttttgtaggtacctggaaacttgtctccagtgaaaactttgatgattatatgaaagaagtaggagtgggctttgccaccaggaaagtggctggcatggccaaacctaacatgatcatcagtgtgaatggggatgtgatcaccattaaatctgaaagtacctttaaaaatactgagatttccttcatactgggccaggaatttgacgaagtcactgcagatgacaggaaagtcaagagcaccataaccttagatgggggtgtcctggtacatgtgcagaaatgggatggaaaatcaaccacccctaaagagaaaacgagaggatgataaactgggtggtggaattgcgtcatgaaaaggcgtcacttccacgagagtttatgagagggcataagccaagggacgtttaactggactgaagttcgcattggactctacaacatttctgttgggatatattggttcaaaaaagataattgtgtgttttccatggatgttagcgagcaactagattttcctcccaaggctggatttttattcggtaatgggttagccgttgggtt

SEQ ID NO: 367568 - DNA, 824 bp, Homo Sapiens
gcgcctgcttggggctcctgtgctcagctcagcctgagcttccacactcagcgctcagcaatggcccgggggcggggcgcggtcctcgcagattctcaaaggtagccgggatcctcgtccagcagtgtcagctcaggctcagcctccccagagacaacaccgggagcctcatctctctcctcaccctgctgtgactccaccacaggtttctagagccatctgggctttccgggaacctggaccagactctggcccagtaggatgtccccgtgtcctccccagcagagcaggaacagggtgatacagctgtccacttcagagctaggagagatggaactgacttggcaggagatcatgtccatcaccgagctgcagggtctgaatgctccaagtgagccatcatttgagccccaagccccagctccataccttggacctccaccacccacaacttactgcccctgctcaatccacccagattctggcttcccacttcctccaccaccttatgagctcccagcatccacatcccatgtcccagatcccccatactcctatggcaacatggccataccagtctccaagccactgagcctctcaggcctgctcagtgagccgctccaagaccccttagccctcctggacattgggctgccagcagggccacctaagccccaagaagacccagaatccgactcaggattatccctcaactattagcgatgctgaatctcttgagctggaggggacagaggctggtcggcggcgcagcgaaatatgtagagatgtacccaagtggagtaccccgtactcacttcctggcc

SEQ ID NO: 367569 - DNA, 1220 bp, Homo Sapiens
ctgctccaagcttatgaagcgaaggttgcaacaggacaaagtgttaattacagagctcatccagcattcagcgaaacataaggttgacattgatgcagtcagaaggttgtagtttacgatcaaagctcccaagatgtgcctctctctcttcagactgttttctcactgtacttctgggtaaactggagaagagcttcaactctgttcacctgcttgcaggtgggtttgctgagttctctcgtagtttccctggcctctgtgaaggaaaatccactctagtccctacctgcatttctcagccttgcttacctgttgccaacattgggccaacccgaattcttcccaatctttatcttggctgccagcgagatgtcctcaacaaggagctgatgcagcagaatgggatcggttatgtgttaaatgccagcaatacctgtccaaagcctgactttatccccgagtctcatttcctgcgtgtgcctgtgaatgacagcttctgtgagaaaattttgccgtggttggacaaatcagtagatttcattgagaaagcaaaagcctccaatggatgtgttctagtgcactgtttagctgggatctcccgctccggccaccatcgctatcgcctacatcatgaagaggatggacatgtctttagatgaagcttacagatttgtgaaagaaaaagagacctactatatctccagaacttcaattttctggggccaactcctggactatgagaagaagattaagaaccagactggagcatcagggccaaagagcaaaatcaagctgctgcacctggagaagccaaatgaacctgtccctgctgtctcagagggtggacagaaaagcgagacgcccctcagtccaccctgtgccgactctgctacctcagaggcagcaggacaaaggcccgtgcatcccgccagcgtacccagcgtgcagccgtcgctgttagaggacagcccgctggtacaggcgctcagtgggctgcacctgtccgcagacaggctggaagacagcaataagctcaagcgttccttctctctggatatcaaatcagtttcatattcagccagcatggcagcatccttacatggcttctcctcatcagaagatgctttggaatactacaaaccttccactactctggatgggaccaacaagctatgccagttctcccctgttcaggaactatcggagcagactcccgaaac

SEQ ID NO: 367570 - DNA, 1055 bp, Homo Sapiens
  misc_feature (48)..(89): n is a, c, g, or t
cccccaaagtcgtgggggaagcggttggagactcccggagggctcaannnnnnnnnnnnnnnnnnnnnnnnnnnnnnnnnnnnnnnnnncctccctggaaccttcagcttttaagggccttggccctgggcagggttccaatggaaggttcaggagaggcagggggtgggtgaactgcggggtgagggcaggtgagctggatgtgctccccaggtggggctcgcagcaggagtgtcactgtggtcacatcctggctggtgccttcaggggtgggggttggctttgaaacctctgcctgctgttcctgttcctctcgctctggcacctcacactgttccagcctgtgtgccgctagccccttgctgtcctctcttgagccactgttgggacgcccgctgtacaacctcccagccaaggtggcagcctcaatctcctgagcccgtacacggcggatggcagctcggatcagcttgcgctcctcatactcaccagcgcttcgcaacagtgcagtcaattcctccacatcgttcatggactccagctgccctgccagccgtgccagggcagcccgctgctcagcttcccgctgctgagagtgcagccagttctccttgttgtcctgccgctcggcacggaaacgcttggatgccagggcctcctcctcgcgctccagctcctgccgctgcagttcccggatggctgagcggatgcgccgccgctctgccagatctgctgtgacctccagcagcttccgaagggctccctcatccagcccagctaaggcctcgtccgccatctcgctggcccctagctccgtcggttcctttctggtgagatccccagtgcctgtggcacctgtcaccagctcagagaattctctcagtccagcccacccgtccggcgcaggctcggcttagctctttcgggacccgacagacggattagacacgcgcaggccggaggtgccgcgacccgctgtcccaggcccgctcagcaaccgtcccctggattctgcggagcctcgtgccgaaatcgccacccaggcctcgctcctt

SEQ ID NO: 367571 - DNA, 1027 bp, Homo Sapiens
ttgccagacagcatagaggctgaggctggggccaggacccagacagagacacacggtcactgcagctgaagccgctgcccctgctacaggcaccaccaggaccagctgatcattccagcccacagcaatggagccacatgactcctcccacatggactctgagttccgatacactctcttcccgattgtttacagcatcatctttgtgctcggggtcattgctaatggctacgtgctgtgggtctttgcccgcctgtacccttgcaagaaattcaatgagataaagatcttcatggtgaacctcaccatggcggacatgctcttcttgatcaccctgccactttggattgtctactaccaaaaccagggcaactggatactccccaaattcctgtgcaacgtggctggctgccttttcttcatcaacacctactgctctgtggccttcctgggcgtcatcacttataaccgcttccaggcagtaactcggcccatcaagactgctcaggccaacacccgcaagcgtggcatctctttgtccttggtcatctgggtggccattgtgggagctgcatcctacttcctcatcctggactccaccaacacagtgcccgacagtgctggctcaggcaacgtcactcgctgctttgagcattacgagaagggcagcgtgccagtcctcatcatccacatcttcatcgtgttcagcttcttcctggtcttcctcatcatcctcttctgcaacctggtcatcatccgtaccttgctcatgcagccggtgcagcagcagcgcaacgctgaagtcaaggcgccgggcgctgttggatggtgtgcccggtcttgggccggtgttcatcatctgcttcgtgcccccaccacgtggtgcaagctgccctggaccctgctgagctgggcttcccgggacagcaattcccccaggccattatgatgccatcagtcccctctgctccttagaccactggtcttaaacccgtttctacggttcccaccaaaattccgagcctca

SEQ ID NO: 367572 - DNA, 1203 bp, Homo Sapiens
ctggcacaacgctgcgggcatcccgctgaaaccgctgtacgaggatttcactgccctcagcaatgaagcctacaagcaggacggcttcacagacacgggggcctactggcgctcctggtacaactcccccaccttcgaggacgatctggaacacctctaccaacagctagagcccctctaccttgaacctccatgccttcgtccgccgcgcactgcatcgccgatacggagacagatacatcaacctcatggggacccgatccctgtctcatctgctggtgagacatgtgggcccagagctgggaaaacatctacgacatggtggtgcctttcccagacaagcccaacctcgatgtcagccagtactatgctgcagcagggctggaacgccacgcacatgttccgggtggcagaggagttcttcacctccctggagctctcccccatgcctcccgagttctgggaagggtcgatgctggagaagccggccgacgggcgggaagtggtgtgccacgcctcggcttgggacttctacaacaggaaagacttcaggatcaagcagtgcacacgggtcacgatggaccagctctccacagtgcaccatgagatgggccatatacagtactacctgcagtacaaggatctgccgtctccctgcgtcggggggccaaccccggcttccatgaggccattggggacgtgctggcgctctcggtctccactcctgaacatctgcacaaaatcggcctgctggaccgtgtcaccaatgacacggaaagtgacatcaattacttgctaaaaatggccactggaaaaaattgccttcctgccctttggctacttggtggaccagtggcgctggggggtctttagatgggcgtacccccccttaccgctacaacttcgactggtggtatcttcgaaccaagtatcaggggatctgtcctcctgtgtacccgaaacgaagccactttgatgctggagctaagtctcatgttcctaatgtgacgaccatacatcaggtacttcgtgagtatcgtcctgcagttccagttccactgaggcctgtgcaaggaggcgggctatgagggcccacgtgcaccaggtttgacttctaccggtccaggcaaggcggggggccaacgctccggaaggtgctgcaaggtgggtcctccaggccctggcggaggtgctgagggcacg

SEQ ID NO: 367573 - DNA, 930 bp, Homo Sapiens
tgaggcgctggttgtgcacgggaatgtcaaggtcatgggctcgcttaatgcacccctccgagctgcgcgccaaggaacacgtgcaggaggtggacaccaccgagcaattgaagaggatctcgcgcatgcggctggtgcactacagatacaagcccgagttcgccgccagcgcgggtatcgaggccaccgcgccagagacaggtgtcatcgctcaggaggtgaaggagatcttgcctgaggctgtgaaagacaccggagacatggtctttgccaatgggaaaaccatagagaacttcctggtggtgaacaaggagcgcatcttcatggagaacgtaggggccgtgaaggagctgtgcaagctgacagacaacctggagacgcgcattgatgagctggagcgctggagccacaagctggccaagctgcggcggctcgacagcctcaagtccaccggccagctcgggcgccttcagccatgcagggagccagttcagtcgggcgggcagcgtcccccacaagaagaggccccccaaggtggccagcaagtcatcgtccgtggttcctggaccaggcctgcatcagccagcgcttcctgcagggaaccatcattgccctggtggtggtcatggccttcagcgtggtgtccatgtccacactgtacgtgctgagcctgcgcacagaggaggacctggtagacactgatggctcttttgccgtgtccacttcctgtctcctggccctgctccggccccagccccctggggggaagtgaggccttgtagccatgcacggtccagccatgagcttagacgactcggcagcttccgacagctcccccttgacacacggggcctaccaccgcatatcacgcctacttctgctgcttggtgactcacacgccctcatccagatgggcaccaggtactgctg

SEQ ID NO: 367574 - DNA, 1060 bp, Homo Sapiens
  misc_feature (882)..(883): n is a, c, g, or t
gaggcctgggtggcgaattcggcacgagggcggcgcagaggcgcgtcttgggtccccgcggcggcgccggtgccaagcgctggtttgcggatacccaggcagatctgcagtgcctaatgccatgagtgtggtggttcagcatgtggaggaaaaagctgtgcactcctggtcgcgcatctccacggcagggaagaaggccctggaagaggcactgcttgtctttaacccaatgagccaggatctcagtgccacagaggcccagcttgtggccttcctgcagggcctgcgagatgatggcttccaacctaccatcctgcgcagtggtgatgtctatggctatagttcatgcacagctaatcccccaagccagacgaaactgcaagctcgtgcccctaacccaactgccacatcacctccagccagtgctccccgaactgccatgcggttgcctgcaggtcgggccacactgcttcccatgccgctatctggcagactggccaaagcatccacaccagcccttgccaagcatgctaccaccaacctgctgctgagctctctgaagcaatcaagtgccagccatgcccggggtgcagcagtgggcttccccacccacctttatccaggtgtctaccctgccatgcggctctctgttgtccttgaggccctggttccacttaagactcccatgccctgcttgggtgccaagcacaaggcacagtcactgcagctctcacttgcagactctcctctgaaactgcggaaaagttcagggaaggggtcccggggaaccctcggcccaaagctcccagaaaaaacacaagcaaagggcccccagtgtctgactcgcaaaggcccctgggggcttggacccccgaacgaggnnctctgggcaccagaagcaaaaaccaacagaagccacctggggtcccccccagtgtcccggccgaaatggaaaagggggggcttctgggcccctggggccacccaaaacacagcccccaggggccaaagggtaggcctccgaaaccaactggggcccaaaaggcttgccttccgtgga

SEQ ID NO: 367575 - DNA, 919 bp, Homo Sapiens
gccccattaaccaaacgcgaggccaggaaaaccttcccccccaaagaaggggatcaagcctctacaacccaaagggttggcaacaagtggaaaaccggccctggtggggggggtggttcccaaagaacgaccagccctcaacaggcgtggacaggtgaaacggcctgttatggggtgctcccaagaacatcaagagggggtccccagagttctcccagaaaaaaaataactattcccacgtagctgctagcgtgagacgctggggccaaccccgagcatgtggggaagggcaccttatgctctgccatcacccacaatgtgatggtcttgggggcggggctttccgaggtgagtaagtcatgaggacccattgtcgtggaaggcttgagtgcccttataaacgaggcctgagctggaaggcgctgtgaggaacaggccctccccagatggcaacttggtcttggacttcccagtccccataaatgtgagagatgattgtctgttattttaagcttcccagtcagttacagcagccaaacttccagcttcctctgcccggcaacgtccctgcccccatctcccctccaccgccaccagggcctgcatccccatctgcaaaggggacagggtgcccacgccttctgaagcacgcgctctccaggccgctctccgggcgtcaccccgccctgctcccctcgcccctgcacagcccgagtccagcctggtcgctgccatcaggacgatcaggaccgaccgccaccatcagtggggaccggccagggcggttaggcccggtccggggccccaggtcccgcgtccccgccgaggccaggcagggaggcctggctgccccgggctttagaaccaaaataagccccgaaatgattggcggcgcccatgcgccaggagaaaacctaaa

SEQ ID NO: 367576 - DNA, 1093 bp, Homo Sapiens; identical to SEQ ID NO: 98990

SEQ ID NO: 367577 - DNA, 845 bp, Homo Sapiens
  misc_feature (23)..(23): n is a, c, g, or t
  misc_feature (132)..(298): n is a, c, g, or t
  misc_feature (508)..(550): n is a, c, g, or t
  misc_feature (569)..(636): n is a, c, g, or t
tggggttgaaccaagccaacctngggttcccgaaagtgctaaagattcacaggcatgaagccaacggcgccctggcccaggatttttaaaggttgaaagcatcccacaaacaattttgtgtgtgaaatgaannnnnnnnnnnnnnnnnnnnnnnnnnnnnnnnnnnnnnnnnnnnnnnnnnnnnnnnnnnnnnnnnnnnnnnnnnnnnnnnnnnnnnnnnnnnnnnnnnnnnnnnnnnnnnnnnnnnnnnnnnnnnnnnnnnnnnnnnnnnnnnnnnnnnnnnnnnnnnnnnnnnnnngatgctatgcttaatacattttttccgaatgtcactctagtgaaaattttaggggacacaaaaatgagactgttgtttggagacaatattttttgacaagagtatgcacaagacaatggcaggtataaacgttttattgtaaatatgaaaaaggaaaaaatgctttcactatattagaggacttgaagtaacgtgaagtgattccaaccnnnnnnnnnnnnnnnnnnnnnnnnnnnnnnnnnnnnnnnnnnngagatggagtttcactctnnnnnnnnnnnnnnnnnnnnnnnnnnnnnnnnnnnnnnnnnnnnnnnnnnnnnnnnnnnnnnnnnnnntgctctatcttttttttcagatgtttgagctattccaggtttttgggatttctgtggttgtttgtttttgcttttctacataattgttggataatcttgtcagtatctacgaagtgccttgatagtaaatatattaaccctgtgtatcaatttggggtaaatttcacattttttctatgttgagtttatcaataaattgatattgtatt

SEQ ID NO: 367578 - DNA, 746 bp, Homo Sapiens
agttccccggagcatgctgatcccatgtgctaagtaattagggccagttttgttcattgtcccggaaggctcgctccttcttaggttgctgggcactgtctatggctactgcactgctgccctttggggatctgggatgtccatcatttggagagactcacgtgaagaaaccaaatattcctagccggtactggacgaccacaaccagcacgtccgtcataggcagccagggcggacccatcaaagatggaggctgagccagtcttgaaggcacctcctgggaaccacaccaagacggggagcttggagcctgtatcggcgtgggcaggcgcatagatgttcaggtagaggcagtcttctgacactgccgaatttcgggtaatgcaccttgagcatgtgttgatctaagagcagccactctgagttctggaggcacaaattagggtaggaggtggcttctcgcaagttatcccagggcgatgcaggctgcgggttcgtaaatcgcagggatcccagcgggggagcagcataaggggactccgaggaacacgttcacaggcacagggcttcccagcacagtgacttgcttgccctgaatccatcccagcctggtgttcctctgtggcccttcagcagaaggcccccagttaaagtggtttttatcaaaagacaggaaaaaacggatgctggcaagagtgcagaaaacggagaaccctcgtacactgttgatgaaaatgtaaatttag

SEQ ID NO: 367579 - DNA, 858 bp, Homo Sapiens
gggggccaagagtgcgtgggcggcggcgcgcgggtgcgatcgcggagctgtgaggcgcaggcagggctctggggcacctagagaccggggccggagacgtggcagccgccctgcccgccagaaagtttcctagaagtttgctgggcgcgggcgcacgactgactggctggaccatgaacgtgttccgaatcctcggcgacctgagccacctcctggccatgatcttgctgctggggaagatctggaggtccaagtgctgcaagggcatctctgggaagagccagatcctgtttgctctcgtcttcaccaccaggtacctggacctgttcaccaacttcatctccatctacaacacagtaatgaaggtggtttttctcctctgtgcctatggtacagtgtacatgatatatgggaaattccgtaaaacttttgacagtgagaatgacacattccgcctggagtttcttctggtcccagtcattggcctttccttccttggaaaactacagtttcactctgctggagatcctctggactttctctatctatctggaatcagtggctatcctgccccagctcttcatgatcagcaagactggagaaggctgagaccataactactcactacctgttctttctgggtctgtaccgggcactctacctggctaactggatcaggcggtaccagactgagaatttctatgaccaaatttgcagtcgtgtctgggagtagtacaaaccatcttctactgtgacttcttctacttgtattgtgaccaaagtccttaagggaaagaagttaagtcttccaatgccaatctgaggaccttccgagaccagtctacgccttactagcaa

SEQ ID NO: 367580 - DNA, 1133 bp, Homo Sapiens
  misc_feature (25)..(25): n is a, c, g, or t
gcaggctggtactgcccacgagtantggatgcggccgtgggctctgtggcgactctggcgactgagcccggggaggacgcctttcggaaacttttccgcttctaccgtcagagccggcccgggaccgcagacctggaaggggtcatcgacttctcggcggcccacgcagcccgtggcaagggtcctggtgcccaaaaggtgatcaaatctcagctaaatgtgtcttctgtcagtgagcagaatgcatatagagcaggtcttcagcccgtcagcaagtggcaagcctatggactcaaaggctatcctgggtttatttttatcccaaaccccttcctcccaggttaccagtggcactgggtgaaacagtgccttaagttatattcccagaaacctaatgtatgtaacctggacaaacacatgtctaaagaagagacccaagatctgtgggaacagagcaaagagttcctgaggtataaagaagcgactaaacggagaccccgaagtttactggagaaactgcgttgggtgaccgtaggctaccattataactgggacagtaagaaatactcagcagatcattacacacctttcccttctgacctgggtttcctctcagagcaagtagccgctgcctgtggatttgaggatttccgagctgaagcagggatcctgaattactaccgcctggactccacactgggaatccacgtagacagatctgagctagatcactccaaaaccttgctgtcattcagctttggaacagtcccgccatctttctcctgggtggtcttcaaagggatgaggcccccacggccatggttatgcacagtggtgacatcatggataatgtcgggttttagccgccctctttgaaccacgcagtccctcctgtcccttccaaatccaaaaggggaagggcttgccctcactggcctaaagggcacctctccccgggttggcctccccagaggattcaatgggtaaaagccttggttctatgggaggaattggcaaggggtggtgccagcttactttgaaaaacccgccccgggtaaaacataaaatggccccaaacagggtccttgggcccacagaaccacaaaaatttcccctctataaaaacccccttc

SEQ ID NO: 367581 - DNA, 1561 bp, Homo Sapiens; identical to SEQ ID NO: 7985
  misc_feature (893)..(970): n is a, c, g, or t
  misc_feature (1430)..(1482): n is a, c, g, or t

SEQ ID NO: 367582 - DNA, 808 bp, Homo Sapiens
  misc_feature (58)..(90): n is a, c, g, or t
ccccccgaatgttcgactcactataggcgactggagcgtacgcggtggcggccgcatnnnnnnnnnnnnnnnnnnnnnnnnnnnnnnnnnatcaggccaaatcggccgagctcgaattcgtcgagagcgggggtaggaacccgagccgggctgccaccgtgtcccaaccggtgccgccgccggagcttctccgggccccgagtcatcgccgaacgccctcctcgccgcccgccgcgtcccggcgccctccggagccgccgagccgcccgcgcacacctgaagcggccgggccaggccctgcctcgatcctcagctcgtcctccccgcccaagcaccggccttcactctggagcggccccggcagccgcagcaggggcggcggcggcggatcgaggagctctccaggtcgtcccgggagagtgctgctgcagtcccgggacaggatgttctccaagttcacgctccatcctgcaacaagccggtggaggcgcttgcaccttctcttcctttacaagaagatcccgtatatcacgtggaaggcaattacccattagctacatagagacttcagatgataaagccccagtgaccgatacaaatattccatcgcatctggaacagagtgttagatatactggttcaagaagaacaatgaacgggaatctggagagacagggccatgtatggaatatttgcttcatcacaagatcttggaaacattatagtaccttggggaaagctgagtgtaagttcctgattcacaccatgttcttgggcattagtacatgcattaatgtcttacgaataa

SEQ ID NO: 367583 - DNA, 488 bp, Homo Sapiens
cagtgaactccctgggttagtgtaggacaaagcattggggctggtcactggaactgtgacaaacaatgaaaagttctgaggtggcagacaagaagggcctcgtttgaaaataaaatcactatcttcatttagtttgctgaatctgtcctccgagagtggactgtgctcaaagtaatcgtcagcatcagggctctcacaaccattaaggcctttctttcttaaagtctcaacaatatccgagttggttctgctttcatgaggttcattatattctgtatacttgagaagaactttgtccatatcagtgctagcatattgaaacagtttgttagagctgttgaaaatgatgagtgctatttcacagtcacagagcacactaagttcataggctttcttcattaatccaaactttctctttgtaaaagtgacctgtcggttcctttcatccattatgcgtgtgatttgtattttcttccgccccattttca

SEQ ID NO: 367584 - DNA, 1446 bp, Homo Sapiens
  misc_feature (220)..(220): n is a, c, g, or t
tgtgtggtcgcggaagaggggaaagacgggcgggggtgctaacgaacaggtgggcgccatgattgtcttttgtttatatctgggggcgggcggttccaatggaaacaagccggcgcatcgccgattaaaaaaaataccagtgtggttaaggatcagagacgggttcgagcggagagtgggatacccacgtgcctcaggccccatatctatagtgtagtgnagttgggtatgcccctccactcagtttttacggtgaccccacctgggggggccgtcgggccaccctctcatcgttagtggggtcaaatttctcctaatagttattctatggaacaagaaacccggtcgcggcgcggcacgagggagtgggagttctccccttgtgaacgcgcccccctggtggtggctgcttctccaaaagtataggtgtcgtcctctggaacacccagcgggcgcactggcaatgatatgcagcaaaggggtaaaccaagaaaagcctcacataggccccgcgccgagggggggtcacccaaataaaaaccccgggattcacaccattatatgggggcccacctttgggaagtgatgattaaaaaggccccttccccccaatagcttttgtttgatgggtgagggagccatataggccattccgcgttggggtcactgggatgcttcccttcttgggagggtgcatcggtaccagggagcttcttgggaatgggaagaagccctgggggtttagtaatccaggattgcccccactcaggaccagttttctagaagaagaaaggtcgccgggcgacgggttggcggcagaagctgagcacatgcttgggagattcgccacgtaggcgggtccaaatgctgatgcaaagaagtaggagcatgccacggaagggaagctcatctggtagatggccaaagatgagcttgcaaaagttggacaccgaagacccaggacttggccgcgctgtaggcccagaagggaagggtcaggaggaagaggatgtctgccaccgccaggttgagcaggtaggtatcggtcatggtcttgagcctcttgaaatagatataggtcaacacgaccagcccattgcccagtaggcccacgaaacaaatgatggagtacatgatagggaggaaccaggctttaaagttccgcacgtccttcttggagcacaaagactcgaacaaagtgtagtccactgtggtgttgtctccgatgtaatcgtccgtgacctcatcttgacacaggcatacctggaaaatgacaaggagagccaccaccagcacgcttttcattggtttccccaggtccatgacgctctctgggcggtaaaaccacacaggaaggctgtgcccggcctcgcatcccgggaatcacggtccatgacaacaaagaaaaatataataaagaggcgcaaagcgaaggtggagccgccg

SEQ ID NO: 367585 - DNA, 947 bp, Homo Sapiens
  misc_feature (55)..(55): n is a, c, g, or t
ttctggagcctggggaaaggctgtcaagccaggggcccaggtatgaagaggaagnagggagcctcgaggttcagcgggggacatcctgagcagccggacttcttggtgcttgtggagcaggaccattcggagaagggtccgagcacacgccttggcactggtacttcgtgacatctgagtggtctggagtggggcccgcaggttggagcggtcagcgaaggcacggctgcagtgggaacaggagaagggcttctcgccagtgtgggtccggacatggccttgtagcagccagggcctagagaaggccttcccgcaggttccgcagacgcagggcagcgtgtggcttcggatgtgcatcttgagggcacccaggctgaggtattccttgttgcagtatttgcagttgaaggcctttcgagcctggagatccttggcctcagagagctgggccagctgcttgggcacttggcccaagcctgggaaggcagcataggcctcggcctccaaggaagagactgaagtagaggagaaggacgaaggagccggtgagggtgggctggggggctgggagcctttcccactgtcctcatctgacagggaggtcagctctgccaccctgggactctcctggagccgaagggaggcccaggcaattggctgggcttggggcgccaggacagagtcccagatgagcattggcagcgaggcggtggggttgaggatctccggaggtgggatggctgccagcaggtgggcctggtcgtagggctgctggaaggtaaactctggattagagtcctgcagctcgctgtagttaggcttccgattggggtcggagggcttcctgacgaggaaagagcgcggcatagtggtcgaggcactggggtcgccgattcgcgcagcagtagcgcagaagaaccactcgctaggccgtgccgcggcgcaat

SEQ ID NO: 367586 - DNA, 1210 bp, Homo Sapiens
  misc_feature (49)..(132): n is a, c, g, or t
  misc_feature (230)..(260): n is a, c, g, or t
ggagtggggaaagagcgccggaagaaaacgggtgtacaggcggcaatannnnnnnnnnnnnnnnnnnnnnnnnnnnnnnnnnnnnnnnnnnnnnnnnnnnnnnnnnnnnnnnnnnnnnnnnnnnnnnnnnnnttattgttggaggaagatgtgtggggtgggtgggaaagaggggtaatcataaggcgcgccgcgttctaggtttttgcgcattgaattgatgagggatnnnnnnnnnnnnnnnnnnnnnnnnnnnnnnncagagtagtaaggagaatggaggggactagccaagggggcgaccgggaggggggcaagacgggggaggcaccacaggtgcgcgtaaaacgagccgtggtgttgcagcagggatacggccttccccccaggtgcattgtatgccctggaggatggcccatggctgggaaaaggtaagccaggcagggtttcgattggggcgcagggatgtacatggtcgggacaaaggtagtgcccaggtagaagcagaggcccacggcacccccaaactctgggcccagagacctggaaatcatgtagtaggagccaccagcaggcacaacaccattcgttgcaattgcactcatggagatggccgtgagcatcgtacaggagcagcagatgaacaccatgcagaaggactccatgatgcctgcaatgcccaccacccaggtgagccgcaggaagaggatgacgccaaagatgttctgcaggcacggcaggtacacgcccatgaaggtgcccatgcgtggggcctgcaccggcttcttttttccaccctcattgttttctgcctcttcatgctccctacttccctggggcaggttggtgtagttggccaggccactgagcaaggaggacaccatagggctggtgtccatctcctcctcaaacaaggccatgttcttgccatcatactcctttcccttctctgtgtcggtgctgttgatgaagggactgctttccttggggttgccatcacccgggttggctcccccatcgccgtcctcgcagtccgtcaggttgtttagcatggtggcggcgcggcccctggtccggggatggctgcgccgcctcgcccgcgcccctctacccgccttcgccgctctctcgttcgctgtagctctgtctcgctctccgctccacggaggaagaagcatgcagtgcccgcccgcccgatcccggaaattcc

SEQ ID NO: 367587 - DNA, 1276 bp, Homo Sapiens
agtgtgggaagacgagtcctggtaaaatgtgaaggaaagttgctcatggcctagtggttgaagataaggacttaggtgtgaagcataatgctgaaggggacgcctggctggtgggaattagattctccacacactgtcctcgggctttcaggcctcccaagtcatagcacggatggcgggttctcacctgcagtgccattggctccgcgttcttagggatctggtggcattactctccgaaggtctggctcagtccctcaattgccctgggcattccaatatcctacaggtgcagagccagccatcctatgtatgtgtggacacacatgctggcttgcctttacagtaaagagcttcaacatgtttgaaagcttggtttcaaacaggtgagctctgtgtgttagcaacagagatgctgggcttcacatatttcattgagttgaaaattaatgactgttctaaatcactcctttatgggttttaaaacgagaataatatatagtgagggtaggtaaagaaacttacccaacactgagaaatttcaggcttgtggctaccaaacagatgtacataattaaaatgagggctaggattggatttcttcaggaaaagaggcctctggtactagatggaaccagccagggaaggaagagatttgaaataaagctttggtttctgaggaatgttgccgtttgagagattcaaaaagaaagaagatccaaatttcgggactggtgtttaaattgtagtgacagattttgggggccattaaaggtatgggagtgaaaaagcggggaacagggctccccagatatgcccacgggaagacagtctcctcctacggggcagcaagcctcgggaggctcaggccatctgagcagcctccgcaaagccagtgaatccaggacgatcccaaaggctctagcccggcgtctccctccacccagggcagtctgacagacacgactttccccaaacaattcattttcctacgcagaatatgacttgaaatagtattttctctcacaagtgcagcctctccgccctagatgcatgtagctcgaagctggcctgggcacaggttgttggccctgctgtgtcttggcacttgggtggcggcacacctgtcctgtctgctcacctgcagacccacacagcaggggctgtgctctctgcttctggggactggaaaaagacacctggtgcgcgaaccccgtgcttagcacagggtagagcacgctccttcccaggctgtggcgtgttttatctatttccc

SEQ ID NO: 367588 - DNA, 1316 bp, Homo Sapiens
  misc_feature (43)..(96): n is a, c, g, or t
ctactgccggagcggggcggttatggcggctccatattaacannnnnnnnnnnnnnnnnnnnnnnnnnnnnnnnnnnnnnnnnnnnnnnnnnnnnncgcccgcgctctaagccatctccgccttcaccctgacgcctgcctcttcccctcacctttccccctcccctgttctaccatgcccggcatgatggagaaagggcccgagttactggggaagaaccgatcggccaacggcagcgccaagagcccggcaggcggcggcggcagcggcgcctcgtccaccaacggcgggctgcactactcagagcccgagagcggctgcagcagcgacgacgagcacgatgttgggatgagagtcggagccgaataccaagctcggatccctgaatttgatccaggtgctacaaagtacacagataaagacaatggagggatgcttgtatggtctccatatcacagtatcccagatgccaaattggatgaatacattgcaattgcaaaggaaaagcatggctacaatgtggaacaggcacttggcatgttgttctggcataaacataacattgagaagtcccttgctgatctccctaatttcactccctttccggatgagtggacagtggaagataaagtcctatttgaacaagcctttagttttcatggaaagagctttcacaggattcagcaaatgcttccagataagacaattgcaagccttgtaaaatattactattcttggaaaaaaactcgctctaggacaagtttgatggatcgccaggctcgtaaactagctaatagacataatcaggctgacagtgatgatgatgtagaagaaacacatccaatggatgggaatgatagtgattatgatcccaaaaaagaagccaaaaaagagggtaatactgaacaacctgtccaaactagcaagattggacttggaagaagagagtatcagagtttacaacatcgccatcattctcagcgttctaagtggccgtccacctaagggcatgtatttaacccaggaagatggggtaccagtttccttgtagtccccaatgcagccaacaccatcctgaggcaactggacatggagttgatctctctaaaacgtcaggttcagaatgctaagcaagtaaacagtgcacttaaacagaaaatggaaggtggaattgaagaattcaaacctcctgagtcaaatcagaaaattaatgcccgttggaccacagaggagcagcttctagcagtgcaaggcacagaccccacagctcctccgtacactgggtccatcacctcctgccccagatacttccgtg

SEQ ID NO: 367589 - DNA, 858 bp, Homo Sapiens
gtttgaaatctgaggggaaaagactgtagtcagcccttagtggatgagagcgcctatgctccagaaacagcaggctcccaggatggacaccccgccccctgaagaacgcttagagaagcaaaatgaaaaactgaacaaccaggaagaggagacggagtttaaggaactggacggtctgagggaagccttggcaaacctccggggactgtcagaggaggagaggagcgagaaggctatgcttcgctcccgcattgaagagcagtcccagctcatctgcatcctgaagcggaggtcagatgaggccctggagcgctgccagatcctagagctgctcaatgcagagctggaggagaagatgatgcaggaggctgagaagctcaaggcccagggtgagtacagtcggaaactagaggaacgctttatgaccctagcagccaaccacgagttgatgctccgcttcaaggatgaatacaagagtgagaacatcaagctgagggaggagaatgagaagctgaggctggagaatagcagcctcttcagccaggctctgaaggatgaggaggcgaaagtattacagctcacagtccggtgtgaggccctcactggggagctagaaacgctgaaggagaggtgtgctcaggatgcctgccaggcacaggcgcgcgagaaggagctgctggagctacagagccagcaggcctgcacccacaccaaggagacagaacagctgcgcagccagctgcagaccctcaagcagcagcaccagcaggctgtggagcagatagctaaggcagaggagacacacagcagcctgagccaggagctgcaggccaggctgcagaccgtcactagagagaa

SEQ ID NO: 367590 - DNA, 1046 bp, Homo Sapiens
ggtaccggtccggaattcccgggatctccatttaatggcgcggacgccggcggcggcgggctcctggccgggccagcgcagcggaagagccaagccagcatgtcggggacccgagcctccaacgaccggccccccggcgcaggcggcgtcaagcgggggcggctgcagcaggaggcggcggcgaccggctcccgcgtgacggtggtgctgggcgcgcagtggggggacgagggcaaaggcaaggtggtggacctgctggccacggacgccgacatcatcagccgctgccaggggggcaacaacgccggccacacggtggtggtggatgggaaagagtacgacttccacctgctgcccagcggcatcatcaacaccaaggccgtgtccttcattggcaacggggtggtcatccacttgccaggcttgtttgaggaagcagagaagaatgaaaagaaaggcctgaaggactgggagaagaggctcatcatctctgacagagcccaccttgtgtttgattttcaccaggctgtcgacggacttcaggaagtgcagcgccaggcacaagaggggaagaatataggcaccaccaagaagggaatcggaccaacctactcttccaaagctgcccggacaggcctccgcatctgcgacctcctgtcagattttgatgagttttcctccagattcaagaacctggcccaccagcaccagtcgatgttccccaccctggaaatagacattgaaggccaactcaaaaggctcaagggctttgctgagcggatcagacccatggtccgagatggtgtttactttatgtatgaggcactccacggcccccccaagaagatcctggtgggaggtggccaacgccgccctcccttgacatttactttcgggaccctacccctttgtgaacttcatcccaacttgaccccttggcggggtgtggtgcccccagcgccttggccatacctcccccccacaaaaagattgaggggaaaccgtattagcgccgctacttcggccacacccctgtacccctaccc

SEQ ID NO: 367591 - DNA, 928 bp, Homo Sapiens
tttcaagtcaaatggagaagtaaagtgaggcaacagattcaccataggctttttgaagcatcaaagggaaatataactactgatagtgaaagcccagccatgacccagatgggcttacccttgacaggaactggggaccaagagcctcccaattgccctaactcctgtcattggtattagcaatatctggccagatttagaaccagtcatggaaacttgtgctcaaactaaaagtaggtcatcacttcccagaaacagaataccttgtgcttcctgaaacagcatatatcactgtgaaactaaagaatattctacagacacccctgtagaaagaaacaaagaacaggatagtttagaaagctttctgttagctgtattcagcaaatttcatactagttgctcaggactgctagttggtatgcttttgtaaaacgagattgaacatttaataaaagatgcaactaaaatctttcctgcatgaagctaaaagcactcaagttgagagaggggcaagggaatctccccaggatgactgaagatgacttctttttacagcaagtactgttagcctttctgcaccccttagcttggcccctgctccaacttctgggtcagcagcaaggtgaactcaacagaagttgctcttgactgtttgaaggtagaagcagcctaccttttctctttgctaaaagaaggtcaaaggcttcgcaaaccaggatgcaaggtctgcggtccagaagcttgcggtgagtgtgtgccactgatggagctccaaagccaaccaccagccactcctgatgggggttgctcacactgcagctggcctatcaccaccctgcacgttccttggcacgattcaaatgttgggtggcaatgaatgtttaaacactgtatctaatgaaatttcctgctctcaaaatgacaccaa

SEQ ID NO: 367592 - DNA, 738 bp, Homo Sapiens
gtccaatagatgactttctcgtgttggtggataagtagagggagataaaatcgaacaaagttcagaggctggagcaattcaggcctcgatgagtctggtctgatcttccctttgaggaccatcgggttgaattccacgattttaaagtttatttctctcagtttggaatgttcaatccattttcgtattcgagtcagagtattccggagtcccactacatagaacaagatgttggcgtcagtgttgctgtagatgctattgatggcagccatagtggcacccatcctccctgctgcagcacaaatcaccacaggaatctcttcttccagttcttcaggagtctcggattcatcatctgcgtcattcttgggcacagtccccttatgaactttcttatacagaatcacacagagggtcacgatcagaaggaacagcagcacctgattaatttttcgtaacagagccatgtgtattcatgcggataagaactgtaacctggtgaatggtgagggtagggctttgggctcctcggtccagaagagctgcaaggcagagcgttcaaatcgtggctggccctgggctgccgccctcacgctgcttcggctgcttctaagatcccattggaagtcccaaagggctggagagccccaaggccaatattacgtttccaaaagaatattcctccccgacccgcactcccctttgcttgcgttgacttcggaacgtctcgggtttctt

SEQ ID NO: 367593 - DNA, 888 bp, Homo Sapiens
gcagaggtggaagaaacccgagacgttccgaagtcaacgcaagcaaaggggagtgcgggtcggggaggaatattcttttggaaacgtaatattggccttggggctctccagccctttgggacttccaatgggatcttagaagcagccgaagcagcgtgagggcggcagcccagggccagccacgatttgaacgctctgccttgcagctcttctggaccgaggagcccaaagccctaccctcaccattcaccaggtcctgtgggaagagcagcgtggaggtgggctgaggttagaaggtgcagagcgtggaagaagattgtgagctgagtattggacatctgttcttgaatagtccctgggcctgccataggaaaggaagttctccagggttacagttcttatccgcatgaatacacatggctctgttacgaaaaattaatcaggtgctgctgttccttctgatcgtgaccctctgtgtgattctgtataagaaagttcataaggggactgtgcccaagaatgacgcagatgatgaatccgagactcctgaagaactggaagaagagattcctgtggtgatttgtgctgcagcagggaggatgggtgccactatggctgccatcaatagcatctacagcaacactgacgccaacatcttgttctatgtagtgggactccggaatactctgactcgaatacgaaaatggattgaacattccaaactgagagaaataaactttaaaatcgtggaattcaaacccgatggtcctcaaagggaagatcagaccagactcatcgaggccctaaattgctccagccctcttgaacttttgttcgatttttatctccccctctactttatccacccaaacacgaaggaaaagtcat

SEQ ID NO: 367594 - DNA, 876 bp, Homo Sapiens
  misc_feature (679)..(711): n is a, c, g, or t
  misc_feature (815)..(815): n is a, c, g, or t
  misc_feature (854)..(854): n is a, c, g, or t
gggggggctgagtgctcagtggagagcggggagttgtgtccaccttgccgacgtcgctagccgtggggctgtcctgggaaggcggacggcgagcgcccggtgtccgcactcggccgcctgccgtgcccgtctgcgcccgtgtcatcctcactcgggacgcagggaccgtttttaaatcacaggggcgtgtgtcagcctgccctaggacttcatgtctatatatttccccattcactgccccgactatctgagatcggccaagatgactgaggtgatgatgaacacccagcccatggaggagatcggcctcagcccccgcaaggatggcctttcctaccagatcttcccagacccgtcagattttgaccgctgctgcaaactgaaggaccgtctgccctccatagtggtggaacccacagaaggggaggtggagagcggggagctccggtggccccctgaggagttcctggtccaggaggatgagcaagataactgcgaagagacagcgaaagaaaataaagagcagtagagtccctgtggactcccatgggtcataccagccagcatctgttcctgaactgtgtttttcccatcatgacggaagaagagagtgagccgcaatggttctgaaaatgtcaaacgaggcttctgttttgcacctgcagatcaccgagttggnnnnnnnnnnnnnnnnnnnnnnnnnnnnnnnnngaaatttgccgagcagtggagccctctgacaatttgcaaggccctctgagaaaggaagctgcttaaagccaggggggttagtgggtgaagggcagcgagtgctngtttttgagatcattatctgaactcaggcagcctaatanaagcagtggtgggattccatgg

SEQ ID NO: 367595 - DNA, 986 bp, Homo Sapiens
  misc_feature (696)..(696): n is a, c, g, or t
ggcgcctgtgacacaaaatggagaaagaggaaccgggagtggaaaggaagaaggaaaaccgagtaaaggaggttattcataagaacaggaaaggggccgaggggtagagaacacccgaaggaaagcgcaggaggccctcgtgagagggcaagggggaaaagatcgacgaagtaagagcgaaaagaggaaaggaaagaaagactttctagatgcggagtctccattttcagcagcgccatattcgcttttcctctcgccgcttttggctgggttttgtgtgcggcggtggacaggcgccaccacatttctgcagcttcagcagctctgctcagacacctggggagggccgcagggcccgggcgggggacgcgcgctcttggcccaggcccgggcgcggccccctccccggcctggcggttcctgcgcagcgccagccccgcgctcctctaggctgcaaagggggcctccgactcgggcccggcccggaggggacacctcactcggggccccgcggcagcccccaggggacgcgggccctctagtttcgcccacggtgtggctgggcatgcgtgccaaggggatgcgtaaccgagaaccgaaaaagacgaacttaaccttccgggaagaggagagggcgcaccctgcgggtaccggggcttgggggcgctcctggaggtgacggggtcacctccaccntgcgcggggccactctctgggagccggcgatcgatgcccgccgcggcgcctggcccaggccccaggctcctcgcggctcccggaaaaacgtccgaggtcggggctcggcgggagcccaagcgggtccctggctcgggacgccagtccggaggcggcgaactccggtttcgcggtctcagcgatttaaggcgcgcagtgtttgaagctctcggggtacctccttggggcactgggggcggtccacgactcaaagtcggggtttcgccggatcccacgtgctttggaatcca

SEQ ID NO: 367596 - DNA, 954 bp, Homo Sapiens
ggtccggaattctccggatcgcctggggagcgcgcgcgatgcagcggcgcgagcctggcggcggcggcgacaacaacaacgtcacagctcgagctttccttttcgggagtccccggcacacatcctgtgtccatgtttgggcatttacgtcacggcggcagggccggggcctcccaaaatggcagtggcccggggagtcggaagcccggagccagcgccgccgcagctatataagtgggggggctgtgggctgggggagcccggcagcgctctggagaggcgaggagccgccgcccgaggccggtgcgggcgagcgagggcgccgcggctccccgactcctttcccagaggtgagtgcccgaagccaggagcccgggcgcctaggtctgtgcgctgcggggaaccccgtaccgctcagctctccccgtccacccgcgcgcccccaagcccagcgggcgaggccccgggcgccccacagccggcgccgcgcctatgctccaccttagctgagtttgccgaacccgacgcgctcctcgtcaagtccactgaaggctgttgcgccgaacccaccgctgaattgccccggctgcctgccagggacgctcccgcggacaccgtgctacgcctgtgacggtaacggatgggcgaggcgaggggtgctcagacgacgacggcgcagctgcgtggggcgcaccatagctgagagaccaggagggacggggacattggagctatgagaataggggcgatgggaagcttaggagtcctggggtgcgcaacccccattcccacccagactgggccgacagcgcctccgcaggaacctgtgcggttatcggagcgccctttggcctgtgcacgtgtgtatagcgtgtgcatgtgctatgtgctccttgggacgtatgcgggcccctgctgaatcagaatgtgcaaaaggcacttggtgtatatccg

SEQ ID NO: 367597 - DNA, 1308 bp, Homo Sapiens
cgcgctcagcggacgactggccggatcccaacgcgctgccccttgcccagcctgcgagcgcgtggtacgaaggcgcgtctgcatccatgccccagcccggggagctggaggcgctcgcagtcagaggcgagtgatgctaggctgagcgcgtggcggcccgtgtcgtgccccgctgagccaagtgcggaagggcagcggcgcgctccagctctgctcgccgcgcgcagggcgggggggcctggccgcccgctgggagctgcggacgagcaggcgcgctgaggacccgagggaggacacggttaaagcattgctatcaactgtgaacccagagagccctccttagccaacacgctaactccgaagcctcccttacgcccccgaaccaccgaaggcggcgacacctgattcagcgcacaaacacaggtcccttctgtcccggatacaattacgcggcagacacacactcagactcgcgcggggcagccaagagacgagctatgaagtcttacactccatatttcattctcctgtggagtgctgttgggatagcgaaggctgccaaaatcatcatcgtgccgccaattatgtttgaaagccatatgtacattttcaagacgctagcctcagccttgcacgagagaggccaccatacagtgttcctcctctctgaaggcagagacatcgccccatctaatcattacagcctccagcgctacccagggatctttaacagtaccacctcagatgctttcctacagtccaagatgcggaatattttctctgggagattgacagcaatcgaactgtttgacatactggatcactatactaagaactgtgacctgatggttggcaaccatgccctgatccagggtctgaagaaagaaaaatttgacctgctgctggtggaacctaatgatatgtgtggactctgataggctcatcttataaagggggttaaaatatgcatggtatttgccaactgggccctttggggattcatggctgaaagtgggtgctcccaggtccatttaggcatacggcccagacaattagtcgcatcctcgagaccgagtgtaactgcggggacggagtatagaaatccggaaggatcgcccatgtacagataagggggtagcagaacagagggtaccccgaatcgaaagggcacaggcggaggacaacccgagtagcgggaaaagccggatagaaaatggccagggtcacacgtgtaagagagaaagaaggagcgaaaaaacacagaaaacacggcaaaatcagcagaagcgaaaacaaacaaagcaagag

SEQ ID NO: 367598 - DNA, 1139 bp, Homo Sapiens
ctaggaagcgaggcctgggtggcgaattcggcacgagggccggccactcccgtctgctgtgacgcgcggacagagagctaccggtggacccacggtgcctccctccctgggatctacacagaccatggccttgccaacggctcgacccctgttggggtcctgtgggacccccgccctcggcagcctcctgttcctgctcttcagcctcggatgggtgcagccctcgaggaccctggctggagagacagggcaggaggctgcacccctggacggagtcctggccaacccacctaacatttccagcctctcccctcgccaactccttggcttcccgtgtgcggaggtgtccggcctgagcacggagcgtgtccgggagctggctgtggccttggcacagaagaatgtcaagctctcaacagagcagctgcgctgtctggctcaccggctctctgagccccccgaggacctggacgccctcccattggacctgctgctattcctcaacccagatgcgttctcggggccccaggcctgcacccgtttcttctcccgcatcacgaaggccaatgtggacctgctcccgaggggggctcccgagcgacagcggctgctgcctgcggctctggcctgctggggtgtgcgggggtctctgctgagcgaggctgatgtgcgggctctgggaggcctggcttgcgacctgcctgggcgctttgtggccgagtcggccgaagtgctgctaccccggctgggcatcgtggccgcgtggcggcaacgctcctctcgggacccatcctggcggcagcctgaaacggacatcctcccgccgcggttccggcgggaaagtggagaagacagcctgtccttcaggcaagaaggcccgcgagatagacgaaagcctcatcttctacaaaaattgggagctgggaaccctgcctggatgccggcccttgctggcaacccagatggaacgcgtgaacgccaatccccttcacctacgaaacagctggacgtccctaagcataaactggattgacttcttccccaaagttaccccccaaatctgggattcagcaaccgggggttacctccttcctaaaaaagaagccctgaggaaaattttccaaagggaaatggtaacc

SEQ ID NO: 367599 - DNA, 881 bp, Homo Sapiens
agcgtcaagggaaagagaggagccgtcgcaggagccgcacacgtctccaactctctattgctttttgcgcacattcctaacttcctgacgtccatcccagcgggcaggcatggggtgtttgggcggcaacagcaagacgacggaagaccagggcgtcgatgaaaaagaacgacgcgaggccaacaaaaagatcgagaagcagttgcagaaagagcgcctggcttacaaggctacccaccgcctgctgctcctgggggctggtgagtctgggaaaagcactatcgtcaaacagatgaggatcctgcacgtcaatgggtttaatcccgaggaaaagaaacagaaaattctggacatccggaaaaatgttaaagatgctatcgtgacaattgtttcagcaatgagtactataatacctccagttccgctggccaaccctgaaaaccaatttcgatcagactacatcaagagcatagcccctatcactgactttgaatattcccaggaattctttgaccatgtgaaaaaactttgggacgatgaaggcgtgaaggcatgctttgagagatccaacgaataccagctgattgactgtgcacaatacttcctggaaagaatcgacagcgtcagcttggttgactacacacccacagaccaggacctcctcagatgcagagttctgacatctgggatttttgagacacgattccaagtggacaaagtaaacttccacatgtttgatgttggtggccagagggatgagaggagaaacatggatccagtgctttaacgatgtcacagctatcatttacgtcgcagcctgcagtagctacaacatggtgattcgagaagataacaacacaacaggctgagagagtcccctg

SEQ ID NO: 367600 - DNA, 987 bp, Homo Sapiens
  misc_feature (746)..(746): n is a, c, g, or t
ggcgcaactcgcaggtaggcgaccgctggtcccgccggtgaggcccctccactgccgcccgcccggcaccccctccgggccgccgtggcccgcgccaaacctgagcgtctcggtcgggaactccggttaccccctcggggcgcaaggcggcaggggtaagggcggggttgtcccccagagtttcggggagcacaggaggctggccgccccaccccaccagcccatcctcccacctccctggggccctgctgccgcgcggcttccggctggggtggacctcaggtctagccggcaagccggagggcgggcgagacaacaacgtggcctggaggcaatggccctggcctctcgtgtccccttctctcacccgcccagacttgccctctttggaggtcgcccgggctaaggtacatggaaggacgctgggtggagagtgaggggagaggatcccagctccccggtgggggaaggcgggtgttggtggggagcagctttgggaaatccgggatcaggacattgtgtgaaggacaggtggctctggttagggggcggggcgtccctgcaaggaggtgggaagggaggccccagggagttctgaaacggggaagggcctcagtgttgtggggcaagggtgttaggtctcgaatctggaagtgttcctgagtggggcgtcagaggcgaaagggctccgcaggctgggacctttgcccctgcactctgtgggctcaattgtggggagggaggcnccggtgggcaagaaggagaagtctgccctgcctgccagctgtcatgaggctgggccaccacggccccaggccagggggctaaggaacttgggtcaggaaccggccttgaacccctccccttggggaatccaaaacctcccaatttttccaaaaattggttgagagggggcttcccctccccttcaaatggaaacccccaaaaggcctgggggtatcccttctttaagagctttttttcagc

SEQ ID NO: 367601 - DNA, 1560 bp, Homo Sapiens
  misc_feature (1468)..(1468): n is a, c, g, or t
  misc_feature (1482)..(1482): n is a, c, g, or t
tgtcgaacgacgagcgcatcgattcagttgagcaatggaagcggccgcataacttcgtagtagcatacacttatacgaatttctcagtcgagtggtaccggacatatgccctgggagttcgcgcacattacaggtcgtgctagcagctccacttccaaaagacgactataacgagtgactggtgagaagccttggagggggtagcctttctggtgttaactgcatgtcaattgactggccgtgccatttaaaagaggctcttgaatggtccaaggtgatatgcacgacaatgctgacaagctggtccgtgatatttatggaggagattatgaaagatttggtttgccaggttgggctgtagcatctagtttgggaatatgatttataaggagaagcgagaatctgttagtaaagaagatctggcaagagctactttagttactatcaccaataacattggttctgtggcacgaatgtgtgctgttaatgagaaaataaacagagtttgtctttgttggaaactttttacgttgtcaataccctctcaatgaaacttttggcatatgcactggattactggtcaaaaggtcaactaaaagcattgtttctagaacatgagggttactttggagcagttggtgcacttcttgggctgccaaatttcagctaaagcatcaggtctctctctctgctaataaatgtcatccaagaggaactaaaaccagaggcattattactgcattgtttgtcactgggaaccaaaggataaaagagtagcataagctgctgaatgttgccatattaaaggagagaacttggtaacgtgaagtatttctcattgaaatgctttcccttttgtatatagccagtgttaaatccttaaatgcaatacagcctctgattattgagcttcctcttaaaaagatttttttattttatgtagccaacattgcagtactgtatgctcaaacacaaatcttaaagtatcggaactgtttagcttatgaaaataatcgactctgaatatttgttacaagtctgttttatgtgttttgattactagtgagcagaaaataacataccctgtattcaaaattactgaaatggcaatcaaagatgatcatttttatgtgattttagaaatgttaaggcaatactactaattattgtaggtttttttaacgtatcacccaaagcatgtatgtgatctttccccattagtatcttttttctcaaatgccataattaactgaaatactattattaaattttcatgagaaattctaaaatgaatcctgggaaaatgcacgttttggtgatggttgcactttctgtattttacaggaattagtcaatacatgttgaaatgtttaacattttaagatttggaggcttaattactgggagtctgtctaatgaagtcctgggactattggtaatggaatatgatttgagttcactgtgcccnttttgtttgtttgntttggtcatatatacattcagaacttttaattttaaaacaaccacaataacattaataatagaaaattccatctgtaa

SEQ ID NO: 367602 - DNA, 360 bp, Homo Sapiens
  misc_feature (233)..(233): n is a, c, g, or t
aagtataaaaaaattccgtgacgaggccagaaggtgagaagaatcagaccgctccaggcacctccctccccctcatcggatccggcccaggctccaggatcctgtggaagcagctcccagcccaggcacgccccctgcagcccacccctccctctcgctgcccccagcagttaggaggcagccggtcccatggtaggccttgcagtccgaaatgtggtcccctgggggtcagnagtgacatgggctcactgcgggaccggcagttgggtcctcatctccctggcttggattcctgtaccagggctgaaagtggggtccccagccacctttctctttcctccaccaggtttcagggggggt

SEQ ID NO: 367603 - DNA, 1174 bp, Homo Sapiens
  misc_feature (327)..(351): n is a, c, g, or t
ccggtcaggccgtggggggatctggcgcccaccaaggtcgtaggcgaagacgttccagaagacggcgaagagcaggaaggtgccgtaggccagcagcaccacccaccagccgcactggtcccgcaggcgctcctcgtagctccgcaggatggtcaggcccatgctcaccccccaccaccgcgcctgccaggtgcgccatgaagctgggctgtgggcccgaggcgggcagcggcggggagaagcgcagccacacggcccggcccacctcggagctcactgcagagggacgcggcaggtgggaggtgccctggctgcaggctgagaggnnnnnnnnnnnnnnnnnnnnnnnnnactcactgcacaccaaggccagcaccatcctcagcaacttgtagggacatctcatcccagcccagttctatgggtgtgtgcagacgagaagtggtgaggctcacctggggcccctccccacgccccccaccgggcaggcccgttaccatgacaacgttggccaggtgtgccgagcacagggcgtagaccccgccggagcctcccaccaccggggcccgcatgtcggtgatggagacggttagggagcctgccagcacgcctgccaggtagagcaggctgatgcggagcaggccgtgcaccatctccaggggcaccccgatcatcagctgcaggagggcgttgaaccccagctgctccagcccaacgtgcatgaacatgtaggtgaggaagcgccaggcgcgggcacggtgcccggggtggtacacaagggggctcttcatgtactcggggtggtaggtctgcagcacccacttgttgaggcgggccccgtaacacaggaacacgatgatcaggtccaccagctcctggtagcagacctggccctgctcgttgctctgagccagggccaccagcatgtccagcttggccgggtccaggggcagctcatggctgtgcaccaggccagtgaaggtgtccgcaccgatgaagcctgtgttctcggggtccagctgctgctcctggatgagctgcagcagcgagctcctgtccatagagcctggccgggggccggggtctggggtcggcggccgcggccgggaggggctgctctgcggacgactccgctccgccccagccggcccgctccgcccgctccgctcccgct

SEQ ID NO: 367604 - DNA, 840 bp, Homo Sapiens
agcgggagcggagcgggcggagcgggccggctggggcggagcggagtcgtccgcagagcagcccctcccggccgcggccgccgaccccggaccccggcccccggccaggctctatggacaggagctcgctgctgcagctcatccaggagcagcagctggaccccgagaacacaggcttcatcggtgcggacaccttcactggcctggtgcacagccatgagctgcccctggacccggccaagctggacatgctggtggccctggctcagagcaacgagcagggccaggtctgctaccaggagctggtggacctgatcagcagcaagcgctccagcagtttcaagcgggccattgctaacggacagcgggcactgccccgggacgggccgctggatgagccaggcctaggtgtctacaagcggtttgtgcgttacgtggcctacgagatcctgccttgtgaggtggaccgccgctggtacttctaccgtcaccgcagctgcccaccccccgtgttcatggcctcggtcactcttgcccagatcatcgtgttcctgtgttacggggcccgcctcaacaagtgggtgctgcagacctaccaccccgagtacatgaagagcccccttgtgtaccaccccgggcaccgtgcccgcgcctggcgcttcctcacctacatgttcatgcacgttgggctggagcagctgggggttcaacgccctcctgcagctgatgatcggggtgcccctggagatggtgcaccgcctgctccccatcagcctgctctacctggcaggcgtgctggcaggctccctaaccgtctccatcaccgacatgcgggccccg

SEQ ID NO: 367605 - DNA, 893 bp, Homo Sapiens
agtgcgacccgaccgcgctgaggctccaggaccgcccgccatggctgcaggaggtcccggcgcggggtctgcggccccggtctcctccacatcctcccttcccctggctgctctcaacatgcgagtgcggcgccgcctgtctctgttcttgaacgtgcggacacaggtggcggccgactggaccgcgctggcggaggagatggactttgagtacttggagatccggcaactggagacacaagcggaccccactggcaggctgctggacgcctggcagggacgccctggcgcctctgtaggccgactgctcgagctgcttaccaagctgggccgcgacgacgtgctgctggagctgggacccagcattgaggaggattgccaaaagtatatcttgaagcagcagcaggaggaggctgagaagcctttacaggtggccgctgtagacagcagtgtcccacggacagcagagctggcgggcatcaccacacttgatgaccccctggggcatatgcctgagcgtttcgatgccttcatctgctattgccccagcgacatccagtttgtgcaggagatgatccggcaactggaacagacaaactatcgactgaagttgtgtgtgtctgaccgcgatgtcctgcctggcacctgtgtctggtctattgctagtgagctcatcgaaaaagaggtgccgccggaatggctggaggttgtctctgatgattacctgcagagcaaggaatgtgacttccagaaccaaatttgcactcagccctctctccaggtgccccttcagaagcgactgatcccccatcagtacaaaggcaatgaagaaagagtttccccaccattcctgaggttcatcactggtctgccactacaccaaaccccttgcc

SEQ ID NO: 367606 - DNA, 1018 bp, Homo Sapiens
  misc_feature (972)..(972): n is a, c, g, or t
ctcgacagctggccaccctgggaggtagcgagcgaatgctttctccagccagtagcttggagctcttcatggaaaccaagcagcagaaaagggtcaaagaagaaaagatgtacggacagattgtggaggagcttagtgctgtggagctgaccaactcagacatcaaaaaggacctctcccgcccccagtaaaccccagctggttcgacaaggatgtgcttctgagccaagaagatggcttgcagtcagggtcatcttccttctcctcgctgtcgccctcctcatctcaagactatccttctgttagcccgtcttccagggagccattcccgcccagcaaggagatgctttccggttcccgggcaccacttccggggcagaagtccagtgggccttctgaaagcaaagaatcttcagatgaattagatatcgatgagacggcatcggacatgagcatgagcccacagagttcttcattaccagcaggagatggtcagctggaagaggaagggaagggccacaagcggcctgttggcatgctggtccgcatggcctctgcccccagcgggaacgtggcagactcaactcttcttctcacggacatggcagatttccagcagattcttcagttccccagtctgcggacaacaactactgtgagtaggtgcttcttgaattatacaaaacccaattatgtgcaacaggccaccttcaaatcctcggtttatgcttcatggtgcattagttcctgtaatccaaacccatcaggattgaacagccaagaccacgctggctcttctgaggtccaagcaaaaaatcactgcagaaatttatactctggctgctatgcataggcctggaaccggcaagcttacatcatcaagtgcttggaagcagtttactcagatgaaacctgatgcgtcctttttatttggcagcaaactagaaaggaaactagtgggaaatatcttanaggaaagagggaaaggagatattcatggagataaagatattggatc

SEQ ID NO: 367607 - DNA, 1178 bp, Homo Sapiens
catgaatgcagagggcgatgagacaggtgtgatggacagtcttctagaagccctgcagtcaggtgcagcattccgacggaagagagggccccgtcaagccaacaggaaggccgggtgtgcagtcacatctctgctagcttcggagctgaccaaggatgatgccatggctgctgttcctgccaaggtgtccaagaacagtgagacattccccacaatccttgaggaagccaaggagttggttggccgtgcaagctaatgtgggtcctgtgaccgcggcagctcctcagcggagccgcagactgtcctgccctgcagcatgtgcctaaaggctcaaggggatattcctctggggtggccactcccaccaccctgaccctgtctttctctctggcctgctgctctctcaacatcacatacagcttcagctgcctggaggccagaaggaaagggcagtgcaggggaggcctgagcccgacttagccagccctggctgttgtattaccaaagcagggtccatgtttgctgccttaaccctgtctcctctctgttactcagagggcctcatctcagacaaggcccagcctgctttttctcagccctgactttctaatgggctttcccccctaggtcagtcttgctggatttgtgcttttcttttgtggtttctctggccctgagaatagcatggggcttgtaaacctttgggctagatccctcctttcattgctgttgtctctgctcttccctctcctggctgtggttatttattattagtggtgtggcactgggagctgctcctaaggaagcagggagcaaatcccacctttaccccaccttcctgggaaaggcctccaaagcaaaggatctggaccagtttccctgctgtgctgtggcccaggccagagcctgtgggcaggcaggcagggcatagcgacagtgtgggacctgcccccagcttctgccacgctttatgcccttgcctctctggacgctctgcaccaaccccaggctactgagccaccttccctcctcatgccttccctgagctttggtgcatctcatctggactatgggttgtactgtgaccatcccaacacctcaccctctgtctacaaggaaatgggaggtggagcctcctggctgagaaattgttttgcaaatggatctatttttgtatg

SEQ ID NO: 367608 - DNA, 773 bp, Homo Sapiens
  misc_feature (69)..(99): n is a, c, g, or t
  misc_feature (596)..(616): n is a, c, g, or t
caaatgaaacattttattgtaaatagctcttcataggtattcctcgtgcttcactccccacccaccctnnnnnnnnnnnnnnnnnnnnnnnnnnnnnnnaaaatgatgtttattatcaggactagtgtttccatggggtgtggtgttacattaaaatgacccccctgcacagcaggggttgaatatttcattgtaactttggttccatgcccaagacacatctttgcttgatctgcagaaactagttccattgctgaactttttctttacacaatatatgtttatagttcttctcttctgatttgacatatacatgtttcattaaatgcagcatatattgtagattttcaacagggttgtgtaggaactgtcaagtaagaaaccttgaataatggctttaaaatacacagttgtagcccctggctacagggtagttcttagcttttgatctccctctcactggtgtaaacaattttgccatctttgaaggtttagaagcacttgtcttcctgggatcttatccatgttttcggttactctgtaaaacagaggaaaaaaattatttatgtatcaattttgttaatagctgaatcatnnnnnnnnnnnnnnnnnnnnngacacaaattttttattctttaccactgctttgatgtgtatgatcttatgcaagttacatctctaagcttagttactttaattttaagggagaaaatagaagtctctatgtcaaaggttgttgcaacacaatgcatataaaacaattaatggttctt

SEQ ID NO: 367609 - DNA, 1126 bp, Homo Sapiens
ggaccggtccggaattcccgggatcgcggaggaagcgctggggtcccggagggcgggggtggcggcgccggaggtcgccatggctaccgagcccgaagccgcggagccggtggtgccttcgctcgtggatcgatacttcactcgctggtacaaaccggatgtcaaaggaaaattttgtgaggaccactgtatactacagcactctaaccgaatatgtgtcatcacattggcagaatctcatccagttcttcaaagtggaaaaacaattaaaagcatttcctatcagatcagtaccaactgtagcagacttcagaacaaggtctctgggaaatttaagcggggggcacagtttctaacagagcttgcacctctctgtaagatttactgctcagatggtgaagaatatactgtgtctagttgtgttagaggacgtttgatggaagtgaatgaaaacatcctccataagccatctattcttcaagaaaagccatctactgaaggctacattgcagttgtgttacccaaatttgaagaaagtaaaagcataacagaagggttactgacacaaaaacaatatgaagaagtcatggtgaaacgcattaatgccacaacagctacgtcatgaggattgacatggaacaaaaagcaaagtgggattcttgttacctggcctaaaccatcagggtactaaaggagaagaaccagtatatgtaaagcatacctaacagccagccatatgcaggggaggcctagtgcttcacttagttttccctctctgtcttcataatgagccttggttcccatttgtctacagcctgccagatctggcctgcccatgtactcacactggtctcttgcatctctctaacaactggcatgcaaggaatgtttttctggattaaaacaaacaaagctcctttgaagaagattttggaaaataccgaaagagttttaagtagccaagtaaaaattattttacccatcatcccataatcccgaaataaaatacattttgaccctggaccaacttagttttgacctggcaagggccaccttatgcctggactattttcaccttttaacgaatccaaaaaaattcctttaaccaaccccaaaaccccctttt

SEQ ID NO: 367610 - DNA, 910 bp, Homo Sapiens
cagactggagtgccatgcaggccttgtcacactggctgtcaaaccatggtacccctgccgggctggggtgagatgactggtgcccagccatggccccccgggccctgcagcgcctcccagtgaccggttggaggaggtggctgccccccgccctgtggccctgctccacctcccaggatgctttgagccagctgggccatggagggctggcaccgagctcgctcagatgactacttgagccgggccacccgttctgccgaggcactggggccaggggcactggtgtcaccccgctttgagcggtgtggctgggcttcccagcgttctgtctgcccgcacccccgctgccaatcgggacctgccagggcccaggcccaccccgttggcctgcagggctggatgacctcgggtacgatctggctaccgggagctacgagccatcattccagcgccggtagcggcctcctccatgctgctctccttccgtgactcgaccctttgggggggcttgcgttaccctttcgaacccttggcccagtccccttgccgtccatttcccacccagagggcctccgggctcaccaaggggttgtgcgggccggtacacccctaggtctcccggggcccgtgagatgccgataccgtgccggaagaaaaccgctggccactgacggtgggtcctatgaagcggcacgaaaagcacgccccgagcggggccgcaaagcgttcatggcttgagccccccgcgagaggaaacagcgcatgacccgccttgcgattaccgtggcgaccgagggtccccaagaagcaaaagcgccagatgggcagaagtgggaacgccctgcgacagggagaacggggggacccatgtggccccaccacagagagaactcacgagggtaaccacaac

SEQ ID NO: 367611 - DNA, 909 bp, Homo Sapiens
tgggcacaggtgattattcagacaattgctactttcaggtgttattaatggcttggatttggcgtaccagccacatgttggagtatggaagaagttccgcttgggattttagcagaaagcaccattaagttcagattcccaaaccatgccaggacctctgtgaagccagggctcactcgcggttccccagggtgatgacatccccaggatggcgcatcctgggcaagcaaagccaacttcgacaccccagccccagcccctcagctcctccctgcccaccttctactatacataagccagacacctcagaagcaactctatatggctacacgagatcagaccccgctctctcttgaacccgggcccagatggttgtggtttgggacggcaggggcctagccctggaagcccagctccttgtagttggaggccatgtccttccggaacagctccagggccttgttcatgggcccccctgggcatcagcaccaaagtccccgggatgcttgctctgcagaacctggatgatgcattccgagatgaactccaggtacttcacggggatcttgtgcttggtggcatgcgactgtgccaggggcttaatctctgcctcatgatgccccttcttcttaaggatgccacccagggcggtgagcacggtggcaccatgcttctttaagtcctcagacgccttcatctcgtcctctgacttcaggtgcttgaacttgtcaaacttctccagagtctctgggtgacccttaaagagcctgatgaggacttcctgcccatggcctgggatgtcagcctccaccttcccccagacgttcagcaccaactgccattccccgtcgctgagccccatggcgcagtctgaagaagacaaaaagagcaagtatgggctcactgggt

SEQ ID NO: 367612 - DNA, 1599 bp, Homo Sapiens
cttaggctaggtacgaggctgggggtaaatcggcacgaggctccagcaccacactaattgacagcttggagcaggcatttctagcctcatggagcgcctgcatgttatggagacgcagaagaaacaagaaagaaaggttcgggtcaagtcacccagaactcaagtaggtagtgaataccgggagtcctggccccctaactcaaagttgcctcactcacagagctctccaactgtcagcagcacctgtactaaagtgctctatttcactgaccggtcacttacgcccttcatggtcaatataccaaagaggttggaggaggtgacgttaaaggattttaaagcagctattgatcgggaaggaaatcaccggtatcacttcaaagcactggatcctgagtttggcactgtcaaagaggagattttccatgatgatgatgccatccctggatgggaagggaaaattgtagcttgggtggaagaagaccatggagagaattaatgccaagtatcagattgagggcttatggaacctggtcactccctggctgcttcactcaggaaagggaactaaaaccagaatacactaagaagtttctagtttgtgtgccaaaacagaagcttctccaagcatgatggccacaggtcagtcctctttctgtgcctggcatatctggtacttaaaattctgtccaaatgtagaccatgggttcatctggagttccttgtccgtgggaacacagtgttctattctactctgaggacaacaaaccgaaggccttaaacgatggggatggatgatcccgcctctgtaggggcatggctgctattatctggaaattaggaattggatgcatcattcctgtgtgttacagtattattttaattggcctcaatggttgcagcaatcagagtcccagcgtttgtactcacagacaaggcaaaggtaccagcttttctgtttctttgaacctactgcaaaccaagaataactcatgaggtggtaccaaagatgaaagcccagacttcagtaatcttttgaaccagacgtggatgagcctgaattgtcgcttggatggcaaaaagggctgcccatgttgtgctacactatgctaaaactgtaatttagtaagaccttgggctgcctcttctgtcttaactggttctgcagcttgtccttttgcccacatagggcctatttcatgtactgttagttatctctggggactctttaactttagagccatttctttttcttcaaactgatgaacttttgtttgaaaggcataagggagtgaaaaagcttccttgaaaatccagggcggggtatggaaaggtggctgctacccatatctttttgactttctttgtttgcatgactttaactcatgggatctcctttgtagtaaaaggagacagaccattaatttcagcatttctttgtgatttataagtactgaggatgaaatacttgtctgcccctcatttcaaggccagagttattttctatttatgtattagtctaggctgatcttttagggcacaagtaaaaccatggggcggtggagcatgatttgtgaatggcaggaatcattctggggt

SEQ ID NO: 367613 - DNA, 792 bp, Homo Sapiens
  misc_feature (413)..(413): n is a, c, g, or t
gccaaaggagcctgaatttctaaactagttgatagggacacaagttagggcaagatcattcatcccagacgagtctcgctgaaaaatctgtattttttacttaaaagctttaattttaaaataagaaaaactcagctttaatagaatgcaaggccaccgaattccgggtggaaggacccagctgtattgaccttatataagctcggtgccttgccgttctcccatttgcccgcctggcctcctgaaccttctttctctcctgtttgtcatgcagtacgacgatctaccccattacgggggcatggatggagtaggcatcccctccacgatgtatggggacccgcatgcagccaggtccatgcagccggtccaccacctgaaccacgggcctcctctgcactcgcatcagtacnccgcacacagctcataccaacgccatggcccccagcatgggctcctctgtcaatgacgctttaaagagagataaagatgccatttatggacaccccctcttccctctcttagcactgattttgagaaatgtgaattaggctacttgtaccccccgcgagccggggtgttggccgggcggggacgtctgctcgtcagagtcattcaactgaagatataggcgtgttcgccaaacaagattcggcagaaaaacctctaattttcttctaatccagaacttggataaactttgatgattctaagccattacaagtattaagggtgtcaatctactggaataggaacaaggtaccacgcattatggtgacaatttctgacaag

SEQ ID NO: 367614 - DNA, 1074 bp, Homo Sapiens
  misc_feature (32)..(32): n is a, c, g, or t
  misc_feature (95)..(95): n is a, c, g, or t
  misc_feature (153)..(153): n is a, c, g, or t
  misc_feature (164)..(164): n is a, c, g, or t
  misc_feature (221)..(221): n is a, c, g, or t
atcttccctagaccagaaggtgggctggactnccagggtccattgagtaggtacccccttcccaattccccggtttgttgggtgccactcccgantgcttccaagaggcttcatgatgtccctcaggtaatttccccttcctcatccttcatntggtgtagctncagaggtggaggggcatgggtgacaccgggaagttgtacagatcactggtgctgtcncggcacaacttccactggggatgtgccagtcggggagagttgctgctgacagcacatggcgaccagtgcttggagtcagggcccttgctccaacctccaagtcctgcatgtagcctggaactgtgtagctgctgtggtcatcaggcagagtggagctgctgagtccatcagagaaggtatcagggctggaatccccacatgacttcctcttggccttgctcttagcatctcggctggacttcgactttctttcttttctctggttcttggtgagaggtggaagcatccggtacactcgcacagctgagctgcccttgttcctgctctggtctttcacctcctcgatatctggcagggagttcatggcacagcgaaagttggccttccacgtcttgggatctggctccttttcccctgctttgtatcggcctgtgtgaatggcccagctccggaacaaacaggcatccttgttgatgtcccagccatgcttggcagcatgcttccatgggatctggaagatcatctcctctttattaatccagatgagccccgggatttggttggaattaatctgcatctctagccagggtctcatgcgcatccgagtgatgggcatgttggctctgctgcaggagcgattcggcggtcgcgcgcgagggtcccggcgacgcaggggctgcagtgagggcgcgcggagcgcgactccgagtggaagagggaagaaggcagaggttgccgggttcttaaggccgccgggcacggccggcgtggactgggcacggctccgggtggcctcggttcggcggggctcgggcgcacgtcttgcctcgactaaggagtggcgagctctccc

SEQ ID NO: 367615 - DNA, 887 bp, Homo Sapiens; identical to SEQ ID NO: 99021
  misc_feature (203)..(253): n is a, c, g, or t

SEQ ID NO: 367616 - DNA, 137 bp, Homo Sapiens
gtatgggatgctgagcctgtccggcagtgcggcggatgtacggatgattcagtggctggcaggaagcccgacctgcccgcccgccagtgtcagtggtgttggcatcagcttgggcaggtgtgcgggctcaggatggg

SEQ ID NO: 367617 - DNA, 805 bp, Homo Sapiens
gccccggcggagagcggacccagtggcctcggcgattatggacccggccgaggcggtgctgcaagagaaggcactcaagtttatgtgctctatgcccaggtctctgtggctgggctgctccagcctggcggacagcatgccttcgctgcgatgcctgtataacccagggactggcgcactcacagctttccagaattcctcagagagagaagactgtaataatggcgaaccccctaggaagataataccagagaagaattcacttagacagacatacaacagctgtgccagactctgcttaaaccaagaaacagtatgtttagcaagcactgctatgaagactgagaattgtgtggccaaaacaaaacttgccaatggcacttccagtatgattgtgcccaagcaacggaaactctcagcaagctatgaaaaggaaaacggaactgtgtgtcaaagtacattatgagcagtggtcagagtcagatcaaagtggaatttgtggaacatcgttatatcccaaatgtgtcattaccaacatgggcacataaactcgtatcttaaacctatgttgcagagagatttcataactgctctgccagctcggggattggatcatattgctgagaacattctgtcatacctggatgccaaatcactatgtgctgctgaacttgtgtgcaaggaatggtaccgagtgacctctgatggcatgctgtggaagaagcttatcgagagaatggtcaggacagattctctgtggagagggctggcagaacgaagaggacatggggaccagtattaatcc

SEQ ID NO: 367618 - DNA, 596 bp, Homo Sapiens
tctctggccgcggcgtggggacagcgaggcgcactggggcctcccagcgcggggccggccgcgccgtccagcccgaggtctacggctttgcgctccgagcccagaggaagatgcctgccggcaccgagctcgggctgcggggctgaacgcctgtcttccaggcgcagcggcagcactgccctcggccggtgtcggtagcggcactcggcgtgccccgggcggacgaagagcgcaggctgggtacaccttgcccgaatcggcggagttcgcagctagcgagggcgggccggccggcccggatgggcgcggggtttgcggcccccgacgggtgctccggagcggcccgggcaccgggggcacgcttgagtgccggaaccgcggccgcagagagaacttggggcggtggccatgccccggtgcggagtctagagccgagtcggagcgcccgagggtgcccggccggtctgcggcgtcggggtctcacagtcccagacgccgtagttcgagtgcgctccagacaaagatggcgcggcggtccgggaagggctccgaggcccgatgcgttcgcttgccttctcctcttctggttggaaagg

SEQ ID NO: 367619 - DNA, 1035 bp, Homo Sapiens
gagggccactgtaggacatcttgtccatgcaggaaataatgtccaacagggggaaaccaagtgcaataaatcacatagaacaatggccgtcagtgtaccacaggaataccatgaatctggttgaaggttcttaaattactccctgggagtttcctaattcacttcaggaaggatttgttgtgttccgtctttatgctgtcactcgcaaacacttttgcttgctagttcttgtattaagatcttcatatacttgcaaaaagaggtcctcttcagattttgttccatccaggtacacaacttcccatgtgatgtcctgcatttcttgtctgtactttagatacatgggccacacatggccatcaaagtatcccggagagtctggaggctgatagacccttgtactcctcctccttggtacattcttcatatggaatagtcaggaaatagcttctattccatatagtgtcaaggggcttataattaaaaagaagaaaaccttcgatgattaaaatgggaatttcctcagcactttcctggtctgttgataccacagagtgtcttgcgctttccatccagcaggaaatggctgacatcattttttccatgttaagtgcttcaagcacatcgtactgcaaaaatccatttttatctgtctctatctcagactctggcttgaagaaatcatcctgagatatgacactgcaatttgggaggtgtttctgcaaattcttagccagtgttgttttgccactgtttgtcacaccactgattccaatgataaatgttttcataattagctttgaaaatcacagcttcctaatatttcctggcgccagttcgagtcctcccaaacacagcggcagaggcgacagccaagcgcgcgcctgtacccagtgcgccgctacccgcagctcgctccccgagaggcccacagcccctttccccacgctcctcctgggttagagggatgccaggtaggggcggtcaccagaggccccttttctctactctcggcgccgggttccagcccccgtc

SEQ ID NO: 367620 - DNA, 1142 bp, Homo Sapiens
cggtccggaattcccgggataacgggggctggaacccggcgccgagagtagagaaaaggggcctctggtgaccgcccctacctggcatccctctaacccaggaggagcgtggggaaaggggctgtgggcctctcggggagcgagctgcgggtagcggcgcactgggtacaggcgcgcgcttggctgtcgcctctgccgctgtgtttgggaggactcgaactggcgccaggaaatattaggaagctgtgattttcaaagctaattatgaaaacatttatcattggaatcagtggtgtgacaaacagtggcaaaacaacactggctaagaatttgcagaaacacctcccaaattgcagtgtcatatctcaggatgatttcttcaagccagagtctgagatagagacagataaaaatggatttttgcagtacgatgtgcttgaagcacttaacatggaaaaaatgatgtcagccatttcctgctggatggaaagcgcaagacactctgtggtatcaacagaccaggaaagtgctgaggaaattcccattttaatcatcgaaggttttcttctttttaattataatacaagggtctatcagcctccagactctccgggatactttgatggccatgtgtggcccatgtatctaaagtacagacaagaaatgcaggacatcacatggggaagttgtgtacctggatggaacaaaatctgaagaggacctctttttgcaagtatatgaagatctaatacaagaactagcaaagcaaaagtgtttggcaagtgacagcataaagacggaacacaacaaatccttccctgaagtgaattaggaaactccaaggagtaatttaagaacccttcaccaagatacaatgtatactgtggtacaatgacagccattgtttcatatgtttgatttttattgcacatggttttcccaacatgtggaacaataaatatccatgccaatggccaggactgtaccttagcaagttgtccctctccagggagcgcatagatacagcagagctcacagtgagtcagaaagtctccactttctgaacatagctctataacaatgattgtcaaacttttctaactggagctcagagtaagaaataaagattacatcacaatcca

SEQ ID NO: 367621 - DNA, 825 bp, Homo Sapiens
  misc_feature (394)..(394): n is a, c, g, or t
  misc_feature (433)..(433): n is a, c, g, or t
gaacccggcgccgagagtagagaaaaggggcctctggtgaccgcccctacctggcatccctctaacccaggaggagcgtggggaaaggggctgtgggcctctcggggagcgagctgcgggtagcggcgcactgggtacaggcgcgcgcttggctgtcgcctctgccgctgtgtttgggaggactcgaactggcgccaggaaatattaggaagctgtgattttcaaagctaattatgaaaacatttatcattggaatcagtggttcacagatgccctgacttatgttcacagacatgagccccaggttaaaacacgctttcaataaatgactgaatcgagaagtgcctccctcccgtgtgatctcctcgatgctgcaaaaactagatctaaaganggagtaactcagtgcccctttctcctggacttcacagtnccggtcagaagagacaaataactggcctgttgtgataagctacagcagacctcccagctggcccccaggtggagagagatggggaaaaggaggcatcgcagaggaaatgtgatttcatgtgtgacaaacagtggcaaaacaacactggctaagaatttgcagaaacacctcccaaattgcagtgtcatatctcaggatgatttcttcaagccagagtctgagatagagacagataaaaatggatttttgcagtacgatgtgcttgaagcacttaacatggaaaaaatgatgtcagccatttcctgctggatggaaagcgcaagacactctgtggtatcaacagacccaggaaagtgctggaaggaaattccccattttaaatccatcgaaag

SEQ ID NO: 367622 - DNA, 1226 bp, Homo Sapiens
  misc_feature (42)..(133): n is a, c, g, or t
gggcccaactgcttgctgttctctctttcttgggctctaagnnnnnnnnnnnnnnnnnnnnnnnnnnnnnnnnnnnnnnnnnnnnnnnnnnnnnnnnnnnnnnnnnnnnnnnnnnnnnnnnnnnnnnnnnnnngcttatccccatggagctctgccggtccctggccctgctggggggctccctgggcctgatgttctgcctgattgctttgagcaccgatttctggtttgaggctgtgggtcccacccactcagctcactcgggcctctggccaacagggcatggggacatcatatcaggctacatccacgtgacgcagaccttcagcattatggctgttctgtgggccctggtgtccgtgagcttcctggtcctgtcctgcttcccctcactgttccccccaggccacggcccgcttgtctcaaccaccgcagcctttgctgcagccatctccatggtggtggccatggcggtgtacaccagcgagcggtgggaccagcctccacacccccagatccagaccttcttctcctggtccttctacctgggctgggtctcagctatcctcttgctctgtacaggtgccctgagcctgggtgctcactgtggcggtccccgtcctggctatgaaaccttgtgagcagaaggcaagagcggcaagatgagttttgagcgttgtattccaaaggcctcatctggagcctcgggaaagtctggtcccacaatctgcccgcccttccagcccttccccagcccctcctcttgtttcttcattcagtttcaaacaaaaaaatttgggcgtggcaacaaacacaagaccaaagaagaaaaagagagaagaaacggaagcagataggaataacaaaaataggaagagacaagagagaacaaacagaacaaaagcagagaacacgaacaagtaacaggagaaaaagagagggagacggagacgcacaagaaagacacacacctcacgcgaggaggagagggcacagaataagataactacgacaaaacaaagaagaaatgcaaaaaagaagagacggagcccacacaaagggaaaagcaaggactaaataaacgagacgaagcgaagcggccgacgacagcataaaccagacacagacgtcgaaggcgaaaacaaaaacaacccagctggaagcagacaagaaccaacagaagagagaaagcaacaacacaccaacaatatggggggagggagaac

SEQ ID NO: 367623 - DNA, 815 bp, Homo Sapiens; identical to SEQ ID NO: 99026

SEQ ID NO: 367624 - DNA, 611 bp, Homo Sapiens
  misc_feature (14)..(14): n is a, c, g, or t
cttagggccaaggnagggaggtgaaggctaaggaagtcagatttgagatgcataaccagcaggcaaaagagcctctagaaacgccatggactttaggaagggccaagtgacaccttccatgatgttggttctggtccagatggatctggaagacaaagatttggggagagtgaccacatggctggtagcaataacaaggcctctggctctgaattgcttcctatggtcctggtagaaacttgcataagttccagagccaaggggagatgagaagccttaacgtggaagagggacaagagagatgaattgctccctctgcaacccaactcttcaaagtaagaatggttgagagcaatagtcaccaatttcccaggccagaacctggggtcctttgctgggaccagttctgcactttccctctcctcttcctccctcctttcaatcttatactcaagtaaacccactcagcatcttggctatgacgcttcaagatcctggagcactgcatgtaaagcagaagagagaagaaatgggttgaagaaactctggaggacctggaagacctagtggctaagctaggaacctggtgaaagagaacagacgatagtcca

SEQ ID NO: 367625 - DNA, 708 bp, Homo Sapiens
  misc_feature (371)..(395): n is a, c, g, or t
catagtgtgatagggtcatgtgtacggaatcagagatacttattgttggaacgagataagacatggtctacctgtcgaaaatacttccactcagaaatattgtgttcatccacaaagcaggtaaaacataagatcatgtacatttcacattggcaccagaaaggttaactgccctgccttcttggattagaaaaactaaagctgagtgataagtagttttgcaggcgtttgaacatgcctaagcctttaaatcagcaaaatactttctaaaaattctgattacaaaagtaatacatacttataaaaaattcgaacagaactaaatgaaaaaagtagaaagtgaaaaggcccctataaaacccctctggggnnnnnnnnnnnnnnnnnnnnnnnnngaagagaaaccacatttaacagtttggtgtatatctttccaaatcttttgttctatgcatattaaaaacatacatactttgatctggctcagactatacatagtgttttgccacttgcattttacacttaacatatctttgacatctttccatgtcagtacatgttggctcgatagtattctatcattaaatacgctttcaaaaatggcaaatcactttaaaaaaataattcgcacaagtacgtgtttataactttaaaagaaaatggacagaatcctaaaacacaacaacctacctctaaaaactatctcta

SEQ ID NO: 367626 - DNA, 968 bp, Homo Sapiens
gggatcacagactgcggagtgggtcagggctgcgagggctgccccaagtcctaccgggtttgcacgggcgcgcccggctccgcccgcaagtgcgccttcctgacttactgctgggtgcgcggggctgggggtgcgagtaccacccctgaagtctcttcctgggcgacctccggggcctcattctaggcctccttaaagagaaggatctaaattaggaaaaggaagtgcccttatccacgaccaagctcttccacctgcggagctcgcttagtctgcacctcaaccgtgcggaaagtgactgccctgtttactgaggaaaaactggggctcagaaagataccatggagtagtttgaaacaggaacaaaatcttctgaaagctcggagcagaagcctttttggtcaacatggaggaaaaaagacggcgagcccgagttcagggagcctgggctgcccctgttaaaagccaggccattgctcagccagctaccactgctaagagccatctccaccagaagcctggccagacctggaagaacaaagagcatcatctctctgacagagagtttgtgttcaaagaacctcagcaggtagtacgtagagctcctgagccacgagtgattgacagagagggtgtgtatgaaatcagcctgtcacccacaggtgtatctagggtctgttagtatcctggcctttgttgacgtgaaagaagctgactggatatgtggaacagctttgtcaagatgttccctggaaacagaggaccggcatcagagagggatactaacttatcagcaaccaagaattacagcatggtaatggagaacttccttacactttattccagaatcactattggaaaccaaattcttcctgggcacccgtgtctgcgcacactaaagaaccggctggagagaacaccgggcacactttcaatcccttatctgcaatcttatcgccatgccaaga

SEQ ID NO: 367627 - DNA, 2558 bp, Homo Sapiens
  misc_feature (2034)..(2034): n is a, c, g, or t
  misc_feature (2057)..(2057): n is a, c, g, or t
  misc_feature (2108)..(2108): n is a, c, g, or t
  misc_feature (2197)..(2197): n is a, c, g, or t
  misc_feature (2317)..(2317): n is a, c, g, or t
  misc_feature (2320)..(2320): n is a, c, g, or t
  misc_feature (2350)..(2350): n is a, c, g, or t
  misc_feature (2452)..(2452): n is a, c, g, or t
  misc_feature (2517)..(2517): n is a, c, g, or t
ggatccttaattaaattaatcccccctccttaaggttccgatcacagactgcggagggggtcaggggctgcgagggctgccccaagtcctaccgggtttgcacgggcgcgcccggctccgcccgcaagtgcgccttcctgacttactgctgggtgcgcggggctgggggtgcgagtaccacccctgaagtctcttcctgggcgacctccggggcctcattctaggcctccttaaagagaaggatctaaattaggaaaaggaagtgcccttatccacgaccaagctcttccacctgcggagctcgcttagtctgcacctcaaccgtgcggaaagtgactgccctgtttactgaggaaaaactggggctcagaaagataccatggagtagtttgaaacaggaacaaaatcttctgaaagctcggagcagaagcctttttggtcaacatggaggaaaaaagacggcgagcccgagttcagggagcctgggctgcccctgttaaaagccaggccattgctcagccagctaccactgctaagagccatctccaccagaagcctggccagacctggaagaacaaagagcatcatctctctgacagagagtttgtgttcaaagaacctcagcaggtagtacgtagagctcctgagccacgagtgattgacagagagggtgtgtatgaaatcagcctgtcacccacaggtgtatctagggtctgtttgtatcctggcattgttgacgtgaacagaagctggacgtggatattggaacagctttgtcaagatgttccctggaaacagaggaccggcatcagagaggtggcaccctgtgctgcgcacactaaagaaccgcattgaagagaacactggccacaccttcaactccttactctgcaatctttatcgcaatgagaaggacagcgtggactggcacagtgatgatgaacccctcactagggaggtgccccataatggcttcactaaagtttggtgccacacgcacattttgagatgagaaagaagccaccaccagaagagaatggagactacacatatgtggaaagagtgaagatacccttggatcatggtaccttgttaatcatggaaggagcgacacaagctgactggcagcatcgagtgcccaaagaataccactctagagaaccgagagtgaacctgacctttcggacagtctatccagaccctcgaggggcaccctggtgacgtcagagctttgagagagaagcttcactgaaacggagcaaaccttccactgagaagccacttcaagaggctggtgctgctagatctcatgatgtggctgttgggaagatggtggggtttgtttgccagcttggagtcctattaaatgaaagccagcaactcatgttggtaataggtctactgtgggaacagttatccctaaccacagctcaaaatcgctatcatctttaggcaaattaaaatctatgtggcagtgctcatgacacaaccacaatccgaaacatctccaatatttccctcaccaaaacccgatcgcaaaacgactacaagcacgaaccgccgaatcgtaatggtccccgcgggaacccctatcccctctatagcctagaaatttcttcggtccggtccccccgctttcccaaaaacttttccaaaacaccccccgtttggccgcggcggtctcccttatggcacaataacccttttgtcccatcttgtttttccccccacaaaacccccgggccctacgccccatagggtcctcgcggcttttcttcccaccgataaaaaaaacccccccgcgggtgttaaccacacacaccgcggctctgtaaacaacaaatttccctaaggcagggcggggtccctggggaggagggcctcaactcacctgcgggatcttcctatcccacaaacagagggcgcggcgcctcttgcgcgccggcgcccctccgcccgttcgtctcacaaatttttctccgccctctcacgccctgtccttctaccgcccgcgtgtctgtgttttcgcctgancgccgccgctaccgcgtggttcnttgccaccgcggcctgttctctatttaacgagtgtggccccgtcctcgccnaccactatcacttctgtggaagagagccttatacttattgcgaccccgccgctcttgtctttgcgtcacgccacacttccttgtatttnatttccgccgccgcccgtggctgttctaccccacgacacatcacctttgtgtggtgtccaccccttctcgcgctggtgcacgcgactattattgtctctgacgcgcagcgggagggaganaanacgccgcgcgcggggacgcaccacacaaanataagtgtgcactcataattgccgtgcggcggccgtctcacgagaagattctatgtctgttgggtgcccaccaactcctctccgctcgataattattgtgtnctcccgacccattaccacaataaacacgcgcccctccagtctataacactcttttccaccgccantatatacgccccgcgtctcttctccccgcccctcaaccccg

SEQ ID NO: 367628 - DNA, 1266 bp, Homo Sapiens
  misc_feature (1195)..(1195): n is a, c, g, or t
aacacttctttgtaatgctatgtaaagatatcaccaacaatcccaatttataaatacacacccatacacattttcttttccaaaatggtaatatcccaaacacgaaaacaatcgaataagagaacaggctaaatagtgatttttctctcccaattattactactgaaacaaatcaaaacaactctaagaggttgccagcaccgcagaaggcatttccacataaaaagagttaatgagcagaccacgcagttcaacagccagtgaccatttgcaagcctcctaggtatattcccagcagacacattatcagattaaaggaagtgcaaacaaactgggctgaaagtttctttgtccaaacccagcctcttcttcctgtgatgtcatattacaaatctaggaagcctttctttttcacttcagagaaagcgacctcaagatacaactggcaactgaggaaaaggcctcaattcaacaagagctaacaagcttgggagtttatttcggaatctttaaaagactcttctgcttacccacaatctgggatccactgcaggaaaacaaaaaaggaaaacttcatttaaaagaagcaagaagtaaaatgggacaaattgggaatgtttaagtctctgaaactctgcactgaaaagaaaataagattgataacttaagcttaacattctgaggcataaagaaacattaactttggagtattcatcttgactactgaaatacaagtttagaagacaagtggtttcattctggtcacagatcacagcttttctttaaatttataatcctatgggttggactcgttgactgtattttttaaaggttgctcgtcagttaactgagccttggaattcatggattttctaaagactaacaaatgaaaatattttcctgttgaagaacccagcggaaattttacagcaacaaatttcatgtttcttttgggtatttctgagaaaaaaggaaatatttataaaaccatccaaagatccagataatttgcaaataaattggaggttatagaggttataatctgaatcccaaaggagactgcagctgatgaaagtgcttccaaactgaaaattggacgtgcctttacgatggtaagcgttaacagctcccactggcttctataatgactccttttaagtacacttgtatgggtgcatgtccagcatgggtgttngtgcttggggttaatatccaattgttgttgccatatacattttcatctgccgtctcaaagtccgaaatgaa

SEQ ID NO: 367629 - DNA, 785 bp, Homo Sapiens
tgggacccatacagggggttctcaaacatctcgggcttcgtcagcggcaggtcctcctgaggcagcgtgtcccctgcgttcttccccaggtcactgggccttgactcctgtgtcctgggagggagaccccggtttgctgttgagggtaaaaacttcttgggtgatatgggcggctggccgggaggtgtcggaggactttctcccctgcagggccccagcggggagtccttgggcggctggtcgtagctccaggctgtgggctgctggtcaggggacaaggtctgcttcacgtgcaggggcattggtggcccaaagggccccactcccatgtagttggggttgatgatttcagtgatgctggagccactgcacggaggggccctgctagtgacttcccactgcttcatggggtcgtggctggtgaggctcttcagggtctttggcccactggattcatcacgctccgtcttcacaaagtcatagagcttctccctcgtcttgccctgagaggtctgcagcttgatctcccactggaagtggcctgtcaactccccatggtgggtgagaggcgtgtagatgggcagctgcgtttctgtggcctctaaccgaagggcaatgcagccctcgccataggattcgtcgctgtcagaggacttgatgctgatgaggatgtgctggtctagcaggtactcagggtcagagataatgggcttcagctttggaagagtctcaccaaacttcaccaccagctccccctcacttccttcttcattttctccttcctg

SEQ ID NO: 367630 - DNA, 632 bp, Homo Sapiens
tggtgaacattttcccccagtggcttcacctcattcctcccactggccttaccccttccttccccagtggaagcattttcaaaagcaaagataattttcgctggtgaacttcagaacttgccttcagggttagcttcatgtaattttaccatttcccatccccattccccaccacattatgtcaagattcaagttataaattaacgttttacttagactttgaaagagatttcatgagtaatttgaatgaaccttgctgaattaatctgaatagcaactgtctgacttgataactccagtgccagtatagtggctgctgcatagacactattcagtaaatgtctgatgaaagaaatggactttttccctttaatactgatgatgcaattttgaaatgttgcttgttctggaatacttcggaagttaaacaataaagtcagcttggagaggagatcatgatctttatactgtgaatagcagaatgtcacagatgaagaatattaaaattaggggcgtccactccaaaacatatcaccagagtgacaacttcagccctcagcctctgcaatccatatatatcctggtcttgggagtccatagaatactgtttccttctaataaaggtttcaaac

SEQ ID NO: 367631 - DNA, 814 bp, Homo Sapiens
  misc_feature (449)..(503): n is a, c, g, or t
atcattggcacatgattctgtgcctgtttctgggggtcattcccatgagaagagcaggtagaacttatgagaatagagcagtcgaaatattataggtttcatattttacggctttattgaaaacattgatatattgaatattcataaattttaatttaactttcttttataatccttaatgtgaggctaaggtataaggagaaaggagattggtaaggaagtgtgatacatattgaatcaggtgtcaaggtaccatttgtgcctggatctgaccaatagaccaaggtaaaaatctcaaagaatgagacttgtaatgagaatgccacaaacttgaataccttatgcacaaaacacaaacattgttatgcataatgtacatgaaccctgaaacaaagataatgatttggaccacccaactgaagtggcatgttatgtttttggcatgaacnnnnnnnnnnnnnnnnnnnnnnnnnnnnnnnnnnnnnnnnnnnnnnnnnnnnnnngttactttaaaaatagctataacgctttgcaatttcagtaacagttctgcctctgatgcaatgtaaaacatgtattagacattcaggctccacaataaattttaatgagcactacaaatttagaatatataaaaatatcagtaacctatgaattcatcaacataactcacttttcagttaagttaggctgagttgaaattctactaagttttcccatattcttgataaagggctaaatttgaaactaatttatttagatgactatattggcaattttgatagtagttacattttatgtaacacttgatata

SEQ ID NO: 367632 - DNA, 912 bp, Homo Sapiens
agcgggtgaactgttgcaccgtgcaattgcacactataaatgtctttccttatctgtgtgtactcttatctcactgttctattttttctcctcatttatattaactcttcttacctttttttctgaacttctaggccttctctttccagaactggtggaagacaaatgaaacggccaagatggtaagaaacaagccgcatttctccttggggagactgataatttaaaaggtttgttgtgtcagaaacattcccagcttcatcaccaaccctttccttccacctctgcccactggagaccacttacatcccgaagcggacgcggcagctgaagtcaggaaaccatgcatcacattagcaggagccaactgcagactttaaactccgttcaacatgtggatgcggcagagaaatgaccgtgtccagacaagccggggcagcttcataaactggttcatctgctccctgtgcgtcccgcgggtgcgtaagctctggagcagcccgcgtccaaggacccggagaaaccttctgctgggcactgcgtgtgccatctacttgggcttcctggtgagccaggtggggagggcctctctccagcatggacaggcggctgagaaggggccacatcgcagccgcgacaccgccgagccatccttccctgagatacccctggatggtaccctggcccctccagagtcccagggcaatgggtccactctgcagcccaatggtggtgtacataaccctacgctccaaagcgcagcaagccagccaatatccgtggcaccgtgaagcccaagcgcaggaaaaagcatgcagtggcatcggctgacccaggacaggaggcttaggtcggaccatcccttcacgccgcaggaagcgggcaagggaaggctgatgctgtagcatctgg

SEQ ID NO: 367633 - DNA, 1071 bp, Homo Sapiens
  misc_feature (849)..(849): n is a, c, g, or t
agcggagcggctggctgggctgcctgttgagtcagccttcttccctcacggctcttctcccggtccctgaaactcggctgccaggggagctggagccacctgcgaaggtgtcctcccatactggacccctacaggaagctccgtgtgcccagctggggcacagccccagctgatgccccagaggggccacccatcgcaagaggggctttgggctctgccctccctccccatggcgcatgggccaaagcctgagactgaaggactgttggacctcagcttcctgacagaggaggagcaggaggccattgctggcgtcctccaacgagatgcccgcctgcgccagctggaggaggggcgggtcagcaagctccgggcctcagtggcagaccctgggcagctgaagatcctgacaggggactggttccaggaagcacgctcccagcggcaccacaatgcccacttcggctctgaccttgtccgagcgtctatgcgcaggaagaagagcaccaggggagaccaggctccaggccacgacagggaggctgaggctgctgtgaaagagaaggaagaggggccagagcccaggctcaccattgatgaggcccctcaggagaggctcagggagactgagggacctgatttcccatcgccttctgtccccctaaaggcttcagatcctgaggaggcgtccccaggcccaggaagatcctggccaaggagaccaacaggtctgtgccgagaaggctgacccggagctggagcccgcgtcgggggggagaaccaggagccgcggccccagcaagcccagaccaaggccgcgtcccagatcctggaaaaaaggggggaggnaggcccccgggggcccgaacccctcttctcgaccgcatggctcagcagcaaggctccttcggtggccccagcctttaaactcctcccacgcctgaagccggcagcccagaaatggagccttgtccagggccaaaacccgcaaaagaggcgggggcccaaggggtcccccccgggcttcccgtgggcacttttctgcgcctggcaaaattaacgaagagcccg

SEQ ID NO: 367634 - DNA, 1178 bp, Homo Sapiens
cagctgcttctcctcaggtgtggaatccatccagggcacctgcagcccatagctgctgccggtgcccaggctgaggcgtgtgcctcccagctggcggttggccagggccccatggtcccagagggagagctcggcacaagcctggcgcaggtcagcaggcccaaagccatcgtacaccatggtgtgattgaacacagggctgaggctgcgtcgcacaacccttgtacgctggcggctgccccggctgtcatcaggcagcacgaaagcattgttacgtaagtgtccagggatcctgcccgcaggcggcaggaggccccgagcctccttcaccccagaagtgcagctccccgctcgggggcagtcctgcgccctcggagccggcggggacgtacttgagggacagggcgagtaacccgcggctcggaaggtcgtcgggagagggtggggacccggggctgcagggggagccaggtgggctcagagccccagtcccacgtgtccaggggcacttcaacttcgcccagaaagatgttgcgacccaggctttcgcggtgccacacagacaggctcagcacgcggccctgaagctcggcctgcgggacagagtaccggagagtctcgttgaaaaccggattcagattccgtttcttcaccgccgttttgcgcttgctctgcttatccgggaggaggtagcttttgacgtaggggtccgagcggcggcgccgggcggcggccaggccctggcactggatcacgtgcacgcgcagctcggcggcgcccggctcgtagtgcagcgcgaagtgcacggagccgcggacctgcaccgcctccgcgtcgcctgacaggctcatctggctgccgctcagcgtggaggagttaaggctggacaccgaggagctgctgctgagcatgcggtcgagagaggggtcgggccccggggcctcctccccattctccaggatctgggacgcggccttggtctgcagagggggcaagtgacggggcgccccttctttccccacccctgccccgagcgccctgggtcgcgggcggctcgcagccctgggcaggagcgctccccgcccggagtccgctccggatgtgagagcagccacgggccactcccgcctacctgggcttgctgggcctcgtcttgagacgccacccaggcctcgcat

SEQ ID NO: 367635 - DNA, 775 bp, Homo Sapiens
  misc_feature (92)..(104): n is a, c, g, or t
gttataaacataagaccaagtgttcttatagttatttaaaaactacaactactcaatggataaggaatagataaggtctccttattgtaccnnnnnnnnnnnnngaagtttatatgccagcaggccttttgtttttttccttttcagaatgtttcttattctctgaagcatcagcattttgaagtgtcttttatggaagtggggacagaaatgggggtaaaaatgagtgtaaacaaagcctagccctacggtcagtacccactggaggtgagaagcagaatggccttggttgtcctggcacctggcccaggggcctaggacagaggtcaaggctaggcccctgtgtctggccagattctgccttatagaattcaaatctttcttacaagggttctggacccgtttcatttctagatatatacctaattctccaaatcattgtcattgggcctcagtagtaaatctcacctctgaagtcttgcttcagtcgctattaatattaccaagtaataataacagcacaggcagagtttatcataatgttatttttaatttgtcatactttattatggttttgtaaggtacatgaaaatgtaattatgtgtgatttgtaggtattaacagaacttagctaattgaatttacatgaaactaaataaaatctttactactgagccccaaatatgtattgtgctatgcctgtctgtataatgtacttcatatagtttaacaatgcacttcagtgatacaaaaaaattctataaaataaacctat

SEQ ID NO: 367636 - DNA, 969 bp, Homo Sapiens; identical to SEQ ID NO: 94046
  misc_feature (703)..(703): n is a, c, g, or t

SEQ ID NO: 367637 - DNA, 883 bp, Homo Sapiens
  misc_feature (175)..(205): n is a, c, g, or t
agcggagtgagactttcctgtcactggctactactactcccaaccctcctcaaagccgccggagcaacccccaggtctttactttacaatcggcaatttgacttgctctgctgcatgtctggagggaccaaggaaagtgtggagacgctccaaggattaggtgatcggagcttgnnnnnnnnnnnnnnnnnnnnnnnnnnnnnnncccacccaccctaacaaatatgaggctgctggagagaatgaggaaagactggttcatggtcggaatagtgctggcgatcgctggagctaaactggagccgtccataggggtgaatgggggaccactgaagccagaaataactgtatcctacattgctgttgcaacaatattctttaacagtggactatcattgaaaacagaggagctgaccagtgctttggtgcatctaaaactgcatctttttattcagatctttactcttgcattcttcccagcaacaatatggctttttcttcagcttttatcaatcacacccatcaacgaatggcttttaaaaggtttgcagacagtaggttgcatgcctccgcctgtgtcttctgcagtgattttaaccaaggcagttggtggaaatgaggcagctgcaatattttaattcagcctttggaagtttttgggcatcgttataacaccccctgctcctgctgctttttcttggttcatcttcttctgtgcctttcacatctattttttctcagcttttatgactgtagtggttcctctcatcattggacagattgtccgaagatacatcaaggattggctggagagaaagaagcctcctttaggtgctatcagcagcagggtactcctcatgatcatctacacaacattctgtga

SEQ ID NO: 367638 - DNA, 1123 bp, Homo Sapiens
  misc_feature (23)..(23): n is a, c, g, or t
  misc_feature (36)..(36): n is a, c, g, or t
  misc_feature (53)..(53): n is a, c, g, or t
  misc_feature (71)..(71): n is a, c, g, or t
cccccaccctccccctcccggangatccttaataanggggtaatttcccttangggttatcccccaaatanaacttgggccaagtccatccttataaaacccacccaataatagccctccttaaaaaattccaaaaatcactcccacttggctaacaaaataaatgcaaattaattcaataattattgaagaaattaaatttttaaaaattaaaaaattgcaatgttgaaattctcaaccaggcttatccagaccttttcctatactactaactgccctgggcttatcttaaatactgctcagaagatttacttgttttacaccaggataggcaaagtatggcccacagtgtatttttggactgtccgcaagcacagttgctataatttttaaaaggctgaaaactttaaatttttgtaaatatgctcattaactgtttattaggcttcattaattttaaaatatacagagactatcctattcaactatatttgtatcctatttctaattctcctaacaattatatacactggcaaaaactcttcagatgatatataacggcaaaaggtcaaatatactaccgaattcatccagctttccaaagatgctcaaaatctttctgtgtctctcactccctcccttaacccacataccacatctgaaaaaaaatgatatggtgtaacgatgccagtattctaaatgcttgaagggcttatcacatgccctttccaagctgtgacagaagcatgtcccttggaccccggcatcctgtcaatctcacctctgaaggtgacccagtctcatacttcactgaaacaaagaccattagacgccagcactcccgacttcttttatctccactttaaacatttctccatatagtaatcctcactttctactcccttgtcatctcccgaaaaggagttctctactcctctttccaccagtaagtttctcaaatttgtgccttatttctacccctcccaaatattccaggagttgtcccactaataattcctctcctggcatcttaatctccatcctcttccgtgttccttccctcagctttacaatcctagacctaacacgtctctggatctgcaggccttaaccaatttaaccc

SEQ ID NO: 367639 - DNA, 1317 bp, Homo Sapiens
  misc_feature (590)..(655): n is a, c, g, or t
  misc_feature (1168)..(1182): n is a, c, g, or t
accatgctggcaccggaccggaatttcccggatgtgacggtggtgaagacggttgtctgctcaccactccgagaccaggagtatggccagccctggcctctgccctggccagctctaggagaccggactcctcggccatggaagttgagcccaagaaactgaaggggaagcgcgacctcatcgtgcccaaaagcttccagcaagtggacttctggttctgtgagtcctgccaggagtacttcgtggatgaatgcccaaaccatggccccccggtgtttgtgtctgacacacctggtgcccgtgggcatcccagaccgggcggctgctcaccatcccacagggcatggaggtggtcaaggacactagtggagagagtgacgtgcgatgtgtaaacgaggtcatccccaagggccacatcttcagcccctatgaggcggcagatctccaccccggaggaatgcagcgtggactacttccacgcggctcacccgcgaaccagacacccagcctactggcgcccccatcatgggcccgcaccacgacccacgccccgctggacgcggtcgtcgccgacccgccacgcccgccgnnnnnnnnnnnnnnnnnnnnnnnnnnnnnnnnnnnnnnnnnnnnnnnnnnnnnnnnnnnnnnnnnnatccaagcgccagccccatcacagacgagctcagccggccgcaccgccccgcaggcgcaaccaacccccccagcacccactcgagccgaggagtcagcccccagaacctgccccgccctcgcacgccccatcacaccacaccccggtccgcggcagaccccatgagtgactgcgccgcgcaatggaagagcgcccggccggcctaggacactcctcgtcacccgaggcacgcgcagccctatctccaagctgcgcgctccggacctcctacaggtcgcgccgtgtcgcccgccccataccaagacgatagatgcgaccgcccgcgactcatgcccgaccgcctgattccacccaagtgagcaccacagtggctgaaggccgcgagccccgcggcgccggtggacgagaagtgcgaggcggccacccaggatactcggccagacggcaggcgccgccagggacaggacgcttgcagaagcccacaccaggcgccacagggccccccgagaatcnnnnnnnnnnnnnnncccggcctccatcacccgccgcccactgcacggccgcacgccaacccccgccacaggcacgcgcggggaccacccttgcctcagctccctcaccggcgctatttcgatggcgagcgaagacgctgagcgcacacc

SEQ ID NO: 367640 - DNA, 1941 bp, Homo Sapiens
ctgggtaccggtccgggaattcccgcggatcaatatttaagatgctgacttgtggagcattcgggcttggaaggaaagctataggctacccattcagctcccctgtcagagactcaagctttgagaaaggctagcaaagagcaaggaaagagagaaaacaacaaagtggcgaggccctcagagtgaaagcgtaaggttcagtcagcctgctgcagctttgcagacctcagctgggcatctccagactcccctgaaggaagagccttcctcacccaaacccacaaaagatgctgaaaaagcctctctcagctgtgacctggctctgcattttcatcgtggcctttgtcagccacccagcgtggctgcagaagctctctaagcacaagacaccagcacagccacagctcaaagcggccaactgctgtgaggaggtgaaggagctcaaggcccaagttgccaaccttagcagcctgctgagtgaactgaacaagaagcaggagagggactgggtcagcgtggtcatgcaggtgatggagctggagagcaacagcaagcgcatggagtcgcggctcacagatgctgagagcaagtactccgagatgaacaaccaaattgacatcatgcagctgcaggcagcacagacggtcactcagacctccgcagatgccatctacgactgctcttccctctaccagaagaactaccgcatctctggagtgtataagcttcctcctgatgacttcctgggcagccctgaactggaggtgttctgtgacatggagacttcaggcggaggctggaccatcatccagagacgaaaaagtggccttgtctccttctaccgggactggaagcagtacaagcagggctttggcagcatccgtggggacttctggctggggaacgaacacatccaccggctctccagacagccaacccggctgcgtgtagagatggaggactgggagggcaacctgcgctacgctgagtatagccactttgttttgggcaatgaactcaacagctatcgcctcttcctggggaactacactggcaatgtggggaacgacgccctccagtatcataacaacacagccttcagcaccaaggacaaggacaatgacaactgcttggacaagtgtgcacagctccgcaaaggtggctactggtacaactgctgcacagactccaacctcaatggagtgtactaccgcctgggtgagcacaataagcacctggatggcatcacctggtatggctggcatggatctacctactccctcaaacgggtggagatgaaaatccgcccagaagacttcaagccttaaaaggaggctgccgtggagcacggatacagaaactgagacacgtggagactggatgagggcagatgaggacaggaagagagtgttagaaagggtaggactgagaaacagcctataatctccaaagaaagaataagtctccaaggagcacaaaaaaatcatatgtaccaaggatgttacagtaaacaggatgaactatttaaacccactgggtcctgccacatccttctcaaggtggtagactgagtggggtctctctgcccaagatccctgacatagcagtagcttgtcttttccacatgatttgtctgtgaaagaaaataattttgagatcgttttatctattttctctacgggcttaagctatgtgagggcaaaacacaaatcccctttgctaaaaagaaccatattatttttgattctcaaaggatagggcctttgaagtgttaaaagaaaggattgaaggagggcacgtggggaaaagggattttcctattttaaaatccagtgaaaattaatcttgaaggcctacacatttattttttaaaaccccaaaaaatttggttcgggctgggaactggaccccggcctgggaactttgcggggaagggaaaat

SEQ ID NO: 367641 - DNA, 801 bp, Homo Sapiens
ataatctccaagaaagaataagtctccaaggagcacaaaaaaatcatatgtaccaaggatgttacagtaaacaggatgaactatttaaacccactgggtcctgccacatccttctcaaggtggtagactgagtggggtctctctgcccaagatccctgacatagcagtagcttgtcttttccacatgatttgtctgtgaaagaaaataattttgagatcgttttatctattttctctacggcttaggctatgtgagggcaaaacacaaatccctttgctaaaaagaaccatattattttgattctcaaaggataggcctttgagtgttagagaaaggagtgaaggaggcaggtgggaaatggtatttctatttttaaatccagtgaaattatcttgagtctacacattatttttaaaacacaaaaattgttcggctggaactgacccaggctggacttgcggggaggaaactccagggcactgcaatctggcgatcagactctgagcactgcccctgctcgccttggtcatgtacagcactgaaaggaatgaagcaccagcaggaggtggacagagtctctcatggatgccggcacaaaactgccttaaaatattcatagttaatacaggtatatctatttttatttactttgtaagaaacaagctcaaggagcttccttttaaattttgtctgtaggaaatggttgaaaactgaaggtagatggtgttatagttaataataaatgctgtaaataagcatctcactttgtaaaaataaaatattgtggttttgttttaaac

SEQ ID NO: 367642 - DNA, 993 bp, Homo Sapiens
  misc_feature (435)..(444): n is a, c, g, or t
cagacttgaagctgcacttttgcaatcaactaacagttaggaaggacttgacttgctggggctaaggaaaacaaatctggaggttcattttgcctgtgaaattaaaattatactttagtaaataaagctgacgccatttaaccatgaacccggtgacatttcctggcttgctgcagcgtttctgcttgtctccttgttacatttgtttaaaatacaaacacagcatttccatgttgccagagaagcaaatgtgggctgactggctgattttagctgctatggtttttctgtaacctttaacaattgttgtgacaaataagattccatgtaaggtgcaatttctaactgtgcagtgtttgtgaaccacatccaccttctccaggtttggtatttggtcgactaagttgacgatgtcattacctttccttccatttnnnnnnnnnngttaatctgaatcgtgctgagagtttggtatgcacgctatactattcaagggagcattctcttctgtgtcagaataatatatttatgtgtgtgaatcattatacttgaatttgtggcaacattttgtatcaaggaatatatatgacacccaggctgactacaatggcttcaaagagtttaatttctcttaaatggactcagtatccttggaatgtgctgtttaagtgtttctgaattttctacacgccatttttacaggtccatctgtttatgatgtgatgagataaacaatcacgttgattttatgtttcttttcaaagaaaatgaatgtatatagtactaagcagatgaataaattattgaaaaaatatacttcatggatcatgcccactgataaaaatgaatttattttatttgttgaacaaactgactgttcaaattataagaatttatattgtccttattaatatgaatgccatctatttaagtgttgttcaatattgatatgtgttctctaataaaatattttaaacctctttctttaaacac

SEQ ID NO: 367643 - DNA, 1013 bp, Homo Sapiens
tcgatagaagccgcccccaaagccgccttgcggtaatgattgggaacatgttgctgcccaacaaggctgcggtgcctccatccccggggcccggggcctggtacgagtccagtgtcagtggttcaggccggggggtctccccaaccacggccccggcacctccgctgcacacaacagcgctagcgtgtggcggtgccgggggcagcaggtccagcatggtgaagagtgtgggggccgtagggtcgtaggcaaagccatcgtccaggaggtcaggcccgccagggggctccaggccgggcagggacaacggtgccagagaagaagtcagggtctggcagcagggctgacggcgggaggaacagggccctgagcccgtggttgggcacgagaagatggtccacgagaaggccggcgcttttcctccccccgttgcttttcgaatcccattggggttccagagctgttcagctccccaaggacgtcgggcatcccccgtttccgcttcttgtccacgccgtagctgtcatggtcgcgaggcaggtacgtgaaaggcaatggctcgctgcaagacccccatcggtgagccgctgcaggaagacgttgactgtcacgggctcgacaatctcccaggtcctcgtagggcggcgtcttgaacacaatggcaatctggcggtgcacgtcggcctgggagaagtcagcccgaccttcccaggaggccctgctgaacaccactgatatgtcctctttctgcaccttgtcgcagagcaagtagagctcctcgccaccggtgcacggcccgctttccttgttaattcggcaaatccgcagctctgatgtgtttgtggatttcttgtcatagacgggctcggaaagcacaggatccatccggcgcatctgtccctgctggtcccgatatgaggcctggaagcagatcctcaccacattcatgtctacttcctgatggttcttcagggacccagcgttgtaggggtcaatgcccagttgaatcttcc

SEQ ID NO: 367644 - DNA, 1031 bp, Homo Sapiens
  misc_feature (1002)..(1002): n is a, c, g, or t
  misc_feature (1014)..(1014): n is a, c, g, or t
tggctgaggcgcctcgaagggcagcgccaagggggcgcgggcgccgccggaagctggggggaggcgcccagcgggatgcggtgaagggcgagcggcgcggcggctgcgatgagtgcctctgcggccaccggggtcttcgtgctgtccctctcggccaccccggtcacctatgtcttcaaccacctggcggcccagcatgattcctggactattgtaggggttgctgccctcatcctgttcctggtagcactgctggctcgtgtcctcgtcaaaagaaaaccaccccgggacccactgttctatgtgtatgcagtttttggatttaccagcgtggtgaacctcatcataggactggagcaagatggaatcattgacgggttcatgacacactacttgagagagggtgaaccgtatctgaacaccgcatatgggcacatgatctgctactgggatggctctgctcattatctgatgtacctggtgatggtggcagccatagcatgggaggaaacttatagaaccattggcctatattgggttggatctattattatgagtgttgttgtttttgtgccaggaaacattgtagggaagtatggaacacgaatttgccctgcttttttcttaagcataccatatacttgtcttcctgtctgggctggtttcagaatctataatcagccatcagaaaattataattacccctcaaaggttattcaagaagcccaagcgaaagacctgctgagaagaccatttgatttaatcttggttgtgtgtctcctcctggcaactggattttgcctgttcagaggtttgattgctttggattgcccatctgagctctgccgattatataccgcaatttcaagagccctatctaaaggatcctgctgcttatcctaaaattcagatgctggtatatatgttctattctgttccttactttgtgactgcactgtatggcttagtggttcctggatgttcctggatgcctgacatctnattgatacatgntggaggtctggctcagg

SEQ ID NO: 367645 - DNA, 544 bp, Homo Sapiens
taaggccagaactacaaggaagggccagaaaaaccgccctgagactgttgggcagaagaggaaaagggctgaggaggcaaaagatcttcctcccaagaagagaacacggcttgggccccgatctcctaaggcatggctagggcctggaacagcaaagctgctgaagttccgtgccataaaggtagataggcggtcctcggatgatgaggtgcggcagcgggctcagcggatcctccgcgtgaacctgtcacctgtaatacggctccagccattgctgccatattcagcagtctgattccttcacacggcaatgtttggggaaactaagcccagctgtctgtgtggctagtggcacagtgtgctatgtccgtggactccacaatcttgaggactcccggtgcctctctagggccctggtgaccaccagcctcctttcagaaaccagagtgggtggggtacggtggggtgggtgggcgggaggggtgttttcatggcgcgatgcactgtgacttgttattcaagttgtatgtctactgttccatct

SEQ ID NO: 367646 - DNA, 1633 bp, Homo Sapiens
ccagtaaatgtaaatgtacaggccacctgtgcattctgtttgaccataagcttcatacacctgacatcccagttgctgcccggaagaatgtcatgactgaagtggacatgggggcagctccagtgacaattacacgaacccttccgcccaggctgtcctaggatctttgcaaagatgagcttgtcccagaaactatcatgcctgatgatacccttttgaagctctttgaatttactggaaacagccagcttcaacaagaacttcttcaagggtgtcttggcctcattttgtaccttatcgtagatcctgttaaggagtcgaggcaccgcgggaaacaatgtgggcttcaaagtcttcatgtcgtcagccagcaaccgaatatccccttggaagaatccaactctggctccacagctgtacacaacagcctgtacaatcctctcaaacatatgagccagagggaggtaggatatggccacatcatcaggagtgggctcataagcatgctccacacatttgagaaaggcagcagcatttgaaacaatattttgatgggttatcatggctcctttggggtcacctgtggtcccactggtgaagcagataacgctcaggtcttctgggctagaaggcacaggttttgctgaagtgctctttgcctaggttctcagccatcatatagggataagatctcaattcccactcttctcccctctttgctccaggtcatcatcaaaagggtccataaggatgatcaccttcagggctcggggtgaagcctttctctaccattccctatcagcaccaatgccttttggggtgtgtcacagatcaccatggcgatatcagccttgttgacaatatgtacgatggcttctggtcccaaggtgtcatacagaggtacagctaccatagagtacgtgtaacaagccaattcggagatgatccactctggcctattctgagcaaagatgccgacaaactggtctggtgatgatttataacctttatgcaagagacaggaacccaggtactctgctctatcagacacctgtttgtaagatagccatctgtagggctggtttggttttctatatcccaagcagggcccattgtcagacacagcgagtcctctttggaaaacctcatacatagtcttggcatctgagaagcagcaacttgttaggtcattgttcttctgggaaacccccttccgtgctcctccctcaattcccacagactgattgttcaggtcaagaagaggtaagacgggttgaggtctggtgatcagccacaagaagatggcagctccaaatgtcaggatgcagatcaacgccggggtcggaagtggggaaaacaaaaagttaaagataaaaagcatctttgtgaacagcagcaggaaattcagaccctgcgagggggccgcatctctcagtgcttctagtgaatgggggcttcccggctctgagttcttcctgccacacgagtccctgtccttcttccctcgctcgtggttcctccagagacagggtggcttcagagcgtccatgcaggcagaaggccggcccagagtgtccccagttctgccctgctctgagctgtcccgagtcaggcatcccgggaattccggacc

SEQ ID NO: 367647 - DNA, 867 bp, Homo Sapiens
ccccattcggctgggctcaaggccacggctgcgacaaaggctggggcgttcagccaagaaggcaaggtatctgtccgaatccagtcctcggcaagacccactgctctgatgataattggctccgtccccaggtagttatttcacagtggcaagcatagaggacccacccagccacttacagctggctgaccgctgagctggctcaaaaggacatgtcgcaccggccacttctcaagtctttcaacctgcgtggaacctggacacattcaataaccccgcacttcggatcaaaagcgaaggtgccacaagtgaggaggtgagaggcactggcaatggcgagaatctggacaaaatctgctgacagttgcgtcctctttacgtgccgtgtacttccgtacagttctgttctgtgagccttcaggaaccatgccaatgcaatcctgcgcgggtctcttcaccctgagaaggcacagggataaagcgaagatggtgtcccgggcgccaaacataaagtgtgtgcagacggcacggatccatcaaggagaacagagtaattgtatgtgtgagaggactgcgaaaccgggctgagacaggaactcagcctcagagattgaaagcgaggttctgggcaccgagcggagggacgcggaccggataccggcccgatcagcacacgacagcacggtcagtagcagggaagagcagaggcgtgtaggcatgcccgggacccgggccgggcctgcgcatgcagaagccggcatcttaggctccgcctgcacgcgggtgcggcgcaagatacggcctctgctcagggcccacaggggttaactggcctcgacgatactcgggtcatcgtcagcccccgct

SEQ ID NO: 367648 - DNA, 652 bp, Homo Sapiens
agcggggagtctgagccggccgcgggcgcgaccggaggcagtttccgttactatggcaatgacggcagggactacaacaacctttcctatgagcaaccatacccgggaaagagtgactgtagccaagctcacattggagaattttatagcaacctaattttacagcatgaagagagagaaaccaggcagaagaaattagaagtggccatggaagaagaaggattagcagatgaagagaaaaagttacgtcgatcacaacacgctcgcaaagaaacagagttcttacggctcaaaaggaccagacttggcttgcactgactttgagtctctgaaacgttcactacgaagaggagcttccggccaggctgcggctcggctccagaagaacagatacaggccatatctatgcaactgacgatcatcgcagacagtctcgcactactgcttgaaccacagagcaggtggcccatatcaccagcagaacgagctacttctcggtcagaagccagactggtgcctggcctgcctgcaacgatggcccaaccagtccactccagggatacgaggaaatcttcacatctagatccctccaaccttgctcccctagcagcgctaccctgcctgacattagcctacactgaagccacgacag

SEQ ID NO: 367649 - DNA, 1211 bp, Homo Sapiens
  misc_feature (714)..(729): n is a, c, g, or t
  misc_feature (990)..(990): n is a, c, g, or t
  misc_feature (1109)..(1117): n is a, c, g, or t
gggtccggaattctcgggatcgcccagtcactggtacagggaagcctcttccctgtgcattcctctctgcgccaggctctgcccgctcccacctgcccccgtggaaatcgcagggtgacctgaaaccaatagagccatggcgactccctctgctgccttcgaggcccttatgaatggtgtgacaagctgggatgtacccgaagatgctgttccatgtgaactgcttcttattggagaggcttcatttcctgtgatggtgaatgacatgggccaggtcctcattgctgcctcctcctatggccgtggccgcctggtggtcgtgtcccatgaggactacttggtggaagcccagctcacgccctttctcctgaacgcagtggggtggctttgctcttcccctggggctcccattggtgtacacccatccctggcacctttggccaaaatcctcgagggctctggagtggatgcaaaggttgagccagaaatgaaagactccctgcgggcttactgaattgatgcctacgatgaaaccatgaaccaaacgctgcgcaaagtcctcgaatcgtgccgggcggcttgctccatccgaaggacaaaacccgggcattgcccccaacccagcgcgcaaggatgcacaagggtttatgaatacgcggccccgcggcgcaaacccccccgacctatgcgacgcgggggcgccaccacactctnnnnnnnnnnnnnnnngtaatgcaccacacaaaccccttctgtttccccccccttgtcccacactcgtttgccgcgaagataatgcccccgcgaacacacaacaaagacaacggggccctcgccgggtcctcgaaccactagcgtccaaaaataccgccgccggcgcgagaacgaccaccctatgcgccccgatatgccctctcccgcacaagtcctcactccccctccccctgcccctccgcaggcctcttcttattcgtccccacctcaccactntctcgatcccattatccgccccgcttctgttcgccgttccgccctctacgcacacgcctgatcgccatattcgccgccatataaaacacccctctgtgaccgttttatcgcgccgtttnnnnnnnnngctcgtgtgctcgacacacaccaccacccgttcccgcgtacccgcccggataccaaagatcacccgcgcggttatgccgccacagtcgatcaca

SEQ ID NO: 367650 - DNA, 1687 bp, Homo Sapiens
  misc_feature (1001)..(1001): n is a, c, g, or t
  misc_feature (1104)..(1382): n is a, c, g, or t
cacatgcttcattgcttgattcctcgaaaagggcggggactctgggcagcggttgtggagtgccgcgggtccacagtgctgcactgagcagagaggaaggggcgtcccgggatatttggaggataaaggtgtgggcaagggtgatgaccacacctgccggctccggcagcggcttcggctccgtgtcctggtggggcctgtccccggcgctggacctgcaggctgaaagtcctcctgtggacccagactcccaggccgatacagtgcacagcaaccccgagctagatgtgctgcttctgggctctgtggatggacggcacctgctgcggaccctgtcccgagcgaagttctggcctcgcaggaggttcaacttctttgtgctggagaataatctggaagctgtggcccgacacatgctgatcttcagcctagccctggaggaaccggagaagatggggctgcaagagcgaagcgagaccttcctggaagtgtgggggaacgcgctgctgcgcccgccagtggccgccttcgtgcgtgcccaggccgacctgctggcgcacctggtccccgagcccgaccgcctggaggaacagctgccctggctcagcctccgcgccctcaagttccgcgagcgggatgccctggaggccgtattccgcttctgggctggcggcgagaaagggccccaggcgttccccatgagccgcctctgggactcgcgcctgcgccactacctgggctcccgctacgacgcccggcgcggtgtcagcgactgggacctgcgcatgaagctgcatgaccgcggggctcaagtcattcacccccaggagttccgacgctggcgggaacacaggcgtcgcctttgaactcagggactccagcgcctatcatgtgcccaaccgggaccctggcgtccggtcgcctcctgagctacccgtgggaagcgcgtggcagcgcgcggggtactgggggggacatcgccacgggggccctccgtggcncttcggcatcgaaagcggacgacgagagcctcctgcggacgagcaacggccagccagtcaaggtgcgcggcgaggctgggactgggggtagaggtggggctgnnnnnnnnnnnnnnnnnnnnnnnnnnnnnnnnnnnnnnnnnnnnnnnnnnnnnnnnnnnnnnnnnnnnnnnnnnnnnnnnnnnnnnnnnnnnnnnnnnnnnnnnnnnnnnnnnnnnnnnnnnnnnnnnnnnnnnnnnnnnnnnnnnnnnnnnnnnnnnnnnnnnnnnnnnnnnnnnnnnnnnnnnnnnnnnnnnnnnnnnnnnnnnnnnnnnnnnnnnnnnnnnnnnnnnnnnnnnnnnnnnnnnnnnnnnnnnnnnnnnnnnnnnnnnnnnnnnnnnngctttcttttgtcccgcctgcactcgtcccgcccatgactgggggtgcgcccccccgtttccgcccgccgtgtggccccaccgagcgccccctacttgtgtgttacatcgtgttacgctgctcgcctgcgatgctggccagcctccgcatgatctgcacgcccacctctcccgatccctgcatagttctatcctcgccgcacacgccactgcatctccgcttcgtcccctcgccttgcccacccctcacgtgtaccgcacacactcgctcgttgctcgccttcctgacagtcattccgctctcgc

SEQ ID NO: 367651 - DNA, 900 bp, Homo Sapiens
  misc_feature (884)..(884): n is a, c, g, or t
ctcctgggaatgtagtttagtaacttcgcatgtgtaactccctgtttctgatgtatcatcgaatgaagttgaacccaagagttctcatcttcctttggtctcaacaattgttacttcttgtatggacagacacttcgatagagcctttcatctggaatggatcctaaaccatatagcgcaatctttgtgcttcctttttgaagcaaaaccggactaatgtctatcttctccacagacattgaacgtccaaagtgatttacaaatccagcacaacttaaaatgtccaaggcacaaagtgcatctgcccctgtgggatcgtcatgattgccatgaatacttaacactggaattgaaatgttgaggttgccatctggatagttcacccatggaaacttactaaaaccaaagttgactgactgatcactgagaatttcaaactggacaggccgatcacccatacaatattttcttaataactcgaggcaggtatgtaatgttttccttgagggcttattttcatgaaaaagatcaccacctaacaaaataaaatccacttcattttcctgggcaagtcttaaaatttcatcgagtgttacaaacgtatcatttcctctgactgcatctttctccataaatccaagatgaatatctgttgcaactaatattttaaatgtgttttcatcatcaagtgcatctgcagtactcatttttatggtcagtcaagctcctctgggaccaggttcttctccaagaacccctgggtactgtactcaaatgtcagaaaatgcactcgattccaaattctagaaattcccactgctggactcttcgaagccccacaatcgcgacccaaggctgtcttcttttcgggaagaaagggcagnatccgtgaaaagaaaa

SEQ ID NO: 367652 - DNA, 580 bp, Homo Sapiens
  misc_feature (215)..(252): n is a, c, g, or t
cgcgcctgacaaccccgtcgtccccgtgccgtcccccgaactccacataccatgcgacgcgcggccagccccccgcccctgcccggctgctgggaggaagtgacagcgccccgcatcccccgctgggcaggccgggcgcgcccagcccctgggacgcagggacacagccgggccgcgctgggccttggcctccgcccgcgggttttccgcggttnnnnnnnnnnnnnnnnnnnnnnnnnnnnnnnnnnnnnntgactctgcgactatttcaggccttgcggaacccgggccaggacagtggcggccaggccgggacacggtaagtgacctccgcttccacacgtccattccccgacgctccgcgcggcttctcgcccgcccctaccccgaggccaggccggattccccgaggaaagagcctgtcgccgcggcggggacaggagggggctggacgcttccagggaaactgaggccctggcgcgcccagcgatcgcgacgtcgggcgcagaggggccaaggctggctgagggaccgggcctgacagaggcagggagggcggggctggggcaggcgcagggag

SEQ ID NO: 367653 - DNA, 812 bp, Homo Sapiens
  misc_feature (257)..(267): n is a, c, g, or t
agaacacaagcatcttaatttgaatccacaaagtttcatgtaatgaaaagaaatacataattttaattcaacccgagtgttttccaagaagattgtatttgcttaaattgctacagtaattcaagagacagccctgtctggacacagagttactgtggatttttaagagactcagttaaagaatttaggaatttctgattcatttaaaggatttacaaattcatcaacccctgaaaactaaagcaaattgaacaggnnnnnnnnnnngaagatgggttttttaagtccaatatatgttattttcttctttttgggagtcaaagtacattgccaatatgaaacttatcagtgggatgaagactatgaccaagagccagatgatgattaccaaacaggattcccatttcgtcaaaatgtagactacggagttccttttcatcagtatactttaggctgtgtcagtgaatgcttctgtccaactaactttccatcatcaatgtactgtgataatcgcaaactcaagactatcccaaatattccgatgcacattcagcaactctaccttcagttcaatgaaattgaggctgtgactgcaaattcattcatcaatgcaactcatcttaaagaaattaacctcagccacaacaaaattaaatctcaaaagatcgattatggtgtgtaggctaagcttccaaattctactacaacttcatctaaagcataatacattcacacgaatttccatttcctcttcctaaatctctggacaagactcctcctgggtaacactgaaatctccaaactgtgaccaa

SEQ ID NO: 367654 - DNA, 878 bp, Homo Sapiens
ccccgcgtctcgcacacttgcaccggtcgctcgcgcgcagcccggcgtcgccccacgccgcgctcgctcctccctccctcctcccgctccgtggctcccgtgctcctggcgaggctcaggcgcggagcgcgcggacgggcgcaccgacagacggccccggggacgcctcggctcgcgcctcccgggcgggctatgttgattgccccgccggggccggcccgcgggatcagcacagcccggcccgcggccccggcggccaatcgggactatgaaccggaaagcgcggcgctgcctgggccacctctttctcagcctgggcatggtctacctccggatcggtggcttctcctcagtggtagctctgggcgcaagcatcatctgtaacaagatcccaggcctggctcccagacagcgggcgatctgccagagccggcccgacgccatcatcgtcataggagaaggctcacaaatgggcctggacgagtgtcagtttcagttccgcaatggccgctggaactgctctgcactgggagagcgcaccgtcttcgggaaggagctcaaagtggggagcccgggaggctgcgttcacctacgccatcattgccgccggcgtggcgcacgcaatcacagctgcctgtacccagggcaacctgagcgactgtggctgcgacaaagagaagcaggccagtaccaccgggacgagggctgcaagtggcggtggcctgatccgccgacatccgctacggcatcggcttcgcccaaggtcttgtggatgcccgggagatcaagcagatcgcccggactctcatgaacttgccacaaaacgaggcaggccgaaagatcctggaaggagaacctgaagcctgcatggtacttcc

SEQ ID NO: 367655 - DNA, 1123 bp, Homo Sapiens
cggtccggaattctccggatcggcagtagctctcgcctgcgtgtggtttgacaagggctggcggcgccacaccagcgaccaggcctggagctcacacttctgagaggcatcgcaagcgagggccttcacgttactgagaccccagccccgcacagaggctcatggagctcgaagcacgcagggctggcctctccagagctagcagattccttctggacctgtagggtgccgccctagcccagccgccatggcgcagggtttcgcagtgggcttcgacccactgggcctaggagacctgagctccggctctctgagctccctctcctcccgaggccacctaggcagcgactcaggctccaccgcaacgcgatacctgctaaggaagcaacaacggctgctgaacgggcccccccgcggaatccgagcctcatcgcccatgggacgcgtcatcctcatcaactcccccatcgaagccaacagtgatgaacagtgacatcatccattcagtccgggtggagaagagtccagcagggaggctgggcttcagcgtgcgcgggggctcagagcatggcctgggcatcttcgtcagcaaagtggaggaaggcagcagtgcagagcgggctggcctgtgcgtgggggacaagatcacggaggtgaatgggctgagcctggagagcaccaccatgggtagcgccctaaaagggctgaccagcagcagccgcctgcacatgatgggttcggcgcatggggccgtggtgcccgggcatcaaggtcctccaaggaaaagaacccctggggtgggatggggttgaaatccgccgcctgggtaaggggaaaaatgcgggtttcaccaccctctcgaaccccggcttaaaaaaatgggggctcggggcaattcgtccacacctaaaaacaaacttccggaagaaattacggccctggggtttccccaactccgtggggcgccgcctaggccccctggtctctggcccaaccccccccgtgttgaaaactgttcctctaagcggccgcccccggtcccacataaaataccgcccaccacagacccgcccgccacctaatattagtgaggcgccccctcgccagtggatgtgtatttgag

SEQ ID NO: 367656 - DNA, 1071 bp, Homo Sapiens
cggtccggaattttcgggatcggagggaatctggcccctagaggctggtacttgggcccgaaacccccatctccggcggagagaccgtccgaggtaattgtctgccacgagtgcacattctgaaaacaggagattttagttcctaaaaatgggaagaacctacattgtagaagagactgttggccagtatctttcaaacataaatctccaaggaaaggcttttgtctctggccttttaataggacagtgttcgtcacaaaaggattatgtgattcttgccactagaacgccacccaaagaggagcaaagtgagaacctcaaacatcccaaagctaagttggataacttggatgaagaatgggccacagaacatgcctgccaggtatccagaatgctaccagggggacttttagttcttggagtatttattattactactttagaactggcaaatgattttcaaaatgccctgcgtagactaatgtttgctgtggaaaagtctataaatagaaagagattgtggaatttcacagaggaggaagtctcagaacgagtgacacttcacatttgtgcttctacaaaaaaaatattttgtcgaacttatgatatccatgatccaaagagttcagcaagaccagcagattggaagtatcaaagtggattatcatcctcatggctttctttagagtgtacagttcacattaatattcacatcccactttctgctacttctgtcagctatactctggagaaaaatacaaaggatggacttacacgctgggccaaggaaaatagaaaatggtgtttatttgattaatggacaagttaaagatgaagattgtgacctattagaaggacacgaaaaatcttctagagggaatactcaagcaactagtcattcttttgatgtcagagtgctaacgcagttgctcctgaatcagaccacagatcacagccacagtccagaaatgtagcgggtctgtaaaccttagggggctgtgaatgcaaagcttatttcccgcagtaaacccaaagtaaagatgctgggccaggattaaagaggtatatatg

SEQ ID NO: 367657 - DNA, 829 bp, Homo Sapiens
caggactgacgggccggccagtcactgagagggcggacattcctgggcatggaacactcgacaaagtcgacaagcggagttaaatgacctgccccccgggggccccacagtgctcagttgaagggggtcccggggaccgcagcctccgcttccgctgctcgtggcccggcggggcccctgctgcctccctgcagttccaggtctccccgaaggcatccgcgccgggccagtgtcctctgtgctgctggcggccgtccccgcccacccccggctcagcggcgtccccatcacctgccttgctcgccacctggtggccacgcgtacctgcacagtcacgccggaggccccccgagaggtgctgctgcatccgctggtggcagagacacagttggaggaggcagaggtggcactggaggcctctggttgtcccccagcctcacgggcatcctgggcccgggaagggaggcccctggctccaggaggcgggagtcgcctgcggctcagtcaagatgggcggaaactccacatcggcaacttcagcctggattgggacctgggaaattactccgtgctgtgcagtggggcgctgggtgctggcggtgaccagatcaccctcattggaccctccatatcctcgtggaggcttcagcagagcccagagatgcagccgtgcctgacttgggatgtggaagcaccggggccctgatcacgcaagttagagatccaggcatggccagatgggcctgctctgggccagggacttccacctacacggacttgggtctccctgctcatcctggggcctcaggagcggccagccggggtgccc

SEQ ID NO: 367658 - DNA, 1280 bp, Homo Sapiens
  misc_feature (80)..(91): n is a, c, g, or t
tgcctgggtggcgaattcggcacgaggagagaggaaggagagaaggcaaagcactgcccccaccaagaacaatttgaaannnnnnnnnnnnatcatatttaaaatctgggacaaagaaccgtcgggacggaactccttccattgcaaaagctcggcgcggcctcgggagctgcccggcggccccggaccgaggcagccctcccctttaaaagaagcggaggacaggattgggatccttgaaacccgaaacccagaaacagcatcggagcggaaaccagaggggaaaccttgaactcctccagacaattgcttcctggggagttgcgaggtgagcgagggggaataaaggacccgcgatggaaggtgcccgcggatggcgcgtccctgagggtcgtggcgagttcgcggagcgtgggaaggagcggaccctgctctccccgggctgcgggccatggccacggcggagcggagagccctcggcatcggcttccagtggctctctttggccactctggtgctcatctgcgccgggcaagggggacgcagggaggatgggggtccagcctgctacggcggatatgacctgtactacataaagggacaaatcaggaagtgtgctgaaaccaatggcaaatgaaatctattacttggtgggaacagtttggctcacaagattcatcagcccacagtagagaatgtcctttattgttttctccacccgaggaacaaccttaatgaaactgacagaagacagagaacaaatccgtcaaggcctagaagaactccagaaagttctgccaggaggagacacttacatgcatgaaggatttgaaagggccagtgagcagatttattatgaaaacagacaagggtacaggacagccagcgtcatcattgctttgactgatggagaactccatgaagatctctttttctattcagagagggaggctaataggtctcgagatcttggtgcaattgtttactgtgttgtgtgaaagatttcaatgagacacagctggcccggattgcggacagtaaggatcatgtgtttcccgtgaatgacggctttcaggctctgcaaggcatcatccactcaattttgaaagaagtcctgcatcggaaattctagcagctgaaccatccaccatatgtgcaggagagtcaattccaagttgtcgtgagagggaaacgggtttccgacatgcgcggcaaacgtggaccagggtcctcttggaggtttccagatcatgacttcggtcacacttcaatgaaaagcc

SEQ ID NO: 367659 - DNA, 994 bp, Homo Sapiens
ggaattcccgggatcgggcggggacggagctcggcgtgcttgctgctggagggtgatggccctgcaaggctgtgggctccgacctcaccgggagtcgacagcgagaggttcgccgaagagcgaggttctgggcgagcgctgaacgccggccccaagcaccccgggtctttacacagtccgcgtccacagactctgacgaagacgtggatctgctctcgctttagctgctcgcggtcctccagatcatgtccgcgactcctgcgactccgcgcggataaaaaaagtttgccaggcgtggactcaatgacctttccaagctgtgcgcctcgctgcctggaccgggtctgagcgcggctgcccaggttgacctttctgcgggagggctttctctacgtgctgttgtctcactgggtttttgtcggagccccacgccctccggcctctgattcctggaagaaagggttggtcccctcagcacccccagcatcccggaaaatggggagcaaggctctgccagcgcccatcccgctccacccgtcgctgcagctcaccaattactccttcctgcaggccgtgaacaccttcccggccacggtggaccacctgcagggcctgtacggtctcagcgcggtacagaccatgcacatgaaccactggacgctggggtatcccaatgtgcacgagatcacccgctccaccatcacggagatggcggcggcgcagggcctcgtggacgcgcgcttccccttcccggccctgccttttaccacccacctattccaccccaagcagggggccattgcccacgtcctcccagccctgcacaaggaccggccccgttttgactttgccaatttggcggtggctgccacgcagaggatcgcctaagatgggaagactgaccaactgagcccagactgggtagccccatctcggggctcagtaaatgactcggaacgaaagcccttctcgagggaaggtgccctccaaaacg

SEQ ID NO: 367660 - DNA, 1079 bp, Homo Sapiens
  misc_feature (97)..(97): n is a, c, g, or t
cggtccggaattcctgggatgaaaggaggaaaggccgcgcagattgttaatctgaaagtcaatccccggatttagctctcaaaaatgctttattttntggagaaaagcaatagagtaagacagaaggacttaacgcttgcagggaagtggctttctgccatgtagagccaggctggcaacctgtcctctgccatcagggagtgagcatgaacctggaaacctctaggacgcaagagcgaggctggctgtcccctcgtgtgcagtgcttagaccttcttgccacacatcccgtccctcacctcactggatagcccccgaatcaactgttcacacgaaagcagctgcctggttctgagtggccatgctcactcccaagcacaggctgaatgaaaagaaaactgtgcaagtagcttgtatggtgggaagcccccagcagaggctgagggtgcagccaggtgctctggaagccttgaggcctctggtgtcatcttcctcacctctaaataagagatgggctaggttggtcaaggtcctccctgtcctaaaacactttaatgaaatggaagaaaggctgcaggctgatagaggagggacagtctggtttggttccctcaagtcttcaggagagggctcaaggacagtctcccatttcttgttggcaaaatgtaaagtgcagtctggaccctgtccattgagtagagactcaggaggccaaccaagatccctgaaaagctaacagcgtggtcagccttcccacagacagtgcacccaccgtgggaggacacttcgccccccattgttaacgtccaccgcgcccagactcccacagcgagctccttcccttcctccccatgtttgcagtggagttcccactcgagaagacagcacagtagcaagtagaggctggtcctggggacactcgcacccatgtgtgtcaggaagcccctgcggtcacacggcccatgaggaaagccagaggggctgctgggggctgattgaggccagggcagggcggcctgctcttccataaatgacagctggcaccaaagcccagagctggcagcctcctgagtagctgg

SEQ ID NO: 367661 - DNA, 890 bp, Homo Sapiens
  misc_feature (821)..(821): n is a, c, g, or t
  misc_feature (844)..(844): n is a, c, g, or t
  misc_feature (869)..(869): n is a, c, g, or t
aacagggaaagaaaacagaaggtggggaagaggaaggaagagagggaggaaggggcaggatacttgagagaccatgaggatcccagatcagtcccacacatgattacactgaattatgaactaagatatttaccgaaacgttttccattaatgcatatttgacttgctttttctgacctaatgaatttgcaaaacgatgacaatcatgtagcaaatgtacatggactagtactcacaattaattttttattttctatgccagcaggagacaaagatgatagaagaatgaaattcatttttgacccagaaatcttattttagctactgctttatctgctcttaattttctaggagtggactttggggccgtcgtgccggatcctccctgaatgtggagcgatggggggttgcacacaggccgttctgccccagcagctaacaagaaagacccttgcattcctccctgcatctctcccttttgggtcctactaatgtctgttgaatttctcttttttccaaagcaaaatccttctctgcattttgtctgcttgtctgtttcccagagccgcagactctctccttgtctggagttccagagagcccccactttctctttctaagctgtgttgtgtgtttcctgggtacattctaggttccccaaagataaacatgactaaggattggaaaggaggaaaggccgcgcagattgtttaatctggaaagtcaatccccggatttagcttctcaaaaatggctttatttttgggaggaaaaggcaatagagttaaggacagaagggatttaacgtttgcagggaagtnggctttcttgccatgttaggagncagggttggcaaacttgccctttgnccttcaggggagttaggcatg

SEQ ID NO: 367662 - DNA, 380 bp, Homo Sapiens
  misc_feature (21)..(21): n is a, c, g, or t
aaccttccccaaaaaaaatgnacccaccgtgggaaggaaaattgcccccccaatgttaaagttccaccgcgccccaaaaatccccacagcgagctcccttccccttccctcccccatgtttgcagtggagttccccactcgagaagacagcacagttagcaagtagaggctggtccctgggaaactcgcaccccatgtgtgtcaggaagcccctgcggtcacacggccccatgaggaaaccagaggggctgctggggctgatgaggcccagggcagggcggcctgctcttccataaatgacagctggcaaccaaagcccagagctggcagcctccacctgaggagtggcatctccatgaacggcttgtgttctcgcacag

SEQ ID NO: 367663 - DNA, 1163 bp, Homo Sapiens
gcgaaaacaaacagctggggctgctgaagcgcccccgccccggccccgagagcacgccggcccagtcccccacctggggcgcccgtctgcccaccatgaggaagatccgcgccaatgccatcgccatcctgaccgtagcctggatcctgggcactttctactacttatggctaggacaaccgagcccacgcagcatcctccggcggccggggcgcgcagagggcaggcaggaggtcggagcagctccgcgaggaccgcaccatcccgctcattgtgacaggaactccctcgaaaggctttgatgagaaggcctacctgtcggccaagcagctgaaggctggagaggacccctacagacagcacgccttcaaccagctggagagtgacaagctgagcccagaccggcccatccgggacacccgccattacagctgcccatctgtgtcctactcctcggacctgccagccaccagcgtcatcatcaccttccacaatgaggcccgttccaccctgctgcgcacagtgaagagtgtcctgaaccgaactcctgccaacttgatccaggagatcattttagtggatgacttcagctcagatccggaagactgtctactcctgaccaggatccccaaggtcaagtgcctgcgcaatgatcggcgggaagggctgatccggtcccgagtgcgtggggcggacgtggctgcagctaccgttctcacctttctggatagccactgcgaagtgaacaccgagtggctgccgcccatgctgcagcgggtgaaggaggaccacacccgcgtggtgagtcccatcattgatgtcatcagtctggataattttgcctaccttgcagcatctgctgaccttcgtggaagggttcgactggagcctgcatttcaagtgggagcagatccctcttgagcagaagatgacccggacagaccccaccaggcccataaggacgcctgtcatagctggaggaatcttcgtgatcgacaagtcctggtttaaccacttgggaaagtaggatgcccagatggacatctgggggggagagaattttgagctctccttcagggtgtggatgtgtggtggcagtctggagatcgtgctcctgcagccgggtgggccacgtcgttcaggacaacggcacccctaaaact

SEQ ID NO: 367664 - DNA, 834 bp, Homo Sapiens
ctccactcaagggaattctgtactttgccctttgggtaaagtctcatttacatttctaaaccttttcttaagaaaatcgaatttcctttgatctctcttctgaattgcagaaatcagataaaaactacttggtgaaatgacttcttgtcacattgctgaagaacatatacaaaaggttgctatctttggaggaacccatgggaatgagctaaccggagtatttctggttaagcattggctagagaatggcgctgagattcagagaacagggctggaggtaaaaccatttattactaaccccagagcagtgaagaagtgtaccagatatattgactgtgacctgaatcgcatttttgaccttgaaaatcttggcaaaaaaatgtcagaagatttgccatatgaagtgagaagggctcaagaaataaatcatttatttggtccaaaagacagtgaagattcctatgacattatttttgaccttcacaacaccacctctaacatggggtgcactcttattcttgaggattccaggaataactttttaattcagatgtttcattacattaagacttctctggctccactaccctgctacgtttatctgattgagcatccttccctcaaatatgcgacactcgttccatagccaagtatcctgtgggtatagaagttggtcctcagcctcaaggggttctgagagctgatatcttggatcaaaatgagacaaatgattaaacatgctcttggatttatacatcatttcaatgaaggaacagaatttctccctgcgccattgagggtctataaaattatggaggaaagtggaataccccg

SEQ ID NO: 367665 - DNA, 295 bp, Homo Sapiens
  misc_feature (11)..(11): n is a, c, g, or t
atatatttaanagatttatgaagaacatatataaacatatataaatatagatacatcatcaaggaagacttaggacatatgaacatgcacatggcaggggttggaaagaacattaattctttcccagaaggggaaggggaaactatacttaatcggatccagctacgtcattggaagtcatttctcgccaaaaagtatctccacggcaaattctggtggataaattttccatgctttttgttgatgtgggattatccaattcatttcttgggtaggataaagcctaaggattagg

SEQ ID NO: 367666 - DNA, 858 bp, Homo Sapiens
ccagattagaagaatccgggtcttgggtcactgagaatactggtggaagctcgctatgctttgcgttggcaattcagattggcgttcggccaaggctaacctgaagcccactaatgtccacagactggcccaatgtttccaacgtcccatcaagtgcaatctggccgaggcgtcttttgtgaagagttcccgtgggggtgccagcatcagctgggaaagaaaaaacttcttctggtggagttataggaggtaaaaatcctgagagcggaggccggtcgggttcctggcccgccgcgggcgggcggcgcgggggttgagcaggtgcgcgaagctggcggcgaaggggttggcggccagcggctcggtgccggtacatctcccagagcaggtagagcgccgtgaggcgctgcgccgcgctaggcagcaggtcgggctgctggagcagcatgacgagcaccgagcccaggcggaagtggtcggccttgctgaagtagtggtggaaggcggtggacaggccctcgaaggtgctgccgccgcccgcctcctccgatatgatgctcagcaggctcgagagctccttcggggtcaagctcatcctgcccgcggggcccccagggcctccgctcccggacccggggccgcttgctccgcctctgccgccgccggagcccccgaagccgctcctggacgccgaccctgccgcttcccgggaccctctttgctccgcggcggtgagaagccggccagacgccgcgctcgcccctccgccgggcatcaacctcgctccccttcccctcttcccggcccgaggggcctggcgccggctcgctccgtccccgcggccgtaaagcccccgct

SEQ ID NO: 367667 - DNA, 1090 bp, Homo Sapiens
  misc_feature (951)..(951): n is a, c, g, or t
  misc_feature (964)..(964): n is a, c, g, or t
  misc_feature (1058)..(1058): n is a, c, g, or t
gctggtaccggtcgggagatttgggatctgggtttctgaactgctgggtttctgcttgctcctctggagatgcagcgtctgttgactccagtgaagcgcattctgcaactgacaagagcggtgcaggaaacctccctcacacctgctcgcctgctcccagtagcccaccaaaggttttctacagcctctgctgtccccctggccaaaacagatacttggccaaaggacgtgggcatcctggccctggaggtctacttcccagcccaatatgtggaccaaactgacctggagaagtataacaatgtggaagcaggaaagtatacagtgggcttgggccagacccgtatgggcttctgctcagtccaagaggacatcaactccctgtgcctgacggtggtgcaacggctgatggagcgcatacagctcccatgggactctgtgggcaggctggaagtaggcactgagaccatcattgacaagtccaaagctgtcaaaacagtgctcatggaactcttccaggattcaggcaatactgatattgagggcatagataccaccaatgcctgctacggtggtactgcctccctcttcaatgctgccaactggatggagtccagttcctgggatggtcgttatgccatggtggtctgtggagacattgccgtctatcccagtggtaatgctcgtcccacaggtggggccggagctgtggctatgctgattgggcccaaggcccctctggccctggagcgagggctgaggggaacccatatggagaatgtgtatgacttctacaaaccaaatttggcctcggagtacccaatagtggatgggaagctttccattccaggtgctacttgcgggccttggatcgatgttacacatcatacccgtaaaaaatccagaatcagtggaaggcaacctggcagcgatcgaccccttcacccttgnacgattttacagnacatggatcttttcatacaaccttttttgcagaatggtccagaaagtctctgggctcgccctgaaggttccaatgaactccctggtcaacccancaatggacaccccaaacccggcttaattataa

SEQ ID NO: 367668 - DNA, 791 bp, Homo Sapiens
agcggagcgctgggcggtggcgggcgctgctgaaggagtctcgctgagctcgaggaggtggcgcgatggagggactggaagagaatggaggtgttgtccaagttggagaattgttaccttgcaagatttgtggaagaacattctttccagtagcattaaaaaaacatggacccatttgccagaagactgcaactaaaaaacggaagacttttgattcaagcagacagagagctgaaggaactgatattccaacagtaaaacctctcaaaccgaggccagaaccaccaaagaaaccatctaattggagaaggaaacatgaagaattcattgctaccataagagcagctaaaggccttgatcaggccctcaaagagggtggcaaacttcctcctcctcctccaccttcttatgatcctgattatattcaatgtccatattgtcagaggagattcaatgaaaatgcagctgatagacatataaatttctgtaaagaacaggcagcacgtattagtaataaagggaaattttctacagataccaaaggaaaaccaacttctcggacacaggtgtataagccacccgcacttaaaaagtcaaattctcctggaactgcatcatcaggatcttcacgattaccgcagccaagtggcgctggcaaaactgttgtaggtgttccttcaggtaaagtgtcttcaagtagcagctctttgggaaacaaacttcagaactttgtctcctctcataaaagggatagcagccccctcatgccggaagctaatgtccaaaccccg

SEQ ID NO: 367669 - DNA, 831 bp, Homo Sapiens
  misc_feature (714)..(714): n is a, c, g, or t
ctcaggcccgggaggccaagctccaagctgaatgctcccggcagacccagctagcgctggaggagaaggcggtgctgcggaaggaacgagacaacctggccaaggagctggaagagaagaagagggaggcggagcagctcaggatggagctggccatcagaaactcagccctggacacctgcatcaagaccaagtcgcagccgatgatgccagtgtcaaggcccatgggccctgtccccaacccccagcccatcgacccagctagcctggaggagttcaagaggaagatcctggagtcccagaggccccctgcaggcatccctgtagccccatccagtggctgaggaggctccaggcctgaggaccaagggatggcccgactcggcggtttgcggaggatgcagggatatgctcacagcgcccgacacaaccccctcccgccgcccccaaccacccagggccaccatcagacaactccctgcatgcaaacccctagtaccctctcacacccgcacccgcgcctcacgatccctcacccagagcacacggccgcggagatgacgtcacgcaagcaacggcgctgacgtcacatatcaccgtggtgatggcgtcacgtggccatgtagacgtcacgaagagatatagcggatggcgtcgtgcagatgcagcacgtcgcacacagacatggggaaacttggcatgacgtcacaccgnagatgcaagcaacgacgtcacggggcccatgttcgaccgtcacaacattatttaatggtcacccaagaacgccggccgaatggccatccccacaagaaccgggtgaattgaaatgtt

SEQ ID NO: 367670 - DNA, 1194 bp, Homo Sapiens
cggcgccggggcgaggcgggggaggggccgtgagtgccgcagtcggccagccatggagcggagcttgctggcggcgaggccgcggcgacaaggtagccacccccgcagcatgcctcgaccgcggtccgcagctgcaccgcctctccccgccccccagggtgcgctggtcccggtcgcgcgctcagacctccgcatcccgggcgtggtcggttaagtccccggccgtgacccaggcccggggagctagtctccgcccttcgctcttacggatcccctcggagtacgccgcaccatgcagctcaggctcttccggcgcctccttctcgccgctttgctgctggtgatcgtctggaccctcttcgggccttcggggttgggggaggagctgctgagcctctcactagcctccctgctcccagcccccgcctcaccggggccgcccctggccctgccccgcctcttgatccccaaccaggaagcttgcagtggtcccggggcccctcccttcctgctcatcctggtgtgcacggctccggagaacctgaaccagagaaacgccattcgggcttcgtggggcgggctgcgcgaggcccgggggctcagggtacagacgctattcttgctgggagagccgaacgcacagcaccccgtgtggggttcccagggggagtgacctggcctcggagtcagcagcccagggggatatcttgcaggccgccttccaggactcctaccgcaacctcaccctaaagaccctcagcgggctgaactgggctgagaaacactgccccatggcccgatacgtcctcaagacggacgatgatgtgtatgtcaacgtccctgaactggtatcacagctggccttgcgaagggggcccttgggggccatgggagagaaacccggaacccccgagaaaaggtgaccaagaaggaaggccggttttgccccgccaaggaagggctcttctgtactggggccgggtgcaactgcccctgaacccctctcggacacggcggggccagcaccgcctatccaaggagcaaggggcctacaccctgggggcccttttccccctattgcctcaggcacggggtctgtgctctgtacccgacggctatggcaaatccatttcaaggcgggccagacggggcccccctttcccccattagagcgagggatcttggcggcggtaa

SEQ ID NO: 367671 - DNA, 1288 bp, Homo Sapiens
  misc_feature (427)..(427): n is a, c, g, or t
  misc_feature (1221)..(1241): n is a, c, g, or t
gagacaaattacccagaaacccctcccttccccacatggaggccttggcaaatgttaattttcctagaaaatccttcagacctgaagacgcaggaaaagaatctggctctcagggtggcttctgcgtccccgccgccaggccccagactatggtcacagggccgtcctgttcctccccgggactccagaatttctctcctcaaaggaaagaaaacagggcatgcgcttgttggcaaaacgcagggccggctcccaaaaaccccatgtgtgtacgattaaaagttggccgtccccaggcctcccagcgcaaacttaaagagacagggctttgctgaaaaccaaacatgggccagctgggctttttaacaacctagagactttccggagctgcctggaacagagcctgtgggaaacgggggcttgccangagacactcacagttttccttcatgggcctgtttttggtcccctaagaatctccacatcattgtctttcttgtgccttttccttggtgagcaacagaaagggaagggttccaagcctctaaaaatgtgctttgtgatcaggagtgcgctcgaaaccaaatacgcgcgctgccctttcgaggccagtgagctcagcctccaaggctttaaagcccgcatttcagcaagagaaagcgctgagagctcgcaggttcattaaagaaggcaaagcactggtttctctccttagaaaagtaggtttcttggcttgattcagactggcttgctttgatttttagtgaagggaatgtacgtaaaacaaaatagggcttggctggtcaacagagacaagcaggatggatggatggatggatgaatagatagatggtgtttgcatgtaaattgcagagaaaacaaaaccaaagctgattggaaacaattaattgtgggtgtctgagggggaaggtcgcagctttgggcagctttgagaagcggtacaagagctctgtgcctgtgtgtccagccctggagccagccagtgcatttattttaagctcttagaagcaactccttggcccaggaatgcgtgacccctgagatgggtccacgcatctctctacacgtccttctctccgtgggatactggactcgtgcctctgcgcccattctcttctcacgcatatccatgagctttaatttcactttctgatcacggtacgtccataaagccagtattacacttaaatgaagtattcnnnnnnnnnnnnnnnnnnnnnagaaggtaaacaaatttaataaagctaccaataatgttgaaacacac

SEQ ID NO: 367672 - DNA, 1729 bp, Homo Sapiens
  misc_feature (476)..(476): n is a, c, g, or t
ctgttaaaagtttaaagctttgctgaaaactgaattcattctcaggaatttcataaatcttctccccaggtaaataattgaaatagctgtaaaataagtagatagctgctgttaatataatacagtacattttggggggcatatgtgtggttggggggtccttaaaaatcaaaatttgccatttcagttggatgaattactagaggtaataacaaatcttactataaaatcaagaggtttaagaacatacactgggcagatgttgattccgtgcatgcccaccttttattaccaaacaaggtttgtttatatgattgtattagaaatgctcagacttccccagaaatgaaccataaatttggaacttcctttcagctcaagaggttcagctatattgtatttgtgcagtgtaatcactactatttctgctcggtttcctaaaaggaaaaaaaaggcgcagtggtgatgaccctcantgaatgagccacgcttctgcattcttcttagaaactgctgtgaaaaacaatttatgtttgcagggtttaaaaatcagtaaaaatgggaatgattgagctaaaacccactctatgagaaggaagattactgaaaagcatgtgacatattgctacaaagattttttttcctaaatgattcagtaattgaatgattatttaatatatagtgctatcaagcaatccctggtactttggacttccatggcttgttatataaaattacatttttacatgtaaaaataaactaaacaaatctaatgataaaatatgtcagatccatgttctaaaaaatttttgtaatgacatgacattacaagagtataaaaatggacattaaatcatggccttgcattaaaatatggaaagcagagcagtacatattcaaatgtattcagaaagtcaaaagattacctatcgttctacaataaaatacatggaaatagcttgctatttttatatacatttccaaaatattaagataactttctgtaagagtcaatgattctgttcgactaaatagctgtcctttccaacacattgctacttttttaaatactgtatcataagttcagcctgtcatactttttgcattgatcgttatgaataccagaccatttgtaagtgtggttgaagagcaaaatgctaattgacatctctagtaaatactgttacaggattcatgaacttgaataattctacagtttgaaactctgatgctatatatacatggtataatgtattcagactttgattactacttatttaaaatggaatgttttatggttgtgcatatggatgtgaagtgaaaatattagccttaactttaaaatttggggtgtttgatagtgtttattttgatattggtgaattagtcaccagtaaattttaaaaaagcacttggttgaaaattgtacttgaatacatacaatgcatgctgctaaactagaactttaatttttccccataacttttataagtcccatttataaacccacttttaaaaataacaggtccaagttagagtgatgtgtgtatattattcaaaaaaatgtactggtgtgatatcttgtatgaatgatcatttaaatacagtacattactgtagaagctaaattgatctttataattaagcagaaattacaaaactaggaataatcaacattgtaagatatgttaataaaaacctgctgtcatttggtttgtgaaaggtcctt

SEQ ID NO: 367673 - DNA, 806 bp, Homo Sapiens
attcattcaaaaggcgcgcaggctgcgcggctgtccgggcgctcgccgagccgggccgcggcgccgagtcgaacggggagccgagctggagctgccgcggcgcagccaggccggcgaccaccaggggcctgaggatgaagccaagtctgctgtgcctggcccctgtcctgcttccttatgctgctgccctggcctctcgccaccctgacatcaacaaccctttggcagtgcccacctggggaggagcccgacctggacccagggcagggcacattatgcaggccctgccccccaggcaccttctcagctgcatggggctccagcccatgccagccccatgcccgttgcagcctttggaggaggctggaggcccaggtgggcatggcaactcgagatacactctgtggagactgctggcctgggtggtttgggccttggggggttccccgcgttccatgtcaaccatgttcctgggcacctctgggtactcatggctgtgatgagtgggggcggcgggcccgacgtggcgtggaggtggcagcaggggccagcagcggtggtgagacacggcagcctgggaacggcacccgggcaggtggcccagaggagacagacgcccagtacgcggtcatcgccatcgtccctgtcttctgcctcatggggctgttgggcatcctggtgtgcaacctcctcaagcggaagggctaacactgcacggcgcacaaggaggtcgggcccggccctggaggtggaggcagttggaatcaaccctgcctaccggactgaggatgccatgaggacaccat

SEQ ID NO: 367674 - DNA, 1172 bp, Homo Sapiens
tggtggaggaaccgacgataattcggggcaggccgccccagagccccacgccataaccccaccagaccatggtttctgccaatctcggttagcgcctggaaacatggccctgatgcttatactggtgccctacagcaatttgctgaggctgcctgtgcctgcaggtgtgtcttcaccatgtagatggggctccccaagtaggctcccatgaccccagccatggccccagctgctgcgctgcgggcaggactgtgggtgccttcggctgtgtgcaggtagcccccagcctcagccagcccataggtgcccagtcggatgccattcatcaggaactggtacaagagggcgggggccaggcctttctgcagggcagcaaggccatccaccttgccgatggtgatgaaaggcatggaagacatttcggtagtgccgctggtatgtgccaggggcctgcagttctccttgcaactgcatcctggtcttcaccacctccaggggattggtgaatacacaggccccgcaggctgccaggccactcatcaagaagtccatggtgggatagctgtagcaggaactgacccaagagtaagaaagtaaaaatgggtgtcagaaagcggggttggaagacagggggaaggcctgtttcagcagtacaggttgcagaagataagaatttagatttgcagtcaagggtgtcagggtcaaatgtcaagtggtcaaacgtcagctggaatttgggagtcaagagctggcaagcagggaagagatagaaatctaggagattctggtgagaagcttaaggcaggaccctctgaggtcaaggaggggcaaaagacagaaggttgcaggtgggatggctcaggatggcgggcgacgggagcacgggagtagaggagggaatcgcggggttgggagatggaagccagggaggcaggaagaagaaagccagcaagtgagagaagaaaaggatccgggagaagagccggtgatttcctcgagccagcaacgagatctcgatccgagaaagaagtcaggactctggccaggaatgagcgtccctgagcgtccccaggcagccaccggagctcgcagtagcttcaaccccgggtagcctgcggaggccgggccgccacactcctgccacatcccgggaatccggaccggtccagccg

SEQ ID NO: 367675 - DNA, 670 bp, Homo Sapiens; identical to SEQ ID NO: 94220

SEQ ID NO: 367676 - DNA, 1026 bp, Homo Sapiens
  misc_feature (935)..(935): n is a, c, g, or t
  misc_feature (969)..(969): n is a, c, g, or t
gcaacccggagtcggatcgatcccgctctgcacattccaaaggcaggtgtcagagatggctgaagatgggagcgaagagatcatgttcatctggtgtgaagactgcagccagtaccacgactccgaatgtcccgagctgggcccagtggtcatggtcaaagactcctttgtgttaagcagggcaaggtcatcccttcctcccaacttggagatcagacgactggaagatggagccgagggggtgttcgccatcactcagctcgtcaagcggacacagttcggtccctttgagtccaggagggtcgccaaatgggaaaaggagtctgcatttcccctgaaggtgttccagaaggacgggcaccccgtgtgcttcgacacctccaacgaggatgactgcaactggatgatgctggtgcggccagcggcggaggccgagcaccagaacctgacggcctaccagcacggcagcgacgtgtacttcaccacctccagagacatccccccgggtaccgagctgcgcgtgtggtatgcggccttctatgccaagaagatggacaagcccatgctgaagcaggccggctctggcgtccacgctgcaggcaccccagaaaacagcgcccccgtggagtcggagcccagccagtgggcgtgtaaagtgtgttctgccaccttcctggagctgcagctcctcaatgaacatctgttgggccacttagaacaagccaaaagccttcctccaggcagccaaagcgaggcagcagctcccgagaaggagcaggacacaccccgggggggaaccccctgcagtgccccgagagcgagaatgttgccaccaaagaacagaagaaaaagcctccgaagggggagaaaacccaaagtggtccaaagctgagcagcctctagtcatcgtgggaagacaagaaccccacagagcnaagtggcagagatcatttacgaggtcccttccgnatgaacctggggatggcaaccccaaaatgacggaatcttgaagctgggtttctgggg

SEQ ID NO: 367677 - DNA, 1084 bp, Homo Sapiens
gggacagaaggaggaaggacagcagggccaacagtcacagcagccctgaccagagcattcctggagctcaagctcctctacaaagaggtggacagagaagacagcagagaccatgggacccccctcagcccctccctgcagattgcatgtcccctggaaggaggtcctgctcacagcctcacttctaaccttctggaacccacccaccactgccaagctcactattgaatccacgccattcaatgtcgcagaggggaaggaggttcttctactcgcccacaacctgccccagaatcgtattggttacagctggtacaaaggcgaaagagtggatggcaacagtctaattgtaggatatgtaataggaactcaacaagctaccccagggcccgcatacagtggtcgagagacaatataccccaatgcatccctgctgatccagaacgtcacccagaatgacacaggattctataccctacaagtcataaagtcagatcttgtgaatgaagaagcaaccggacagttccatgtatacccggagctgcccaagccctccatctccagcaacaactccaaccccgtggaggacaaggatgctgtggccttcacctgtgaacctgagactcagaacacaacctacctgtggtgggtaaatggtcagagcctcccggtcagtcccaggctgcagctgtccaatggcaacaggaccctcactctactcagtgtcacaaggaatgacgtaggaccctatgaatgtgaaatacagaacccagcgagtgcaaacttcagtgacccagtcaccctgaatgtcctctatggcccagatgcccccaccatttccccttcagacacctattaccatgcaggggtaaatctcaacctctcctgccatgcggcctctaatccaccctcacagtattcttggtctgtcaatggcacattccagcaatacacacaaaagctctttatccccaacatcactacaaagaacagcggatcctatgcctgccacaccactaactcagccactggccgcaacaggaccacagtcaggatgatcacagtctctgatgctttagtacaa

SEQ ID NO: 367678 - DNA, 1296 bp, Homo Sapiens
cgtggcgtcgatcacgcttgatgccggaggtagagagggggtacaaaatggagtgacgcgtagaaagggggagagggaaagggaggtgtgtaatatacgggggcggaggattagatatgaagtggagatgtgttgtaagggggtgggtggtctatgggttgtgtggcgcacacgtcgattatttaagcatccttgcgtgtgtggaaaggggacacaggttgcggttaaggagaagaatgtggggaggatggctatagtaaggaggtgggtgggacgaaggctaataatagtctggtgggttggaggggcgataggaatagctggggggggcggagtaaacgtgtgaggctaggggtttaaacgatgggagagatcgagggaggtgaaacgtggtaaggatgtcgatgggcgaggagatagcgagatatgtggtcggggccaaagatggcacggggaatcgcgatcgatttgttatggtgttttttgaggtggggttgtatgggtatgttaaggagatggggtcaagagaagggaggggagatgggaatgagtagattttggaaggggggattacgagggaaaggggggtacctcccaggtgacaacgggttacggttacttcggggcccgaggggtggacccggacgtgcaccagattgatcgtcaggcaggttgcgatcgtccggacactgaccatcggcctcatgcagctcggccagggccacccgccgctggtgcaggcagtacgccagcgaggtcaggacgcccactggggtccacaagcgcatgctgaacacaccagtgatcatggtggtaggccctcgctgccctccgggttgaggctgcaggaggcaaacacaagtcttctgcgggcgccggggctcagcgggcgcccccaagtccgcgggaacctgcggatgcgtacatccagcccttcagcaagcagggaccgctgtgcctcccggccctgagggagaccccgagtgggaacgggggagagaacaagaggtggcagcagcgaagagtccctgggagttttaacccgggtcggggttggtcgctcctgctgcacaccgggccgggggagatcggatccttatcttttgcccgacgaggaacattaaacttgtatttcaagtttggcctccagcactcttgaaggaacaggagccggccctgagttccctggcggcagcggctccaccagcaaggactactcgattccacttttctataagcaagctcctacccacctcctcacctactcagggacccgtcccaagtggacccgcgcac

SEQ ID NO: 367679 - DNA, 975 bp, Homo Sapiens
tgttaccggactataaaggattaccactctccgtcagccggaatatcgagctcgcggtactctccgattgtcctactttttcccgtgtttttaaaagaccaggttcaggtttgtgctacaattcaacagcccttccgtcatgataatggtaaagggcatcaaaatactgctgtcccataggtctccttaatatgcttgggggcttctttccaactttgcttcattcgctctaaggactgtgtcatgtttgtcattcccgttctgaagtagccaggttcaactatgctgattttcaccccaaaatgttgaatctcacgcctcagaatatctgaaaaggcttccactccatacttggagacacagtagcctcctacaaagaaagcaactcttcccagaatgctggagacattgacaattcttccccgtgctctcctcaccaaaggaagcatgctcaaggtcacctggatcacaccaatgaggttcactttgagcatattcatagagtcctcagtgttcagccactcacataaggtaattggtgtaagaatgcctgcattgttcaccagtccccagagtcctctgtcccccacatgctccttcacccactgagtagctgcagcgatgctctccatcttggtaacatccagggtcaccgtctccagcctgtcagacgtctggcccctcagctgctcggcccccttctccgtcagacacgcagccagcactctcaagcctcgtgcatccagctgtctggccagcaggttcccaaagcccgagtcacagcccgtgataaagacatacttgtcttggaggtggctcaccacctgcctctcccggtaccagtgcagaaggtagtacaggcccacgaaggccgccaggtagagccacatagtgagggtgcttccttctcggacttgcttaggaagagtccagtcctagagacttgaaaggacttctttgcagaccaggcagcag

SEQ ID NO: 367680 - DNA, 537 bp, Homo Sapiens
gcaaagaagtcctttcaagtctctaggactggactcttcctaagcaagtccggcgtgagattcaacattttggggtgaaaatcagcatagttgaacctggctacttcagaacgggaatgacaaacatgacacagtccttagagcgaatgaagcaaagttggaaagaagcccccaagcatattaaggagacctatggacagcagtattttgatgccctttacaatatcatgaaggaagggctgttgaattgtagcacaaacctgaacctgggtcactgactgcatgggaacatgcttctgacatcggtgcatccgcggaacttcgatattcagctgggctggggatgcttaaatttttctttcatccctctatcttattttacctacatcactgggcaggactacattttggactagatcttgggcccaaaccagcccaggcagtctaaagaaaactgggttggtgcttcttggaatgaaggcaaaaatctgaaattgttagtgtctcagtaatcctgatttagaacccaggccacat

SEQ ID NO: 367681 - DNA, 700 bp, Homo Sapiens
ctcggagcgcaggctcagctccgcgctgcgagcgctacgggcgcatgggcggggagccggcccggagcgcagtttccagtggggccggggtttcacccgggccctctctgtttgaaccgaacccgacaaatgggcgcatgacgatggagagcagggaaatggactgctacctccgtcgcctcaaacaggagctgatgtccatgaaggaggtgggtgatggcttacaggatcagatgaactgcatgatgggtgcactgcaagaactgaagctcctccaggtgcagacagcacttggaacagctggagatctctggagggggtcctgtgccaggcagccctgaaggtcccaggacccagtgcgagcacccttgttgggagggtggcagagtgtcctgccaggcccacaagtactgtttccccctccagtcaaccttctcttggcagcagcaccaagtttccagtcccataggagtgtctgtggaagggatttagcccccgttgcccaggacacagccacatcaaagctgtgctcaagaaggggccagagcgagtggaaccggatgactggacctccacgttgatgtcacggggccggaatcgacagcctctggtgtcaggggacaacgttattggagacctggtggggcatttggatagactttgcaagaactggaagaagggtggatgagaacggtgagaa

SEQ ID NO: 367682 - DNA, 952 bp, Homo Sapiens
  misc_feature (53)..(53): n is a, c, g, or t
  misc_feature (78)..(78): n is a, c, g, or t
  misc_feature (655)..(656): n is a, c, g, or t
  misc_feature (744)..(744): n is a, c, g, or t
ggcccaaaaaccagctggctaccggtccggtaattctccggaatcaccatggncaggggaagcccaatacactcccanggaacttcaaggagtgtccagcagtttctggctatgtgtgacaggggtgaaacttcccaaggggccaagtacacaggaaggactttgaactaccagagcctcccccatcgctccagaacagacaactcctgggcaccctggtcagagaccaaccagcatattgggaccagattcccgactactccagggtgcaatcctcaactaacctacactgccacactaccagaaagaagcaagggccttcaggttcctcacactcagtcctggagtgatcttttccattcaccctcccaccctcccattgttcatcctgtgtacccaccatctagcagtcttcatgtacccctgaggtcagcttggaattcagatcctgttccagggtcccgaacccctggtcctcgaagagtagatatgcccccagatgatgactggaggcaaagcagttatgcctcccactctggacacaggagaacagtgggagaggggtttctgtttgttctatcagatgctcccagaagagagcagatcaggggctagagttcctgcagcacaggtcaatggctaaaagggttattcnncttttcctttccctgggaggctaccacctttgtccttttggtaaaaaaacctgttacctgggtgcgggccccgagggccggccgggantggggccttcaacaacccttggtaaaatccccccaagccaacatttttgggggaaagggccttgaaaggcccgggggttggggaatttcaaccgaaagggtttcaaaggaaagaatttggaaggaacccaatccccttgggggcccaaaaccattgggttggaaaaaaccccccccggttcccttcttaaccccaaaaaaattgaccc

SEQ ID NO: 367683 - DNA, 786 bp, Homo Sapiens
  misc_feature (379)..(458): n is a, c, g, or t
agcgggaccgcgctgcgggagagggatgaaacaagagggcggctgaagccgatcctgagtggggccccagcaattcggaatgagccttttccctccacccgcttctgccgaccggggccctcccgcgcggctcgcaggcctccccacccgcgcccgtccctcctcctccgctttcccttctcccccgtcctcggctccgacttaggggcaaggacggggcaaggcatgcccaagtcatgaccttgcgggcctctcccgacttgccggaagcgcatgagaccacacggtcctcttgcaagaaagaatatatgaaagcaatcattctattaactattacacaaaccaaattaaatacaaaacaaataaatcataataatannnnnnnnnnnnnnnnnnnnnnnnnnnnnnnnnnnnnnnnnnnnnnnnnnnnnnnnnnnnnnnnnnnnnnnnnnnnnnnnctagacagagaccacccgaattgagaagctaagtcaccagaactctagacatctacctaccaatagataactaaacaccagtaaagcgaagacaacagaagctacctagtagtcaagagcagtgaccaccagagaccactttcataattaaacgaagtaaaacagaagtcaagtgagcgagcagtagtaaacaaagacagtgagtggattagagagtactgttacggtcttcgcactgtacagcgagccgtccgctataaatccgagcgtagcacctgtgcgaagaattcgactaagaacaattctaatcgcacaaccttagtcatcg

SEQ ID NO: 367684 - DNA, 1279 bp, Homo Sapiens
ggcctgggagttcaagcatctcctcatctgctgccctagccctgccactagagatatctgtcttatcctctgtgacaatggcctggggctgactggacaggggtttgctcagaggctgcagaaatgcatcaagcttctgttcccgggaatctgtacgaaccatctggtgggcatagaccttatcactacttccagaagtagaagacgaggtcagacttgttgtggatttaaccatctccccagaggggccagcaagtcctggtagcaaagtctgggtgaagtacatcctggaggaattggagcccaggagcttgctctcgatgtgctgctgcacccgctccaggatgctctcctcgtgcaggaagtgaacttcatgctttgtggggtgcacattaacatccacattctggggactgatttcctaaactgaggtacaggaatgggtgtgtgcttttgggcaaataggctgcatacactgtttctatggctttttctcaaggaagttgattctaccagacgatggttgatgaagagtaagaagatgcacttcttcactgagtagtttgcattggatatgtaaccattcattttgaaggctagggttttatcctcacatccaatttctatcagttctcgactaacagcatttccaaagatggagcgaatattgtccacggttgaggcattgggtagtgtcctaacatcagctactgtctctccttgttttttaactgagaaactaatgcctgcattgtgtactgaatacctgccaacaacttccaaaattttcccatattcttcacttggattttttaaagcttttctcctcgtggctatgttgtaaaaaaggtcctccaccgtgatctgggtcccttgattgccagcacatggtttaggaggggctttcagttttccatctgagtaacttgctctgtatgcacactttccatcagctgttttcgttgtaatagtaacatgagccacatggcttatgctggccaaagcctcacctcgaaagccataggtagaaatactggctaaatcctcaaaggactgcagtttactagtagtgaacctttcacatacaatatccagatcttctttcctgatcccggtgccattgtcttggatctgaatcaacttcaggcctccctctttaacaatcacttgaatacttgtggattttgcatctaaaactccaaacaacccttaaaaggtctcgggggagagcggtaaagaaacacacggtctgcggaaaaggagaaggcccgactccgct

SEQ ID NO: 367685 - DNA, 719 bp, Homo Sapiens
  misc_feature (688)..(688): n is a, c, g, or t
  misc_feature (695)..(695): n is a, c, g, or t
gggatggttggaaattgggcatctgttcctttaaacaggaaacatttcttgttcgaattatattctcctgccttttaaaaagatggacttcagcagaaatctttatgatattggggaacaactggacagtgaagatctggcctccctcaagttcctgagcctggactacattccgcaaaggaagcaagaacccatcaaggatgccttgatgttattccagagactccaggaaaagagaatgttggaggaaagcaatctgtccttcctgaaggagctgctcttccgaattaatagactggatttgctgattacctacctaaacactagaaaggaggagatggaaagggaacttcagacaccaggcagggctcaaatttctgcctacagggtcatgctctatcagatttcagaagaagtgagcagatcagaattgaggtcttttaagtttcttttgcaagaggaaatctccaaatgcaaactggatgatgacatgaacctgctggatattttcatagagatggagaagagggtcatcctgggagaaggaaagttggacatcctgaaaagagtctgtgcccaaatcaacaagagcctgctgaagataatcaaacgactatgaagaattcagcaaaggggaaggagttgttgtggggtaatgacaaatctcggactctccaagagaacaggnatagtgnaatcacagactttgggacaaagta

SEQ ID NO: 367686 - DNA, 911 bp, Homo Sapiens
  misc_feature (747)..(747): n is a, c, g, or t
gtgtattttcggttaaatgataattgaatgtaaatatttagatgcagcaccatattttataacccagctttagcatttcttcatattttaaggaaaccccccacctccttcttttaagggcgcttcttgctctctgaaatgccctgctaaatgcttctcttaattatttgaataaggtagtttggaataaagaaagaaaagatcactctacatacagatagtaaacttaatttgtgatcctatatatgagacagtataaaaatacagataagttttagaaagactcaaaacaatatgtaaatgactgatgtttgcattattaaggaaaacttgggatgttgggtcaagaggggaaagtgttagtcaatccactttggagcaatatcatgaaggtcaattataattccatatacctttctttgatgccacagtcagagatagaatacagtttgggtggccatggatgtgccccaatacagtacacattttttggttaaattgttttcagatcatttcatggaacctttgaagtatccttgactccaaccttgacctggtggtggaccctccctggtttttataacacccaagagatatccctttagaattacatgtattttagccataaggaaattgaaaaagtaaaacatactggtttttttcaacaagaccatatgtaaattaaatagtgaaatgtgtatgagtttcagtagaactgtaccatcaacaatgtttccataaatatgncagagttctttcttttgtattgttatttacaatattgttaaattgaatgcatttgcaatttctaggattctaaagaattgagtacagaaagtagcaattttattatttgatgataatatgagaattactgtgccaatactgttttgataaataaatagattttt

SEQ ID NO: 367687 - DNA, 1114 bp, Homo Sapiens
  misc_feature (1025)..(1062): n is a, c, g, or t
tccttgtctattgtgtccttaggctcggtggttttgcggcgtgacggtttgacagtctgttgtttcctgtcgtctatgtttcgctcaattcgcggggggtcctctttgactcaccgttgttgcttcatagtgtgtgtgcagggtctcgggcctcggtctgactgactgtttcgtatccgatggttggccccgactgatggtgttgccttctaggatgcgattttcctggcttgcctgttgtcctctttgtatcaattggtgatgacaccacggctcttttcgctcaatggcattgtggcataactgtccttagccattctccattggatactttccgcaatctgctcatgtcacgtcaggccctgtgctttagtagtatttatgaagactgaagatgtaccaggtggagttcaagaccatgaatgcaaagcttcctgatggatcctaagaggcagatctttctagatcaaaacatgctggcagttattgatgagctgatgcaggccctgaatttcaacagtgagactgtgccacaaaaatcctcccttgaagaaccggattgtttatcaaaactgaaatcaagctctgcatacttcttcatgctttcagaattcgggcagtgactattgatagagtgatgagctatctgaatgcttcctaaaaagcgaggtccctccaaaccgttgtcatttttataaaactttgaaatgaggaaactttgataggatgtggattaagaactagggagggggaaagaaggatgggactattacatccacatgatacctctgatcaagtatttttgacatttactgtggataaattgtttttaagttttcatgaatgaattgctaagaagggaaaatatccatcctgaaggtgtttttcattcactttaatagaagggcaaatatttataagctatttctgtaccaaagtgtttgtggaaacaaacatgtaagcataacttattttaaaatatttatttatataacttggtaatcatgaaagcatctgagctaacnnnnnnnnnnnnnnnnnnnnnnnnnnnnnnnnnnnnnnaagtgtatttgaaaaatatttttaagtgttctaaaaataaaagtattgaatc

SEQ ID NO: 367688 - DNA, 1461 bp, Homo Sapiens
  misc_feature (24)..(24): n is a, c, g, or t
  misc_feature (1180)..(1190): n is a, c, g, or t
cggtccggaattctccgggataanagggtaaaagggaatctgtcctatctgggaaagtcactgcgacatgattaatggtacagatgcagcctcatttccaccttttgttgagaaaagccaggtattgcagttcttttcttctgatatttgcaggtcaatctatgctgtatttgaatccgacgttaatctgaaaggaatccctgtgtatagatttgttcttccatccaaggcctttgcctctcccagttgaaaacccagacaactattgtttctgcacagaaaaaattatctcaaaaaattgtacatcatatggtgtgctagacatcagcaaatgcaaagaagggagacctgtgtacatttcacttcctcattttctgtatgcaagtcctgatgtttcagaacctattgatggattaaacccaaatgaagaagaacataggacatacttggatattgaacctataactggattcactttacaatttgcaaaacggctgcaggtcaacctattggtcaagccatcagaaaaaattcaagtattaaagaatctgaagaggaactatattgtgcctattctttggcttaatgagactgggaccattggtgatgagaaggcaaacatgttcagaagtcaagtaactggaaaaataaacctccttggcctgatagaaatgatcttactcagtgttggtgtggtgatgtttgttgcttttatgatttcatattgtgcatgcagatcgaaaacaataaaataaacctggctcaagcacaaaccaatttgtgttgttctgattcaataattggtttctgggtggccaattcagaagaagagtgtacatgctcaacaaatcctaggccctgcattcctgtcatcctcatccgggggaaacaccatcatcccagtagctgccctattcaactgcaacagtctccaggaccatcagtatactgcatttcatgtgcaccaaatattttgaaagacatttataaataattggcttatgactcatatttctctatgaataccttcatacagcaggtataactcttttctttatgggcttaaatattttgtcactgatcctgcaaatggacatcattttagcacactagcggtttatattttaaggaccttcattctctgttctgcacctcttctggaaattgagtaaattttgcnnnnnnnnnnnactcagttgcaacttacgctgggcatcttcagaatgcttttctagcattaagagatgtaaatgataacaggaattatggtactgaaatattacaaagcgtagactatgcatggttattcattataatattttcggctatcataatcgcctcataaagacaggtttcaaccattaaaatatgttcttccttaaattccgtgtgctttttctagttcctgtggtgtcataaaagtgtttatcctaaaacaagaaggaagcagaagaaaaagag

SEQ ID NO: 367689 - DNA, 768 bp, Homo Sapiens
gatcatttgaacaaaattgatttgatagatatgggagtgcagcgccacagccagattgaggaactgtgaagttgtcagccttctgttccaactgatagtgaagggtccgaagatggcaccattgggctgcaggaaagagactgtgttgtcctcagcgtcctgggttacattttcccttggctagaaaacgaactctgtacgtataaggacctctttgctttaaacttgaatgttgctgctgttcatcatcacttcctgtggattttgcacatcaaagatccaaaactgtctgtaaacttctgtgcctgttttaacccaatttttaaaagcaattgtaccttcttcgaggacaacttgctttttaattgtcttctggataagcaggtctccaactggcattagaatacctccaaacacagccaggacagcaccaatgacagccccagcgatgagcccacagttccggtcacagcccatttttcttgttcaggaggtgaattagtgttaagcacctgtttcttgcaaactcctggatatgattaaagtggtttctacaagctctggttcttattcacaaatcaacagcaagacatgaattttacaggaaaggaactgatgagtcacagaaagaatcaattcgtctaatcattggaaagctatcattagaagtccgatgaaagagcacaaggccacaaatgttaatgcactttcagaatgctagttgggaagaccagggaattaacaccgaagactctggttgtgttttcc

SEQ ID NO: 367690 - DNA, 1671 bp, Homo Sapiens
ggggaggactgcagtgtaggactttcctgcagaataccatttgatcctattaagaattgtccaaatgttggagcatttgattgaaaaatccttcttagccattttaaagatagctttccaatgattagacgaattgattctttctgtgactcatcagttcctttcctgtaaaattcatgtcttgctgttgatttgtgaataagaaccagagcttgtagaaaccactttaatcatatccaggagtttgcaagaaacaggtgcttaacactaattcacctcctgaacaagaaaaatgggctgtgaccggaactgtgggctcatcgctggggctgtcattggtgctgtcctggctgtgtttggaggtattctaatgccagttggagacctgcttatccagaagacaattaaaaagcaagttgtcctcgaagaaggtacaattgcttttaaaaattgggttaaaacaggcacagaagtttacagacagttttggatctttgatgtgcaaaatccacaggaagtgatgatgaacagcagcaacattcaagttaagcaaagaggtccttatacgtacagagttcgttttctagccaaggaaaatgtaacccaggacgctgaggacaacacagtctctttcctgcagcccaatggtgccatcttcgaaccttcactatcagttggaacagaggctgacaacttcacagttctcaatctggctgtggcagctgcatcccatatctatcaaaatcaatttgttcaaatgatcctcaattcacttattaacaagtcaaaatcttctatgttccaagtcagaactttgagagaactgttatggggctatagggatccatttttgagtttggttccgtaccctgttactaccacagttggtctgttttatccttacaacaatactgcagatggagtttataaagttttcaatggaaaagataacataagtaaagttgccataatcgacacatataaaggtaaaaggaatctgtcctattgggaaagtcactgcgacatgattaatggtacagatgcagcctcatttccaccttttgttgagaaaagccaggtattgcagttcttttcttctgatatttgcaggtcaatctatgctgtatttgaatccgacgttaatctgaaaggaatccctgtgtatagatttgttcttccatccaaggcctttgcctctccagttgaaaacccagacaactattgtttctgcacagaaaaaattatctcaaaaaattgtacatcatatggtgtgctagacatcagcaaatgcaaagaagggagacctgtgtacatttcacttcctcattttctgtatgcaagtcctgatgtttcaaaacctattgatggattaaacccaaatgaaaaagaacataggacatacttgggatattgaacctatagactggattccactttaccaatttgaaaaacggctgccaggtcaaccctattgggtcaagccattcagaaaaaaatttcaagtattaaaagaaaccggaagaaggaacctatatttggtgccctattctcttttggccttaattggagaaccggggaaccctttggggtgaaaggaaaaaggcgcaaagcctggtttcacgaaaaagtccaaggtataacctgggaaaaagaattaaaaacccctcccct

SEQ ID NO: 367691 - DNA, 671 bp, Homo Sapiens
ccacacccacctggagggcgtcctgctgctggccagtgctatggtggcacatgccgaccaccacctgcgaggcctcttcgcagacttgctccctcggcttcgcagcgcggacgacccgcagcgtctcacggctatggccttcttcacagggctgttgcagagccggcccaccgcacggctcctgcgggaggaggtcatcctggagcgactcctcacctggcagggagaccccgaacccactgtgcgctggttgggcctgctgggcctgggccacctcgcgctgaatcgcaggaaggtgcggcacgtgagcacgctgctgccggcgctcctgggcgcactgggcgaaggcgacgcgcggctcgtgggtgcagcgctgggcgccctgaggaggctcctgctgcggccccgggcgcctgtgcggctcctgagcgcggagctgggaccgcgcctccctccgctactggacgacacacgggactcaatccgcgcctcggccgtcgggctccttgggactctggtgcgccggggccggggcgggctccggctggggctccgcggccccctgcggaagctggtgctgcagagtctcgtgccgctgctgctgcgcctgcatgaccccagcagggacgctgctgagagctcagagtggaccctggcccgctgtgaccacg

SEQ ID NO: 367692 - DNA, 1289 bp, Homo Sapiens
gggtccggaattcccgggatcgtccttgcaggctctgccgtcggaaagccgctcattctcgcttccccttccctttcccggctcaagtccttcctctctctttcctttctttccgcctatcttttttctgctgccgctccgggtccgggccattttccgggccgggcgcactaaggtgcgcggccccggggcccagtatatgacccgccgtcctgctatccttcgcttcccccgccccatgtggctgcggggccgcggcggcgctgcccactatggcccggaaagtagttagcaggaagcggaaagcgcccgcctcgccgggagctgggagcgacgctcagggcccgcagtttggctgggatcactcgcttcacaaaaggaaaagacttcctcctgtgaagagatccttagtatactacttgaagaaccgggaagtcaggctacagaatgaaaccagctactctcgagtgttgcatggttatgcagcacagcaacttcccagtctcctgaaggagagagagtttcaccttgggacccttaataaagtgtttgcatctcagtggttgaatcataggcaagtggtgtgtggcacaaaatgcaacacgctatttgtcgtagatgtccagacaagccagatcaccaagatccccattctgaaagaccaggagcctggaggtgtgacccagcagggctgtggtatccatgccatcgagctgaatccttctagaacactgctagccactggaggagacaaccccaacagtcttgccatctatcgactacctacgctggatcctgtgtgtgtaggagatgatggacacaaggactggatcttttccatcgcatggatcagcgacactatggcagtgtctggctcacgtgatggttctatgggactctgggaggtgacagatgatgttttgaccaaaagtgatgcgagacacaatgtggcacgggtccctgtggatggacacatcactcccaaggccttaaaggacatccccaaaaagacacaaacccctgaaactgcaaggttccggctttgggcctttcaccaccaggaaccaggaacttgggagccttggtctccgggagggtaactttcctctctgggaaggttggaaaaaacctatcctaagctcctcctcccccaaacttggcctatttgcccggggaaaaatgggggggccgggccttatgggtagcggaaggggcccgagctttgggaaggggggctccccaagccccaggggcgcctctctgtggacccccgggagaccactttataa

SEQ ID NO: 367693 - DNA, 745 bp, Homo Sapiens
  misc_feature (270)..(316): n is a, c, g, or t
agatggtgatgagttagacaatgagcgagggtggaaggggagaaatggggtgagggtatgatggggtaagacggggagtagcggaggatgtgtgggtggtgcgtgtggcgcgccgatcccgtgtttcgtggcttccgtggtgtcgtgtcggcagtccttgttgttcggtctgttcgtcgttcggagtgggcgtggggccgcgttcccggtggcggttcgggtggagagctgtgcgtgtgcgcacgagagggcctcattgctgcgctgaannnnnnnnnnnnnnnnnnnnnnnnnnnnnnnnnnnnnnnnnnnnnnncgtcggctggcggcggccaggcctattccgcaggtcctggccctccggagcgggggcgggctgcggcggcccgggcttgcccaggtaactgcccatgaggagcagttcggcagggtcaggtccttcgagcagggtccgcggctctaggaggtttccgttggctgtcgacttggccggaggcgaagcgaacagtgttcgccgatgtcgcgccttctgaacgaaggaggacaaggggcgcgaacctcggggctcgcggctcagtccccaccaggccgcggtagtccccacggccagccaggccagcgcagccgcagcaggcacgaggtacagtaggaggccgaccagcgacaggccgagaagcgccgccccggccggccctgacactcgctatcggccgccgccgctcgcctgctccagccgccgcagccg

SEQ ID NO: 367694 - DNA, 1087 bp, Homo Sapiens
cgctttcaaccggagggattggcaagaaattccgggtagatatgcctggctcaggcagtgcattcatccccaccatcaacgccatcacgaccagccaggacctgcagtggatggtgcagcccacagtgatcacctccatgtccaacccataccctcgctcgcacccctacagccccctgccgggcctggcctctgtccctggacacatggccctcccaagacctggcgtgatcaagaccattggcaccaccgtgggccgcaggaggagcagatgagcagctgtctcctgaagaggaggagaagcgtcgcatccggcgggagaggaacaagctggctgcagccaagtgccggaaccgacgccgggagctgacagagaagctgcaggcggagacagaggagctggaggaggagaagtcaggcctgcagaaggagattgctgagctgcagaaggagaaggagaagctggcgttcatgttggtggctcacggcccagtgtgcacgattagccccgaggagcgccgatcgcccccagcccctgggctgcagcccatgcgcagtgggggtggctcggtgggcgctgtagtggtgaaacaggagcccctgtaataggacagcccctcgtcctcgtcggcggggctggacaaggcccagcgctctgtcatcaagcccatcagcattgctgggggcttctacggtgaggagcccctgcacacccccatcgtggtgacctccacacctgctgtcactccgggcacctcgaacctcgtcttcacctatcctagcgtcctggagcaggagtcacccgcatctccctccgaatcctgctccaaggctcaccgcagaagcagtagcagcggggaccaatcatcagactccttgaactcccccactctgctggctctgtaacccagtgcacctccctccccagctccggagggggtcctcctcgctcctccttcccagggaccagcaccttcaagcgctccagggccgtgagggcaagagggggacctgccaccagggagcttcctggctctgggggacccaggtgggacttagcagtgagtattggaagacttgggttgat

SEQ ID NO: 367695 - DNA, 896 bp, Homo Sapiens
  misc_feature (53)..(89): n is a, c, g, or t
ggatgtatagactcactatagggcgaaccggagctaatcgcggtggcggccgnnnnnnnnnnnnnnnnnnnnnnnnnnnnnnnnnnnnnatcaggccaaatcggccgagctcgaattcgtcgagagcggtgctgtaagggacgctcgggggacgctgttcctgaggtgtcgccgcctccctgtcctcgccctccgcggtgggggagaaacccaggagcgaagcccagagcccgcggcgcggccggcggacgaacgagcgcgcagcagccggtgcgcggccgcggcgagggcgggggaagaaaaacaccctgtttcctctccggcccccaccgcggatcatgtaccaggattatcccgggaactttgacacctcgtcccggggcagcagcggctctcctgcgcacgccgagtcctactccagcggcggcggcggccagcagaaattccgggtagatatgcctggctcaggcagtgcattcatccccaccatcaacgccatcacgaccagccaggacctgcagtggatggtgcagcccacagtgatcacctccatgtccaacccataccctcgctcgcacccctacagccccctgccgggcctggcctctgtccctggacacatggccctcccaagacctggcgtgatcaagaccattggcaccaacgtgggccgcaggaggagagatgagcagctgtctcctgaagaggaggagaagcgtcgcatccggcgggagaggaacaagctggctgcagccaagtgccggaaccgacgccgggagctgacagagaagctgcaggcggaagcctctcagaagctcatgacgttcgtcagacccttgagacagacggaaactgttttcactccggaatatgctgtctctgctgaacgaagcccc

SEQ ID NO: 367696 - DNA, 1092 bp, Homo Sapiens
ggattgcagcactagggaggagagcaaagtaatcagaacctcccaaggatggataacaaaatttcgccggaggcccaagtggcggagctggaacttgacgccgtgatcggcttcaatggacatgtgcccactggtctcaaatgccatcctgaccaggagcatatgatttatcctcttggttgcacagtcctcattcaggcaataaatactaaagagcagaacttcctacagggtcatggcaacaacgtctcctgcttggccatctccaggtctggagagtacatcgcctccggacaagtcacattcatggggttcaaggcagacatcattttgtgggattataagaacagagagctgcttgctcggctgtcccttcacaaaggcaaaattgaagctctggccttttctccaaatgatttgtacttggtatcactaggaggcccagatgacggaagtgtggtggtgtggagcatagccaagagagatgccatctgtggcagccctgcagccggcctcaatgttggcaatgccaccaatgtgatcttctccaggtgccgggatgagatgtttatgactgctggaaatgggacaattcgagtatgggaattggatcttccaaatagaaaaatctggccaactgagtgccaaacaggacagttgaaaagaatagtcatgagtattggagtggatgatgatgatagctttttctaccttggcaccacgactggagatattctaaaaatgaaccccaggactaaactgctgacagatgttgggcctgcgaaagacaaattcaggacgggagtgtcagctatcaagtgcctgaaagatgggcgcggttggtgcgggggctctggagccggactgctggtcttctgtaaaagccctgggctacaaaccccatcagaaagattcggttacaaggccggaatcacttcctatcacactttccaggagaagggacccccttttctccgtagggaacggaagaatcccaccatttttcgggggcagccttcccgggttttcaaagaaaaacctcattgcggaccttggccccttggaaggccgggccaagggaaattggtcctt

SEQ ID NO: 367697 - DNA, 838 bp, Homo Sapiens
  misc_feature (248)..(292): n is a, c, g, or t
aagtgccgtaggtgttaccggcccccccggagttacgggatggccggtgtgcgtccgcctgctggacctggtgcaccgtcagcctgcctggtgcactgggactggtgctgggggctgctgacctcgtggctattgagtgcccaggatcccgtgagacgcccgctgccctcagtgaccctgctgggtcgcacgccctccccagcttctgctgctcgctgctcttcgtgcagggcgaggtcaggtgcccnnnnnnnnnnnnnnnnnnnnnnnnnnnnnnnnnnnnnnnnnnnnngtgcccgcggagactccggccgcccccttccgcaggggtgtagtaatctgcggagctgacagcagcccctgtagccaccctgcccgaagtctcctggaagcggcactgagctcatggccagccgcagcccctggcggacccactagttggacctgaggagccatgccctcctccctgcacccaaacttggagcacttgaccttttggctcgttgcgacgggggcaggctcgctgggttggctggaccatgctgcggatgcctgcgagggcatcttgcctggatgacctgtctggctgcactcccgggctcctggctttgcctctggggatcccgagtgtgtccaacatcagaccgcatgtggactgagacctagagtcatggatgtatgccgtccgtcttgcactgtggctcctctggggactcctcctgcaccagggccagagcctcagacatagtcacatgtgagaaggcgaccaggaaccagctcgggggccaactctgagtgagtccactggagcagagtatttggcgaattgacaaagccc

SEQ ID NO: 367698 - DNA, 900 bp, Homo Sapiens
gggagagcggacagggcgatggcaggttcgccgggtgtgaggcttcacagcggtccggtgaccaagtcgaggatttttctggtggtctagtctcagagattacatctgtagtcagcacaatgattcccttccaagcccagtggtgcccagttgcctccaggtcccagacctttatgtggacaagaaaagcttacagaggaaatggtaattctccacttgcacactgaggtgtccagttgcagcccatggagatccagttcaattatgaatctcaggaacaccaccttctgtcagatggtgagaacaagaccaagattggaaagccagcttcagaggagggaattacagcaaaaattgaaccattgacagaagagtctagcagtctcagaatgttctccaggattctgaaggcaaagaattctgtgaatttggggataaattaaatgaaaaagatcagaacgtctttaaaaagagacctcataactgtgacgaatatgggcaaagctttgtttggagaacaagcctgtttagggcatcgaaaaacgcactggtgagaaacctttatgagatgggaataagtggtggaaaagggcccccctggggggagaaaaccctctattcccctggtaattggggggtaattaaaaaggtttccaggttgggaagcctcccgaacccttaatttaagaccggggtacagggcagacccgagatcatcaccagccgtcctcagggggacccgcggaatgatcacgagttaaacgcggagccggccctggctctaacccaacctcgccgcacacaaaaggctccagcacccacctaactacacgcaattatatactcacaagaagcacgaaactgtccctttttctttcgggcccgccgctctttgctcac

SEQ ID NO: 367699 - DNA, 943 bp, Homo Sapiens; identical to SEQ ID NO: 178126
  misc_feature (790)..(790): n is a, c, g, or t

SEQ ID NO: 367700 - DNA, 720 bp, Homo Sapiens
tccaccatcaggccaaacagctccaggtggccgtggacatagatgccaagccggagtgcggggacgccgggggcctcgcacagggagagcagcagcagcagcagggccgtggccagctccatcaggtagaagaggtgattgtgtgcaaagaggtaggccgccagcgccttggcatccttgggctgggtgaagaacttgtcgttgttctcgccttcctggaggtagattgctgcctcttggtaattcatctcccagttgtgtgcggggctggagggggaactctcacccccagagctgagactgggggcctgggagtcgtggatggcatagctgccgccatttttgctaggtagctcttcttggcccaggccgttggagggagccagtggggcactgccaccctcatccaaggtcaggatgagcggcacgtcgtcatccaaactcacagccatgttctcttctcctgtggccctcaggatatgatatccagggcttgaaatagtctctggtttgagctccctttcaaagccactgggccaggggtgctgctcagaaactcctccattagaggcatcttacgcgccgccccagcaacccggaccgcgcgccggggtccgcaccgcgcagcctagcccgccggcgccaccgccaaaaccccgagcccgaagctgttgcagccgccgcagccgccgaagccgccgccacttcagccactgccac

SEQ ID NO: 367701 - DNA, 876 bp, Homo Sapiens
ttcgggatctagctccacgtagcgctcagggattgacaccttctctggtttggacagctctctgctgatgtccaagtcatagtcttgaggctccaggtccaactcagtgacaggcatggcctgcactttcaaccagccattctcctccttgtcctttttttccccttgcacgacccgttccagcaactgcaggtcaaagtcctgctcacgcttccatgagccaagatctccagggagcggccggctgaggtagcgagatgagggcaggcccgtcctctccccttggcccagtgtcctcttgcgctctcggaccagggccttctggtgtcgcttcatgcgctccagctgctcctctgcactcatcttgcctcgctggtgatcccctgagtacaggcgctccaaggcactcttaggtctagggaaggtcgccttgctgctttcggcattgagacccctccggagtgtgacgtagggagcaatggtggacgactgctggagccttgacgtggaccctgagagccctctgcctggcagcgtctggtacctgctctcagggcccacaagtcctagggagggctgggccatgtccccgctgagggtcgccagctcaggctcactgacatacgaccgcagctccatccctggaatcccaatacacacactgccccagctcccggtctcgcttcctctcgtctgactgccgcttgaggccccgcacagatgtgtgccggatgatggtggcctctcttggcagagagggcaaagccgggggctggtcctctgggctgtagagttcggggagtgggggcctgggaggtgctttcatcttcctgaactcttggtcgccttagttggtgactgaaggggggatgtcac

SEQ ID NO: 367702 - DNA, 605 bp, Homo Sapiens
gacactgccccccatcagggacaaaggtcacccctgggctggcccccatcctctattggggaccttgcatcaccatgccctggggaggaagaagagaaataagggtgggtcattgactgggtgctcttggtactcctgcaagaatgtgtgatgagggagaagcagggacccatccaccccagcacaaacatgcttgcacttctctttcctcactaagggctctcagggtccacgccaaggctccagcagtcgtccaccattgctccctacgtcacactccggaggggtctcaatgccgaaagcagcaaggcgaccttccctagacctaagagtgccttggagcgcctgtactcagggtatcaccagcgaggcaagatgagtgcagaggagcagctggagcgcatgagagcgacaccagaaggccctggtccgagagcgcaagaggacactgggccaaggggagaggacgggcctgccctcatctcgctacctcagccggccgctccctggagatcttggctcagtatgttaggaggggccaggcagcggggcagggacagggagccgagtgcccctcagagtcccccaaacacaagcacatcaca

SEQ ID NO: 367703 - DNA, 655 bp, Homo Sapiens
gcaggctgtacgcccccgtaggtatgggatggaaggcttgcacaggttgaaatgctttgcttctctgctgctgtaacaggaactagcacagacacacggatgagtggggtcatttccagatattaggtcacagcagaagcagccaaaatggatccccagtgcactatgggactgagtaacattccctttgtgatggccttcctgctctctggtgctgctcctctgaagattcaagcctatttcaatgagactgcagacctgccatgccaatttgcaaactctcaaaaccaaagcctgagtgagctagtagtattttggcaggaccaggaaaacttggttctgaatgaggtatacttaggcaaagagaaatttgacagtgttcattccaagtatatgggccgcacaagttatgattcggacagttggaccctgagacttcacaatcttcagatcaaggacaagggcttgtatcaatgtatcatccatcacaaaaagcccacaggaatgattcgcatccaccagatgaattctgaactgtcagtgcttgctaacttcagtcaacctgaaatagtaccaatttctaatataacagaaaatgtgtacatacatttgacctgctcatctatacacggttacccagaacctaagaagatga

SEQ ID NO: 367704 - DNA, 1027 bp, Homo Sapiens
  misc_feature (861)..(861): n is a, c, g, or t
  misc_feature (914)..(914): n is a, c, g, or t
ggaattcccgggatcccggctcgcgggcgctgcgtctccgcgtacaggaggcggcggcggctcccagtcaccggcccccgccggcgagcgcacgatgcactgcctgggcgccgagtacctggtttctgcagaaggagcccctaggcaaagggagtggcgaccccagatttataggaaatgcacagatacggcatggttattcctgttctttctcttttggactggtttggtgtttatcatgggctactcggtggtggctggagccgcgggaagactcctctttggctatgacagctttggcaacatgtgtggcaagaagaactcccccgtggaaggggcccctctttcagggcaggacatgaccctaaaaaaacacgtgttctttatgaattcctgcaacctggaagtcaaaggtacgcagctcaaccgcatggccctctgtgtatccaactgccctgaagagcagcttgactccctggaagaggtccagttctttgcaaacaccagtgggtccttcctgtgtgtttatagtttgaattccttcaactatacccacagtccaaaagcagactcactgtgtcccaggctaccagttcctccaagcaagtcatttcccttatttaaccgatgtgtccctcaaacacctgaggtgctactccctagttgcatctgtgttgataaatgatgttgacaccctccaccgaattctaagtggaatcatgtcgggaagagatacaatccttgggctgtgtatcctcgcattagccttgtctttggccatgatgtttaccttcagattcatcaccacccttctggttcacattttcatttcattggttattttggggattgttggttggnctgcgggggttttatggggggctgtaatttatgactataccaacgacctcagnaataaaattgggacaccgaaagggaaaattttgatgtggtggcttgggggtttgctatcgaatccccgggattcccccgcaggtctttccccccctggaatttggggccccag

SEQ ID NO: 367705 - DNA, 905 bp, Homo Sapiens
tgtcggtccggaatcttaggatggagctggtccttcgctccttcgcgctggggatgccctgcctgcctgacgccgccagcctgagccaccggcgcatgtgaccgcgcgtcgccccagtcccatccgtaggcgcccggcgcccggcccgcagcggcctcgttgtccccggtcgggccccgcccggtctcccgcgctgccacctcgcacgccggccctgcacccatgcaggcgcgagcgctgctcctggccgctggtaggccgcgctggcgctggcccgggagccccctgtcggcgccgttgtaccgcgcgctgcgacgtgtcgcggtgtcccagcccccgctgccccggcggctacgtgcccgaacctctgcaactgctgcctggtgtgccgccgacacgcgagggccgaacccctgtggcggcccttctggactcgcccttgcggcgcagagcctgggagtgcgtccttctgccctatgccgctgccgcctggttcgcccgccgtgattgttgccaacccgaacggagccaacaccacttattacccaaacaaatgttagcgcagccatagcaaagacaagaccccaagcacgacccactgcgacaccacacgccatctcccggggaacgtccccgttactgccctaccctcgcactacataagtggttcggcccttgaccccggatcagcagctccttcactaaccatactactgaatccacacactcgtgccgcgctacaacagattccaaacattcacaatttctggctcgacggattggacggaagcacacacaccgcaaaccaaccccagcattggtacaatacgatacgcagccactacttactctaaataacacaccgtcttgttttgagccgtccaaaccgtggccgccatgtagat

SEQ ID NO: 367706 - DNA, 955 bp, Homo Sapiens
cataatgatctgattgcccacccccaccaaacaggcacattttgtaattaagacgtgattcctgactttccttctgaccatggtaaccataaggggatatgcccttgggaaactaacttggcaagcactctcagtgtctgcttaaatacacaaccacgttctccctttgataaagttcatggggggaaagaatagagtagaccaaggttatcgcttttcgcctcccctctgctgtgtccttggttgtatccttttgaccttgcgctcctgcttggctagtttgtctctctccctctgcagcttgtcctgttccttcttcctttgggattcatcccgaagtgagtctcgctccagttttcgggcattaaggacatcttccacattggtgtttcggaacagaagtttgtcagaaccaatgttcattgtggtagcacctgaatcatccttctcatctgcttcatcctcttcatctgtcacatcagcatactgggccaggagggcagcttttctctgcttctcctcttctgacaccatccttggctttactacgatttgtgcctgcttctcaattagggtggcaatggcctgtacttcatcttcttttttcactttggtgacaacattctgagtttctgaccatcgttccacaatctccttgcagatattaaggagggaatcttcttccaggaaagcagagaggatcccctgcagagcgtccagcttctcttcttcctcctcctcctgcaggatacccaagatgtaggctccataaacggctcggtccactcccagtgcctccaaccgtccgtccagccaggagccaaagccgccgcctccgccatcgccttcgccaggggctatcgcggccacttcgctgggcgccgccatcttggggtcagggtcctgcaagcccctccgctctcgacgaattcgagctcggccgatttggcctgat

SEQ ID NO: 367707 - DNA, 856 bp, Homo Sapiens
gaggaacagctcctgcatccaccacagcttgtgacagttctgcattatgtcttgcaatatatctaagtgcccaggctgcagcctccttgactccagggtcaaaatcttccaagcatatgaccagcgtatccagtgctccacaatcgactattgcctgagctagctggggagaatgtttaccaactgctcgtaacacaaaggcagctgctttctggtagaagcgattctggttctgccaatgaataaacaagctgtggaagaatgtcgcacttcacaacagcttctgctaggtcatcattataattggccagtctcccaagagccaaagcagcagtctgttgaattgttgggaccacgtccagaagaagagttctcagcaaagacattacacctgtgtgcaatgaagatggaatacagggacaacgcgcacctcccacaaccatctggaagcttcaccctgctcggcctgacccccaaagacccgctgaaaagaatggatgcttttgcgaactccggtccccacactgcggctccccaagagctccacgggcagggcagcgggacggaggcgtcggggactcagtgcgcggggggcgacgggggttcgggctccgggctcacccgcgttctgcagcgtctcgatgttttggggtctagtcgccagctccgccaccatctgcacgaactgggtcctggccttctggtattgctcgaacacttgcagcacctgcctctgactcatggcgcccccgccgccgtctgccctcctcgagctctgcggggaagccgctcggcctgcgagtccaccaagggggcgatcgtggcgacgactcggcctccgacgggagccgcttct

SEQ ID NO: 367708 - DNA, 1098 bp, Homo Sapiens
ggaccggtccggaattcccgggatcgcgggtacacagagaagcggctcccgtcggaggccgagtcgtcgccacgatcgcccccttggtggactcgcaggccgagcggcttccccgcagagctcgaggagggcagacggcggcgggggcgccatgagtcagaggcaggtgctgcaagtgttcgagcaataccagaaggccaggacccagttcgtgcagatggtggcggagctggcgactagaccccaaaacatcgagacgctgcagaacgcgggtgtaatgtctttgctgagaactcttcttctggacgtggtcccaacaattcaacagactgctgctttggctcttgggagactggccaattataatgatgacctagcagaagctgttgtgaagtgcgacattcttccacagcttgtttattcattggcagaacagaatcgcttctacaagaaagcagctgcctttgtgttacgagcagttggtaaacattctccccagctagctcaggcaatagtcgattgtggagcactggatacgctggtcatatgcttggaagattttgaccctggagtcaaggaggctgcagcctgggcacttagatatattgcaagacataatgcagaactgtcacaagctgtggtggatgcaggagctgttcctcttttagtactctgtatccaggagccagaaattgctttgaaaaggattgctgcttcggccctcagtgatattgcaaagcattctccagagttagcacagacagtagtggatgcaggagctgttgctcatttagcccagatgatcctgaaccctgatgctaaattgaagcatcagatcctttcagctctcagtcaggtttccaaacattccgtggatctggcaaaaatgggtgttgaaacaaagatttttcccagttgaacttacctggctgaagggacaaggatgaatacgttgaagaaaatggcttctaccttaaattaaagagattggcaaaacaaccaccccgagcttttcacagctgggaagttaaaccccaggaggggtttgctgcccgggattgaactggcctttgggcccttgccaaaggggaaaccccg

SEQ ID NO: 367709 - DNA, 938 bp, Homo Sapiens
  misc_feature (785)..(785): n is a, c, g, or t
agcggagagaagcggctcccgtcggaggccgagtcgtcgccacgatcgcccccttggtggactcgcaggccgagcggcttccccgcagagctcgaggagggcagacggcggcgggggcgccatgagtcagaggcaggtgctgcaagtgttcgagcaataccagaaggccaggacccagttcgtgcagatggtggcggagctggcgactagaccccaaaacatcgagacgctgcagaacgcgggtgtaatgtctttgctgagaactcttcttctggacgtggtcccaacaattcaacagactgctgctttggctcttgggagactggccaattataatgatgacctagcagaagctgttgtgaagtgcgacattcttccacagcttgtttattcattggcagaacagaatggtgtaccccagttgtcagtctgcttgtcagaagaaccggaagatcatattaaggctgcagctgcttgggccttaggacagattggaagacacactcctgaacacgcacgggctgttgcagtcacaaatactttgccagttctgctttctttgtacatgtcaacagaaagttctgaggatctccaagtaaaaagtaaaaaagccataaagaatatcctgcaaaaatgtacctacttaccagcccttgaaccatttctatatgatgctcctcccaatattctgaaacatgtggttggacagttcagtaaggtgctgccgcatgatagcaaagctcgacgactttttgtaacaactggtggccttaaaaaagttcaangagataaaaagcagaaacctggttctctcccttcaagaaatacatccaacaggtatttaacagtttgtttaccccccgaagaaaaataagtggagggaatttatttcccccctggaattatttccaaaaataacacctttccttgccaaaaaa

SEQ ID NO: 367710 - DNA, 954 bp, Homo Sapiens
ggatcttccggcatcattcccaggtaaatcatacagagtcccgtacatattccagggtatcttctgctgtagacaaggttgggtcctgagacagatcccattgtggccattggatacctgggcgcaggcttcgatgaggctggtggatgtccaggtagtggatctctgtaaaaactccagcagggccaggcaaatggtcaaattcctggtccccgatccttgaaacggcggttggcagcgagttgatgatgtagtggggagacccgcgagttctcggacacttgacagcaacatagtccccaggggcaggtggaagaatcgcggacgaggaacataccgtggcgactggccctggcgccggggtctgcgccacactggcgagacaccggccccatataccaggcggaacggtccgaggagtcgaacctggcggaggacatggtgattggaccggggactcatgcggcaggtagggcgagcggctgtcctcgcctgctctgcacgccttagcccggcagacggctttggggccgaggaagggccttctcgcacaccttcgaggagcgctcagagggctgggccagcactttcctctcggctccgggcccgcagcatcctccgacgccgcccgcctgctccggggccgccacacggagagagccgcccgggaatgcacggcagagccggggggtcggggcaggcaaacccgagccgcagcggaggccaccccggggttctcgggctgctcggcgtcccaggggtgcctccagtgactcccggcctggaacgcgccggcgccgcagctcgacgggtcttcaccgacccccgccgtcacacgaggcaccgaactcgaaggagcgtcagcgcctccggggtgccattttgcccagcctgttcccaatagccacagcaacaaaatgcgacgcgggagaagcgcagccacctccatcccgt

SEQ ID NO: 367711 - DNA, 1089 bp, Homo Sapiens
  misc_feature (139)..(140): n is a, c, g, or t
  misc_feature (151)..(151): n is a, c, g, or t
  misc_feature (193)..(194): n is a, c, g, or t
acccgggggggtccccacggtatgcccacaggaaccccgcccctgtggggattttcccagcacactttttccttgatgttttacgaaccccgatgccgcgaaacccagaagttcgtggttgatgtactttcatggctgnncatgcatgccntatgacctcgtttctgttccttccaggctctttcccgggcanncgcgtagcgggtctccaggatgtgcctgatttccgagaggggtgagggtgttgccctcgatggcccactgtgtggtagatgtgatggtagtaggtctcctccatgaccctgcgcagagctgagttccccttggggatggacatgaccttcttcactttgctgtcgatgatgctgaaatacctctggtcgatctcttccacaagagccagtgtccgatcgcggttgaccagtgctttctcatggtagggtgagatggtcaatgctctggtgtacaagtagtccgcctggatgatgtccttgtcttcttccgagaagatgccaaactcggtgagcgcgtccacgaagtccgggtccatcttgagggcgtgcatgaagagcttttgggctttttcccgcttgccctggcgcttcatctccagggcctggttcagggcagctctggcttccaacttacccgctggagaggccttggtcttggccaccagcagcgtcgcgcccctggaggtgatgctgagctccgtggacgggctggtgcacttggtggcggcatgctgcgccctgtccggtttgctcctgagcaggtagaggcctttgagcacagccaagcactgctcctccacagcccccagcggcagcagcagggccagcagggaccccagcaccatgctcagcagcgtcacccagaggaagcggctccagaccgagacccatttcggttcagtcaccgccatcactgaagccattggtatgagcatcatctggactcaggagagggccctttgcgcatgtccacaggcggctgagagagagcaggatcgcgcgcagctgtcagaaccccaaccgccttccccgcgctcccagctccgggccgccggctcccgggtccccctccgct

SEQ ID NO: 367712 - DNA, 1112 bp, Homo Sapiens
  misc_feature (101)..(178): n is a, c, g, or t
  misc_feature (490)..(490): n is a, c, g, or t
  misc_feature (497)..(497): n is a, c, g, or t
  misc_feature (499)..(499): n is a, c, g, or t
  misc_feature (501)..(501): n is a, c, g, or t
  misc_feature (510)..(510): n is a, c, g, or t
  misc_feature (520)..(574): n is a, c, g, or t
  misc_feature (1050)..(1060): n is a, c, g, or t
  misc_feature (1062)..(1072): n is a, c, g, or t
tggaccggtccggaattcccgggatggaagccccccttgatctcctttccttccacatcccccggagctaccctgatttcttctacagctgagcctctttnnnnnnnnnnnnnnnnnnnnnnnnnnnnnnnnnnnnnnnnnnnnnnnnnnnnnnnnnnnnnnnnnnnnnnnnnnnnnngcgagggcagacaccaacacatggtgcttgcaggggtctccctgactgttgttgctcccagatcatactgcttgctccaccggagcatgtgcctgatgccttcctctcccgcttgacctgaaagttcgaacctcctgataacttcagcattaacagcgtgcttgagttaagttcacactctagccactctatggaatccacaccataactcatggtgtcctatggggcaggaactgtccgatctcaaggtggtttgttttttttattgtttgcttttgagacaagatctcgctctgttgcagcctggtgaantgcagtngntncaatcatanctcactgcannnnnnnnnnnnnnnnnnnnnnnnnnnnnnnnnnnnnnnnnnnnnnnnnnnnnnntgtgagccaccttcgccagccctgtctcagagtgtgacagctgggaaaactgaagcccagtgaagcaaagtcactggtcccatgttgtccctgatccagcctcccctgaaggccccaccctctctgccttgttcctggaagcgccccctctctcgtcaccccatggcagccactgcagcagattgctgacctccaggctctgcaggggcccctacttgctaacatggcctctggcccccacaggaaggggttgccccatggcccccgggggccccccaaaagttactaactacatgcttggcccatgaaaggtggcggggcccttgggttctccaaagagggcaacttgacccgtcaaagcctgggcccaaaaacaaacccgcgaccattccatgggacctcccctaaagaactggcccccccggggaaaaccccaccagttaaccttgaacaaaaaacctgggggcaacaataannnnnnnnnnntnnnnnnnnnnnaattcccgaaaactccccctccggggggaaacttctgtgg

SEQ ID NO: 367713 - DNA, 1157 bp, Homo Sapiens
  misc_feature (1015)..(1028): n is a, c, g, or t
gcacttggagatcgttctacatatcccaaaggacaacgtatcacaaccaagtggggtatatctcagggatgtaaagtgagtgtaaaagttgaaaatgaaaccaatgtaattcagtggcagaatgaagaaagttgtgtaatcatctcaacagatacagaaagaggcacttgacagcattaaacatcgttatgataaaaactcccaagaaataaagtttaaaaggaatgtcctcatttggataaaggtttactctgcagatcctacagacatcataccatatggtggactactgaaagctttctgcctaagcttggaaacaatgcaattatgcccattcttgtgacttctgttcaacactatggaagtcctggacagtataataaaccaataaaaagcaagacaagacataaggattagaaagaaggaagtaaaacgatagtcacaggaaacataattgcaaatttcttagagttctatataaacaaaccactagaagtaataagtgaaacagacgttatcagactataaagtcactatacaaaaatcaattgtatatctacatactgacagcaaacaactggaaagtcaaattcaaaagttctacacagtaatgtaaaattataaaatacttaagaataaatttttaaacaggcatgcaagactgctacattgaaaattatgaaatattgaggcccaatattaagatgttgattctcccccaaatgatctggactcaatacaattctccgagaaaatccaacaggcttcactgtagaaattaataaactaatagtaagtacaaagttggaggacacacactacctgatctcaagacttcatgaaattatagcaatcaagagaaatataccaaaagaaaaacagacaatcgatagaacagagtccagaaatagaccaatacatagaaagttaattgactttttatgaagatacgaaactggattaatggaaaaaggaaacaccagtggtgctggcacaaatggctatcaagatgttnnnnnnnnnnnnnngtaaatcttgaaaccaaactcacaccatgccaaaaattaatttgagattaatgacagatttaatgtaaaaactaaaactatgatgcctctaaaagacaatgtagatcccgggaatccggaccggtccac

SEQ ID NO: 367714 - DNA, 1258 bp, Homo Sapiens
aaaagaaagtgcttccacggaggggggcggggtgtttttgccccggaggttagcccgggtgggccccgcggggagaaaaaagggggcccgggaccccgcccccggcgggcgccggggaacccacccggccaaaactattttggaccggggggttgcttttaggggacccggatttcaaggttccaggggccacccgggcgcccagggaaggattcccgtgtgataggttaaacccaaggggctccgggaaccaccggtgttggtcagctcaccctcaccggggggttgggcgggccggccatgctgcgttggcggcttgcgcgggtttacttgctctgctgtgcggcgtggctcgactggtcagcctgacttgcctgcctgcctggttgctcggcctgctggtttgttggctgacaaagccaggggcaaacgtcccttttttccccctgggactgccaaggctggcaagcgttttcgggggagggggcttggcctcggggccctgccattttattaaggcttaaaattttgagctcggaaaggtgatgccaggctggaccaggactgaaaaggtgaagggaacctctgttggggctggctccatggccctgcggatcacctgggatgagggcccccggctggcttggtggcatctgaggtggagttgggcctcctccagacatagggctggagacgtgctctggggctcctaatggagatgggtgtggtgacatataaccttggctgtgttgatccattggactctggggagggcccatgcctgggtgaggtggtcgcataccagtgcccttcatggatccacaatggatgtcttctacaatccccttgtcatgtataccatcgatgggcttatgcatttgatgcatgccttcctgtgggaagtctgtggaccccatcgtcggcataggatgggagacacttggaggtccaggacttggccccatcatgctgtggacggaacctggggatggtcctggtcctggactaggcccaagaattggcccaggggaaggcccaggccccggcgaaggccctgggtggggcatcgcaccagggtctgtgggcgtggacatctacctctcctgtctctgccagtcagtagagtaatgcttgctcgcgaggagtgtgctggctgaatctcttccctctctgagtcacccagagtacagaaaatcccgggaattccggaccggtccataagaattgatttcaacgagggatacggggtttcccggcg

SEQ ID NO: 367715 - DNA, 998 bp, Homo Sapiens
ctccctctgaacggttaggctatggctgcgataaaggccgtcaactccaaggctgaggtggcgcgggcccgggcagcttgggctgtcaatatatgcgccgcccgagggctgcaggatgtgctgcggaccaacttgggtcctaaaggcaccatgaaaatgcttgtttctggtgcaggtgacatcaaactcaccaaagatggcaatgtgctgctcgatgagatgcaaattcaacatccaacagcttccttgatagcaaaagtagcaacagctcaggatgacgtcacaggagatggtactacttcaaatgttctaattattggagagttattaaaacaagctgacctgtacatttctgagggcctgcaccctagaataatagctgaaggatttgaagctgcaaagataaaagcacttgaagtttgggaggaagttaaagtgacaaaggagatgaaaagaaaaatcctcttagatgtagctagaacatcattacaaactaaagttcatgctgaactggctgatgtcttaacagaggttgtggtggattctgttttggctgttagaagaccaggttaccctattgatctcttcatggtagaaataatggagatgaagcataaattaggaacagatacaaagttgatccaaggattagttttggatcatggtgcccgtcatccagatatgaagaagcgagtagaagatgcatttatccttatttgcaacgtttcactggaatatgaaaaaacagaggtgaactctggtttcttttataagactgcagaagagaaagagaaattggtaaaagctgaaagaaaatttatttgagatagagtacaaaaataatagacctgaaggacaaagtctgtgctcagtcaaaaaaaggatttggcgtcattaatccaaagggaaattgatccctttttcctagattctcttgccaaacatggaaatagagcctccttcccgaagcaaaaggaagaatttgggaaagactctct

SEQ ID NO: 367716 - DNA, 1268 bp, Homo Sapiens
ccttttccatttgctaataaggccctgccaggctgggagggaattgtccctgcctgcttctggagaaagaagatattgacaccatctacgggcaccatggaactgcttcaagtgaccattctttttcttctgcccagtatttgcagcagtaacagcacaggtgttttagaggcagctaataattcacttgttactacaacaaaaccatctataacaacaccaaacacagaatcattacagaaaaatgttgtcacaccaacaactggaacaactcctaaaggaacaatcaccaatgaattacttaaaatgtctctgatgtcaacagctacttttttaacaagtaaagatgaaggattgaaagccacaaccactgatgtcaggaagaatgactccatcatttcaaacgtaacagtaacaagtgttacacttccaaatgctgtttcaacattacaaagttccaaacccaagactgaaactcagagttcaattaaaacaacagaaataccaggtagtgttctacaaccagatgcatcaccttctaaaactggtacattaacctcaataccagttacaattccagaaaacacctcacagtctcaagtaataggcactgagggtggaaaaaatgcaagcacttcagcaaccagccggtcttattccagtattattttgccggtggttattgctttgattgtaataacactttcagtatttgttctggtgggtttgtaccgaatgtgctggaaggcagatccgggcacaccaagaaaatggaaatgatcaaccctcagtctgaataaagagagcgtgaagcttcctacccgttaagacaatttctcatgagtctggtgagcactctgcacaaggaaaaaccaagaactgacagcttgaggaattctctccacacctaggcaataattacgcttaatcttcagcttctatgcaccaagcgtggaaaaggagaaagtcctgcagaatcaatccccgacttccatacctgctgctggactgtaccagacgtctgtcccagtaaagtgatgtcccagctgacatgcaataattttgatggaatcaaaaagaaccccggggcctctcccgtttctctcaaattttaaaaattccatttactccattttccagggaacggttcctaaggaaaaagggaattttttaaggagggaagaaattttggtggaaccagttggaaatgctggaaaagacccacaggtaaaggtgggggcctacccccttaaataagggccattgac

SEQ ID NO: 367717 - DNA, 1183 bp, Homo Sapiens
  misc_feature (857)..(857): n is a, c, g, or t
  misc_feature (1061)..(1061): n is a, c, g, or t
tgctgttgccccaacctgtgatccagcatgacatggaggccgagattgcagctgatccgggaggagtatgaagagcgcctgccccggctgaaagccgactataaggccgagcaggagtctcgggccaggctggaggaagacatcactgccatgcgcaactcatatgacgtcaggctgtccacgctggaggagaacctgcggaaggagacaggtccctgcgccgacagacctgctggagcccagtgatgccaggcctgaagccgaggcggctgatgacttcccgcccaggcctgaggtagatctggcctcggaagtggccttagaggtggtgcggacagcagagcctggcgtgtggttggaggctcaggccccggtggccctggtggctcagcctgagcccctgccggccacagctggtgtgaagagggagagcgtgggcatggaggtggcagtgctgaccgatgacccgctgcccgttgtggaccagcagcaggtgctggcccgtctgcagctgttggagcagcaggttgtgggtggagagcaggccaagaacaaggacctgaaggagaagcacaagcggcgcaagcgctacgcagacgagcgcaggaagcagctggtggctgccctgcagaactcggatgaggacagcggggactggggtgctgcttaacgtctacgactccatccaggaggaagtgcgggccaaagagcaagctgctggagaagatgcagaggaagcttcgggcagcagaggtggagatcaaagatctgcagtccgagtttcagctggagaagatcgattacttggccaccatccgccggcaggagcgtgactccatgctcttgcagcagctccntggagcaggtgcagcccctgattcgcagggactgtaactacagcaacctggagaagattctgcgtgagtcctgctgggacgaagataacggcttctggaagatcccacatcacgtcatcacaaaaacaggcttcccagtagtttcaactggggcacagaacaaaccagccccgcaaacctctgcagcagaccatggcgagcccnaacattgggaggaggaccgctacagggctcatgctccagtcgggagcaaccagtggaaaaacatgtccaggaaactaattttccgaatcttaaacggggcccaacccaaatcctttaggcaa

SEQ ID NO: 367718 - DNA, 1073 bp, Homo Sapiens
  misc_feature (882)..(890): n is a, c, g, or t
gtgcgaggcctgggtggcgttccgagacgaggctgcagactgtggagccgggagccggcagtaagcccagaggtctccaccccacgggaggaaggctgaggccaagaccccggaagagatggaccgcgtgaccagataccccatcctgggcatccctcaggcacaccgtggcaccggcctggtgctggatggagacaccagctacacataccatctggtgtgcatgggccccgaggccagcggctggggccaggatgagccgcagacatggcccactgaccacagggcccagcagggcgtgcagaggcagggggtgtcctacagcgtgcatgcctacactggccagccgtccccacgggggctccactcggagaacagggaggatgagggttggcaggtttaccgcctgggcgccagggatgcccaccagggacgtccaacatgggcactccgcccagaggacggggaggacaaggagatgaagacctaccgcctggatgctggggacgctgaccccaggaggctgtgtgacctggagcgggagcgctgggccgtcatccagggccaggcagtcaggaagagcagcaccgtggccacgctccagggcactcctgaccacggagaccccaggacccccggcccacctcggtccacgcccctggaggagaacgtggttgacagggagcagattgacttcctggcagcgagacagcagttcctgagtctggagcaggcgaacaagggggcccctcatagctccccggccagggggaacccctgcaggcacaaaccccaggggccagccaggccccccaaggcctccaacaagcccccacctgggcaaacgggcacgtggtttcccatcaagccccaaggggaaannnnnnnnncccagggaaaaacaaacaagggggcgtggattgggcccaaccttggggccagtgggccaaaagtgggtgggataaaacccgtggctctccttgtgcccctcctcggggaggcccccccgcgtgtaaccccccatcggaaaagacccccgaccatctatagcggcgcagaaatatcacgcccaa

SEQ ID NO: 367719 - DNA, 938 bp, Homo Sapiens; identical to SEQ ID NO: 99101
  misc_feature (135)..(135): n is a, c, g, or t

SEQ ID NO: 367720 - DNA, 1197 bp, Homo Sapiens
gggacagtcgcgtgctagactccggacccgccagtggtatggctgagccgactagtgatttcgagactcctatcgggtggcatgcgtctcccgagctgactcccacgttagggcccctgagcgacactgccccgccgcgggacaggtggatgttctgggcaatgctgccgccaccgccaccaccacttacgtcctcgcttcccgcagccgggtcaaagccttcctctgagtcgcagccccccatggaggcccagtctctccccggggctccgccccccttcgacgcccagattcttcccggggcgcaaccccccttcgacgcccagtctccccttgattctcagcctcaacccagcggccagccttggaatttccatgcttccacatcgtggtattggagacagtcttctgataagtttcctcggcatcagaagtccttcaaccctgcagttaaaaattcttattatccacgaaagtatgatgcaaaattcacagacttcagcttaccctcccagtagaaaacagaaaaaagagaaaagacaggaaccagttgtttcacttttttttgtgatacctgtgatcgggggtacgaacccccgaaaaaagataacaaatcccagtcggatcatgccaccccgccccgcacccgcatagccccccgatatggcgacacgcggaagtagagcagacagccggttagtaaaatgagagacaggccagggcggattgtcgacgcggtgatgggagaagaactcgacaggtcagcggccgtgcacggacggcgaggcggaagaaaggacacctagcggcggcgggttgggccccgggcgggcggcagtgtacagagccgatgtatggccaccctaaccggcggcctgagagaaagcaagagagagcgcagatgggcgggggggaatagacgtttaagccctggggcatgggcccgcggctagaagataaaagaaacgattcgttcaacggccaaccaatgcatctccggctttacccaccatataccaccccccttcatagccgcgggatctgcgtcacccgcgtggcgtgccacgctcctggccgcagtcgcgcggcaccaccacccgtcccgataccgcaccgcattccttccagaacatagtgtgatgccacaagcaggagagcacccgcggaccgtggcaatagacgccgccccgtccctcg

SEQ ID NO: 367721 - DNA, 1555 bp, Homo Sapiens
  misc_feature (1488)..(1488): n is a, c, g, or t
  misc_feature (1508)..(1508): n is a, c, g, or t
  misc_feature (1545)..(1545): n is a, c, g, or t
cagaagcagttgggccgaacgaagcgtgcgcgctttggtaaccggctagaaatcccgcacgcgcgcctgcctcctctccccaggcctgagctgcccctcccactgcctttccttcttcccgcgagtcagaagcttcgcgagggcccagagaggcggtggggtgggcgaccctacgccagctccgggcgggagaaagcccaccctctcccgcgccccaggaaaccgccggcgttcggcgctgcgcagagccatggaattctcctggctggagacgcgctgggcgcggcccttttacctggcgttcgtgttctgcctggccctggggctgctgcaggccattaagctgtacctgcggaggcagcggctgctgcgggacctgcgccccttcccagcgccccccacccactggttccttgggcaccagaagtttattcaggatgataacatggagaagcttgaggaaattattgaaaaataccctcgtgccttccctttctggattgggccctttcaggcatttttctgtatctatgacccagactatgcaaagacacttctgagcagaacagatcccaagtcccagtacctgcagaaattctcacctccacttcttggaaaaggactagcggctctagacggacccaagtggttccagcatcgtcgcctactaactcctggattccattttaacatcctgaaagcatacattgaggtgatggctcattctgtgaaaaatgatgctggataagtgggagaagatttgcagcactcaggacaacaagcgtggaggtctatgagcacatcaactcgatgtctctggatataatcatgaaatgcgctttcagcaaggagaccaactgccagacaaacagcacccatgatccttatgcaaaagccatatttgaactcagcaaaatcatatttcaccgcttgtacagtttgttgtatcacagtgacataattttcaaactcagccctcagggctaccgcttccaaaagttaagccgagtgttgaatcagtacacagatacaataatccaggaaagaaagaaatccctccaggctggggtaaagcaggataacactccgaagaggaagtaccaggattttctggatattgtcctttctgccaaggatgaaagtggtagcagcttctcagatattgatgtacactctgaagtgagcacattcctgttggcaggacatgacaccttggcagcaagcatctcctggatcctttactgcctggctctgaaccctgagcatcaagagagatgccgggaggaggtcaggggcatcctgggggatgggtcttctatcacttgggaccagctgggtgagatgtcgtacaccacaatgtgcatcaaggagacgtgccgattgattcctgcagtcccgtccatttccagagatctcagcaagccacttaccttcccagatgggtggcacattgcctgcaggggttcaccgtggttctttagtattttnggggtttttcaccacaaccntgttgttttgggaaaaacccaaaggttttttgacccnttgaggtttt

SEQ ID NO: 367722 - DNA, 770 bp, Homo Sapiens
  misc_feature (602)..(602): n is a, c, g, or t
agcggagttcctggagaaacgatggcgacagccgagaagcagaaacacgacgggcgggtgaagatcggccactacattctggcgtgacacgctgggggtcggcaccttcggcaaagtgaaggttggcaaacatgaattgactgggcataaagtagctgtgaagatactcaatcgacagaagattcggagccttgatgtggtaggaaaaatccgcagagaaattcagaacctcaagcttttcaggcatcctcatataattaaactgtaccaggtcatcagtacaccatctgatattttcatggtgatggaatatgtctcaggaggagagctatttgattatatctgtaagaatggaaggctggatgaaaaagaaagtcggcgtctgttccaacagatcctttctggtgtggattattgtcacaggcatatggtggtccatagagatttgaaacctgaaaatgtcctgcttgatgcacacatgaatgcaaagatagctgattttggtctttcaaacatgatgtcagatggtgaatttttaagaacaagttgtggctcacccaactatgctgcaccagaagtaatttcaggaagattgtatgcangcccagaggtagatatatgggagcagtggggttaattctctatgcttttatatgtggaacccttccattttgatgatgaccatgtgcccaactcctttttaagaaagatattgttgatggggatccttctatacccccctcaatattttaaaatccccttccggggat

SEQ ID NO: 367723 - DNA, 962 bp, Homo Sapiens
atcaggccaaatcggccgagctcgaattcgtcgagagcggagatgcagagcagttggctcagacgggggaatgtgaccccgaggagatctacaaggcagctcgacacctggaggtgcgcatccaagacttcgtgcgcagggtggagcagcggaagcttctcctggacatgtctgtttccttccacacacacaccaaagagttgtggacatggatggaagaccttaagaaggagatgttggaggatgtctgtgcagattctgtggatgcagtccaggaactgatcaagcagttccagcagcagcagaccgccactctagatgccacactcaatgtcatcaaggaaggcgaagaccttatccagcagctcaggtcagcgcctccctccctcggggagcccagcgaggccaggactcggctgtgtccaacaacaaaacaccccacagcagctccatcagccacatcgagtcggtcctgcagcagcttgatgatgcacaggtgcagatggaggagctgttccacgagcggaagatcaagctggacaatcttcctgcaactgcgcatctttgagcagtacaccatcgaggtgaacagcagagctagacgcctggaatgaagaatttgcttcggcagaatgaaatgacttccaacacagagggaacctaaccctgggcagaaacagcggtgcagcgccacacaagaacggagctagcatgaacaacattgactttgaaggttatccagcaggaccggacctgccagtactcacggggtccggctcagattgagtggatctgtgaaaacactggtctgcgccggtgcgaatttggattccccggaagcctgatgggcagaagagactaggaaacgggccaagacccggaggacgctgggtccgcaagcctctggggcgcactccaggatcaggacgcgccttgtccaacaacagccacacacaaagcac

SEQ ID NO: 367724 - DNA, 1036 bp, Homo Sapiens
  misc_feature (90)..(127): n is a, c, g, or t
ctcctactcccccccaccacggcgcccgcctaatcctcccgccgctaccggccccggaattcccgggatccctgctgcgcaccgggcctnnnnnnnnnnnnnnnnnnnnnnnnnnnnnnnnnnnnnnaccggcctccaggatcatgtggtatgtcagcaccaggggcgtagccccacgggtcaactttgagggggccctcttctctggctatgcacctgacgggggcctctttatgcctgaagagctcccacagttggacagagagaccctgtgccagtggagcacactctcctatcctggcctggtgaaggagctgtgtgccctcttcattggctctgagctccttccaaaagatgaattaaatgatctgatcgaccgagccttcagcagattccgtcacagagaagtggtccatctgtccaggttgaggaatgggctgaacgtgttggagctgtggcatggcgtcacatatgcatttaaggacctgtccctgtcctgcacaacacagttcctgcagtacttcctggagaagagggagaagcacgtcactgtggttgtaggaacatctggggacacaggaagtgctgccattgagagtgttcaaggggcaaagaacatggacattatcgttctgctgcccaaaggtcactgcacaaagattcaggagctccagatgacaacggtgctgaagcagaacgtacatgtgtttggagtggagggaaacagcgatgagctcgatgagccgatcaagactgtgtttgccgatggtggcttttgtcaagaagcacaatctgatgagcctgaattcgatcaactggtcccgggtcctgggtgcagatggcccatcacttctttgcttacttccagtgtacgccatccttggacacacatcccctacccctggtgggaggtggttgtgccaacaggggctgccgggtaactttgcagctgggtacattgctcaaagataaggctggcccatccgtctgggtcgtggcagtggaccgcaatgacatcatccacaggactgtccag

SEQ ID NO: 367725 - DNA, 1477 bp, Homo Sapiens
  misc_feature (137)..(185): n is a, c, g, or t
  misc_feature (1256)..(1266): n is a, c, g, or t
ggtgcccctgcccggctcccgccgggaagttctaggccgccgcacagaaagccctgccctccacgccgggtctctggagcgccctgggttgcccggccggtccctgccgctgacttgttgacactgcgagcactcannnnnnnnnnnnnnnnnnnnnnnnnnnnnnnnnnnnnnnnnnnnnnnnngtaacatgccatagtgcgcctgcgaccacacggccggggcgctagcgttcgccttcagccaccatggggaatgggatgaacaagatcctgcccggcctgtacatcggcaacttcaaagatgccagagacgcggaacaattgagcaagaacaaggtgacacatattctgtctgtccacgatagtgccaggcctatgttggagggagttaaatacctgtgcatcccagcagcggattcaccatctcaaaacctgacaagacatttcaaagaaagtattaaattcattcacgagtgccggctccgcggtgagagctgccttgtacactgcctggccggggtctccaggagcgtgacactggtgatcgcatacatcatgaccgtcactgactttggctgggaggatgccctgcacaccgtgcgtgctgggagatcctgtgccaaccccaacgtgggcttccagagacagctccaggagtttgagaagcatgaggtccatcagtatcggcagtggctgaaggaagaatatggagagagccctttgcaggatgcagaagaagccaaaaacattctgggtaaatataaggagcaagggcgcacagagccccagcccggcgccaggcggtggagcagttttccggcactggctccgctgacctacgataattatacgacggagacctaacgcaagcgacctgctgccttccttcccactgcttgtcttcagtgtgcccggctgggcaagggtgccgtgggtgggggcccatgaagacaggaaagggaaatacccaaggcaagggggggcaagggctcctttcccccaagcaaaaccgcccagccctgctccaggcccctgcactccgcccacccctaccctggctgcacctgagcttgctgcccccggggatgttgcccagtggctgtgcactgctctgtgcacctgcgtgtgtgtgagtgcacttgtgtgtgggtgactaagtggatgcatgtgtggtgcctgtgtgaatgagggtatgcccccctaacggggtacctgggggcatgttgggaaaatgtctggccccctcaatgcttnnnnnnnnnnnaaaccttttccacctcccggcagtcaccgcaatccccattgctcccccggactggtgcgtgccccttttccctttgccacaactccccccgtgagggggccttgccccacgacctatccaatccctcctcaaatgctaacccgacctcttccccctcgtagccacacgccaagcaactcataagccacactggaccccataacctgcgctc

SEQ ID NO: 367726 - DNA, 1064 bp, Homo Sapiens
ggggttcgccttcagccaccatggggaatgggatgaacaagatcctgcccggcctgtacatcggcaacttcaaagatgccagagacgcggaacaattgagcaagaacaaggtgacacatattctgtctgtccatgatagtgccaggcctatgttggagggagttaaatacctgtgcatcccagcagcggattcaccatctcaaaacctgacaagacatttcaaagaaagtattaaattcattcacgagtgccggctccgcggtgagagctgccttgtacactgcctggccggggtctccaggagcgtgacactggtgatcgcatacatcatgaccgtcactgacttttggctgggaggatgccctgcacaccgtgcgtgctgggagatcctgtgccaaccccaacgtgggcttccagagacagctccaggagtttgagaagcatgaggtccatcagcatcggcagtggctgaaggaagaatatggagagagccctttgcaggatgcagaagaagccaaaaacattctggccgctccgggaattctgaagttctgggcctttctcagaagactgtaatgtacctgaagtttctgaaatattgcaaacccacagagtttaggctggtgctgccaaaaaagaaaaagcaacataagagtttaagtatccagtagtgatttgtaaacttgtttttcatttgaagctgaatatatacgtagtcatgtttatgttgagaactaaggatattctttagcaagagaaaatattttccccttatccccactgctgtggaggtttctgtacctcgcttggatgcctgtaaggatcccgggagccttgccgcactgccttgtgggtggcttggcgctcgtgattgcttcctgtgaacgcctcccaaggacgagcccagtgtagttgtgtggcgtgaactctgcccgtgtgttctcaaattccccagcttgggaaatagcccttggtgtgggttttatctctggtttgtgttctccgtggtggaattgaccgaaagctctatgttttcgttaataaagggcaacttagccaagttt

SEQ ID NO: 367727 - DNA, 1392 bp, Homo Sapiens
  misc_feature (1111)..(1120): n is a, c, g, or t
ggaattcccgggatcctttcctcactgcacgctcttgcccctccttttttctctcctgcccgtgttcttcccgccgcctgacctggcccgcccgcctttccagtctggccgggcgggggcctgaagcacggcggctcgggccgtgggaccgtgttcacaccctttccagaaaggctgggctggtaaccgcgaaaccgactggagcaggagctgggagaactggagaaaactgctctaatctcacttgactccagctaggagctgatgctgcatcgtaataacatttgcagagcgctttcacaggcgctggagtgacttgtctgagattcctccagaactgagccctttgttggaaccataccccagcccatggtcccatgactaggtggatagtactccttgtacctcctgcaacccagaaccctggctgaccactttgaaggaggatgctccagcaggtcaatggccacaatccggggtctgatggccaagccagggagtacctcagagaagacctgcaggagttcctgggtggggaggtcctgctgtacaaactggatgacctcaccagggtgaatcctgtgacactagagacagtcctgaggtgcctgcaggcccggtacatggcagacacattctacaccaatgctggctgcaccctggtagccttgaaccccttcaagcctgttcctcagctctactcgcccgagctaatgagagagtaccatgctgcgcctcagccccagaaactgaaggccccatgtgttcactgtggggtgaaacagacctacaggaaatgtcaagagcctgattgaaccagtcaaccagtctattgttgtcagtggagagagtggtgctggaaagacatggacgtctcgctgcctaatgaagttctatgctgtggtggccacctcacctgcatcttgggagagccacaagattgcagagaggatagaacagaggatcctgaactccaaccctgtcatggaagcttttgggaatgcgtgtacactgaggaataacaacagcagtcgctttgggaagttcatccagctccaactgaacagggctcaacaaatgactggagccgcaatccagaccctacctcctnnnnnnnnnntcaattggccctcccagctttccaatggaaaggaaattcccccatcttctatcaaaatttgcaaaggacccagtgaaggacaaaaagcttccagtgggccccttccctagaaggaaacttgccttttctcctggcttgtccaaacccaaaaaggaaactttaaaaaagaggaattgtttttcagccgcgaacaataaaaggtccattcttccccttttggggcatttgtacccccccactacccacaaaaactacctttcttttaaggtcct

SEQ ID NO: 367728 - DNA, 729 bp, Homo Sapiens
  misc_feature (697)..(697): n is a, c, g, or t
ggtccggaattcccgggataccgcttgctgccaaacagtgggggctgaactgacctctcccctttgggagagaaaaactgtctgggagcttgacaaaggcatgcaggagagaacaggagcagccacagccaggagggagagccttccccaagcaaacaatccagagcagctgtgcaaacaacggtgcataaatgaggcctcctggaccatgaagcgagtcctgagctgcgtcccggagcccacggtggtcatggctgccagagcgctctgcatgctggggctggtcctggccttgctgtcctccagctctgctgaggagtacgtgggcctgtctgcaaaccagtgtgccgtgccagccaaggacagggtggactgcggctacccccatgtcacccccaaggagtgcaacaaccggggctgctgctttgactccaggatccctggagtgccttggtgtttcaagcccctgcaggaagcagaatgcaccttctgaggcacctccagctgcccccggccgggggatgcgaggctcggagcacccttgcccggctgtgattgctgccaggcactgttcatctcagcttttctgtccctttgctcccggcaagcgcttctgctgaaagttcatatctggagcctgatgtcttaacgaataaaggtcccatgctccacccgaggacagttcttcgtgcctccnaacttcaggatgtgacccaaaaaattcttgtc

SEQ ID NO: 367729 - DNA, 759 bp, Homo Sapiens
agcggattgtgcctgcgctgccagcagccaggagccaggagccaagagcagagcgccagcatgaacttgggggtcagcatgctgaggatcctcttcctcctggatgcaggaggagctcaagtgctggcaacaggcaagacccctggggctgaaattgatttcaagtacgccctcatcgggactgctgtgggtgtcgccatatctgctggcttcctggccctgaagatctgcatgatcaggaggcacttatttgacgacgactcttccgacctgaaaagcacgcctgggggcctcagtgacaccatcccgctaaagaagagagccccaagagcccacgtcctcagggacggtcctgccttgggacctttgcacttgctgttttctgtaattggaatgctctttgccagaaagctgcaagcctcgaccctcttttccttcaaatccctgcttcagtgtcaccactgcatcatggagggcctatttaaggcgaaaccacaatttctccaaaaggtgagttgtaagagtgatcacttgtcttaaaaggaggacaggcagtctctgcccaatggggctgcatgggttttcggcatgacctctccctcccctggccacgtgggacgggcaaccatggcatggccaggagccctcatgccaggacagctgtgagaccaggaatcagcatcaccttgggacatgatggtacttggcaagatttaacatgaagctgtggggcattgcccagttagagcttgaaaaatg

SEQ ID NO: 367730 - DNA, 1079 bp, Homo Sapiens
  misc_feature (723)..(726): n is a, c, g, or t
  misc_feature (728)..(730): n is a, c, g, or t
  misc_feature (732)..(735): n is a, c, g, or t
  misc_feature (737)..(746): n is a, c, g, or t
  misc_feature (751)..(751): n is a, c, g, or t
  misc_feature (754)..(797): n is a, c, g, or t
  misc_feature (996)..(1005): n is a, c, g, or t
aattctcgggatcaagccgtgctaaagctccagtgaacacatatggacctggctttggacccaacttgcccaatcacaagtcaggttcctatcccaccccttcaccatgccatgaaaattttgtagtgggggcaaatagggcttcacatagggcagcagcaccacctcgacttctgcccccattgcccacttgctatgggcctctcaaagtgggaggcacaaaccccagctgtggtcatcctgaggtgggcaggctaggagggggtcctgccttgtaccctcctcccgaaggacaggtatgtaaccccctggactctcttgatcttgacaacactcagctggactttgtggctattctggatgagccccaggggctgagtcctcctccttcccatgatcagcggggcagctctggacataccccacctccctctgggccccccaacatggctgtgggcaacatgagtgtcttactgagatccctacctggggaaacacaattcctcaactctagtgcctaaagagtagggaatctcatccatcacagatcgcatttcctaaggggtttctatccttccagaaaaattgggggagctgcagtcccctgcacaagatgccccagggatgggaggtatgggctgggggctatgtatagtctgtatacgttttgaggagaaatttgataatgacactgttttcctgataataaaggaactgcatccnnnnannnannnncnnnnnnnnnnccccnccnnnnnnnnnnnnnnnnnnnnnnnnnnnnnnnnnnnnnnnnnnnnaaaaggggggcccccccaaaatatcccccgaggggcccaaatttaccgcaaccccttttttttgaaaaaaggggcccctaaaggggggcggaataataaacctagggccggggccccccttgttaaaacccccggggggtgggaaaaactggcctactctggggaacctttttggggaaaggaacctttcacctttctnnnnnnnnnnaaaaaatattggggaaaaaattatctcttacgaagaatatattaacgccccctccgggggagaaatttaaaaaa

SEQ ID NO: 367731 - DNA, 485 bp, Homo Sapiens
  misc_feature (97)..(150): n is a, c, g, or t
  misc_feature (313)..(370): n is a, c, g, or t
agcgggcccaccgcccgcccgccagccgagaagccgggctggtcgcgctcggtttctccgcgaaagccggccgtgtacctaggaattaaccggcccnnnnnnnnnnnnnnnnnnnnnnnnnnnnnnnnnnnnnnnnnnnnnnnnnnnnnntgctgagcgcgcgcgagaacaataataagatccgtgtttgcggtcgctgcccgagaaggaattcggagcagacgcgaggcccggcgctcgcgccgcgcccgggagcccgggagggagaccggcagcggcggcatgaggcaggcgacgcggcgctggtgagcannnnnnnnnnnnnnnnnnnnnnnnnnnnnnnnnnnnnnnnnnnnnnnnnnnnnnnnnnagcgccgaacggccgggggctcccctcccccgctgccgggccgtgatttgccgggcctgctgcgccccccgcccaccccttgcctcagccgccgcctcgccgctttccctcgtcg

SEQ ID NO: 367732 - DNA, 1178 bp, Homo Sapiens
  misc_feature (496)..(562): n is a, c, g, or t
  misc_feature (609)..(618): n is a, c, g, or t
  misc_feature (858)..(868): n is a, c, g, or t
cggtccggaattccccggatcggggatgcccagaggcaacagcccaggctggaggtgccccagggaagggtgctcacagtggtcccagggctacacttggctttgactgcacagcccctgctcagatccttgtggagggtgtccgatgacttggggaggttctcttccccttcctagaggaggaagtgaccaagtttgaaggcggcagaaatggccacacagccaagaagagcccatgcaactcagtccaggattttactgggtcagtgacattggtggaagccttcatgcctcctcattccacagcacttcctcctatgttgaccttaaacactggcttcccactgatacagactgggatgagctgagggcagtctcatttactgtcaagagttgtatttttgtattgtcctttttgccaagtctacatgtgttgactctgtaatggatttatgtagcccacttcagtctgcaaataaagcaaagtaactggagnnnnnnnnnnnnnnnnnnnnnnnnnnnnnnnnnnnnnnnnnnnnnnnnnnnnnnnnnnnnnnnnnnncggggggcccgcccaaaagataccctccaggggggcccagggttaannnnnnnnnnatctttttcttgatcaaagggggggcgcggcccagggacgggaaattatatcccgtggggccccgggctcgtgcgtttccaacccctttctttatttggagaaaaccggcccccctttggggactcctttgtaaacgaaacctcccccccgcgggggtgggcaaccccttgggccgccccccgcaaaccgcaagttttggaggctctccatgggaaagaacaaaacattttttctgggcnnnnnnnnnnntttgtaggagacccccacttcttcgtttgattgtcttaaagcactttccgaaattactacaattatctttctgggaagaaatggttggttccacccgacccacgctgcttcctatcttcgtctgcgggatttttcatattctgggggcccccgcgggtccaatacaacgccacccacccgcccgcgacgcgcgcggtgtcgtggcgggaaaatccatcacacacgccgccccggcgagagggttctttctccgccttgccccacatactcgcaccgcctgccttcgatagacgagagctagtccccggag

SEQ ID NO: 367733 - DNA, 533 bp, Homo Sapiens
gaattgagggagttataggcagaggaggatcctagctccagccataagaactgggagagccgcctgctgctccagaagacctgcccacctccacagaaatgctagcccttcagaccttctggtcagtgaactgggaccagctctgactaaggatgccttccatggcctgggactcgagttcttcagaaccaagaggctaactgggcttcctccaagaagggaccaggggctagaagcagaagttggcatcagcaaacatttctggaatctaccaaagggaggcccaggcagaaccccttcctcagtctcccttcccctcttccccccagccttgaagaggttgatcctttgtgctgtgtctcttagccctttcatcggggatgcccagaggcaacagcccaggctgggaggtgccccagggaagggtgctcacagtggtcccagggctacacttggctttgactgcacagcccctgctcagatccttgtggagggtgtccgatgacttggggaggttctcttccccttcctag

SEQ ID NO: 367734 - DNA, 1022 bp, Homo Sapiens
ttcccgggatggcctctcccctctcccctttctctctgggtcttcctttgccccactgagggcctcctgtgagcccgatttaacggaaactgtgggcggtgagaagttccttatgacacactaatcccaacctgctgaccggaccacgcctccagcggagggaacctctagagctccaggacattcaggtaccaggtagccccaaggaggagctgccgacctggcagggaacaaccaagactggggttaaatctcacagcctgcaagtggaagagaagaacttgaacccaggtccaacttttgcgccacagcaggctgcctcttggtcctgacaggaagtcacaacttggccctgacttcctatcctagggaaggggccggctggagaggccaggacagagaaagcagatcccttctttttccaaggactctgtgtcttccataggcaacatgtcagaaggggtgggcacgttccgcatggtacctgaagaggaacaggagctccgtgcccaactggagcagctcacaaccaaggaccatggacctgtctttggcccgtgcagccagctgccccgacacaccttgcagaaggccaaggatgagctgaacgagagagaggagacccgggaggaggcagtgcgagagctgcaggagatggtgcaggcgcaggcggcctcgggggaggagctggcggtggcccgtggcggagagggtgcaagagaaagacagcggcttcttcctgcgcttcatccgcgcacgggagttcaaggggggcgtgcctatgagctgctcagaggctatgtgaaatttccggctgcagtaccctgagcttctttgacagcctggtccccaaggctggccgctgcaccattgaagctgggtacccggggggcctctctagccgggaacaagatgggcgcaggggtcctgccccttaaccttggaaactggcaaagtaaaaaaatcccctttggaggaaaacttgccaggcaaatggccttcatccagggaaaaacccccgg

SEQ ID NO: 367735 - DNA, 1256 bp, Homo Sapiens
  misc_feature (620)..(629): n is a, c, g, or t
  misc_feature (1153)..(1153): n is a, c, g, or t
ggggtggctccccttcaaaattcccccggggggggtaccatccagtaccccccctcccgggaaattggggagggagttccagaaaactttggtgttctgctggggctggggccagcccccttttggttttggggctcgtgggggcttggcaggtgggggttgtgggcagctcagataccatggagggacttgatatgttgagctacaaaattctcccaactcaaaagcggtctggcttcctgatgtcttaaaaataagggggctcttgccagggacacttttgtggcaagaaagcacacttggaaagcggtctgctaagtgcgggtactaaaaatatttactaaacatcatggctggaaagaaatggagatcatttttctaaaaaagtcgaagaggctccctaggaggggccagttcctccctgggttgggggctggtgatttgcgcagcccatggcccgggccagccggcctgagttgtggtaactggggcaggggttccggtagggcccaggtccataatgaaggggcacgggtgacccggcgcacctgggggctggagagaacccaggtcagcccttcctccttccaaggtgggagtcccaagaaagtgtggggagnnnnnnnnnntaggaaaggaaataggaagggctgggaatgggctgggagaaagaccattcagtactaaattgagtgcattaatgaacaggtgggccaggctgtgcaggcgcctgtatttgttgcaagggtggcgctcagaagatgttggggcacatatgccagtcttgcttctccttggcctcccagtagccgcccttgtacacacaggccatctccccggtcagcggatccagcctcttctcaaaccacagtggcgtgtaggcatccgcctccttctcttcctccgagctgcagctgctgcccggcccgcaggcctccagccgccggcgccgcgacaggcgctgcttctcctccagccgctgcttctcggtattggcctcgtcccaacggcccttctccatcagccgctggtcgggccgcaggcggctgtcggttggcgctacgccctcctcgtgctcgttgagggtcagggccagctctgagaagtagtacatgttctccgcgttctccggcagcgggtacttcttccacangcagcttggctgacagggtctggtacactgtcttctgcttcccgtcagagctggggctgctgggactgctatgcatgaccttggagcactccatatcccggga

SEQ ID NO: 367736 - DNA, 1049 bp, Homo Sapiens
  misc_feature (243)..(243): n is a, c, g, or t
  misc_feature (414)..(414): n is a, c, g, or t
tccttggtttttgctcatccctgagctgaaagagtttatttgagttgagcatagtgtcctggtacctgtggaatcatagcctgagctacaaagggacctttgagaccatcctctagtccaccatcctcttcattttacaggtgtgggacctgagctggattgaacagggtcgggggagaagaggcctgggcaggacaggccacctgggatctcatcctggcccttgccagccactggctgagntgaccttcagcaggcacttcacctctcagagttgctgttccttagagttatacgatgggtttggactagatggtctttaagattatagaagtatagggtcctaagtatatattattatattgagaagggctatggaaggatttatattaatcctgatgttcttcagttatncttctgtagtttcctgctattacggtagcagtgtttacattttaaagaattataatgggcttttactaacttgctctttcttgattatctgaatagaagcctaaatcataatcttagagattttcctttttaagtattacagaaacacatgcgtggacacacacctacctattctaataaaatggtatcagaagatttctttttaaatgtataatcaggcatctaccagtttaaaacgggcaaatactataagcatatgtttctgatttgcttttattccagctatgtaagaggagtaactatagcagaaaacatgacaaattgatttttccctttacaacattcaaatgagtcccaatgttttcaaaaatacatacctcagaggagataaagcttaagtggacacttctaagtatgattataattattattattaatgatttctttaacaaacctatcagaattttgacatcctattaagtggtgttccccctcatggcatctaagtttacttaggaagtaatacttatttctaatgaggctgccatccctataagttatttttgaaactccctctccttaaaaataatttcagggaagggattagaggtttaaaaaaatcccctatttttttt

SEQ ID NO: 367737 - DNA, 354 bp, Homo Sapiens
aaatgggcagtccctgagctccagccagctgtctctgcctgccctgtccgaaatggagccagtcccaatgcccagggatccctgctcatatgaggtgctccaaccgtcagacatcatggatgggccagatcctggcgcccctgtgaaattgccttgtctgccagtgaaactgacgcctccgctacctccaaagaaagtcatgatctgtatgcccgtggggggggccagacctctcactggtgtcctacacagcccagaagagtggccagcagggtgtggcccagcaccaccacactgtcctgccctcccagatccagcaccagctgcagtacggcaccacggccagcacctccc

SEQ ID NO: 367738 - DNA, 1102 bp, Homo Sapiens
acttgtccaaaagtaaggagccccgggccggtggaaaagtaggtgtggtgttttcccttttcttttatttttggaccccgtttgttttagggggatgtggtccttcctaccggaaatttaaagggccaagattaaaggggaaaaagcccccataagtggaagtatgcatccactttgcagtaaattccaatttccaggggttcaatgggccagaattacagcaggtaccccggaaggtgttaaatatttaaacaggttttaaaaatttttttaaaagcaaaatgctggaaaaatccaggtcctctttgggcacacacagtatgacctttatgtgtatccaaaatgccacgtggggagtagctgcaccttcaaaaatcctttaaaatgttttaatcccaaaaacaaaagtacagatccagtccacattaaggactaactgcatgtaacatttaacttcgtgaatggatgcagcattcaatagacagggtgtgaaaaaaggcatccacacagctactaaacatcttccctagtgctctcaaatactaaaaatggctgaagcaatttattcccactatgtgggctttctcttttacaactaagttttataaatccctcaaaataaggtatttagaatggaaatcctccctcactatagtggaattaataaatgttactgatacagccgcttgtggggttgtttaaatacctatatacttagagctatatataatcaattctcagttaaaatgggaaagagatggaactaatcaacaaacacagcaactcataaatattcccccaactaattctacccaattgcttcaatctaccatctatctaacttcttaccagaacagataaaagtagcaatgtggctgagtgtcaccaactgtccgtcccttctctctaactgcagtgcgaaacagcactgaatgttcatgaaggtagtgggaggagaggcaaatgtgataactgagaatcgaccatacagacatagcctcccccaaagcacacttacagacatgaagagctgaaaaccaaaactgtgatcccgggaattccgggccggtgtcaggtcgtctgttgattgggcgttgtgggt

SEQ ID NO: 367739 - DNA, 1253 bp, Homo Sapiens
  misc_feature (590)..(709): n is a, c, g, or t
  misc_feature (727)..(883): n is a, c, g, or t
  misc_feature (887)..(896): n is a, c, g, or t
  misc_feature (942)..(1050): n is a, c, g, or t
  misc_feature (1054)..(1132): n is a, c, g, or t
ggctagtacgagctgggtgtgaatcggcacgaggcccgccgggcatagcaccatgcctgcttcccgcctaggcccgctagccgccgccctcctcctcagcctgctgctgttcggcttcaccctagtctcaggcacaggagcagagaagactggcgtgtgccccgagctccaggctgaccagaactgcacgcaagagtgcgtctcggacagcgaatgcgccgacaacctcaagtgctgcagcgcgggctgtgccaccttctgctctctgcccaatgataaggagggttcctgcccccaggtgaacattaactttccccagctcggcctctgtcgggaccagtgccaggtggacagccagtgtcctggccagatgaaatgctgccgcaatggctgtgggaaggtgtcctgtgtcactcccaatttctgagctccagccaccaccaggctgagcagtgaggagagaaagtttctgcctggccctgcatctggttccagcccacctgccctcccctttttcgggactctgtattccctcttgggctgaccacagcttctccctttcccaaccaataaagtaaccactttcagcnnnnnnnnnnnnnnnnnnnnnnnnnnnnnnnnnnnnnnnnnnnnnnnnnnnnnnnnnnnnnnnnnnnnnnnnnnnnnnnnnnnnnnnnnnnnnnnnnnnnnnnnnnnnnnnnnnnnnnnnggggggggggcccttaannnnnnnnnnnnnnnnnnnnnnnnnnnnnnnnnnnnnnnnnnnnnnnnnnnnnnnnnnnnnnnnnnnnnnnnnnnnnnnnnnnnnnnnnnnnnnnnnnnnnnnnnnnnnnnnnnnnnnnnnnnnnnnnnnnnnnnnnnnnnnnnnnnnnnnnnnnnncttnnnnnnnnnnaaattttggggcacatccccccacaagaatttttacccctcaaggnnnnnnnnnnnnnnnnnnnnnnnnnnnnnnnnnnnnnnnnnnnnnnnnnnnnnnnnnnnnnnnnnnnnnnnnnnnnnnnnnnnnnnnnnnnnnnnnnnnnnnnnnnnnncccnnnnnnnnnnnnnnnnnnnnnnnnnnnnnnnnnnnnnnnnnnnnnnnnnnnnnnnnnnnnnnnnnnnnnnnnnnnnnnntattcccaaaagggttgtgtttgtgttaaatataaccccccaccacccctttttgtgggagaggtttttttcttgtttttaataaaaaaatctcacaaacctttctcctggtgggaagggg

SEQ ID NO: 367740 - DNA, 1044 bp, Homo Sapiens
gctgcgaaggccaacttcggttcgggacaaaagccagaagagccttttccccgtcattaagttggcggtgggtggccccccaggcggtaacccttcggagcggacccttccggggtcagggcggagtaggattggccttggaaggatgaatggaaactggcagggtttccccatcaagcattgccatcctgggggtagagtctctcgctggggcagaagccaaaccggtcgtcggtgtcgtagttgcccgtggtactgcaccagggcaagccgtcggagcgaccgtcggtggtgcaggcagagtaggagcggccctcgaagatgaaggggaagtggcaggccgcgccatctgcgtttccaaaccgagttggaaccacgacgcccttgcccagggaccacaactcgtcatcgtcgaaatgggcgtctccctgaatgccggggccaggaggaaaggcgtgtgccaggagcccgtccttcccgtcgaagggatacccgtctccgtgctccgcgacaccaaactggatgacgatgtctgcgtcccggctgtacacgcgagtgaaggtgagcggcgtcaccgcgctccacagtgcgaaggcgcgggcaaaggcgtcgtcaatcaccgcccgcggcaagtcttccgagtagttttggatccaataggtgatgttgtggtggtgccacttgaggtcgccctcaaaggtttggaatctgcccaggtctgggaccccgcaccgtggggttcgcatggccttcagcgtggcgctatccagctcaccggtctcgggcagggacagttgcttctggagaagcagcagcgcaggccccagagatttcgactctccacgcatctctgccacccgagtgtaaccatagcggtacaggtattcctctgccagctgcctgtcggtgagattggttctcaggtctccagggaagagcacaagggtggactggcgctgtctgggggcagcaaagcagcagcccagcaccaggagcaccaggaccaggggctgccagaggctcaatcccgggaattccggaccc

SEQ ID NO: 367741 - DNA, 194 bp, Homo Sapiens
caggattagtaggcggagacacagagctttcacatgacaggatattcagtctgaaactactcactgttaaactgacactggtcaggagacaatctttgatttcatatattggataatagtactccgaataaggcaatgaggatagataatccatttctgagccacaatgttgagaggcagtcctccggcctaca

SEQ ID NO: 367742 - DNA, 919 bp, Homo Sapiens
tacccactttcagagtagtagagccaatgggatagagacagggatatggatgatagagatggagatagaggtagagatccattgattcctctgttaataaattggctcatgcagttgtgacaatttcgaaatctgcaaggtatgtcgcaagctggagacccagggaacagttgatgttgcaccttgagtacaaaggcagtgtgtctggagccataatatcttcttgttaggaagactttggtcttttctcttctggccttcaactgcttgggtgaggcccgtccccactacagaagacaatagtctgttctactcagagtctactgatttaaatgctcatctcatcccaaaaaataccctcacagcaacatttagcctgtgcatttgaccaaacaactgggtaccatgccccccctcccaagttgacacacaaaattgaccatcataccctccccacccccagtcttactgaatgagagagaatctgtgcttcaacaagatccccagaagaggtataagcgcagggaagtctgagaagcaccacctttgaggcttatcccgggatgccccacatgagccttctctggatatgtcagatccccttcccgggccccctagacacctcctccactccccaaacttgggaaggcaacattgtggggaagcaggcagtgaggcgctcagtctacccacgttgtgagatacacagctccatctgtgtatcatgatttgatccaagggaaaacaaaagatccagaaacataagtacttttttgtgagctctcaaaaacttcctgtgacaagatcaggtcgttgatgcgagagccacacttgtttctttttcctctttattctccacctctgacataatacttagcataaacaaaaatccaataaacaccaattttattgaatatct

SEQ ID NO: 367743 - DNA, 1327 bp, Homo Sapiens
  misc_feature (131)..(131): n is a, c, g, or t
  misc_feature (433)..(489): n is a, c, g, or t
cagatacgggggatggatggtgaaaagggtgccaatgtttgtggaatgatcaaaagtaggggtggtaaagtggtgagcgggggattacggcggggggaaaagacagccgcacaaagagctcactgtggggngcgggtgatgaaatattcatagatagcgtgacaacgtgtggtgcgaagaatgttatggacgggggaatatgtgggaacgtgcacagttcgtacataggtgggatggtaagtgtgggacgtgcgagcggaatggggctgggaaggtgtaaatgtgagttgagttgaaagggaaggtgtgtagcatgtgggaaggaatggataaattgggtgacagcggaatgctgtgaggtaaaatggtgtaagtgaaataagggtaggagtggcgcaaaacgggtggatgcaatgcgacggtgtagggttgnnnnnnnnnnnnnnnnnnnnnnnnnnnnnnnnnnnnnnnnnnnnnnnnnnnnnnnnnggaataaaggaggaaaattttgggggcggggagatcgggaaggaaggaagccgtgaggctgactggtcgggccgggtccccgggccggggacccatgtttctgtggaaatccgtgacggagatattatttgcagaggtcatggcagccatgctctgcaggaccttgtccttagctgcctggtcctttagcttggcctggatctcgcgagctttgcgacgagccagcacctggatgtggctggagacctgcttcctggtgcgggtcttccctgtccggagcttgatgtagcgggcaatcagctcgttccgaccatacatcttgccctcgtccgacaggatgattttgcgcctgccacagggcgggtagatggcgagggcctcctggaaactctgctcaatatccgggctccacacgccctctgcgtcattgtcgatgggcttgtccagtgcctgactgcccccagaggcggtgctcccctcaggggaggtgggagagctccactcgttggaggtaatggtgccggccgtgccctccaaggctccgcttggaggagcgctcgttggaccggtcccagggtgcgggaaggtgggatgggtgcgctaagccagttccaaggagtccgccccgagcgccaactcttccggccgcggcgatcgttctggcgggacgcggcggcgccggagctgcggccctcccgccccctggcctcgagtgtgcgaggaggacgctggaatgcgcggaatgagggctggaatgagatgcgcgccgcggcgggagggagggagccggagggagtggcggcggggccaccgatcccgggaattccggaccggtcca

SEQ ID NO: 367744 - DNA, 1045 bp, Homo Sapiens
  misc_feature (790)..(872): n is a, c, g, or t
cggtcctaggtagcgaggcctgggtggcgaactcggcacgaggccagtctcgtcccgggagggagctccgcacgcaccgcgcagactcctgccctccggcaaagtcctaccaagtccccgcgccccagccttaccggtcccagggtgcgggaaggtgggatgggtgcgctaagccagttccaaggagtccgccccgagcgccaactcttccggccgcggcgatcgttctgcggggacgacagggcgtcagcgcgcagagccgggctccggccggggccgacgggcggcgcagtgaaggcggggccgcggggccaagcccaccccgcgccgaccggccccggtgcgcccagcggagcggagcggagcgcgcggagggaggagttttcccagaatgggactgacgggaaaacacggggatccctattcctggaggaatccagcctggtgcctgggatagggaagtgcatgataaatgctgcataaatgaaaaacaattgctaccgtggaagatattgaaaggaaagtgctatcgatgccaaagttgtttccaagagaggtattccaaaagtgtttcaagcaatgactgagctaagcatccagtcctgcaaagtgaaggcgttgaagacgcagccctcatttgaatagatgaattgtggtattcttgttaaataatgaatcatatcaaggcttggtcacacctcatgcacatgaaaagaccaaaacgcaaggcagcatatcagcgccacgtgaagtacacactaagcaccaactatttaattccgccatcttnnnnnnnnnnnnnnnnnnnnnnnnnnnnnnnnnnnnnnnnnnnnnnnnnnnnnnnnnnnnnnnnnnnnnnnnnnnnnnnnnnntcgagattcacctggggcatcctggtgggcctgcacctgtagtcccagctattccaggaaggttgtaggggggaaaggaaacttttagcccccaacaaaggtttaaggcgtttcatggtagacccgagaaatgctctcccatttacaccacccaagccctggggaacgaccca

SEQ ID NO: 367745 - DNA, 1107 bp, Homo Sapiens
  misc_feature (537)..(566): n is a, c, g, or t
  misc_feature (788)..(788): n is a, c, g, or t
  misc_feature (820)..(820): n is a, c, g, or t
  misc_feature (1019)..(1027): n is a, c, g, or t
gggtccggaattcccgggatggaagcccacggcccacaggggtgtagcccgagacccacctgcagcccccagcccttgccaggaaagcagcagccgcagccatggcggggatgaagacagcctccggggactacatcgactcgtcatgggagctgcgggtgtttgtgggagaggaggacccagaggccgagtcggtcaccctgcgggtcactggggagtcgcacatcggcggggtgctcctgaagattgtggagcagatcaatcgcaagcaggactggtcagaccatgctatttggtgggaacagaagaggcagtggctgctgcagacccactggacactggacaagtacgggatcctggccgacgcacgcctcttctttgggccccagcaccggcccgtcatccttcggttgcccaaccgccgcgcactgcgcctccgtgccagcttctcccagcccctcttccaggctgtggctgccatctgccgcctcctcagcatccggcaccccgaggagctgtccctgctccgggctcctnnnnnnnnnnnnnnnnnnnnnnnnnnnnnngagccagaggaagagctctatgacttgagcaaggttgtcttggctgggggcgtggcacctgcactgttccgggggatgccagctcacttctcggacagcgcccagactgaggcctgctaccacatgctgagccggccccagccgccacccgaccccctcctggctccagcgtctgccacggcccaggctccctgtcagacaagacccagcttccaccgcaantggctgaaactcttcgccggtgtctcctgcancaggccattcaaagcccgggggaccccctctgggcttgcgcttcaagtactacaggcttcttccgaatttggatccccacgaaagaacccccgtgcgggctggacacaagtttgtatgaaaccagcgcccgggtgggaacctggcttgtctggtagggagaatttgccttggcccccgaggggggggaaatcaacgggnnnnnnnnngcccccccctggccccattatcccctttataaaagatttggccccctaaacccagtgtgtaacagcggttgggcaaaact

SEQ ID NO: 367746 - DNA, 1308 bp, Homo Sapiens
  misc_feature (44)..(80): n is a, c, g, or t
ggctggtcgctcttggggaactgggctcatcgcggtggcggcgnnnnnnnnnnnnnnnnnnnnnnnnnnnnnnnnnnnnnatcaggccaaatcggccgagctcgaattcgtcgagagcggagaagccccgcagccgccgcgcggagaacagcgacagccgagcgcccggtccgcctgtctgccggtgggtctgcctgcccgcgcagcagacccggggcggccgcgggagcccgcgccccgcccgccgcgcctctgccgggacccacccgcagcggagggctgagcccgccggcggctccccggagctcacccacctccgcgcgccggagcgcaggcaaaaggggaggaaaggctcctctctttagtcaccactctcgccctctccaagaatttgtttaacaaagcgctgaggaaagagaacgtcttcttgaattctttagtaggggcggagtctgctgctgccctgcgctgccacctcggctacactgccctccgcgacgacccctgaccagccggggtcacgtccgggagacgggatcatgaagcgctcggtagccgtctggctcttggtcgggctcagcctcggtgtcccccagttcggcaaaggtgatatttgtgatcccaatccatgtgaaaatggaggtatctgtttgccaggattggctgatggttccttttcctgtgagtgtccagatggcttcacagaccccaactgttctagtgttgtggaggttgcatcagatgaagaagaaccaacttcagcaggtccctgcactcctaatccatgccataatggaggaacctgtgaaataagtgaagcataccgaggggatacattcataggctatgtttgtaaatgtccccgaggatttaaatgggattcactgtcagcacaacataaatgaatgcgaagttgagccttgcaaaaatggtggaatatgtacagatcttgtagctaactattcctgtgagtgcccaggcgaatttatgggaagaaattgtcaatacaaatgctcaggcccactgggaattgaaggtggaattatatcaaaccagcaaatcacagcttcctctactcaccgagctctttttgggactccaaaaaatggtatccctactatgcacgtcttaataagaaggggcttataaatgcgtggacagctgcagacaatgacagatggccggggatttcagataaatttgcaaaggaacaatgagcagttactggtgctgattacccaaggcagccaagagcgattggaagcccagagtatataaaatcctacaaaaattgcctacagtaatgac

SEQ ID NO: 367747 - DNA, 1112 bp, Homo Sapiens
agcggagttggcggtcgggctagagaagagaggcgcctgcgcttgcgagctgggcttgtgagtggggctgccgagagggcaggcgtggggcgaggccaaaggactgaacccgcaggagcgtcacgggcgccggggcggctgccgacggcgggactgggtcagtgagaagcccgtgggcccccgccctgcctgctactcccatccccacctgcgcgctccccatgggggacgacccccgattgggtccgatgcctaccctcggggtggagccggcaggtgtgtgagcgcgcgaggcctaggcgtggtgtgtgcgtccgcagatctcctcgcgggtggagtgtgaggagcaaagccctcccttaactataaaaacccgcggattcgctgacataaacgctgtttttttaatcctttggtttctgaggcatggtcaggactagatggggccaagttttttaaaaataggaatgttaaaacgtaatgatatgcttagaatatttacgttaggacctttgagatattttaaatttcttggtaaatacatgaccacagaaatctgttaggagtagctgcgcgtttggtttcaaagatgcttttctaacacattgatgtacagataacttcattactaacaagttggctctgacgtgtacacataatgcaccaaattggagtctctcaaaatgaaagaacaaaaagatttttaataacgaatgttctaacacatagtcgcgctatttttctttaggttttctatcagatgttccacgtaatattggctgcgaagtatgggataattaagaaaatattttgaagaccgaaattaattttgttgagccccctccgccccggccttgaaaataccaaattgttaaaggcttcctaaaaatactttttatttaatttttaggagttcagaaagttttccattatatttggcctccaaccaaaaaagaatcctgtttcccttggtaattaggaatacgggagcaatttctttgaaaaaccacctgggccggatgggttttaaaacctggaaaaatcgcccatggaattggttttaatccctaaacctccccaagggccgtgaaagaaaaaacaatgtgttcttt

SEQ ID NO: 367748 - DNA, 1071 bp, Homo Sapiens
  misc_feature (992)..(1010): n is a, c, g, or t
cggtccggaattcccgggatgaagaggatccagatttggaaacggcagcagcagctggcagggaatggcgcaccgtttgaggagagcctggccccactccaggagaggtgtgaaagcctggtggacatttattcccagctacagcaggaggtaggggcggctggtggggagcttgagcccaagacccgggcatcgctgactggccggctggatgaagtcctgagaaccctcgtcaccagttgcttcctggtggagaagcagcccccccaggtactgaagactcagaccaagttccaggctggagttcgattcctgttgggcttgaggttcctgggggccccagccaagcctccgctggtcagggccgacatggtgacagagaagcaggcgcgggagctgagtgtgcctcagggtcctggggctggagcagaaagcactggagaaatcatcaacaacactgtgcccttggagaacagcattcctgggaactgctgctctgccctgttcaagaacctgcttctcaagaagatcaagcggtgtgagcggaagggcactgagtctgtcacagaggagaagtgcgctgtgctcttctctgccagcttcacacttggccccggcaaactccccatccagctccaggccctgtctctgcccctggtggtcatcgtccatggcaaccaagacaacaatgcccaagccactatcctgtgggacaatgccctctctgagatggaccgcgtgccctttgtggtggctgagcgggtgccctggggagaagatgtgtgaaactctgaacctgaaagtcatgcctgaggtgggggaccaaccggggggctgctcccagagcacttccctcttccgggcccagaagatcttcaatgacaaccgcctcagttatggagggctttccagcaccgtttctgtggcccgggccgcaagtttaacaaggaagaaccctgctggggccgggggctttccccctcttggccacnnnnnnnnnnnnnnnnnnntcccgggagaccctcaccaaaaggcctgtgcttcccggaacctactgggggcccggaaccg

SEQ ID NO: 367749 - DNA, 918 bp, Homo Sapiens
  misc_feature (634)..(634): n is a, c, g, or t
  misc_feature (709)..(709): n is a, c, g, or t
ggtaccggtccggaattcccgggatccccgaggcgcacagagcaagcccacgcgagggcacctctggaggggagcgcctgcaggaccttgtaaagtcaaaaatgtcagaaacttccaggaccgcctttggaggcagaagagcagttccacccaataactctaatgcagcggaagatgacctgcccacagtggagcttcagggcgtggtgccccggggcgtcaacctgcaagagtttcttaatgtcacgagcgttcacctgttcaaggagagatgggacactaacaaggtggaccaccacactgacaagtatgaaaacaacaagctgattgtccgcagagggcagtctttctatgtgcagattgacttcagtcgtccatatgaccccagaagggatctcttcagggtggaatacgtcattggtcgctacccacaggagaacaagggaacctacatcccagtgcctatagtctcagagttacaaagtggaaagtggggggccaagattgtcatgagagaggacaggtctgtgcggctgtccatccagtcttcccccaaatgtattgtggggaaaatccgcatgtatgttgctgtctggactcccctatggcgtacttcgaaaccagtcgaacccangaaacagacacgtacattctctttcatccttggtggtgaagatgatgctgtgtatctgggaccatgagaaagaanggagagaagtatgtccctgaatgacctcgggggtaattttttatgggagaggttcatggaccttcagaaccagaaagcttggacctttgggtccgttttgaaagatggccatccctggaaaccttgccttggattggggatgggacccgaacccccaattgggaccttcccccgggaaaaaggggattccccatcccaaagtccacccc

SEQ ID NO: 367750 - DNA, 599 bp, Homo Sapiens
  misc_feature (165)..(173): n is a, c, g, or t
aggaggcatgaagactaggtagaggcgcgtcgtggtaaagagatgcaatgaatggggctttctggtaagtgtgaggaatcgtgtgagttgtgactcagaagcaaaaaaatattttaaacatgggagtggcatatgtcttttttataggctacttttatttgaagnnnnnnnnntgagagagaaatccctctcccggtactcaagagctatctttagatatgaatcttaaagcaatatcaaaactgcatgatctagcaagacatgtgtttcctcaaagcatgttataaaactctgcctgatcatgaacatactaactttttcattatcaaatgttttggtagatgtggttccacaatctgatgcaagatttggctgggtatgaataatgactttcctccaagagcacatggcctggtaagatggtaggtatatcttttactcagtatcttcgagtatgtgtgtcgcgggggacctcaacactgtccccaagttcagggatttgctaagaagactcagaggactcagcatttaatggcagctgatttatggcagagacaggatacagggcaaaatctgcaaagggataacacgttcgcgag

SEQ ID NO: 367751 - DNA, 1021 bp, Homo Sapiens; identical to SEQ ID NO: 99118
  misc_feature (992)..(992): n is a, c, g, or t

SEQ ID NO: 367752 - DNA, 1130 bp, Homo Sapiens
gggtccggaattcccgggatgaacaggctttcctctgaaaagcagtgccgttcctttttagaaagactgaatctaaatgttgtctctggagacaagaagccttcagtatgttaaattactttcattatgtattttcagatgcttattgattccacagtaggaagagtgagagactgcagcagcctctaagcagcactacatgttccatacattagcagtactgctgaaacaatggcacactacagacacatattttcattaaggtcattttcgaagagatgtttatgaccctcttcccccagtcctctactaacaagtgaacaaaatgaatcaatccaaactggaaatgcttcaactacatcaagaatttatcaaatctttagcagagggccaatagcagctaattcagtatttacaactgacaatatgaagaatgcaattgactgagcatctccctagctgtctgaactacgaactgcaagatgttcttgtaacacgactttaagacattaaggagttaaaaccagggaataggtctacattactgatggaatataaaaaatcaactgtatcctaagaagatgctacataaaataaccacaaaaagaaaaacaatataactgtaaaagcctgaaaagaatttttaaaaggggaagtttatactttcatataccagaattgtggaagttactgattctggaagacataatgaaacatgaatttccaaaaagaaaagaaaatactttatcagcacacaaaaggaagatttaggaagtgttttctgcactaaatattcagatattcatatcaattggtatgactaatggatttttctatctgacttttatgaccaattatgtatcctcttctaatgaaaacaaacaaaattaaacagcagatgggtttatatcaaaaggacatgcccctggatttataatataaaagcaagttatgtgaatccaagaaaatcatttcaaattagtggacactgttattaaacccgcatttacaacgggtaacaaaggatgtctcaatatattaagaaagctacaaggttgtgttcccttttggtgtcacatatctggaaacaaaggacattatcctggtctcctccaaggggacatatccat

SEQ ID NO: 367753 - DNA, 1106 bp, Homo Sapiens
ggaattcccgggatgccactgtgcatgctctatcaccagcctcaccctcctggtcagccttacaagagtgacactggatatactccagaagttggacccaccacagcctgcacactggacttcttggcttttatgagctattcaagagatatttagtcatcacgttgtgtcacaatgggagtgactcacagagcaaggagagaacctgaggattcctcacacatgtagtactcagagctctacggaaacccaggcacctcgacctcaagaggatcagcctggccagggtggcacaactcttccttccccgtgcacagcaggaaagctgccatcagctgagcaagtccaccaacagtttctgtgtcccacttcatctttaataaggacaccatcttcttgtattatacaagaaaggagtgtacctatcacacacagggggaaaaatgctcttttgggtgctaggcctcctaatcctctgtggttttctgtggactcgtaaaggaaaactaaagattgaagacatcactgataagtacatttttatcactggatgtgactcgggctttggaaacttggcagccagaacttttgataaaaagggatttcatgtaatcgctgcctgtctgactgaatcaggatcaacagctttaaaggcagaaacctcagagagacttcgtactgtgcttctggatgtgaccgacccagagaatgtcaagaggactgcccagtgggtgaagaaccaagttggggagaaaggtctctggggtctgatcaataatgctggtgttcccggcgtgctggctcccactgactggctgacactagaggactacagagaacctattgaagtgaaccctgtttggactcatcagtgtgacactaaatatgcttccttttggtcaagaaagctcaagggagagttattaatgtctccagtgttggaggtcgccttgcaatcgttggagggggctatactccatccaaatatgcagtggaaggtttcaatgacagcttaagacgggacatgaaagcttttggtgtgcacgtctcatgcattgaaccaggattgttcaaaacaaacttggcagatccagtaaaggtaattg

SEQ ID NO: 367754 - DNA, 972 bp, Homo Sapiens
  misc_feature (641)..(641): n is a, c, g, or t
  misc_feature (738)..(738): n is a, c, g, or t
ggaattcccgggatctggaaccccgtctgagaggtctccctgaatttcagtgacacatagtgcagcccggcagtgtcccacttccgtggagagagccgctggaatggtgtggacccatcccgcgggtgaccggtgcctgttctcccctgaccgagcctgtgagcacatcgccccctgctggcgacaccggggaaatgagggctgaaaatatcctccccacaagggcaatccccgggacctgccgagcagccaaggccctgtcctttcttgaatggtggcgagctgaatctggtcggtttcctagcttttaggtggtaaaagtgcctggcagcttggctgccgtggaggagtcagtcgtggttggaggttcattgccgtgctttcatgcagagtgttttgccttcatgttagcttccggctcccctcccaggctgcagactctgacctgtggcatcaggcttctcccagtacaggagggtgccatcccccagcatgcggcttctctgccattagcagccctgggcgggccgaccacactcgaggctgcggtgctacgggcttagccctcgcctccctcactgggagcttccccatcctccctgccttccccagtgggaagttagggaagctcaggagcctgngaccccgcatgtcccaaaatgggattggagaagctggagagaaagcaaaagaggccgaggagtgaggcagcagcctctatgcttgatttccacaccngggtccgtgcagaggaaacagaaactccccactgtccttacccaccgacatcacagcccctatgaagaaagtagcccacatctcaaataacaaaaggggaatggttcttaaactttttcttcccttaaaaaatgggagaaaattgcaccttgtgcctggctgggtgggatataaaaccaggaattagttcccaggggtcgtggaggtttcctgggtgaaaaggggttaaatccg

SEQ ID NO: 367755 - DNA, 1011 bp, Homo Sapiens
aattcccgggattggcagaagcccttcgcctgctgcggctgcaggtgcccccttcctccctgcagggctctggcacaccagctcctccgggggacagcagtcttgcagcccccccaggactgccacccacgtgcaccccttccttggtgagccgaggcacccagacggagacagaggtggagctcaagtcatcccctggaccccctggcctgagcaatggacccccagcccctcagggggccagcgaagagcctagcgggacccaatctgaaggagggggcagcagcagcagtggtgctggctcccctggccccccggggatcctcaggcccttgcagcccccacagcgtgctgacacgccgcgaagaaattcttcctcctcctcatccccctcagagcggcctcggcagaagctctccaggaaggcaatctcctccgccaacctgttagtgcggtccgggagcacagagagccgtgggggaaaagaccccctctccagccctgggggccctggatctcggaggagcaattacaatttggaaggcatctcagtgaagatgttccttcgagggcgccccattaccatgtacatcccgtctggcatccgcagccttgaggagctgccgagtggcccaccgccagagaccctcagccttgactgggtttatgggtacaggggtcgtgactcccgctctaatctgtttgtgttgcgctctggggaggtggtctactttatcgccctgtgtggtggtgctgtaccggcctggaggaggcccagggggtcctggaggtggcggccagagacattaccgggggcacacagactgcgttccaatgccttgctggtccaccctggaagggggttccgggtaccctcgggaaaaaacgctggaaggggaaaaagggatggaaaagcccctggacagccgggtgggtcaccatctggggaactcaaaaaaacgcttgttggaaaacttgccgggaaaaatgggaactggggggggcctttcc

SEQ ID NO: 367756 - DNA, 981 bp, Homo Sapiens
  misc_feature (638)..(638): n is a, c, g, or t
gggggccatcttgccgatttaacgctgctttttgtgttgttgttgttttccctcctccctgcctgcctgccccttctcccccagcgaggacggtgtcgtggagaggtccagccccaagtctgagattgaggtcatttctgagccacctgaagaaaaggtgacagccagagcgggggccagctgtcccagtgggggtcatgtagccgatatttatcttgcaaacatcaacaagcaaacgaagcgtccagaatctgggagcatccggaaaacttttcggagtgacagccatgggctgagcagttccctgactgactcctcctccccaggggtgggggctagctgccgcccatcctcccagcccatcatgagccagagcctccccaaagaaagggccagataagtgttccatccagtgggcacgggagcctcaactccatcagccgccactcatccctgaagaatcggctggatagtccacagatccggaagaatgccacagcgggaaggtcaaaaagcttcaataaccatcggcccatggaccctgaggtcattgctcaggatattgaggcaacaatgaactcggccctgaatgagctacgggaactagaacggcagagcagtgtcaaacacacccctgnacgtggttctggacaccttggagcccctcaaaacctccccagtgggtggcccccacgtcagagccctcccagccctctgcacacccagctcctcaaagaacccgaacccgccttccagcgcagcgccagtactgctggggacatcgcctgcgccttccggctgtcaaggtctgtcaagatggctgccccggtcaaaccaccagcaccacggccaagcccactgtcttccccaaaaacgaaatgccactagccctggtgttcactcatcaaattccccacagtctactgacaagtcttgtacttgtctgagggataataatttaattgttctagaccaagggga

SEQ ID NO: 367757 - DNA, 1628 bp, Homo Sapiens
  misc_feature (1388)..(1388): n is a, c, g, or t
ccggaattcccgggatcgcggccggcgtcaccgctgcggctgcctcagctactgccgcagtcgccgcggaattcggcgagtagaaccgctgaggcggcagcgggcccgggtggggcaaaggttccggccactctgcagaatggagataatcaggagcaattttaagagtaatcttcacaaagtgtaccaggccatagaggaggccgacttcttcgccatcgatggggagttttcaggaatcagtgatggaccttcagtctctgcattaacaaatggttttgacactccagaagagaggtatcagaagcttaaaaagcattccatggactttttgctatttcagtttggcctttgcacttttaagtatgactacacagattcaaagtatataaccgaagtcatttaacttctatgttttcccgaaacccttcaatagatcctcaccagatgtcaaatttgtttgtcagagctccagcattgactttctagcaagccagggatttgattttaataaagtttttcgaaatggaattccatatttaaatcaggaagaagaaagacagttaagagagcagtatgatgaaaaacgttcacaggcgaatggtgcaggagctctgtcctatgtatctcctaacacttcaaaatgtcctgtcacgattcctgaggatcaaaagaagtttattgaccaagtggtagagaaaatagaggatttattacaaagtgaagaaaacaagaacttgggatttagagccatggtaccgggttccaaagaaaactaatttatcagactttgagctggaagtatccgaaaggcattcatgttgagactttagaaactgaaaaggaggagctgaatgatgctgtgggattttctagagtcattcacgccattgctaattcgggaaaacttgttattggacacaatatgctcttggacgtcatgcacacagttcatcagttctactgccctctgcctgcggacttaagtgagtttaaagagatgacaacatgtgttttccccagactcttggatactaaattgatggccagcacacaaccttttaaggatatcattaacaacacatcccttgcggaattggaaaagcggttaaaagagacacctttcaaccctcctaaagttgaaagtgccgaaggttttccaagttatgacacagcctctgaacaactccacgaggcaggctacgatgcctacatcacagggctgtgcttcatctccatggccaattacctaggttcttttctcagccctccaaaaattcatgtgtctgccagatcaaaactcattgaacctttttttaacaagttatttcttatgagggtcatggatatcccctatctaaaacttggaaggaccagacctgcagccntaaacgtgatcatgtttctccatggtgacattccccaaagaatggaaaaccagcgacctttaccagcttttcagtgcctttggtaacattcagatatcctggattgatgacacatcagcatttgtttcccttagccagcccgagcaagtaaagattgctgtcaataccagcaaatatgcagaaagctatcggatccaaacctatgctgaatatatggggagataaacaggaagaggtcag

SEQ ID NO: 367758 - DNA, 500 bp, Homo Sapiens
  misc_feature (270)..(309): n is a, c, g, or t
  misc_feature (481)..(481): n is a, c, g, or t
gtctggaaagcgagtttagtacaaagtcctcttggaatctgaactatacattctgaaaccccagtataatttcgaatgtagaagtcttttttctaaccttgactttctttagggaaaacttgttattggacacaatatgctcttggacgtcatgcacacagttcatcagttctactgccctctgcctgcggacttaagtgagtttaaagagatgacaacatgtgttttccccaggtaagctttctttgaggatttgtctttcttttaaannnnnnnnnnnnnnnnnnnnnnnnnnnnnnnnnnnnnnnncagattttacttttaaaaaaacttttcaatcaaaattttactacttctgattcatgagggtggcataattaataaaaattcaagaaaaagatcagtgacatcaaagtcatttgtgctttcactttgctttctggatttaacaatccaaaatgattctcaaatcatcctgttnttctcaggaatcagctagt

SEQ ID NO: 367759 - DNA, 959 bp, Homo Sapiens
  misc_feature (831)..(831): n is a, c, g, or t
ggatttcgggatggaggagccgggcgcgcctgccacgcaaaactaccgggctggcagggcggcgggcgcggtgcgcgatcccgggtggcggcggcaacggcggtggtgacggcggcgactgcagcggccggctctcacctctcccctgtgcacccgcatctcgccgcgccgccgagcagccagcagtccccgggtcgcccagcccacgcgcgcacggccgagcccagcgcacaatagcggcgacagccatggggaaaccggcgaggaaaggatgcgagtggaagcgcttcctgaagaataactgggtgttgctgtccaccgtggccgcggtggtgctaggcattaccacaggagtcttggttcgagaacacagcaacctctcaactctagagaaattctactttgcttttcctggagaaattctaatgcggatgctgaaactcatcattttgccattaattatatccagcatgattacaggtgttgctgcactggattccaacgtatccggaaaaattggtctgcgcgctgtcgtgtattatttctgtaccactctcattgctgttattctaggtattgtgctggtggtgagcatcaagcctggtgtcacccagaaagtgggtgaaattgcgaggacaggcagcacccctgaagtcagtacagtggatgccatgctagaatctcatcaggaatatggtcccctgagaatcttgtccaggcctgttttcagcagtacaaaactaagcgggaaaaaagtgaagccctcccagcggatccagagatgaacatggacagaagaagtccttcacagcttgtcatgaaaacctggcnatttcccagaaaacaaaccaagggaataccaaaatttggttgggcagggatttcaaaatggggaataaaacggccccggggggcttggaatggaccctttttgcccctgggcctttttgggaacttgg

SEQ ID NO: 367760 - DNA, 901 bp, Homo Sapiens
gaacgtaactactacggtcgttaaggtagcgaggcctgggtggcgaattcggcacgaggcacggctggaggtgggatccacacagctcaggaacagctggatcttgctcacactctttcaagagaagcttccttgggttaagaaaaaaaacgaacccttccagtcaggtcagtgactggagagctccaaggaaagtctctcagtgacctggctgctggcaccatggactcagaaaagaaacgctttactgaacgaggccaccaaatacttccgggagagagtcagcccagtgcatctgcaaatcctgctgactaacaatgaagcctggaagagattcgtgactgcggctgaattgcccagggatgaggcagatgctctctacgaagctctgaagaagcttagaacatatgcagctattgaggacgaatatgtgcagcagaaagatgagcagtttacggaatggttttagaaagagtttccccaagtcaagaggaagatccaggagtccataaaaaagcttcgtgcccttgcaaatggtattgaagaggtccacagaagctgcaccatctccaatgtgggtgtccagcctccactgggcgctgcctctggcatcatgtcccttgctggtcattgtataggcaccatttacagcagggacgagtctggcccttactgcagctggggtagggctgggaagcagcgtctgcttgtgactgggatcaccaccagaatcggggagcactcatacacatcatcagcagaagctgaagccagccaggctgactgcaagcagcattgaccgatgaaggtatccaaggaagtcatgcgtgaacatcacaccaagttactttccccttctaataattattacgaagccaagaaaccatggggagtgaaatcg

SEQ ID NO: 367761 - DNA, 700 bp, Homo Sapiens
tgtccttaaatacccttcaatcggtcaatgctggttgcagtcagcctgctggcttcagcttctgctgatgatgtgtatgagtgctccacgatgctggtggtgatcccagtcacagcagacgctgctcgccagccctaccccagctgcagtaagggccagagctcgtccctgctgtaaatggtgccataacaagaccagcaagggacatgatgccagaggcagcgccagtggagctggacaccacattggagatggtgcagcctctgtggacctcttcaataccatttgcaagggcacgaagcttcgtctatggactgcctggatcgtgcctcttgacttggggaaactctttgcaaaaaccattccctataactgcttcatctttccttgctgcacatattcgtcctcaatagctgcatatgttctaagcgtcttcagagcttcgtatgagagcatctgcctcatccctgggcaaattgcagccgcaagtgcacgaatctcttccacggcttcattcgttagtacaccaggatattgcagatgcatctgggctgactctctgcccggaagtatttggtggcctcttcagtaaagcgtgttcttttctgggtgcactctgccctccagtggcacagcctggctgaaatccgaggtgtgggaggcagcacttggactaaaagcaaccagcctcgggacaacc

SEQ ID NO: 367762 - DNA, 986 bp, Homo Sapiens
ggtaccggtccggaattcccgggatttcgtctttgactgtccctacctggctcgcaagctgacccttgccatccccatcatcgctgccatcctcttcttcttcgtcatgagctgcctgctgcagacaagcttcaccgaccctgggatcctgccccgggccactgtctgtgaagcagccgccctggagaaacagatcgacaacacaggcagttctacataccggccaccccctcggacccgggaggtgctgatcaacgggcagatggtgaagctgaagtactgcttcacctgcaagatgttccggccaccccgaacctcacactgcagtgtctgcgacaactgtgtggaacgatttgaccatcactgcccctgggtgggcaactgtgtggggagacggaactatcgcttcttctacgcgtttattctctccctctcattcctgacggccttcatcttcgcctgtgtggtcacccacctgacgttgcgcgctcagggaagcaacttcctctccactctgaaggagacaccagcaagcgtgctggagttggtgatctgcttcttctccatctggtccattctgggcctctcagggtttcacacgtacctcgtcgcctccaacctgactactaatgaagacatcaaaggctcgtggtccagcaagaggggcggtgaggcctctgtcaacccctacagccataaaagtattatcaccaactgctgtgctgtgctctgtggccccctacctcccagcctaattgaccggaggggatttgtgcagtccgacaccgtgttgccctcacccatcagaagcgatgagccagcctgcagagccaagcctgatgccagcatggaggacacctgtcaggattttgccatctcctggcacagcctgagggggagctaacaggcctcttttgcagagggttagctgtgtgttgcgggggctttaagggacctcctgaggaaccgttgttttttgcctttcc

SEQ ID NO: 367763 - DNA, 1096 bp, Homo Sapiens
  misc_feature (810)..(810): n is a, c, g, or t
ggaccggtccggaattcccgggatgccggagccggagccggagccggagccgtagtcgcagccgcagccgcagccgcgcgccgggcctcgcaggcagcggcgcggcgagcgcagccgggccccctcctcgcgacctccgggccctgttgctcgggcgcacctggcgcgtgtgaggccggggccggcgttttcgggaagctagcaggaggccgggccacgcgcagcccctgccggcccaggttcctggggccgggccccgagtagtgcatgcggggcggggcggccgtgagccggaggcgaagatggaaggcttaacgctgagcgatgcggagcagaaatactattcagatctcttctcctactgcgacattgagagcaccaagaaggtggtggtcaacgggcgggtgctggagctgttccgggccgcgcagctgccgaacgacgtggtcctacagatcatggagctttgtggtgcaacaagacttggttattttggaagaagtcagttctacattgctttgaaacttgtagctgttgcccagtctggtttccctttaagagtggaaagtataaatacagtaaaggaccttcctctgccaagatttgttgcttcaaagaatgaacaggaatctcgccatgcagcctcatattcttcagattctgaaaatcaagggtcgtattctggtgtaattcccccaccacctggcagggggcaagtgaaaaagggatccgtaagccatgatacggttcagcctcctacatctgccgatggacagggaacctgcattccccgtaggtttcacccccagnaatcccccaaccaacttcctccacacccctggggaggaaagcacaggccctccatccccagcgggggggaaatagtggaaaagggcctcctggcggggaactgggggcccattttgggctctcccctttggggggaaaccccaattccggggtttttcccggtggcggaatgtaaatgggggggcaccggggcctattcccccgccccttccaccctcccacaaataacccctggcgccacccctttttcgtggaaccccttcccccgccgctgctagtctgcccg

SEQ ID NO: 367764 - DNA, 1130 bp, Homo Sapiens
  misc_feature (878)..(883): n is a, c, g, or t
ccggaaattaaaggtcagcggggggaattgccggccccaaaagggagactttaaggtccagggtgagtttcgggttcgcaagtgcccaacccggggggaacccgtaccaccttaaagaggccatttatgaggcaactccaggcaccagtttagatgttaaaataggatgcgccacatagggccccattcttttttcgtctttcccaacaggttaatggttttctgggcttttacaggccaggggtgaaaaaaagcaggcttgatttagttagggtctcggagcaaaaggaatcaggacaaaatggaaatgcagggctttgatctccagatcctttgctctttcgtcagtatctcaccatccttcacttgccttcacatgtcagttctgccaactggacaaggactgtgaccactagcttttggccctgactgttatgaacacggttttgggagatcatcctgacacatgtgtaagaattaaagaaagaggaaagaaacatgaaaggtggcttgacagccaaggacaggtttattttagagaaaacaaatttgaaaggggcttctggccgagttaggtcagagcccactcacttacagactaagagtttttaaggattcagggtgggagagtttatcagaggcttggactgcttctatgtctctttagctgtgcttatctgggagggagagttgtgtgtccgttcccatacaatattcctgcagctgcaggtacaccccacccccagccagtctgcttttagcttccccatcttagtgcacctgaagggaaaggaatgtgcttattaaggcccactgttatactggaacccaatgtatgaaggcaaagtttggcaattacccaagagactttccccccnnnnnnacctccctctatgccagagctgtctcatctatattttactctctgctctttctggctgctcgctgttagaaaagaagtgatttccttgaaatgcatgaggctagaaagggaactggaacttaaagtggcggtgtttgtccgagaggatggtgctcctgctctgtcacagtgggcatggggattcaggccactgccaccgaatttcaagagcccaagcacagagcccagaactaaattgtgagggttt

SEQ ID NO: 367765 - DNA, 1142 bp, Homo Sapiens
  misc_feature (1076)..(1099): n is a, c, g, or t
ggagacggggtgattcgcggtggtgtgacgggcgtacaggggatcggcggggcatggtaacggggggatcgagcgaagtcgggggttgctttgggtgatggtaggcgggattcaccgcgcagacgtgtggtgtgggtaacgacgctgacgagatacaccccagacccgccagcggagggcaccgtcgtgaggtttgatttcgtatccggagggccgtcagcactctccgcaccaatgggggaggggtggcgcagggcagcgcgtagcaggaaaacgagaccggggagaggacaggggcacgcataacggccgaagggagttgacataagaaggggccggggacgttagggcccctaatggtataaggcgttgggttttatgggttcatgaagggacggaaacttagggggttctccacaaggggggaaaaaaaagccggggccaaaaaatgaaggaatctcaggccgggataagtaaggaattctttctaagggtgctccaggaggtgaggaagggtcacgcttaaaataggtgtttcggccctccggagcaagatttccaatggagagggaagagaaactcgttcttgaatgggaagagagtggggaggtgcagagtaagaaagtgggaacgcgtcagtcccttccttgcaggagaggtggcggcaggagggggctcccagcagctacaatcccaacactgcttggccgcagagaaaatgccctggccaggaagccggctggggtgtgtgatgatcaccgttctccggcctccgtcctgaacgtgaagggggcccgaggccgaggaagatccggagcccggctagaagggtcggcctgagagaagccagtcccgcgcctgatagacccccgccccgctgtctgggccttggggacacggtgccgcgggcgacggcggctcggccgaccgaaagcgctcccgcccggagtttgaggtctccggcacgggcaactctcggccactcacacgcgcaggccccactccagccgcgactccggacccctgctccggcttcggccgcggctgctcccgacacgttgttgttggcgttggtnnnnnnnnnnnnnnnnnnnnnnnncgcgagctccagccccggcctcgtgccgaattcgccacccagc

SEQ ID NO: 367766 - DNA, 1048 bp, Homo Sapiens
  misc_feature (938)..(938): n is a, c, g, or t
  misc_feature (953)..(953): n is a, c, g, or t
gctggaccggtccggaattcccgggatggaagcttagagaccggtgagggagcagagctggggcgcctgtgtacagggatagagcccggcggcagcagggcgcggcttccctttcccggggcctggggccgcaatcaggtggagtcgagaggccggaggaggggcaggaggaaggggtgcggtcgcgatccggacccggagccagcgcggagcacctgcgcccgcggctgacaccttcgctcgcagtttgttcgcagtttactcgcacaccagtttcccccaccgcgctttggattagtgtgatctcagctcaaggcaaaggtgggatatcatggcatctatctgggttggacaccgaggaacagtaagagattatccagactttagcccatcagtggatgctgaagctattcagaaagcaatcagaggaattggaactgatgagaaaatgctcatcagcattctgactgagaggtcaaatgcacagcggcagctgattgttaaggaatatcaagcagcatatggaaaggagctgaaagatgacttgaagggtgatctctctggccactttgagcatctcatggtggccctagtgactccaccagcagtctttgatgcaaagcagctaaagaaatccatgaagggcgcgggaacaaacgaagatgccttgattgaaatcttaactaccaggacaagcaggcaaatgaaggatatctctcaagcctattatacagtatacaagaagagtcttggagatgacattagttccgaaacatctggtgacttccggaaagctctgttgactttggcagatggcagaagagatgaaagtctgaaagtggatgagcatctggccaaacaagatgcccagattctctataaagctggtgagaacagatggggcacggatgaagacaaattcactgagatcctgtgtnttaaggagctttccntcattaaaactaacatttgatgaatacagaaatatcagccaaaaggacattgttggacagcataaaaaggagaattatctggggcatttttgaac

SEQ ID NO: 367767 - DNA, 1029 bp, Homo Sapiens
  misc_feature (943)..(951): n is a, c, g, or t
ggaccggtccggaattcccgggatctaggctgtttctctcgcgccaccactggccgccggccgcagctccaggtgtcctagccgcccagcctcgacgccgtcccgggacccctgtgctctgcgcgaagccctggccccgggggccggggcatgggccaggggcgcggggtgaagcggcttcccgcggggccgtgactgggcgggcttcagccatgaagaccctcatagccgcctactccggggtcctgcgcggcgaagcgtcaggccgaggctgaccggagccagcgctctcacggaggacctgcgctgtcgcgcgaggggtctgggagatggggcactggatccagcatcctctccgccctccaggacctcttctctgtcacctggctcaataggtccaaggtggaaaagcagctacaggtcatctcagtgctccagtgggtcctgtccttccttgtactgggagtggcctgcagtgccatcctcatgtacatattctgcactgattgctggctcatcgctgtgctctacttcacttggctggtgtttgactggaacacacccaagaaaggtggcaggaggtcacagtgggtccgaaactgggctgtgtggcgctactttcgagactactttcccatccagctggtgaagacacacaacctgctgaccaccaggaactatatctttggataccacccccatggtatcatgggcctgggtgcctttctgcaacttcagcacagaggccacagaagtgagcaagaagttcccaggcatacggccttacctggctacactggcaggcaacttccgaatgcctgttggttgagggagtaccctgaatgtctggagggatctgcccctgtcagccggggacaccatagactattttgctttcaaaagaatggggagtggccaaagctaatcatcatcccctgggccnnnnnnnnncggcttgaaatcctcgtgagcttccatggcctggggcaagaaatgccggtcaacccctgcgggaaaccggcaaggggg

SEQ ID NO: 367768 - DNA, 971 bp, Homo Sapiens
ttgtgaggtgataaagtgttgcgctccgggacgccagcgccgcggctgcggcctctgctggggtctaggctgtttctctcgcgccaccactggccgccggccgcagctccaggtgtcctagccgcccagcctcgacgccgtcccgggacccctgtgctctgcgcgaagccctggccccgggggccggggcatgggccaggggcgcggggtgaagcggcttcccgcggggccgtgactgggcgggcttcagccatgaagaccctcatagccgcctactccggggtcctgcgcggcgagcgtcaggccgaggctgaccggagccagcgctctcacggaggacctgcgctgtcgcgcgaggggtctgggagatggggcactggatccagcatcctctccgccctccaggacctcttctctgtcacctggctcaataggtccaaggtggaaaagcagctacaggtcatctcagtgctccagtgggtcctgtccttccttgtactgggagtggcctgcagtgccatcctcatgtacatattctgcactgattgctggctcatcgctgtgctctacttcacttggctggtgtttgactggaacacacccaagaaaggtggcaggaggtcacagtgggtccgaaactgggctgtgtggcgctactttcgagactactttcccatccagctggtgaagacacacaacctgctgaccaccaggaactatatctttggataccacccccatggtatcatgggcctgggtgcccttctgcaacttcagcacagaggccacaagaagtgagcaagaaagttcccagggcatacggcctttacctgggctacactgggcaggcaaacttcccaaatggcctgtggttgaggggaagtacctggatgtcttggaggtattctgcccctggtcagcccgggaacaccattagaaccattttgcctttttcaaagaaatggtgagtt

SEQ ID NO: 367769 - DNA, 1176 bp, Homo Sapiens
  misc_feature (974)..(974): n is a, c, g, or t
  misc_feature (1048)..(1048): n is a, c, g, or t
gagcgaggcctgggtggcgaattcggcacgaggctcagggatgagaggcctctgtgtggtgggggcggactctgaggaggcctctgccctctgcctggccctcccccagcctcctgcaggtgtccgagcagcaggggccctgcgggcaggggcatgacccttacagcaatggtggctggccctgtcacagctaatgaccctgacggcccaggctgggaaggaggtggggtgtggagagaggaagggaaggcagaggatgcctctgtgtgtgtgagcagggtgtttggggtgagacccctactcacccccgcccctcccccagcctacaggactgtgtgcagcgtgaacgggcccctggtggtgctggaccgggtcaagtttgcccagtatgcggagatcgtccacttcaccctcccagatgggactcagaggagcgggcaggtgcttgaggtggctggcaccaaggcgattgttcaggtgtttgaagggacatcagggatcgatgccaggaagaccacttgcgaatttacaggggacatcctacgaactccggtgtcagaggacatgctgggtcgggttttcaatggctccggcaagcccattgacaaggggccagtggtcatgggcggaggactttctggatatcaatggccagcccatcaacccgcactcccgcatctaccccgaggagatgattcagacgggcatttctcctattgacctcatgaacagcattgcccgcggccagaagatccccatcttctcagcagccgggctcccccacaatgagattgccgctcagatctgccgccaggcggggctggtgaagaagtccaaggctgtgctggattaccatgacgacaacttcgccatcgtctttgcagccatgggggtgaacatggagacagccagattcttcaagtctgactttgagcagaatggaaccatggggggacgtctgcctcttcctgaanctgggccaatgaccccacgatccgagcggatcatcaccccgcgcctggcgctgaacactgctggatttccttgnctaccagttgtgaaaagcatgggctgggtcatactgaacggacatgaatttcctatgcaaaaggcctttggcgggaaggcctctggctggctaaaaaaggaggtggcctgggggcgcccaaaggtttt

SEQ ID NO: 367770 - DNA, 872 bp, Homo Sapiens
  misc_feature (749)..(776): n is a, c, g, or t
gcaacacctttctagaaaagccattcatcttatctcataaaattaattccccagagttatctcatgtagtagcagcattatcaaatagtgcaattcttcaaaattgatttcaaataatatctttctaaaataaattacatttacttacagctttgcttataaaaccacagcttaaaacacttagccctcaaatgggtaaattactataagcaataactgtcttgtctacatggtaatgaaatgcacgtgcacgcacacatgtgtgtgtgaaggccaaagataccgcaacaaggtaaaaacatgtaatattaaataaaaagtaaacagtacataatggaatttttagttttggtacttctaatcatattcccgtcaataataagaactataaataggtaattgttaaattaagcatctatgtaagaaaaggcaaggagctatatactaaagaacagtgataatttgtatgtttcatgctatataacctataaagtacatgcaaaacagcatgatcctgaattccatattttatagttaatttacataaatgtggcacatacagaaaattacaaatcttaaaagattatgcttttcccgcccacttttttcatcttctatttattaatcagaaactaggcactttaatctaaaaattcgctttttaaaaatgcattttaggagtaagacatggtgacacatgcctctggtatgaggagttggagactgcagtgagctatgtatgatagcannnnnnnnnnnnnnnnnnnnnnnnnnnngagaccccatctcttaaaagaaggcaaaaaacaatgcattttaggtccttttgtgcaactcactcctaaaattcccgggaatccggaccggtccag

SEQ ID NO: 367771 - DNA, 1142 bp, Homo Sapiens; identical to SEQ ID NO: 99134
  misc_feature (919)..(919): n is a, c, g, or t
  misc_feature (987)..(987): n is a, c, g, or t

SEQ ID NO: 367772 - DNA, 1553 bp, Homo Sapiens
  misc_feature (1415)..(1445): n is a, c, g, or t
ggagattaaaatatcagtattggaacatcatgaattattgtgatctccgtaaggattttaggctggttttaatggctatgtgcattttgtatgtatggaaaaaggaaatttctcattgaaactgacttgtcaaatatttctctcaaaaattgtttgcagcattagtgccagcagtagttcccaagggctgtctcagccatccacccagacgactcagtatctgagagcagacacgcccaacaatgcaactcctatcaccagttatcctaccttgcggatagagaagaacgacttgagaagtgtcactcttttggaggccaaaggcaaggtgaaggatatagcaatatccagagagaggataactctaaaagatgtactccaagaaggtacttttgggcgtattttccatgggattttaatagatgaaaaagatccaaataaagaaaaacaagcatttgtcaaaacagttaaagatcaagcttctgaaattcaggtgacaatgatgctcactgaaagttgtaagctgcgaggtcttcatcacagaaatcttcttcctattactcatgtgtgtatagaagaaggagaaaagcccatggtgatattgccttacatgaattgggggaatcttaaattgtttttacgacagtgcaagttagtagaggccaataatccacaggcaatttctcagcaagacctggtacacatgggctattcagattgcctgtggaatgagctacctggccagaagggaagtcatccacaaagacctggctgccaggaactgtgtcattgatgacacacttcaagttaagatcacagacaatgccctctccagagacttgttccccatggactatcactgtctgggggacaatgaaaacaggccagttcgttggatggctcttgaaagtctggttaataacgagttctctagcgctagtgatgtgtgggcctttggagtgacgctgtgggaactcatgactctgggccagactccctacgtggacattgaccccttcgagatggccgcatacctgaaagatggttaccgaatagcccagccaatcaactgtcctgatgaattatttgctgtgatggcctgttgctgggccttagatccagaggagaggcccaagtttcagcagctggtacagtgcctaacagagtttcatgcagccctgggggcctacgtctgactcctctccaatcccacaccatcaggaagaaggtgcctgtcggggctcacttgaagcctgtcagggatgctttgtatctaacacaacgccaacagaagcacatttgtcttccagaacaccgtgccttagaaatgctttagaatctgaactttttaagacagacttaataatgtggcatattttctagatatcacttttattaggttgaactgaaagggnnnnnnnnnnnnnnnnnnnnnnnnnnnnnnnaaacatacttactttggactaggggtacattcttacaaaataaataaacagttttttaaaattgtttagacacagatattttggattagctatcttagtgccaactgc

SEQ ID NO: 367773 - DNA, 1166 bp, Homo Sapiens
  misc_feature (576)..(576): n is a, c, g, or t
  misc_feature (735)..(735): n is a, c, g, or t
gaggctggaccggtccggaattcctcgggatctcccggcctcctctgctctcgcgcctctaggggctcaagcactgctccgggagcgctgaattttgaggaagagggcagaacttcagtaaggagacctgtctgggcaacggtttcaggacacgcggtggggaaagcgactagcctccggcggggcagggcgggctgtccttacctgcagaaccaccggccacgatctgccgagaagcctcgcgcactaagctgacttcaggcttggcggacatcttcgccaggcgggaggacaagggagtgggctgagatgcgtcaacgagctcgcagcctgcacagcctactgatccagagagccccggctgggctggtcctcaagcgcgttggctccctgtggagcagcaatccggcgactgctggaaagcgagggttcgaggcgcagattcgtcgcgcgatctccggcgcgtcggaacctgttcgcagcgctctcgcagaggcgccctcggctccgaaaatgtctctggaaagaagacccgcggatggggtttgggttggctcaccgcagcggctcaggctnttgtctcctagattggcgcccacgcccttctctatcaggagcctcccggtagtttgtcaaactagacggttgcctctgataactcaagtgaagtgacccaggcctggagcgccaagtacaaagcggggacgacacttgcacctcctggcaagccagaancacagtgaggttcaaaagaaggggacaagtggaataaattccctcagttagttgtccctataaattgtgggcctgtagccaactaagtcaaaaggcaaacctaatttacaccttaccttacaataggagctaagggagtacctttaccaaaaaagggttttgattttaggtaaaatcatacctcattcactttgagttttatttaccctaggaccaaaagaagaaaaggcctggttaccaaatattttcttctaaaccccaggtcaggggttccttaaaaggggggtttagtaaccccaggcattagcctaaatttgtgaaaaggggttaggaattccaaatttcgtggggtcccaacccccaaccttaaagggaattcgaaactcctgggggaaaaggggcccaaaaaagaagttccccggggggaatgg

SEQ ID NO: 367774 - DNA, 1128 bp, Homo Sapiens
  misc_feature (709)..(709): n is a, c, g, or t
  misc_feature (953)..(953): n is a, c, g, or t
  misc_feature (967)..(967): n is a, c, g, or t
gctggaccggtccggaattcccgggatctggaaccatggagctcagcgtcctcctcttccttgcactcctcacaggcctcttgctactcctggttcagcgtcaccctaactcccatggcaccctcccaccagggccccgccctctgccccttttggggaaccttctgcagatggacagaagaggcctactcaaatcctttctgaggttccgagagaaatatggggacgtcttcacggtacacctgggaccgaggcccgtggtcatgctgtgtggagtagaggccatacgggaggccctggtggacaacgctgaggccttctctggccggggaaaaatcgtcatcatggacccagtctaccagggatatggcatgctctttgccaatggaaaccgctggaaggtgcttcggcgattctctgtgaccaccatgagggacttcgggatgggaaagcggagtgtggaggagcggattcaggacgaggctcagtgtctgatagaggaacttcggaaatccaagggagccctcgtggaccccaccttcctcttccattccattaccgccaacatcatctgctccatcatctttggaaaacgcttccactaccaagatcaagagttcctgaagacgctgaacttgttctgccagagtttcttactcatcagctctatatccagccagctgtttgagctcttctctggcttcttganatactttcctggggcacacaggcaagtttacaaaaacctacaggaaatcaatgcttacattggccacagtgtggagaagcaccgtgaaaccctggaccccagcgcccccagggacctcatcgacacctacctggctcccatgggaaaagagaaatcccacccacaccagtgaattcagccaccagaacctcatcatcaacaacgctctcgcttctttctttgctgggcacttgagaccaccagnaaccactcctccgnttacgggctttcctgctcatgctcaaatacccttcctggtccccaaaagagattctaccagggagaatttgaaaagggggggttgggcccacaatcggcccctccagcggctttgatgacccgagcccaaaatggccccttccccggaaggcggtcacttc

SEQ ID NO: 367775 - DNA, 1255 bp, Homo Sapiens
gttcctaaacgccagctcggagcatccccttgggctggagccaaatccctgctgtgattttaaggaagaccggcaggtccgggcccccaagggtcaaccccacacacatccccgcactttcctgtatgcaggcctgcgagcgtagagggagtggaattcacagcctccccacccatccgcaggggtctcctgggaggaacccaccagcgataggaacactgaagctgggctacggcgtccgcccgagccttttcttaaaggcgccgaccccggaagcggggcgtccgagggagcgcgcgacgggccacgcacgtccgggcgtccagttcggggcagcttctccggctggtgggtgggtggggcagcctttcaggcagggtggcaaccaactatatctgaggaccagagccattttggggcaccagagcttgtgacctctccatctccacccagctgggtccaggggccactctcagcactcacctcagcagctgacatcataaagcagacttgggaacctggaagcactctggagaacctttccctgagacatggagctttggggccgaatgctgtgggccctcctgtctggcccagggaggaggggaagtacccggggctgggccttcagctcatggcaaccccaaccacctctggctgggttatccagtgccatagaactggtcagccactggactggggtctttgagaagaggggtatccctgaggcccgggaatccagtgagtacatcgtggctcatgtccttggagccaaaacatttcagagcctgaggccggcactttggacccagcccttgacctctcagcaactacagtgtatccgggagctgagtagccgtcgattgcagaggatgccggtgcagtacatccttggagagtgggacttccagggggctcagcctaaggatggtgcccccagtgtttatcccgcggccagaaacagaaggaactggctgagtgggtgctggaaaaagtggcccaaaggtcccatgctgtggggaccccaggcagcccccctcattctggaagggggcttccggattagggagcctattcccctcagcctggttggaccagttccccccaaaaccgaaattttttctgggggaataaccggaaaaccgtctttttctcttcgaacccctgagaaaggtctcaaaaggccctctggtgtgccggacaaaggaattttgggataactcccccttctgaacgtgaccccccccaaaaaggg

SEQ ID NO: 367776 - DNA, 1037 bp, Homo Sapiens
  misc_feature (564)..(564): n is a, c, g, or t
  misc_feature (706)..(706): n is a, c, g, or t
  misc_feature (962)..(962): n is a, c, g, or t
ggggtgttcgagtggacaaaatggcgaagatcgccaagactcacgaagatattgaagcacagattcgagaaattcaaggcaagaaggcagctcttgatgaagctcaaggagtgggcctcgattctacaggttattatgaccaggaaatttatggtggaagtgacagcagatttgctggatacgtgacatcaattgctgcaactgaacttgaagatgatgacgatgactattcatcatctacgagtttgcttggtcagaagaagccaggatatcatgcccctgtggcattgcttaatgatataccacagtcaacagaacagtatgatccatttgctgagcacagacctccaaagattgcagaccgggaagatgaatacaaaaagcataggcggaccatgataatttccccagagcgtcttgatccttttgcagatggagggaaaacccctgatcctaaaatgaatgctaggacttacatggatgtaatgcgagaacaacacttgactaaagaagaacgagaaattaggcaacagctagcagaaaaagctaaagctggagaactanaagtcgtcaatggagcagcagcgtcccagcctccatcaaaacgaaaacggcgttgggatcaaacagctgatcagactcctggtgccactcccaaaaaactatcaagttgggatcaggcagagacccctgggcatactccttnccttaagatgggatgagacaccaggtcgtgcaaaggggaaccgagactcctggaagcaaccccaggctcaaaaatatggggatcctacacctagccacacaccagcgggagctgctactcctggacgaggtgatacaccaggccatgcgacaccaggccatggaggcgcaacttccagtgctcgtaaaacagatggggatgaacccccaaacagagagagaactcctgggcatgaaatgatggctgagactctcgnacagatcgagtggagatctatgtgaacccgatccggagcagtaaagaatcacgtggagaacacagctatcagagg

SEQ ID NO: 367777 - DNA, 1192 bp, Homo Sapiens
cggtccggaattcccgggatctttgctctttctcagtttctgtggagttgtttggtaggtcagtctagcacagactggatgccggtctctgccgccacctccgttatttcagtgaacacctgtatgccagtgagttcctttgccataccaccttaatgcaccaacttaaaagcacagattagagtggagcattcacatttattactgcaggcttctaggaaagcatattaaaggtctctggtccttctctcacctcccttgttcctcctccaagcccagtgaggtaggaggaattgctaattagattagtgagattctaaggtgggtcactcctgtttacttatgagttgctatttatgaaaagatggcctggactgtgttccctcttctgctttctcctcttccgggtcttggactggtaagggggcctgtgcccaaaaggggctcctccacctaatgctgtctttaatctgtggctttctgctgctggttaattttttaatttggcttcctcaagcctttttggccttgaacttcatgctgatttttatcaaagaactttttattggggcatcagcactagccctatgaatacagtgaaaacttggggttccactttcatcagatgtgaccctgtgtgttcctgatgtctttgaatcactagtttctgattcaaaataatggggtaggtggatctgatgaatagtcatatgcctgtgtcctggctaggaagtcagaatgaggttatctggaaaattgagcttcctcacacatgggaaggtacttcagatgctggaaagccaataaaaataacaaagggccaccagaaccattgccccagtcactgattgaacaaacatttactgaacactgatgaagcgaagtcctcctcagggacctcttagggaagagggtaactgccctaaagcaggatactcctgggctccttagatatactatccttgaaactattaggccccgtgtccagagtacctaataataataattggcaaatatgtattcggtggtctgccaattggaagcaaaatcttcactttatcaacaagtctaaaggtaggtactctgatctccatattcaaccacatgacatacatttacaggtccagacaacttgctcgagtccacatatctattcaagtggtcagtcacgattccagatcccagtctgatg

SEQ ID NO: 367778 - DNA, 1502 bp, Homo Sapiens
  misc_feature (87)..(87): n is a, c, g, or t
ctgttacttggcgtgcttcggaggcggggttaatggagtgtggaggcgctaggaggctgctatagcagctaggggtgctatagtggntatggttatgtatatagagacgttgctataaagtgagtatgtctccatctggcatctcgctcggccgatcggatcgagagggaggaggctgtatgcatcacagttagtggactggcgtgtgctgagaggtgagaggtgtgtgatatatggacgacggaagcttctaaggcgtatatcttgtggaagaagtgatgttggggaggtgttgtgtcactaggtcaaagtcgtgtaaggatattgtgagtgcgtgttcgagggaatgtaggggggcgccatgtggaataaaggtcaagcaatgagtcgcgttgttgttattagtgcacgatgtaggggtgtgcgtaagcgaggtggtccaaggctaagcgtatgtgacgcagaataagtatagattcgtacgggggtactgacgcgaaggaggtttgctctgtagcggggcaggggtgacctcgggggaagatagtatgtcaagtcgagtcgcttttgattgtggacttattcaagcccccacattttgccgtgttccacgctgcccgtgttaggatatttgtcccggaagggttcccgctgttcaagcaggcttcgggcgtggacaatccggctttttccttgaatgttcataaatctaagtgaggggttccgaggttcaactcttgcactttgcatttgcaatggtaggtcagatccactgaaccatcaaagaccaggtacatgcctctgcctggtgttctcaactcatccaccagtgtggagctgtcatccccacttttcattacggtcatcatcgctgccctggctggcctggctgccaccagaattgctgaggtgatgactgcaggttccccagtccccggctctggaaagcctgcactggcagctggaaggcccctggtggtggcacttgttgtgcctgcagcagcagctagagggctttgggaggcagcttcgaggaggtgggtaccatggtgagaagggccttgaagcctatgggtgacacattgccctagcaggctggggcaccagggctgctgtcactcaccaggcatggcctagcggcaatggagtgaggccttgtctctaagaagcatatttgtgagaggagtcccagtatctccgaagagcttgatcaccacacttctctgtaggacagaacttacaattaagattgttgccaccgaaatgaaaaatctaaatgcattggttataaccggatctcgggactgcaggatttaagtggcagcactcaactgcagcagagtaggagcttatggaggtcaggcgatcaatggagttttgaatcaattctaattcccagttggcctggtgggtttctcaaccacccttcggttatcttccccgttctttcacgtccctagctgtattcactctcctggcgaccggcggcgtagaaccccgct

SEQ ID NO: 367779 - DNA, 1373 bp, Homo Sapiens
cttggaagccgtccaagcccagccagcaccgtcctccggcatgccaaggaccaggcccagtgcgagccgaaagaggaagaagtcggacacatcgaagtcaaagcggccccaggctgacctcagggagcttgcggccccccagccgccggggtctcagactcatcctttagcacgctggagtggatgcttgagaggaaggcatggtgctgggtgatggcctcgcagtcataggtggaggagtcgctctgtttccgcggcaacggcctcttgggctcctcatcctccaacccactggagatgtcaatgttgcttttgctgagacgcttgctgctggccaggctgcaatcttcctccaccgcgactggggtgtcctgggtgctgctgatgctccccttccggctgctgctggcagggctgtcccctgagggccccgcactgtagcagatggcatcgaaggccaggaggccccccacacagtccccgatgagacacacctgcccacttgaagccaatcccatcagaggacttcaggaactctctgtagacctgggtggctcgctcgatgacggtggcgacagcatcctggtactgcggggaggagatggccaacaggggaagggcggccagagggacgtggtcctggctgctgctgaggcagccctcatcgtggctgtaggggttcaggtgagagacaagcgagaaagcctcagagcagatggcaggacaggggacgaacttgatgaggatgtggcccagggcagcagggaaatgggctcgtgtgaccttctccagcacggagctgaaggtgtggatgtcggctgccttgcaggacgggtccccggcacccgtgtccaggatgtttcccccatgcaggaccagcaggaggacatgtgtcttgcaggagcgctgcgggcagccttcctcgctgtcttcgtggatctcgatgcttccctgggctgggaacctctgtcttctcaaggaaacccggtacagttctcgctgcttctcctggaggatgctggatgtgcacggcgtggtcccttctccttgatgctcgtccagtttccccatggtctcgatctgctccacgaggtcattggagttccactggctcatcccaatgaggatggcattcttcccttcagccatctcctctctggcatcaaagaattcatcatctgagctctccacagagtcactgaggacatttcgaaggtgccagggggcaccgccgcccgggggaggaccacctgcacggcccgccttggccatgtcccgggcggcgggctccggcggcgctacgcgcgctcctcgcgcttcccgggcccggccccgaccgcctccggccccgaaatcccgggaattccggaccg

SEQ ID NO: 367780 - DNA, 1697 bp, Homo Sapiens
  misc_feature (366)..(416): n is a, c, g, or t
  misc_feature (550)..(645): n is a, c, g, or t
ggcctgggtggcgttcatacacgcgggcagggtcggcttcgtgccccgcaaagcggtgaggaagacctgcggcggcgggaggagagctgtggccaccgctgcgcgccggaggacgcaccgcccccactcctggagtccagcccggcgctcacctccgccacctcctcagggttctgcgccgcctcgcgaaagacttgcttgctgtgggcgaggtattggtagaagcggtggaaggtgtggatgtccgtgcggtccagcacctcctctgggctgcccaacaccttctccatgaaggcggtgtgcactgtttcgcactcgatcaggctcaagctgctggccggagagcaacgagtgggagggggcggnnnnnnnnnnnnnnnnnnnnnnnnnnnnnnnnnnnnnnnnnnnnnnnnnnncgtcccggcccccgaccgcgagcagcaccgctgcgctgggaagtgaggcggaaagggcgctggggataaccagaacatttgaaacgcgggttcctgccggagcagccctcccaaatccatctgaggctacaagnnnnnnnnnnnnnnnnnnnnnnnnnnnnnnnnnnnnnnnnnnnnnnnnnnnnnnnnnnnnnnnnnnnnnnnnnnnnnnnnnnnnnnnnnnnnnnnnaacaataccaacacttcagcagctaggtcagagaggtggcacaatgcgtgccatgcgcccagcccaagtgcctggcacacagctaatgtgagccgggcagagagggccagggagatcgccccagagcggctcccgcaggacagggtgctcggcatctctaggtcagagttaagagggttcggggaacgggggtgttgactcactggaccccaaagggcagcagcagaaccgccagactctcgcataagccttcgagcgcgaacttgctggcgcaataaacgtcattgaaaggcagcccttaggtggggagacgaggttcctgaggcgcagcggccggggggtcatccccgggcagacggtgcccctccaagctgacggcaccccactccaccccccccgcggaacctgccttcaaggctcagctccgcacactaagaatctggagctgcccgagccactccctaccactcacccatcaatcctcccccgttcccggtcaccaacagccgtctcgaaccgcgcctcttcatgtctggccggaacggcttgcatcatttgtacgggccctactaccttcaccgtcccgcccataggccatggcggttttcccccagcgtttcaagcggcccccgcctggcccgggcttgcgtttcctccctgccgcagaccaaaaggcccgaacccgccccccctctacatcaacccttcgccagggcctggccccctcggggctctcccgggccccggggcacattgtttgggccttcaaccctagggtagtgcccactggccccctacgggagcccccctatggcctccccccggaagggctccaccccttaacccgttcctccccgcggcccccttttatcccaggcgatttttcccgggggtaaggcgggttcccagcgattttttgtagtccccccttaatctcatcagggtgtggccacctttgttccgggggcacactccctgtcggggcgttattcacccacgggccccgcgggggttgccccttctcccccacaattgtggtcccccccgcgtgg

SEQ ID NO: 367781 - DNA, 1238 bp, Homo Sapiens
  misc_feature (74)..(191): n is a, c, g, or t
  misc_feature (902)..(954): n is a, c, g, or t
  misc_feature (1123)..(1172): n is a, c, g, or t
cggtccggaattcccgggatgtgaatccttgatgccgatcggacccccgctgggaccgggcggagaaaggcaannnnnnnnnnnnnnnnnnnnnnnnnnnnnnnnnnnnnnnnnnnnnnnnnnnnnnnnnnnnnnnnnnnnnnnnnnnnnnnnnnnnnnnnnnnnnnnnnnnnnnnnnnnnnnnnnnnnnncgctggtaaaactggctaacgcgatctatcttaattagccacccacagctgctaccgccgccccatccccagggaccacacagacccaggggacaaagaagggcgcgggagacagcggctgaggaagcctttactgcggggcggccggaggatcgccgagctcagggtcccccaccgcactgcgccaggcctcgtcctctgccccaggcccggccccgcccccagcctcggccccagcctcggcctttgccggaacgtcgccgaacacttcccggtgcatggcggtgacgtagttggagccgctggggtcgtccaggcgcatccgcagcaggggcaggaagcgctcggtggtgaagtagcgcagggtcggcttcggggcgcgcaaagcggtgaggaagacctgcggcggcgggaggagagctgtggccaccgctgcgcgccggaggacgcaccgcccccactcctggagtccagcccggcgctcacctccgccacctcctcagggttctgcgccgcctcgcgaaagacttgcttgctgtgggcgaggtattggtagaagcggtggaaggtgtggatgtccgtgcggtccagcacctcctctgggctgcccaacaccttctccatgaaggcggtgtgcactgggccgcactcgatcaggctcaagctgctggccggagagcaacgagtgggagggggcggacgccagccagnnnnnnnnnnnnnnnnnnnnnnnnnnnnnnnnnnnnnnnnnnnnnnnnnnnnngaccgcgagcagcaccgctgcgctgggaagtgaggcggaaagggcgctgcgggataaccagcaacatttgaaacgcgggttcctgccggagcagacctcccataatccatctgacggctacaagggagccctggtgtcaggattctgaatctagcggggtccatggccnnnnnnnnnnnnnnnnnnnnnnnnnnnnnnnnnnnnnnnnnnnnnnnnnncataacaataccaacacttcagcagctaggtcagcaggtggcacaatgcgtgcatgcgccagccca

SEQ ID NO: 367782 - DNA, 462 bp, Homo Sapiens
  misc_feature (78)..(78): n is a, c, g, or t
  misc_feature (81)..(81): n is a, c, g, or t
  misc_feature (137)..(137): n is a, c, g, or t
  misc_feature (382)..(382): n is a, c, g, or t
  misc_feature (414)..(414): n is a, c, g, or t
  misc_feature (423)..(423): n is a, c, g, or t
  misc_feature (428)..(428): n is a, c, g, or t
  misc_feature (445)..(445): n is a, c, g, or t
aggcgcatccgcggcaggggcaggaagcgctcggtggtgaagtagcgcagggtcggcttcggggcgcgcaaaggtcgnagngaagacctgcggcggcgggaggagagctgtggccaccgctgcgcccggacgacganccgcccccactcctggagtccagcccggcgctcacctccgccacctcctcagggttctgcgccgcctgcgttacacactgcggagacaagaggcccgaccagcccgcctcagcatcaccctcagcacggcctgtcccctcgtgctccctgggcctgggaacatgttggtttcaacgcagggcggagaaggctcctaggagccaatatgcttccagggaggcttacccagcacgtccacgcggccntcagttcaagggtttcccgggtagcggccaanggatttttnagttnctttaagtttcagttgnaagtttttcaagggatt

SEQ ID NO: 367783 - DNA, 1004 bp, Homo Sapiens; identical to SEQ ID NO: 151955
  misc_feature (384)..(384): n is a, c, g, or t
  misc_feature (412)..(412): n is a, c, g, or t
  misc_feature (415)..(415): n is a, c, g, or t
  misc_feature (430)..(453): n is a, c, g, or t
  misc_feature (459)..(460): n is a, c, g, or t

SEQ ID NO: 367784 - DNA, 714 bp, Homo Sapiens
gctaatagccatgataaacaactcctatcaggaaattgaggaggatgcagatgtggaatggaagttcgcccgagcaaaactctggctgtcttactttgatgaaggaagaactctacctgctccttttaatctagtgccaagtcctaaatcattttattatctcataatgagaatcaagatgtgcctcataaaactctgcaaatctaaggccaaaagctgtgaaaatgaccttgaaatgggcatgctgaattccaaattcaagaagactcgctaccaggctggcatgaggaattctgaaaatctgacagcaaataacactttgagcaagcccaccagataccagaaaatcatgaaacggctcataaaaagatacgtcctgaaagcccaggtggacagagaaaatgacgaagtcaatgaaggcgagctgaaggaaatcaagcaagatatctccagcctgcgctatgagcttcttgaggaaaaatctcaagctactggtgagctggcagacctgattcaacaactcagcgagaagtttggaaagaacttaaacaaagaccacctgagggtgaacaagggcaaagacatttagcagcccacatcggcgtctgtgacttctaccagcattccaaggccaggttggatgccctcgcccccatccttggtggggaggggtccccagcccactcctctaggacacgaagggggatctcctgg

SEQ ID NO: 367785 - DNA, 733 bp, Homo Sapiens
ttccaggatcagaagtactgaggagcagagccaatcttctctgtttggaaatagtggcttggaaatggacatgctccaggaccttgagtccctgcagtttgagtatggggttccagaggaagatcgtatctggctgtatttgcagggccgttctcggggactgatgatcgaggcttgtgcccatgcaaccttcttctgcaaactattatataatttgagagcatcattaaataagaatcaaagttccagacatctctcaattggctcccttaattcagccactcctgaagagtttaaggtgggcatcattggaggtggccaccttgggaagcagctggctggcacactgctgcagcttggccccatccctgctgaaagcctgcggatctccactcggaggccagagactctgggtgagctccagaagctgggaatcaaatgcttttaccataacgctgatctggtgagttgggccgatgtgatattcctctgctgcttgccgtctcagctgcctaatatctgcgtagaaatttacaccagccttgagaaggccagcattgtgtacagctttgtagctgccatcccactacccaggctgaaactactgttgaaccacaccaatatcttgcggctcagtatcagtatgatgaagattctgtcagcgtctggggggccaataagggagtcatagctgctctccaagatcctacgattcttcaagctacctgtccct

SEQ ID NO: 367786 - DNA, 2036 bp, Homo Sapiens
cggtccggaattcccgggatcttgcctgccggcacccagccaccatgtgggagctcgtggctctcttgctgcttaccctagcttatttgttttggcccaagagaaggtgccctggtgccaagtaccccaagagcctcctgtccctgcccctggtgggcagcctgccattcctccccagacacggccatatgcataacaacttcttcaagctgcagaaaaaatatggccccatctattcggttcgtatgggcaccaagactacagtgattgtcggccaccaccagctggccaaggaggtgcttattaagaagggcaaggacttctctgggcggcctcaaatggcaactctagacatcgcgtccaacaaccgtaagggtatcgccttcgctgactctggcgcacactggcagctgcatcgaaggctggcgatggccacctttgccctgttcaaggatggcgatcagaagctggagaagatcatttgtcaggaaatcagtacattgtgtgatatgctggccacccacaacggacagtccatagacatctcctttcctgtcttcgtggcggtaaccaatgtcatctccttgatctgcttcaatacctcctacaagaatggggaccctgagttgaatgtcatacagaattacaatgaaggcatcatagacaacctgagcaaagacagcctggtggacctagtcccctggttgaagattttccccaacaaaaccctggaaaaattaaagagccatgttaaaatacgaaatgatctgctgaataaaatacttgaaaattacagggagaaaattccggagtgactctatcaccaacatgctggacacactgatgcaagccaagatgaactcagataatggcaatgctggcccagatcaagactcagagctgctttcagataaccacattctcaccaccataggggacatctttggggctggcgtggagaccaccacctctgtggttaaatggaccctggccttcctgctgcacaatcctcaggtgaagaagaagctctacgaggagattgaccagaatgtgggtttcagccgcacaccaactatcagtgaccgtaaccgtctcctcctgctggaggccaccatccgagaggtgcttcgcctcaggcccgtggcccctatgctcatcccccacaaggccaacgttgactccagcatcggtgagtttgctgtggacaagggcacagaagttatcatcaatctgtgggcgctgcatcacaatgagaaggagtggcaccagccggatcagttcatgcctgagcgtttcttgaatccagcggggacccagctcatctcaccgtcagtaagctatttgcccttcggagcaggacctcgctcctgtataggtgagatcctggccggcaggagctcttcctcatcatggcctggctgctgcagaggttcgacctggaggtgccagatgatgggcagctgccctccctggaaggcatccccaaggtggtctttctgatcgactctttcaaagtgaagatcaaggtgcgccaggcctggagggaagcccaggctgagggtagcacctaaaggctgtaactcacagcccctgtccaccctatgtggcccacaacacagatttagagatacaaccccccaccttctccggccattcttccctactcccaacccactctgccttctttttcagcttgtggcaagtgcccacgtgaattggtgccattacaacagggtcttttcttattgttccagatacaaagggaattagagaccctactaatttaaccgaccacatgcagcataaaaaataggggccggccgtgctacaaaataacattcccccagagggggtgccccaacactttcgatctgctaccccaccactttttggtgtcacagcatggggcccccaatcaatggggcagcgctgtccatacaaacaccgacaccgcctcgccgcgcttcatttatccaccacacccgctcggtgcgtgagtacacaccgcgtctgcgtccggcccttcattggtgaga

SEQ ID NO: 367787 - DNA, 827 bp, Homo Sapiens
  misc_feature (625)..(633): n is a, c, g, or t
ctggtgactccagtcagcacaaatctagaaggacgctatctcttcccatactctttctgcgagtcacaaaaagaggtcagcgagggacgtgtcttccaaccctgagcagttgttctttaacatcacggcatttggaaaagattttcatctgcgactaaagcccaacactcaactagtagctcctggggctgttgtggagtggcatgagacatctctggtgcctgggaatataaccgatcccattaacaaccatcaaccaggaagtgctacgtatagaatccggaaaacagagcctttgcagactaactgtgcttatgttggtgacatcgtggacattccaggaacctctgttgccatcagcaactgtgatggtctggtaagactccttctgttttgtgcgtatgtttgcaggtgctgggagtgcagccatggcttctgcatagtttggaaggtggaggtggaaaggaggcttcattgttatgttacattttaagttcagaaaaagacactagaaagcattttgctgtcaaagatatgcgtttggcttaatttgtgacaattttgtttcttggaataatgcgaagacgacattattccaagaaacaaaagtcaaatattttagcannnnnnnnngttaatgtttttcctgtgtattacattggaagattttatttccttatttggttcaaagtattctgaaaactttccgaaagaagcatagattccttcaaaatgaccgtattttactccttatgtggaaacttggatatcttcatacaagaaagtatttgaaagtgttctttagcttcctcacagaatgctaatgg

SEQ ID NO: 367788 - DNA, 981 bp, Homo Sapiens
atatgccaggagggtggctgggcaggctgctgtctaggccaggctaacccctgcggtgggcgtgggtgtcaccagggccgatggcgcttgtgcagaaacccacgtctctgagctgccagcagccaagctgtcctgatgacattcccgggtgggcgcacaagcctgcactgtccgtatagaatcggcccaggctgtgcagcaggggaacccggagcccggaccccgccacggaggccaggctgccgtgcaccatcctgggtgtcctcgtggtgctccgggcgcaggtggcagcagccatggaggagctggaccggcagaagattggaggattctggagggaagtcggtgtggcctccgatcaaagcctggtgctgacggccccgaagcgggtggagggcttgttcctcaccttgagcgggagtaacctgaccgtgaaggttgcatataacagctcaggaagctgtgagatagagaagatcgtgggctcagaaatagacagtacgggaaaattcgcttttcctggccacagagagatccacgtgctggacaccgactacgagggctacgccatcctgcgggtgtccctgatgtggcggggcaggaactttcgcgtcctcaagtactttagtaagcttggccctggggggctctgcccagctgctgctctcccagggacttgccgcccagccccccttgtgccccacagctcggagccttgaggacaaggaccggctgcggttctggaagtttcgggagctgacagcagacactggtctctacctggcggcccggccctggtgagcccaggggccttggggtggacggctgggttggggccctgtgggctgactctgcaggctccctcatgctggctatcctgcagtgcggttttgcgagctcctgaaggaggtgcccttgaccccgaacctggctgtgctgaagttcccgggccctggcccatcctggcctgtcggagccccg

SEQ ID NO: 367789 - DNA, 988 bp, Homo Sapiens
caatcaccactggaggctccctcccgaggcaccctcgctggcgagctgagaggaaatggcggggaggtccctgacatcgaaggccgagcccaccgcaggagccgtggacagggctgagaaggccggagggcaggacacgtcctcacagaaaattgaagacttgatggaaatggtgcaaaagctgcagaaagtgggaagcctagagccccgagttgaggtcctgattaaccggattaatgaggtccagcaagcaaaaaagaaagccaataaagacctaggagaggcccggaccatctgtgaggccctgcagaaggaactggactcgctgcatggagagaaagtacacctgaaggagatcttgagcaaaaaacaagagaccctgaggatcctccggctgcattgccaggaaaaggaaagtgaggcacacaggaagcacaccatgttgcaggattgcaaagagagaatttctgccctgaacttgcagattgaagaagagaagaacaaacagagacagctgaggttggcattcgaggaacagctggaagatctgatgggccagcacaaggacctctgggacttccacatgccagagcggctggcaaaggacgatttgtgccctggacagcagcaaggagcagctgctcaaggaagagaagctggtcaaggcgacactggaagacgtgaagcatcagctgtgctcccctgtgtggggctgagggcccctccacccttgatgagggactctttctccgcagccagaaggctgcagccacagtgcaactgttccaggaagagcacaggaaggctgaggagctcctagcagctgctggccagcgccaaccagcaagtgcagcagaatgtgccaacaacagcagcagaagctggcagaggctgaaaggaagagcttggaaaaccttggactgcacagtccttgccaagccagagcacaagaggaaagttggccagggaatttggcagtcccaagccc

SEQ ID NO: 367790 - DNA, 738 bp, Homo Sapiens
cctcctgcctcccaccaccaccatcatcctggctggacggagagggtgacgggggctgggaaggggcagctcatgttcaggtttccaggaggggctacctgttgactgtctttgcaggaagaagaaaacacctgagtgaccagatgtcccagctccagtgctgtggagcatggtttctgcacacctggaatgactggaaccccaaagactcaagaaggagctaaagatcttgaagtagacatgaataaaacagaagttactcccaggctgtggaccacctgtcgagatggagaagtccttctgaggctatccaaacacggaccaggccatgagaccccgatgaccatccctgaattttttcgagagtcagtcaaccgatttggaacttatccagccctcgcatccaagaatggcaaaaagtgggaaattctgaatttcaaccagtactatgaggcttgtcggaaggctgcaaaatccttgatcaagctgggtttggagcgtttccacggagttggtatcctggggtttaactctgcagagtggtttatcactgctgtaggtgccatcctagccgggggtacttgtgtatggtatttatgccaccaactctgccgaggcttgtcaatatgtcatcactcatgccaaagtgaacatcttgctggttgagaatgatcaacagttacagaaaatcctttcgattccacagagcagactaaagcccctaaaagcgatcatcca

SEQ ID NO: 367791 - DNA, 1002 bp, Homo Sapiens
ccttgggtatgcctgtggtccctgaagggtagatgagcactgcgcattgattcgccttctggctctcgaggacctgctccattgggtgtcagggatacttctgccaagttccatgaaaatcatcccaagagtacaagttgttgttcttcttcattggcagtctgtactggatgatcgcttttaggggctctaggctgctctgtggaatcgaaaggattttcctgtaactgttgatcattctcaaccagcaagatgttcactttggcatgagtgatgacatattgacaagcctcggcagagttggtggcataaataccaacacaaagacccccggctaggatggcaccaacagcagtgataaaccactctgcagagttaaaccccaggataccaactccgtggaaacgctccaaacccagcttgatcaaggattttgcagccttccgacaagcctcatagtactggttgaaattcagaatttcccactttttgccattcttggatgcgagggctggataagttccaaatcggttgactgactctcgaaaaaattcagggatggtcatcggggtctcatggcctggtccgtgtttggatagcctcagaaggacttctccatctcgacaggtggtccacagcctgggagtaacttctgttttattcatgtctacttcaagatctttagctccttcttgagtctttggggttccagtcattccaggtgtgcagaaaccatgctccacagcactgtcactcttcaagaggtgtggttctggccatctggcaaggcacctggagctgggacatctggtcactcaggtgttttcttcttcctgcaaagacagtcaacaggtagcccctcctggaaacctgaacatgagctgccccttcccagcccccgtcaccctctccgtccagccaggatgatggtggtggtgggaggcaggaggatgggtggtttccctccacaacaggccttctacatcccggaagttccgggcc

SEQ ID NO: 367792 - DNA, 906 bp, Homo Sapiens
  misc_feature (838)..(838): n is a, c, g, or t
ttcccagcctcagaaaggcagaaaccaggaaagctaagacaaacaaaactacaatggaagaagaaaacgtcctcaactagacatctgccaaaaatgaacatgagcagctgacctactcttccacaaggtccaaagcccccagtgtcatcatcacaggtcttaagccagccaccaaatatgtatttcacatccgagtgagaactgcgacaggatacagtggctacagtcagaaatttgaatttgaaacaggagatgaaagactctccatttcaagtgacaaaactgtactggcttaatgaaaagtgggactttattgcctcagcttctgacatggcagcagaacaaggacagattctcgtgatagccaccgccgctgttggcggattcactctcctcgtcatcctcactttattcttcttgatcactgggagatgtcagtggtacataaaagccaagatgaagtcagaagagaagagaagaaaccacttacagaatgggcatttgcgcttcccgggaattaaaacttacattgatccagatacatatgaagacccatccctagcagtccatgaatttgcaaaggagattgatccctcaagaattcgtattgagagagtcattggggcaggtgaatttggagaagtctgtagtgggcgtttgaagacaccagggaaaagagagatcccagttgccattaaaactttgaaaggtggccacatggatcggcaaagaagagattttctaagagaagctagtatcatggggccagttgaccatccaaacatcattcgctagaagggttgtcaccaaaagatcttccggcatgggtggaagcgtntgcccaagttctgaggcaggtttaaatagcatcagcccgcatcagtgccagggaagatccttgcccca

SEQ ID NO: 367793 - DNA, 806 bp, Homo Sapiens
gcgagtctcggagaagatgtggtggcttccgtttgttggtggaggaggtggcaggcctcggcgggtaacccagagaacacagccgaagtggaatgtggggacgtctgcgacaccggggacagagcaactgtggatgaagagggctacatctggttcctggggaggagtcatgacactatcaatgcctctgggtggtgaaggcattgattgtcctgaccccacagtttctgtcccatgacaaggaccagctgactaaggagctgcagcagcatgtaaagtcagtgacagccccatgttgtaagggaagcatggcaccagcatctgcttctgatgagggcctcaggaagcttcccatcatggcatatggcaaagagggagcaagcaaatcatggtgagaaaggaagcaagagtgagcgggaggaaatgccaggctcttttgaacaaccggatctcgcatgaagtcatagagtgagaactcattcattactgcaggacaacaccaagtcattggtgaagattccatccccgtgacccacctccgggtaggcccacctccaacactggaggtcacatttcaacatgagatttggaggggacaaacatctaaaccatatcaagatttttcatttatttgtctaaattgattcctatgtatttcatattttgtagctattgtaaatgagattgtttcttgatttcttttttcagattattcaccattgacatatataaaatgctactaatttctgtatgttgagttgtatccagcaatttactgaattagttaccagttctagcagtttggg

SEQ ID NO: 367794 - DNA, 988 bp, Homo Sapiens
agcgggagtctcggagaagatgtggtggcttccgtttgttggtggaggaggtggcaggcctcggcgggtaacccagagaacacagccgaagtggaatgtggggacgtctgcgacaccggggacagagcaactgtggatgaagagggctacatctggttcctggggaggagtcatgacactatcaatgcctctgggtggtgaaggcattgattgtcctgaccccacagtttctgtcccatgacaaggaccagctgactaaggagctgcagcagcatgtaaagtcagtgccttgcctggcctaggaactgggaaaacttacctgcttccaagactcagctctagcacctcttcctgctgggtgttttccgatgccccccctctcgccacctcatggggaccccacagtcccctgaagagccttctgccccagtgcctcaccccactctttagacctgtttctgtttccatggctgccttgccttcttagaccacgggctcctgcagagcgggaccccatatctcagtcggctttgcattcccagtgcctggccgaaactgaggctggaatggtctcctattccataagctctcaataacccttgaaaaatgactggaatcctggacagcgccaaggcagcaactgggatgggagagtgatcctgctgcctctcctggcaagtgaggaatggctaagcaacagacaactccctcctggcttggcacagtgcggatgggggaaactggaagaaggagccggagggaggatagagagaaggagcgatgcacggctaagggagacacgacgcgtgaatggacggaagtagcagggcacatctggacgaggatacgacaggaatatagccccaagggtattggggcccgagaggccaaagtacagggattgccacaggaaggggacatcggaaaaaaaggctcgggtcccccaacaaaacctaaatcgtgaaaacatatacctacaaagataaca

SEQ ID NO: 367795 - DNA, 864 bp, Homo Sapiens
caagcaccgtgggaccttggctggcttctggggagcaagagatccatttatgaatacttgatttctgactgctgggaagcatggctgatgctccgaaggagggaagactgacccggtttctggacttcacccagctgatggacatggcatctgaatccgtaggaggaaaaattttatttgcaacagatgacttttttgctcctgcagaaaacctcataaagagtgacagcccgtgcttcaaagagcatgaatatacggagtttgggaaatggatggatggctgggagaccaggaggaaaaggattccaggtcacgactggtgtgtcctcaggctggggatccaaggagtcatccggggcttcgacgtggacgtttcttacttcacgggagattacgctcctcgagtgtccattcaagcagcaaacttggaagaagataaactaccagaaatcccagaaagaggaatcaggacaggagctgcagccactcctgaggagtttgaagccattgctgagctaaaatccgacgactggagttacttggttcccatgactgagcttaagccaggaaaccctgcttccggccacaactattttcttgtcaattcccagcagagatggactcatatcagactcaacattttcccagatggtggaattgcacgacttagagtattcggtactggacaaaaagactggactgcaactgaccccaaagaacctgcagacctagtggccatcgcttttgggggtgtctgtgtaggattaagtaatgctaagttgggcacccaaacaatatataggagttggggggcaaagtctatggcgggatggttgggaaactgcaagaaggctggaccggcca

SEQ ID NO: 367796 - DNA, 961 bp, Homo Sapiens
  misc_feature (61)..(61): n is a, c, g, or t
  misc_feature (174)..(174): n is a, c, g, or t
tttttgaaggggatggcaaaggttgggctggcaagtatctttcccttgaccccttttccangggagtttttcaaattggaatccatccactgtttcaggatttccatctttcagttcatttcttcttctgaaaataaatccttctagctcattttttaatccgtagtttttctngtaaaacttctgaaacatgggaatcagtgaaagtatgtggttggtacagcttgctgtccagggttccagggaaggagttagcatttcctttacttgagtgcaaaacatctttctttgcccttttggcagacatttcctctctgccctttgagttctgatttgatagcatcattcttctgtctttctgaagcctctccacagtttttgagaggtcttgtatttctctcttttttgcagccagttcttcattgagtcttactaatttagctttagcatgagcctgttccacctggaattctatagactgaaaatcttcatcatctttatcatttttcttgacgtctaattcagcattctgatgtttaagaacgtctatttcggcttcaaggtttcttacagtgatctgatgggcttccttgatgtcatcaagttccttctctagggctttaattctgggagagtcatgttgattcaatttgcaggcaagtagctgctcctgctgctctagtctttgttcatactgaatcttcattttctgaaactgttgttccatggtacgaaggcttttctttgcatcttcatctttgccctccagatcagcttctagcttttttatccttttctccataaattccactgtatttttatccactgtatcaccagctgctgatgcagccaatattaaagcaggtaaagaattgggatatcttctcttcagaatcccttccatttccttaaccttttaatataaaaataggtcttgtaaaagtaataaagttaattcttt

SEQ ID NO: 367797 - DNA, 718 bp, Homo Sapiens
ggctctggcaagctggggcttctagagttcaagatcctgtggaaaaaactcaagaaatggatggacatcttcagagagtgtgaccaggaccattcaggcaccttgaactcctatgagatgcgcctggttattgagaaagcaggcatcaagctgaacaacaaggtaatgcaggtcctggtggccaggtatgcagatgatgacctgatcatagactttgacagcttcatcagctgtttcctgaggctaaagaccatgttcacattctttctaaccatggaccccaagaatactggccatatttgcttgagcctggaacagtggctgcagatgaccatgtggggatagaggcgctgtaggagcctggtcatctctaccagcagcagcagcagcgaggttctagcccaggagggtggggtgcttcttgtagccctcagctctccggtctctgctgatgaaatgggctccaggtggcagtgcccgggtcccaggtgccgtgtttactgcagcagtgggacctccgtgcccactcccccagctcagaggctttctcttttttccccaacccggcttctgatggctggctttcccccaccatcgctctctcagagtatattttactaaagagtagttgatgcttccccagggtccccctggctggggaggccaagaatagggaagggacttgtagcccgtttcttaccctccatgcttgctgttc

SEQ ID NO: 367798 - DNA, 777 bp, Homo Sapiens
  misc_feature (727)..(727): n is a, c, g, or t
ggggtgaaggagtggggcaaagtgtaatttggggaaccaagcagggcctggagctatctccatcttcagctccagagtccttggtttctgtctgagaacaaatggcacagcatccctgccaggatcaggaacaaaaggtagaaatgacctccaagcagcagagaagcacatccatagaagagacaatgagaccacaggaaaaacaggtaaccatcactgaaaccctgtgggaccaggtgctgacagtttttaaggatatacaaaaggagctgcaggaagatgctcggattcgagggatgagcaactgctccatgacacccatgacatcagcacccaggactggaagcataaggcctccagattccttgatgaccccaaagttgagaagattgcagttcagctctggagagcagccatcaggaggccgtatccacaacctgaagacacagctcttcagtcaatcagcttactaccctggaccctaactctacaatcaaggaagaaggacatctctgcttccgccagcacagcttcagttggggaagatattagcagacatcatcactgaacccagaagagagggtggtgcccatgagtggagatgccagggtctatggctgaaactgggaacttggaaatcaagtggagaccccaaggcaagggaaagccaaactggcccaaagccaaagggaagacccaggctttgggtttgggcaaaaccaaggcntgaattgaaacataaatggtgaccgttaagaaaggaacacaagaaccgac

SEQ ID NO: 367799 - DNA, 814 bp, Homo Sapiens
  misc_feature (377)..(377): n is a, c, g, or t
  misc_feature (476)..(476): n is a, c, g, or t
caagagcactgtcacccctctgattctgcctaagaggcgtagaggctccggtgtttttgtgccaattgcctgaccacaaagacctctctctggcgaaagaatgcaaatggcggatatgtatgcaacgcgtgtggcctctaccagaagcttcactcgactcccaggcctttaaacatcattaaacaaaacaacggtgagcagattattaggaggagaacaagaaagcgccttaacccagaggcacttcaggctgagcagctcaacaaacagcagaggggcagcaatgaggagcaagtcaatggaagcccgttagagaggaggtcagaagatcatctaactgaaagtcaccagagagaaattccactccccagcctaangtaaatacgaagcccagggttcattgactaaaagccattctgctcaacagccagtcctggtcagccaaactctggatatttcacaaaaggatgcaaccntttgcacattcagataaaaagtcctcaggaaagtactggagatccaggaaatagttcatccgtatctgaagggaaaggaagttctgagagaggcagtcctatagaaaagtacatgagacctgcgaaacacccaaattattcaccaccaggcagcctattgaaaagtaccagtacccactttttggacttccctttgtacataatgacttccagagtgaagctgattggctgcggttctggagtaatataagctctccgttcctgggaatccgcactacttgagtcacgtgcctggcctaccaaatccttgccaaaaactatgtgccttatcccacctt

SEQ ID NO: 367800 - DNA, 972 bp, Homo Sapiens
gctccgcacgcacctcggtaacatcacagcaggtccaggccaatgataaccttataagaggccatgtcgaagcgcgacatcgtcctcaccaatgtcaccgttgtccagttgctgcgacagccgtgcccggtgaccagagcaccgcccccacctgagcctaaggctgaagtagagccccagccacaaccagagcccacaccagtcagggaggaaataaagccaccaccgccaccactgcctcctcaccccgctactcctcctcctaagatggtgtctgtggcccgggagctgactgtgggcatcaatggatttggacgcatcggtcgcctggtcctgcgcgcctgcatggagaagggtgttaaggtggtggctgtgaatgatccattcattgacccggaatacatggtgtacatgtttaagtatgactccacccacggccgatacaagggaagtgtggaattcagcgaatggacaactggtcgtggacaaccatgagatctctgtctaccagtgcaaagagcccaaacagatcccctggagggctgtcgggagcccctacgtggtggagtccacaggcgtgtacctctccatacaggcagcttcggaccacatctctgcaggtgctcaacgtgtggtcatctccgcgccctcaccggatgcaccaatgttcgtcatgggtgtcaatgaaaatgacttataaccctggctccatgaacattgtgagcaacgcgtctgcaccaccaactgtttggctcccctcgccaaaggtcatccacgagcgatttgggatcgtggaagggttgatgacccacagtccatttcctacaccggcaaccagaagaaggggacgggccatcaggaaggcctgcgagatgggcgggtgccaccaaaacatcatccagctccctgggctggaaagctgtgaccaagtatccagagctcaagggaagtgaagggatgggtccggtaccc

SEQ ID NO: 367801 - DNA, 1047 bp, Homo Sapiens
  misc_feature (1006)..(1006): n is a, c, g, or t
ccggaattttcgggataggacccacagccctggcgctccgcacgcacctcggtaacatcacagcaggtccaggccaatgataaccttataagaggccatgtcgaagcgcgacatcgtcctcaccaatgtcaccgttgtccagttgctgcgacagccgtgcccggtgaccagagcaccgcccccacctgagcctaaggctgaagtagagccccagccacaaccagagcccacaccagtcagggaggaaataaagccaccaccgccaccactgcctcctcaccccgctactcctcctcctaagatggtgtctgtggcccgggagctgactgtgggcatcaatggatttggacgcatcggtcgcctggtcctgcgcgcctgcatggagaagggtgttaaggtggtggctgtgaatgatccattcattgacccggaatacatggtgtacatgtttaagtatgactccacccacggccgatacaagggaagtgtggaattcaggaatggacaactggtcgtggacaaccatgagatctctgtctaccagtgcaaagagcccaaacagatcccctggagggctgtcgggagcccctacgtggtggagtccacaggcgtgtacctctccatacaggcagcttcggaccacatctctgcaggtgctcaacgtgtggtcatctccgcgccctcaccggatgcaccaatgttcgtcatgggtgtcaatgaaaatgactataaccctggctccatgaacattgtgagcaacgcgtcctgcaccaccaactgtttggctcccctcgccaaagtcatccacgagcgatttgggatcgtggaaagggttgatgaccacagtccattcctacacggaccacccagaaagacagtggacgggccatcaaggaaggcctggccaaatgggcggggtgcccaccagaacatcatcccggcttccacgggggctgcgaagcctggaaccaaagtcttcccggagctccaagggaacctgaacggnatggggtttccgggtacacaccccggaatgggtctggccgg

SEQ ID NO: 367802 - DNA, 796 bp, Homo Sapiens
ggcagggactacgtccgcaccttccagaacgctaggacacagaccaggctctagaagcccggggaaaccccagatgcatgcatactgttttgcatgcaataaaaacatcttttctttttcttcctcagaatagtaaagaaccttgacttcattgtctataagtttgacaactatgggaaaacattcattaagaagcagaaatgcagccctgatgccttcatccaggtggccctccagctggccttctacaggctccaccgaagactggtgcccacctacgagagcgcgtccatccgccgattccaggagggacgcgtggacaacatcagatcggccactccagaggcactggcttttgtgagagccgtgactgaccacaaggctgctgtgccagcttctgagaagcttctgctcctgaaggatgccatccgtgcccagactgcatacacagtcatggccataacagggatggccattgacaaccacctgctggcactgcgggagctggcccgggccatgtgcaaggagctgcccgagatgttcatggatgaaacctacctgatgagcaaccggtttgtcctctccactagccaggtgcccacaagcacggagatgttctgctgctatggtcctgtggtcccaaatgggtatggtgcctgctacaaaccccagccagagaccatccttttctgcatctctagctttcacagctgcaaagagacttcttctagcaagtttgcaaaagctgtggaagaaagcctcattgacatgagagacctctgcagtctgatgccga

SEQ ID NO: 367803 - DNA, 926 bp, Homo Sapiens
gggtccggaattcccgggatcagctatggggaaaggaacagttgctgttcaagaaaaagcaggtttgcctcgaagcataaacacagacactttatctaaggaaacagacagtggaaaaaatcaggatttctccagctttgatgatactgggaaaagtagtttaggtgacatgttctcacctatcagagatgatgctgtagttaacaagggaagtgatgagtccataggcaaaggagatggctttgactttctaccgcagttgaactcagtgtttcctccaagaaaaaatccagtaacttcaagtacttcagtattgcattctagtcctcttaatgtttttatgggatctccagggaaagaggaaaatgaaaaccgtgatctaacagctgagtctaagaaaatatatatgggaaaacaggaatctaaagactccttcaaacagttagcaaagttggtcacatctggtgctgaaagtggaaatctaaatacctctccatcatctaaccaaacaagaaattctgagaaatttgaaaagccagagaatgaaattgaagcccagttgatatgtgaacccccaatcaatggatcctcaactccaaatccaaagatagcatcttctgtcactgctggagttgccagttcactctcagaaaaaatagccgacagcattggaaataaccggcaaaatgcaccattgacttccattcaaattcgttttattcagaacatgatacaggaaacgttggatgactttagagagcatgccatagggacattgtgaatttggcagtggaagatgatataaacagtttccatatgcaactgaatgaaatgcattctttgcctggaaagatactcagtgaatgaacggtttagtggctgaaattgaaagactacgagaagaaaacaaaagattacgggccaat

SEQ ID NO: 367804 - DNA, 974 bp, Homo Sapiens
tttcaatggtagtgctggcactccagtgatgtttaacaagaacggggatgcacctgggcgttatgacatctttcagtaccagaccacaaacaccagcaacccgggttaccgtctgatcgggcagtggacagacgaacttcagctcaatatagaagacatgcagacggggtaaaggagtccgagagatacccgcctcagtgtgcacactaccatgtaagccaggacagagaaagaagacacagaaaggaactccttgctgttggacctgtgagccttgcgatggttaccagtaccagtttgatgagatgacatgccagcattgcccctatgaccagaggcccaatgaaaatcgaaccggatgccaggatattcccatcatcaaactggagtggcactccccctgggctgtgattcctgtcttcctggcaatgttggggatcattgccaccatctttgtcatggccactttcatccgctacaatgacacgcccattgtccgggcatctgggcgggaactcagctatgttcttttgacgggcatctttctttgctacatcatcactttcctgatgattgccaaaccagatgtggcagtgtgttctttccggcgagtttccttgggcttgggtatgtgcatcagttatgcagccctcttgacgaaaacaaatcggatttatcgcatatttgagcagggcaagaaatcagtaacagctcccagactcataagcccaacatcacaactggcaatcacttccagttttaatatcagttcagcttctagggggtgtcatcggcttggcgtctgatccgcccaacattctccattgactacgatgaactcggaccaatgaaccctgagccaagccgacaggggtctccagctgtgcctcccgatctccgatcatttgcccttgggatttgcctcttctcatggtccctgtcctgcgcgctcgccccacactcgcgggttccga

SEQ ID NO: 367805 - DNA, 849 bp, Homo Sapiens
tggaattgtaggcacaaacacagatccccagctcaagggtatagtgaccaggttatatggcaggcaaggctactacttgcaaatgcaccccgatggagctctcgatggaaccaagggatgacagcactaattctacactcttcaacctcataccagtgggactacgtgttgttgccatccagggagtgaaaacagggttgtatatagccatgaatggagaaggttacctctacccatcagaactttttacccctgaatgcaagtttaaagaatctgtttttgaaaattattatgtaatctactcatccatgttgtacagacaacaggaatctggtagagcctggtttttgggattaaataaggaagggcaagctatgaaagggaacagagtaaagaaaaccaaaccagcagctcattttctacccaagccattggaagttgccatgtaccgagaaccatctttgcatgatgttggggaaacggtcccgaagcctggggtgacgccaagtaaaagcacaagtgcgtctgcaataatgaatggaggcaaaccagtcaacaacgagtaagacaacatagccagatcctcacaggctgctgtgaccttatacgtcctgagccacagttgagtgattcatcctcaccagcacattcctgctccgctggcctgaagcagcacccagcgaagtaacgcctaatgctcacttcttgcctgtctccggaacttctcctgtctgcaagtgcgatccactcctcaccctgttcgcaccctctcattaccatagacagacacctggatacaccaggtaaacttcagaccatggaattggcctaccagcatattgcacatgc

SEQ ID NO: 367806 - DNA, 1008 bp, Homo Sapiens
ccctggagcgcagtcactttacaaccaccttcctccccaaatgccagcatggacaaattagatccagaagccctgcacacagccatcctcagggagaaagcacagttggctgggccttgattcacgaagggggcctgccccatgccacggcggtccctcctggcacccgcctcctgataaccctcgtgctgtgtcgataccacagatcctgttccgggccaaagacctggatcccgagcccaggagccacatcgtgcgagggaaccacacgcagtcggccctgctggcaggcctgcgcaagttcgtgctctacgagctccaggtgctggcgttcacccgcatcgggaacggggtccccagcacgcccctcatcctggagcgcaccaaagacgatgccccaggcccaccagtgaggctcgtgttccccgaagtgagactcacctccgtgcggatagtgtggcaacctccggaggagcccaacggcatcatcctggggtaccagattgcctaccgcctggccagcagcagcccccacaccttcaccaccgtggaggtcggcgccacagtgaggcagttcacagccaccgacctggccccggagtccgcatacatcttcaggctgtccgccaagacgaggcagggctggggggagccactggaggccaccgtcatcaccaccgagaagagagagcggccggcaccccccagagagctcctggtgccccaggcagaagtgaccgcacgcagcctccggctccagtgggtcccgggcagcgacggggcctcccccatccggtacttcaccatgcaggtgcgagagctgcctcggggtgagtggcagacctactcctcgtccatcagccatgaggccacagcatgcgtcgtggacagactgaggcccttcacctcctacaagctgcgcctgaaagccaacaacgacattggggacagtgacttcagttcagagacagaggcggtgaccacgctgcaggattgtccaggagagcc

SEQ ID NO: 367807 - DNA, 1144 bp, Homo Sapiens
ggcccatggaggaaaaggaagataagcatcaacagcataaaatagaggatgctgctataacatatgtaagtgaaaatgaagaaattaaacacgaagaaaaacctggaaaaagcatacatcattcaaaatcacatgttggaagaggacgtatatattatgctaaattcattaacacaaatgcaagaacatacaatgaaccatttccctacatagatcccaaaaaagggccagaaatacagggtgactggtggtcacatggtaaagcactggaacctgtcttcctaccaccttacgactctaagagcacccagaggagtgacttccaaaaaccatcgtgtccactggttttgccagtcaaacacagcaagatgcaaaagccttcttgtggaatagtaccacttgcctctcctggtacatcagcagaacttcaaaacaattttatagaatacatctcttttatacatcaatatgatgccagaaaaactccgaatgagcctctccagggaaagagacacggagcttttgtacagagagagataaaaccaggcagtaggccaacagttcctaaaggagcagaggtattactgaacactccagggtcacgttcatcagaacagtccaaaaaaacagagaaaaggaaactcaggcggaaagccagaatgattctcaccaggtctctgccgaacaaaattctcaggagctgttagagccttaaaactcacttatcagaaacagacgtccagacaaggcagccaaggaatgccccagcactcttgagaagcaggagaaaagaactcagggcgccactcaaaaaacttgtagggagatgctcttttcactaggcacaagcctgttaaatccaccaattaacacactcagaaattaaacttaaccctttcttccgaattaaaatcttaaatcccctgtgaagatattagggaaaagttcaccaaatccaatcatgcttgggccctcaacagtttaagatttcctggaaatccagcacacttcggaaagcttaccaagtgatgttcacatgggaacgcgcaaaaacaaagacaacattaaacacaacacgcagagggttagaaagagagacaatgaagaaccacacaacgagcgcgcgcggacaaaagtatagcag

SEQ ID NO: 367808 - DNA, 902 bp, Homo Sapiens
  misc_feature (631)..(631): n is a, c, g, or t
ttcctgctcaccggtgggctccgggcacgcccggcagggtcctggtgggcgcaggcaaggggacgtaggcagagtgctccggccagcatggagggactggtcttccttaacgccctggccactcggttgctagttcctgctgcactcgctggtcggggtctggcgagtgaccgaggtgaagaaggagccgcggtactggctgcttgcgctgctcaacctcttgctcttcctggagactgcgctcaccctcaagttcaagcgcggcagaggctacaaatggttttcaccagccatatttttatatctgattagcatcgttccatcattatggcttcttgaattgcaccatgagacccagtattgcagtatccaggctgaaggaacatcacagaataccagcagaaaagaagacttcaatcaaacattgacatccaatgaacaaaccagtagagctgatgatctcattgagacggccaaagtttttgtgaataacttatctacagtatgtgagaaagttttggacattgggactccatcagacattcctgttaatgctaataattggaagatggcttctacccattggaggcgggatcactcgagatcaactctctcaacttcttcttatgtntgtggggacagcggctgacatactggaattcacaagtgagaccctagaagaacaaaatgtgaggctctgttggaaaaattccactaatagaagacatactaaccccaagtggcaacttggtctaatttggagggtactgggttttctatccacgtgctattgcccatatgtgcattgtgaagaagccttcatcaatgtccaccaaggtcctgataaatgtgaggtagaaaggaatcaaaagcaagctttcaaaacccatgggggagtcccg

SEQ ID NO: 367809 - DNA, 628 bp, Homo Sapiens
tgcaaaccacccccagatgtcagccctgatcactgacgaagatgaagacatgctgagctacatggtcagcctggaggtggaagaagagaagcatcctgttcatctctgcaagatcatgttgttctttcggagtaacccctacttccagaataaagtgattaccaaggaatatctggtgaacatcacagaatacagggcttctcattccactccaattgagtggtatccggattatgaagtggaggcctatcgccgcagacaccacaacagcagccttaacttcttcaactggttctctgaccacaacttcgcaggatctaacaagattgctgagatcctatgtaaggacctgtggcgcaatcccctgcaatactacaagaggatgaagccacctgaagagggaacagagacgtcaggggactcccagttgttgagttgaatatgatggagcatcagattttacctaatacagcagaactcctaaaaagttacagccatatgcaggacggcagtactcagcatggtcttatgcacaggaactaaaggaacaaagagatcgagtcacaaaaattcaggaagagggggtaaatgtggatcgtatggaatgaaaaataaacattctcaacgg

SEQ ID NO: 367810 - DNA, 1044 bp, Homo Sapiens
  misc_feature (935)..(935): n is a, c, g, or t
agcggaggagggctggcttctctgcagagctctgcttcctgcagcctctccccgacctcagagcctctgcagaggaaaggccccctggggccctgccccacagcatcatgatggggaaactccccctgggggtcgtctccccttatgtgaagatgagttcggggggctacacggaccccctgaaattctacgccaccagctactgcacagcctacggtcgggaggatttcaagccccgtgtgggcagtcacgtaggcaccggctacaaatcaaatttccagcccgtggtctcatgccaagccagtctggaggccttagacaacccggccaggggggaacaagcccaggaccatttccagtctgtggccagccagagctaccgccccctggaggtgcctgacggcaagcatcccctgccctggagcatgcgccagaccagctcaggctatgggcgggagaagcccagtgcgggtccccccaccaaggaggtccggaaggtccatttcgacacccaggagcacgggcctcaggccatcacggggctggagcccagggaagtgcctctgctccaccagcagcagggccaggacccgctggagcgggagaacttccgacatggcccacgcttcatgacgtcggagtacaattccaagtatctcagggaccctctagaccagccagatttcttgcagaagaaatcgatcggcgcaaaggaggggagtggcttcaccaaacagtcccaccagagccccattgtcttccaaccgccctcacaggcccctccctggggaaccctgacctcctcccaggccagagtgtcaccaagtcaggacttcccccccaagactcacctacatggagatgagttcctacctgtgttggccagaggctccagcggggaacagccttcacccgagggaaatgaaggattctgnaaccccagagtgcccccctcctggcccagacccaggaggggggagtccccgcaatttcagccacctcattggatgcaacagacaaacgttgccctcgttggccgggaaa

SEQ ID NO: 367811 - DNA, 717 bp, Homo Sapiens
ggggaagccatgtcctacttcaggactccacaaactcatccaggtcctctgccttccggccaaggtggggctgcttctccaggcttgtcccttggcctctgtagtcctgtagagccagtggtggtggcctctggtggaacaggcccactgagccagaaagctgagcaggtggcacctgctgcccaggcctggggcccagccctggcaatgccacaagccaggggctgccctggggggactagctgggagacactacggaaggaatacagccgaaactgccacaaattcccgcatgtgaggcagctggagagcttgggctgggacaatggctactccagaagcagagcccctgacctgggtggccccagcaggcctaggcccctgatgctgtgtgggctgtcaccacgggttctaccggtaccctctgaggcagtggggaaggaggccagctcccagcctgatatctgcatcctcaccctcgccatgatgatcgctggcatccccaccgtgcccgtcccaggagttcgggaagaggacctgatctgggccgctcaagctttcatgatggcccatccggagccagagggtgctgtggagggggcgcggtgggagcaggcacatgcccacacagctctgggaagatgcccctagtgagatctaaaaggggccagcctcctggctcctgcttgtagatggctgaaatagcaccagatatgt

SEQ ID NO: 367812 - DNA, 807 bp, Homo Sapiens
  misc_feature (770)..(770): n is a, c, g, or t
cgctaacgcatggtgtcggagggaggcccacttgctgaacagcagggagcgatggcgcagaacgtgtatggtccgggagtccggataggcaactggaatgaggatgtctacctggaggaggagctcatgaaagacttcttagagaagagagacaaggggaaacttctcatacagagaagtagaagactaaaacagaatctcttgagaccgatgcaactttccgtaactgaagatggctatattcattacggtgacaaagtgatgcttgtgaatcctgatgatcctgacacagaagctgatgtgtttctgcgtggggacctgagcctgtgtatgactccagatgaaattcagtcccatctgaaagacgaattagaggtaccctgtggcctgagcgcagttcaagccaagaccccaattggcagaaacacttttatcattttgagtgtacacagagatgccactggtcaagtccttagatatgggcaggacttttgcctggggataacaggaggatttgacaacaaaatgttgtatttgtcaagtgaccacaggaccctcctgaaatcgtctaagaggtcttggctccaggaagtgtacctaacagatgaggtctcccatgtgaactgctggcaggctgccttccctgacccccagttacgcctggaatatgaaggcttccccgtcccggcaaatgctaaaattctcatcaatcactgtcacacaaatcggggactggcagcccaccggcatcttttcttaagcacctattntggaaaggacggctggaggtgtagctcacacataccg

SEQ ID NO: 367813 - DNA, 751 bp, Homo Sapiens
gtccccatgaggaataataatccccaaatttcccttcccatctaataaatactcaaccttatcataggtcagcatcacatgtcagtcacgtattggtaatttccaacatatgcaggtcccactaaaattaatggactaattaacctgttggctctacaggtgcctggcggatggtagatttatcttggccttgtctgggccatggagatctgagtgccatccttgagctgctgcctttagggactcagggttgctgctccatgggcaaagacccgggcggctacagccacaaaggcctggaggctgcgaaggattttgaagcggagaaggagacgctgccatggctggctgggactgaggcttggaatctgctgagtctcccagtggtgaccctcaggctgcaggagttggctgaggcccagtagggaggcatgaagctggcccacagggctatcagggagcagagaaggctcccctgtgaaaatatccgatcctagcagcttctcataaaaaatcagaccctggtggatcctttgcaagcagaactgactgttgtccctgagtccttgggggtcacagccatctccacactggatatggggaacatcatttgtagtctcttcatctccctcttctcttagatcttgtgtacaacatctcctatgttcttcccatctctggtccccattctgggagccctagacgtaattttgttcaagaagactaaaaacagagttactttctaacgcca

SEQ ID NO: 367814 - DNA, 814 bp, Homo Sapiens
gcaatggggataccattctggaagacttgcccatccaatctggtgacatgctgatcgagggaagaagaccaaaccaggcccagaagttcacctgcatttactaaacgtggtgcttctagttacgtcagggaaactttgcctgtgcttaccagaaccgtggtcccagcagacaactcttgcctctttactagtgtgtactatgtcgtcgaaggaggagtcttgaatccagcttgtgcccctgagatgagacgcctcatagcacaaattgtagcaagcgatccagacttctatagtgaggcaatactgggaaaaacaaatcaagagtactgtgactggatcaaaagggatgacacttggggaggagcaatagagatatcgattttgtccaagttttaccaatgtgaaatatgtgtagtggatacacagacagtaagaattgatcgttttggggaagatgcaggatataccaaaagggttctgcttatttatgatggcatccactatgatccacttcagcgtaacttccctgatccagatacacctcctctgaccattttctcctctaatgatgatattgttcttgtacaagcactggaattagcagatgaagctagaagaaggagacagcttactgatgtcaaccgcttcaccctgagatgcatggtatgtcagaaccggattaactggacacgcagaagcaaaggaacattccaaggagacaggcctaccaacttggagaatgtgacctatgctgatgacgttgaagccactacctcacacctccgaagcctgggttccaattagctatggaacc

SEQ ID NO: 367815 - DNA, 1357 bp, Homo Sapiens
  misc_feature (1007)..(1007): n is a, c, g, or t
  misc_feature (1090)..(1090): n is a, c, g, or t
  misc_feature (1144)..(1144): n is a, c, g, or t
gcgaaggccgccagctgcggggaggggaggggaggcgcggtcccgtcagcgcccccaggctcgagtgtcccaggttgtgccttgttagccaagaagcatggaagtcattcacggcaggccctactgttgcagggagcttgaaggagctgacatactgtccaacaccttttactctaagtgaattgcacaaccccctccagacggttactcgcccaactgcctcagaggacaggtatcaggaattaagggagtcacttcaacaatgtaggcttccttggggcgctgaaagagagtatggtgggataataccgatttcactccccgaggaccacaggccaaagtatgagcctcctcgtgtcatgggcaaaggacatcagcattatggatttggtggagaaacctggccaagaaagcttcctgttgaacaattttattatttgacccagaacaaaaaaagtgatgtctatggaaatgattctttgatacccaagccgcctaattcaacagtaggagagatctgcttgccatatccaattgaacacccctaccacacacacatctggtcgcggcaccatgttccccaccttcacgtcacctgaggacctctacacgggcattaaagcccgcacccagcagccctttcctcccacggtgccaaccaaggcttatgattcaacagtttttgaagacaagaggtaatccttatagatatgaactgattgatattcccatggattcaaagaagaaagcactgacttggccaggtcaaggtgtatattatgattttcccagaggtgttgagaaaaataagccagtattctacccaaaacctcctaaaaccttcgctcctaacacttctttaaattcatgggaccctatttgctctgccaaagaagccaacatacaaagaaatcttgagaggtcccactggctcacttcgtacactcatgattttacaggtctggggccccatgggacccccttgaactggatgattacccgtgaanagatggtagcagagttaacagaaaagataaggatttgacccagagccgccagaaaaattccaccctgtcctcaaaccctccanaccgtttggaaggacgaattgcccgatttattccgaaaccgacggttctctggnaggctatagtcccagcaaagaccacggttcctgtcccagatggaactccctagagttttgggtaaaatttccatacctttggaacccaggttctaaagaaaagggtgggacctttaagggaaaacttaacccacccggggggaccccttataaaaccgggaaatttggaaggagaagatcttaaaagaaaccgagccttgctgggcaaactaa

SEQ ID NO: 367816 - DNA, 1319 bp, Homo Sapiens
ccccactggccgggcctcaacctcttctccccacaaccccaaccccagaggaaaagccccctcacctggcgtccgcaaccatggatgcaagtcgccccaagtcctcggaatcccagtcctccctggaggcccccaggcccggcccaaaccccagtcccaacgtggtgaacaagcccctgcagcgggactcccccggcatggtggccgacaggctgccaccaaagaccggcgcggtggttattgacatgggcacaggcacctgtaaggtaggttttgctgggcaggccagccccacctacaccgtggccaccatcctgggctgccagcccaagaaacccgccacctcggggcagtccgggctgcagacgttcatcggcgaggcagcccgcgtgctcccagagctgacgctggtgcaacccctgcgcagcggcatcgtcgtggactgggatgccgccgagctcatctggcgccacctgctggagcacgacctccgagtggccacccacgaccacccgctgctgttctccgacccacccttcagcccggccaccaaccgcgagaagctagtggaggtggccttcgagtcgctgcgctccccagccatgtacgtggcatcgcagtcggtgctgtctgtctacgcccacggtcgtgtcagcgggctggtggtggacacgggacacggggtcacctacacagtgcccgtcttccagggctacaacctgctccacgccacggagcgtctggacctggcgggcaacaacctgaccgccttcctggcggagatgctgctccaggccggcctgcccctgggacaggcaggacctggacctagtggagaacattaagcaccactattgctacgtggcctccgacttccagaaggagcaggcccggccggagcaggagtacaagcggactctgaagctgcccgatgggcgcacggtcaccctgggcaaggagctgttccagtgtccggagctgctgttcaaccccccagaggtcccggggctgtcacccgtcggcctctccaccatggccaagcagagtctccgcaagttgtcactggagatgcgcgcggacttggcccaaaacgtgcttctctgcggtgggtcctcgctcttcaccggcttcgagggtcgcttccgggcagagatgctgcgcgctctgccagccgagacccacgtggtggtggcctgcaccagcccaccaggaatttctccgtatggactcgggggctccatcctggcctacactgcggcgccttcaagtcctgctgggtcctgcgggagacagtagcgaggaaacagggtccctatatt

SEQ ID NO: 367817 - DNA, 858 bp, Homo Sapiens
gggagagagatcttcctctctcttcgggcgtgttaagacagcggggttggcctgtacttcctctggccctggctgaagaggcgatcatggccttgagacctgaggaccccagtagcgggttccggcatagcaacgtggtggccttcatcaacgagaaaatggccaggcacacgaaaggccccgagttctatcttgagaatatatccttatcctgggagaaggtggaagacaagctgagggccatactggaggacagcgaggtgcccagtgaggtcaaagaggcctgcacctggggcagcctggccttgggagtgcgctttgcccacaggcaggcacagctacaaaggcacagggtgcggtggctgcacggcttcgccaaactgcacaaatcagccgcacaggccttggcatcagacctgaagaagctcagggagcagcaggagacggaacgcaaggaggcggcctcccggctaagaatggcccagaccagcctcgtggaggtgcagaaagagagagacaaggagctggtgtctccccatgagtgggagcagggggcagggtggccaggcctggcactgccggaggggtttgcacagaaggagcagctgaggaggaagaagaggcggcggtggctgctgctggtgctgctggaggaaaaggagcagaagaagagcagagggatgtggaggttgtggctgcccctgtggaggccatggctccccctgtggaggctgggctgccccatggagaccagttcccccacgtgggaggccagggctgccttccatggagaccaccagagaaagctggagagaatcctcctgcagctcttggaagatgctgatcaggaaagtacac

SEQ ID NO: 367818 - DNA, 580 bp, Homo Sapiens
gtttccatctggagcaatgtgacccctttgattattccagcaagtgcagaatggagatgcagacatcaaggtttctttctggcagtgggcccatgaagatggttggccctttgatgggccaggtggtatcttaggccatgcctttttaccaaattctggaaatcctggagttgtccattttgacaagaatgaacactggtcagcttcagacactggatataatctgttcctggttgcaactcatgagattgggcattctttgggcctgcagcactctgggaatcagagctccataatgtaccccacttactggtatcacgaccctagaaccttccagctcagtgccgatgatatccaaaggatccagcatttgtatggagaaaaatgttcatctgacataccttaatgttagcacagaggacttattcaacctgtcctttcagggagtttattggaggatcaaagaactgaaagcactagagcagccttggggactgctaggatgaagccctaaagaatgcaacctagtcaggttagctgaaccgacactcaaaacgctactgagtcacaataaagatgt

SEQ ID NO: 367819 - DNA, 596 bp, Homo Sapiens
cccgggattaaagtgatagtgcagaaagaagactggatgtggaatgagaactgaagttagagttttaagtcctcacaaaaggatttgcctgatacctgtccttagcaggaattcaagggctccacagtcgtcgagctgatgaagaaggaaggcactaccctgggtctgacggtatcgggaggaattgataaggatggcaagccaagagtatctaatctgcggcaaggaggaattgctgctagaagtgaccagctggatgtgggtgactacatcaaagcagtgaatggaatcaacctggccaaattccgccatgacgagatcatcagcttgctgaagaatgtgggagaaagagtggttcttgaagtagagtacgagcttccaccggtctctgtgcaaggatcaacgtgttattttccgaacagtggaggtcacattacataaagaaggcaatacctttggttttgtaattcgagggggagcacatgatgatagaaataaatctcgtccagttgtgataacatgtgttcgtcctggagggcctgctgacagagagggcacgatcaaacccggtgacaggttgctcagtgtggatggac

SEQ ID NO: 367820 - DNA, 866 bp, Homo Sapiens
  misc_feature (852)..(852): n is a, c, g, or t
cagctataagtttaaaagcttaaagcactgtgtgagtgctggggaaccaattacccctgacgtgactgaaaaatggagaaacaagacgggcctggatatctacgaaggatatggactgactgaaacggtgctaatctgtggaaattttaagggaatgaaaattaaacctggctcaatgggaaaaccttctcctgctttcgatgttaagattgtagatgtaaatggcaatgttctacctcctggacaagaaggagatattggcattcaagttctacccaaccgaccatttggcctttttactcattacgtagataatccttcaaaaacagcttcaactctacgaggcaatttctatatcactggggacagaggatatatggataaagatgggtatttctggtttgttgcaagagcagatgatgtcatattatcctctggctatcgaattggaccatttgaggtagaaaatgccctgaatgaacacccttcagttgcagagtcagctgttgtcagcagcccagaccccatcagaggagaggtagtaaaggcttttgtcgttctaaatcctgattacaagtcacatgatcaagaacaactaataaaggagattcaggagcatgttaaaaaaactacagcaccttacaaatatcccagaaaggtagaatttattcaagagctgccaaagactatcagtggggaagacaaaaagaaatgaactgaggaagaaagaatggaagacaatttaaaagttgtttcattaattaccatatctataaaacaaacatagtatctgtcaatctctagaaaccacaagatgatggagaggtcataaaaactgtggtagtatgcttnagaaactgttgatt

SEQ ID NO: 367821 - DNA, 558 bp, Homo Sapiens
  misc_feature (11)..(11): n is a, c, g, or t
  misc_feature (34)..(34): n is a, c, g, or t
  misc_feature (43)..(43): n is a, c, g, or t
  misc_feature (50)..(50): n is a, c, g, or t
  misc_feature (69)..(69): n is a, c, g, or t
  misc_feature (89)..(89): n is a, c, g, or t
  misc_feature (110)..(110): n is a, c, g, or t
aaattccaccnttggcatccgggggaggaaattngcccggaantttttancttacataaggcccaattnttttggccagtttggattangaattctaggtggaagaattngaattagtccttgggaatgggtttggggtaacagcccaaaatagggaaaaagggtattgttaggaaagttgtcttggatattaagtatttactgtgagtccagtaagccaaaggaccaaacaaaataggttcagggtttcattttaatctcaaagattctgattcttacccatatgtcatcagttcagtttgggacatgtggtgcagcatgtgtgaagaaaatattcattaaaatgtaaaaataaacacttgaaattgtccacaacactgagcaaatattcgttataattaggatgcctacctttctgggatatttgtaaggtgctgtagtttttttaacatgctcctgaatctcctttattagttgttcttgatcatgtgacttgtaatcaggatttagaacgacaaaagcctttactacctaaaataaatatttgaaacaccagga

SEQ ID NO: 367822 - DNA, 1467 bp, Homo Sapiens
  misc_feature (1417)..(1417): n is a, c, g, or t
  misc_feature (1442)..(1442): n is a, c, g, or t
  misc_feature (1452)..(1452): n is a, c, g, or t
ggacggcatcatcatcctctacactattctggagctccaaaaacgagccagagataaggaagagaccaacaaaaaggagctatatgagagcaacaagcatttcctggggccctacaaccctgtgagcccgtgccagaacattctgcgggtgatcgaggaatttggagacttcctggggccccagcagataaaggacctgctgctggccgccctggaagggctgaaaggcagctcagaggctccacggaaggactccagggagatgatgcagctggcctcggaggtcatgctcagctcggtgctggagtggtaccgccacagggcgctggaggtgatcccagaaatcatgcaaggcatctacatgcagctgagccacatccaggagcctcgggcccgccaggtggccctgctgcccgtctccctcctggctagctccttcatgaccgaggttgtggtggccctgctcatgtgccccctcccactgaacagcaatggagcagagatgtggaggcagctgatactgtgtaagcccagctgtgatgtccgagacctcctggatctgctcctgggcagcctgaaggagaagcccgtcaccaaggagggccgggcttccatcgtgcccctggcggcagccagcggcctgtgcgagctcctgtccgtcaacagctgcatgggccgtgtgaggcgcatctaccctcagctgctcctggccctgctcattcaggtccattaccacatcggcctcaaacctgcctggctgcgtggctcctcccaaggacaccaagaagggtgcacagccctctcccttcgtacctgtgcgctgggtggtgaaagtggtgaaaaccctgctactgaggatgggctgctcttatgagaccacgtttctggaggaccagggtggctgggagctcatggagcaggtggagagccaccaccgcggagtggccttgtctggcaagggccatggtgcagtactcctgccaggagctgtgccgcatccgtctaccgtgctcatcctcgctcctggagcgaggcgacgagaagcacaggatcacggccaccgcccttcttcgtggagctcctccagatggagcaggtgcgccggatccccgaggaatactctctggggcggatggcagaaggcctgagccaccacgaccccatcatgaaggtgctgtccattcgaggcctggtcatcctggcccgcaggtctgagaagaccgccaaggtgaaggccctcctgccttccatggtgaagggcctgaagaacatggatgggatgctggtggtggaagcggtccacaacctcaaggctgtcttcaaggggcgggaccagaagctgatggacagtgcggtctatgtggagatgctgcagatcctgcttgccgcacttcagcgacgcacgagaggacgtgcncttcctcctgcatcaacctgttatngggaaggttngttccagaagctttc

SEQ ID NO: 367823 - DNA, 1408 bp, Homo Sapiens
  misc_feature (940)..(940): n is a, c, g, or t
  misc_feature (1356)..(1356): n is a, c, g, or t
ggaaagcccagttgcttaacgaatatgtggctgtcaaaatatttccaatacaggacaaacagtcatggcaaaatgaatacgaagtctacagtttgcctggaatgaagcatgagaacatattacagttcattggtgcagaaaaacgaggcaccagtgttgatgtggatctttggctgatcacagcatttcatgaaaagggttcactatcagactttcttaaggctaatgtggtctcttggaatgaactgtgtcatattgcagaaaccatggctagaggattggcatatttacatgaggatatacctggcctaaaagatggccacaaacctgccatatctcacagggacatcaaaagtaaaaatgtgctgttgaaaaacaacctgacagcttgcattgctgactttgggttggccttaaaatttgaggctggcaagtctgcaggcgatacccatggacaggttggtacccggaggtacatggctccagaggtattagagggtgctataaacttcccaaagggatgcatttttgaggatagatatgtatgcccatgggattagtcctatgggaactggcttctcgctgtactgctgcagatggacctgtagatgaatacatgttgccatttgaggaggaaattggccagcatccatctcttgaagacatgcaggaagttgttgtgcataaaaaaaagaggcctgttttaagagattattggcagaaacatgctggaatggcaatgctctgtgaaaccattgaagaatgttgggatcacgacgcagaagccaggttatcagctggatgtgtaggtgaaagaattacccagatgcagagacctaacaaatattattaccacagaggacatagtaacagtggtcacaatggtgacaaatgttgactttcctcccaaagaatctagtctatgatggttgcgccatcntgtgcacacctaaggaaatgggactcctgaactggagctgctaagctaaagaaactgcttacagtttattttctgtgtaaaatgagtaggatgtctcttggaaatgttaagaaagaagaccctttgttgaaaaatgttgctctgggagacttactgcattgccgacagcacagatgtgaaggacatgagactaagagaaaccttgcaaactctataaagaaacttttgaaaaagtgtacatgaagaatgtagccctctccaaatcaaggatcttttggacctggctaatggagtgtttgaaaactgacaccagatttcttaatgtctgtcagaagacactaattccttaaatgaactactgctattttttttaaaacaaaaacttttcatttcagattttaaaaagggtaacttgnttttattgcatttgctgttgtttctataaatgactattgtaatgccaatatg

SEQ ID NO: 367824 - DNA, 872 bp, Homo Sapiens
tccctgtgcacctactggagccaggttactctgggtcctggacctgactgcctcattctggaggcttccagacagccacggttagtgcccaaacctgagaggatggcttcagatggagcatctgcattgccgggaccggatatgagcatgaaacctagtgccgccctgtctccatcccctgcacttccctttctcccaccaacttctgacccaccagaccacccacccagggagccacctccacagcccatcatgccttcagtattctctccagacaaccctctgatgctctctgctttccccagctcactgttggtgacaggggacgggggcccttgcctcagtggggctgggtgctggcaaggtcattgtcaaagtcaagacagaaggggggtcagctgagccctctcaaactcagaactttatccttactcagactgccctcaattcgactgccccgggcactccctgtggaggccttgagggtcctgcacctccatttgtgacagcatctaatgtgaagaccattctgccctctaaggctgtaggtgtcagccaggagggtcctccaggccttccgctcagctccaccagcagttgctcaactggtccccattgtgcccctggaaaaagcttggccaggggccacatgggacaaccgggcaaggaggtcctgttggccactctatccaagccttccctaggtgaccgctccaaaatttccacggacgtttattgagaacttccgtcagtggcgagcgttacaaagccttggcgcggaggcacctatcccagagtcctgacacagaagctctttctgattactaatccagtgcttcgttcccctggcccggtgaagcccactatgagcg

SEQ ID NO: 367825 - DNA, 987 bp, Homo Sapiens
gttgcattctatgttgccagtgttcctgctgccagaattggatccaacccattgttccagacaagatcagggcaactagtatggaaaacataacctcaagtatctttgatgtaatctccaagggaaaagttgctccaactttttcttactggtcttttcggaatgatggtttgaaagcttctgatgtccttcctatcctaaaggaaaaggtggccttcgtgtctgggggtcgtgataagcgaggcggacccatcctgaccttccctgctcgcagcaatcatgacagaataagacaggaagacctgcggaaactcgtgacgtatttggccagcgtgccaagtgaggacgtgtgcaaacgtggcttcactgtcatcatcgacatgcggggctccaagtgggacctcatcaagcccctcctcaaaacgctgcaggaagcctttccagctgagatccatgtggccctcatcattaaacccgacaacttctggcagaaacagaagaccaactttggcagctccaaattcatctttgagacgagcatggtatctgtggagggcctcacaaagctggtggacccctcccagctgacggaggagtttgatggctccctggactacaaccatgaggagtggatcgaactgcggctctccctggaggagttcttcaacagcgccgtgcacctgctctcgcgcctcgaggacctccaggagatgctagcccggaaggagtttcctgtggatgtggagggctctcggcggctcattgacgaacacacacagctcaagaaaaaggtgctgaaggcccctgtggaggagctggaccgggaggggcagcggctgctgcagtgcatccgctgcagcgacggcttctcaggacgcaactgcattccgggcagtgctgacttccagagcctggtgcccaagatcaccagtctcctggacaagctgcactccaccggcagcactgcccagatgtggccgtgcgcga

SEQ ID NO: 367826 - DNA, 829 bp, Homo Sapiens
ctggcgaagaaggaaagagggtactctctggctgggctggggccgtagcgacgtccgccgcgaacctgggccccccaaagctgcggggcgttcggtgtcgccgaagtaaacatgcaccctgagccctcggagcctgcgacaggtggtgcagcagagctggattgcgcgcaggagcccggcgtggaggagtctgcgggtgaccacgggagcgcaggccgagggggctgcaaggaagaaattaatgatcctaaggaaatatgtgtgggttcttctgacacatcctaccacagccagcagaaacagagtggtgataatgggtcaggtggtcacttcgcacacccaagagaagacagggaagatcggggccccagaatgactaaaagttccctgcaaaaactctgcaagcagcacaagctttatattaccccagcattgaactgatacgctgtatttacactttaaaggttttgatcgcattgagaacctggaagagtacacagggctgcgctgtctctggctgcagagcaatggaatacagaaaatcgaaaaacctggaggcccaaactgagttgcgttgcctcttcttgcaaatgaacttgctccgtaaaattgagaacctggaacctctgcagaaactggatgctcttaacctcagcaacaattacatcaagaccattgaaaacctctcttgcctcccagtcctgaaacacattgcagatggcccacaatcaccgtggagaccgtggaaggacattcaggcatctacaagagtgtttgagggttgtgtccttggacctttcgcacaacaagctgagtaccccggagatcc

SEQ ID NO: 367827 - DNA, 1017 bp, Homo Sapiens
tgtgagaattttaacctagatgctccagacagttctaccaaggtatgtgaggttccgggtggactccagtcagtgtcttccgctggaagtgcaagtgccaagtggaaaagtccccggccttatccacctagtccggtagagactgaaggcacattatccaactccgtaatgaaaacattcaacgtacacagccacgaattaattccgactgtcctcgtgtgttttgcccgaggagatattttcaccaatttccattgttggacttttggagaatctgatcgtcctggctgcctgtgttcaagaataagtatctgccaggcacccatgtactgttttcatctgtagcttggccatatctgatatgctgggcagcctatataagatcttggaaaatatcctgatcatattgagaaacatgggctatctcaagccacgtggcagttttgaaaccacagccgatgacatcatcgactccctgtttgtcctctccctgcttggctccatcttcagcctgtctgtgattgctgcggaccgctacatcaccatcttccacgcactgcggtaccacagcatcgtgaccatgcgccgcactgtggtggtgcttacggtcatctggacgttctgcacggggactggcatcaccatggtgatcttctcccatcatgtgcccacagtgatcaccttcacgtcgctgttcccgctgatgctggtcttcatcctgtgcctctatgtgcacatgttcctgctggctcgatcccacaccaggaagatctccaccctccccagagccaacatgaaaggggccatcacactgaccatcctgctcggggtcttcatcttctgctgggccccctttgtgcttcatgtcctcttgatgacattctgcccaagtaacccctactgcgcctgctacatgtctctcttccaggtgaacggcatgttgatcatgtgcaatcccgtcattgaccccttcatatatgccttccggagcccagagctcagggacgcattcaaaaa

SEQ ID NO: 367828 - DNA, 541 bp, Homo Sapiens
ccagggatcagacttgtgggtacccaagttcctcagcccatctttaactcagtaggatgtggcatctccattgaggctcttcatggaatccctggaggtgaaacctcggtgtccggttgctccaaaccagtgctggtgggattcagttttctggacccatttctgggtgaagtcaaggaatggaggcgggcggctgtcaagcgtctctgttgctcaatggggcaggccagtcccagcggcgacttagaggtggctggctgggcgtccctacaggagaatgggccacagggccagcggggccagcaggatgagcaggcctggtttggggtatgggccgcaggcgtggagctcgatgctgggcaggggcctgctcactgacgagttgccacccgggattggggtaggggtgggcgcggtggtctcgggctctgagcggctctgcaccggcaggagcaggactggcagcagcagcagcagcgccagtgcggatcgggccgccatggccaagcgctccggctcgtcccgtagcagtgccgcggcg

SEQ ID NO: 367829 - DNA, 884 bp, Homo Sapiens
tgaaactccctcccactgtctcttgtattagcatcaaggaagcaagaaaaaataagcaccctgagaatggagacagtgtttgaagagatggatgaagaaagcacaggaggagtttcatcttcgaaagaagaaatagtccttggccagagactccatctaagctttccttttagcattatcttctcaactgttctctactgtggtgaggttgcctttggtttatacatgtttgaaatttatcgaaaagctaatgacacattctggatgtcatttaccatcagctttattattgtgggggcaattttggatcaaattatcctgatgtttttcaacaaagacttgaggagaaataaggctgcattacttttgtggcacattcttcttttaggacctattgtgaggtgtttgcacaccattagaaattaccacaaatggttgaaaaatcttaaacaggagaaggaagagactcaagttagcatcacaaagagaaacacgatgctggaaagggagattgcattctcaatccgggataatttcatgcagcagaaggctttcaagtacatgtcagtgattcaggcttttctcggttctgttccacaattaattttgcagatgtatatcagtctcactatacgagaatggcctttgaatagagcatgctgatgacatgttccctgttatcagttacttatggggccattcgctgcaatatacgtggcatccagatcagcaatgatgatactaccatataagctaccgcgatagaattcttctggtgtcgtgatggggcagttatggaagttatctcacgtggtagtgactctggcattttcccttgcatctctgaacttgtagagctaaccgttggtaaccatatatgggag

SEQ ID NO: 367830 - DNA, 571 bp, Homo Sapiens
gtcccccaagatctggatatctggggacaagatggtggcctcaggcctgcctcccaggcagttggctgggctcccaactgtctgtcctcaatgccctaccccaactccactagtgaccctcagagtcttctccccttaggacaaggcagacaccccaccatgcgggcctcaggtggcagagaggcccagcctcaacaggcctgtggccccacacaccagtcccagcaaggtgaccacggctgccggaccccttccctgttcaggcaggcccagcccctctcagaacctgctgccagctgctggtcttggcccccaccctgaatcttactgagtccctctgggcagcagctcccttctccaccccaccccagcacccgtcccaaatgtggcctcagcttgtcctccccttccccaaactatgcattcattcagcaataaatgagcctttgctgtatgccagacccagttctaggctcttgcagccctggtagaaagcaaaacaaaaactcccgctttcccagagggtcacttggcaggggaaagaatcaggaaataaaataaataatgaaaa

SEQ ID NO: 367831 - DNA, 887 bp, Homo Sapiens
cggccccggccccggctccggcgctgctcccaccgccgcggcaacggccccggcccacggaggcggctggacggacccccgacggttggacgtacggactctgcttcgagagtaggccatggacaccttcagcaccaagagcctggctctgcaggcgcagaagaagctcctgagtaagatggcgtccaaggcagtggtggccgtgctggtggatgacaccagcagtgaggtgctggatgagctgtaccgcgccaccagggagttcacgcgcagccgcaaggaggcccagaagatgctcaagaacctggtcaaggtggccctgaagctgggactgctgctgcgtggggaccagctgggcggtgaggagctggcgctgctgcggcgcttccgccaccgggcgcgctgcctggccatgacggccgtcagcttccaccaggtggacttcaccttcgaccggcgcgtgctggccgccgggctgctcgagtgccgcgacctgctgcaccaggccgtgggtccccacctgaccgccaagtcccacggccgcatcaaccacgtgttcggccactagccgactgcgacttcctggctgcgctctacggccccgccgagccctaccgtcccacctgcgcaggatctgcgagggcctgggccggatgctggacgagggcagcctctgaaccccggcgccgccaaccggcccctcgcgccttttggggctctcctgctgggcgcgggtgggggttggggttttttccacctctttttctcccaatcggactccggcaaaatccctagaccgatgggtgacctgtctcctttgagaggatgttgaggcctctgtagcagctgtttcaacaccatgtcacctctctcctggccccgccatg

SEQ ID NO: 367832 - DNA, 948 bp, Homo Sapiens
aaggtgtctgtacggcccggattacgggatgcagagcagaccttgtccccaaggccaggccatggggtgaacatcagcaccagttccggggccgtgccaacctgcatgtgtttgaagactggtgtggcagctctatccagcagctcaggaggaacctgcatttcccactgtacccccatattcgcacaaccctgaggaagcttgctgtgtcccccaaatggaccaactatggcctccgcatctttggctacctgcacccctttactgatgggaaaatccagtttgccattgctgcagatgacaacgcggagttctggctgagcctcgatgaccaggtctcaggcctccagctgctggccagtgtgggcaagactggaaaggagtggaccgccccgggagagtttgggaaatttcggagccaaatttccaagccggtgagcctgtcagcctcccacaggtactacttcgaggtgctgcacaagcagaatgaggagggcaccgaccacgtggaagttgcatggcgacggaacgaccctggagccaagttcaccatcattgactccctctccctgtccctcttcacaaatgagacgttcctacagatggatgaggtgggccacatcccacagacagcagccagccacgtggactcctccaacgctcttcccagggatgagcagccgcccgctgacatgcttcggcctgacccccgggacaccctctatcgagtgcctctgatccccaagtcgcatctccgccacgtcctgcctgactgtccctacaaacccagctatctggtgggatggggcttcctcttgcagcgctaccaaggaatccgggtttgtccatcttgtcttttgttacccccaattgactatacccgcttgaagccacattggagaacccacaataaaatgttctaccaaggaaaagcctaataccaagacg

SEQ ID NO: 367833 - DNA, 829 bp, Homo Sapiens
ggagatgaggcgggaggacttgtgggacagtctgtggggacacggcccagatgctctggtcccagcagaagtgactggcggggaccaggatgctggagggtcagctcgaggccggggagcccaaggagggcacccacccagaagacccgtgcccgggagctggggctgccatggagaagacacctgcagcagccgaggtccccagggatggacggcaatgccgaggagatgccgtcattacagcagcagatcaccagcctccaccaagagctcgggagacagcagtcgctgtgggctgatattcacagaaaactccagagtcatatggatgccttgaggaagcagaaccgggagctccgagaagagctgagaggcctgcagcggcagcagtgggaagccgggaagaaacccgcagcgtccccacacgcggggcgagaatcacacactctggcattggaacctgcttttggaaaaatttcacctctgtcagctgatgaagagacaacacccaaatacgctggccgcaagagtcagagtgccactctcctgggacaaagatggtcatctaaccacttagctcctccaaagccaatgagtttaaagacagaaagaattaactcggggaaaacaccaccacaggaagatagagagaaaagtcctcccgggagacgtcaagacagaagtccagcacccactggaagggccgactcccggtgcaagaaagacgggaggtgtctgaagacggaaagattatggcatccatctttccggaagtccgcaaaactccgggtggccgaaaattcaccagtgcaggctttccagggccaca

SEQ ID NO: 367834 - DNA, 1184 bp, Homo Sapiens
ttggaactgtccgctgctctctggtctctggatatgaggcaggagggcttggggacaactgtggggacatggcccagatgatctgatcctggcagtagtgactgttggggaccaggatgctggcaggtcaactcgaggccaggaaccccaaggagggcacccacccagaggacccgtgcccaggagctggggctgtcatggagaagacagctgtggcagccgaggttctcacggaggactgcaacactggggagatgccaccattacagcagcagatcatcagactccaccaagagcttgggagacagaagtctctgtgggctgatgttcatggaaaactccggagtcatatagatgctttgagggagcagaacatggagctccgagaaaagctgagagctctgcagctgcagcggtggaaagccaggaagaaatctgcagcgtccccacacgcggggcaagaatcgcacactctggcattggaacctgcttttggaaaaatttcacctctgtcagctgatgaagagacaatacccaaatacgctggccacaagaatcagagtgccactctcctgggacaaagatcgtcatctaacaattcagctcctccaaagccaatgagtttaaagatagaaagaattagctcgtggaaaacaccaccacaggaaaatagagataaaaatctttccaggagacgtcaagacagaagagcaacacctactggaaggccaactccctgtgcagagagacgggggggtgtctgaagatggaaaggtggcctcggacacctgtgtcactctacactggccccttggaaaattcagattcagataaagttccacttaggtctaataaaagtactcaatttgttattcaaaatagacctagtaatttattaaactaattatgtttctatagataaaaacttgaagttcttcagacatgtctctaatgctataaaagcaaacaacttggattgggttttataaatcagttgctttcctgagctctgtagttggtatatttctgcagagtcttttaaaaaattaacccaccttgtagtatggagtgtcgggctgttgggtgagccctggggtcttgctggaaatcgaggatggctgaagatggctttgtgctcccagcctttaggctcaaggcattgcccgctccagggaccttgtgac

SEQ ID NO: 367835 - DNA, 679 bp, Homo Sapiens
agcgggcttctcggctccgttgctcccgcggcgcgaggcgctctcgctctcctcctcctccgccgtcgcgcgtcgcactggcctcggacgggcgtcggggccgagacccatgagccccaggggcacgggctgctccgccgggctgctgactgactgtcgcgctggctgctatctggcgggcctccagtccgcgcgcgggaccaacgtcagcgctgccgtccacggatgccggcctggcccacgaaggcgagggcgaggaggagaccgaaaacacacgaccagcgagaccgcggagaactacgctccgcctgaaaccgaggactgtttcacatacggaatgtcgtcaaagacacgtacgaacttcggaactgtgcaaccagttaaacatgtggtattgcgtgttcgacgaagttactattacacaacatggcatgccctggtggtagaatccaaagtggttgtacgctacggcgtacgaagcaatgccagtggaccaaccacgacttggatgcgccttgccgtgctaacaccaccaagtatttcacctaccaagatccttggagaagcctgcgtaacccactttgcggccatgctcatttacacccacatttcttccccattaagactccgcgtttcaacccactctgctgcgcccaacttgctaacgaacaagaaccca

SEQ ID NO: 367836 - DNA, 849 bp, Homo Sapiens
ggcggctacgggcggggtgtcgcagctctcttcgacgtacctgtcctcaggagccgcggcggcgactgcgcctcggacggccgtcggggccgagaaccatgagccccagggcacgggctgctccgccgggctgctgatgactgtcggctggctgcttctggcgggcctccagtccgcgcgcgggaccaacgtcaccgctgccgtccaggatgccggcctggcccacgaaggcgagggcgaggaggagaccgaaaacaacgacagcgagaccgcggagaactacgctccgcctgaaaccgaggatgtttcaaataggaatgtcgtcaaagaagtagaattcggaatgtgcaccgttacatgtggtattggtgttagagaagttatattaacaaatggatgccctggtggtgaatccaagtgtgttgtacgggtagaagaatgccgtggaccaacagattgtggctggggtaaaccaatttcagaaagtcttgaaagtgttagattggcatgtattcacacatctcccttaaatcgtttcaaatatatgtggaaacttctaagacaagaccaacaatccattatacttgtaaatgattcagcaatcctagaagtacgcaaggaaagtcaccccttggctttcgagtgtgacacactggataatactgaaatagtagcaactattaaattcacagtctatacgagcagtgaattgcagatgagaagatcaagcctaccagccactgatgcagccctaatttttgtgctgaccataggagtcattatctgggtattataattttcttaatggatcttcataaccataaattgcgcagcagtcaaggcttctgg

SEQ ID NO: 367837 - DNA, 787 bp, Homo Sapiens
  misc_feature (256)..(256): n is a, c, g, or t
  misc_feature (270)..(270): n is a, c, g, or t
  misc_feature (284)..(284): n is a, c, g, or t
  misc_feature (307)..(308): n is a, c, g, or t
  misc_feature (352)..(352): n is a, c, g, or t
  misc_feature (647)..(692): n is a, c, g, or t
ccagctgatgaggctcccgcaggagctcatcgtctcctgggctcacctggagaccggtatctttcctcccggccaccaccccaggcgggtcctagggctacaggacaacccctgggcatgtgactgccgactctatgacctggttcatcttttggatggctgggccccaaacttggccttcattgagactgaactgagatgtgccagcccacgtagcctggccggagtggccttcagccagcttgaactgaggaangtgccagggcccangagctccatccagngagtgggcccagcatcaaggtcnnccttttgcggtgggcaacaagcaatttggcctaacggccttggntggggaaggcctaccctgggggaggcttccccccttggggtgggcccccccggaacgcacctggaagccctggggaagcggaacgcgcggccacaaaatgtggggccaagggtccccccccgttttaaaaccgggggttaaccaacggcttgggcaacacccccaacggcgggcccacacacggggtttccactttaaccacaccaaaggctttggggaaacaccggggggtccaaacccggggaaaaggagcgcctcttgtggggtggtaaaaccacttttatcactatgtgannnnnnnnnnnnnnnnnnnnnnnnnnnnnnnnnnnnnnnnnnnnnnttggtggccacacagagggcttgagtgtattccccacccaaaagacccgcttttttgggggcaagccctttttcccccggggggaacccgcgaac

SEQ ID NO: 367838 - DNA, 671 bp, Homo Sapiens
cagaaatactaacatagctaaataaccctgcctgcctttgaagagcttatgattttgtatcagaagatgaagtaggcacaagtgatatctgttgtaagaaagatgcaggaaggtactgtgggggattaatggaaggagagattacattttttcgggtagaagaagtgaaaaagcaccaacactgtttagcatttagctcctctggaccccaaagccagacttactacatttgctttgatactttcacagaatacttaaggtggctgcgacaagtctccaagcatctagggagagtagactagaatctcgctccatttgggaatatatgcctacagggaatttgacatggataaggatgattgttacaagctccttcagcttccagtttcccccttcaattgtcatctgctcttcttcctatgttgcatcccagcgcattagctcagtggacctctcgtgatgtagccctggaacatctgccttgccaacctcttctacagccaaagacctcactcatctcaatataaaacaaaaattcctaaggcagaaccctagccttccagctgccagggggctatactgaacctgcaaaggttcacaagttgaacgagtcttaagcgttacagtaatcatttaggggacttcccactggcagtctgaagtattccaac

SEQ ID NO: 367839 - DNA, 427 bp, Homo Sapiens
ctgcctcatccgctctatgcaggaaaacctcacagcacgggtagctctgaacggattcagctctcaggaatgtataatgtccgtaaaggcaagatgcagttgccagtgaaccgatggacaagacgccaagtcatcctatgtgggacctgcctgatagtatcatctgtgaaagacagcttgaccggaaagatgcatgttctgccactaattggtggaaaagtagaagaagtgaaaaagcaccaacactgtttagcatttagctcctctggaccccaaagccagacttactacatttgctttgatactttcacagaatacttaaggtggctgcgacaagtctccaaggttgcatcccagcgcattagctcagtggacctctcgtgttgtagcctggaacatctgcctgccaacctcttctacagccaag

SEQ ID NO: 367840 - DNA, 698 bp, Homo Sapiens
gacccctgccagggaaggggtcctcagacttgaggttgccagctcagatgtggggctgctgatactaggtgactggactgatgttctgttctagatgaaactccttgaggggaccatttgaaaaggcttgatgtgctgcccaaagcccccttcagagctgacttctccacccccagctgccgtgagccttggctgctgacagctcatagctgagtccctcccgtgaagtcaccttctgctgaagggtacatcctctcccaaggcgaagctggtccgttacatttgtaagcagaggcagtgcaagctgagcgtggctcccggtgagaggaccccagagctcaacagctacccccgcttcagcgactggctgtacactttcaacgtgaggccggaggtggtgcaggaggggagcacaaggaggactccagttggagttcattggatgcgcggcgggaaagtggctcagggccttccacggacaccctctcagcagccagcctgccctggcccccagggagctcccagctgggcagagcaggcaacagcgcccagggcccacgctccatctccgtgtcagctcttcccgcctcagactcccccacccccagcttcagtgagggcctctcagacacctgtattcccctgcacgccagcggcgggtgaccccccgtggccctgacagcttcattcaccgaccc

SEQ ID NO: 367841 - DNA, 829 bp, Homo Sapiens
aaaaaggaaaaaagccaagtcctcagtttccaagaagccgggagaagtggatgacagtttggagcagccctgtggtttgggctgcttagtcagcacctgctgtgagtgttgcaataacattcgctgcttcatgattttctactgcatcctgctcatatgtcaaggtgtggtgtttggtcttatagatgtcagcattggcgattttcagaaggaatatcaactgaaaaccattgagaagttggcattggaaaagagtattgcagaatgtacatcaatgattggatatgctctgggttatgtgctaggagcaccactagttaaagtccctgagaatactacttctgcaacaaacactacagtcaataatggtagtccagaatggctatggacttggtggattaattttctttttgccgctgtcgttgcatggtgtacattaataccattgtcatgctttccaaacaatatgccaggttcaacacggataaaagctaggaaacgtaaacagcttcatttttttgacagcagacttaaagatctgaaacttggaactaatatcaaggatttatgtgctgctctttggattctgatgaagaatccagtgctcatatgcctagctctgtcaaaagctacagaatatttagttattattggagcttctgaatttttgcctatatatttagaaaatcagtttatattaacacccactgtggcaactacacttgcaggacttgttttaattccaggaggtgcacttggccagcttctggggaggtgtcattgtttccacattagaaatgtcttgttaaagccttatgagcatttctaa

SEQ ID NO: 367842 - DNA, 1038 bp, Homo Sapiens
ggaccggtccggaatttccgggatgcttgggcggcaagagccccttgtggccaccgagtcctccgacgccctcggccaggctggcctttgggttggcccaggcaggacgggcagccgagagcactcgggccgcgtcgccaggagccgcccagggtgagccatgttcgtaggcgtcgcccggcactctgggagccaggatgaagtctcaaggggagtagagccgctggaggccgcgcgggcccagcctgctaaggacaggagggccaagggaaccccgaagtcctcgaagcccgggaaaaaacaccggtatctgagactacttccagaggccttgataaggttcggcggtttccgaaaaaggaaaaaagccaagtcctcagtttccaagaagccgggagaagtggatgacagtttggagcagccctgtggtttgggctgcttagtcagcacctgctgtgagtgttgcaataacattcgctgcttcatgattttctactgcatcctgctcatatgtcaaggtgtggtgtatggtcttatagatgtcagcattggcgattttcagaaggaatatcaactgaaaaccattgagaagttggcattggaaaagagttacgatatttcatctggcctggtagcaatatttatagcattctatggagacagaaaaaaagtaatatgggttgtagcttcctcctttttaataggacttggatcacttttatgtgcttttccatccattaatgaagaaaataaacaaagtaaggtaggaattgaagatatttgcgaagaaataaaggttgtcagtggttgccagagcagtggtatatcattccaatcaaaatacctggtctttcttcatccttgggcagactgtgccagggaatagcaggaatgcctctttatatccttgggataacctttattgatgaggatgttgctacacactcgccggggatctatttaggattgcagaatggacctccaggattgggaatgctctgggttatgggcctagggacccccctagttaaagcccct

SEQ ID NO: 367843 - DNA, 636 bp, Homo Sapiens
  misc_feature (253)..(279): n is a, c, g, or t
  misc_feature (478)..(478): n is a, c, g, or t
gatgcgcgccggcggcggatccgcagttaaaatggtccgtagtcgggacccggcctttccccggccgctccgctgactgactgagccggctggccgggcccggactggtcgcctagccggcaggctcgctcgctccctccctcgcgtccccaaagctcgcgcccatcgttctcccggcttccctgggcaaagcatgtagcccccgtcgggcactccggcggcccgcagctgacgcccaccccccaccgtcgcnnnnnnnnnnnnnnnnnnnnnnnnnnncgcaggaagggcgacccctccgggggccgagccagcgagcggcctgccccgctgccgggagccctgcctctctgggtctccctccctcccgtcccggtccccctcctcggggccttctatatgggccaccttctctcgaaggagccgcgtaaccgcccgagccagaagaggcctcgctgttgcagttggtgccgccgcncggcgccctctcctcaggctgacccgccggaccccagccaaggtgccccctcagccggcggcgcccggagccggggactgcttcttccgcgggccctgcaatgctctgcttcatcgtgcacagtcccggcgcgcccgccccgccggcccagaggagga

SEQ ID NO: 367844 - DNA, 726 bp, Homo Sapiens
gatccgggagctgcttctccccacactccgcccctgccgcctccccgagcttcagcctctcctgtaaagagcagagatggagaggaagcgacagtcacaacttccggttagcgtggcggaggctctcggagtctttgggacctcagcaccgggataccgggagactccctcgtgtccccatgtgggccacctaccagacagaagagacaggcttggaattcaaaactctgacagactctccatcccatgcaaattccatctctttgtgactgtgctcttctctttggttcatgccacatcattgcaaagttaaatgaggttctaggtagcacagggcgtggagtttgctgaaggatcactcacacaagcggctgcccactgttcctggctcagtgctcaccactgcacgtcacaaggagcggcaccatggctcccgtaacaggaaaaccctgcatttgctactcccggctgcacgagagtggagggaggcttggacctttccaccacccccttccctttgttgccagctactcttacccactagtctactcaagtcacctcagcagacacccaagacccaaactgagaggcgctgctggtggtgcggagagcgacacagtccaaaataagacgcggagcccgagctgtcaggctgtgagtgacagccgggctcccagggctgactgacaagttctctcccttcttgtggcagccatgtgcgagccc

SEQ ID NO: 367845 - DNA, 590 bp, Homo Sapiens
gagaaatatctgccccatttagatctctggggccactgatgggatgccctgggaagatccttggctgccgctttctctccccacagcctcaaggccaccctacggtcatatatatcactcaggcgtagaagaaaagacacatattttataaaatctttttaataaaaggaagttccaagaagaatttttaagaactacctctaggtgtgcctccacgctggccctagctttcccattgctgttccattgctgagacaaactggaaggctccctttctgtttgaagttttatgacttgtagtcaggctttgctgttcgtcacagtgtcattttccattcaggtaccatcacctggtcccatcaacaggtctagtatgtagctcactgataacagaggaagatgtgtctcctcccaccctcttcctaatggtcattatgcctttctccatctattgtctctttcaccccttcccctctcccttgggctctgatgaaaaattgttgactgcagtttcggaagtttgatctggagaaccaaccatagaatgtttcaagttctagggacaataaaacccagtttgatttaaaggc

SEQ ID NO: 367846 - DNA, 904 bp, Homo Sapiens
ccggcgccggcggcgggtgcccggcggtctttgctgccgcccgggggcgcagaggccgggccttttctttcagcacaaacgtcagtttgtaaaagggaggtgctggagtctgaggagttttcaggcttccgtctcgaaggaagtctggcaggctcggaattgtcatcttcctcaggcaaatagtttttcaccttagagccagcaaggccaaaccgcccagtcacccgacttcccacagtctcagcaggtacacagggcggggagcctcgggagcggctcccttagcaggacctgagggtttcgggagagtcctggctttgcacttagttttcccgctgcctggctgcctccgtggcggttgtgctgctttttatgcaggatgtaggatcgaaggcaaatcatcctttccctacgtcccctgccaacccctgccgctctcctctattttgtacactttatcattaacaggatttgaaatgaatggacggaataagtttttttcatctgtaatttggaagccaagtcagtaacaaaatgaaaccagtaaagcatctgttgaccaccagtaacaaatcggcaaatgttccagcattaactactaaaaaaggactacataatttaccattatcacctgagctaaaggaaaaacataatgcaaaattaattcatgataaaattgaaccaatggtcctaagatctccaacaacaggagaatccattttacggtatgctttgcccattccatcgagtgaagacaaagaacttactacccagaagatgaaatgatcgggaacacattcttcgaaaccatctgaagatgggtttgtttccacctttggaaggaaacctatgtggacattggcgattcagaatggcggaagaaccctttggtaagcatgaacct

SEQ ID NO: 367847 - DNA, 1737 bp, Homo Sapiens
  misc_feature (1122)..(1122): n is a, c, g, or t
gcgacgccggcggcgcaaggcgtcgtggcgtcgggcgcctgggacgtggcttcaacggccccatccggcgccggcggcgggtgcccggcggtctttgctgccgcccgggggcgcagaggccgggccttttctttcagcacaaacgtcagtttgtaaaagggaggtgctggagtctgaggagttttcaggcttccgtctcgaaggaagtctggcaggctcggaagtgtcatcttcctcaggcaaatagtttttcaccttagagccagcaaggccaaaccgcccagtcacccgacttcccacagtctcagcagggaggaataagtttttttcatctgtaatttggaagccaagtcagtaacaaaatgaaaccagtaaagcatctgttgaccaccagtaacaaatcggcaaatgttccagcattaactactaaaaaaggactacataatttaccattatcacctgagctaaaggaaaaacataatgcaaaattaattcatgataaaattgaaccaatggtcctaagatctccaccaacaggagaatccattttacggtatgctttgcccattccatcgagtaagacaaagaacttactaccagaagatgaaatgatcggaaaaattatcaaacatctgaagatggttgtttccactttggaagaaacctatggacattgcgatcagaatggagaagaaccatttgtaaagcatgaacatgaagaattatctttatctgttggggatgatatgaattcattcttgacatattgttcgcaatttgcagctcagctagaagaagcacttaaagaagaacaaaatattttggaatctctttttaagtggtttcagtggcaggtcaatcagatggaagaaataagtaaagatcaaactcttttacaagcagagcctccaaaacctgacaaaacagtcattttaaataatgcagaaatagtaaggcttgtacaacagattgaaagaactgaagaattcgccttaaacagaggtctaaatcctccgtgaaagtcatgttgtctaaaactatggataaagaacaatcgaccagaagcagtgaaaagttgtgaagctctggcacagaaaattgaagaaattcttagaagcccanctcaactgatgaatttaaagatgtttctgcaacagaaacacaaactgctcaatcaatgactaatcgatttaatgccatgttgaaagtatttgaaaacccaggcaaattatgttggaggagaaaactaagcctacaaataatcgaacaaagaaagctcgttgaaaacagtgaagaaaaaacgacaaaggaaaatctgaggacttcagaaaagaagatgtctccagaaaaagagtttaaaataaaagaagatttggatcaagtacagaaagtagcacgtctggaaattgagaacaaagtccttcaggagccaattgatacaggctttacaggaagctgaaaaagctaagcatcaacttaactatttcctaaatcaagagaagttacttaaaagtgaggggaaaaactgagacaacaatgcaagtgggtaatagtcaaacaaaagttaaaggtgaagattcaaaaaatataccattctggagaaagacaatcaagaaaatcactggtttcagacttcaggtggacaaagaacaacgtgataaaatccaagaatatccacagatgctaatagagtttctgaaatactatggaaaagtctcccaaaccttcagagagtga

SEQ ID NO: 367848 - DNA, 867 bp, Homo Sapiens
accagtagttctgcagtggggatctgcacttctgggcttcagcacacatcagtgtggttcacgtgtttcctgctgttatgaaagagattggagaggtgaggcagagacttatgaagggccagggttcttccaggacatggggtttcactcttccttctccccattcagagttgcttgtgagtgaagactgcctagactggacttaccttcccgccctctttgaccaaagtctcttgggatctctctctctgggtcagaaactggaagtgagtccacacttccattgtagcccgtccagactgctgtggactggcagtgcactgggacgtacagagctgccgtgggcacgtcaggttggtggctggggataggaggagaaagaaaacttggagctaacttgaacttcacctagctggaaaatgtgcaatttaattttagccccacctggtgaagtcctgtgtcttttcggagcctcattttctccatctgtgaaagaagataaattagtagtgtctccgaacaccttactgggtatttgtgaagaccagactaatttaccagatgtgagaatgcttgacatggacttgtgttagttatctcttgctgcacaacaaatcaccccaaaacttagtgggcttaagacaacatttactatctcacagtttctgtgagttgggaataccggtggagtgctggtgatttttctgtcccaggtctctcacaggctgcaatcaaggtgttgcttggagtctctagtctcatctcaaagctcgaccagagaaggaacccattcacattggcaggatccagctactctggagctgttggcaagaggccactctgagttccttgccctgtggacctctc

SEQ ID NO: 367849 - DNA, 791 bp, Homo Sapiens
cgacggacgggtaggggaggcgaccccggcgttctgctccgcactgtggaggaggtggggaggtgttgggccagggctgaggtaggagggagtctgtccctcgacgcctcctgcgacgccagcccctgagcgatgatgcgaacgtgcgtcctactctccgcggtgctctggtgcctcacaggagcctatcgggaacctgattattcatatcagatggctgtacgttttaccacaaggtcttgtatagggagatacaatgatgtattctttagagtgctgaagaaaatcttggatagtctaatttctgatttgtcatgccatgtcatagagccatcatataaatgccattctgttgaaattccagaacatggcctcatacatgagctatttatagcatttcaagttaatccttttgcgccggggtggaaaggtgcttgcaatggatctgttgactgtgaagataccactaatcataatatcctccaggcaagagatcgaatagaagacttttttcggagccaagcatatattttctaccataactttaataaaactctaccagcaatgcattttgtggaccacagtttgcaagtagtacgtctgggatagctgtcgaccaggctttggaaaaaatgaacgtctacacagtaattgcgctagcttgttgtgtggttgtagtcctgcgacttttagtcctgatgttaatgtaacttgtcagacctgcgtttccgtccttacctatggagctaaatctggcccaaagatttcaacaaaaatcaggcaactatgag

SEQ ID NO: 367850 - DNA, 857 bp, Homo Sapiens
cccgccgttgcgacggacgggtaggggaggcgaccccggcgttctgctccgcactgggaggaggtggggaggtgttgggccaggctgaggtaggagggagtctgtccctcgacgcctcctgcgacgccagcccctgagcgatgatgcgaacgtgcgtcctactctccgcggtgctctggtgcctcacaggagacaaaatatatgtagagttacatcaaaatagtccagtccttatctgtatggattttaagctttctaaaaaagaaatagtggaccccacctacttatggattgggcctaatgaaaagacgttaacaggaaataatagaataaatataactgaaactggacagctgatggtgaaagattttttggagcctttgtctggactttacacatgtactctttcttataagactgttaaagcagaaactcaagaagaaaaaacagtcaaaaagagatatgactttatggtctttgcctatcgggaacctgattattcatatcagatggctgtacgttttaccacaaggtcttgtatagggagatacaatgatgtattctttagagtgctgaagaaaatcttggatagtctaatttctgatttgtcatgccatgtcatagagccatcatataaatgccattctgttgaaattccagaacatggcctcatacatgagctatttatagcatttcaagttaatccttttgcgccggggtggaaaggtgcttgcaatggatctgtagactgtgaagataccactaatcataatatcctccaggcaaggagatcgaatagaagactttttcggagccaagacatatattttcctaccaataactttattaaatcttaa

SEQ ID NO: 367851 - DNA, 567 bp, Homo Sapiens
cggagagccggcggatccggactccgccgccgctctccgcggcacctgcggcacgtcgccggctccaggcgccgcgcactgagcggcggcatggaggctctcaccactcagctggggccggggcgcgagggcagttcctcgcccaaactccaagcaggagctgcagccgtactcgggctccagcgctctcaaacccaaccaggtgggcgagacgtcgctgtacggggtgcccattgtgtcgctggtcatcgacggccaggagcgcctatgcctggcgcagatctccaacaccctcctcaagaactacagctataatgagatccacaaccgccgcgtggccctgggcatcacgtgcgtgcagtgcacgccggtacagctggagattctgcgtcgggccggggccatgcccatctcgttcgcgccgctgcggctatgatcactaagccgagaggccgaacgcctgtgcaagtcgttcctgggcgagcacaaaccacccaagctgcccgagaacttcgccttcgatgtggtgcaccgagtgcgcgtggggctcgcgtggtagcttatccc

SEQ ID NO: 367852 - DNA, 856 bp, Homo Sapiens
gtccggagtccgggcgttctggcagcaccagagtccctgcagcagagacgggctgggctggcactcacccacgaccccccttccctgctatgatggtttgtcagtagcaggtcctagacaccccccgcccgctcccggggcacgtgggcagagctagcagcagccaggtgcacggagccacaagagctctagggcactctgggggcagctgtgcctgctgccctctctggtgcctgtggagatgcctaactgacaggagagttagtgaggacaagaacgctcccttttggccgaggtccgctgtatccatggctctcctgaccaatctactgcccctgtgctgcttggcacttctggcgctgccagcccagagctgcgggccgggccgggggccggttggccggcgccgctatgcgcgcaagcagctcgtgccgctactctacaagcaatttgtgcccggcgtgccagagcggaccctgggcgccagtgggccagcggaggggagggtggcaaggggctccgagcgcttccgggacctcgtgcccaactacaaccccgacatcatcttcaaggatgaggagaacagtggagccgaccgcctgatgaccgagcgttgtaaggagcgggtgaacgctttggccattgccgtgatgaacattgtggcccggagtgcgcctacgagtgactgagggctgggacgaggacggccaccacgctcaggattcactccactacgaaggccgtgcttaggacatcactacgtctgaccgcgaccgcaacaagtatgggtggctggcgcgcctcgcagtggaaagcggttcgactgggtctactacgagtccgcaagcacgtcacg

SEQ ID NO: 367853 - DNA, 815 bp, Homo Sapiens
gacaaagtcatgccagtccttccatactggcagttttaatttttacgaaaccacattcttcacgatgcctgatgctgtgcagaagagcgtagtctagaagaaagaacacggattttggagacaggcattcctctcaaccccaaacctgccatctcctagccatgtaactttggacaaggggcaatagaaagacaactaaagaaggatccaacgatttgaaattccagaacttcagtctgccaaaaaacaggtcatggcctcgcatcaatagtgccacaggccagtaccagaggatgaacaagcctcttctagactgggaaagaaactttgctgcagtcctggatggagcaaaaggccacagtgatgatgactatgatgaccctgagcttcggatggaagagacatggcagtcgattaaaattttaccagcccggcctataaaggaatctgaatatgcagatacacactatttcaaggttgcaatggacactccccttccgttagacaccaggacctctatctccattggacagccgacctggaacacacagacgaggttggaaagagtggacaaacccatttccaaggacgtcagaagccaaaacattaacaggagatgcatccgtaagaaagaacaagattcctttaccacctcctcggcctctcataacacttccgaagaagtaccaacccttgccccctgagccggagagcagcaggccacctttatctcagagacacacctttccagaagtccagagaatgcccagtcagataagcttaagggacttaagtgagccataaaatagggatgg

SEQ ID NO: 367854 - DNA, 714 bp, Homo Sapiens
tgggtttgatgaggctctgggagatgggccacagccagggacccagtcaaggagacgctcctggaaggtcgcggacccttgtattccacagaagtaagttcttgcactgctcgaactacggagaatcttgatggcatatctcaggatgcaatcttgagcactgttgatgccgttgccccgcgcacagggagcggaagccgccctcctggaccatgctctgtagcccccccagcaggttggtgaagttcgtcttggaggagtagacctgcatgtacaccttggctctgtccagaggtgccgtgcccgtgcgagacaccgccccggccatagctcctgagagtagaaacttccacaaggcctccttgttatccacttccaggacttccacggggaccatcagctgctctcctgtgtccagtacctgctgtgacgggagatgttcaaggttgttgtcatgcatgtggccaaacgcgtacccatacacgtgtgcacagccagggttccaggatgggggtggaggcggaggttgggggggaggcggggctttgatgagtaaggtcttgaccctcctaaacagtgtctggatcctagagcaagtgttctgaggttccccaggctgagcgcccatggaggaagttaggacacctggcttcaaatccctaagcagttgtttgctgctccagctaccatgcgggagtgtctagtgggaggatt

SEQ ID NO: 367855 - DNA, 769 bp, Homo Sapiens
tcacgcccctcacgccgctatctctgtgcagccgactgaggatccctagtcgcataaggctgtggcctggcctgttggcgtccctggcagttgttgggttctggcggttgttgggtccctggcagttgttggcggttgttgggttccttcattgaaactgcactaactgggcttccagtcagcgtcagtcagcggatccttgggccgtggggcagccgcaggtcggttaggccaccagggcggctctcgtgccagtgaggcccctgagagccctttggtcagacagaggctaaatctgaacagtcaggcggtgagattaagcatagtcagggagttcgccaggagccagcgttcctcagcctccaccacgtcagtcacctggtcagccagagggcagctggggcgacatccatctgccaagaaggtgaacaggccttcacgatgaccagagacagaagcccctgacttggctaaagatacttctgctctccccatccccacatcctctttcagttacgcatcacctcactccttctgaaccatatggttctgatgtcagagccagtgtagtaaagagcttctgctgttcctgagaactgttgctgctggaagtgatgcttccactgctacagctgggtaagtaaggaaagagttctttggctgcccaggccttcgtgaaagggctgatccagggtgctatctatgcggggaattgtaattgcgccgctcttcctctgcttctccctctcatagtgaaacatatcagaag

SEQ ID NO: 367856 - DNA, 928 bp, Homo Sapiens
ctctcctgggccgtttcatctcaccgagagcgagatccgctttcctagaggctgggaggaccaggcccgggcacaggactggcttcgcaccactggccccgcagtcgggtccccggggacgcgccacgggtcactgctgcctgctaaagcgacacaaggcgccttcattcctcaggccgaggcggccgaacgccttggctctggccgacagtgagcacccactgcgagtccgcacacactgcagcgcccccgggcacgccccgcagtccgcccagcgtcccccggggcggggcacagccagaggacggcccgagagccctgctgtccccgtcagcgccgcaggagggcgcgccttccccgctgggccgaggcctttgccgggccctctactgtacgccggtcctagggctgggaccgccgtcctggaccgacctcagcccactgttctgcggaggccgcgtgttgggcgacagcagccacccagcccggaagcagccgttccgagcgcaggggcgccaaagagccccgcgccccgcctgtgcgccggccctgagacttggaacgatggtgcaggcaggaggggtcaccggtaggggatgccactggagggactgggccgtccacacggaccagctgacacactaagtgctgggtacccagcaggacaattggcaagggctgctcagactgcgttttaaaatcgcctcaccacgaaaagacagaaagtacgggaaggggtaccttgctgtggccaaggccgccctcgctggagttcagcttggcatttcccacgacttccacgaagtccccgaaagggcttggtcagagccccagcggacccttcgccctggaaagtgccctgggttctcctcaagagcccttattgggacagaagatcagattaaccgggccaacaaactccaccaat

SEQ ID NO: 367857 - DNA, 844 bp, Homo Sapiens
cataatttaaggctctaagaaggtggctgcacttggatctcttacaaagcatcatattttcaatgaggagaccattgaagtgatgtcacgtggctgttcatctgacctgagggaagaatgaaaaggaagcccctgcccctccaatggagcctgaagtccccgagatgtctcaaagcaaaactgaacatatgaaaactccagaagaggagctgcagccagaaagctctcctgctgaaacttcagcctgcaaagatcctctgaaacctttaaagatcaggccagtctcccagcccttcgtgaatccagctgtgaagaacaaggctgaggaatgtgagacgtggatagacaggttcaggaagctggaaaatgccctctacctgtgtgatctgagtaacacaggagttctggagaaggaacgagccagacgcctcattcacaactacaatctcatttacaacctgtccctgagccctcagaaaatcgaccaggccttgcgcagattccgttcgggagaaaatatgctcttggagccagcactgcggtacttaaaggagctatgataacaagcccatattgtgagaacagatgtatcccttatctccctttttacccagacacatgttactccccagcctaagatgtagatggcggaggcattgtcaagagtggaggccgatgcagctattgtagatgcttgtgattcggacttagattactgggctatgatgctcactcataagcagttcaaagtgatcagaggaaacctagttttatcttttgatgtggcaagaacccagctacttagaatctccttctgttttaataaaacttattattaatatta

SEQ ID NO: 367858 - DNA, 884 bp, Homo Sapiens
gggcacttctaggtgtaatgtcgtccagacgcattctaagtaaaaggtaggcaattgttgacagaccaggaaaggtgaaatagatgacatgatgtaatggttcacccacgcatgtgcattctcccccacgttcaatgatgactgtcacataggactcctttctgaagtcgagtgcaaaatttccaatgccttttcaggttgcttatcatcaccgcgacttatattttccgtcccctggtgagacatgggaaatactttactgcccgtaccttgatagttgtagatgatcaccccatttgctcccttctctgctgccacgttgattttatgtgtaaaagtacagcctccacgttcgatgagggccagccatgagtctgcctgtttgggcctgctgaaattggtcaaaggatgacaggcattctgattccatccttcaggaagtgccaccacaccagacaccctttccagaggagaatgattcccgaacactccactctctcctaattccgatgtgatctcatttccaacctgaaatgttatattcaggtgagctgtccaaatggcttttccgtttgagtcaggaaagctaagtagtagaaagatactaagcctcaaaagtccagatgaaacagaactatgcgtcgaaggggtaattctaaggaagctcatgcctccatttgtctattaagagacaacatgagaaaacaaacaacatcagttgtagaagaacataaagaagatagcttgttggcggcagattactaaagcacataaatggaaaaggtctccctggatcaaagctatcttgctccttccagtattttaatatttagtagattatctttctcataatgaaacaaaataacaagacttgtgattggtac

SEQ ID NO: 367859 - DNA, 1164 bp, Homo Sapiens
ggtgtccattgtaccagctgggccatggatccctcccgcctgaaatctgactccacctgccaagagtctgagcctgcaggcctagatttcgactctgctggccaagattatttctctgcagcccaataattcgactctttctaccaagaattggacctggactctcttaacgaagatcttctttcccagtccatgccacatgccaggacagagacctctgtgggcacatatgaatcccactcgacttctgaactggaggatctgacagagcccgagcaaagagagctcaaaaccaaactcactaaattggaggctgaaattgtaaccctacgccacgtactagcagccaaagagagacgctgtggggaactcaagaggaagttaggcctcaccgccttggtagggctgagacagaatctgtccaagagctggcttgatgttcaggtctccaacacctatgtgaaacagaagacatcagctgctctgtccaccatgggcactctcatctgcaggaagcttggaggcgtgaagaagtcggccacactcagatcttttgaaggattgatcttcaataaatacacgttaaatcaaggaaggaattaacatcatatacttcagacatcaaatatggaatccaagagactatcaacaacatgaacttgttcaacaaagttcctttctgcttttaaacaaaaatatcgtgttaattcaaagcccatctgagacccttactctagtatcaagaaactgtcccaggtttctgaaaaggcatagaattacgacatccgtatgtggccctctaagaaaacaacttagaactttcaaatcattactaattcaactggagtcctaaaaatagaagctgtgttgcccaggagaattacacaggaagtcccctgaaagaaaaaggcgtggttcacaacactggcctagaggaacagcacaaggacaaggagccttgcaggcaagaacagcagaagtcttaagaaggcacccagggcagaaaagttggcccgcgacagacaagagcacatcataagcagtcgccgaacaaaatgagcacggacccgcaggcccacacgcacacggctaccaacagcgcacatactaagcgagcacaacagcgggctgcaaaagagaggcgacacagagtgtcaataccag

SEQ ID NO: 367860 - DNA, 957 bp, Homo Sapiens
ggaggcggagaggcagcatccaccagcccgctccccgcctccaggacagagcctcaggtctgcatgggggtgacaggtgcccatggatttccatgctgcggcaaagggtcagtggaggttgcagagatgcgagatgacttaagtcaacaccagatacaagaggaacaggagctggaggcagacatgctagagcagaagccccaactccaagtggacctggacctggacccagacccagacccagacccagaactggagatcggacaggtgccggctttactggagtcagagctatacccagccctcaagcttgaagctgagctggacacggaagccaactcgaacgaggagtctgactttgaagaacccatgcagctggtatgcaagatagagtccgtccactccaacatggggctgcccacgccacagaccttcagaccgtggagtctgaattcaaactgccggagtttcacggaggagaaccacatgtctgcctgccatcactccatcagtgcgcagacctccaagcacctcttctgggcaaacaagctcatccaggcctcagagcacagcctgcagcgggccatcaacatgcagctcaacaatggcagcgcaggccagcccatcagatccccgctccgggaggccatccccaccaacgccctgtgctccgaggagcagctccagatccctgatgcccactcagctcctccaagcaaaagctcccaggcaaccaagccccctcctgtcctcagaatctcccggcacccattgagctgaacagagctaatccactttgcatcttccctggccatggactccatccagcagggatggacctgccccaggttggaacacattgatgaaagctcaaccccaggaggctctggagcttccaagagccctcttgacactggtgaagacgagaacagaaatcggcagagacctgcaagaaac

SEQ ID NO: 367861 - DNA, 914 bp, Homo Sapiens
tggaaggaagaggatgcactttgacggggagtagaagagttagttctggtgaaagaaagtaggggaacttgggagagagggagaatagggatgtggagcaaagtcagaatttgagtcacaagagccgaattggaagccaggagagggggatgctggtggaggggaggagggacgacgggactgagtggaagagaacggtggttgagagggagggaggccctgatggggagagagaggctgtaggttgtgaggagaggagtccacaagttgtgagaagccccaagtggggcgcccagggagcactgaggtctgtggcagcacctggtccttgttttgaggcaacatcgccttgaatccagaaggaactggggcaacaagactagggataagagacctggcagagtcaggaccagtatctctgaggtcagctgtgcctgagaaatcaaggccaccttctgtgcgcagagcgtggctccagcctggtgtgggtgcaggtgctggtggcaggccaaggggatacccagccctccagcaccaggctctcagggtgttcaggcatgagcatgaatctaagcttggcttctcacttctttgcagtcaaccattgatgagggatgtgtggggatggagaatcacagctgcatcttgggagtggaggggcagcagcgattatctgggtggggcagagaggaagacaaagcccataggaccaatgagaactcctctgggctgtgtttcacaggcacttcagcgttgagaggaccttattatacccagcagcagaaggaatggggccagctggtaaaagcctctgggagactgggactttgtctaaggggtggcaccaggttcgccgaccccaatgggagctgggggccccattccctgagttcagatcccgggaattccggacc

SEQ ID NO: 367862 - DNA, 1104 bp, Homo Sapiens
  misc_feature (887)..(887): n is a, c, g, or t
  misc_feature (901)..(901): n is a, c, g, or t
  misc_feature (965)..(974): n is a, c, g, or t
ggagaggcaggacgcgcaaaggcccgaaagaggagctgggcggggtggggggaaggcggaggcagtctagtaatgtaaagctccgctgagagggagagtgctgaagaaggggacagcctctgtacctgcggcgcggcccgaggggcggacgcgagcggactgacgcgctggaggctgtttatagcgctgtcaggacagcgcggggagtggaggcagaggcctgagagctccccggattatggtgcactgagaaggcatctggaagcctgggccctcatggcatccaacgataaaggcatggcaccctcgctgggctctccctgggcctcccagatggggccctgggatgccatcctcaaggctgtcaaagaccagctcccgtctctggactcagactcccctttgtcggactatggggaagaggagctgttcatcttccagcgaaaccaaacctccctgattccagacctgtcggaggagctggctgaagatcctgccgatggcgacaagtccagggcctgggtcgctgcagctgaagagtcccttcccgagccagttctggtgcctgcagaattggccacagaacctgggtgcagacagaacacaaggacaaaggatgcatcctctcaggaaggaagagaccctggcaggccttttgaaagctctggtgaaggtcagcgctcttcttgggatggccgaggagcccccaaggtggctggaaggcgaccttggaagcctgtcttacaacaccaaaggatcccagggtcctccctgtggacccacaggccgaagccaatctctcctggccatgaagagacccaaaggcagagcccctcagcactgcctcacaagaatcttgtgaccgccgggccctccaacaggagaanaaagaagatgatanagacggacatccctccagaaagtcacccggggatgcctgcgggcccgaccacagggaacaaaannnnnnnnnnaaaggaggcgccctgccacccctgcgggattcagctccccgatcccaaatggcccctccggggagactccggagagggacccccgggggctcttccctcacgaaacttgaaaaccggggggaattttgta

SEQ ID NO: 367863 - DNA, 942 bp, Homo Sapiens
gccccggctctggctctgccggcggagggggcggagagaacccgcagctgcaacttcgcctggagcctttgagcctgggctcagccggggatctagcagccgtcaccgccgagtcgccgcttccccgtgcgcgggcctcagcccagccggcttggccatggcaggcgccggcagtgcggcgaatctggcccctgcgctccccgcccgtagctgagcagccgttaaccagccatcccgcctttcctcctgcccgtgtcgccgaggcccacgctccgcgcaagtttcctgccgccgaagaagcaggaggacggacgtgaggagtcgggcgtccctggcccacccggccctctcgcccgcgatgtgggggcgcttcctggctccggaggccagcggccgggatagccccggccgcagcccgcagcttccctgccggcccagattattcatcagcatggctacctgctaatgaaatcattgtggcaggccacaactgttccatctaaccatcgaaataaccatatcaggagacacagtataggcttctgacagtggagacactggcattggaacttcctgttctgatagcgtggaaagatcattcaacttcaaggtggcacattatcttttaagcctagtcaatcattgattactcttcctactgcccatgtgatggcgtctaattccagcgcttcaagttccaaaacttagggaactcattggccaccaggatggcctcaacactggcagtaacaagcctcatgcgaacattgggagaaccactgatcaggggggaagcaggaacgcctttccctagacctgaaagggacttccggccaagttcgggaacatggtcatctttatccgaactcactggcccggatcactgttggcatggtggcactgctatccgacgaaaagtcagcactggattgagaaagaatg

SEQ ID NO: 367864 - DNA, 1177 bp, Homo Sapiens
ggtgagcggcgggtgctcccactgctgtgcgtccccgggagcccgcgcaccctctctgggctccacccaggctgagagctggggtcgtggcggcgggggtggagagcgcgcccctagagatacacttcgagtggattctggccatttgagcattctctccaactctccaatccccagtctgcccccacgggggtctcccccactctcccccgtcccacagcctaaacccctcttcgccctgaacctcccttttcctcatgcggtgaatgggcactggccccgctcagactcccaggagcaccagagctggccctgagccaagccctgccccagcaggacctggggacacgggtgactcagacgtgactcaggaaggctcaggtcctgctggcatccgcggagccccaccagcatgggcagcctcggccagagagaagatctccaagatgaggacaggaactcagcattcacctggaaggtccaggcaaacaaccgtgcctacaagcgggcagttcaaggagaaggtgatcctgtgctggcaacaggacagaaatacaagaccaatgtcatccgcacggccaagtacaacttctactcgttcctgccgctgaacctgtacgagcagttccaccgcgtgtccaacctgttcttcctcatcatcatcatcctgcagagcattcccgacatctccaagctgccctggttctcgctcagtacccctatggtctgcctcctctttcatccgtgcccacccgggacctggtggacgacaatggggagacaacaagagtgacagagccatcaacgaacagacccctgccagattctgatggggaaagaactccaagcagaagaaatggcaggatctgtgcctggggggatgtggcctgtctcccgaagggacaacatcgtcccagccgacatgctccttgctgggccagcacgggagccccgcagcccggtgctatgggggagaccgggggacaatggaccggggaaacccaaccttgaagtttcaaacagggccccggaggggtccccccaccaagaaactgggccccttttaaagaagaatgggggtcctttttcaagggccacggggaccgggggaggggcccttaaaaggcgggagggaccacaatttcctggggggggcgcctgggaatgtggaatgccc

SEQ ID NO: 367865 - DNA, 1107 bp, Homo Sapiens
gttgggtttttccgggatagggcggttgttccagccatagatcccttcctggtaacatgggggcttgccccacggaagccttgtggctacaaatggggattacccccttgatggttgacacagtcagtgtgtgcttttgaaaccaccttttcctactggttttgggataatccactctggggggcagcctgtgtttgctgggcctgtgtgttttttctgggagactctggctgctggagaggattctcacaaaggcatgcacacctgggcaggctgctcccccgtggtgacctgctcactgggtttttcacgttggccgcccgtcttgtcctcctgcacgctggtgtggctgctctgcctgttttgggcactgccatccagccggacgctctgacggctgctggcctgggtggagggaaggctggctgtggaagtcagcagcccgctgctcacctggtaggtgagggcactgctgcccaagctgatgaagctggcgctggacaggatgctgctgccgctgccgctgccgggcaggctggcctcactctttccctccagtctgcttggtgctgtgggcggggccagtcagccggctctttagagagctgggagggtctatggagcccagctggctggtttggttactggccgcctgggtgttgagccttctgttcagccgcactctccggtggctgcccaccaagctgatgtcgctgccctccttgtcccctgcgtacccgctgctcaggctggcatggctgccctcctctggcctcgggtgctgcacgctggaaacatgactctcgctgctctgggtgtcactgaggtagctgctggacactttcaggggctcctgagccactcctgcatggcgtggccacgcaggggactggagctctaagctgggtgactgtaggcttggctctccttcctgctcattctggacagaggattcccctttttctccctcgagaaaaatggggggcagctgaagtggtttatccagggagagggggcctgggaggcctctgaatgttggctgtgacctctctggggagaggtgactccgtatataaggctgccctttgaaaactatcccgggaatcc

SEQ ID NO: 367866 - DNA, 1137 bp, Homo Sapiens
tatatctcaatcacataatgtgtgttgcaggaattccttgacatgggctcatggacactgcagacgtcaggaggataggcctcagaggttcactcccctcaaggactgcactgcagacattcagtgtgcaatacatgcatttttgtggaaagaagttctatacgcttttatcaattctatgaaggagtctgtagccttgaaaatagtttaatcaaccgctcttctacgaatgctctaagaatgtaatagcagtggatgaggccagaggttgtctctccaaagagacagatagcttatgtctgatttgatgggctctcctttagttctacttatctgccagtccatcatcacggttcttgctgttgtttcaatgacagatggagacttgcttactaagttaagtgatactgtgtgaggattcacagtggagaaaaccggagggagataaatgatgccacagaagaatgggcatactgtgtggctgaagaggcaggagtgcagagtggatccagtagtggccatgaggctgcaatagatgggaatttcctaggagtaaagtgagagaacgtggggagactagagtactagtgatgaagaacatttaatggagtaaatgagtgggtgatacacgagagtgtggccgatgatataaggctatcatcgcatctggtgatagttacagtgccacctcctcattcaactagttacaccattaaaatatggattaaaaccattagaattcgcgtcaactgatgggagttaactttattaccaagcaagtgcctcaacagttcaggtcttcagggtgcaacgggaataaacttgagttaccccaggctggagaccttaatgacatcttgggggcacacacaggggctgtggaggggcaagcgatatacgtatagtaagcctcggtggatatacttaagtgggtaagaaagttcagccaacaagggtatgggacatcttagcatagaaaaaaaggcgtagggcattcaccattcagaagatgtgcaaaatgagggtgcagggccatatgtgaaatttacctggaaatgggacaagacatcgattaaacgcatatcagggtgtaggttccacgcgcccaatcccggagaaaagtcaacgagtgtagta

SEQ ID NO: 367867 - DNA, 1249 bp, Homo Sapiens
aggacatcctctccaatccaccacacaccaccttacccctctgctggcaagaggggacctgattcatcctcacgctaaacactcattctacccaactgattgagacagaacagaagataaactgaaacttctctgccttcccgctgcaagagtgaatgagcgatccctctcaactgactcaaaatgtttgcctcacccaggagatggagctctcgaaggccttctctggccagcggacactcctatctgccatcctcagcatgctatcactcagcttctccacaacatccctgctcagcaactactggtttgtgggcacacagaaggtgcccaagcccctgtgcgagaaaggtctggcagccaagtgctttgacatgccagtgtccctggatggagataccaacacatccacccaggaggtggtacaatacaactgggagactggggatgaccggttctccttccggagcttccggagtggcatgtggctatcctgtgaggaaactgtggaagaaccagcactgctccatccccagtcctggaaacaatttagagcccttcggtccagtggtacagcggcagcaaaaggggagaggtgccgaagtttcattgaacttacaccaccagccaagagagaaatcctatggttatccctgggaacgcagatcacctacatcggacttcaattcatcagcttcctcctgctactaacagacttgctactcactgggaaccctgcctgtgggctcaaactgagcgcctttgctgctgtttcctctgtcctgtcaggtctcctggggatggtggcccacatgatgtattcaccaagtcttccaagcgactgtcaacttgggtccagaagactggagaccacatgttgtggaataatggcggggccttctacatggcctggctctccttcacctgctgcatggcgtcggctgtcaccaccttcaacacgtacaccaggatggtgctggagttcaagtgcaagcatagtaagagcttcaaggaaaacccgaactgcctaccacatcaccatcagtgtattccctcggcggctgtcaagtgcagcccccaccgtgggtcctttgaccagctaccaccagtatcataatcagcccatccactctgtctctgagggagtcgacttctactccgagctgcggaacaagggatttcaaagaggggccagccaggagctgaaagaagcagttaggtcatctgtagaggaagagcagtgttagga

SEQ ID NO: 367868 - DNA, 1401 bp, Homo Sapiens
ggctggtgtctggccctcaggacatcctctccaatccaccacacaccaccttacccctctgctggcaagaggggacctgattcatcctcacgctaaacactcattctacccaactgattgagacagaacagaagataaactgaaacttctctgccttcccgctgcaagagtgaatgagcgatccctctcaactgactcaaaatgtttgcctcacccaggagatggagctctcgaaggccttctctggccagcggacactcctatctgccatcctcagcatgctatcactcagcttctccacaacatccctgctcagcaactactggtttgtgggcacacagaaggtgcccaagcccctgtgcgagaaaggtctggcagccaagtgctttgacatgccagtgtccctggatggagataccaacacatccacccaggaggtggtacaatacaactgggagactggggatgaccggttctccttccggagcttccggagtggcatgtggctatcctgtgaggaaactgtggaagaaccaggggagaggtgccgaagtttcattgaacttacaccaccagccaagagaggtgagaaaggactactggaatttgccacgttgcaaggcccatgtcaccccactctccgatttggagggaagcggttgatggagaaggcttccctcccctcccctcccttggggctttgtggcaaaaatcctatggttatccctgggaacgcagatcacctacatcggacttcaattcatcagcttcctcctgctactaacagacttgctactcactgggaaccctgcctgtgggctcaaactgagcgcctttgctgctgtttcctctgtcctgtcaggtctcctggggatggtggcccacatgatgtattcacaagtcttccaagcgactgtcaacttgggtccagaagactggagaccacatgtttggaattatggctgggccttctacatggcctggctctccttcacctgctgcatggcgtcggctgtcaccaccttcaacacgtacaccaggatggtgctggagttcaagtgcaagcatagtaagagcttcaaggaaaacccgaactgcctaccacatcaccatcagtgtttccctcggcggctgtcaagtgcagcccccaccgtgggtcctttgaccagctaccaccagtatcataatcagcccatccactctgtctctgagggagtcgacttctactccgagctgcggaacaagggatttcaaagaggggccagccaggagctgaaagaagcagttaggtcatctgtagaggaagagcagtgttaggagttaagcgggtttggggagtaggcttgagccctaccttacacgtctgctgattatcaacatgtgcttaagccaaaaccacct

SEQ ID NO: 367869 - DNA, 833 bp, Homo Sapiens
ctggtgtctggccctcaggacatcctctccaatccaccacacaccaccttacccctctgctggcaagaggggacctgattcatcctcacgctaaacactcattctacccaactgattgagacagaacagaagataaactgaaacttctctgccttcccgctgcaagagtgaatgagcgatccctctcaactgactcaaaatgtttgcctcacccaggagatggagctctcgaaggccttctctggccagcggacactcctatctgccatcctcagcatgctatcactcagcttctccacaacatccctgctcagcaactactggcttgtgggcacacagaaggtgcccaagcccctgtgcgagaaaggtctggcagccaagtgctttgacatgccagtgtccctggatggagataccaacacatccacccaggaggtggtacaatacaactgggagactggggatgaccggttctccttccggagcttccggagtggcatgtggctatcctgtgaggaaactgtggaagaaccagctaaaagcgagatggaagaggaattaaaaaaatgtgtgtatttacatttatatttattattgtgccacttagcactgctccatccccagtcctggaaacaatttagagcccttcggtccagtggtacagcggcagcaaacaggggagaggtgccgaagtttcattgaacttacaccaccagccaagagagaaatcctatggttatccctgggaacgcagatcacctacatcggacttcaattcatcagcttcctcctgctactaacagacttgctactcactgggaaccctgcctgtg

SEQ ID NO: 367870 - DNA, 1097 bp, Homo Sapiens
  misc_feature (24)..(24): n is a, c, g, or t
cggtccggaattcccgggatggancatcctctccaatccaccacacaccaccttacccctctgctggcaagaggggacctgattcatcctcacgctaaacactcattctacccaactgattgagacagaacagaagataaactgaaacttctctgccttcccgctgcaagagtgaatgagcgatccctctcaactgactcaaaatgtttgcctcacccaggagatggagctctcgaaggccttctctggccagcggacactcctatctgccatcctcagcatgctatcactcagcttctccacaacatccctgctcagcaactactggcttgtgggcacacagaaggtgcccaagcccctgtgcgagaaaggtctggcagccaagtgctttgacatgccagtgtccctggatggagataccaacacatccacccaggaggtggtacaatacaactgggagactggggatgaccggttctccttccggagcttccggagtggcatgtggctatcctgtgaggaaactgtggaagaaccagcactgctccatccccagtcctggaaacaatttagagcccttcggtccagtggtacagcggcagcaaaaggggagaggtgccgaagtttcattgaacttacaccaccagccaagagaggtgagaaaggactactggaatttgccacgttgcaaggcccatgtcaccccactctccgatttggagggaagcggttgatggagaaggcttccctcccctcccctcccttggggctttgtggcaaaaatcctatggttatccctgggaacgcagatcacctacatcggacttcaattcatcagcttcctcctgctactaacagacttgctactcactgggaaaccctgcctgtggggctcaaactgagcgccctttgctgctgtttcctctgtcctgtcaggtcctcctggggaaggttgggccacatgatgtattcacaaggtcttcaagcgactgtcaaactggggtccaaagaactggaaaccacatgtttgggaattagggtggggccttctaactggcctgggctctctttcaccggctgcatggggtcggctggcc

SEQ ID NO: 367871 - DNA, 1016 bp, Homo Sapiens
  misc_feature (991)..(991): n is a, c, g, or t
tggaccggtccggaatttccgggatcccctctgctggcaagaggggacctgattcatcctcacgctaaacactcattctacccaactgattgagacagaacagaagataaactgaaacttctctgccttcccgctgcaagagtgaatgagcgatccctctcaactgactcaaaatgtttgcctcacccaggagatggagctctcgaaggccttctctggccagcggacactcctatctgccatcctcagcatgctatcactcagcttctccacaacatccctgctcagcaactactggtttgtgggcacacagaaggtgcccaagcccctgtgcgagaaaggtctggcagccaagtgctttgacatgccagtgtccctggatggagataccaacacatccacccaggaggtggtacaatacaactgggagactggggatgaccggttctccttccggagcttccggagtggcatgtggctatcctgtgaggaaactgtggaagaaccaggggagaggtgccgaagtttcattgaacttacaccaccagccaagagagaaatcctatggttatccctgggaacgcagatcacctacatcggacttcaattcatcagcttcctcctgctactaacagacttgctactcactgggaaccctgcctgtgggctcaaactgagcgcctttgctgctgtttcctctgtcctgtcaggtctcctggggatggtggcccacatgatgtattcacaagtcttccaagcgactgtcaacttgggtccagaagactggagaccacatgtttggaattatggctgggcccttctacatggcctgggctctccttcacctgctgcatggcgtcggctgtcaccaccttcaacacgtacaccaggaagggtgctggaagtcaagggcaagcatagtaagagcttcagggaaaacccgaactggctaccacatcaccatcaggggtttcctcggcgggctggcaantgcagccccccaccgtgggtccctt

SEQ ID NO: 367872 - DNA, 889 bp, Homo Sapiens
  misc_feature (763)..(763): n is a, c, g, or t
gggaaaccaaagggacttggagtgcagatggcatccttcggttcttccagacaagctgcaagacgctgaccatggccaagatggagctctcgaaggccttctctggccagcggacactcctatctgccatcctcagcatgctatcactcagcttctccacaacatccctgctcagcaactactggtttgtgggcacacagaaggtgcccaagcccctgtgcgagaaaggtctggcagccaagtgctttgacatgccagtgtccctggatggagataccaacacatccacccaggaggtggtacaatacaactgggagactggggatgaccggttctccttccggagcttccggagtggcatgtggctatcctgtgaggaaactgttggaagaaccaggggagaggtgcccgaagtttcattgaacttacaccaccagccaagagagaaatcctatggttatccctgggaacgcagatcacctacatcggacttcaattcatcagcttcctcctgctactaacagacttgctactcactgggaaccctgcctgtgggctcaaactgagcgcctttgctgctgtttcctctgtcctggcaggtctcctggggatgttggcccacatgatgtattcacaagtcttccaaggcgactggtcaactggggtccagaaagactggaagacccccttgttttggaaattattgcctgggcctttccaacatgggccgggggtctccctttcacctggcttggatgggggntccggctgttcaccacccctttaaaccccgttaacaccccaagaatggggggcctgggaaatttccaaagggggccaaggccatatagttaaaagagaccctctccaaggggaaaaaacccccccc

SEQ ID NO: 367873 - DNA, 1032 bp, Homo Sapiens
  misc_feature (281)..(293): n is a, c, g, or t
ccgaagagacgccaccacctgaagcaggatgctgcccggccagaaatcgcccgtctgcccgccccatctttctccgggctttttccaccgagcttaagccccaaaagggagggggtgcatgggagagaaaaaggcagggattccgagaagcgagcggcccccttccgcccacgcaaggcctcccccgcaacctgctgcccagcggctgcagcctcggccccctcggctcccgggcgggccgcgtccacttccccgctacagccaggagcgacgccaccgannnnnnnnnnnnncgagtccccgtcgcccgctcacctgccggggccgcgggcgccgacgctgcggttgctggccggtcgcctctacccgcgtccacgcaagccacctgcgccaccagctgccgcagaggcgtctcaacggctcggaatcgcaaccgcgccgccgtgccgcacgccgtagctgcgctgataccgcgcggctcccgctcggcgcccgctagcactggggcgcgaccaactgtttaccgagaagaggggggatgttgcagcacccggcggaagctgtgtggctccgaagcggattctctggaaaaccctacgtccccaaagttcgctttcatgtaacaggttgcatgcagatggcagaggaagacgcaatgcgaagaagaacagcgactgggcgaaaatagctcggcctgccggaaagtttcccccatgacgggtattgcgaaagatggatcgggaccccggcccgacccctgactgggacttactctgcggctgtagtgtactcagacatgctggtagccgggtattggttaacaagcgcgcgagtgcacacgtgacaggaacactgaatgagcacgaagcgaacgacagggacattgaaggagggccagcatatataccccaggcgcctacttctccacgttggtgcgttgccagcagcttacgggcaacgacaagtgtgccagtcaaaagaaatcattggtacatggcacatccggaacaacacagagcaaccacataacca

SEQ ID NO: 367874 - DNA, 1052 bp, Homo Sapiens
acggtgtctgaccttggctaagagggaaggagatcctatcagtggggagagtgtgaggggagagggagagcctgcagggcaggcgctgaggatcacgcatcctgtgactctcccctgtcccccgccaccctctgaaccactggccaccatggctacttcaaagttgcccgtggtgcctggggaggaggaaaacaccatccttatggccaaggaaaggctggaggccctgcgcacagcctttgagtcgggtgacctcccccaggccgcctctcacctccaggagctgctggcctccacggaaagcatccgcctggaggtgggcgtcacgggcgagtcgggcgcgggcaagtcctccctcatcaatgccctgcgtggcctggaggccgaggaccctggcgcggctctcacgggcgtcatggagaccacgatgcaaccgtcgccctatccacacccacagttccctgacgtgaccctctgggacctgccaggagccggctctccaggctgcccggctgacaagtacctaaagcaggtagacttcagccgctatgacttcttcctgctggtctccccccgccgctgcggggccgtcgagacccgcctggccgctgagatcctgtgccagggcaagaagttctactttgtgcgcaccaaggtggacgaggacctggcggccacgcgcacccagcggccgtcgggcttcagagaggccgctgtcctgcaggagatccgagaccactgtgccgagcggctgcgggaggccggcgtggctgaccctcgcatcttcctggtgtccaacctctcgccggcccgctacgactttcccacgctggtgtccacctgggagcacgacctgccctcccaccggcgccacgcctgggctgctgtcgctccccgacatctcgctggaggccttggcagaagaaggaagccatgctttccagagcagtcctcaggaccggcccctggtgttggggggtcattcaggcccctggcggtccccagggctggcggcccgctctagaaatatcccctcgaggggcccaaagctt

SEQ ID NO: 367875 - DNA, 813 bp, Homo Sapiens
ttctcaagatcatatctaagttttccatgttaacgtccctcataatcttgtcaagcgctatattttaaggtattttaattgacataaatgttcccgagacttctcaccaataccagatttgaactttaacactgagaggtgtttagcatgtccttgtattttcaaaattagaagcctttgcaggagaaaatattcaagatacaaaatttcaacttctgcttacaaacaactctagtgatatgttacaatataagtgtttctgaagaacctcttaatacttttctgttaccccccgttatctgttagtctgctgagactagatattcaatatattccaaaagccagagtgtatgcaagttcactttcatctcacttgtcataggaatttaaacattaacgcctcaaagtatggcaccctatatgtcttgttcaaacaacaacaacaaacaaccacattgtgactactagatgaggtaaaatttgtaataacagaatcaaaaaagtcaaccctaacttttcagcgcttgaactccacaatcacccccactaaaggcttcttcgttaaccgttgaatcgataagaatcactgatcatcgaagtaagtaagtgttcgggagatatgactgtgagatccagctaagtagaataatttctggatttttggggcgagtcaatttcaatcgcatctgattcgtataatctctgtcaacttaaagaatgagggacttgggagtatcaacatgatttctaaatagacggtcttactgcaaagtctattattgctgatacacaaagaagaaatcgaaatcctta

SEQ ID NO: 367876 - DNA, 1265 bp, Homo Sapiens
accccggggggggaaaagccagcttgttcaggggtttgggcccccccggaacaggggggtttcccggaggtccttcccaaaaagaagaatgttgcacagtgcgcgaccaggaaaatgcaagggggtttccggttactgctcccttcggctggggtaaatgtttctggaagggcaaaggtcctatgaatttgccattaaaataaggccctttttcgtgaagggattcaaaggttttccaaagatgtcttttcaagcaaaaagggtactgaccaaaagttttttcccacaaccggtctttctttcccttaagccatatacaacgtggggggtcccctggcctaaaagggtgatgaggtccccatccgtctgagaacccggttatagggatgttgttcagcatgtgcagaggaaaggtcactgaggggtgaaggcccattgttccactggcttagtcatcgtgaagatcccggtagctggtgttggccaggcgaagaatagtttctaatgcggcaaatccaaatattggatgttttccccactaatacagactttccctactcctctaataagaatgcagaggggtagagcttaggtcttgcagaagatctttgattaagcgaggattgtggtggtcatcaagaaccttttgaacgattttatccaaaatgttgaagtaattcttctgtgccacgccactcaatgaagttaactgggattttgcaattagctgcaacagtttgaccacataattgaaccttcggatatcttgaattgcacttgagaagtctaaccgattaaaggcttctcccaaggtgcaatagccatgcctttcctttgtgctttctttatggacatagatccatttttcacgataaaaactttgagtatttgtgtcatttctaaaatggtcctttttcctttttttcgatgcatattcatgctcttcattattgaatatttctccatcttcactatttaagataatgctgtgactgatgttacaatggttattctctctttcaagtttctgactacaagattcacatctcttccagccatcttctgtcttaatccaactccatccaggagatctccagtcctgacccaaaaatggcatagttctcctagcgcgcctgcggcccccagtcttcacctgacgcgcccgcgtcccccagtgcccaacgggcgcgccggccacctgggcccgcacctgacggcgaccaggcggttattgccatcccgagaattccggacccggtaccagc

SEQ ID NO: 367877 - DNA, 1114 bp, Homo Sapiens
tgagtgttccacccctgagtcgaagcccagcccaggcagccagccagacgcctccggtagtgtaaatgaggacaatgcctgctggcccacatgacggggggatgtagacggcagcggcgccagtcgctcctggcaccatggacgatgccacagtcctaaggaagaagggttacatcgtaggcatcaatcttggcaagggttcctacgcaaaagtcaaatctgcctactctgagcgcctcaagttcaatgtggctgtcaagatcatcgaccgcaagaaaacacctactgactttgtggagagattccttcctcgggagatggacatcctggcaactgtcaaccacggctccatcatcaagacttacgagatctttgagacctctgacggacggatctacatcatcatggagcttggcgtccagggcgacctcctcgagttcatcaagtgccagggagccctgcatgaggacgtggcacgcaagatgttccgacagctctcctccgccgtcaagtactgccacgacctggacatcgtccaccgggacctcaagtgcgagaaccttctcctcgacaaggacttcaacatcaagctgtctgactttggcttctccaagcgctgcctgcgggacagcaatgggcgcatcatcctcagcaagaccttctgcgggtcggcagcatatgcagcccccgaggtgctgcagagcatcccctaccagcccaaggtgtatgacatctggagcctgggcgtgatcctgtacatcatggtctgcggctccatgccctatgacgactccgacatcaggaagatgctgcgtatccagaaggagcaccgtgtggacttcccgcgctccaagaacctgacctgcgagtgcaaggacctcatctaccgcatgccgcagcccggacgtcagccagcggcttccccatcgatgagatcctccaccactcctgggctgcagcccccccagccccaagccacgtctttctggcctcctttaaaaagggaagggggaaggccaaataaccgcccctggagtgcaaactgggacccccaaaaaaggccttgaaaggcccgaaccaccgggcccgaacaacaggcttgggaagccaaaac

SEQ ID NO: 367878 - DNA, 1061 bp, Homo Sapiens
aattcccgggatggcctctaggaggcaggaacagcaggcctggccagcccaaaggactctctatccaggatgtaaatgagcacactgctggcccatgcgcctcggggctgtagagggcagcctcagaggcactgggcattcctggcaccatggatgacgctgctgtcctcaagcgacgaggctacctcctggggataaatttaggagagggctcctatgcaaaagtaaaatctgcttactctgagcgcctgaagttcaatgtggcgatcaagatcatcgaccgcaagaaggcccccgcagacttcttggagaaattccttccccgggaaattgagattctggccatgttaaaccactgctccatcattaagacctacgagatctttgagacatcacatggcaaggtctacatcgtcatggagctcgcggtccagggcgacctcctcgagttaatcaaaacccggggagccctgcatgaggacgaagctcgcaagaagttccaccagctttccttggccatcaagtactgccacgacctggacgtcgtccaccgggacctcaagtgtgacaaccttctccttgacaaggacttcaacatcaagctgtccgacttcagcttctccaagcgctgcctgcgggatgacagtggtcgaatggcattaagcaagaccttctgtgggtcaccagcgtatgcggcccagaggtgctgcagggcattccctaccagcccaaggtgtacgacatctggagcctaggcgtgatcctctacatcatggtctgcggctccatgccctacgacgactccaacatcaagaagatgctgcgtatccagaaggagcaccgcgttaacttcccacgctccaagcacctgacaggcgagtggcaaggacctcatctaccacagtctgcaaccccgacctcaaccggggggtccccatcgacgaaatcctcacccactgctggatgccacccaaaggcccggggatctccctccgtgggccatcacaagggagggggaaaagtcccgcggaacctgaacccttgtgggccccccaaaccgg

SEQ ID NO: 367879 - DNA, 1111 bp, Homo Sapiens
cggtccggaattcccgggatccctccttcagcccaggcaaggcctggggccctgggcagcctccaggtgcagtgccctcccgtgggccgcacccttgccactgccccagggcatgtctctactcaccaattatgaagggcttcggcatcagatagagaggctggtgcgggaaaatgaggaactgaagaagttggtgcggctcattcgggagaatcacgagctcaagtcagcgatcaagactcaggcaggcgggctcggcatcagcgggttcacgagtgggcttggtgaggcaacagcaggccttccctcacgccagaacaatggtgtcttcctgcccccgtccccagcagtggcaaacgaacgagtcctcgaagaagtggggatcatggccttggcacccctggccgagatgctaaccagcttgcagcccagcgccacaccgggctcactcatgagccccctgacaggcaccctcagcacgctgctgtctggcccagcacccacgtcacagagcagccccctcaccagcttcctgaccagtcccattgcgggacccctaacaggcacactggccagttccctgggcctgccctccactggcaccctgactcccagcagcctcgtggcaggccctgtggccatgtcccagagcagccccctgatagcccctgtgatgggcacggtggctgtctctctgaggcagccccctcctcagctccactgccaccccaccaggggtctctcagaacctgctggccaaccccatgagcaacctggtcctgcccagaggccccaaggctgcggctaggctgagccactccgcgggaggccccactgggccccagtccccagctttgcgtggtacccactgccaccaccaaaggtcccacttctcactgagccccccccagtcgaccccaggacccagaagcctctcagcatgccggtttgcaaggagcacccctccaaaccttcacccctatcggaagcccatgggcacccctggttccccaagacgggctttcttcttttcaaactttcgggaacacaaggcccagcccaatggccgccccaggaaaaaggggggcccccggaaatttggttccccccc

SEQ ID NO: 367880 - DNA, 910 bp, Homo Sapiens
atttggggggttttacaatggagcagtcctgtattgacccacaaacttgtcactcattctctgaacaggttttatgttttgctcttcttccacgctgttcacagtgcttcagacccagttggtagtacctttcttggtctaggctcattcccttggtgcttagtcctcttgtattattgctgtactggcagatgcgcaccatatgactccgatcttgttaaatgtatagttttaatgattatttcaaaagcagtatggagatgaagcatttcaaggttgaggatccatatctgatgagcatctcatcgctggtggcgactcgctgtagagttgcaaccggtagtgaaaggcatcgcatggtgaaggggaggagtgtgctagctcaggtctctctttctctgcttttgaaaccactaatatctctcccatgacgattcattaatccattaatccattaggttgataaattccctcatgagggccgtgatccaattacctcttgaaggcctaaactctcgatactgccacactggggacacaagttcactgctacatgaatttcagagggaacaaactttcacggtgtagtgttctgcccgttggagtctccaacaatgttatgtctttctcaacaagcgtttaaatacattatacgtttttttccatcctcatagccccaaatgacttcactcatttcagcatctagcccttcggctcaagaagtccgtattcccagagtcttacttgtagaacctccaagaattgaggcaacgttttccacctttccaggataaaatgggtgttacaggtataggacagacattcgccttgccgaacaagggaaagagcaatccgtcataagattgaatacgctcacaggcgagtccgcacatccagacaggtgcacaca

SEQ ID NO: 367881 - DNA, 429 bp, Homo Sapiens
tacacattccttctggaggctgcgggggagaagaatctgtctctgggccttttccatcttctagaggctgcctatttccttgattcacagacactgaatcttctgcctcccttttccacgttctaaaggtccttgtattccattggcccacccagatcatccagggtgatctcccctgtcttaaagtcagcggtgagacaccttcactccatctgcaccctcatttccctttgccataagctgacagtattcacaggctctgggggtttggatgtgggtgtctttgtgcagccattattctgccttccacacctggaaactgagacatttcgtgagaggccttgggcaagctgtctcccctttttggacccagtttattctcttctgtgaaatggtgtggctgctatgcaggaggagaacgggcccctc

SEQ ID NO: 367882 - DNA, 1278 bp, Homo Sapiens
aagtcgtgctcctgagaaatcgtcccaccaacaggcagcccagagactcccacaagggagggttttcaggacactccagaggttgacgggtgcagaaagaaggcgggcgctttcctggaagagaagtgggtcaggcccaactgaaaagcaagcctggcaccagaagggggacattccggaactagatatgaagagacttttctccctgaagttccccggacccaattagatgttgtacccaggctggttaccctggtaacaggcgtcgcggtttgtcaaggaactgagagaagaggcttaagaaaattattcaccactcataagtcatggagacatcctcaaaaggtctgcttacccaagttactcagttttggaacctcctagatgatctagctcagagtgaccctgagggctatgagaagtttattcagcagcagctgaaagaagggaaacagctctgtgctgccccagaaccacagctttgtctacagaccaggattctgaaaccaaaagaaaaaatactttttatcaacctgtgtcagtggacaaggatcccagctccccaatcaaccactcatccagtacctctaactgttggcaaaccagaagatacaactgagatatcagatgcttacacagtcattgatgttgcctacaatcctgatgttcttcatgcagcagaaaaggaccaagtgaaaaaaaatcagttaattcagatggccatgaaatgcattgaggagaaattccagttcaccctctcacactcttaccatattaccaaatttagaataaaaggaagcattcaaagaatgaaacaaaatctgatgggaatccaaactgattccatagatttaagagaaaaaatgagaagggaactaactcttggacagatacgaagcagtactatgagcaatccagatcactttcctcaactgttactgccaaaagaccaagtttcaggcaaagcagtgtgtctgatagaagagatttccagtactgaaatccaggtggagatgaagatgccagcctatgaactaaaaattgtgcatgatcacagtgagaaacctctgaaaattgagttgaaaggttgaattaccctggtattaactctgtctcttctctgtgaccttagtgtttcctgaggatgactctattgactgaagtatctgagaagtacagattacatctgaatcttccaaaacttattgatactgaaatgaccacagcaaaatttatcaaagaaaaatccacgctaatcatcacaatgcctttggtgta

SEQ ID NO: 367883 - DNA, 1100 bp, Homo Sapiens
  misc_feature (856)..(864): n is a, c, g, or t
gcgcctgggtgctggcagccttgccgctcgctgtgccagtgcctggtgggccgttctggccatccagcatggtggactactacgaggtgctggacgtgccccggcaggcctcatccgaggccatcaagaaggcgtaccgcaagctggcactcaagtggcaccccgacaaaaaccctgagaacaaggaggaagcggagaggagattcaagcaggtggccgaggcctacgaggtgttgtcggacgccaagaaacgcgatatctatgaccgctatggcgaggcgggggcggagggcggctgcacaggcggcaggcccttcgaggaccccttcgagtacgtcttcagcttccgcgacccagccgacgtcttcagggagttcttcggcggccaggacccattctcctttgacctcttgggaaacccgctggagaatattttgggggggtcagaggaactgctggggaagcagaagcagagcgtctgcaccccttttctctgccttcagtgaatttccagcttttgggggtgttttttcttcttttgatacagggatttcgttcctttggcctccctgggaagtgggggcctttcttccttctgcatggcctacggtagtgatgggacaggcagcttccagtccatgtcgacttcccctgaaatagttgatggtaaaaaatcaccaccaagagaatcattgagaatgggccaagaaaggggggaaatggaaggaaaatgggagaagttgatttaaagtcccttcataataaatagcaaagagcagttacttccccattgacccccaagaaattcccgtcccacatttggatttttaacacttttggggggaatagcgggacnnnnnnnnnaggattggaaagtgaacttttactttttagaaaaaacttggtaccccagaattttaataaccactttcagtgcccaacacccgggttcctatatcgttggggaataccccgggataaggaacccccgggttggcctttccaaacgcggtgaaaaaaattctggtatgggcactttggctcatttatttaaaaacttaaacccttgggggaaacacaaaagggccatcttctttcca

SEQ ID NO: 367884 - DNA, 1332 bp, Homo Sapiens
gaagaaaaggagaaggacaaagtggagagggaggagatggagcaatctcttatgtgatcattccatcaactcacaaatttttcacctaacacctggttcaactgtaatgtgctcagctccgtataacctggacagcagctgtgccctcacccctaaactcagcaaaatattatggtcctctaatcaagagaattttgctcctgttactgcatgtcttgtgggttcatcgtcagaccagtgagttgataccaaacttcaccaaacggttctccggagcaaccgtttagaggaatcattaaccaatggcaacaggaatccaaggataaagtgatttccctcctgttaactcatctgcctttgctgaagccaggaaacctcgacgcgaaagtagaatatatgaaactgctgcccaaaatcctggctcactctattgaacacaaccagcacattgaggagagcaggcagctgctgtcctatgctttgatacatccagccacttcgttagaagaccgtagtgctttagccatgtggctgaatcacttggaggaccgcacgtcgaccagctttggtggccagaaccgaggccgctcagactctgtggattatggacagacacactactatcaccaaagacagaactctgatgacaagctcaatgggtggcagaactctcgggattctgggatttgcatcaatgcctccaactggcaggacaaaagcatggggtgtgagaatggccatgtgcccctctactcctcctcatctgtccccaacaaaatcaatacgattggaaccagcacaagtacaattctctcaggccaggcacaccacagccctttgaaacgatctgtgtcccttaccccacccatgaatgtgccaaaccagcctctaggacatggatggatgtctcatgaggacttacgagctagaggaccccagtgcctcccatccgatcatgcccccctgtctccacaaagcagtgtagcctcttcaggaagtggtgggagtgaacacttagaagatcagaccactgctcgtaacacattccaagaagaaggtagtgggactgaaagatgttccagcctggctgacaagcctccgcctgcacaaatatgccgcgcttttctcccagatgacctatgaggagatgatggccctcaccgagtgccagctggaggcgcagaatgttaccaaacggtgcaagacacaacaaactcgtcatcagtatccagcaagctcaaagaaagacaccatctcctgaagcctcggaaagggacatcatcgagaggggcagcccgcgcatcccgatccaggcaacgcaccagacgaccc

SEQ ID NO: 367885 - DNA, 1077 bp, Homo Sapiens
cggtccggaattctcgggatggggctggaagttcccgccaggtccgtgccgggcgagagagatgctgcccggcccgcctcggctttgaggcgagagaagtgtcccagacccatttcgccttgctgacggcgtcgagccctggccagacatgtccacagggttctccttcgggtccgggactctgggctccaccaccgtggccgccggcgggaccagcacaggcggcgttttctccttcggaacgggaacgtctagcaacccttctgtggggctcaattttggaaatcttggaagtacttcaactccagcaactacatctgctccttcaagtggtttgggaaccgggctctttggatctaaacctgccactgggttcactctaggaggaacaaatacaggaatagcaacaactataactacaggattaactctgggaacgccagccactacatctgcagctacaacaggcttcagtttaggattcaataaacctgcagcatctgccaaaccatttgctctacctattacctctacctcagctagcggtctgactctttcgtctgctctgacatcaactccagcagcatccacaggatttactctaaataatctgggtgggacaacagccacaactacaactgcatcaacaggcctctctttagggggagccttagctggtatgggaggttcactttaccagagtacaaacacaggaacatcaggacttggacagaatgctttagggttgactttgggaactacagcagctacttcaactgcaggcaatgaaggccttggtggtatagatttcagtagctcctcagataaaaagagacatctatagaagataggtggcaattttagagatactaaatatgaaagaaaaaaatcttaataaaatacaaaacttggaaacataaattacagttggatgaaaagaggtaaaaaagtaaaaccccatgtgccgaagggaaaaaggggataaaacgggaaccagacccgagggatgtaagagctcttaagggagggaaatctaccctcctgggcatctggcccggaatggttggaaaatcttcc

SEQ ID NO: 367886 - DNA, 1367 bp, Homo Sapiens
  misc_feature (32)..(32): n is a, c, g, or t
  misc_feature (43)..(43): n is a, c, g, or t
  misc_feature (51)..(51): n is a, c, g, or t
  misc_feature (53)..(53): n is a, c, g, or t
  misc_feature (55)..(55): n is a, c, g, or t
atttccacggggggaaatgttaacaaaccccnaaaaggggaangctttaancncnaatagtaagtaccatgcacccaaatcctagcaagcttaactatagctaccagttatgaaagttatgtcacaagacatcctttcctctcccttggaggaggactcagttccacagtttcaccttagcattggcttatgataaggagtccgtgcaacccccctccctcctacccctgagatacatttttctcccagatgcaactccaagcttcgagtcaaggccctaggaaacaaaattggatctgagggatccagaggcaaataacaacagaggttaaaaggcacagggcaagtgagcatggctgattcctgccaaataagccaacactaagcttcctgtttcatggataaagaccacgttaatattcatggcataaatgaggtctagggaattcgaaggccactgcatccagccaccatggctgattttaagaaatcaacatgaagccattgtatggggagttgaatgctgctggtggagtcagcaggaaaagcctttctgcccctgatcaacctctacctgaggacctaaggcaatgcttttatgtagatcctgatatgcaaacagaactacagcactccagaagtaacctcatgttgactgggcctactgagttaatggctctctacgtttatcagctgaaaaataagacagatctgctaagacgactgataaaggacagaggctggaattgtgacttgcattgaatggaacctgagctagagaacttcacaaatgcccaaatctgatcctgccagtcactcctgatgcagacatttccagaagagctacacataggaagactgatagcaactgggaaccaaaatgacaactatctttcagagcttggtaaggttgggtaagagcatatggttcattcttaaggcctaagaaagacacctccactccctacctgcccctcgtccccagcacatctcagcttgctcctgcagaatgctggactctctgtatgtccatcaccatagagtggaaacaagaaatgcaaaaggagcaccatgccatgggcatggtctttttatggttgatctggccatcgataaacatggccaaccaatactttaactgaccaaacatgaatggcaagccattcttcgcctaaaggatgtgggtagaacgagagaggagggccaatagggaagtaggcagagaggcagaagcatgtcttcctctataacatattcaccctatttccataaaaatgctctatttgaaatcctatacagagaaggtatatgaaattgatttggcttcctatagtaaaccctaaagtaaaaacgcttacgagaattta

SEQ ID NO: 367887 - DNA, 1111 bp, Homo Sapiens
  misc_feature (74)..(103): n is a, c, g, or t
caaaatcctagcgaagcccccccatatgtgggagagatacccctgcttcaggtccccccaggatcctgaccacnnnnnnnnnnnnnnnnnnnnnnnnnnnnnnagtgctcgggccagctggtccttttcccatccctccccatgaaggagggaggctggtagctttgccagcagctgcgccgcggcaggggtggcccatggacctgcctgagggcccggtgggtggccccactgcggaaatgtacctccgggagcggcctgaggaggcaaggctgggaatgccggtcagcttggaggagcaaatactcaactccacgttcgaagcttgtgaccctcagaggacaggcactgtggctgtggcccaggtgctggcctacctggaggctgtgacaggccagggcccccaggatgcacgcctccaaacattggccaacagcctggaccccaatggggagggccctaaggccactgtggacttggacactttcctggttgtcatgcgtgactggattgctgcctgtcaactacatgggggattagagctggaagaggagaccgccttccagggagccctgacctcccagcaactgccatctggatgcccagaagctgaggagccagccaacctggagagcttcggaggcgaagaccccagacccgagctacaagccacagctgacctgctgagcagcctggaggacctggagctcagcaaccgacgtctggtgggggagaatgccaaactgcagcggagcatggagacagctgaggacggggtcagcacgcctgggggaaggagatcttggctctgcgtaagcagcttcacagcacccagcaggccctgcagtttgccaagggcatggatgaggagctggaggaccctgaagactctggccagggaccctggaggaacaaaatcccagccctcctggcccaagcccgggcagggcggaaaaggagcagcaaccatctggggggcctgaaatggaaaatcctccagggaggaaaaacgggaaactgccttgcccaaaccgggaatggaatgaaaaaaagagaagtccggaaacctgggccatgcggaaaagggccctttttaaaaacggcaaggttt

SEQ ID NO: 367888 - DNA, 878 bp, Homo Sapiens
ggaattcccgggatgggatctatggccgggctcaggcggctgctggggagccaggagaccgcgcgggacggcggatgaggcgcggcggctgcggcccaggcacctcccctctggcttcccgaacccggccaggtccgacccgagggggaggatggaaacacctgccgcgctctgagccccccagaagagaacacccttcccgccatatcaccccacggtcctgcggaggccaccgcctggtccccccaagtctccatcgcgcagcgtggggccgagaggaatagtgagcgatggcggaaaacctgaaaagactggtctcaaacgaaactttacgaacgttgcaggaaaagctagacttctggctgaaggagtacaacacaaacacgtgtgatcaaaatctaaaccattgccttgaactcattgagcaagttgccaaggtgcagggacaactctttgggatcctcacagcagcagcccaagaaggaggacgtaatgatggtgtggaaacaatcaagtcacgccttttgccttggctggaggcttcctttactgctgcttccctgggaaaatctgttgacagcaaggtcccctctctgcaggacacgtttgatagggagagacataaagatcccagtcctcgggatcgggatatgcaacagttagactctaatttgaactcaacccggagtcaatgcaaccaggttcaagacgatctggttgaaactgaaaagaatcttgaagaaagcaagaacagatcggccatatccctttgggctgcagaggaggaaataaatcagctgaaaaagcagcttaaatctcttcaagctcaaggagggatgcccggcacagaaacaccagatcagaggagctcaggagac

SEQ ID NO: 367889 - DNA, 958 bp, Homo Sapiens
tgaagggtcccatgacagaaggagcctgaaggtggtggcgagaggagctatttagaggcccatgcctgggtattcccggtgaacacctttttagcatctatgtcctcttcgaccaagtcggggtggatatccacagtcattcctgcatccttgcacaacttgagcaaggtccgaatgttctccttggataacctcaggtatcggcagctcagcacctcctctggcttcaacatcctcatggtttccatcttaggttcggtgcttttctccatgaggctctttagcttgcgttcgtaagccatgtcaggcatcttgttggaccagtctcttatgaaggttgccctctggctgttaaaggtaccctcctgtaacatgggatctaagacaatgctttgtcgacggaatgggtttggccgctgagtggactctgggtcgactgcatccttgatgtctgtatcagatttcttggggccatccttgatgtagctgccagggaccatgctgaggtgtttccccttttgctccactccatagaggcttcggtaggaggcggcgtccttcctgaatctctttcctaaggcctgctgggaagtctccgtgtccctgcggttccctccccgtgctgtcatgaggcctttgcctttcttctcttccttcttcttatttcgtttaaggactgtcaccactttgggcttttgcttctcgggagcttgtttcttcttcccctgcctccgctccagccactccagcacacaggtgaggtcagacatgcgcctatcttcagcagtcttccacatgtatttcctctttgtgggcattaaatccttcaggtccatttgttgctctgacattgtggagtcttgctagtggcttgggtgggaggtggctggcactgtctcactctttcgatccctttgtctggacttgatggcctggtgacttagaaggtagggtgtgg

SEQ ID NO: 367890 - DNA, 1051 bp, Homo Sapiens
  misc_feature (930)..(930): n is a, c, g, or t
ggtaccggtccggaattctcgggatgggtggctgtgtagcaagatgagggaggtttggagccctgcataaagagaaggacgggaccacagctgactgctgtgtccccacagatctgggcctcctgctgccaccatggccaaaggtggagaagccctgccacagggcagcccagcaccagtccaggatccccacctcatcaaggtgacagtgaagacgcccaaagacaaggaggatttctcagttacagacacatgcactatccagcagctgaaggaagagatatctcagcgctttaaggcccaccccgatcagcttgttctaatctttgctggcaaaatcctcaaggatcctgactcactggcacagtgtggagtgcgagatggcctcactgtccacctggtcatcaagaggcagcaccgtgccatgggcaatgagtgcccagctgcctctgtccctacccagggcccaagtcctggatcactccctcagccaagctccatttacccagcagatgggccccctgcctttagcttaggtctcctcacaggcctcagtaggctgggcttggcctatcgtggcttccctgaccagccaagctccctgatgcggcagcatgtgtctgtgcctgagtttgtgactcagctcattgatgaccccttcatcccgggtctgctgtccaacacaggcctagtacgccagctggttcttgacaacccccatatgcagcagctgatccagcacaacctgagattgggcatattcttaacaacccggaaattatgcgggcagacactggagtttttacgtaaccctgccatgatgcaggagatgatacgtaagccaggaacggggtgctcagttaacttggagagcattcctggtgggctacaaatgtgctttgcactatgtacacagatattatggacccnatggcttaacgcagtccaggagcagtttggcggcaatccctttgccactgccactactgataatgccaccaccaccacccagccaactttcaaggatggagaaatggttgaccctctcccc

SEQ ID NO: 367891 - DNA, 815 bp, Homo Sapiens
caagagtcaccgcagaatcgtgaagcgcgggttgcccaatcggaggatttacagaacactttgggaaccgactttgtgtcctggcaggtgcgctgtgagaactgacaggacttgtctgcagcacacaagagcacagtctaaacctctgcaactcacaagatcgaggaactctagcgtggcttataggagcatgacctcaaggtccccgcaccctccgctgccgcctaacctcgaccccagtaaaatgtcttcccgagaaagctcaaggcagccaggagaattgccccgtttattctagccaacacccgatggtaaggcccctgccctccctttattgtaggatattttcttaaaagggcttacaacgtgtgaatcctttctgtgttgctttgagatgtatatgtatcgcctacacctcagaagtgtctttctcaaggacctgaaagccattgctctgaaatgcagtcatggggaggataggcctctgtcccccagtctctgtgggaggatagaatcccagcttcataacggccagctccaggcacagctgcccgtcattaatactgaccgccccttcatgatttttcacgtgatcccctgctagcttcccggccctactctctccttcaccctttaaaacgcccattctgctatgcacaaatgagaatgatcagctttttctcctacctgtaaggtagttacatgagctaaacatctggttttgcatgcttttaaaaaagaacaaacaagagagaccacgaagcagaaaaccgaacacagcaccaacaaaaagaacgagaaacaaggggggggcg

SEQ ID NO: 367892 - DNA, 721 bp, Homo Sapiens
gaatgagtcaacgtcaagagtcatagttgacccggcctaaagactccagaccatcagtccaggcttagtcagcggggcccggagtggcttccctggctggcatctggacttaggctatttccgtgcacgtaaaagcggaatattggaacggttgcacagaacttccaaataatttttaccgccacgcaagatttagccctgaggtcttaatctcaggatttgggacagtaaaagctgtcgtccctccccctcgtccagccggtggcaagcgggtactgcgggcggttccgtccgtcccctttcgcagaaatggcaacgaatgaccaccagcattagctgagccaggggacgtgggagggttgattgcctaaacgactctgcatcgccgcctctttttgaaactaagagaaaatggtgggagatcaaaagaaaactaaataaacacacaggcaacttgtcctgggacctcaactaagcaaatgaagccttattgtgtgtgctgagcctgcagttcccaaccttccggggaagatgggaggacagggcgacaaagggcacagtaggcttgcctggcagtaagtgtgaccgcagctatccaggcggaagagcagaggactgaaaccaccctccagcaagcgagtgtccgccgcgttgagaaccgcgcaccctacccatcggccacgtgaccagtacctttttgaaacacaaatttctttacctt

SEQ ID NO: 367893 - DNA, 773 bp, Homo Sapiens
  misc_feature (411)..(444): n is a, c, g, or t
cggatccatctggaattgatttggtataaggtacaaagttagttttatattttccagatgacagcccatttgtcccagtgccatctgttaaatagcctctgctctccctcccagatctgagctgtctctcgtttactcccacatctatttgggttcacttctggaccctgcgttctgcttcatggatgtctccatccagatgacctcatgttggccagcatttttgaaacatggggttgttggagtggttggattttccctggaattgagtgagaaattcagaagactgaagcccaggcttactgtctacctttcacggaggcctagccgtgagaggacagaagaaggcatgtggcgaatcatgacagcagacaaagacaaagagaaggaccgggactgagactgggactnnnnnnnnnnnnnnnnnnnnnnnnnnnnnnnnnntgagaattcaaggccacgccggagctgtaccttggaaggaggagccaaaaattatgctgagagtgatcacagtgaagacgaggacaatgacaacaatagtgccaccacagaggagtccacgaagaagaacaagaagaaaccaccgaagaaaacgtctcgttatgaaaggacagataccggcgagataacatcctacatcactgaagatgatgttgtctacagaccaggagactgtgtgtatatcgagagttggaggccaaacacactgtatttcatctgtagcattcaagacttcaaacatggtaagcatttttaatgtgctgttcgct

SEQ ID NO: 367894 - DNA, 1942 bp, Homo Sapiens
cgtgcgccccgccccgcgcctgcggctctctctgcggcttggcccgttagaggcggcttgtgtccacgggacgcgggcggatcttctccggccatgaggaagccagccgctggcttccttccctcactcctgaaggtgctgctcctgcctctggcacctgccgcagcccaggattcgactcaggcctccactccaggcagccctctctctcctaccgaatacgaacgcttcttcgcactgctgactccaacctggaaggcagagactacctgccgtctccgtgcaacccacggctgccggaatcccacactcgtccagctggaccaatatgaaaaccacggcttagtgcccgatggtgctgtctgctccaacctcccttatgcctcctggtttgagtctttctgccagttcactcactaccgttgctccaaccacgtctactatgccaagagagtcctgtgttcccagccagtctctattctctcacctaacactctcaaggagatagaagcttcagctgaagtctcacccaccacgatgacctcccccatctcaccccacttcacagtgacagaacgccagaccttccagccctggcctgagaggctcagcaacaacgtggaagagctcctacaatcctccttgtccctgggaggccaggagcaagcgccagagcacaagcaggagcaaggagtggagcacaggcaggagccgacacaagaacacaagcaggaagaggggcagaaacaggaagagcaagaagaggaacaggaagaggagggaaagcaggaagaaggacaggggactaaggagggacgggaggctgtgtctcagctgcagacagactcagagcccaagtttcactctgaatctctatcttctaacccttcctcttttgctccccgggtacgagaagtagagtctactcctatgataatggagaacatccagggagctcattcgatcagcccaggaaatagatgaaatgaatgaaatatatgatgagaactcctactggagaaaccaaaaccctggcagcctcctgcagctgccccacacagaggccttgctggtgctgtgctattcgatcgtggagaatacctgcatcataacccccacagccaaggcctggaagtacatggaggaggagatccttggtttcgggaagtcggtctgtgacagccttgggcggcgacacatgtctacctgtgccctctgtgacttctgctccttgaagctggagcagtgccactcagaggccagcctgcagcggcaacaatgcgacacctcccacaagactccctttgtcagccccttgcttgcctcccagagcctgtccatcggcaaccaggtagggtccccagaatcaggccgcttttacgggctggatttgtacggtgggctccacatggacttctggtgtgcccggcttgccacgaaaggctgtgaagatgtccgagtctctgggtggctccagactgagttccttagcttccaggatggggatttccctaccaagatttgtgacacagactatatccagtacccaaactactgttccttcaaaagccagcagtgtctgatgagaaaccgcaatcggaaggtgtcccgcatgagatgtctgcagaatgagacttacagtgcgctgagccctggcaaaagtgaggacgttgtgcttcgatggagccaggagttcagcaccttgactctaggccagttcggatgagctggcgtctattctgcccacaccccagcccaacctgcccacgttctctattgttttgagaccccattgctttcaggctgccccttctgggtctgttactcggcccctactcacatttccttgggttggagcaacaatcccagagaggccacggtgggagctgcgccctccttaaaagatgactttacatcacactgttgatctccagaaaaaaac

SEQ ID NO: 367895 - DNA, 1195 bp, Homo Sapiens
  misc_feature (789)..(852): n is a, c, g, or t
gtccacgggacgcgggcggatcttctccggccatgaggaagccagccgctggcttccttccctcactcctgaaggtgctgctcctgcctctggcacctgccgcagcccaggattcgactcaggcctccactccaggcagccctctctctcctaccgaatacgaacgcttcttcgcactcctgaaggtgctgctcctgcctctggcacctgccgcagcccaggattcgactcaggcctccactccaggcagccctctctctcctaccgaatacgaacgcttcttcgcactgctgactccaacctggaaggcagagactacctgccgtctccgtgcaacccacggctgccggaatcccacactcgtccagctggaccaatatgaaaaccacggcttagtgcccgatggtgctgtctgctccaacctcccttatgcctcctggtttgagtctttctgccagttcactcactaccgttgctccaaccacgtctactatgccaagagagtcctgtgttcccagccagtctctattctctcacctaacactctcaaggagatagaagcttcagctgaagtctcacccaccacgatgacctcccccatctcaccccacttcacagtgacagaacgccagaccttccagccctggcctgagaggctcagcaacaacgtggaagagctcctacaatcctccttgtccctgggaggccaggagcaagcgccagagcacaagcaggagcaaggagtggagcacaggcaggagccgactcaagaacacaagcaggaagagnnnnnnnnnnnnnnnnnnnnnnnnnnnnnnnnnnnnnnnnnnnnnnnnnnnnnnnnnnnnnnnnggactaaggagggacgggaggctgtgtctcagctgcagacagactcagagcccaagtttcactctgaatctctatcttctaacccttcctcttgtgctccccgggtacgagaagtagagtctactcctatgatactggagaacatccaggagctcattcgatcagggccagggaatctcgatgctcctgcgctgcagctactttgctctgagaactcctacttggagaagacctggtactctggctgtcctccgtgtcgtgtctgccccaccccggatggcccttggctggttgcttgtgctttccggatcgtggtggaatccctgctgtcgtttgccctcga

SEQ ID NO: 367896 - DNA, 1053 bp, Homo Sapiens
  misc_feature (737)..(800): n is a, c, g, or t
  misc_feature (953)..(953): n is a, c, g, or t
ctggtaccggtccggaattctccggatgcccgttagaggcggcttgtgtccacgggacgcgggcggatcttctccggccatgaggaagccagccgctggcttccttccctcactcctgaaggtgctgctcctgcctctggcacctgccgcagcccaggattcgactcaggcctccactccaggcagccctctctctcctaccgaatacgaacgcttcttcgcactgctgactccaacctggaaggcagagactacctgccgtctccgtgcaacccacggctgccggaatcccacactcgtccagctggaccaatatgaaaaccacggcttagtgcccgatggtgctgtctgctccaacctcccttatgcctcctggtttgagtctttctgccagttcactcactaccgttgctccaaccacgtctactatgccaagagagtcctgtgttcccagccagtctctattctctcacctaacactctcaaggagatagaagcttcagctgaagtctcacccaccacgatgacctcccccatctcaccccacttcacagtgacagaacgccagaccttccagccctggcctgagaggctcagcaacaacgtggaagagctcctacaatcctccttgtccctgggaggccaggagcaagcgccagagcacaagcaggagcaaggagtggagcacaggcaggagccgacacaagaacacaagcaggaagaggggcagaaacagnnnnnnnnnnnnnnnnnnnnnnnnnnnnnnnnnnnnnnnnnnnnnnnnnnnnnnnnnnnnnnnngacgggaggctgtgtctcagctgcagacagactcagaagccaagtttcactctgaatctctatcttctaacccttcctcttttgctcccgggtacgagaaatagagtctactcctaatgatatggaggacatccaggagctcattcgatcagncccagaaatagatggaatgaatgggaatatatggatgaaaactcctactggaggaaaccaaacccctggcagcctcctgcagctggcccccacagaaggc

SEQ ID NO: 367897 - DNA, 1024 bp, Homo Sapiens
  misc_feature (705)..(762): n is a, c, g, or t
  misc_feature (909)..(909): n is a, c, g, or t
  misc_feature (934)..(934): n is a, c, g, or t
  misc_feature (996)..(996): n is a, c, g, or t
gggtccggaattcccgggatcacgggacgcgggcggatcttctccggccatgaggaagccagccgctggcttccttccctcactcctgaaggtgctgctcctgcctctggcacctgccgcagcccaggattcgactcaggcctccactccaggcagccctctctctcctaccgaatacgaacgcttcttcgcactgctgactccaacctggaaggcagagactacctgccgtctccgtgcaacccacggctgccggaatcccacactcgtccagctggaccaatatgaaaaccacggcttagtgcccgatggtgctgtctgctccaacctcccttatgcctcctggtttgagtctttctgccagttcactcactaccgttgctccaaccacgtctactatgccaagagagtcctgtgttcccagccagtctctattctctcacctaacactctcaaggagatagaagcttcagctgaagtctcacccaccacgatgacctcccccatctcaccccacttcacagtgacagaacgccagaccttccagccctggcctgagaggctcagcaacaacgtggaagagctcctacaatcctccttgtccctgggaggccaggagcaagcgccagagcacaagcaggagcaaggagtggagcacaggcaggagccgacacaagaacacaagcaggaagaggggcagaaacnnnnnnnnnnnnnnnnnnnnnnnnnnnnnnnnnnnnnnnnnnnnnnnnnnnnnnnnnnctaaggagggacgggaggctgtgtctcagctgcagacagactcagagcccaagtttcactctgaatctctatcttctaacccttcctcttttgctccccggggtacgagaaagtagagtctactccctatgataatggagaacatcncaggagctcattcgatcagcccagnaaatagatggaatgaatggaatatatgatgagaactcctactggaagaaacaaaaccctggnagccctctgcagctgccccacacaaagc

SEQ ID NO: 367898 - DNA, 1305 bp, Homo Sapiens
tggtggacaaaagcaggcacttccaaatggctttatgcactgcctgctgggagtcagtcttaaatcttgaaaaacatttccctttaagggggcaccacagcatcaccatccctgacaactgggcaagtcagcagaataacactgatgctcttcctccatcttctgtggtgatggagttattccttatccaaatcagtgccttaaagcaatcctcttcctcgttgagagtgaaatggttgcaaggaactttccccgtgtaccgccgctgactgctgttgggaacctccctgtttgtcaggtgttgactaatatcagcctctgtagggcatgggacctggtactgctgcccggtgcagaggatgaggtggtcgtagggcacgatctcgtccgtggaaagcacaacgtgcttggctgctcggtctatgccggtcattctacccaccacgacattaacccaggagcacagtgacatcagtgcataatctttatcattaaaacagtggtcgctggctaaaaatttcctttgttcagtgtccagaagtttttttcctgggagtccatgagttgaaatcagggtaagattattaaacttcatgtgagagcaaaataccaatgtctctaggaaggaaattccaacactggatgcaccaaccacaatgatcttggcattgacagtaattttaggttccaatgttagttttctgtttgtatggcttaaagcataactcatctgtgcatgggtgcttggccatggctgttcattgtcatcacttcaagagagtcatgtgcattatacgcacaatatgtgttgagtttaagtgcttctgacaatgtcttcaaaaagattacagcatgatttggcattgaaatgaatgcttattgttgtgttcccataaaggcccagaaactgagcagcaaggtgcaaatttgatattagtgaagcaaatattagtcattggaggaatggatgtaattccatgttttcttgcaatgcaacgattgagtgcctcaaatggctccatgtctctcctttgccaccttgagtagtgtaaagtgttcagaaatggcctccgggtttctgcaacattctactcgaatcctatctgacatgtgtcagctagctggcactccaggtatcattctcaatacagggtcagccacaaactggagaaatgacttctcacccagaagttctcctaaccgctttggttagggttttatggaggcttcatcgtgtaggcatggttgatgaaatcattggccactggtggttgaactcaacttctggctcctctcctctccgcg

SEQ ID NO: 367899 - DNA, 1840 bp, Homo Sapiens
gtgagagtggcagcgagggcagcgttcgccgcccctcaggccccgtcccggcgccacagccgcctgcgtttcggtttgtgagcaggcccggccgggccaggagcgagagcgagactctggagcggtcgccgccgcagtcgcccgtggccgggaaaggcgggcgatgcccccaaccgccgctcgggccatgtccgaggggctgcgcgtgttgtctgccgccgggggcgccgtgcccgcctgtcgtcccccgggcccagccgctcgtccgaggcccgcgaggagctgcgccgccacctcgtgggcctcatcgagcgcagccgggtggtgatcttcagcaagagctactgtccccatagtactcgggtgaaagaactcttttcttctttgggagtcgaatgtaatgtcttggaacttgatcaagttgatgatggggccagggttcaagaagtgctgtcagaaatcactaatcagaaaactgtgcccaatattttcgtgaataaagtgcatgtaggtggatgtgaccaaactttccaggcatatcagagtggtttgttacagaagctccttcaggaagatttggcatatgattatgatctcatcatcatcggtggtggttctggaggcctttcatgtgcgaaggaagctgccattttgggaaagaaagttatggtgctagactttgttgtcccgtcacctcagggcacatcctggggtcttggtggcacttgtgtaaatgtaggttgtattcctaagaaattgatgcatcaggctgcccttttggggcaggcattatgtgactcaaggaaatttggctgggaatataatcaacaagtgaggcacaactgggagacaatgacaaaagcgattcagaaccacatcagctctctaaactgggggctacaggttgtctctgaaggaaaaggctgtggcctatgtcaattcctatggagaatttgttgaacatcataaaataaaggcaaccaataaaaaaggacaggaaacttattatacggctgcacaggtttgtcataacaacgggtgaaaggccacggtatttaggaatgccaaggagataaagaatactgtattactagtgatgaccttttttctctgccttattgccctggcaaaacattagtggtgggtgcctcttatgttgccctggagtgtgcagggtttctggttggctttggcctagatgtcacagttatggtacgctcaatccttctccgtggcttcgaccaataaatggctgaaaaagtgggtttctacatggagcagcatggtgtgaagttcctacggaaattcatacctgtgatgggtcaacagtctggagaaaggttcacctggcaaagctgaaagtgttgggctaaaatccacttgaaggaacctgaaaaccatttgaagggagtctataaacacctgttttgtctagcctattggggccggcgatttccctgttacaatggacacattaggctttgggagcacgaaattggtggttcaaaaatttaactcggaaacaaaagtggctaaacaaaaacccttgcccaaagtggatggtgtgaaaaccagaacccccccggttgcccataatggtccttaactggctggctctgggtcgaattattttttgggcaggggaatcaatggccaataaacccttcaaattccctgggtccgcccaattaccccattcaggggctgaacggctgcccttcaaatcccacgacaaaacttgttctttgccggggcccctttctttttcacaaaaaaagtggcgcggtctttacatttcccccctggtttcctccaccactaacaggggggtttctatgcc

SEQ ID NO: 367900 - DNA, 960 bp, Homo Sapiens
ggcagtactcccggcgtataaggtagcgaggctgggtggcgaattcggcacgagggatggcggaggccgtggagcgcactgacgagctggtccgggagtacctgctcttccgcgggttcacgcacacactgcggcagctggacgccgagatcaaggcggacaaggagaaggggttccgggtggataagattgtggaccagctgcagcagttaatgcaggtgtatgacttggctgcccttcgggattattggagctacttggagcgtcggctcttcagccgcttggaggatatatacagacccacaatccacaagctgaaaaccagcctgtttcgattttatcttgtctacacaatccagacaaacagaaatgacaaggctcaggagttctttgcaaagcaggccacggaactccagaaccaggctgagtggaaggattggtttgtcctgcccttcctgccatccccggacaccaaccccacctttgctacctacttttctcgacagtgggctgacaccttcattgtgtccctgcacaacttcctgagcgtcctgtttcagtgcatgccagtccctgtgatcctgaactttgatgcggagtgtcagaggactaaccaggttcaagaagaaaatgaagttctgcgtcagaagctttttgcattgcaagctgaaatccaccgactgaagaaagaggagcaacagccagaagaggaagaggccttggtccaacacaaattggctccttatgtctccaaacatgggaccgcctggggagactcgggaacttgccatgggtgtgcagccaaaggaatgcctccctctcccagtcacttcgtgtggggcttcctgtcctcgctgcttggctcagaagtacgaagaagccctcaggttggcgctgtccaggacctcttaactcagaactcggcagaaaaaggccttcgtggtcagggcccagggaacg

SEQ ID NO: 367901 - DNA, 1209 bp, Homo Sapiens
ctaggacatgctagatattcaaagcttgttgaataaatgactgaaaggatgcagaattttcaaaattccctcttcaagtacttcttctacaggaatgggtagagtgggaagtgaggagacagggtgggtatgtgggtgggaatagggcaagtgacttaagctggtgtgggtgggctccagtatccacttctacttcaatcagagcaactcaacaatgctacatatataagcccactatgaaaatcggatattgaatcagctgggaaaatgaattccttactgagcatttcaacttaaacttgggttccaagtggattaaacagatgatgttgtaacactgttatcagcctgacaggaaatgcatagagacaccagtcctcgtttcttaaagtggaggagcctcagctagcaaattgccacttattagcttgtctcacctataaaagagccatggaagagaagtgcaagagaactgaagtgatttcctgatgacagcagggggtgctctcactagactgaaggacagatacattctcagagcagtaggaaaggaataacacgattgccttactacgactctatatgagactttagaagtgcctaatacctgcctggagcaaacagaattaatatgctctattccacggctctgccgtcttcaactgtgataaatacttaacaaatgtatcccctgaacaagtcattaacttctggaatataggattcagccaccacacttagaactgtgtgaaactgtggtgcaatctgtaacaggatgtacaccacacatttaatcagggaattgtgtagatgaaagctacagagacctgtagtgaactaagggcatctggcccagccaaacattccaatcacgaaacgatcgaaaaggaaatccatagaatcttattataaacttacaaaaaggataactgtgggtctcggccataaactgaagtaatacagatgaactggacacatatgttgcacaataggtgattcagagcaatatagcctatgctgttttatgatatggaaagcaatcaaatcttatttgcaaaaaattcagatcaattgaattttaatgagaagcaggtgctggagtgtagcatccacaaagaattctgggaatgtttaaaattagtcccatatttgccaggagacagttgggtacataaactgttttatttcatactcctgggttattcggac

SEQ ID NO: 367902 - DNA, 912 bp, Homo Sapiens
  misc_feature (41)..(77): n is a, c, g, or t
  misc_feature (828)..(828): n is a, c, g, or t
tatagctaattggggaccggagttcacgcggtggcggccgnnnnnnnnnnnnnnnnnnnnnnnnnnnnnnnnnnnnnatcaggccaaatcggccgagctcgaattcgtcgagagcggattccattcacagactcttgttgggcagcagccacccgctcacctccatccccaggacttagagggacgcagggcgttgggaacagaggacactccaggcgctgaccctgggaggccaggaccaggccaaagtcccgtgggcaagaggagtcctcagaggtccttcattcagcggttccgggaggtctgggaagcccacggcctggctggggcagggtcaacgccgccaggccgccatggtcctgtgctggctgctgcttctggtgatggctctgcccccaggcacgacgggcgtcaaggactgcgtcttctgtgagctcaccgactccatgcagtgtcctggtacctacatgcactgtggcgatgacgaggactgcttcacaggccacggggtcgccccgggcactggtccggtcatcaacaaaggctgcctgcgagccaccagctgcggccttgaggaacccgtcagctacaggggcgtcacctacagcctcaccaccaactgctgcaccggccgcctgtgtaacagagccccgagcagccagacagtgggggccaccaccagcctggcactggggctgggtatgctgcttcctccacgtttgctgtgaccaacagggaggacagggcctgggactgttctcccagatccgccactccccatgtccccatgtccttcccccactaagtggccagagaggccctggacanactcttgcggccttggcttcatcccttctaaggctgtccacacaggagccggtgctagggggaagcatccccaggctgactgag

SEQ ID NO: 367903 - DNA, 897 bp, Homo Sapiens
tcagcgtgtgtcatgtcttggctgcgtttctggggcccatggcccctccttacgtggcagggtattgtctttactagtcaaggaggctcagcctctggtgtgggtcaaggacccgctccagctgacctctaaccccctggggccacctgagccctggtcttcccgctcctcccatctcccatgggaatctccccatgcacctgctcccccagcagccccgggggactttgattacctggggccctctgcttcttcgcagatgtcagccctgcctcaggaaccaactgaaaatttggctccattcctgaaggaattggattcagctggagagctgcccctggggccagagccgttcttggctgcacatcaggacttaaatgacaagcggactccagaagaaaggctcccagaggtggttccgcttctcaaccgggatcagaaccaggccctagttcagcttcctcgcctcaagtgggttcaaactacagatctagatcgggctgcaggtcatcaggcagatgaaatacttgttccactagacagtaaggtttcaagaccaaccaaatttgtctgtttcgcccaagaacctgaagaaagatctagctgaacgttggagccttcctgagattgttgggattccacaccaattatccaaacctcagcgtcagaaaacagactttgccagatgatcatttgagtatggacacactgtatcccggcagcctacctccagaactccgggtgaacgcaggatgagcctccagggcctcctgagcaagatggactttctcaattccatctaggagcccagaagtacaaaatcccggagacgcttggagacgctccagatactcttcactccaggaagaggcccagagcggcagtctacaggtccct

SEQ ID NO: 367904 - DNA, 738 bp, Homo Sapiens
ctcacatccagtctctgatcaggaaagcaggcacagccttgggaagaatggataagcatggtgtgaagacccccttgtggaagaaggaaacggaagagctccgggccgaggaggcggagcaagaggaagggaaggaggggtcggaggacgaggacgaggacaaccagaggccgctggaggacagcgcgacggagggcgaggagccgccgcgggtagcggaggagggcgaaggccgcgagcggcgctcagtgtcctactgcccgctgcgccaggagtccagcacccagcaggtggcgctgctgcggcgcgcggacagcggcttctggggctggctcggccccttagcgctgctgggcggcctaacagctcccaccgacaggaagcggagcctcccggaggagccgtgcgtgctggagatccggcgacgaccgccgcgccgcgggggctgtgcttgctgcgagctcctcttctgcaagaaatgcaggagtctgcacagccacccagcctatgtggcgcactgcgttctggatcacccggatctgggtaagggcgggggccgatggagaactcctgagcgcccacgaatcccaagctttgtgccctcaaatcagttacctgggcccgagacgcgccttaacggagccttctctcttgggaagcgcgggaagccctcattacaagacgcaatacatagaagggaccgaccacttactcagttgctagccagaggtgcgcgca

SEQ ID NO: 367905 - DNA, 1398 bp, Homo Sapiens
  misc_feature (347)..(355): n is a, c, g, or t
  misc_feature (525)..(533): n is a, c, g, or t
ggggaacggattgagaggggatcttagtgggggtgtattgccgcggtatatcgagaaggggtctcgactcgggggcggatgtgatggttaatatgggggagatagccgacgggtggagaaaatattttttggaaatggttaatcccccgttccataagaggtcgcccccgtcgtgtgtggtgtacacctattattcgggggaggaagacatgggacgaaataagttgggtcgtgttttgtaagtggagaagggggaaatacgccgggaggcccaatgtccaatggtgggttttaaaaatagaagaaagggtgggcaaaatgaaggttggcggcaaaaaggccggacnnnnnnnnngcaaggtggccgggtttacggttggaattgaagcgcgggccaaggtgtaattaaagcgggtgtgagatattgctttgggcatgagaatgggccccccggcgggtaagggtaaaaattaccaattgggaaacgcggtggaacaatgggggcgttgtcgggccgccattagnnnnnnnnntggcaacttcagagtttaccgccggtgggtgagacactttgctttccccttacgtatgccgcgggatgaggagggggggccgcagccatggccatgttcgggaagggtcaccacgttcggcttctcatcaagggccatgtgtcgtatcccccaggagagttactcgtcatcttcctcagggtcactgatctcttcataaatcaccagctgctttctctcacgcagtctgttgggtccaggcatgtttcccccttttgggttccagatctcttattgagccttctcagaaatatttgcttgtcctggggggtgcagttggtttcccatcgttttgtgggccagatgcgttctgacactcccttcgaatcattttcgtcctctgctggcttcttgggcatgatcttcgggatgattctgtggagcctgccgaaagtcatctgaggatgttcaacctgaatcccacggttagggtcattatccaaatcattcccctggaagtctgcggcccgtttattacacatgaaaggtgggagggtgaccttgaaacctagtttagtcatagcctcatactttctcttcatatacacatagaagattttctccgaggatttcatcttttcccactcttccttagagaagtatgtggcaatatcatcaaaggccttgcggatcttctctgatacttgagcaccaaccctgggtctccttgcaaaggcgtcgtctccgttcatggcaccaggagcagtctcacttcagagacaagcagtggttgcgaggtcggcagcagtggtggcgagttggcagcagttggtgacaagtgtggctggaggaggagaaaatattctgcaatgtcattgctccagga

SEQ ID NO: 367906 - DNA, 854 bp, Homo Sapiens
cgatctcaatccccccagcatagaacaaggggatctggtcaggcttggaaagggtctccaggaggttcttggtggtcacggctgtgttctttcctgaatccagcagttcgtgggcttccattttcttgaaggtctgctttcttcctgaagatctacttgattcaggtaacctttcacctgggtttgcagcttggggtttagtttctaagatcttcttataacactctctagacacactgtagttcttcagggccaggttggcttttcccatgtgaaaatatgcttttgtgcatttttcatcacacttgagagcccactcacaatccaccagtgccttctcatagtcctcaagtttcatataagcctgggctcggttggtgtacagcactttcatgtccttcagcttctccaaaccctcactgtagcgcaggatagctgtgttcataattgccttcagcaaatgcttcattccctttttcttttagggcatccgccaagactttgttttcccttcttctcttggctcgttcctttgcatccttctccacagatgccaagaaggcctctgagtttatttcttctgcactcttcagagcagtttgtggaggactgatcatagtcttgttcaaggtggtcctgcattcatcctcctcctggtcttcctccataagcagtagtctcttttctgtctccaggacagctttctgttgcacaactgggtcatcagaattcatctcctgaattaaattggagatttcataccacattctttaagaaatttctgcaaatctttctccatttatcagcagtccacttgtgaaccggaatacctgattcgcccagctttggacagg

SEQ ID NO: 367907 - DNA, 1225 bp, Homo Sapiens
aagctggatgttactcctgtgattatgagaacccacataaataggttggctccactcactccagagccctgcctctctgcacatggagctcactgctgctctcacttgaacatcgtacttagaaagatcatcaattattgagatgaatgcattggtcatcaatttttctatctgcaaatatccattccttgtattgtgtatttttacttcataatcaaagcaatggattggaaaagcagacactggtttctcccattggatagagagacgagttccttcaatctctgctgtgacattcagtggaggatttatttgatcaatggcgtgaagggcaaacagctgatcaaagggcctgatagcagagtgcttgctggagccgttaacaagcaccgcaagccagtcacgccctttgctgaggataaaagtcctgggaaaccagcatgcgatatttctccccagtgtgtctttgctgtattcttggcattcctcaatccaagagccatacctatagtagagaaaatactgcgtgtcctcaggggcatctgtgccaacaagccaggtgcagtgaagggaaacttggtatgaccttaaacgtgaataattgtcttctgtagtgtttgtggtgcaagttaaattcacaattgaggttccaggagaccctggtggggcatgaagttcagcagaagcccagctgctggccagtagtgagtggtcgttctgcaggatggtccgcacacttgctgaaaagcctttgtggaggatggttacacatttgctttcagtgattctggtttcatagtcatcttcttttggagcgtttattttcacttgatattctagattaacattcctttgctcttgatcaggatttggtttccattgtaaaagaacttgagccaaaccagtaactttaatggtgaaattgacaggtgggagaagtgaaatcttttcatcaggaagtaagtcagcttgcagtatctcagtggcccccaaaaggatgagtaatacatgcgccacgatgatcatatcctgtctacagacgatcctcttgttccgaccagtactcaacagaagatggcgaggaccgtgtctgtcgtgtctatgctcgtggctgcaaccccagcatctagcatagcgtcaggcacaggaccaatgctcaatgtgcctggcccgaacagtccgtcctaccctggggtaggttttattaacagtctcgttttgcaaa

SEQ ID NO: 367908 - DNA, 875 bp, Homo Sapiens
  misc_feature (348)..(405): n is a, c, g, or t
  misc_feature (633)..(646): n is a, c, g, or t
tgcaagggtgacagtggggggcctctggtctgcaccccagagcctggtgagaagtggtaccaggtgggcatcatcagctggggaaagagctgtggagagaagaacaccccagggatatacacctcgttggtgaactacaacctctggatcgagaaagtgacccagctagagggcaggcccttcaatgcagagaaaaggaggacttctgtcaaacagaaacctatgggctccccagtctcgggagtcccagagccaggcagccccagatcctggctcctgctctgtcccctgtcccatgtgttgttcagagctattttgtactgatataaaatagaggctattctttcnnnnnnnnnnnnnnnnnnnnnnnnnnnnnnnnnnnnnnnnnnnnnnnnnnnnnnnnnngaggggggggcggccataaaaaatttccccggggggggacaaaagataagggaacacccagattttgttgaaaccaagggggccccccaaaaaggggacggcataattagagagcaggaagagacggcgcgccgcgggattaagaaaagagcgggagaggagggaaaaacaacggcgaccacggaggagacacaaccttggggggaggaagcaccccacacaagaacnnnnnnnnnnnnnnacacaaaataggtgggggagccaaaaatacatatctaggagaaatattataagatcactggcggagtggtaaaataataaaaattttgaaaagaccgatgattattgtggtggtgtaaaaacaagagagagagcatagaatatgatgggatggatgaagaaaagaagattgtggtaaaacgaggaggataattataattatgaagagaaaaatttttttacagaagggc

SEQ ID NO: 367909 - DNA, 1010 bp, Homo Sapiens
gtgggtcttctcctcggttcttgagattggtggtgctttctcttcggtttgtgatgcccgtggcacttttgggaagattctttccgacacactttgggtaggaatccccccggggaccccttgtggatggcccccatccagccgtttctccttgcgcagcccactgggccctgccgcttcaccgccagccgatgtgatgtcctcccgagtctgaggatgacgtgccagtgggcgagtatggggtgctggacctcgcagacttggaggaatgcgcactgctggacgcggcctggcccacagaaaagaactgttcatcagcactaaaccgcctagtcatctgtttcatttcactcctcagtctgttaatgccactcctctcagttttggtgactccggtatggcccacctcgtggatggagatggtagggctggatgtggaggagtggatagggcgcacacttctttcaacgccaaactctttcccacttagaatatggtgcaggagatttttcatatcgaaagggctgaggttcatcaaactttcagaagcctcttctcctgagcagttcaggctccgtgccagctccgtggccatcacctgaatgatcagtccaatccggagtctcagcatctccacaaagaggctgggctgcgccctgacatacatggccaggtaaaccacaatctcctgcgtgaggacggcaatgctgatgtcctgcccactggcctcgtagatgagttttgtgagctcctctgggggaaggggcgcagagatgatcttctcccggggctcgggcggcaggcccacggtgagctgcttctggtgcgaaagcaggtctgtgcaggcctcagccaggacctccactttcttcctgagaaggcctgagatgtagcgaatcagaccccactcctggttcaagccggctttcccatagagctcaccaagaaggttttgaacggtgaccccgtgctgtccagagagatttgtgtcccagctgggaccctttatg

SEQ ID NO: 367910 - DNA, 514 bp, Homo Sapiens
  misc_feature (306)..(418): n is a, c, g, or t
atggcaaccaaggtcactgaaaacagacctcacctatgaggttgaaatagtaccagtgccatctgagctccaggaaaaaaggccccttcacagcttctaaaacacatagttgctgccaaaataccataagctgttttctaaaagccactggttttacccaaaatggtagtatccattcaaccaatctgacttccctgagttttgaaagtctctaagctaaggacagaaccgttgaaaagctgcttctaatttaattctccctaaattgagaaacctccacatctattaaaatcaggatctactttnnnnnnnnnnnnnnnnnnnnnnnnnnnnnnnnnnnnnnnnnnnnnnnnnnnnnnnnnnnnnnnnnnnnnnnnnnnnnnnnnnnnnnnnnnnnnnnnnnnnnnnnnnnnnnnnnaaagcaaaagcagagagaccgatgaatcaagcatgaagcagccacaaaataagagaagagacagaagagaacaacagacacaaagcacacaagcga

SEQ ID NO: 367911 - DNA, 848 bp, Homo Sapiens
ggggaaacttaggctaggtcgaggctgggtggttgaattcggcacgaggctgcggctgggcaccggctccgctcccgcgtctgcccgcgctccagctgcgcatggcccggccccggcccggctcggcgtggccccggcctccaagcgaaggcgccgctgccgctgggcagctcccagggccatgaggaagcggcggcagccactgcggcccgcgtcaaggtgaccggccgggactgcggcggcggggagagcggcggacttctccagacaggttatgttacctgcagaggctgccctgaagctccctgtggcctggagactatgtacaagaggaatggtctgatggctagcgtgttggtcacctctgccactccacagggcagcagcagctcggactctctggagggccagagctgcgactatgccagcaagagctatgatgccgttgtcttcgatgtcttgaaagtgaccccagaggagtttgctagccagattacattaatggatatacctgtgtttaaagctatccagccggaggaactagccagctgtggatggagtaagaaggagaaacacagtcttgcccctaacgttgtggcctttacccggaggtttaaccagaaaacttctagaactcaacaaccttcattctctcatgtctgtggtatcagcattacaaagtgctcccatcttcaggctggacaaaaaacctggggctctttttaaatcgaaaaagacaagactacctttgagaacattgggactacctgatgtcgaaagaagataattacaagcggacacgggaatatatccgaagcctgaagaatggttccaagtattcctatcta

SEQ ID NO: 367912 - DNA, 819 bp, Homo Sapiens
atcacttcttagctgtacctccgagaacttccagaaccagttattccttatgcgaagtatgaagattttgtcatgtgccaaactgctcagcaaggaagaggaagcaggtgtaaggaattagcaaagcaggtgaagagttgccagtggtaaattacaacctcctcaagtatatttgcagattcttggatgaagtacagtcctactcgggagttaacaaaatgagtgtgcagaacttggcaacggtctttggtcctaatatcctgcgccccaaagtggaagatcctttgactatcatggagggcactgtggtggtccagcagttgatgtcagtgatgattagcaaacatgattgcctctttcccaaagatgcagaactacaaagcaagccccaagatggagtgagcaacaacaacgaaattcagaagaaagccaccatggggcaggttacagaacaaggagaacaataacaccaaggacagccctagtagacagtgctcctgggacaagtctgagtcaccccagagaagcagcatgaacaatggatcccccacagctctatcaggcagcaaaaccaacagcccaaagaacagtgttcacaagctagatgtgtctagaagcccccctctcatggtcaaaaagaacccagcctttaataagggtagtgggatagttaccaatgggtccttcagcagcagtaatgcagaaggtcttgagaaaaccaaaacacccaatgggagctacaggccagaaggagctcttcactgaaggtatctggtaccaaatgggcacgcacagtgtcagaatggaacggtgcgcatg

SEQ ID NO: 367913 - DNA, 789 bp, Homo Sapiens
cacagtttctccctccagcttatccggctctcatggctggcaaagcgtgacaccagtgccacaggtaaactgcaatcctgcctgcctctcttcccaataatgtggggagagcacggttttgctatggaagatagtcggctttgacctgaggctgacttgagagtcccagctgtcatgtctcttccaaataagctgctgaacttggaattatcttggctgaataattaatcaggactaaaaatgaacctcaaactgcctgggctttgcttaaatcctacacaggcactagcgatcaccttacgatcgaagacagattcagacgaatctgcctctcatccataggtggccactaggcaactcctctgggaccatttcttcctgctctatgctcccatgaccttcagtcataactccctcttcccctgcgtggaaacctacttctttgtaaccgtcctcataaggtaaaataggacccaggctggtgaacaaatagaatacatttgctctattctaaagagaagcattagagcaagggatggaaaaactgatgcagagacataatcgagcttctgggctacatcataaaatacttgagcagtcagcagaacatgtaagaagagaattctactccccaccacacactataaccatctgcaaacctgaatgccgagactaagcctcaccagacgccagcagcataaatgagaggagtcacttacccctctgaggctcaggcttctcgactggaaacaaaaacaagagaataacaatatcagttcagtggggaac

SEQ ID NO: 367914 - DNA, 1018 bp, Homo Sapiens
ctcagaggaaggagcccctccctgtggagccagacccccacaccatggcgagcgtggtggtgaagacgatctggcagtccaaagagatccatgaggccggggacacccccacgggggtggagagctgctcccagctagtcccagaggctccccggagggtgaccagccgggccaaggggatcccgaagaaaaagaaggccgtgtcgttccacggggtggagccccagatgtcccatcagcccatgcactggtgcctgaacctcaaacggtcctcggcctgcaccaacgtgtcactgctcaacctggccgccatggagcccactgactccacggggacagactccacagtggaagacctcagcggccaactcacactggctgggccccctgcctcccctaccctaccctgggatccggatgacgcagacatcacggaaatcctgagtggggtcaacagtggattggtccgcgccaaagactccatcaccagcttgaaggaaaagaccaaccgggttaaccagcacgtgcagtctctgcagagcgagtgttctgtgctgagcgagaatctggagagaaggcggcaagaggcagaagagttggaggggtactgcattcaactcaaggagaactgctggaaggtgacccggtctgtggaagatgctgaaatcaaaaaccaacgtcttgaagcagaattctgccctgctggaggagaagctgcgctacctccagcagcagctgcaggatgagacgccgcgacggcaggaggccgagctgcaggagccggaggagaagcaggagccggaggagaacgcaggagccggaggagaagcagaagccggaggcttggcctctcctggaacagccgtgggccccgccgccacgtcccagggctgcccggcccgcagggagtccgacaaaccctcgcggcacacggctggtccccgcaggctggggaatggggcctcgggctggcgagggccctacgtgagcgaggcaggaattgcagaagctgtcaccg

SEQ ID NO: 367915 - DNA, 882 bp, Homo Sapiens
acgctttcaacaaaagcaaacaagaatgctactctctgaaatgcaatttagaaaaagaaaggatgaccacaaagcagttgtctcaagaactggagagtttaaaagtaaggatcaaagagctagaagccattgaaagtcggctagaaaagacagaattcactctaaaagaggatttaactaaactgaaaacattaactgtgatgtttgtagatgaacggaaaacaatgagtgaaaaattaaagaaaactgaagataaattacaagctgcttcttctcagcttcaagtggagcaaaataaagtaacaacagttactgagaagttaattgaggaaactaaaagggcgctcaagtccaaaaccgatgtagaagaaaagatgtacagcgtaaccaaggagagagatgatttaaaaaacaaattgaaagcggaagaagagaaaggaaatgatctcctgtcaagagttaatatgttgaaaaataggcttcaatcattggaagcaattgagaaagatttcctaaaaaacaaattaaatcaagactctgggaaatccacaacagcattacaccaagaaaacaataagattaaggagctctctcaagaagtggaaagactgaaactgaagctaaaggacatgaaagccattgaggatgacctcatgaaaaacagaagatgaatatgagactctagaacgaaagtatgctaatgaacgagacaaagctcaatttttatctaaagagctagaacatgttacaaatggaacttgctaagtacaaagttagcagaaaagaccgagaccaggcatgaacaatgggttttcaaaaggttcaagaaaaagaagcttagtcagggggacttctcaggagaagtggatgcttaaaagagaa

SEQ ID NO: 367916 - DNA, 1373 bp, Homo Sapiens
  misc_feature (376)..(376): n is a, c, g, or t
agcagaatgggcacggagcgtacgtgagggtcccaggatctctggaggccactgaaccagcccttcgggggtccctgtgcagggctctaatcatagttggggtctagcctgggcctggcgtggggtgaggtggctggtcaggtagcgcatggctgagcggatgccctccacggtcctctgctccactgtctccagcacacgggtgatggtgcgcatgtctgagctggtccctgacaccagcccagaggagaaggccgatgctgacgcttcccaccaggctggggaccgagcgcaagctgggccccgagctggtgcagcaggtctgcccacagtcctgtggccggaattccaggaagcctgtggctatgcccatgcnccatggtggtctcggaccacaccaggatgtctgccagggagctgatggagccttcgcccctgtccagcaggctgttcatggagcgcatgtagctgttctcctcactggccgtgtacaggctggggtccaggggccttctccccagggccacctcgtgggggccaggcgacggggacacactgcctgctggagtggagggaagaaccaagtctgcaggtctcctaagctgtccaccacatttgcccccattgccactggggactcatcagatggtaaagcttcagcttcagggtgtggggcctttggatgctcagctttctcctcagcagacttggtggtgctggcagcctgagggccatgctggccattggcacctgctgtgacatggtcagcatcactctcgacgggctgagcctccatgtgctgggtggactgtagctcagcactcggggcagagggggctgactccggctctctctcaggaacactcgccatttgtgacatcttgtctttacccaggaggtgacttgggaaaaccactagactctgacttgtccttgcgtcttgaacctgcctgtcccacgctggattctgaaggctcatagacacttgcaggggacttggattttggctgggaagcagaggtgtgatttttctgggtgtcttctggccgtgttctggaacaactgcactcttgtctttgtctccagatgttgatatggccctgggggtggccgtcttgaaggaggcctgatctatatcctgccagtcagtggatgcgacagagctgctcactgccaagacatctgctgtgagtgggacctgaccttggggctctcctgctgggctgtccttagacctgctgtcatccacgttgcccagggggtacctgggagtgccatgtatggggctgctggtggagccggcctccccctagggctctcctgtggtcatctatgccctttgctgcttgtggcggttggagggagtggctgca

SEQ ID NO: 367917 - DNA, 996 bp, Homo Sapiens
gaaagacatctcatcagcagataagtgtctgtacttctgccctgcaaagccagctgccattacactgtctgaaattggggatgtggacttcttgggaagaggacactttcatgcttgttgaaatttagggagttaatgatagttatttcattctctgttcttctctgctccaagtgccctactcctctggtatttagcccttgtagtctagctgaaatcatgtcagtgtattacaggcggatccagtcaagcgcattctgcagagaaatgacaagtggcctggtcgcgtggtaaaagctatcctaatggcaggtggcggcatggtagcacttagtgcttacttgatggacagctagggatctcaatgtcagtttccaggttctgtgtcaccatggttctagaaagataatttgtattaactatcaccaaggagaagctaccctggcagagagctgctgttcttgtaaggtggcctggacacctgcatacggtaaactgaggtattttgacccttctgcttaataacccctactggccatttggcttgaattgaagccccacatttggcttgaattgaagcctcacatttccaagtggctcaaggccacttggaaccaagactgtacaggagtaactatttctgagttaaaatggtaccattaagtgttcctgcaacgttactatttaaatgttcatgggcagagctctcaatttgtgtaggattagaactaaagaatgttttgcattccaatcttgtggatcatctgagattttcttgtccgtgttctgatcaggcccagatatgggactactgctgcagggctgcaggctccctcacaatcactgggaatcatgaaacaaacaggcaggcaacatctgtgtctgtaattcccctagtaccttcttgttaactctgaatgctgaatggggtctggcctctgccaagtttcctcactttagttgtcccgcagggtcccacaacttctggtttacaaa

SEQ ID NO: 367918 - DNA, 1030 bp, Homo Sapiens
tgcttggagaagccaacgggggtggaccattaccgtgggcccaaaactcccggactttaatctacacggtttaaaaataggctctcggacccacagggaatggaaacgcgtgtgggatccctgctgggccacctgccttgtacctccagatatttttcccggcaccagaatctttggtaatgagctttccaggggttccccaaagactgagtggctcttcgtccatcatagactcccacaatattcaggaattcccagatctctgtcctcagtagctgagttgccatttaagaagatcacacccaggagaggcatcagaagctttctcctgggaaagtcccaggaactgagcagggattcctcatcagtgaggtctaccttgtcgatgaaggtgtaagtgtggccgttggggttgactttattcagctcaaggccaaagacaacactgaggccctcagaggctttcttgaggatctcagggaagtgctccctgaaccttttgccaacaattttcagcatttctccctttgtaacggacttttttattttatacttgtacaacaggaactgcaccaacgaccctgacttcctggttagaggatcttcgcttgggctcttagtggatgttgaggcctgggaggaacttgcatttttctcaccttggtggctcttggcaccttttttagattttgtggatgaaacacccgcagccgcagcagcggcagtggttggggctctctgaggcttctggggaatgccagcagcaggagagcttgaagcagcacccccagaaacagaagaggaacagcagggggcctcttcttcctctgcttcagtgacctgaggaacattgagaccccgggtctcatctcgggccttgcggcgtttctcacgggcacggagcttactcttctgaccacgaggcatgatggcttgactgccgaccagtcctgagaattcacccctggctgaccagacgccgcaccccctacactcgctcgggtcctcgccatgcaaggaattccggacc

SEQ ID NO: 367919 - DNA, 1072 bp, Homo Sapiens
ggaattcccgggatgccggcgcgcggctctctcagcgtcccaagagccactttctcgccagtacgatgctgcagcggttttccggttttccgcttcccttcatcgtagctcccgtactcatttttagccactgctgccggtttttatatccttctccatcatgcatcgtgagcctgcgaaaaagaaggcagaaaagcggctgtttgacgcctcatccttcgggaaggaccttctggccggcggagtcgcggcagctgtgtccaagacagcggtggcgcccatcgagcgggtgaagctgctgctgcaggtgcaggcgtcgtcgaagcagatcagccccgaggcgcggtacaaaggcatggtggactgcctggtgcggattcctcgcgagcagggtttcttcagtttttggcgtggcaatttggcaaatgttattcggtattttccaacacaagctctaaactttgcttttaaggacaaatacaagcagctattcatgtctggagttaataaagaaaaacagttctggaggtggtttttggcaaacctggcttctggtggagctgctggggcaacatccttatgtgtagtatatcctctagattttgcccgaacccgattaggtgtcgatattggaaaaggtcctgaggagcgacaattcaagggtttaggtgactgtattatgaaaatagcaaaatcagatggaattgctggtttataccaagggtttggtgtttcagtacagggcatcattgtgtaccgagcctcttattttggagcttatgacacagtttaagggtttattaccaaaagccaaagaaaaactccggttcttgtcttcctttttcactgctcaagttgtgactacatgctctggaatactttcttatccctttgacaccgttaaaagacgtatgatgatgcaggtcattaatttcccttataattacaactccaagctgcatccttaaaaatttaaagtggtgaggctaaacgggcatataaaggaaccttagactgctttgtgaagatataccaacatggaaggaatccgttcctttttttccggcgcctt

SEQ ID NO: 367920 - DNA, 926 bp, Homo Sapiens
cgtccgtcccccgcacccacagaacatcgcgacgacgttgcctaccgtcaagatgattgtggaggtgagtcgctctgcctgtctgatgacgacacagctgatctgtaagttgctgcggtccagggaggcggcggcggctgtggacgtcaggacgtggcccctcatcctggacacagatgatttgccaaagaagcggcctgcccagatctgcaaaccttgcaacccagacactcttgcatatctcgacttcagcgtgtccacaactgggatgctagctggcgtaaagatgtctcacgcagccaccagtgccttctgccgttccattaagctgcagtgtgaactttacccctctagagaagtggccatctgcctggacccttactgtggactgggatttgtcctctggtgcctctgcagtgtgtattctgggcaccagtccatcctgatcccgccctctgagctggaaaccaaccccgccttgtggcttcttgccgtgagtcagtacaaagtccgagacacgttttgctcctactccgtgatggagctgtgcaccaaggggctgggctcgcaaacagagtccctcaaggcgcgagggctggacttgtcccgagtgaggacctgcgtggttgtggcggaagagaggcctcggatcgcactcacacagtcgttctcaaagctgtttaaggacctgggccttcacccgcgggccgtcagcacctcgttcggttgcagggtgaacctggcgatttgcttgcagggaacctcaaggacctgacccaaccactgtctacgtggacatgagagctcttgagacacgacgagaatccgcttaaggggaaagaggatccccttcataattctggcccttggatgggaatcgggaaagaaaattcccggggggtcggatataattggcaacccaaaaa

SEQ ID NO: 367921 - DNA, 1131 bp, Homo Sapiens
  misc_feature (58)..(114): n is a, c, g, or t
cgttccgtcgcggtccctgtgtggtcgtggcctttgttatcggttgccttgggttgtnnnnnnnnnnnnnnnnnnnnnnnnnnnnnnnnnnnnnnnnnnnnnnnnnnnnnnnnngttttattgagaagagagtactatgattctttgttttttacaaaatgagatagaggttacaaatgaaataaacctactaaggtggtagaactgggatttacactcttaccaatgtgctcttaaagggagaaaggatgaaaaggtggttttcttctgaatgcaattgacagggcattacaggattttgagaaaggagttacgaggttttggatctgtgttggtaaatacggtgtacttttgggacttaaagataaggagcaccagttagcctccaaatgtgaggttgtctcgtgtcagtttcacagaacgtatgagacgggtctgagctagggcagtatatcgtgtgcgataaggagggattaactatcggagaggccttgagaacgtggaacactgaatcttgtcagctgatatgcgttattgtgctgctgaggctggggaaaacgtgatgtggaacgaggctcccaaattctctgaacgacctgggaaggtacctggatttacacaagttaggaacgcctggagaaaagtggatacgtatcttaacaggacatgtgaagtgtagcatgtttagcggacggtctcaaagggaaggttagatgctaatcagatagtactaagactaactgtactatcgtctttcactaagatatattgtaaattgcctggagaaattccagcgatccgagaacacaagacatgactcttttttggtacaaaacctttggtttcttatagaatgtacactctgaaaatagagccttaaatgggtcagtaagctagttataccattgtgttggaaaatatgtttacaacccaggatcaccgcctgcgtacttactcgacttaggatgtaccggaaaggactagaggaaactaggtaccaaggaagtttactatccacatatggaagggagcaacaaacaggcgattggaattgacgttctaactgagggagacacctggagcaggcaaccagcgagaacgaagcttcggactatatctaaaaaagcatcc

SEQ ID NO: 367922 - DNA, 1507 bp, Homo Sapiens
cccctgtgtcctaggagttatctcaccctgtcgaagggtaggcacttgccatgtgcagtgtccatcctcgtcgccgttcagaagcaccttctgttagaggaatgaaaggccccggtgttcctcgtactcaacagcggtgtgacccacaatgcgttggaaaccctgagagtgaggccaggatggagccaccggtccacacggacacatgtctctttcagcgcagcacgtttacctgcgtgggtgtcacttggagacacatgctgcttagctccttctgcagacggttagcggaatgccacttgagcaatcagtgctgcccccagcagaacatggatgttccccatgaggtcccagtttgagggcgatgtcacacttgttaaggcacggacactggtttgggtgtggaggcccagctgcatggacgttgatgagcagatggcttgaagaacatctccgaggtcagaggaacctgttcctgtgcacagctgtaatctcccttcccatccggcagcacgtagcggatcgtatgcatcactgagagggactttcttctcctcaatgggatccagggccacaaagcagcatttcttcttagatgtcctccacgatgcccatctggtcctgggtgaattcgttccccgcactgttcagcaggcccagcaggtaggctgtcaggtcagagcccgcgtagtccagccttccggtgatgctgggcaaaggataaccctcgtagatggggaccacgtaggacacgccatggcccacctccaccaccaggccggaggtccttccataggagtacatggacaggcgcgactggtaggcgatgtgcattgcaggggtgttgaaggcttcaaacagcatttcagcatatttctctctgttggtgtgtgggctcagtggcgggtctgaaaccaagaccgcatgctcctccggggcgatcttcatctcttgtcggaagagatattcccagatatcctgcactgtatcccagtccacgatgatgccatgtcgcagagggttaaccagcttgagatgaacgtttgtgttgttgagttcctgccccacgaatgtctccttgcgattatccccagtcttggcggtctccatgtagggcttgcccaccgttgttgagatcttgtgggtgggtcttggcaggccggcaaagccacatttacagtagccagtgcccaggtccacgaccactgctttggtcacctcctgcttgggcctctccttggctgcctttgattcagtaggttcttgtggctctgaactcgtatggcggacccacacggcccgcttcgccgggccatcccttaaagaggcagtctggagggcctgtgtctgcaggggggcctggttgcccaccttcttggtgggcccatcccccatgattgctgctggtggagcccacatgttgtcaagagccgcaccactcttagaaagttctcaatcccactggattcaaggcctgaaaggcctacatcagagatcccgggaattc

SEQ ID NO: 367923 - DNA, 1459 bp, Homo Sapiens
  misc_feature (720)..(734): n is a, c, g, or t
  misc_feature (1056)..(1056): n is a, c, g, or t
  misc_feature (1328)..(1328): n is a, c, g, or t
ccaagcctaggctggggacatggtgtgggaaagccagcaggaacgggggggccaagggcctaggagacaggagggcaggagcagggagggggcaatcaggatggtcagggaagccagagacggaagctgcaaaaattcaccaggctgtgtggacgggaggaggggctccgggtgaagagaagctgcccttcttgtggctcggagcttggggttgaagagaagagggggaaaggaaatccgatttccatccagttgttccccccagagctggtggagcatatcatctcattcctcccagtcagagaccttgttgccctcggccagacctgccgctacttccacgaagtgtgcgatggggaaggcgtgtggagacgcatctgtcgcagactcagtccgcgcctccaagatcagggttctggagtccggccctggaagagagctgccattctgaactacacgaagggcctgtatttccaggcatttggagggcccccgccgatgtctcaacaagagcggggcccccttgctaagccaacggctaccggccgcttcttggcccaccaaggatcacgtcttccattcttgactacgttggggacccctcctccttctctcaaaaatgcccctgggctcccccccctccggcccaaatgcaaggggaaaccgggcccggcccccttttgttgggggttgtgtccggggaaccccaaggattttttnnnnnnnnnnnnnnnggggggtggaacccgcttttatccccctaaaaataccccctccccgccctctggggcccacctctcgggagacccccctcagggaatgggggtggtgtacccaccccatcaacccccgggcccttgtgtaaactttgttatgaagaggatattctttcgccaacccccttggggggcgcaagggggtgctcctcaaacggagagcattcttcccccgccctcctgtgagactctctctagcgcgcataagccgcgcgggcgtgtgttgtgtgtggcagaaccacccacccaccgctatgctttctatttgtgggcgcgcccncaccgcgcggcgcgtgtcgcacgtagaggaatgtgtcctcgtctcctctctgtggcgctgttgttggagttgtgtgacagcctccggctcctctgtcgtatgatctatcttaccgccccgcctctcgcttgtaatgcatgttaaccgatgggccgcaccccggcggcgacgatgatgtctattgctaactctcatgcacctcctcaacgtcgcgcgctgctgccggtgggccgcctgggtgctatatttcacctcaatctcaccccgtggcncacgcccctctccacgctgacgctgcgcgcgcgggtgtgtgagattctgtcgcgggtctctctgccatctagtaagggaaccgcgacacgcgccctatgacgcgtgcgatatttcgctttatgtactcgta

SEQ ID NO: 367924 - DNA, 1065 bp, Homo Sapiens
  misc_feature (822)..(822): n is a, c, g, or t
  misc_feature (846)..(846): n is a, c, g, or t
  misc_feature (867)..(867): n is a, c, g, or t
  misc_feature (989)..(989): n is a, c, g, or t
gattctttcgatggcaggatgggcttccggcttcaagaagcccagcgctgcctccaccggccaaaagagaaaggtggcacctaagcccgagctcactgaggatcagaagcaagaagttcgggaagcatttgacctcttcgacgtggacggaagtgggaccatcgacgcgaaggagctgaaggtggccatgagagcgctgggcttcgaacccaggaaggaagagatgaagaaaatgatctccgaggtggacagggaaggcacggggaagatcagcttcaatgacttcctggccgtgatgacgcagaagatgtccgagaaggacaccaaagaagaaatcctgaaggccttcaggctctttgatgacgatgagaccgggaagatctcgttcaaaaacctgaagcgtgtggccaacgagctgggggagaacctcacggatgaggagctgcaggagatgatcgacgaagctgatcgggatggggacggcgaagtgaacgaggaggagttccttcggatcatgaagaagaccagcctttactgaagtcggttcagaagctaaagtgactctctgggttgcctgcttccattttgtgaaaccttagaggacagcggctgcctgtcccttcttcaccccctcacccccataatttgtctagatctatttccatatctctagttcaataatagaatttgaaagatgcttgtaatgtgagttatgggttttaattctcaagagtcaacctggagcacatgaggttaaacaaagggccctgaagtttgagtgcgcccctcatttgccctgtgctgaacttgctggtcatctgntgatctgggagccagacagcttcnggggacacacaaaaatggggntccccttggcaccttctttggtggtcttaaaaatatcttgcctcatataatcattccttaaaatcccagtcattggttccggcataatgagaatggaatccgccagttaaatttgccctagncctggccccttaactggaatacaagtttgaaaggaaaaccaggtgggccactttacaaacttaccggagcttcagg

SEQ ID NO: 367925 - DNA, 838 bp, Homo Sapiens
cggctcccgggccctctcgctcctcccctctggcccctccgagcgctgggggtgcttccctccccgcctcctcgcactcccacctcgcgggcacgccggtgggctgtgccgccatgccccagccacaggctgctcacgggcctaggcgcggcggcccgagatatggggcccctgagcctcccgggggaggagagaggcagcgagccgcgcgctccgccccttccccccgtggccgacgactgcggcgcctcgccgcccagcctggcgggagaaggaggaggagcagcaggcctccgggcccggcgccgccgcccgcaggacatttctgatttatttgcatccttgaagagcatctgtagaagaggaagtaaaacgatgggtgtgaaaacatttactcatagctcctcttcccacagccaggaaatgcttggaaagctcaaatatgctgcgaacatgatggcacatcactggtgatatcactattcgtgtccaggacaaacatcttccgggcacataaggtggtacctaccagacttgcagtgattactttcgcaccaaacttgtacggccaagcccgaggatgagaacaagaatgtgtaggatctgcatcatgtaacagtgactggcttatacctctttaagaatatgcttacacagccactctatcaattacgcacagaaaatattattggatgtctagcagcagccagctaatctgcaaatggtccagcgttgcgcagcacctggttcagaagtgcatgaacatcacgccatttatgggaataccacccccaagaggccaagcctgaaaaagggtctagcatgcctggccaagaaa

SEQ ID NO: 367926 - DNA, 1078 bp, Homo Sapiens
  misc_feature (722)..(722): n is a, c, g, or t
  misc_feature (1028)..(1028): n is a, c, g, or t
ggtccggaattccctggatgcgccggcaaggggcgggcgcgcgcggaggtgagagccggcacctggctcagcgccccgttgttcggcgggaggctccgcgcggctgttggggccgttgcagggtgcgggcgagcgtcgacccgggccgctcctggaggaggaggtgggaggagatgcctacatagaagagtgacagcagctagactaaatgtttaactgctgaactagttcctcaggtatcctggctctagagattgctatgggagattggatgactgttacagatccaggtctgtcttcagaaagcaaaactatctctcaatatacctcagaaacaaagatgtctccatcaagtttatactcacagcaagtgctatgttcttcaatacctttatcgaaaaatgtgcacagttttttcagtgccttctgcacagaagataatattgaacagagtatctcatatcttgatcaggaattgactacttttggttttccttcattatatgaagaatccaaaggtaaagagacaaagagagagttaaatatagtagctgtactaaattgtatgaatgagctgcttgtgcttcagcggaagaaccttctagctcaggaaaatgtggagacacagaatttgaagctgggaagtgatatggaccatctacagagctgctactcaaaacttaaggaacaactgggaaacctccaggagggaaatgattggngcttcagggaaagagacagacagttacaatgtaagaacagggaatttgcattcagctactaaagaatgagaaagatgaggtgcaaaaaattacaaaatatcattgcaagtcgagctactcagtataatcatgatatgaagagaaaagagcgtggatataataaactgaagggacgtctacctcaaacttgttattgaccagaaagattagaaaaattgctatggacattttgaaattatgtccggaagacctgatggaaaaaaaggctcctggaaggactggctaaaactgaaagccaggaatggnagatggaaggttttaaaattcccttggatggattttgaatatccgcccaa

SEQ ID NO: 367927 - DNA, 874 bp, Homo Sapiens
  misc_feature (262)..(371): n is a, c, g, or t
gggccggggccaccctgccccgccagcctggtgcttagagcctcttcaggcctcccacagcccagaggaggcaatttggttggcaccagggagccactgctttcccaggccatcggcagaaactgggcaatagaaagactctctaggacctgtgtgggacatagggggcaggcaggaaggagcggcgcctcagtgcttttatgttatcagcacattcacggccatgaacccagccttgttacagtaaaacactgcagccctnnnnnnnnnnnnnnnnnnnnnnnnnnnnnnnnnnnnnnnnnnnnnnnnnnnnnnnnnnnnnnnnnnnnnnnnnnnnnnnnnnnnnnnnnnnnnnnnnnnnnnnnnnnnnngaagggcgggggcgcagaaacacacatccccggggagggaccacaatatgcagcccccccagttttttgttaatcaagagagcgcgtcgccccccaaagtgatggggtctatattaatccacgaacacacagggggcggcacagtgctcatatactacagcagccagttgcagagaggagaaacaccacttaggctgctgctcatcattctattagcggagcacaccctctcactcctggggtagaggggatcatcacactatattccggcggcacaacacaaacctccttgttcagcgaggcagcgaatatcagcctgccccaccccgcggtagcggtagaccaacaccatagagcatctccagccgccgcagtgctttcgtacgtgtgtgagagacacacacgagactacgtaataacatagtgcgcgcgcgtgtgaaaataaatgctctcgttcacgacaggcagttagctattcagtcagagcacttatttttactccc

SEQ ID NO: 367928 - DNA, 1198 bp, Homo Sapiens
  misc_feature (907)..(907): n is a, c, g, or t
  misc_feature (1172)..(1172): n is a, c, g, or t
gccaggagagagcagtcaccctgtgctattagtggaactcatcaagctagcagagaaactgaagctgtcagatcctctggttttagaaagacgcagtggagacagggacctggagccagattggctagcgcaacttcggaggcagctggagcaaaaggtagcaggagacattggggatcctcatcctactcgctcagatatttcgggagccggaggaacaacaacagaaaacactttctaccaggacttttctggatgtcaaggctactctgaagcccctgggtaccgctcagctctgtggctgacacctgagcagacctgcctgctccagcccagcccacagcagccctttcccctccagccgggctcctacccagcaggagggggtgcagggcagacagggacaccgaggcctttttactcagttcctgagacccatctaccagggactggcagcagcgtgccagtgacagaggccactggaggaacagtctgggaggaaatgctgcagacacacctgggccctggagagaacacagtgtctcaagaaacttcccagcctcctgatggccaagaggtcattttccaaaccactagacaccattggctgctagagcacgaagtatttctgagagttccgccagttcagccaaggaggatgagaaggagtcctctgatgaggctgataaaaactctccccgaaatactgcccagagaggcaagctcggagatgggaaggagcatacaaagagctcagggtttggctggttcagctggtttcgatcgaagcccaccaagaacgcatcccccgctggagacgaggactcctcagacagccctgactctgagcaggagacccccagagcatcttctccccaccagggctggcctgggccttcttcactgnacaccttcccctggagtccccacctcttgccggatgttagtgccttctccaggggcagaggtgggggtgaaggccgaggatccgcatccagcgggggagcagctgcgggcgctggggcttggaggcttgtctggaccagagagtgtttcctttgagctctgctccaaccctggtgttcttcttcctccacctgccttaaaaggggctgttcctctttacaacccatctcaggtgcctcagctgcccacggccactagcctgaatntaccacatggcctagctcaggccgtt

SEQ ID NO: 367929 - DNA, 1014 bp, Homo Sapiens
ggactttcaagaacagcagcacaaaaataatgacttaactggatagaaaaaaaggcacatattttcaggaaggcctctttattcttagaagttacccttcaagatgacaagtggtgcaaactcttcaggatcttacctgccctcagaaataagaagttctaaaatagatgacaactacttgaaggaattgaatgaggacttaaagctaaggaagcaggaactgctagagatgctcaaacctctagaagataaaaacaacctcttatttcaaaagttaatgtctaacttggaggaaaaacaaaggagtcttcagatcatgagacagatcatggcagggaaggggtgtgaggaatcctcggtcatggagctccttaaggaagcagaggagatgaaacagaacttggaaaggaaaaacaagatgcttcggaaggaaatggagatgctatggaacaagacattcgaggcagaagaacttagtgatcaacaaaaagcaccacagacaaaaaacaaggcagacttgcaggatggaaagaggctctttcttccaccaggaaaagcaacagaggaaaatggaatgggtcaagtatcaggaacaaaataacatccttcagaatgattttcatggcaaagtgattgagctgagaattgaagccttgaagaactaccagaaggccaatgacctgaaattatcactgtatttgcagcagaattttgagccaatgcaagcatttttaaatcttcctgggtcccaagcatttccttgagctcttctgagaaaaacctgaacgttggatgtactatgggcattacaactatggacagagtgactactggcagaaatgaacaccatgtgagaattctgggaacaaaagatctacacagaacaacaaggaactaaaggaagtcacgcttgataatacaggagggagactcttttttctgaggtcattgccagatgaagcactgaagaattagcaggctttcgacaccacttggtttggacagattttttac

SEQ ID NO: 367930 - DNA, 967 bp, Homo Sapiens
atcaggccaaatcggccgagctcgaattcgtcgagagcggagtcgctgctgcgcggccgccggcgggactggtctgaagagacgcggggaccaagtggcaacgacttggacatctgagctgtcactgccgaaaacaggccgcaagagagataatcaatatgcatttccaagccttttggctatgtttgggtcttctgttcatctcaattaatgcagaatttatggatgatgatgttgagacggaagactttgaagaaaattcagaagaaattgatgttaatgaaagtgaactttcctcagagattaaatataagacacctcaacctataggagaagtatattttgcagaaacttttgatagtggaaggttggctggatgggtcttatcaaaagcaaagaaagatgacatggatgaggaaatttcaatatacgatggaagatgggaaattgaagagttgaaagaaaaccaggtacctggtgacagaggactggtattaaaatctagagcaaagcatcatgcaatatctgctgtattagcaaaaccattcatttttgctgataaacccttgatagttcaatatgaagtaaattttcaagatggtattgattgtggaggtgcatacattaaactcctagcagacactgatgatttgattctggaaaacttttatgataaaacatcctatatcattatgtttggaccagataaatgtggagaagattataaacttcattttatcttcagacataaaacatcccaaaactggagttttcgaagagaaacattgccaacctcccggatgtagacctttaaaaagttctttacagacaggaagactccatcttttatacccttgtgatgaatcccagattgacacatttgaggtgttaagtggatcaaaacaggtggtaaaccaagggaaggctccctacagggatgtgggttcctccctatcaaaactgccaa

SEQ ID NO: 367931 - DNA, 843 bp, Homo Sapiens
ctggcacctatccacagcctgaaccttggagaacacctccctttcatatgacttctgcaaagggcgtgtttcagctcacagggacaaagagtcactgcaccagagaaccagaaagagttacagacacggctcacaggcttaagcgtcttgctgtaggtcatacggcaggttaatgacaacactggggcaagaacacaggttacgctcgtcctggggaaggctcccacaccaagctacacacttctgcaatgctgttccagatgtgaaaatccgctaagacaaataggtcacaaaaacaccatgggagacgatgatgtcttttcctttttgttatcttgataaagcttcatacatgggacaaaaggaggaactagctcctaccaagcaggtttaaagggagtgtcggacacaaaaatgacatgccccatattgcagtctagaaggaacaacacggtgaattgtctactgcagaacacttcactctgtctcgattactacatggtgaattgaagttccagtagagagggagttgagctgatactgaggagataaatacccatcactgtatacatctacttcttggaatttgcaagggaaccagtcaacagatttttcaagccttataagtttatctgcactgagaagttcaccagctacataacatcctggactctggagcccaagagatggtgtagtttccattttggagccattttctttaatgaataagtagtgaggctgccattcttgtcaaagtctgaggaccacaaccttactccatgaaagtgaaagattgtttgttatgaggagttctgtttgagccatacaagcaatatatcctgt

SEQ ID NO: 367932 - DNA, 854 bp, Homo Sapiens
aaaaaattatctgctatatagaaccaaagatagattcgctttgctatatattataactatacttgcttttgcaataaaacaacttgtaattcaaaaatgaagattatctgcatatagtatttatgtgtgtgaataacatcttggcatgcagaaaataattttggctgctttgaacaggattgttcattctacacttccctgaaattccatttttgggagtgtctatccttcaatggctgaatagttccttaaatcagacaagctcctggctatcttcataaccagcagtgagtagatcttcttaatatagctgtctgaccacatgtggaaggcagctagacttattgtatttacagcctggccactctagacatatgaatccaggctgactgcttaagtgcccatctcgtttgatataaactgtagaaaaggcaagcactttgttctgagtcttttatctccaaatacatagttgtctcaaaccaagcaagctttatcaaaatggcttatttgcagaatagttccaatgatataaatgccaactggcaagtcattccaaactgcttgaaggagtagatgaaccagaatctgagaatttggaaataggtcacagaaaaagcctccatttggctaaatatgacaattatctgagtatggttaaatacatacaattaaatgtctgaagccaatgagttgtgtattctgaacttgaaatatatttttgtgagaataaatgttagaaaagttagtttaattttggaaacctgccgtgaaaggaaatttaaaggcttaacatgaaactgtctgcatttctacctgttagacaatggttgctcttgggctcttgtatacag

SEQ ID NO: 367933 - DNA, 1062 bp, Homo Sapiens
  misc_feature (197)..(205): n is a, c, g, or t
  misc_feature (447)..(458): n is a, c, g, or t
  misc_feature (482)..(545): n is a, c, g, or t
ctagctgtgtttgtctaccatcaaccaatctgcatgggacacaactctttctgttgccccgcagtatagattccgtgggcttgtgtatacaccccgttaataagcctcgactagttagtaatattacgtccgcccaggctgctctaactactccttcctaggtggtggtttgcggctccaacatgtgtggttccctnnnnnnnnngagatgtagtgtgcgtctctcctctagacatgagccaccgccgaccactactgtttccttccgctaggaccagcatgggttattattaaaagccgcacgcgcgtgcctgctctgtcattatattaacctcctccctacatataggcgtggcccctcctttctatctatacaacagagcagctgttgtgctagcctactaaatctctgtcccctccgcgagtggggcagaatatttagggggnnnnnnnnnnnntttttgtttgttcgtaagcggtgnnnnnnnnnnnnnnnnnnnnnnnnnnnnnnnnnnnnnnnnnnnnnnnnnnnnnnnnnnnnnnnncacctctgtttgaaagtgaaaacagaacacagcagtactgatttttaatgactttccagaccctagttctagttccccatgattcctggtaacccaagtcctggagctgatctggcagtttcaaatacatttcttttccttaagctggttttgtgggcttttgttgcttgaatccaaacaaaaataaaactgtaccagtaaaatgaagcaaacaaaatctgccaaaaaggagccccagttctgccccagttttgccaacaaaggagctgtgaggccgtagataaggttccttctctctaagctacaagttctatcccttacaaaatgatgcagttgaactggatatctcaggggccttcaccctctactatgctggcttagacactggctcctctggataacctcttgtgcgctacagattccttatgaaggttctccgtaagttactttagttctacccattgactccaggcagttaaagtaacaaaaacagaaaataaaaagcacccaattcttt

SEQ ID NO: 367934 - DNA, 1445 bp, Homo Sapiens
ctggaagaaggcctcagcaggcccaggccacctggagggagagcagacctgcggctgaggatgcagggctcccgggcacggtgctagccctgccttgagacaccccgagagctgtgggaagagctgtgggatcccctattgcatcacaaagcggccctggagggctggtctttattttgatgaggctgagaagggaaggctgcgggcatgtttaatccgcatgctttagactccccggctgtgatttttgacaatggctcggggttctgcaaagcgggcctgtctggggagtttggaccccggcacatggtcagctccatcgtggggcacctgaaattccaggctccctcagcagaggccaaccagaagaagtactttgtgggggaggaggccctgtacaagcaggaggccctgcagctgcactcccctttcgagcgtggcctgatcacagggtgggatgacgtggagagactctggaagcacctctttgagtgggagctaggcgtgaaacccagcgaccagcccctgcttgcaacggagccctccctgaaccccagggagaaccgtgagaagatggcagaagtcatgttcgagaacttcggcgtgcccgctttctacctgtcggaccaggcggtgctggctctctacgcctcggcctgtgtcacgggcctggtggtggacagcggggatgcggtcacctgcactgtccccatcttttgagggttactccctgccccacgcagtcaccaagctccacgtggcgggcagggacatcacggagctcctcatgcagctgctcctggccagcggccacaacttcccctggcagctggacaaaggtctcgtggacgacatcaaaaagaagctgtgctacgtggccttggagcccgagaaaggagctttccccggaggcccggaggaggtcctgaggggagtacaaactgcccgacgggaaacatcatcagcctcggggacccgctgcaccaggcgcccgaggccctgttcgtgccccagcagctgggcagccagagccccgggctctcgaatatggtctccagcagcatcaccaagtgtgataccgacatccagaagatcctctttggggagattgtgctgtcggggggcactaccctgttccacgggctggatgaccggcttctcaaggagctggagtagctggcctccaaggacacccccatcaagatcacggctccccccgaccggtggttctccacctggattggagcctccatcgtcacctctctgagtagcttcaagcagatgtgggtcaccgccgcagacttcaaggagtttgggacctccgtggtgcagagaagatgcttctgaaggccgcttctcgttgggtaccgttgggggtgaaccctagccccagctttgggaggatgttcaataaaggaccaatgccggaaaaacaaaaccaactc

SEQ ID NO: 367935 - DNA, 825 bp, Homo Sapiens
ggacgggggcgcggagctgtgggaaactgcgccaggcgcccgaaaggtgaacacgggagtcgcgcgtctcccccgcagcagcggtaaagcggaagttatgctgcagccggagcccgggcttcctcccggagccgcgtcccggggcccggctgcccctgagctgagcggagcatcctttccgggtgaggggaggacgaggacttggcgcgttcccctcgctgccccgggagccgcagccgcggtgttcatgccgcggagcagccaggctcctccgacgaaaacctgcatttatttgctggcgggacgtttgccttgaaaatggacaaagacgccgccctccggggtattcctgtttgcctgaccctgagagcgcctttttgcttcaagacgtgttggatgctcctgttctccgaattctgatacgcttctgggcataatactgaaacacaaaactgcttttgctctctctgtggttggccgaaaataggattctttttcgtgcaggtgtcgtagtttagtcggctttactaacatattgaaatggctctacccaaagacgccatcccctcgctgtccgagtgccagtgcgggatctgcatggaaatcctcgtggagcccgtcaccctcccgtgtaaccacacgctgtgtaaaccgtgcttccagtcgaccgtcgaaaaggcgagtttatgctgtcccttctgtcgccgccgggtatcgccgtggacctcggtaccatacccgaagaaatcctctcgtcaacgtggaactgtggacgaaaattcaaaaacactatcgcaggaagtgccagcttagagcgtctggcca

SEQ ID NO: 367936 - DNA, 618 bp, Homo Sapiens
caggacataaagatctggtccctgatgaagaaaaaaatctagctatgtcagagtgcagcagagtttccaaatcagattcctcaaaccacactttgaaaagccacagagtcttgagttcctaaatgactttgaaggcaaaaccgtggaatcctaacagatcaaattggatgaaatatataattacttgatagcacaataaacatagaaagaatttatatgaatgtctatatttaaggaagaataatttgaaagatttatgtcagtcttagataataccatgcaaggcaattaaatcactgtgacagcacagaggtcagagttccgtcattttgcattacttgtatccactcatgtttgtttcataataattgcattttcttagaactattttggtgtcaaatgctattttttatattacattaaaatagagttgtcagtcattgcatctgcccatacatcttctgagagaacctgcttccttccatcagccatacctaagacctgcacctaagtggccatgtttgctcaaatgtcctcatcaccttggcctcaactaattaggccaaacagatgtacttcactcaaggagaaaccaatcatattttctctctgtctctc

SEQ ID NO: 367937 - DNA, 1048 bp, Homo Sapiens
  misc_feature (590)..(644): n is a, c, g, or t
ttcctcccctccccgcgctctcgcctgcgcacccccgccgcctgctccgctccccttgtcctctcccttttgcttattgactgttctagtgcgcggcgcgcgcgtgcttctcctcttctgctcacgcactgcccccgttggctgtttccgcgcgcgcttcctgcctccttggctcccattcacttcgcgagtcgctctctcatgtctgtcgggtctattcatgcctctcttacatcagggttcctcggcccctccagcttgtcctccactcaatgcctcacctctgcttggctgtttttctacatcccctcaaccccgttcagtgtccttgctctcgcgcgtctgcccattctcgccacccgttcgcgcgttcgatgcactcactcgttctcattcttcactccagtcatcgttgtaactctcccgctatcatttcacctgtcctatcgctgggtccaccgtcgtctttatgtgttttccatgtggagtgtgcttcatggcctgacaggtgtcttcctcctcggtcctcttatcgtctttgtgtcgtgtcttctctatttatctgtttgttattttctatggtggttgcnnnnnnnnnnnnnnnnnnnnnnnnnnnnnnnnnnnnnnnnnnnnnnnnnnnnnnngaatgcaaggaatttgtttgtttattttcagtcatttcctatggatacaggcagatgtgtaagttgagctttaactcacaaaagtgcccacggatgcgttgatgtgttttaagcacgggggctgcacagaggccttgctgcggctgtgtctgctccatcctgaaccgatgattacagccccagagaacctgatattaagctgctctttgagtcttatccaggcataatgtgctgctctgttgaaaggctggcgctgggagaagacgcagagggcgtcaccacatgccattacgaggccatcatgcagccaaacccacactttccgcagccagcggcaggcagcccggtgaagggggcgattagaaaccgggcccagccctccacggtaacaagctcagagaaag

SEQ ID NO: 367938 - DNA, 1651 bp, Homo Sapiens
ctgcaatccagccagccctctgccctttctgagcccgagggactgccacctccactgtgtgcacactcagctacgggacacaaacaaagaacagccaccatgcagctcttcctcctcttgtgcctggtgcttctcagccctcagggggcctcccttcaccgccaccacccccgggagatgaagaagagagtcgaggacctccatgtaggtgccacggtggcccccagcagcagaagggactttaccttcgacctctacagggccttggcttccgctgcccccagccagaacatcttcttctcccctgtgagcatctccatgagcctggccatgctctccctgggggctgggtccagcacaaagatgcagatcctggagggcctgggcctcaacctccagaaaagctcagagaaggagctgcacagaggctttcagcagctccttcaggaactcaaccagcccagagatggcttccagctgagcctcggcaatgcccttttcaccgacctggtggtagacctgcaggacaccttcgtaagtgccatgaagacgctgtacctggcagacactttccccaccaactttagggactctgcaggggccatgaagcagatcaatgattatgtggcaaagcaaacgaagggcaagattgtggacttgcttaagaacctcgatagcaatgcggtcgtgatcatggtgaattacatcttctttaaagctaagtgggagacaagcttcaaccacaaaggcacccaagagcaagacttctacgtgacctcggagactgtggtgcgggtacccatgatgagccgcgaggatcagtatcactacctcctggaccggaacctctcctgcagggtggtgggggtcccctaccaaggcaatgccacggctttgttcattctccccagtgagggaaagatgcagcaggtgggagaatggactgagtgagaaaacgctgaggaaggggcttaagatgttcaaaaagaggcagctcgagctttaccttcccaaattctccattgagggctcctatcagctggagaaagtcctccccagtctggggatcagtaacgtcttcacctcccatgctgatctgtccggcatcagcaaccactcaaatatccaggtgtctgagatggtgcacaaagctgtggtggaggtggacgagtcgggaaccagagcagcggcagccacggggacaatattcactttcaggtcggcccgcctgaactctcagaggctagtgttcaacaggccctttctgatgttcattgtggctaacaacatcctcttccttggcaaagtgaaccgcccctgaggtggggcttctcctgaaatctacaggccctcaggtgggagatgaaaggggctaagctatggcccctctgaatgctggtagctagtgacttacacagggtttactggactaaggaggcctttccccataatacttcccccatgatggattggcttcaacccccccggatgccaacctaaaggggggcccttggggaaaaagagggaacgaaaatttgcagttctttgtccggtccactacgttgctttaattggacacaatttaaatacttgcgacagccccgtaaagatggatctgcgatagccaccctgggctctaagcgcgctccaa

SEQ ID NO: 367939 - DNA, 1085 bp, Homo Sapiens
  misc_feature (953)..(961): n is a, c, g, or t
gctggtaccggccggaagtatgggatcgagggactgccacctccactgtgtgcacactcagctacgggacacatttcaggtatccaaggcagcagaggtgagtgggtcccccgagctctgtgaccttatgctccacactaactctggcagagcctccgtttcctcatagaacaaagaacagccaccatgcagctcttcctcctcttgtgcctggtgcttctcagccctcagggggcctcccttcaccgccaccacccccgggagatgaagaagagagtcgaggacctccatgtaggtgccacggtggcccccagcagcagaagggactttaccttcgacctctacagggtcttggcttccgctgcccccagccagaatatcttcttctcccctgtgagcatctccatgagcctggccatgctctccctgggggctgggtccagcacaaagatgcagatcctggagggcctgggcctcaacctccagaaaagctcagaggaggagctgcacagaggctttcagcagctccttcaggaactcaaccagcccagagatggcttccagctgagcctcggcaatgcccttttcaccgacctggtggtagacctgcaggacaccttcgtaagtgccatgaagacgctgtacctggcagacactttccccaccaactttagggactctgcaggggccatgaagcagatcaatgattatgtggcaaagcaaacgaagggcaagattgtggacttgcttaagaacctcgatagcaatgcggtcgtgatcatggtgaattacatcttcttttaaagctaagtgggagacaagccttcaaccacaaaggcacccaagagcaagacttctaacgtgacctcggagactgtggtgcgggtacccatgatgagccgcgaggatcaatatcactacctccctggaccggaaacctctcctgcaaggtnnnnnnnnnttcccctaccaaagcaatgcccccggctttgttcatttccccccatggagggaaaaaatgccccaagggggaaaatggaactgaatggaaaaacccccggagggagggggcttaaaaatgtttc

SEQ ID NO: 367940 - DNA, 1118 bp, Homo Sapiens
gggtccggaattcccgggatgggaccatttcaggtatccaaggcagcagagaacaaagaacagccaccatgcagctcttcctcctcttgtgcctggtgcttctcagccctcagggggcctcccttcaccgccaccacccccgggagatgaagaagagagtcgaggacctccatgtaggtgccacggtggcccccagcagcagaagggactttaccttcgacctctacagggtcttggcttccgctgcccccagccagaatatcttcttctcccctgtgagcatctccatgagcctggccatgctctccctgggggctgggtccagcacaaagatgcagatcctggagggcctgggcctcaacctccagaaaagctcagaggaggagctgcacagaggctttcagcagctccttcaggaactcaaccagcccagagatggcttccagctgagcctcggcaatgcccttttcaccgacctggtggtagacctgcaggacaccttcgtaagtgccatgaagacgctgtacctggcagacactttccccaccaactttagggactctgcaggggccatgaagcagatcaatgattatgtggcaaagcaaacgaagggcaagattgtggacttgcttaagaacctcgatagcaatgcggtcgtgatcatggtgaattacatcttctttaaagctaagtgggagacaagcttcaaccacaaaggcacccaagagcaagacttctacgtgacctcggagactgtggtgcgggtacccatgatgagccgcgaggatcagtatcactaccctcctggaccggaacctctcctgcaaggtgggtggggggtccccctaccaagggcaatgccaccggctttggttcattcctccccactgaaggaaaagaatgcacccagggtggaaaaatgggactcggagtggagaaaaacccctgaagaagagggctttaagaaggttccaaaaaagaaggcgaggctccgagcgttttacaccttcccccaaatttcttcccactgagaggggcctccctattcaaccttgtgaagaaaaaggccctcccccccacatcttgtggggggaaattaagaaaaaaggggcttttct

SEQ ID NO: 367941 - DNA, 1137 bp, Homo Sapiens
  misc_feature (860)..(870): n is a, c, g, or t
ggtccggaattcctcggatcccgagggactgccacctccactgtgtgcacactcagctacgggacacaaacaaagaacagccaccatgcagctcttcctcctcttgtgcctggtgcttctcagccctcagggggcctcccttcaccgccaccacccccgggagatgaagaagagagtcgaggacctccatgtaggtgccacggtggcccccagcagcagaagggactttacctttgacctctacagggccttggcttccgctgcccccagccagagcatcttcttctcccctgtgagcatctccatgagcctggccatgctctccctgggggctgggtccagcacaaagatgcagatcctggagggcctgggcctcaacctccagaaaagctcagagaaggagctgcacagaggctttcagcagctccttcaggaactcaaccagcccagagatggcttccagctgagcctcggcaatgcccttttcaccgacctggtggtagacctgcaggacaccttcgtaagtgccatgaagacgctgtacctggcagacactttccctaccaactttagggactctgcaggggccatgaagcagatcaatgattatgtggcaaagcaaacgaagggcaagattgtggacttgcttaagaacctcgatagcaatgcgggcgtgatcatggggaattacatcttctttaaagctaagtggggagacaagctttcaccacaaaggcacccaagagcaagacttctacgggacctcgcgaagaatgggggcgcgggtacccatggatgaacccccgagggatcagtatcccctaccctcccgggaaccggaaacttcttcctgcaaggtnnnnnnnnnnncccccctaccaaggtaaaggcccacgggcttttgttccatttctccccaagtgaagggaaaaaatgcccccggggggcaaaaatggacttgcagcggaaaaaaccccttggagaaatgggggcttataaatgtgttcaaaaagaggggccacctccgagcttttttcctttcccccaaaatctctccctttgtgggggcccccccaatccattttgggaagaaaaaggcccctcccccaatttgtgggggaaacccaaaaccgtccc

SEQ ID NO: 367942 - DNA, 1024 bp, Homo Sapiens
  misc_feature (841)..(841): n is a, c, g, or t
  misc_feature (890)..(890): n is a, c, g, or t
gacagcccctctgatgaggaggccactgggctgagaccaatgaatgagatggagccagccacgtggtgagccagaagagggcatcacagggcttgagtctgggggagcctggctgcccagaggtggcagatgacatgaagaaataaccatgtaagggctggctgtgtatgagagcaagcattgggaaggatgaatgccaactatgttccaggaacttccactgttctcacacacccaggtgagtggtgttcaggtgggtggcacccaggtgagtgacatcccagttgagtggcacccaggtgagtagcatccaggtgagtgacacctaggtgagtgacattcaggttagtggcgtctgtgtgagtggcatcatccaggtgagtagcttccaggtgagtggcacccaggtgagtggcattcgggtgagtggcattatccaggtgacacctgggtgagtggcatccaggtgagtgatatcatccaggtaagtggcacctaggtgacatccaggtgagtgacgacatccaggtgagtgacatcatccaggtaaatggcacccaggtgagtagcattcaggtgagtgacacccaggcgagtggcatccacgtgactagcgttgtccaggtgcataacacccaggtgagtggcacccagttgagtggtgcccaagtgagtcacatccaggtaagtggggtccaggtggtggcacccaggcgagtggtgcccaggtgagtgacagccaggtgaatggtgtccaggtgagtggcatcacccaggtgaatggtgtccaggtgagtggcatccaaggtagttggtgtccaggtgggtggcacccaggtgnaatggtgtccccggtgaggggccatcacccaagtgaatgtggtcccagngaagtgggcttcacagtggggtggtaccgtccaactggacaatagctaacaattattgggcgtctttgtggaacgggcactgtgcccaagctttgaattcactgaaacccagttcattcctccccaggaacctt

SEQ ID NO: 367943 - DNA, 882 bp, Homo Sapiens
ttccccagccctgccaggccttccccagtcctgcctcccacccgtgcttgattgggtgcgcccgcgccacgccgcccgccagctcgcagcccggcgctccgggcagcaccggccggtcccagctgggcaccaggctagagctcttcagcactatgcgcggctggttctcgcccgcgaagcccgccttggtgaagcccgagccctggtccaccaccaccgcgatgcggcccagggaggacggccggtgcacgcggcggctccccgacaccgacgccaccttcgggctcggcccagccgcggggctgaaggctccgctcctccgcgccactcggcttagtcggcccgatacctcccggcctctgtcctagggagtagtccccttcagcctttggctctgcctccggagcctaagttcttcctcttctggaccaaatcaccacccttttcagctcttggctccgccctctggtctgaaagccccgcctcttctgtccgggccatccgcctccttttcagctcgtggctagttcctaggcctgaggcccggcccctagttcaggcttcagtctccgctctggctgggttccagccgcatctcaccctcttggtctccctctggcgccgggcttcaggctccacgctctcaggacccgcctctgctttgctgttccgccccgtcagcccttgctgagatggctgacgagatggctaggactgatccttttagatcctaagaagcccccgggaggagcagaactttgagggcgaaggggccttgtggtaaggccatttggacatatatcccccttgaggacccaggcagcctcctggcacctctcacctgggcttgacggaagttcctcgctgtgtatgcagggaatt

SEQ ID NO: 367944 - DNA, 928 bp, Homo Sapiens
  misc_feature (41)..(63): n is a, c, g, or t
aggtagcgaggcctgggtggcgttacaaagacgagggtgannnnnnnnnnnnnnnnnnnnnnncgcgagggcaagtcgggagggggacccagctcaggactgggaggccctgctcgcaggtccctgggtcccggtggcggccgaagcgctcgctccgcaggcagcgcgacggtggtcgcccctcccgcccccaacccgcgcggtgcgcgccccggcctctccctccccgccaccctcctcggctcccgcgcggcggcggcggttcctctcccactccccccagccctggctccgggggaccccgcgatgccggtccgcaccgagtgtcccccgccggccggtgcctccgctgcctccgcggcctcactcatcccgccgccgcccatcaacacccagcagcccggcgtggccaccagcctgctctacagcggctccaagttccgcggccaccagaagagcaaggggaactcgtacgacgtagaggtggtgctgcagcacgtggacacgggaaactcttacctttgtgggtacttgaagattaaaggccttactgaggagtatccaacccttacaaccttcttcgaaggagaaataatcagcaaaaaacaccctttcttaactcgcaagtgggatgcagatgaagatgttgatcggaaacactggggcaagtttctggctttttatcagtatgcaaaatcatttaactcagatgactttgatatatgaagagctgaagaatggagactacgtcttcatgaggtggaaggaacagtttctggtcccagatcacacgatcaaagatcatcagtggtgcttcttttgccgggttctactacatctgctttccagaagtcagcagcctccatagagggctactactaccataggagttcagaatggtatcatccctcatttaaccagttccgat

SEQ ID NO: 367945 - DNA, 840 bp, Homo Sapiens
  misc_feature (298)..(298): n is a, c, g, or t
tccaagcccctacttagagattaggaaactgaggcccgatgtataaaggcatttttctgaggtcacagtgagttggaggcagctagctcctgcattccacccagcagaagggagttggggtggagctaccaatcggtcacatctgccgagaagtgaaaggctcagcgagaagaggcaagaacataaggcctgcgggacctagtctgagctaaagctagttacggcgctggacgggctcttcagtgtgtctcggacgctgactcagggcacgacggcaaggccttgtgctgaatgaacngaacgacggaatgggcaatggtgaggaagggcagggggacaggagaaccaggccactgaggggctgctgcgaccaagggagccagagcttcaacggaggaacagacaacggcagaaaaggaaccaactttggtcaccagtagcctgtccatgaccttggcacactagatgatcttacgtggaatgcttcaggcagagctacccaggaaggaagtgtggaagggaaggaggtgaagaggacggcggtaggtactagaccgcacgaaggagccatagaacagaaggtgggagccttcaccgtattccgaagtcgatttactcgaatcaactcaagtgttttccaggaaacggagcatggcatgtcggggcagatgggaaaggtgccaagtctgaaaaggaaaccaacaagagtggttggcgaggtgggctggagggccaaggacaggaccagtgttacttgtgaagcggaggacacctcttcagtaaacgaaacggcaacatgttgacaacgtggacctgactgccaggatacggcaatgccca

SEQ ID NO: 367946 - DNA, 766 bp, Homo Sapiens
cgaggacattgaagactgccaaaagaagtacggaacttcttatggctgctactttgtcccagccttttcagggctatatgcaccttattgggagcccagtgcaagagggatactctgtggcctcactcagttcaccaataaatgtcatattgcttttgctgcattagaagctgtttgtttccaaacccgagagattttggaagccatgaaccgcgactgtggaattccactcagtcatttgcaggtagatggaggaatgaccaacaacaaagttcttatgcagctacaagcagatattcttcatattccagtaataaaaccctttatgcctgaaacaactgcactaggagctgccatggcagcaggggctgcagaaggggtaagcgtttggagccttgaaccccaggctttgtcagttctcaggatggaacgatttgaaccacagatccaggccacagaaagtgaaattcgttatgccacatggaagaaagccgtaatgaagtcaatgggttgggttaccagtcagtctcctgaaggtggtgatccttctatcttctctagtctgcctttgggattttttatagtgagtagcatggtaatgctaattggagcaagatatatctcgggtgtgccataataataccagctatggagtcccaagatgtaaacattttacataatgaaagcatatagcagttctgcctcttaatataatgacactattatagacttctgattttgttatatacacctgtgcatacccata

SEQ ID NO: 367947 - DNA, 1243 bp, Homo Sapiens
cagtttgaaaagtgactcatcccccaaactaggcagggttgagtgtctgtcctgtttatcttccacatgccacctgcacctaacttctgaagataatcctataataaaagcactgtgattaaaaaacagaaaaacacacacccaaaaatgtataggtttgtctgttggtgcttctgacaagaaaataaactcatgaatctcattaactttaaaaaaatcacatctacttaaggtttaatgactaaagccaactttctaacatatctgtaccgttctctgaacatactgttttcacacttaactacgatgttgtcacttgtttctgtctgattctgcaagggcagagaccttgaaatattcaaatctggattcccccatggtttgacccagctgaagtcaggcagtgttcgctgaaagaaataaaggtgtttccattattgcctgttattagcatatcttttggggctgtatagaagttaccacagatctatgtgtcataaaacaatatatcgatattactgctttcacgcttctactgtagggccctgacgtactggattccatggtctcagcgtagattctctgcttatccagtctcacagaggctgagacatacaacgggtagctctaatattcctctttctaggagatgttaggggacggcgggtactcacatctagtatcccaacgttgcactctcagactttgtacagagatctccaagcatctgtagagcgtatgtcaggactcgaatgtacccgcattgtcccatgcataggctacctttgtgcagggactatactctactctgagctatctgtcgagaaggctagccctaaggaattacccgtaggctatagtagggcccatctatatacaaaaggcccaagtcaaacaaggtagggtctgaatttgcgctacttacgataacctatgtagacagtgaattgaattttaccgtacctatgcccttcattacgtacctaacgtcaaataagaatcaattctgcttgtcttataggcgcttatccacccttatgtactgatatgtgctttttatcagtaggggatttgccacttagttgatttgaactacacctcgcgaggcttcgaacccccaattaatttcaattgagtcgggaaattaccatacttgagcctcttcttaacaggggggctctttcattttttcccatgtaaggggctcagaaatttcgatgactttttttggcccaagacgaaa

SEQ ID NO: 367948 - DNA, 1149 bp, Homo Sapiens
  misc_feature (458)..(466): n is a, c, g, or t
tccctgcctagaataccccgtgtgagcaaataagaggagtgggggaagagtccatgttcacagctggaaaggtccgagatactcaaagtcctcaagtccaagggctgtaggaaggaaaatccccttcagatacaaattaccagccagcaatatattacccctaatacttgaatagtgaggtagatacatggaaaagtcatgaaaatatagcagactcaggtccctctaggactaaagctctttagacataaacttacaaattccaatgcaaagaggaactgaactgtacaaataacaaataatcactcaaataagttttctctctttttacagcgttaaaaaaataagagaaaggcagaaggatgcccttccttctgcatatctctatacaattttacaattttattctaagtttattaccctcaagttaaatagtctgtttagtgttctgttgggcnnnnnnnnntctttaaaagtatgaaaaactgctttataggcagtaggagtcatttgtactacaattcctcccttgtgaatcaatgttatcgctaggcacagtaccttgatggcccacaaagtcttccgtgcctgggaggtcttcacacagcagtttattgaactttctactgttccacgtgatatccactcagctcccctgtgttgccgttgctggagtagccattgccataggccttcaaagaagaactgcgcaggcacagaagctcctggaaggcaatcctgaaatctgggctccggcagtagataaggggattgaaaccagaattgacatagcctatccaatttaggaggatgtaaacttccttacggatgaggttatcctggatcacatgcacaatgttaacgatgaagaagggcagccagcagagggtgaaagtgcccatgatgatgcctaacgtcttgagggctttgtgctccttcaagcagaacttggaagatctgcggagtccatgccccgtccgcccatcctgctccacctggctaaggttctggacatggaagcggccctcagatttgtcaatcttctggagctgccttttggcctcctgaaagaccctggagtagacgaagaccatgatcaccaggggaacgtagaaggacacgatggaagatcccgggaattccggaccg

SEQ ID NO: 367949 - DNA, 1357 bp, Homo Sapiens
ccggatgtgacacgacttaagtgactactctactcggttattcctgtagtctccttaccgcaattgttgtttacgcgaacactgctgcttttctggtacagctgttccctcctcgtctggtgtgtagcgaccccgccgtagaattctggtctctctgctgttgaaagtaacgcctgtcgatgagcgtaaggctctttcatacatctgccttttatgctccgtaattgtaggaaatgctgtcgccaatagggttttactaggtgtggttatataccccataatggatgttcccccttttggtaatgtgtatggtgagagtacagtgaacaactggaaatgcataacctggcctgttacgggatgcatacgggcgtttcagcatcctagacttgggatctattctgttgttgccaggaaacacagaccttctgccacattgatctgatcccctggtttccattcgcggcgcatcaccttgtcagaattgtaactgccaccatattcatccactcaaatcagcagtgcaaggtaattctaggaagtcaggaagcattaacccagacctgtgtacaacatttgtcaccgtgtacataaattcttgcctccactcaggtgattcgtgaacagctctcagactggcactaagctgtcgagcaatccatctggtgatagtgactcctacgatgttagaatctgcatgatctaagctcctgttacagaaggatatgaaagagttaacgaatgcagattcatggaaaagtttaggcaaaccagtgaaaccatgcaggtagtaatgaaatcctcagatgagctcttcaaccacatttagaaaagcagccatagaataaggaagtaaaagctcggacatcaggaactcatacggaagcatttggaacaataatacaaaggaactaaaagcatctcaagaaaatcagagggatcttgggaatggacttgactgtagaatcgttattctcaaataataatacaaaacaagtgctctggagaagagcagaaagaacatcagcagtcatcagaagctcaagataaatccaaactctggcgtctcaaagaccgtgagtttagcaaggcagaaaggaacaagagaggaggagtgagagaagcgaatggtgggtaccagttagatatcgagcccttcaaagtgactattatgacaatgtatgaaaacaaccttggattaaaactcagttctttaaattaaccagtcaacattaaaatgaatggtaaaagatcaaaatgcatatggtaaaatgactgctttcagataacaagataccaatcttatattgtattttgactgctctaaaatgattaaacagttttcacttacattttt

SEQ ID NO: 367950 - DNA, 939 bp, Homo Sapiens
ggatgttgaaaatctccagaaatttgtgaagggagcagaaacaagttcaagaagaaattagtagaatgtcttcaaaagcaaggcttaaggtacaagaagatatgaaagctctgaagcagctcctgtcgttggctgccaatggaatacagagaaacactctcaacatggacaaattgaaaatagaaactgctcaggagttgaagaatgctgaaatagctttaagaacccagaagacaccacctggacttcaacatgaatatgcagctcctgctgactacttcagaatcttggttcagcaatttgaggtacagcttcagcagtacaggcagcagattgaagaactagaaaaccatcttgccactcaagcaaataattcacatataacccctcaagatttgtcaatggctatgcagaaaatttatcaaacatttgtagctttagcggcacaacttcagtctattcatgaaaatgtaaaggttctgaaagaacagtaccttggctacaggaaaatgttcttgggagatgctgttgatgtgatttgaaacaaggcgagcagaagccaagaagtggcagaacacacgccagagttactactggacccactccgtttcagcaccatgccaaacgcagcagccgttgccatggctgcaacacttacacagcagcaacagcctgctacagggccacagccatctctgggagttagttttggaacgccattcggctcaggtattggcaatggcttgcaatcaagtggcttaggttcttcaaaccttggaggatttggaactagctctggttctggatgcagcaccaccagggcctccacattgggattgggaacaacaaataaagcctcaggaagtcttagtgcaggcaaccaatcacaggtttaactgaattcgaaaacccagtgttacagaaaccaatgaaatagga

SEQ ID NO: 367951 - DNA, 815 bp, Homo Sapiens
atcaggccaaatcggccgagctcgaattcgtcgagagcggagtgcctgctgcggcgctgcatcgacaaggctgagaccgttcagcggatcatctacatcgccacagtggaggcattccatgtagcaaaaatggcattcagacacttcaagatccatgtgagaaaatcgttgacaccatcttatgtggggtcgaatgactttgagaatgctgtcttggattatgtcatttgtcatcttgatctatatgattctcaaagcagtgtcaatgatgtgatccgagccatgaatgtcaatcccaagatttcattccctcctgtcgttgacttttgccttctcagtgacttcatccaggagatatgttgcattgcctttgcaatgcaggccttagaaccacccctagatattgcatatggagcagatggagaagtttttaatgattgcaaataccgccgcagctacgactcggatttcactgctcccttagtcctctatcacgtgtggcctgctctcatggagaatgactgtgtcattatgacagggagaagctgtcaccaggagaggggctttttggaattcggtgcgatctgtaagtcgttgtcgaagcaggagtttaagtcccattttgcccccgtagccaaattggtttaaacacgatgtctcgaagtcggagtccttctccaataagatgtggattgcgcaagattttaaaagcaccagacctgctccttttgacccagtgcgtggaaacagctgctttctccagtgccggcatctgtcttctgtgtcttgctcagaactcacttaagataatgtcc

SEQ ID NO: 367952 - DNA, 1272 bp, Homo Sapiens
ggaattcccgggatcgcggcgggacggggcggggccgcgggacgccaggaggcggaggcggagtggagttaggactttgtctatatctgagctgtgaagaatatttacagtaaaaagaaacaattcatcccagtagaacgcctgcctctttagtgactacagacctcacttcccttctctggagttttggagtctattttcttcatggaattttgctaggaacaaaagaaaagtctaactccacattgtcagtctggctgctataacaaattaccgtagactgggtggcttcaacaacaaacatgtatttctcacagttctggaggctaaaaagtccaagatcaaggtgacagcaggtcctatatctgatgggggactgcttcctggttttcagatggctatcttctcactgtatcctcacatggtgaagagtcgagattaaatgccttaatggataaagaaaaattggatgttaagattgaatattgtaactatgcaatggattcctcagtggaaaacatgtatgtaaacaaagtgtgggtatcaatgtgagaatgaaaattgtttgaaatggagattgttatcaagtgaggattcagccaaggttgatcatgatgaaccatggtactgcttcatgaacactgattcaagatataataactgctcaatttctgaagaagactcccctgaagagtctcagcttcatcagtgtggatttaagattgtctattcacagctccctcttggaagcctgggtttgggtaaaattacagaaattggccaagttggcccaggaatactttgcccctgaccgtttttaaagggaaatatgtaacttatgacccggatggaaatgttgaagagtatcacatagaattcctgggcgatccccattcaagatcatggataaaggcaacattcgttggacattatagtatcacattaaagattatgagatctatgacttatatccacatgttgctacagacatataagaaataatttaaagtaatgatcaatatttgaaatcataccaatgaatttttgaagctctataaagaagattaggctaatcacataattcaggattaaaaaatgtagcagcctttcattttcatctccagtttcctgactgggttgtttttcatgccaccttgaacgaaatatatctatttatactactcaataaatatttactcaactcctattatttgaaattcttctaggttccaaaggtgaacaaaatagactactccatggcctcataaaatt

SEQ ID NO: 367953 - DNA, 1021 bp, Homo Sapiens
atccaagatagatcaactctccctaaaggctgacagtgaactcttggggccgttttattctctgaggttagcaaggagtcatctactagccattcaggaggccagctgggaagacaaaataggcaccccaaactcagcaacttcataacaccttcctctccccgcctgaagccttaaactgcatcaagtcaaagaaacctggggcaaatccttaacatgtgttttgactgcagtaaatccacagccactctctactccgagctggcagattgagaccaagtattcaacgaaagtgctcactggaaattggatggaagagaggagaaagttcaccagagacactgacaagacaccccaatccatttacagaaaagaatacatccccttcccagaccacagaccagaccagatctccaggtggtatgggaagaggaaagttgaggggctaccttacaaacacctgatcacccaccaccaggagcccccacatcgctacctgatcagcacctatgacgaccattacaaccggcatggttacaacccggggctgcctccactccgcacttggaatggacagaagttgctgtggctgccagagaagtctgactttccccttcttgctccccctacaaactatggactctatgagcagctcaagcagagacagctcacacccaaggctggcctgaagcagagcacttatacttcatcctaccccagaccaccgttgtgcgctatgtcctggagggagcatgcggtcccggtccctccccatcgcctgcatcctctccccacacttctgagagctgccaccccaggagcagctcagatagaatcagctggagaccacagcatcactggacttgccagaacacaagtggcgcagataaactcagagtaccagatctggcccgtcaaaagtgctctcagaatcatcatctgcatttggcggtacctgtcccccctcaaaaccacagggttccttcctttccatcccaacattaaagatctttgaccctac

SEQ ID NO: 367954 - DNA, 1137 bp, Homo Sapiens
  misc_feature (955)..(968): n is a, c, g, or t
  misc_feature (982)..(982): n is a, c, g, or t
  misc_feature (987)..(1077): n is a, c, g, or t
  misc_feature (1080)..(1082): n is a, c, g, or t
ggcgcgaccgcccttttctcaccccgctctcctcctcagccccatcctccttcgctcctcctcttgtcactccctttcagacatgcgcagtgcggcccgtccctagggctgggttaagggccgcggatgtggcgttctcaggcctcttggtgatcgcctcaagaagccccctcacgagtgtcgtcgatttcctgtcagccaagcaatagggcctgttcgcctttcatggcctccatcagcgaggcgttgccgtggctgtcacaaatcctctgcaccccaggagcgccgcttggacccccgggctcgctgcgtggtccatatctaggtcgggcctctcacggagactttcccaccagtgtaataaagaggagaaaacgtcacagcggaagggcctgaccctgctgcatccactaaggaaacagctacggggatgggaccctgggagctgctgtggagcctcatccaccgcttctctgaccccacccaggctgcttcccaggcctcagggtcttagtgtggacctccgggccgtgattaatgcagtttttcaggttaagtactgcacgactactcgcttctgaaactgatagacactgcctcagctccgtgcagggcagacgcacaagagcagaatctccgtgggacatctctctggagcatcaatattactgcagtatttggaagaaacaaatttaaataagttctaaggtgaagaatggaacatttaagacaagtctggaaagtcatctgcctttaataactgtcgtttgtccttaacgtcagactttctccaagaccaaaactctaagaacttatttccattcttacaaatagtaaaaatgataaatcatatcaagtcaattgaaagtcctgcctgctgctttcctaaattgcaatatggccttggtatggttttatttgtacttttgtgggggattcgtggatctttagattnnnnnnnnnnnnnntaggtttttgaacnattannnnnnnnnnnnnnnnnnnnnnnnnnnnnnnnnnnnnnnnnnnnnnnnnnnnnnnnnnnnnnnnnnnnnnnnnnnnnnnnnnnnnnnnnnnaannnatttgtggggccgcctgggcccctcaaaaaagtttttctaaaaaccttttctttt

SEQ ID NO: 367955 - DNA, 781 bp, Homo Sapiens
gcacccacttcacttctcccatgtagttcctgagtgcaggactctcctgaagaaggggcgtctaaaaggccagcccatgcatcttgttcagaccaggctgctccatctccgctaagcccagggatccacttgtgtgtctttctgggataattgtctttagtggcagcctgggcctcggggaaggaagggcatgaggaatggccccggctgggatgtcaggggcccaggacaactcctgtctctaccaggaaattgccccctcttttcagaggctgccttgtcctagaacctcgtcgcgacatttctcagaagccatgacatgtccctgcggctggaggcctttcaagggtggcccaggaggcctcaagggcccggtgtggcctgcaaaggaagagaacagctgttctcacggaaggatccaaagggttcaaaggcgaagggtgccatctgcttccccactgattcagaagataaacaggagaagtgtcctgtttcacccatattgctggtcctgatttttcaatagtgtccctaccctgaagctcttccattggtcatcatggagttagctaacagcccagggaactggtctcttttcccttttcccttaccacctggaactcacctggaaagggcaatcagctggctctatatcagacgccaccacctggtctttgaagtttctgtcctaccagtgccacagctccctctcccacttctgaactacctccaagagagaccatcctcagcagcctagtatgttatgctagtcctggaatgg

SEQ ID NO: 367956 - DNA, 784 bp, Homo Sapiens
cccacttcacttctcccatgtagttcctgagtgcaggactctcctgaagaaggggcttctaaaagaacctcgtcgtgacatttctcagaagccatgacatgtccctgcggctggaggcctttcaagggtggcccaggaggcctcaagggcccggtgtggcctgcaaaggaagagaacagctgttctcacggaaggatccaaagggttcaaaggcgaagggtgccatctgcttccccactgattcagaagataaacaggagaagtgtcctgtttcacccatattgctggtcctgatttttcaatagtgtccctaccctgaagctcttccattggtcatcatggagttagctaacagcccagggaactggtctcttttcccttttcccttaccacctggaactcacctggaaagggcaatcagctggctctatatcagacgccaccacctggtctttgaagtttctgtcctaccagtgccacagctccctctcccacttctgaactacctccaagagagaccatcctcagcagcctagtatgttatgctagtcctggaatggtgtattctggatgtctactcaaggccaaaccccagtattgcctttcgtttccctattcaaggccaaggctagattctcttcattgtctccatttctctttctccagagctcctatagggcaagacactgtttctcatatatttctggatccttggagcttagctcggagcttggcatacatgcccagcatgaacttttctgaataaaataatttcaaatgctga

SEQ ID NO: 367957 - DNA, 1041 bp, Homo Sapiens
ggtccggattcccgggatcttgaagagaggctaggcacatagcctcctcctattcctaatcctcccaccaaagaaagaggcacagagttcattacttagtgggggccagctgtgatcggccaactgccagctgccttaaaaaggaagaccagtgatgctaggatggagtgaaacccaagaggaagtgccatcatgaggaatcaatgagagatctgtgaagagagagggctgggtgggagcccagaaggatagaacctggaagatcaatatctcccgtgagggaaataacaatggagccaggttctaagtcagtgtctaggtcagactggcaacctgaaccacaccagaggcctataaccccgctagagcctgggccagaaaagacacccatagcccagccagaatcgaagactctgcagggatccaatacccaacagaagcctgcttcaaaccaaagacccctcacccagcaggagacccctgcacaacatgatgctgaatcccagaaggaacctagagcccaacaaaaatctgcttcacaagaggaatttcttgccccacagaagcccgcaccacagcaatcaccttacatccaaagggtgctgctcactcaacaggaagctgcctcccagcagggacctgggctaggaaaagaatctataactcaacaggagccagcattgagacaaagacatgtagcccagccagggcctgggccaggagagccacctccagctcaacaagaagctgaatcaacacctgcggcccaggctaaacctggagccaaaagggagccatctgccccgactgaatctacgtcccaagagacacctgaacagtcagacaagcaaacaacgccagtccagggagccaaatccaagcagggatctttgacagagctgggatttctaacaaaacttcaggactatccctacagcgatcagcccctaaagtgggaggcacttttctgagtgggtcacagattctgagtcagaatcagatgtggggatcttcttccgacccgattctcccagccccaat

SEQ ID NO: 367958 - DNA, 1152 bp, Homo Sapiens
  misc_feature (74)..(74): n is a, c, g, or t
ttgccaagcttggcacgagggcgctgagctgcagtgtctggtcgagagtacccgtgggagcgtcgcgccgcggnaggcagccgtcccggcgtaggtggcgtggccgaccggacccccaactggcgcctctccccgcgcggggtcccgagctaggagatgggaggcacagctcgtgggcctgggcggaaggatgcggggccgcctggggccgggctcccgccccagcagcggagtggtggagccacagtgttaaagaacagagaagtgatccttaatcatttagaattttgcctccaccatccaccagaaaatgaagtggaaagagaagttgggggatggtgtctatgacaccttcatgatgatagatgaaaccaaatgtcccccctgttcaaatgtactctgcaatccttctgaaccacctccacccagaagactaaatatgaccactgagcagtttacaggagatcatactcagcactttttggatggaggtgagatgaaggtagaacagctgtttcaagaatttggcaacagaaaatccaatactattcagtcagatggcatcagtgactctgaaaaatgctctcctactgtttctcagggtaaaagttcagattgcttgaatacagtaaaatccaacagttcatccaaggcacccaaagtggtgcctctgactccagaacaagccctgaagcaatataaacaccacctcactgcctatgagaaactggaaataattaattatccagaaatttactttgtaggtccaaatgccaagaaaagacatggagttattggtggtcccaataatggagggtatgatgatgcagatggggcctatattcatgtacctcgagaccatctagcttatcgatatgaggtgctgaaaattattggcaaggggagttttgggcaggtggccagggtctatgatcacaaacttcgacagtacgtggccctaaaaatggtgcgcaatgagaagcgctttcatcgtcaagcagctgaggagatccggattttggagcatcttaagaaacaggataaaactggtagtatgaacgttatccacatgctggaaagtttcacattccggaaccatgtttgcatggcctttgaattgctgagcatagacctttatgagcttattaaaaa

SEQ ID NO: 367959 - DNA, 708 bp, Homo Sapiens
cacgagggcggagggcgtgtgccgggagcacaatccgggccgaggctcctggtaagggagcagagcgggaagctgatcccccacggattcttagggggccgacttcccctgtgttgaagattcatcaaagactgattcgagtctgtgttcagcatgtgtgttttagattagaacagtgttgagaatttttatatggggcccagttttagcaggacatcatttaggatctttacaaacgagttcagggtacttcgttttatctgttgtctttgagccactgagtgaattagtaaatgtttgcaaatgtgattgcatcagtgaagaagaacatataccacgagttaaaataaatttcccgtgctgctgaaaaatcagtgccgccatcctctgaccctgctcctcccacgcgccctgcaggctgtctccctctggggtcgagagagcttcacagaccatttgggaaagagccaagcaaacacacttctgcaagccatttgcataagtagacataatccatacggaatgatgcactgttcggttgtagtttcattcgtcagtgacctgcatctgcccgcccaggtcttgagttcagctccatccctccctgcagttccgcagcctccggttccccacctcagcttggctgagagtttcacgttcatccaagtgcttctttacagactcactcccagctggaggaggcagagg

SEQ ID NO: 367960 - DNA, 1057 bp, Homo Sapiens
ccaagtttaagggcgcccctgtccggaatgcgttgtgggcccgggacacccagagcagggaccggttcacccggagggccttccgcgatgtagccctgcccccttgttcacggatgtggtgaaacccagggtgagccgagacgagggtccggttgcagctgtgcagcgtggacagccctggccccaggagttgcgccccgcggtcgtcgatgttattgttccgcagagacaagtgcgcaatcgtgctgtccaaggccatgagcttgtgataggactgctccggcagtgggttcccctccagagacaccttcctgagcgtggatgaacagagaggcaggagctcgatgaaggtggtcagggtcttatcggtcagccccaccttccacaagttgatggcctgtagctgggtaagcgggggcagacatttagagaagacacccagaatccgttcctcaaccttccaaccgcggatgtagatttccttcactgacttgctgtcctcctgctccagctccacctggatggtgggccggaagaacacgtatttgctctccaggctattgaggctgcaggaccccgacagccgcggatcgtctaaggtggccttttccggacaaagaggcggaggggacgaagcgcgagctcggggcggggccggttgacaactttggggaagtccgtgtagccccaccgcgtgcagagctcggcgaagtcggtctcgaggaccccggagcactggtactcctcagggcttttgggctcctcctcccccacgggaggcagaacggtcgctggcttctctttggccgcgcagctctccctttcttggtcaccgcgccagaagacttctgggtccccggacgcggggccctgggtgaggcccccggcgcgctctgctcgctcgacatgctggtgttgtccgcagcgtctctgggaccttcgtcggggcaggaaggtaagaacgcactctacggggctcagtctggggatggcatgaatcaggggatctctgttccgcagtccagggaccggatcccgaaaattccggaccggtccc

SEQ ID NO: 367961 - DNA, 790 bp, Homo Sapiens
ctcggcaagggccctcgatttctgcccctacatcctcagaccagaccgccccctcaagcgctcaagtctcccatattccggcggacgccctgtaccttttccagcgacccacattctccctccggctgccccaggattgcgcacttgtctctgcggaacaataacatcgacgaccgcggggcgcaactcctgggccaggcgctgtccacgctgcacagctgcaaccggaccctcgtctcgctcaacctgggtttcaaccacatcggtgacgagggcgcaggctacatcgcggacggcctccggctgaaccgttccctgctctggctgtccctggcccacaaccgcatccaggacaagggcgccctgaagctggctgaggtcctgcgcgccttcgagctgacacacaccgaagtggtggagcgccgacgcctcctgctggaaaaagggacacaggagcgctcgcgatcgaggtaaccatccctgaacagaagccaagcagggcaaaagggatcaagatcgggagcagagagaagcgcagcatcctcctggagtccgagaaaaattgcttcgccccacaatgtcctgcgtacgccataatccaggagctgatgttgccaagggatcccatcaaggccaaactcagggaggatgaggccatggcattcttcccctagccccctcccacctgcttgcctctaagactcggggctacagaagcacctcctgtccctgtgtggggtgacctccctgggggagatctcagaccaataacaaagtctgttgctatact

SEQ ID NO: 367962 - DNA, 1118 bp, Homo Sapiens
  misc_feature (15)..(15): n is a, c, g, or t
  misc_feature (23)..(23): n is a, c, g, or t
  misc_feature (1008)..(1008): n is a, c, g, or t
gcaggctggtccccncggagtantggatgcaatggctgctgcctaagctgggtccctggtctcctgggattactagcccttgggggatagggagaagccaacatctcccgcaggaccccctaatcttcagggcagctcccagagcatggatccctcctgattccactcagcccgatgttcctcacagtcaagctgctcctgggccagagatgcagtctgaaggtgtcagggcaagagagtgtagccacgctgaagagactggtgtccaggcggctgaaggtgcctgaggagcagcagcacctgcttttccgtggccagctcctggaggatgacaagcacctctctgactactgcattgggcccaatgcctctatcaatgtcatcatgcagcccttggagaagatggcgctaaaggaggcccaccagccgcagacccagcccctgtggcaccagctgggactggtcctagctaaacactttgaaccacaggatgccaaggccgtgctgcagctgctaaggcaggagcacgaggagcgcctgcagaagataagcctggagcacctggagcagctggcccagtacctcctggcagaggagcctcacgtggagccagctggagagagggagcttgaggcgaaggcacggcctcagagctcctgtgacatggaggagaaggaggaggcagcagctgatcagtaaacgggccatcctacccatttgcatgctaaaattctcccggcctcatccttacgtgttccctggtgacttttcctactacttcctgctgatgtggatgcgtccacacccctttttgaaccttccaagcagctggagggtttttggatccctgtcccctcttgggcctgaggtcctccctctgaaatgcagagtgaaccaaccctcatcaccatgcttccccctagaagggttctgatcaccggagggcaagccccaaaggcccacagtccctcctgtgctgcagctttgccacaaattcccaagagctcnccaggtgaaagaggcctggcccggtctccatggtctaggcgacctcttttccttcggcacgaagacactgtgattctttccccactctaagccggcacttcctaaggtcc

SEQ ID NO: 367963 - DNA, 1451 bp, Homo Sapiens
cgaggggccggagctcctggcggtgccggatcctgacggcggcttcccccgggtctgtctgccaaaatgtctgaaagatcagatctccttcacttcaagtttgaaaattatggagattcaatgttacaaaaaatgaacaaattaagagaagagaataaattttgtgatgttacagttctcatagatgatattgaggtacagggacataaaattgtgtttgctgcaggttcccccttcttaagagaccaatttttactgaatgattccagagaggtgaaaatctccatattacagagttccgaagtggggagacaattgctcttatcctgttatagtggtgtgctggaattccctgagatggaactggtaaattacttgactgctgcaagttttcttcagatgagccacattgtagaacggtgcacacaggccctgtggaagtttataaagccaaaacaaccaatggatagtaacagagggatgtgaaccacagagtgcttctccccagtcaaaagaacagcagggagatgccagaggctccccaaagcaggactcaccttgtattcatccatctgaagacagtatggatatggaggacagtgatattcagattgttaaggtagaatctattggggatgtatcagaggttagaagtaaaaaagatcagaaccagtttatttcttctgaacccactgctttacattcatcagagccccagcactccctgataaattcaactgtggaaaacagagtaagtgaaattagaacaaaaccatctccacaattatgccctttcttatacaggcagttgataacatcatcatggcctcaaaagatgtcttgggccctaatattcgaggtgtagacaaaggcctacagtggcatcaccagtgcccaaagtgtaccagggtgtttcgtcacctggagaactacgccaaccatttaaaaatgcacaaactctttatgtgtctactctgcggcaagactttcactcagaaaggcaaccttcatcgacacatgcgtgtgcatgccggaattaaacctttccagtgtaaaatctgtgggaaaaccttttctcagaagtgttccttacaggatcatcttaaccttcacagtggagataagccccataaatgtaactattgtgatatggtttttgcacataaaccagttttgaggaaacaccttaaacagctgcatggcaaaaacagctttgataatgccaatgagagaaatgtacaagacctcacagtggattttgattcttttgcatgtacaacagtcacagactctaaagggtgtcagccacaacccgatgcaacacaggtcctggatgcaggttaactggcccaagctgtcctgaacttaagaatgatagtacttgtgggaattgagtaggggcttcatgctccaactcgaactgaatgacaatggggcaatagtcttagtct

SEQ ID NO: 367964 - DNA, 1127 bp, Homo Sapiens
  misc_feature (41)..(41): n is a, c, g, or t
agatagccagttggggcgcgtcatttccctcccttgaaaancccgtgtttcttgccaggcggccccaggcaggccagtttggaagttccggggaggccccggctgggtgctgcctgccagggagggctggaagagcatctcagagcaacggaagcgctcctggccaatagtgatgagtttgccgtccgggagctcgtagtccacgcgcagctcctccgggaccaggcccagctcctcctcgggcaggaagggccgcatagcagcacttcttcttgatgtgctctatgatgtgcaggtggtcgtccgtgaatgcgtggcccgcctcattgagcagctgcatcaggtagttggtgaggtcacccccagcgtagtcggcgcggctggtcaggcccggcagcacgtcgccctcggatatgggcaccacgtgcgagacgccgtgcccgctctccaccaccagccccgaggtcttgccgtaggaatagatggacagcaacgactgggacgtcacgtgcatggctgggatgccgaaggtctcaaacatgagctccgcgtacttctcccggttgctgctggggctgagcggagggtcggagaccagcacagcgtgctcctcggggaggatcttcatggcggtgcggaagatgtactcccagatgtcctgcacgcagtcccagtccaccacgatgccgtgcttcagcgggttcaccagcttgagaggcgcctccgtgttgagcagctcatggcccactaaagtccacttgcgggtgtcgccagcgtcggccgcctcggggcagcgtttgcccacggtggaggagatgaagtaggtgggcctcggctctcccgcgtagccgcacttgcagtactgggagcccaggtcgatgatgaccgccttgatcttgtgcaccttcctgggcttcatcttgagctgagtggccgcacctgtgtcccggaggctggcgtcagggccgggccgtgttcctgcctctccagggtcaccctgagccgtgcccaggggcatggggctgttccttgtcgccatctgcctcccttgctccccttctcacatccacagcctagagcccactggggagaaatgagatcccccacatcccgggaattccggaccc

SEQ ID NO: 367965 - DNA, 1503 bp, Homo Sapiens
  misc_feature (977)..(1039): n is a, c, g, or t
  misc_feature (1111)..(1164): n is a, c, g, or t
  misc_feature (1266)..(1276): n is a, c, g, or t
accgaaccccgcccgcgccgggagcatctcgcgtccccaacgggcccccgggtcggtttccgcggtggccatgactgcggccgtgttcttcggctgcgccttcattgccttcgggcctgcgctcgccctttatgtcttcaccatcgccaccgagccgttgcgtatcatcttcctcatcgccggagctttcttctggttggtgtctctactgatttcgtcccttgtttggttcatggcaagagtcattattgacaacaaagatggaccaacacagaaatatctgctgatctttggagcgtttgtctctgtctatatccaagaaatgttccgatttgcatattataaactcttaaaaaaagccagtgaaggtttgaagagtataaacccaggtgagacagcaccctctatgcgactgctggcctatgtttctggcttgggctttggaatcatgagtggagtattttcctttgtgaataccctatctgactccttggggccaggcacagtgggcattcatggagattctcctcaattcttcctttattcagctttcatgacgctggtcattatcttgctgcatgtattctggggcattgtattttttgatggctgtgagaagaaaaagtggggcatcctccttatcgttctcctgacccacctgctggtgtcagcccagaccttcataagttcttattatggaataaacctggcgtcagcatttataatcctggtgctcatgggcacctgggcattcttagctgcgggaggcagctgccgaagcctgaaactctgcctgctctgccaagacaagaactttcttctttacaaccagcgctccagataacctcagggaaccagcacttcccaaaccgcagactacatctttagaggaagcacaactgtgcctttttctgaaaatccctttttctggtggaattgagacagaaataaaactatgcagatatgcgtaccattcnnnnnnnnnnnnnnnnnnnnnnnnnnnnnnnnnnnnnnnnnnnnnnnnnnnnnnnnnnnnnnngggggggggggcgccaaaaaaatatcccccggggggggcaccccatttgggtggcccccctttttttgtgannnnnnnnnnnnnnnnnnnnnnnnnnnnnnnnnnnnnnnnnnnnnnnnnnnnnncagcggcgataaaaaacaaccgcgtggcgaggggaaaaaacagcggagtcacgggggaggaagcctcacttgggaggagaacgaggaccccacacaacggtnnnnnnnnnnncgaacaacatagtggggaggaccaaaaccaccactacccacgacaagaagattttataacacgccacaggaggaggacaaatacaaacctcagaggaggggtgattcatgcgcggtggcacacccaacgccgggcatcattattgccggtcgcgcggatgaaaaaagtcgtgcgcaaccacggggagaatttcatatggaccacaacattattatcagccgaggagg

SEQ ID NO: 367966 - DNA, 974 bp, Homo Sapiens
atcggaactcgaggcggggctgctgggtcttccaggagcgcccagacgcgggcaggtggccgccggtggccacaggcctgggcaggatggaagcgcccgcagagcgggcgcttccacgtctgcaggctctggctcggccgccgccacccataagctacgaggaggagctttacgactgcctggactactactacctgcgcgacttcccggcctgcggggcagggcgcagcaagagccggactcggcgcgagcaggcgctgcgcaccaacgtggcctgcacctggcgggcacgagcgcaaggtcgcgcagaagctcctcaatggccagcgcaagcgccgccagcgccagctgcatcccaagatgcgcactcgcctcacctgagcctgggataccgaaggaccgtgttcgaagtatttactgtaactccaactgtaactgtggttctgaggaggagagaatccatgtgtggtcaacagaacttttcgctgtcaccttaagtttacgtgcttcgatatcttttccttactaattgattggtaacttaagtagtgcccaagtggattagcctttttagaagtttattaattaaaagagagcagcaagaatggcaaaaaagaggagagagaggacaaaaagcacaagcagaaaacaagcagcagatgaacgaacgaccacgacacgcacagcgaaacacaagacaaacgcagcgggggggccgagacgcagaagagcgatcgcaaagggggagcacagaagagagcgccaacgagaggacgtcaaacgagggaccgcagagagcggcaagtcagacaaaacgacgcaagccgcggcggcggagaaaacagacggcgaccacgacacacacacgacccgggcggaccgacccgcgaggcggacaccccacaccagcggggggggagcccccagacggccggccaccccgcgcggagggagagagcgccccgggggcacca

SEQ ID NO: 367967 - DNA, 535 bp, Homo Sapiens
cggggatggccacagactgccggtcagtgtcagcaggcggtgggttagggtccgcaggcccagaccaggccgccgacaccaataagctacaaggaggagctttaccgctgcctgtactactactgcctgcgctacttcccagcctgcggcgtagggcgcaccaagggcctgacgcttagcgagcaggcgctgcgcaccaagcggctgtcgcctggacggcacgctcaggcagaagctcctcagtggccacaagtccgctagctccggctacagcccttgccgcacactcccgccacctgagcctgtgtaggatgccgaaggacctcttcaaagtattttctgtaactccaactgtaacttggttctaggaggagagaatccatgtttggtcaacagaacttttcgccgccacttaagtttactgcttcaatatcttttccttactaattgattgttaattaagtagtgtccaagtgagttagcctttttagggttgattaattaaaagagcagcaagaatggcattgtaaaaaaa

SEQ ID NO: 367968 - DNA, 1730 bp, Homo Sapiens
caaggcgcagcctaggacagggcttctggagcttctggcagccgtctgccctcatggcctttgcacctatggggcccgaggcctcgttcttcgacgtttggaccgacacagggagtccctgctggctgccctgaggagaggtggcagggagcccccaactgggggaagccgcctggcctccaggtttgaagattctgtgggtcttcagatggtatcccattgcaccaccagaaagatcaaaagtgattcaccaaaatcagctcaaaaattttctctaatccttaaaatattgtccatgatttataaattagtacagagcaacacttatgcaaccaaaagggacatatattacactgacagtcaactctttggtaaccagactgtcgtcgacaatattatcaatgacatttcttgcatgttaaaagtgtcaaggaggagtctacatatattatctacatcaaaaggtttaattgctggcaacttaagatacatcgaggaagatggcaccaaagtgaattgtacctgtggtgcaacggctgttgctgtgccatcgaatattcaaggaattcggaatttagttacagatgcaaagtttgtattaattgtagaaaaagatgcaacatttcagcggctcctagatgacaacttttgcaacaaattgtctccttgcatcatgattacgggaaagggagttcctgatctaaacacaagacttttagtcaagaaactgtgggatacatttcatgttcctgttttcactcttgtagatgctgatccacatggcatagaaataatgtgcatctataagtatggatctatgtctatgtcttttgaagctcatcatctcacagttccagctattagatggcttggtcttctcccttctgatcttaaaagattcaagtgtacctaaagatagtttgattccactgacaaaaagggaccaaatgaaacttgacagtatcctgaggagaccttatgttacctgccaaagcatttcggagaagaagaaactggatgatacatggcatgactctaaaatgaaggcagaattcaagctttgactttcctatcatcagatttatcttctccagagtgtacttacctaatcaaagttaaaagtttgggaggatgggctataacaataaatcagaaagaggcttctgattgccaagaggcctttccattagcttcaggtccggatagggcaagatacgtattgttgcccaggacgcactgttcttcatatttcttgaatacctgtacagcaggtgaaacataaaactaactttccgttaaactatggtattcgagggcaaaaccagactgtctgtactcgaagttctgctttggcaaaggacctaattccttgcatctgtagaagacagagtttgtaggtcaatacttctaaaggcaattattagaccactatgttatttttgaccccttacagagttgacttagggaaaaaaataagaaattgaatacacataggaaaccaaaagcgtaccaaaaatctattacgttctagaaaacgacgataatggtatagcggcaaaagagaaactaaccgggacagagaacacgacagcaaccgacaagggacagtgtcacagaaaaatgaagtggtacaagagaacacacaaacaataccaaggcaacactaaaaagcgaagaaccgacaacaagtgacacaggagaacacagacaaaacaatgaacagcaaacaa

SEQ ID NO: 367969 - DNA, 1052 bp, Homo Sapiens
gggtccggaattccttggatcgccgcgcggggctccaggttccgcccagggactaactccaggtctgcgcgcgtccaacgagcacggctctcaaccggcctcctggcgcccaacgaccatggcttccaaccggcctccgtgcgcccaacgaccatgactcccaaccggcctccagtttccaactgtttctcgaacagggaagccgccatgacacagctgactacgcccttggtcacaggggacctgagatcctccacgatttacgggaccggcgccacctcgggctcgaaccaccctctcgatagggccgccgctaagtaatcggcgtaggggttcagccgcacatctccttcccgcgccgcggaccgagcagtcgttggtgctcttcaggtgcggcctgggtgcccagagccttcgttagactctcggacccgcaagggagcccgaactctttcagactcgctctccctcagccggacctcggccctttttcacaccccaggggagtctggatttctcatagtcctgggcaccagccccttcccagtctagctcttgggactccctgaagccggaactccctcgcctggactcccgggagaacctggaatccccatctccagtccacattttctcagaatctgtcctagcccttcagtctcccaggcatgacatcgtgtggtcccagcgccctaggtggtgagctgtgactctccttagagcctggcgaggccgaggtcctccccagctcgaacccatcccacactccccttctcagcctctgtgttccccagtggtcctggaaaagccccagttccctctgcctggcccaatcctcgacaaaaccaattacccacgctccttttccattccataacccccatcactgcatcctccaggctccccatccatggaggacttgaggtggaacgccatttggttcaaaatacccttgatttatactggcaagcgaatattccagtcgttgccagcctcctccgttctagaaatggcaaatttggcacactgaaaaaaacccaacgacaaccaca

SEQ ID NO: 367970 - DNA, 1061 bp, Homo Sapiens
tctggctccgatccgggcgactatggcggcgctgcggctcctggcgtcagtgctcgggcgcggggtccccgccggcggctcagggctcgcgctgtcccagggctgcgcccgctgctttgccaccagtccccggctccgtgccaagttctacgcggacccggtggagatggtgaaggacatctctgacggggcgaccgtcatgatcgggggcttcgggctctgcgggatccccgagaacctgatcgccgcgctgctcaggacccgcgtgaaagacctgcaggtggtcagcagcaacgtgggcgtggaggacttcggcctgggcctcctgctggccgccaggcaggtccgtcgcatcgtctgttcctacgtgggcgagaacaccctgtgcgagagccagtacctggcaggagagctggagctggagctcacgccccagggcaccctggccgagcgcatccgcgcggggggcgccggggtgcccgccttctacacccccacgggctacgggaaccctggtccaggaagggggcgcccccatccgctacaccccggacggccacctggcgctcatgagccagccccgagaggtgagggagttcaacggcgaccacttccttttggagcgcgccatccgggcagacttcgccctggtgaaagggtggaaggccgaccgggcaggaaacgtggtcttcaggagaagcgcccgcaatttcaacgtgcccatgttgcaaagctgcagacgtcacggcggtggaggtggaagaatcgtggaaggggggggcttttccccccagaagaactccacggttcctaacattttatgaagatcccgtgcataaaggggcccaaaatacgagaaaccaaattgggcgctttaaccatccctgaaaaaagaaaatgggagacccttgtaaagggaaaaggaccctcaggaatcgccttcttcgaacgcggaacttctgagatttgaggacggcattgtaacccaatctggggattagggaatcccccctgggggcgcgcactttattccgggcccgacatggcggggcacgcttcaa

SEQ ID NO: 367971 - DNA, 561 bp, Homo Sapiens
cgattgagctggcaggagggagcttgtgtcctgtgacctgtgacccacctccaccaaaattccatgggctctaccagtgtactaatggcttccagttcaacagtgagtgtaggatcaagtgtgaagacagtgatgcctcccagggacttgggagcaatgtcattcattgccggaaagatggcacctggaacggctccttccatgtctgccaggagatgcaaggccagtgctcggttccaaacgagctcaacagcaaactcaaactgcagtgccctgatggctatgccatagggtcggagtgtgccacctcgtgcctggaccacaacagcgagtccatcatcctgccaatgaacgtgaccgtgcgtgacatcccccactggctgaaccccacacgggtagagagagttgtctgcactgctggtctcaagtggtatcctcaccctgctctgattcactgtgtcaaaggctgtgagcccttcatgggagacaattattgtgatgccatcaacaaccgagccttttgcaactatgacggtggggattgctgcatctccacagtga

SEQ ID NO: 367972 - DNA, 776 bp, Homo Sapiens
cggggccgcctggacgacggttgacggaggcgagggaaactgagggcgaaagttgtgtgtcgtgttggcaggagggcctagaagggaaagactgtctagtgggacaatgtcatattataaatttggaatgctgaatagaaaattatagattttgatattgaaggaaatgaagcgaagcctaaagtgaaaattcagctcgaagtacagcaggctgtttgcctgttccgttgttcaatcagaaaaagaggaacagacagccattaacttctaatccacttaaagatgattcaggtatcagtaccccttctgacaattatgattttcctcctctacctacagattgggcctgggaagctgtgaatccagagttggctcctgtaatgaaaacagtggacaccgggcaaataccacattcagtttctcgtcctctgagaagtcaagattctgtctttaactctattcaatcaaatactggaagaagccaggtggttggagctacagagatggtaacaaaaataccagcttgaaaacttggaataaaacatgattttaagcctcaatgtaaacgaacaaacttagtggcaaatgatggacaaaaattcttgtccaatgagttcgggagctcaacaacaaaaacaattaagaacacctgaacctcctaacttatctcgcaacaaagaaaccgagctactcagacaaacacattcatcaaaaatatctggctgcacaatgagagggctagacaaaaacagtgcactacagacacttaagcccaa

SEQ ID NO: 367973 - DNA, 1490 bp, Homo Sapiens
  misc_feature (844)..(844): n is a, c, g, or t
ctcccgcaagctcccgcagccccggcgctgcctcgctgacggctctccgccttccatggccgccatctgaacctgggcttcagctctgtccccagcctcccggggactcagattccctgaccctgatccgacccagaaattgagccagacacctcgggtggccttcgagtcaatctctgggcacactctgggtggccaccagcatctaacaaacggatgtctggaccctaagggccagggggtgaggggaagtggggcacactttttagacgatggtggggctgaggccggttgggcaggagatctgcctctgtctctccagtcacaggacagtctcctttcctctctgggcaaaactctaaggagctggagccatccctgggtccacagtgtgagaacgccaaggaagagcgttaacgtcatcgcgcccggccaagggcggccaggcaggcagcgaagatgccatcgcgccgaggtggcggccactgcgcctgcgcggtccacggcgcctgcgaacagcctgattcccgcgctttcttcgcgggcgggaagggcggcggttgctgacggggccgcctggacgacggttgacggaggtctagtgggacaaggtcatattataaatttggaatgctgaatagaaaattatagattttgatattgaaggaaatgaagcgaagcctaaatgaaaattcagctcgaagtacagcaggctgtttgcctgttccgttgttcaatcagaaaaagaggaacagacagccattaacttctaatccacttaaagatgattcaggtatcagtaccccttctgacaattatgattttcctcctctacctacagatngggcctgggaagctgtgaatccagagttggctcctgtaatgaaaacagtggacaccgggcaaataccacattcagtttctcgtcctctgagaagtcaagattctgtctttaactctattcaatcaaatactggaagaagccagggtggttggagctacagagatggtaacaaaaataccagcttgaaaacttggaataaacaatgattttaagcctcaatgtaaacgaacaaacttagtggcaaatgatggacaaaaattcttgtaccaatgagttcgggagctcaacaacaaaaacaattaagaacacctgaacctcctaacttatctcgcaacaaagaaaccgagctactcagacaaacacattcatcaaaaatatctggctgcacaatgagaggggctagaccaaaaacagtgcactaacagacacttaagcgcaattttcaacaaaatcaatatcagaaacaaatgttgggatgatattccagaagacaacaccctgaaggggaaacgtccatggtatcagttgacagttaaggaaacaagctagtccttaaagaataatttctggaaggaattgaaaggcttgaaggaatggggttaacattgccagaaagctgtcttcctttggagtatagctggtctga

SEQ ID NO: 367974 - DNA, 1558 bp, Homo Sapiens
  misc_feature (21)..(21): n is a, c, g, or t
  misc_feature (32)..(32): n is a, c, g, or t
  misc_feature (63)..(63): n is a, c, g, or t
  misc_feature (86)..(86): n is a, c, g, or t
  misc_feature (96)..(96): n is a, c, g, or t
  misc_feature (119)..(119): n is a, c, g, or t
agggttatttgaaacccaggnccaaattcttncaaatcactggcttctcagtttcttcttccntggaagtcttcattcaaatcccnaaagtccttngggagtaccacagattgtactgncattaagttgacaaaatgtgcaccctgtatttggactgaggaggaaaggaaatggcacctaggcagcagcgcttagggtcagcaaggagaccggcctagggtctcagtaaagcagaactgtttcaaatgggacttagaccggggcatgtgcttccggtgaatcctcttgaaacctaaagtaaatgggaaggccgccctaacagttgtacctgacataaagggagacccttcttaatattctggcagctgacttccttcactgaacaactattatcaaaaggcgagaggcataaagtgcacactgtagaataagaagagactgaattatgatggaaaaaaaacatcgtaacttccccaaagaggtgtggacagtgtacctagcctcacaaaggtccttaataccctcctgtgtgctgccagggaacagctgtgaattccagatggggaggaaggctctgacttaagtggaaaaattcctctgcatggttgtcagcaggaaggtttcacgtaaggttatccttatgtggagaacatgggttatcctgctgttcacgccagatacattttactgacaacagtcagatggtgattccactcatctggccttgggacagcagaaaacgaagtggaagaacaatagctggccagggacagaattaaattttcctagagatggtgttctagacagctatgccaaggccactgggaatttctcaggctctccaagttaatttctgtggggtgccttactctgccatgtgggatttaccccaacaactgaggactgcagtggatagtaaccatataattgctaccaaaaacagtggtccttaggttttagttaagcaagagagaaagccttgagactacaactccagcaagttaggctttatgttgatctgaacccccctgccctcacagcattctaggaactacagtaacgtcagtcggttgcagtggtacaacgagcctgcaccagtctagctacagaacactttggaatacttgtcagagcgcactggcatctgttaatacatggcctgacccatgtacccattaccataaactcaaccacagacgagacatccagaggttaaaaaaaaccctattacttcaacatagcaatagagagaaaggataaataaaagcctccagaaggtggctgcatcagaaatgaaaatgtgccttccaatagattacacaggctgggagttctgtcttggctcccttcaaggcctctggttctatccttaaaacaataatacacttccactgagacaggcagggcactctcctgtggttctgctggctccaccacaggccctgctagtcctttggaaagggacctaacttggcaattcaggaaagcccagggctggggggagcagcatgcttttgtgggattaggaatgaagagccctcgtctttgatcgccaccc

SEQ ID NO: 367975 - DNA, 440 bp, Homo Sapiens
ctggggtacaacccttccatgggagattcaagaataaaggaaagcttcaagcctcctcttcttccttttccaagaaatcagtcaatgttccattatcaacaggaattaataaatactctactccatcagttcccttctttgttcttataagcttgtggtccctaaattcagttaactgggcccggagtgtctagatcactattgcacgaggaatgcctcccgacactgctggtaaaaatcttgaaaagaaaggccaatgtaagaagggttatcctggttgtccagctggtattttattagtagcctgaaaattccccttgcatcatggggtaaggcttcgtaagacatgagtaagggagctaagtggcagggataccagaatgctttagcagtagagagttgctgaataaggagctttgttctatgtataaaggacagta

SEQ ID NO: 367976 - DNA, 804 bp, Homo Sapiens
  misc_feature (164)..(164): n is a, c, g, or t
cgcgacggcggctctttggcgcggattagggggtctcggcgagggagtcatcaagcttgggtgtatgtgttggccggttctgaagtcttgaagaagctctgctgaggaagaccaaagcagcactcgttgccaattagggaatggaccgtttgggtccctttagncaatgatccctctgataagccaccttgccgaggctgctcctcctacctcatggagccttatatcaagtgtgctgaatgtgggccacctccttttttcctctgcttgcagtgtttcactcgaggctttgagtacaagaaacatcaaagcgatcatacttatgaaataatgacttcagattttcctgtccttgatcccagctggactgctcaagaagaaatggcccttttagaagctgtgatggactgtggctttggaaattggcaggatgtagccaatcaaatgtgcaccaagaccaaggaggagtgtgagaagcactatatgaagcatttcatcaataaccctctgtttgcatctaccctgctgaacctgaaacaagcagaggaagcaaaaactgctgacacagccattccatttcactctacagatgaccctccccgacctacctttgactccttgctttctcgggacatggccgggtacatgccagctcgagcagatttcattgaggaatttgacaattatgcagaatgggacttgagagacattgattttgttgaagatgactcggacattttacatgctctgaagatggctgtggtagatatctatcattccaggttaaaggagagacaaagacga

SEQ ID NO: 367977 - DNA, 460 bp, Homo Sapiens
catcaagccaagaatatcaagtgaccttgttctattctgtgataacaccactctgtaatcctctaatatatagtctcaggaacaaagagatgaaagattatctgaggaaaatcttcaggacactgtggcacagcaaactggatctggtgctcatcctctgagtcacagtccagggctctgtactctctactgtcttccgcttacctccaactgatgacagcttaccttgcaaatgaatcacctgcaggtgaatcttagtctctggatctgctttcagggtagcactgtagtcagatgaatgggaatccattctctcagaaatgcaagaagggaatgtggtttggcaaagttcattagatcaattttggagttgagtttgaggtgcccccagcaattgatgagttcaaggctatcctgtcacatttcgtgatgtggcactgagcccgcccaggagcgttac

SEQ ID NO: 367978 - DNA, 1071 bp, Homo Sapiens
agcgggtgacgggcccggctgtagcggcggcggccgcggcgtcttaagcggcgcccagtgcaggatggtgctggaggcggcggcggccgtggtggcggcagcgtcgttggcggcagcgggagtgggtgcggcggcagcggcggcggcgcccgcgggtggtataaaatggcggatttcgaagagttgaggaatatggtttctagttttagggtttctgaactacaagtattactaggctttgctggacggaataaaagtggacgcaagcatgacctcctgatgagggcgctgcatttattgaagagcggctgcagccctgcggttcagattaaaatccgagaattgtatagacgccgatatccacgaactcttgaaggactttctgatttatccacaatcaaatcatcggttttcagtttggatggtggctcatcacctgtagaacctgacttggccgtggctggaatccactcgttgccttccacttcagttacacctcactcaccatcctctcctgttggttctgtgctgcttcaagatactaagcccacatttgagatgcagcagccatctcccccaattcctcctgtccatcctgatgtgcagttaaaaaatctgcccttttatgatgtccttgatgttctcatcaagcccacgagtttagttcaaagcagtattcagcgatttcaagagaagttttttatttttgctttgacacctcaacaagttagagagatatgcatatccagggatttcttgccaggtggtaggagagattatacagtccaagttcagttgagactttgcctggcagaaacaagttgccctcaagaagataactatcccaataggctatgtattaaaagtaaatggggaagctatttcccttttgcctgggttatgcacccaccgccctaaaaaagggggattggaacaaaaagcgcccctggaacccccccttggaaaattaacatcctttaattaagggttatctttccggctgtgcgccaaacccaaattttccattttctttggggcaatccaaaaaattgggaaaggaaattaccccta

SEQ ID NO: 367979 - DNA, 968 bp, Homo Sapiens
gagcaggcatgggtgggtcacaggctttggagagcactctctgtcctgatcttttcagttgagagacttcagctgttcatgctcatttggacttagttcaagaattttgggtgtcaccaggtaaacagagccctcagcatctgaatagaaactgaacaggaacagaagagattacactacatctgagatggagacctttcctctgctgctgctcagcctgggcctggttcttgcagaagcatcagaaagcacaatgaagataattaaagaagaatttacagacgaagagatgcaatatgacatggcaaaaagtggccaagaaaaacagaccattgagatattaatgaacccgatcctgttagttaaaaataccagcctcagcatgtccaaggatgatatgtcttccacattactgacattcagaagtttacattataatgaccccaagggaaacagttcgggtaatgacaaagagtgttgcaatgacatgacagtctggagaaaagtttcagaagcaaacggatcgtgcaagtggagcaataacttcatccgcagctccacagaagtgatgcgcagggtccacagggcccccagctgcaagtttgtacagaatcctggcataagctgctgtgagagcctagaactggaaaatacagtgtgccagttcactacaggcaaacaattccccaggtgccaataccatagtgttacctcattagagaagatattgacagtgctgacaggtcattctctgatgagctggttagtttgtggctctaagttgtaaatcccacagagctttaggactaggggtcttactaaagaaggacctcttcttgttcattcttgtttaaacctttccttaatatctactctttagcactatagtgaactcctgattatttattctaactggaggagtgaaaaatccaaaattgtggatcattcaattaaaagttatgactgac

SEQ ID NO: 367980 - DNA, 1695 bp, Homo Sapiens
  misc_feature (21)..(21): n is a, c, g, or t
  misc_feature (629)..(629): n is a, c, g, or t
ggaagtggagccagatccacnagttggagacattggtcacctcagcgtaggtgtgggcccagtccacaatgctgttggagcatgtcaacctgatcaaactactcccaagcatttggcagacaatccaggcccttggaccttggatgcattgacataccaaccgcacgctgccaactcttgccacaagaggggcattgctgcttcttaatcttttgctttaaatgaccttcctgcatccaaggtcttcccagctccttcactgccagtcacactcctgggccatgctgccattttgtagatttcaaaattattcgaagagtaggttttaaatgttctcgctattaaaaaaggatctgcactctgatgataataatggtgataattttcttggtgcttctgttctgggaaaatgaggtgaatgatgaagcagtgatgtcaactttagaacacttgcatgtggactaccctcagaatgacgttcccgttcctgcaaggtactgcaaccacatgatcatacaaagagttatcagggaacctgaccacacttgtaaaaaggagcatgtcttcatccatgagaggcctcgaaaaatcaatggtatttgcatttctcccaagaaggttgcttgccnaaacctttcggccattttctgagctagaaggagaaggacgagaaagagagatttctaattctggggatttcatgaagtcctcttcttctctattcattagtttccttgtctgtaaagtgaggatcttgaattagataatctttcaagttctttccaagtctattagtctataattctatttcttaagtagtacagaaaatggctatattatagccattgttggaggggagaatttgtattgtgaggtagtaagaaataaggggcaattggcaaataaaggccagattatgttgtcactaattctgagctatggcatttcaatcctgtatgtgagagctagagactcatacagtgacctagagcaggcatgggtgggtcacaggctttggagagcactctctgtcctgatcttttcagttgagagacttcagctgttcattgctcatttggacttagttcaaggtcatgtcaaagaagaaggtgcacttacgctagttgttagctctgtcttttgtaaccatcaagttccatgcgattgatcagatttaggagggggcgttgggggataatcgtaagtgaaggacagtttgcaaccttaattttgggtgtcaccaggtaaacagagccctcagcatctgaatagaaactgaacaggaacagaagagattacactacatctgagatggagacctttcctctgctgctgctcagcctgggcctggttcttgcagaagcatcagaaagcacaatgaagataattaaagaagaatttacagacgaagagatgcaatatgacatggcaaaaagtggccaagaaaaacagaccattgagatattaatgaacccgatcctgttagttaaaaataccagcctcagcatgtccaaggatgatatgtcttccacattactgacattcagaagtttacattataatgaccccaagggaaacagttcgggtaatgacaaagagtgttgcaatgacatgacagtctggagaacaagtttcagaagcacacggatcgtgcaagtggagcaataacttcatccgcagctccacagaagtgaa

SEQ ID NO: 367981 - DNA, 1197 bp, Homo Sapiens
  misc_feature (1114)..(1125): n is a, c, g, or t
atcaggccaaatcggccgagctcgaattcgtcgagagcggaattttaacggtcactcggccttaagccgtcctgggtgtatgtgaggctgaaagggaaggaggaacagggtctgggccgctgtgtgctctgccgtcatctctaagaaacaaccataccactgaatgctactgtgtacttacaaaccacactcatattcgtcacgtcatttcatcttcacccccacctccaaatgaggcttgaaatgagatgagatgttcctccctcccctttcaaccatggacctcacactgtggacttcctcttagagcctctgagttaggtacccaagccaaggcacaatgtccctgccccccataagactgcccagcccctatggctctgatcggctggtacagctagcagccaggctccggccagcactctgtgatactctgatcaccgtagggagccaggagttccccgcccacagcctggtgctagcaggtgtcagccagcagctgggccgcaggggccagtgggctctgggagaaggcatcagcccttctacctttgcccagctcctgaactttgtgtatggggagagtgtagagctgcagcctggagagctaaggccccttcaggaggcggccagggccttgggagtgcagtccctggaagaggcatgctggagggctcgaggggacagggctaaaaagccagatccaggcctgaagaaacatcaggaggagccagagaaaccctcaaggaatcctgagagagaactgggggaccctggagagaagcagaaaccagaacaggtttctagaactggtgggagagaaccggagatgttgcacaagcaactcgccaccaagagcagaaccccagatgggaggaagcaacgcaggaggctcagcagggaccgacccagtcaaaggaaaaacgccctccaagccccttggccaaaggggagcagatgggaagcttgaaatgctccacgtggttgaagggaaaattcagggggctcttaaggaaaatttgcccaaagttccctggcccccttcccccagaaaggttccctggaaaaccaggttaacccctaggccctccgtggctggaggcccctttgtttnnnnnnnnnnnncaaccctggcccttgggaacaattccggttggatgccgccccaaaatagggatttcccctttaaccataaaa

SEQ ID NO: 367982 - DNA, 844 bp, Homo Sapiens
cagcccctggcagcacccacgatgcgggacctgcctctcaccagcctggccctagtgctgtctgccctgggggctctgctggggactgaggccctcagagcagaggagccagctgtgggcaccagtggcctcatcttccgagaagacttggactggcctccaggcagcccacaagagcctctgtgcctggtggcactgggcggggacagcaatggcagcagctcccccctgcgggtggtgggggctctaagcgcctatgagcaggccttcctgggggccgtgcagagggcccgctggggcccccgagacctggccaccttcggggtctgcaacaccggtgacaggcaggctgccttgccctctctacggcggctgggggcctggctgcgggaccctggggggcagcgcctggtggtcctacacctggaggaagtgacctgggagccaacaccctcgctgaggttccaggagcccccgcctggaggagctggccccccagagctggcgctgctggtgctgtaccctgggcctggccctgaggtcactgtgacgagggctgggctgccaggtgcccagagcctctgcccctcccgagacacccgctacctggtgttagcggtggaccgccctgctggggggcctggctgcggctccgggctggccttgaccctgcaagccccgcggagaggactcccggctgagtaccgcccggctgcaggcactgctggtcgggcgacgaccaccgctgcttcacacggattgaccccggccctgctcctgctgccgcggtccgagcccgcgccgctgcctgcgcacgggcagctggacaccgtgcccttcccgc

SEQ ID NO: 367983 - DNA, 874 bp, Homo Sapiens
cggggctgtctccaggaaacgcgacgctctccgtaggcgcaggctggcaagcagtcgggacgggagcgcgggcgtcgcggtggctgcagtcccgtcggtctccctgctgtccggcgcgagctcttcgagtcttgcttggttggaagaccacagacatggaaggggcccatgcctcccttagcttagaggacgaagtctctggggctggcagccgccaacgcccgctagaggggaagggcggcgagacccctgctgccgaggagccggggtccctgaagaactacgctgtcttcgccacaagggatgtttcagcagcccctgagaaggaagaggaggaagctgagggcccgctgagggcgcaggacctgagggagtcctacatccagctcgtccagggtgtgcaggagtggcaggatggttgcatgtaccagggggagtttgggttgaacatgaagcttggatatggcaaattctcttggcccacaggcgagtcataccatgggcagttttaccgggaccactgccatggcctgggtacctacatgtggccagatggctccagtttcacgggcacattttacctcagccaccgagaaggctacggcaccatgtacatgaagacacggcttttccagactcactgccacaacgacattgtcaaccttctcctggactgtggggccgacgtgaacaagtgctcagatgagggtctcacggcactcagcatgtgtttcctcctccactaccccgcccagtccttcaagcccaatgttgctgaacggaccatacctgagccccaggaacctccaaaattcccagttgttccaatcctttcatcatcattatggacacaaacctggagtctctgtactat

SEQ ID NO: 367984 - DNA, 2225 bp, Homo Sapiens
  misc_feature (326)..(334): n is a, c, g, or t
  misc_feature (1149)..(1149): n is a, c, g, or t
caggtggcctggtcttgcccactccagggctcccatccttcctttgggctccgctctaacactggtggctctggagggagggtgggacccatcctttttcaaaacctttcctgaagaccacaggggagctagccttgcaggctagggagcaagagtggcaacaggccaaggcgagcccttaccaattgggaatcccactcctcctgctgctgccagctaaagggcaggacagtccctgaagacagttcagcttgttcctccccacctgaggcagaaggggttttgaggcaggccagagccctccagggacatgaaagcaggagatnnnnnnnnncatatggaggggtgtcccctcctgctctttttttcagggctggggatagtcaggggacaatcagcccagagtccgaaagccagcaagttgtagcaacctccacccctaacgccaaactaactatcataacaggggtaaatgaaaaaaaagggtggtggggaagacaaaccaaaacagaatcccctgacctcctgcccagggcagagggtccagccagtagcaggggctggggaccagggctggagggtctagctgggccggcactgcacctggccctcagagctgtcctcatcatcagaggccccggcacccccactgctcaggcccgtgatccggtagcccatgttgagcagcatcacctccaacgggtctgcattcatgcgccgctggttggcctgtgaagcaccctccatatcttccacgactcggcctgtgaggtcttcactctctggtcgggggttccagagccgcacaacaggatcgatgccactggtggccaggaagcagtagctggggtgtggctgcaggcagttgacaatggactcatccccttggagcacacggaccaggttggtggtctcctgccaaagaaattggcctctttgatatccgtggtggtgttgcagtggccgcagtagcggaactgatagtcgtagcttcggctcccgcagcaccatttcatcctctgagatggagtccttgcggctcgtgctgcggaggcggactgggggcgccgccaccaggtcccttcttctcctcaccatcatttttagagaagagggcagctgtgatgtcgcggcccaatgcatcaccanagcgctgctgtgggcctgctccggaaatttccctttgaagtcgtccaggcactccagggcttcagccacatacttgagctcaaagaggcagcgggccaggcgaaagtgtgccttcaggtggcatgggtttagggagatggccttgaggcagtccctcagggcatcatagtggtcaccatcccacttgcgcttcatgtaggctgctgctcggtttccataaagcatggcattgtgaggggccctctgcacagccttgctgtaaagctgaatggcttgggtccactgctggcaggcaaaagcctcattggcttgctgtttcacacgctccaggtatggtggtagctctacttgggggctgacatgtcccctactctccggcagccggaagccattgctatgaaggtgcaggccattggacacaccgttggacacaccgttggtggacatcttgccattctggacttcccccgaggagtggcattttctaggcaagaggaaggtgtacggccgctgcttgtaagtcaagtcaaacaaatagacctgttccccccccatgttgactagtagctctgtgccattggggctcgaaggtcacataggtggcaaccagcactctcaaacggttgttgtagtcaggaagcttcactggcaggtgacctgctacgtaatactgggctgcaccgtaccggaaggggtttcatgccggtcacagaaggtgtgcacacccgctgaagggctctgcttcatgctctttctgtggttatggatcatgcggatgtcatagagcctcacgaagggcccgctggccccaactgccaggcagttgttgtcctgggggttgacagtgaggcacttggcctccaccagctggccacagtactctgtcaggtcaatcagcacctccgagtgtttgctgttctctcgaaggtcatactggcggataagcccatcctcagcagcactccagaatgtgttgggccacatgggcgctgtggcgatgcgcttcacccggtttgtgtggtctccaaacatgtggatggtctcctttactgtcaggtcgtgccctcgtgccgaaa

SEQ ID NO: 367985 - DNA, 790 bp, Homo Sapiens
actgaacaaccagaagttatgaagataggtactgtgggtgttagaaagattcacggcaaaacagggaagcatctaggctgcttgtggaagtcagaccaaaatagcaggaaggtattgcagcaagatggatttgggaaaggaccaatctcatttgaagcaccatcagacacctgaccctcatcaagaagagaaccattctccagaagtcattggaacctggagtttgagaaacagagaactacttagaaaaagaaaagctgaagtgcatgaaaaggaaacatcacaatggctatttggagaacagaaaaaacgcaagcagcagagaacaggaaaaggaaatcgaagaggcagaaagagacaacaaaacacagaattgaaggtggagcctcagccacagatagaaaaggaaatggagaaagcactggcacctatagagaaaaaaactgagccacctgggagcataaccaaagtatttccttcagtagcctccccgcaaaaagttgtgcctgaggaacacttttctgaaatatgtcaagaaagtaacatatatcaggagaatttttctgagtaccaagaaatagcagtacaaaaccattcttctgaaacatgccaacatgtgtctgaacctgaagacctctctcctaaaatgtaccaacgaaatatctgtacttcaagacaattcttccaaaatatgccaagacatgaaggaacctgaagacaactctcctaacacatgccaagtaatatctggtaattcaagaccatcctttcaacaatgtaccaagatatg

SEQ ID NO: 367986 - DNA, 853 bp, Homo Sapiens
ctgtaagttgcctaggacagtggcctggtcccagggctgttgtggggagttgaagaacaccctggcctcctccatcatgtcggccaagagggcagaattgaagaaaacacatctgagcaagaactacaaggcagtttgcctggaattgaagccagagccgaccaaaacatttgattacaaagcagttaaacaagaagggcggtttaccaaagcaggagtgacacaggacctaaagaatgaactcagggaagtgagagaagagctcaaggagaaaatggaggagataaaacagataaaggatctaatggacaaggattttgataaacttcacgaatttgtggaaattatgaaggaaatgcagaaagatatggatgagaagatggacattttaataaatacacagaagaactataagcttccccttagaagagcaccaaaggagcagcaggaactcaggctgatgggaaagactcacagagaaccacagctcaggcccaagaaaatggatggagccagtggagtcaatggagcaccctgtgctcttcacaagaagacgatggcaccacaaaaaacaaaacagggctcacgggatccccttcatcactgtgggacctgctgcgagaaatgtttgttgtgtgctctaaagaacaactacaatcgggcgcagctgcagaacctaccagcagttccgattcatcacctccaagctccttaagatgcacagtcagggcttcttgtcctgttaaataccaacccaaacccaggcctccactggagattaaaaaccttcattcaaaagccagaacaaaacacaactttacccaatacctctcataccaaatacacaccccca

SEQ ID NO: 367987 - DNA, 840 bp, Homo Sapiens
ctccagagcaggcgtgtgatctctgtacccccgcagtggtcagaatatggagaacttctcactcctcagcatctctggacctccaatctcttcctccgccctgagtgcttttcccgacattatgttctctcgtgccaccagcctgccagacattgcaaagacagcagtacccactgaggcatccagcccagctcaggccctgccaccccagtaccaaagcatcattgtcaggcaagggatacagaacacagtgctctcaccagactgcagcttgggggacacccagcacggagagaagctgaggcggaactgcactatctaccggccctggttctccccctacagctacttcgtgtgtgcagacaaagagagccagctggaggcctatgacttcccagaggtgcagcaggatgagggcaagtgggacaactgcctttctgaggacatggctgagaacatctgttcgtcctcttcctccccagagaacacttgccctcgagaagccaccaagaaatccaggcattggcctggactccatcacatcccaggacatcctaatggcttccagatggcacccagcacagcagaatggctacaagtgcgtggcctgctgccgcatgtaccccaccctggacttcctcaagagccacatcaagaggggcttcagggagggcttcagctgcaaggtgtactaccgcaagctcaaagccctctggagcaaggagcagaaggcccggcttgggagacaggctctcctccggcagctgccaggccttcaatagtcctgctgaacaccttaggcaaattggcggtgaagcctacttatgtctctaggagaga

SEQ ID NO: 367988 - DNA, 785 bp, Homo Sapiens
ggcggggccaggccagacaggtctgggccccagtcgagggctgcaggtggtaggctgcgaccccttcctcccacagccccttcccgcccctcgccgggcatccgccgacaggtacataccaagaaattgaattgctgaatcacaggagagatttacaaatagtgttttggcatcatggaacgtgtaggttgtactttaacgacaacttacgcccaccctagaccaacaccaaccaactttctaccagccatcagtaccatggcctcaagctacagggaccgctttccccactccaatttgacccatagcctgagccttccttggagacccagcacatactacaaagtcgcctccaattccccaagcgtggccccgtactgcaccagatcacagagggtgtccgagaataccatgcttccctttgtttccaacagaaccactttcttcacaagatacacaccggatgactggtacaggtccaatttaaccaactatcaagagtccaacacttcccgacataattcggagaaactaagagtggatacatctcgcctgattcaagacaaatatcaacaaacaagaaaaactcaggcagacacaacccaaaatctgggagaacgtgtcaatgacatagggttttggaaatctgaaatcattcatgagttggcatgaaatgattggagagacaaatgcacttactgatgtgaagaaaagactggagcgggcttttgatggagactgaagcccctcttcaggtagccccgagaatgtctatttcatcgaga

SEQ ID NO: 367989 - DNA, 973 bp, Homo Sapiens
gcagtggtggctggttcctgtctcttcagtagagagtctagaccccacccagtcttcatgtacggccgaccgcaggctgagatggaacaggaggctggggagctgagccggtggcaggcggcgcaccaggctgcccaggataacgagaactcagcgcccatcttgaacatgtcttcatcttctggaagctctggagtgcacacctcttggaaccaaggcctaccaaccattcagcactttcctcacagcgcagagatgctggggtcccctttggtgtctgttgaggcgccggggcagaatgtgaatgaaggggggccacagttcagtatgccactgcctgagcgtggtatgagctactgcccccaagcgactctcactccttcccggatgatttactgtcagagaatgtctccccctcagcaagagatgacgattttcagtgggccccaactaatgcccgtaggagagcccaatattccaagggtagccaggcccttcggtgggaatctaaggatgccccccagtgggctgccagtctcagcttccactggaatcccaataatgtcccacactgggaaccctccagtgccttaccctggcctctcgacagtaccttctgacgaaacattgttgggcccgactgtgccttccactgaggcccaggcagtgctcccctccatggctcagatgttgcccccgcaagatgcccatgaccttgggatgcccccagctgagtcccagtcattgctggttttaggatctcaggactctcttgtcagttcagccagactctcaagaaggcccatttctaccagaagcagcccggacctgctccacagacagtagaagaagaactccaggcctcaggaagggacctgctagcacggggctccctccgaggccacgccttacctgctgcaactacgaaactgcgggaaaagcttataccaaaaggctccaccttgttgagccc

SEQ ID NO: 367990 - DNA, 1784 bp, Homo Sapiens
  misc_feature (1076)..(1110): n is a, c, g, or t
ggattcccgggatgggcgcgggagttggcattcggtggtcctggcagttagctgagcacgccctctgagccgctcggtggacaccaggcactctagtaggcctggcctacccagaaacagcaggagagagaagaaacaggccagctgtgagaagccaaggacaccgagtcagtcatggcacctaaggcggcaaagggggccaagccagagccagcaccagctccacctccacccggggccaaacccgaggaagacaagaaggacggtaaggagccatcggacaaacctcaaaaggcggtgcaggaccataaggagccatcggacaaacctcaaaaggcggtgcagcccaagcacgaagtgggcacgaggagggggtgtcgccgctaccggtgggaattaaaagacagcaataaagagttctggctcttggggcacgctgagatcaagattcggagtttgggctgcctaatagctgcaatgatactgttgtcctcactcaccgtgcaccccatcttgaggcttatcatcaccatggagacatccttcttcagcttcttcatcttactgtacagctttgccattcatagatacatacccttcatcctgtggcccatttctgacctcttcaacgacctgattgcttgtgcgttccttgtgggagccgtggtctttgctgtgagaagtcggcgatccatgaatctccactacttacttgctgtgatccttattggtgcggctggagtttttgcttttatcgatgtgtgtcttcaaagaaaccacttcagaggcaagaaggccaaaaagcatatgctggttcctcctccaggaaaggacaaaggacccagcagggcaagggaccagaacccgccaagccaccagaacctggcaagccaccagggccagcaaagggaaagaattgacttggaaggaggctcctggtgtctgaaacggcagtgtattttacagcaatattgtttccactctcttccttgtcttctttctggaatggttttcttttccattttcattaccacctttgcttggaaaagaatggattaatggattctaaaagcctnnnnnnnnnnnnnnnnnnnnnnnnnnnnnnnnnnnggaggacgaatcaaaaaaatacctcaaaagggaccaagattacgcggacccagctttcttgtgcaaagcggtccctatagtgactcgtattatcatctaggaactggccgcagttttacgacgccgggactgctaaaaatgctaccttgggatctttgtgaaggatccccccttttggggggggacatattttgtcaggctacctatcgagaattatagctctaaagtaaattataaacttttaagggtattatgaggttaactagcggcattatgcgttgctgaaggcaaaattgggcgaatgcggaggattttggataaaattatacactggaggccccggatgcaaaggggggtgaatttcaaaaaacgcgaggcccaaggttttttttcgggccccccgggcccccaaacctggccctggaacaaaatcggcccttaaagattttttagaaggtttccctttgttttaaaaaacctctcccccctttctccctgaaatttgaaaaatttaaaagaaaggcctaataggtgcttggaaaactccgcctcattggcacccttaatattgcgtggccccctaaaacggtggaggtctacacaagttttcaacgagcacgccattatttttccacacacgcttcctgttgtggccaggaggcttaccccccttg

SEQ ID NO: 367991 - DNA, 2089 bp, Homo Sapiens
cacgcagcggctagggcgcttagctgagccattgtctcgttctttccttccagcaacttcgcggtgtggtgaactctctgaggaaaaaccattttgattattactctcagacgtgcgtggcaacaagtgactgagacctagaaatccaagcgttggaggtcctgaggccagcctaagtcgcttcaaaatggaacgaaggcgtttgcggggttccattcagagccgatacatcagcatgagtgtgtggacaagcccacggagacttgtggagctggcagggcagagcctgctgaaggatgaggccctggccattgccgccctggagttgctgcccagggagctcttcccgccactcttcatggcagcctttgacgggagacacagccagaccctgaaggcaatggtgcaggcctggcccttcacctgcctccctctgggagtgctgatgaagggacaacatcttcacctggagaccttcaaagctgtgcttgatggacttgatgtgctccttgcccaggaggttcgccccaggaggtggaaacttcaagtgctggatttacggaagaactctcatcaggacttctggactgtatggtctggaaacagggccagtctgtactcatttccagagccagaagcagctcagcccatgacaaagaagcgaaaagtagatggtttgagcacagaggcagagcagcccttcattccagtagaggtgctcgtagacctgttcctcaaggaaggtgcctgtgatgaattgttctcctacctcattgagacaagtgaagcgaaagaacaaatgtactacgcctgtgctgtaagcaagctgaagattttggcaatgcccatgcaggatatcaagatgatcctgaaaatggtgcagctggactctattgaagatttggaagtgacttgtacctggaagctacccaccttggcgaaattttctccttaccctgggccagatgattaatctgcgtagactcctcctctcccacatccatgcatctttcctacatttccccggagaaaagaagagcagtatattcgcccagttcacctctcagttcctcagtctgcagtgcctgcaggctctctatgtggactctttatttttccttagaggccgcctggatcagttgctcaggcacgtgatgaaccccttggaaaccctctcaataactaactgccggctttcggaaggggatgtgatgcatctgtcccagagtcccagcgtcagtcagctaagtgtcctgagtctaagtggggtcatgctgaccgatgtaagtcccgagcccctccaagctctgctggagagagcctctgccaccctccaggacctggtctttgatgagtgtgggatcacggatgatcagctccttgccctcctgccttccctgagccactgctcccagcttacaaccttaagcttctacgggaattccatctccatatctgccttgcagagtctcctgcagcacctcatcgggctgagcaatctgacccacgtgctgtatcctgtccccctggagagttatgaggacatccatggtaccctccacctggagaggcttgcctatctgcatgccaggctcaaggagttgctgtgtgagttggggcggcccagcatggtctggcttagtgccaaacccctgtcctcactgtgggggacagaaccttctatgacccgggaccccatcctgtgcccctgtttcatgccctaactagctgggtgcacatatcaaatgcttcattctgcatacttggacactaaagccaggatgtgcatgcatcttgaagcaacaaagcagccacagtttcagacaaatgttcagtgtgagtgaggaaaacatgttcagtgaggaaaaaacattcagacaaatgttcagtgaggaaaaaaaggggaagttggggataggcagatgttgacttgaggagttaatgtgatctttggggagatacatcttatagagttagaaatagaatctgaatttctaaagggagattctggcttgggaagtacatgtaggagttaatccctgtgtagactgttgtaaagaaactgttgaaaataaagagaagcaatgtg

SEQ ID NO: 367992 - DNA, 1145 bp, Homo Sapiens
gggtccggaattcccgggatgggaaaccgactcccgggagcagggaggaacgcgcgctccagagacaacttcgcggtgtggtgaactctctgaggaaaaaccattttgattattactctcagacgtgcgtggcaacaagtgactgagacctagaaatccaagcgttggaggtcctgaggccagcctaagtcgcttcaaaatggaacgaaggcgtttgcggggttccattcagagccgatacatcagcatgagtgtgtggacaagcccacggagacttgtggagctggcagggcagagcctgctgaaggatgaggccctggccattgccgccctggagttgctgcccagggagctcttcccgccactcttcatggcagcctttgacgggagacacagccagaccctgaaggcaatggtgcaggcctggcccttcacctgcctccctctgggagtgctgatgaagggacaacatcttcacctggagaccttcaaagctgtgcttgatggacttgatgtgctccttgcccaggaggttcgccccaggaggtggaaacttcaagtgctggatttacggaagaactctcatcaggacttctggactgtatggtctggaaacagggccagtctgtactcatttccagagccagaagcagctcagcccatgacaaagaagcgaaaagtagatggtttgagcacagaggcagagcagcccttcattccagtagaggtgctcgtagacctgttcctcaaggaaggtgcctgtgatgaattgttctcctacctcattgagaaagtgaagcgaaagaaaaatgtactacgcctgtgctgtaagaagctgaagatttttgcaatgcccatgcaggatatcaagatgatcctgaaaatggtgcagctggactctattgaagatttggaagtgacttgtacctgggagctacccacccttggcgaaattttctcctttacctgggccagatggattaatctgccgtagactccttcctctcccaaatccatgcaatcttccctacatttcccccggaaaaggaaggaccagtatatcgccccagttcacctctcagttcctcaatcctgcaaggccctgcagggttctctatgggggaaccctttatttttcccttaaa

SEQ ID NO: 367993 - DNA, 1485 bp, Homo Sapiens
  misc_feature (62)..(118): n is a, c, g, or t
  misc_feature (127)..(127): n is a, c, g, or t
  misc_feature (131)..(131): n is a, c, g, or t
  misc_feature (161)..(169): n is a, c, g, or t
  misc_feature (293)..(302): n is a, c, g, or t
  misc_feature (325)..(325): n is a, c, g, or t
  misc_feature (350)..(364): n is a, c, g, or t
  misc_feature (619)..(651): n is a, c, g, or t
aggggggttcccccccacttaagaaaaaagaccccctcgcaaaggggatcactatttgcaannnnnnnnnnnnnnnnnnnnnnnnnnnnnnnnnnnnnnnnnnnnnnnnnnnnnnnnnaaataaatnaagnctgagtctattctcgccctttgttgccccnnnnnnnnnaaaaaatttgtttggggggaataagaattcccccacatgtgtaattttctggggggaaaaaaggggatagggaaatgttttttacggccagcagggatattgaagagacccagtttttcggggnnnnnnnnnnggtgggtaaaggggggaagaganaaaatttttgttgccggccccaaannnnnnnnnnnnnnntaaagctctttctccccgcagggtttcaaccaagagagctccacccttttttcccccgaaatttctttttcccaaaaatgaggagaaattttccccacagctttgggcccaccccacaattttttttcacagggggaattcccattctcgcagggaattatggtcccctggcccgcgggtgggccccttgggccaaaaaaatatcttgttcacggtttttccttacccaggcccccaggggggttaagttcccannnnnnnnnnnnnnnnnnnnnnnnnnnnnnnnnatcctaggttagggggaagcaaattccattcacagggcccctttccttgagggaaaccaggtgtacgagcacctctgctggaaggaaggcgtgctctgcctctgtgctcaaaccatttacttttcgcttctttgtcatgggctgagctgcttctggctctggaaatgagtacagactggccctggtttccaagaccatacagtccaaaagtcatgatgagagttctgccggaaatccagcacttgaagtttccacctcctggggcgaacctcctgggcaaggagcacatcaagtccatcaagcacagcttgaaaggtctccaggtgaagatgttgtcccttcatcagcactcccagagggaggcaggtgaagggccaggcctgcaccattgccttcagggtctggctgtgtctcccgtcaaaggctgccatgaagagtggcgggaagagctccctgggcagcaactccagggcggcaatggccagggcctcatccttcagcaggctctgccctgccagctccacaagtctccgtgggcttgtccacacactcatgctgatgtatcggctctgaatggaaccccgcaaacgccttcgttccattttgaagcgacttaggctggcctcaggacctccaacgcttggatttctaggtctcagtcacttgttgccacgcacgtctgagagtaataatcaaaatggtttttcctcagagagttcaccacaccgcgaagttgtctctggagcgcgcgttcctccctgctcccgggagtcggtttcccatcccgggaattccggaccggtaccagcgtgagccgccggaagcgtgtaatgg

SEQ ID NO: 367994 - DNA, 842 bp, Homo Sapiens
ggaattcccgggatcgaggcttcagggtacagctcccccgcagccagaagccgggcctgcagcgcctcagcaccgctccgggacaccccacccgcttcccaggcgtgacctgtcaacagcaacttcgcggtgtggtgaactctctgaggaaaaacacgtgcgtggcaacaagtgactgagacctagaaatccaagcgttggaggtcctgaggccagcctaagtcgcttcaaaatggaacgaaggcgtttgcggggttccattcagagccgatacatcagcatgagtgtgtggacaagcccacggagacttgtggagctggcagggcagagcctgctgaaggatgaggccctggccattgccgccctggagttgctgcccagggagctcttcccgccactcttcatggcagcctttgacgggagacacagccagaccctgaaggcaatggtgcaggcctggcccttcacctgcctccctctgggagtgctgatgaagggacaacatcttcacctggagaccttcaaagctgtgcttgatggacttgatgtgctccttgcccaggaggttcgccccaggaggtggaaacttcaagtgctggatttacggaagaactctcatcaggacttctggactgtatggtctggaaacagggccagtctgtactcatttccagagccagaagcagctcagcccatgaccaaagaaaccgaaaaagtaagatggttttgagcacagaggcagagcagcccctttcattccagtaaagggggctcgtagacctggttcctcaaggaggtgcctgtgatgaattgttctcctacctcattgaaaaagtgacacc

SEQ ID NO: 367995 - DNA, 981 bp, Homo Sapiens
cgggaaaatgtaggaaagaagcatggaatttgggaaaggaggagttttaccgcagatttattctttgggcccagggtaaggagaaaatttcccccaagggggggtagctttccaggtacaagtcactcccaaatctttcaatagagtccagctggcaccattttcagggatcatcttgatatcctggcaggggcattgcaaaaatcttcagcttcttacagcacagggcgtagtacatttttctttcgcttcactttctcaatgaggtaggagaacaattcatcacaggcaccttccttgaggaacaggtctacgagcacctctactggaatgaagggctgctctgcctctgtgctcaaaccatctacttttcgcttctttgtcatgggctgagctgcttctggctctggaaatgagtacagactggccctgtttccagaccatacagtccagaagtcctgatgagagttcttccgtaaatccagcacttgaagtttccacctcctggggcgaacctcctgggcaaggagcacatcaagtccatcaagcacagctttgaaggtctccaggtgaagatgttgtcccttcatcagcactcccagagggaggcaggtgaagggccaggcctgcaccattgccttcagggtctggctgtgtctcccgtcaaaggctgccatgaagagtggcgggaagagctccctgggcagcaactccagggcggcaatggccagggcctcatccttcagcaggctctgccctgccagctccacaagtctccgtgggcttgtccacacactcatgctgatgtatcggctctgaatggaaccccgcaaacgccttcgttccattttgaagcgacttaggctggcctcaggacctccaacgcttggatttctaggtctcagtcacttgttgccacgcacgtgtttttcctcagagagttcaccaccctcgtgccgaattcgccacccaggcctcgct

SEQ ID NO: 367996 - DNA, 1231 bp, Homo Sapiens
  misc_feature (85)..(123): n is a, c, g, or t
gagcgaggcctgggtggcgaattcggcacgaggtgagattttgccctggaaggactgagaaacggggattggtcagaccaggctnnnnnnnnnnnnnnnnnnnnnnnnnnnnnnnnnnnnnnnacgcagcggctagggcgcttagctgagccattgtctcgttctttccttccagcaacttcgcggtgtggtgaactctctgaggaaaaaccattttgattattactctcagacgtgcgtggcaacaagtgactgagacctagaaatccaagcgttggaggtcctgaggccagcctaagtcgcttcaaaatggaacgaaggcgtttgtggggttccattcagagccgatacatcagcatgagtgtgtggacaagcccacggagacttgtggagctggcagggcagagcctgctgaaggatgaggccctggccattgccgccctggagttgctgcccagggagctcttcccgccactcttcatggcagcctttgacgggagacacagccagaccctgaaggcaatggtgcaggcctggcccttcacctgcctccctctgggagtgctgatgaagggacaacatcttcacctggagaccttcaaagctgtgcttgatggacttgatgtgctccttgcccaggaggttcgccccaggaggtggaaacttcaagtgctggatttacggaagaactctcatcaggacttctggactgtatggtctggaaacagggccagtctgtactcatttccagaaccagaagcagctcagcccatgacaaagaagcgaaaagtagatggttttgagcacagaagcagagcagcccttcatcccagtagaagtgctcgtagacctgttcctcaaagaaggggccctgtgatgaaatgttctcctacctcctttgagaaagtgaagcgaaagaaaaatgtactacgcctgtgctgtaaagaagctgaaagatttttgcaatgcccatgccggatatcaagatgatccctgaaaatggggcacctggactctattgaagaatttggaagtgactttgtaacctgaaacctaccccacttgggcgaaaatttcctccttacccgggggccaaaggattaaatctgccgtaaaattcctccttttcccaaattcatggcattcttccctaacttttcccccggaaaaagggaaaaacccttatatccccccaggttttcccttcccaggttcctcacatctggcaagg

SEQ ID NO: 367997 - DNA, 1320 bp, Homo Sapiens
  misc_feature (736)..(736): n is a, c, g, or t
  misc_feature (1279)..(1279): n is a, c, g, or t
  misc_feature (1289)..(1289): n is a, c, g, or t
tctaggggtattgatgactaaggcgcctctatggcaatttctctatccctgggattagacttcggataaaatgcatagtcattgctttcccattctcattgcgtgcttggttgtgtatgaacggggaatgtgacccctcaaggggaattacatagggagctatgtgggaaagttatgggcctgtttctgtggctatgctttgtgccttacataaccggggggggttttaacgatcagggcgtattggaccccttgtggctttagtgatcaccgggggtcttctcataagcggggggaagtgtcggtgttccgaacttcgagatggcctttttgggacggtgtgacatcttatgaatcagctgtgttctcaatcccatcccggcgttcacaatgagggggctctgccttccctggcaacatggcctctcgaatggcaatgtagggtcccatatcacagggaaagtgcgtatcgaacgcctcggtcacgacgcgactcaagcggacggtatcggcaggggtccagcgcgcaaagtagcggtggcttcaagccacgcgagggtcgcaccccaacaatcgcggcggcttcaagccagcgcattatttaccgcgttcgtgcgcccgtctaatgccagcacgaaagtatcctggtgcgggccgcgcagactaatcgcggcagattgaatctttgatacgacacggtagtactgcttcgtcggcctaatctagaacgaccttnttcattctgggtccttgcagccagtaccaggtcccactgtgtgcggcgtggtaccatcgcacgaacgcgacttgggcattccggcggacatccgagcgttaggagccacgtaacgtgcggcactactaggagtcgccggaactccgggcagtcgggattgtacgcgctcacgtccccgcataccattggtacggccctgtaggacagggaagaggaacggggaaacggggagggagcctacagctcagcgcagcgagccccgggccccagtccatgcctgcgaagccccggggagcacgtgggcggcatggaccaatggaaagacagacaggggaaaggaaggagacggagggaggcgagacccgaggattgggaggctggaaggcgccggaaaggggaaaccccgggtcccgcagcagcctcttggcggagggtgccctcttcatcccgcgtgggactggactcgcggagaggcgtggccagaacctctagtgccaatgagtcccgggagcttcaccctccacccctccctagcaacggtcngggggcaggnccgagctgcacaggccaaggaattccacaga

SEQ ID NO: 367998 - DNA, 771 bp, Homo Sapiens
atggcgttgaggaggctgtcaacatctcggagttcttcccatgtgcaaggcaggtgctggagcctgtgatgcgtatgtatgaagccgtgtcatgctcaccactcccctattgagcagtgtgcgatccccaacctctgatgttacacggaaccagctacccaacgagttgttttttacatttcccttttggtgttctatttatctggccttaaacaggcctggctgagaatatttaaaatcagagaacgcacggctggacacaaggcaaaccgtattccacacgcgcatttgcttaggagcagagttcagcaacgtgacgctgcctcccaagggcttgggttgttcccccatcctctctccacgactccgtcccaccttcccagtacttaaaagacgacggcagtaaccaacaatgaatgccccagctcaggagagcagctttgtgaccggaaggccacggcttccaggagcctgaggagggaaggtcagccctgaggagggaacagcacaagccaggctcgcgtgttgacatgaagggttctctgagcccagcctgagcaaatactaacacacaccgcctgtgctggctactgtctagcagccactggtcccgaaactccacacagtcaggccatctctgaagccgccaacacgcacctactttctgggcaagaacacaaatctgtcatttgcactcgtgtatttgcaatcggtgcgaacactcacagtctctatgctgcatgtggggaacacgcagccatttcaactatg

SEQ ID NO: 367999 - DNA, 1036 bp, Homo Sapiens
ggggtccctcgcccactccccccacggagaccgtgaccgcgtgtgagatttcgtgtgcgctctccttggacagtgactaggggcggtagaggcgaacttggttccgggctctcaacttgttcgggggagaacctgagtgagggaattccactcttgacggggggtgccttttccacttaaagttaacacttgcccccagtctgaggggagcagcaggagaacaccatgccccatccttacatcaagatccaacctccagcaccaggaagcccctgcctccagctggccatgatgatgacaggacaggctaaatgagagggacctggctttgccctgagggttggtgggtggggaaggcgatcagcagccaggcgtctggggaagaggagcatggccaccaggtgcctccagggtgagaccaggcccagctcccctggctctaaaatacaagcttcctgggaacctcccatgggaactcgcttcttccgaaatggccatagcatgctgtcttctggtagatgggcttctttcaagtccaaatccctgacaatgacgcccggccggaggtcgaagttcttatgcaccacatccagcagctctcgcttctgtcttctgagaggttccgtaggttgaagatggaaatggacagcggctcggccacaccaatggcataggaaacctggacaagcactctccggcagagccctgctttcaccagagacttggccacccagcgggcagcatatgcggctgagcggtccaccttggtgtagtccttcccagagaaggccccaccaccatgagccccccagccgccataggttgtccacaataatcttacggccagtgacacccgcatccccctgcagagggagagaaatcaagataagaagcagagccagcccctagatgctggagggggctgaagtactgtgatggcagctgaactgcaactcaggaaggatgtcctggggcctgcccacagacattttcctaagaccccttagcccagaactctggactccactcccagctc

SEQ ID NO: 368000 - DNA, 1068 bp, Homo Sapiens
  misc_feature (118)..(130): n is a, c, g, or t
  misc_feature (846)..(963): n is a, c, g, or t
  misc_feature (981)..(981): n is a, c, g, or t
  misc_feature (988)..(990): n is a, c, g, or t
  misc_feature (993)..(993): n is a, c, g, or t
  misc_feature (1024)..(1024): n is a, c, g, or t
ccatggtcttctaactgaggaacctgagcagatgccttgacccagaccagagacccaagccaaggaaagcccatgatcaccagagtgggttgggaagtgcggatagaggggaagtagnnnnnnnnnnnnnctaacagagaggttgtgcaaggtgttctgagagttgggagcagagtgtgatgccaggagagggcagagctggcagatggaagccaaagcaggtaatggggatatgaaggaagaatcagctgcacaattaggttgttgtcataggcccatggccctgggaggtacagggggctccctgtcccccagcctggacttccagctcttccgaggtgaccaggtcttctcagcctgcagaccacttccaggcatggtggatgctcgtggcccatcctgtgccagctggctgtgtcccttgcccctggcaccgggcaggtctgcactgctggcctgcctacaggacctggacctgaacctgtgcaccccacagccggcacccctgggcacagacctgcagggcctccaagaggacgccttgagcatgaagcacgagccaccagggctgcaggccagctccaccgatgacaagaaattcacagtcaagtacccacagaacaaggacaagctgggaaaacagccagaaagagctggcgagggggccccctgcccagcctttctcctctcataacagctcttccccgacaccgctgcagaacagaaagagccccagccccttggctttctgcccctgtcccccctgtcactccatctcccaggagctcccattttctcctccaggcctttttacccgggaaaacccacttttttcctggtttcctnnnnnnnnnnnnnnnnnnnnnnnnnnnnnnnnnnnnnnnnnnnnnnnnnnnnnnnnnnnnnnnnnnnnnnnnnnnnnnnnnnnnnnnnnnnnnnnnnnnnnnnnnnnnnnnnnnnnnngcgccacactctccccantcccccnnnccncgacgcgcgtccactcgaccatactcaggtngtctgtggtgatccggggggggtggtgacggggcgactttcgct

SEQ ID NO: 368001 - DNA, 1186 bp, Homo Sapiens
  misc_feature (144)..(157): n is a, c, g, or t
  misc_feature (925)..(925): n is a, c, g, or t
cagcaaggaagggcttggcaggcagaggcttctccacgtgggaacctgagggagtctgtcctcagcccacctcctggggcatttcctagccaagccagggagctttcaggattggagacctggaaatctccaaggccatttccnnnnnnnnnnnnnnctaacagagaggttgtgcaaagtgttctgagagctgggagcagagtgtgatgccaggagggggcacagctggcagatggaagccaaaggtaatggggatatgaaggaagaatcagctgcacaattaggttgttgtcataggcccatggccctgggaggtacagggggctccctgtcccccagcctggacttccagctcttccgaggtgaccaggtcttctcagcctgcagaccacttccaggcatggtggatgctcgtggcccatcctgtgccagctggctgtgtcccttgcccctggcaccgggcaggtctgcactgctggcctgcctacaggacctggacctgaacctgtgcaccccacagccggcacccctgggcacagacctgcagggcctccaagaggacgccttgagcatgaagcacgagccaccagggctgcaggccagctccaccgatgacaagaaattcacagtcaagtacccacagaacaaggacaagctgggaaaacagccagaaagagctggcgagggggccccctgcccagccttctcctctcataacagctcttccccaccaccggtgcagaacagaaagagccccagccccttggctttctgcccctgtccccctgtcaactccatctccaaggagctcccatttctcctccacgcccttctaccctggatacccacttcctcctggcctccaccccacctgttcaccctatggggccctaccttctgaccatgtcccacctcctcatgctgncccagaacccctctacccaccatggctatgcctacctgctgatgatggccatgagctggggcaccccacgctcgtgggaaacctgctcctaccagggcctcaagctctgccaagttgcttcagcccaatcagtgggagtgccacactccggtgatgtggctatctcaagggcctttcccaaagcttcttcggaaaagatcttgtccgttcccaggcgcccgcaaataccggagggtgtggaaagttgtggcccacacccaa

SEQ ID NO: 368002 - DNA, 1341 bp, Homo Sapiens
agggaaccaggggatggacttctggtcaaacgtttaggctcaacatagtacttctcaatgcaagattctgatgttgacctaaaccatatgcaaatcagattcattctgcttttcttactgcaaagttcaaacctgatttcgtctcttttcccagctgatggtaaccagaaatcttttctgccgagggtcactaatgatatggcttatcctctcagtccccaaagtgtttatgctggtctccttcccaaccagcttcttcgcccctttctgaggcatcgagctgcagctccaggtagacgattcaagcgagtatggtaccctctttgagctggccgagaaggtaaaaggaatgtggaatctgaaaatttatccaatccagaatccattctttctacttcagaacaatgatcaggagcccacttgggcagaagattagggacagtgaatcctgggacacattctccttcatagaaccaatcactctgttcgtcatcaccttgtcgcccttcatcattggtaaaagagcccagtgtcactgctgctacaccacactgctgggtttcacattctgacatgttctcatcagagccctgtttttgttcatctgtttcacactccatcctttctttccttcctgttttgcttaggaaagtcctattttctgctgattcacacaatccgtggcctgatgaggtccagggagtattctccttccagcgggacagacgctgcttcttagcagacttgaacctgcagcctctctcatagctccaatctgacaccttcagcttctgctgaaggctagcagccacctctgatgtcactcgcttcaccttccgcctgcgcctgagtggtcgacaaggtgcattttcagtaaaggagtcagattcatgccaagaatgttgcttactcttgacaatggcattgagagctgggtgtcgtttggctaccattgtgtcatcagagtcactaaaattggtcaccggagccacttctcgacagtccttagtggcctcatccagacttgactcagaggcctcgctgtagcagcaggtatgctctgccaggtgagtgaagtcagaacgacgcttccgacctcggcgtttccgaagctgccgcctctgctgtcgggggctcagcgccatctcctcccacagttcaccaagcttattctgctcagatgtctgctccaaggctgaggctaagtcgtgtaccagctcatccatgaggccacatcagctgccgcagccacctccaacggccgccgctttttgggccgactctcaccgccggggcttccctctctgactcatttccgtctgggccggaggggggggcgga

SEQ ID NO: 368003 - DNA, 1219 bp, Homo Sapiens
tgaggttggtaagggggtttagtggtccctggccgcccgtgtcttgccgactttggggtcccacttcggacatggagccctcaggtgctccggcctttggccgcccccccgggccgtccggagcacccgggcaatattctctggcactggttcttgcgcttcgctcacaaagtccagcttcggaagttagcccttgtccgttcacttggtgaatggaattttctaagcatctgcttcacactcgactttgggcccagaaggagcctcaaagggagaccatcttcaaactggagggtctccacgagctctctgagcttgtatgcagtgcccagctcaggtgtgtagcccatgcagctcaggatggctcggatgtcctcttccagtaatgtcgacttgacataataaacaaaagggcccgtgtaggtcttgatgcttctgaattccttcttccacgggtagaggaagaggttgatgcccaccgtctccagcatgctgaaggcgccgtgcagagcccgcaggctagaggagctgagcgagcgcaaggagctctccaccacctcgtagaactggatcagccggaatcgataaaagggatccaccttgtgcaggctgagcagggttgaggctgccacccgcaggcactcatcgctgccaggccgctgcctgctggtggtggtatccactttgctctcatggaactgcacgtacttccgaaataagtcatccttgaatttagtatccattgaactgggcttccccatccgatcgaggggggctaccttatctcctccatggcttctggattagaggcagggacatcactaaaagcatggacatgttgccgcctggaccagcggagtgctcctgacactgccgccgaggacggcccggccgagggaagcaagcgagaggcgcggctgccgccggagccgggccccgtcgggctctagcctctccggccggctgcaggggtactgagaccagtacccgggggccagcagcgacccggaaacactcggcccggaaatgatgtcaccaggaggcgggcccgaagagagggtggaccacggctgcgcgctggctccgggaagcggtcgatgcccgcggccgacggagactacaacccagaggcggaggacaaagcggaaggccgaagagcgaggacgaaaccggcggaaccgcatttggagcctaacgagccatcgctgcgtctgagact

SEQ ID NO: 368004 - DNA, 1137 bp, Homo Sapiens
  misc_feature (987)..(995): n is a, c, g, or t
ggggcctctcgccccgcctcccgcgctccccgtcaggttcaaagccccctcccgcctaacgtcttcagcccagccaggctgcccttcttccctgcggagggagggcctgggcggtcgcgttggcgggagggaggttacctttcccagtctcgctctggccgcctgagccaggaggaagcagcggcgaggtctgcgggaggcatggcgggagctccggacgagcgccggcggggccccgcggcaggggagcagctgcagcagcaacacgtctcttgccaggtcttccccgagcgtctggcccaggggaatccccagcaagggttcttctccagcttcttcaccagcaaccagaagtgccagcttaggctcctgaagacgctggagacaaatccatatgtcaaacttctgcttgatgctatgaaacactcaggttgtgctgttaacaaagatagacacttttcttgcgaagactgtaatggaaatgtcagtggaggttttgatgcttcaacatctcagatagttttgtgccagaataatatccataatcaggcccatatgaacagagtggtcacacacgagcttattcatgcatttgatcattgtcgtgcccatgtcgactggttcaccaacatcagacatttggcgtgctcagaggttcgagctgctaaccttagtggagactgctcacttgtcaatgaaatattcaggttacattttggattaaaacaacaccaccagacttgtgtgcgagacagagccactctttctatcctggctgttaggaatatcagcaaagaagtagctaaaaaggctgttgatgaagtttttgaatcttgtttcaatgaccatgaaccttttggaaggatcccacataacaagacttatgcaagatatgctcacagagactttgaaaaccgtgatcggtattattcaaatatatgagcacaatgacatttttatattacagagcttccatcatcatgaagnnnnnnnnntttggttctcaagtgaacaaacatataaaatgtaaacaatccctacaataccagataaaacagagaagaactgtgattctagcatattatcagaagaagtaactatggcaaaaaatgaaactgctttaataccaagggagaa

SEQ ID NO: 368005 - DNA, 1080 bp, Homo Sapiens
taatggaccgctccacacctgagctgccgcaagctaactcaatccgagccggcgcatttgagaaggcgcctgtgagggtcgctcctcagccgccgcgctcccactccgcgtccccactccgcgccgccgcgcctctgccagccccgaaggtggacgtgaagctccaacacctcgacttctgggcccgcctccatggccaggtcccgggactgctggactgggacatggggaacgagctctttctggccttcaccacatctcacctccccttagcggagcagaaacttgccaggtataaactccgaattgttaagccaccaaaattacccctagagaaaaaacccaaccctgataaggatggtccagattatgagcccaacctctggatgtgggtaaatcccaacattgtgtatccccctggaaagctggaggtctcaggacgtaggaagagggaggacctgacaagcacactcccctcctctcagccaccccagaaggaggaagatgccagctgctcagaggccgcaggcgtggaatcactgtcccagtcctccagcaagcggtctccccctcggaagcggtttgccttttcccccagcacctgggagctcacagaagaggaggaggctgaggaccaggaagacagctcctctatggctctcccatcccctcacaaacagggcccccctccagagtcggaggcttcggcaagccagccagccaggcggggaggctctggtcccggccccctctccaattacttccaactaattgccctggcattaagaaacagttcccccctgtggcctcaacgtgcaacagatctacagtttcactcgaaagcacttccccctttttcccggacggccccggaagggctggaaagaatactgtccgtcacaaatctctgttttcgagacagcttttgagaaagtgcctgtcagcatgcagggcggggccagcacaacgggctccatcttgcctctggaaagttgaccgaggagggacaccgccggtttgccgaggaagcccgcgccttggtttccacccggctaaaaagtatccacagtgcatgagcca

SEQ ID NO: 368006 - DNA, 886 bp, Homo Sapiens
  misc_feature (42)..(79): n is a, c, g, or t
gactacatataggcgaatggagctccaccgcggtggcggccnnnnnnnnnnnnnnnnnnnnnnnnnnnnnnnnnnnnnnatcaggccaaatcggccgagctcgaattcgtcgagagcggagtatgcaacttacagcaatgtctctcccacttataataaaacacctaactctcatgtagcattttatccatattgagagctctgtgagatagaaattattatattacaagtcacagatatgtaaactgagatgcagagacatcaataacttgctcaaggttacaaggtggacttagtagttttaagcagaaccatgaaaacctctgtgacaactccctccagctccaagagtgccgggaggtggggggcggcgcatccgcggcctcgagcttgctacctcagcccatccccaccacccctgacatcgagaacgctgagctcacccccatcttgcccttcctgttccttggcaatgagcaggatgctcaggacctggacaccatgcagcggctgaacatcggctacgtcatcaacgtcaccactcatcttcccctctaccactatgagaaaggcctgttcaactacaagcggctgccagccactgacagcaacaagcagaacctgcggcagtactttgaagaggctttgagttcattgaggaagctcaccagtgtgggaaggggcttctcatccactgccaggctggggtgtcccgctccgccaccatcgtcatcgcttacttgatgaagcacactcggatgaccatgactgatgcttataaatttgtcaaaggcaaacgaaccaattatctccccaaacttaacttcatggggcagttgctagagttcgaggaagacctaaacaaccggtgtgaacaccgagaatc

SEQ ID NO: 368007 - DNA, 1092 bp, Homo Sapiens
ccgttccaaaagaattctccgggaatttccccccccaaatttccccattttactcctcaagcctgttggaaccctcacccagtaaggaggcttccccagtcaaaaaaagatgtcctcagacccacggcccaggaagtccctttttagaaaagggaataaaggatggcaccagcatggccagcagtagccgtaaccccccaacaggaatgggaagacaggtggcccccaatttcagtctttcgagtgtgagtgagcagctgatgtgggcacgcttccctcacaaccatgggtcctactgctaagattccagacatcagcctgcagccaatcatggctgtacagcctttgacctccacagacgactcaatgccacctccagtgatctcaagttttccttgatagcatcgagttgtaccattgggacagggaagagaaggagcactgaaacaggtccccaaagccacacaggttggacaatggagggttgttgacacagtggaagctgtggtctcactgaactcccaaaactgagacaggctgtctttgtcattacagaaggaatcctcacagtagttactgtaggaggtcacgatcaggccgggaggtgaagagtgctggacaattgttatggcctcctccccttccgggatgcagcccttcgtggccaaaatggctgtctcagtccctgctttaattattagtatggtttcctggcaaagtgcccctttgtcacaagtctccacttcctctgtggtccagttaaacatattggctggatctgcttccacagtcatggacagacccttttgacaatacagctctaggcccgaggtcaggagggaggctcctaggaccaggaggatcagcaaatgctggatacgaggggttcccatggcttcttctggagaggtctgggaggagctggtctggatctcagaatccaggaatctgagtccctagccttctttttctctttaaagaagcaaaattgctgccggcttccaggcagacgcctcacaagaatctcacgacgccaaagttgaggcccggaacgccttctccccgggcttggcattctcttacgaccccgct

SEQ ID NO: 368008 - DNA, 1037 bp, Homo Sapiens
ggaattcccgggatctcaactttggcgtcgtgagattcttgtgaggcgtctgcctggaagccggcagcaattttgcttctttaaagagaaaaagaaggctagggactcagattcctggattctgagatccagaccagctcctcccagacctctccagaagaagccatgggaacccctcgtatccagcatttgctgatcctcctggtcctaggagcctccctcctgacctcgggcctagagctgtattgtcaaaagggtctgtccatgactgtggaagcagatccagccaatatgtttaactggaccacagaggaagtggagacttgtgacaaaggggcactttgccaggaaaccatactaataattaaagcagggactgagacagccattttggccacgaagggctgcatcccggaaggggaggaggccataacaattgtccagcactcttcacctcccggcctgatcgtgacctcctacagtaactactgtgaggattccttctgtaatgacaaagacagcctgtctcagttttgggagttcagtgagaccacagcttccactgtgtcaacaaccctccattgtccaacctgtgtggctttggggacctgtttcagtgctccttctcttccctgtcccaatggtacaactcgatgctatcaaggaaaacttgagatcactggaggtggcattgagtcgtctgtggaggtcaaaggctgtacagccatgattggctgcaggctgatgtctggaatcttagcagtaggacccatgtttgtgagggaagcgtgcccacatcagctgctcactcaacctcgaaagactgaaaatggggccacctgtcttcccattcctgtttgggggttacagctactgctgccatttgctgctgccatcatttattcactttttcccaaggaaggcactttcggggccctggggtcctgaaggaacttcttttttttgactgggaagcccttcctttacgggttgaggggttccaacaagcctgtaagggagtaaaaaaggggggaaat

SEQ ID NO: 368009 - DNA, 1068 bp, Homo Sapiens
  misc_feature (971)..(971): n is a, c, g, or t
gggcgcgcagcagctcctcaacgccgcaacgcgccggcccaactgcaggaaggtctgtgctctggagccaggtaaagggttataaaattatacaccatggccctcctaaagacactctaggaaaaccatgtcatcctgatcttaaaacacctgcaagaaagagcacagtacttcaccattaataaagtagatatttcatcctgctcagaaaaccaacatttccagcaatggctttactaccggtgttgtttctggttactgtgctgcttccatctttacctgcagaaggaaaggatcccgcttttactgctttgttaaccacccagttgcaagtgcaaagggagattgtaaataaacacaatgaactaaggaaagcagtctctccacctgccagtaacatgctaaagatggaatggagcagagaggtaacaacgaatgcccaaaggtgggcaaacaagtgcactttacaacatagtgatccagaggaccgcaaaaccagtacaagatgtggtgagaatctctatatgtcaagtgaccctacttcctggtcttctgcaatccaaagctggtatgacgagatcctagattttgtctatggtgtaggaccaaagagtcccaatgcagttgttggacattatactcagcttgtttggtactcgacttaccaggtaggctgtggaattgcctactgtcccaatcaagatagtctaaaatactactatgtttgccaatattgtcctgctggtaataatatgaatagaaagaataccccgtaccaacaaggaacaccttgtgccggttgccctgatgactgtgacaaaggactatgcaccaatagttgccagtatcaagaatctccttaagtaactgtgattccttgaagaatacagctggctgtgaacatgagttactcaaggaaaagggcaaggctacttgcctatgtgcagacaaaatttactggatttacctantgagcattgtgcaagactgcatggataagggctgcatcatttaattgcgacataccagggggaaattggatggatgttaatgacaaatttgatttca

SEQ ID NO: 368010 - DNA, 736 bp, Homo Sapiens
ccagcaggacaatattggcagacatagtagtattttagactatcttgattgggacagtaggcaattccacagcctacctggtaagtcgagtaccagacaagctgagtataatgtccaacaactgcattgggacttctttggtcctacaccatagacaaaatctaggatctccgtcataccagcttttggattgcagaagaccaggaagtagggtcacttgacatatagagattctcaccacatcttgtactgcttttgcggtcctctggatcactatgttgtaaagtgcacttgtttgcccacctttgggcattcgttgttacctctctgctccattccatctttagcatgttactggcaggtggagagactgctttccttagttcattgtgtttatttacaatctccctttgcacttgcaactgggtggttaacaaaagcagtaaaagcgggatcctttccttctgcaggtaaagatggaagcagcacagtaaccagaaacaacaccggtagtaaagccattgctggaaatgttggttttctgagcaggatgaaatatctactttattaatggtgaagtactgtgctctttcttgcaggtgttttaagatcaggatgacatggttttcctagagtgtctttaggagggccatggtgtataatcctataacccttcctgcagttgggccggcgcgattgcggcgttgaggagctgctgcgcgcccctctcaccgcg

SEQ ID NO: 368011 - DNA, 1906 bp, Homo Sapiens
  misc_feature (1359)..(1377): n is a, c, g, or t
  misc_feature (1379)..(1383): n is a, c, g, or t
  misc_feature (1385)..(1427): n is a, c, g, or t
  misc_feature (1801)..(1820): n is a, c, g, or t
gctggtacggtccgggatgtagggatgggcgcgcagcagctcctcaacgccgcaacgcgccggcccaactgcaggaaggtctgtgctctggagccaggtaaatggttataaaattatacaccatggccctcctaaagacactctaggaaaaccatgtcatcctgatcttaaaacacctgcaagaaagagcacagtacttcaccattatttccagcaatggctttactaccggtgttgtttctggttactgtgctgcttccatctttacctgcagaaggaaaggatcccgcttttactgctttgttaaccacccagttgcaagtgcaaagggagattgtaaataaacacaatgaactaaggaaagcagtctctccacctgccagtaacatgctaaagatggaatggagcagagaggtaacaacgaatgcccaaaggtgggcaaacaagtgcactttacaacatagtgatccagaggaccgcaaaaccagtacaagatgtggtgagaatctctatatgtcaagtgaccctacttcctggtcttctgcaatccaaagctggtatgacgagatcctagattttgtctatggtgtaggaccaaagagtcccaatgcagttgttggacattatactcagcttgtttggtactcgacttaccaggtaggctgtggaattgcctactgtcccaatcaagatagtctaaaatactactatgtttgccaatattgtcctgctggtaataatatgaatagaaagaataccccgtaccaacaaggaacaccttgtgccggttgccctgatgactgtgacaaaggactatgcaccaatagttgccagtatcaagatctcctaagtaactgtgattccttgaagaatacagctggctgtgaacatgagttactcaaggaaaagtgcaaggctacttgcctatgtgagaacaaaatttactgatttacctagtgagcattgtgcaagactgcatggataagggctgcatcatttaattgcgacataccaggggaaattgtatgtatgttagtgacaaatttgatttcaaagagcaatgcatcttctcccccagatcatcacagaaatcactttcaggcaatgatttacaaaagtagcatagtagatgatgacaactgtgaactctgacataaatttagtgctttataacgaactgaatcaggttgaggattttgaaaactgtataaccataggatttaggtcactaggactttggatcaaaatggtgcattacgtatttcctgaaacatgctaaacgaagaagactgtaacatcattgccattcctactacctgagtctttacttgcattaaacaataaattcaaagctttacnnnnnnnnnnnnnnnnnnnannnnncnnnnnnnnnnnnnnnnnnnnnnnnnnnnnnnnnnnnnnnnnnnggggcggcccgctctaaagtatccctccgaggggccccaaggtttacccgttaccccagtttttcttgaacaaagggggcccccaataaggagcccctaattattaaccttaggcccgtggccggccttttttcaaacgcccccggacctggggaaaactgcctaacttgggggaatctttacggaaagggaacccttaccttccggggggtggggaaactaatttgggaaaaacctaccctacccgaagaattttaaggctcctaaggggaaaataattaaatttttttaagggggaaaaagggggttaaaaactaacccgcaaaaagccttggccgcccttgaaaaatttttggcttaccggggaaatgggnnnnnnnnnnnnnnnnnnnnccccccgggagccctgggggatctcccaaatggggttgggggaattttttaaaattccccagggcccccaagggctcttttttcta

SEQ ID NO: 368012 - DNA, 1073 bp, Homo Sapiens
agcggggcgcctggcaagtgaacaatcgcggtgagaggggcgcgtccgcagctcctcaacgccgcaacgcgccggcccaactgcaggaagggttataaaattatacaccatggccctcctaaagacactctaggaaaaccatgtcatcctgatcttaaaacacctgcaagaaagagcacagtacttcaccattatttccagcaatggctttactaccggtgttgtttctggttactgtgctgcttccatctttacctgcagaaggaaaggatcccgcttttactgctttgttaaccacccagttgcaagtgcaaagggagattgtaaataaacacaatgaactaaggaaagcagtctctccacctgccagtaacatgctaaagatggaatggagcagagaggtaacaacgaatgcccaaaggtgggcaaacaagtgcactttacaacatagtgatccagaggaccgcaaaaccagtacaagatgtggtgagaatctctatatgtcaagtgaccctacttcctggtcttctgcaatccaaagctggtatgacgagatcctagattttgtctatggtgtaggaccaaagagtcccaatgcagttgttggacattatactcagcttgtttggtactcgacttaccaggtaggctgtggaattgcctactgtcccaatcaagatagtctaaaatactactatgtttgccaatattgtcctgctggtaataatatgaatagaaagaataccccgtaccaacaaggaacaccttgtgccggttgccctgatgactgtgacaaaggactatgcaccaatagttgccagtatcaagatctccctaagaactgggaattccttgaagatacagctggctgggaaccatgagtactcaagggaaagtgcaaggctacttgccctatgtgaagaccaaaattactgattttacctaggggagcactggtgcaagaactgcatgggataagggccttgcatccatttaattgccaacttacccaggggaaaattggaattgtatggttaagggccaaaattttgattttctaaagaagaaatgga

SEQ ID NO: 368013 - DNA, 917 bp, Homo Sapiens
ggccctgcaagagctggctgcttagagactgcgagaaggaggtcccccacggcccttcaggatgaaagctgcggtgctgaccttggccgtgctcttcctgacggggagccaggctcggcatttctggcagcaagatgaacccccccagagcccctgggatcgagtgaaggacctggccactgtgtacgtggatgtgctcaaagacagcggcagagactatgtgtcccagtttgaaggctccgccttgggaaaacagctaaacctaaagctccttgacaactgggacagcgtgacctccaccttcagcaagctgcgcgaacagctcggccctgtgacccaggagttctgggataacctggaaaaggagacagagggcctgaggcaggagatgagcaaggatctggaggaggtgaaggccaaggtgcagccctacctggacgacttccagaagaagtggcaggaggagatggagctctaccgccagaaggtggagccgctgcgcgcagagctccaagagggcgcgcgccagaagctgcacgagctgcaagagaagctgagcccactgggcgaggagatgcgcgaccgcgcgcgcgcccatgtggacgcgctgcgcacgcatctggccccctacagcgacgagctgcgccagcgcttggccgcgcgccttgaggctctcaaggagaacggcggcgccagactggccgagtaccacgccaaggccaccgagcatctgagcacgctcagcgagaaggcccaagcccgcgctcgaggacctccgccaaggcctgctgcccgtgctggagagcttcaaggtcagcttcctgagcgctctcgaggagtacactaagaagctcaacacccagtgaggcgcccgcggcggcccccttcccggtggccaccttggcaagaaaagggcc

SEQ ID NO: 368014 - DNA, 405 bp, Homo Sapiens
  misc_feature (376)..(376): n is a, c, g, or t
ctccagctggcccccaagcgctgcacgcagccccggttcccgctcgcgcctctccctccacacatccctgcaagctgagggagccggctgtggccttggccagcacagaaaggggctcccacagtgcagcggtgggctgaagggctcctcaagtgccgccaaagtgggagcccaggcagaggaggcactgagagcgagcgagggctgtgaggactgccagcacgctgtcacctctcaactcagtctcccacatggcgtggccacccttgtgtctgttaaactctttctcttacaaaaatgccatggtctttctttgttgcagtggtcagggaaaaaccccttggggcagattacaaaagttctttttcagggcatntgttttccagaataggcgaggttttcctc

SEQ ID NO: 368015 - DNA, 703 bp, Homo Sapiens
ccggcaggtgcgcgcatactcgttacatacatatacaagtatgatcagcaatcggcgagctcgaatcgtcgagagcgatggaacggccagcatcaccagccgaacacgatggctactggggagctcggggacttgggtggctactacttcaggttcttgcctcagaaaaccttccagtctctgagctctaaggagatcaccagccggctccgccagtggtccatgctgggcagaatcaaggcgcaggcgttcggctttgaccagacctttcagtcctatcggaaggatgatttcgttatggcttttttcaaagacccaaatgttattcccaatttgaagttactttcagattcttctggacaatggatcatattaggaactgaagtgaaaaaaattgaagctataaatgttccttgcacacagctttcaatgtcattttttcatcggttatatgatgaagatattgtacgagacagtggacatattgttaaatgtttagattctttttgtgatccatttctcatttctgatgagttacgaagagttttgctagtggaaaaatcagaaaaatatgaaatattcagccaacagatagagaagaattcctgtttgttttttcaaacatctttgcttggtggagccctttgtcaatatgaggatgtgattagccatatctggaaacaaaaagttatctataaggatc

SEQ ID NO: 368016 - DNA, 926 bp, Homo Sapiens
aaggcctggtacggcccggagttatgggatgtcaggccagcctgagttcatttctccttgagacaggaacagttcatggacgaactctgaggaccattctgaggacaagaggcatccagtgtcatgagtggaacatgcattttatggctacagagttaaggcaagggttgaattccacgagtcaaaaagcagcccttttcagagacccaactctctggggtgctcaggggcttgggctggattgagaagaaaactgacaagagtaagctgccctctcttctctggccatctcacaaaccacagtgcgggccaactggtcctgcctctttaccacacagaaccaagcactagggataagacagctgcccatggtgtccgcggcgggtctctctggggatggcaagatgcgaggggtgctcctggtgctgctcggccttctctattcttccaccagttgtggcgtccagaaagcttccgttttctacggtcctgaccccaaggagggcttggtcagcagcatggagttcccgtgggtggtgtcgctgcaggactcccagtacacacacctggctttcggctgcatcctgagcgagttctgggtcctcagcatcgcatccgccattcagaacaggaaggacattgtcgttatagtgggtataagtaacatggatcctagcaagattgctcacacagagtatccagtcaataccatcatcatccatgaggactttgataacaactccatgagcaacaacatagccctcctgaagacagacacagcgatgcatttggcaacctggtccagtccatctgcttcctcggcagaatgctgcatacaccaccagtcttgcagaactgctgggtgtcaggatggaatcccacatctgcaaccaggaaatccatgacgatgagtgtcttgacgaaaa

SEQ ID NO: 368017 - DNA, 730 bp, Homo Sapiens
tcaaaattccgtcttcaagaagaaacacccgtggaggaagaagacattatacaaaacaaatttagaaactgtatgtatagcttcatgtttttcataaaataggaatgaggacaaatgttgctcttcatcctaccagctgtttgttctttggtaggggatcatgagtggaaaaacaaaggcaagaagggctgccatgttttttagacgttgctctgaagacgccagcggtagcgccagtggcaatgctttgttatcagaggacgaaaatcctgatgcgaatggggtaactcgatcatggaagattattctaagtacaatgcttacactgacttttcttcttgtaggactcctaaatcatcagtggcttaaagaaacagatgttcctcagaaatccagacaattatatgccataattgcagaatatggttcaaggctttataaatatcaggccagacttcgtatgcctaaagagcaactggaacttttaacagaaggaaagccagaatctggaaaacaattttcgtcaaattctatttttgatcgaacaaatagatgtcctgaaggcattgctaagagatatgaaggatggtatggacaataatcacaactggaacacccatggcagaccctgtggaggacccggaccacacagaggaagtgtcaaacttggtcaattatgtacttaacaaagttgagagaagaccaagtcgagatggctgattatgccctg

SEQ ID NO: 368018 - DNA, 961 bp, Homo Sapiens
  misc_feature (49)..(85): n is a, c, g, or t
gactgtatcgactcactatagggctggattctaccgcggtgggcggcgnnnnnnnnnnnnnnnnnnnnnnnnnnnnnnnnnnnnnatcaggccaaatcggccgagcgtcgaattcgtcgagagcggagaagcttttcaaaattccgtcttcaagaagaaacacccgtggaggaagaagacattatacaaaacaaatttagaaactgggatcatgagtggaaaaacaaaggcaagaagggctgccatgttttttagacgttgctctgaagacgccagcggtagcgccagtggcaatgctttgttatcagaggacgaaaatcctgatgcgaatggggtaactcgatcatggaagattattctaagtacaatgcttacactgacttttcttcttgtaggactcctaaatcatcagtggcttaaagaaacagatgttcctcagaaatccagacaattatatgccataattgcagaatatggttcaaggctttataaatatcaggccagacttcgtatgcctaaagagcaactggaacttttaaagaaggaaagccagaatctggaaaacaattttcgtcaaattctatttttggtcgaacaaatagatgtcctgaaggcattgctaagagatatgaaggatggtatggacaataatcacaactggaacacccatggagaccctgtggaggacccggaccacacagaggaagtgtcaaacttggtcaattatgtacttaaaaagttgagagaagaccaagtcgagatggctgattatgccctgaagtcggccggagcctccatcattgaagctgggacctcagaaagttataaaaataataaagcaaaattgtactggcatgggatagggtttcctaaatcatgaaatgcctccagatattattcttcagccggatgtctaccctggaaaagtgctgggcttttccaggttcccagggtcataccc

SEQ ID NO: 368019 - DNA, 822 bp, Homo Sapiens
tccagcccgaggctaaggaggtgttaaccaccgaagggaggtagaatgtttttccccaccagaggaggcagcgaccacgtctcctctatggaggcattcaagagccgtccagctgaagcagcatcactgtctgagctcggaaggcacaatccacataggtctgcatggtccaccgagctgcatacccacggggccagcgggaggtgggcagctgctgggctctcttctgaagcagacaggatctcactctgttgctgaggctggatcacagctccctgcaaccttgaactctccctcaagcaattctccccactctgccttccaaagcactagcattataggcctaagccaccactcccatccactgtagtgtaaactgtctccttcaatgtttccaatagttgcggagcagatcagataagggttcttcctgtctgttgcttcaagtttcattctctctttaaacaatacaaggttggcttccatggttccttcttaaagaatgttgaaggtgtgtcttcagattcatttagtgctcgtggaaccccagggaaagctgatgtaacaaacctcttccctctcccatatgtctcaaaacagtcgtatctactgcggtccaagggatctgcaagcctcctaaaggcatctccatctgctcactaccaccaggtgtgaacctgtaatctggcacgctatagttcccaagaaactgtcattcatagactgttcgccgacaccatcgtcgaccgcttcactccgctgttacccaactggtgcaagctccttacgctaggacggaatccttgcgccgcgtctgcacat

SEQ ID NO: 368020 - DNA, 1062 bp, Homo Sapiens
  misc_feature (995)..(995): n is a, c, g, or t
ggtccggaattcccgggatccgctctgcaaacaaccatcaatctgatcccacaggcctgagaaagtctgctctccagtacctgctgctgatctgtttcagccgacaagaggcaccatgaaattggaattcacggagaaaaactacaatagcttcgtgctgcagaacctgaacagacagaggaaacgcaaagagtactgggacatggccctgagtgtggacaaccacgtcttctttgcacatcgcaatgtgctggctgctgtctccccactggtgaggagcctcatctccagcaatgacatgaagaccgctgatgagcttttcatcaccattgacaccagttacctgagcccggtcacagtggaccagcttctggactacttctatagcggcaaggtggtgatctccgagcaaaatgtggaggagctgcttcgtggggctcagtatttcaacacaccacgccttcgagttcactgtaacgacttccttattaagtccatctgccgtgccaactgcttgcgctacctcttcttggctgagctgtttgagctcaaagaggtatcagacgtagcttactctggcattcgggacaacttccactactgggccagtcctgagggctccatgcacttcatgcgctgtccacctgttatctttggccgcctgctccgtgatgaaaaccttcacgtgctcaatgaagaccaggcgctcagcgcactcatcaattgggtgtacttccggaaggaggatcgggagaagtatttcaagaagttcttcaattacatcaatctcaatgctgtctccaataagacgctggtgtttgccagcaacaagctggtgggcatggagaacacctcatcccatacaaccctgattgagagtgtcctgatggaccgcaagcaagagcggccatgcagcctgctggtctacccacggaaaaggggccctggcttgattcccggggtcatcctccggggccaagaagcccaccgccagnttcaagaatggagaggtttgcttatatccatcacgaaaaacctggtggaagaagctctcccaactgg

SEQ ID NO: 368021 - DNA, 233 bp, Homo Sapiens
ccgatgaacacctctgacccagctggcggcgggctgcccacccagcctgggggtggcccgccatacttcctctgcccgttcacctgcaccaggcggatgcctgtctccctgacccacgcctccagcgccgccttgttctctggattcaccctctcacaccacagctcacaatcccgcttggactgcatggctctccagactggccccctcgtaccctctttataacttcctcc

SEQ ID NO: 368022 - DNA, 886 bp, Homo Sapiens
ggatgaatgagacccagcctctgccctgggagtgcagagactcaagacagatacgaccacgtggagagacaactgtaaaacaagtgtggttgccctagagtttgcagtatatgtttacaagctaacccaagaccactttcaaattacactacaccttgcaggcagtgaattagagaataaaatcccagcacgatgttcctcactggagacaccagtccagctgaggacaatagagaagccacccttcctcaatgttcacttccagaattatatgcatgtattgagaattttaataaggagagcaagaaatcaaatcttctaaaaatgcatggtatttcacttaacgaagcacaggaagtacttgctagaaacctgaatgtcatgtcattcaccaggggcgctgatgtgagaggagatctccaacctgttatcaggaaaacaattcatgaatctaagggatctggaatggcagatattttaaggggcttgcgaagtggaggcgcactactgcaatttcattcggagacataaaatacaacactgagaagagatttgtagagagccaggacatgcctgacgttattttcccccctatagttcgcaagtctttggtcatttatcctcaaattgattatcaaaatgaaggaagttattctcttaaatggaatatgtagtgtattaaacatattctcggacgtagcattcagcttttgagagcattgatttaatacacaaaaagtacagaagccaagtacccaatagaacatctgaagtgagtgttgttcacacacattgaaggtgatattgtgccacattaagccgttaataccgagcaaagggccgattaaactgcgaaacgtggaagtggctggacggtgcaacccat

SEQ ID NO: 368023 - DNA, 969 bp, Homo Sapiens
aacccggctgggtgggtgggaagtgtggctggtaacctggcagccgcggagagagagaagattataaatggcagagccatttaactgtggttagctgttggattctgatactttcttaaaaatacgttcttgcaccaacatcttcattgggaacagttcagaaaaagcaaagaggagagccaacattcacatttaccatggctataccaataacagtgcttgactgtgacctcttgctaaatggccgtggtcaccggacattggaccgttttaagctggatgatgtgactgatgaatacttgatgtccatgtatgggtttccacggcagttcatttattacttggtggagctcttgggggcgaatctttctaggcctactcagcgatccagggctattagcccagagacacaggtccttgcagcattgggtttttatacctcaggttccttccagactcggatgggagatgccattggaatcagtcaggcgtctatgagtcgttgtgttgccaatgtcactgaagcacttgtggaaagggcctcacagttcattcgctttccagctgatgaagcctccattcaggctctgaaggatgaattctatgggttggcagggatgccaggggtgatgggggtggttgactgtatccatgtggccatcaaggcaccaaatgctgaagacctctcctatgtgaaccgaaaaggcctgcattctttaaaactgcctgatggtgtgttgaccattagaggggacactaattgacccgtggaagacaatactgggccccggcaagcccttacagggacctgttgctgttggctgtaggcaagtctttccctccagtaggtcagtttgaacgcggggtttgcacacaagatatactgggcttcttgggttacacaatcccttcttttcttcggaaccctggttcatgaaacccactttccaatttcttgaaaattccagg

SEQ ID NO: 368024 - DNA, 770 bp, Homo Sapiens
agccaatgagatttgtaacaaatcggaaaagaagaccatctcaccagagcatgtcatacaagcactagaaagtttgggatttggctcttacatcagtgaagtaaaagaagtcttgcaagagtgtaaaacagtagcattaaaaagaagaaaggccagttctcgtttggaaaaccttggcattcctgaagaagagttattgagacagcaacaagaattatttgcaaaagctagacagcaacaagcagaattggcccaacaggaatggcttcaaatgcagcaagctgcccaacaagcccagcttgctgctgcctcagccagtgcatctaatcaggcgggatcttctcaggatgaagaagatgatgatgatatctgaaattcaccagctgagtttctatttcttctataaatgtttttccctgcacaacaaaaacagtgaaagaaatgcttatctgtaattttgtatgcatcttggtggacttgtcattggtattctagggatgtctgctattaagtttcatctattgtgtgctatacatgtaaaaactgtctctttgaactattgaaaatttaaggttcagtataatatcaattttgaatttttaatggtgtttatgaaattttagatagcagcgagtccttcgtttgatcaataaacagtgttacagataacttcaagtttataaaaatacagtgaaatttctacaaaggctctaaatctggcatttgcatttcctctgcccttttaactaaactaaaacttgtggatttta

SEQ ID NO: 368025 - DNA, 1083 bp, Homo Sapiens
ggcgagagcagcgcgagatagggcctagcgcctcagatcttcgttggcggccatggcttcggcttctcagggcgctgacgacgacggcagtcgtaggaagccccgcctggctgcatcgttgcagatcagcccccagccccgcccctggcgaccgctacccgcccaggcccaaagtgcctgggagcccgcgcccgcgcccgcgacgtatcgcgcggagggcgggtggccccaggtctcggtgttgagggacagtgggcctggggcaggggccggagtcggggaactgggggcagcccgggcgtgggaaaacttgggggaacagatggggaaggccccgagggtccctgtgcccccagcagggctcagcctgccgctcaaagacccacctgccagccaggccgtgtccttgctcacggagtacgcggccagcctgggcatcttcctgctcttccgggaggaccagccaccaggtccctgcttccccttctcggtgagcgcggaactggatggggtggtctgccctgcgggcactgcgaatagcaagacggaggccaaacagcaggcagcgctctctgccctctgctacatccggagtcagctggagaacccagagtccccccagacctccagccggcctccactggcccccctgagcgtagagaacatcctgacccatgagcagcgctgcgcagcgttggtgagcgccggctttgacctcctgttggacgagcgctcgccatactgggcctgtaaggggactgtggctggagtcatcctggagagggagatcccgcgtgccaggggccacgtgaaggagatctacaagctggtggctctgggcaccggcagcagctgctgtgctggctggctggagttctcgggccagcagctccacgactgccatggcctggtcatcgcccgcagggccctgctgaggttcttgttccggcagctcctgctgtgcacacaggggggccccaagggcaaggagcagtccgtgctggccccccagccagggcccggaccccattcaccctcaagccccgcgtcttcctgcacctctacaatcaagcaaaacaccat

SEQ ID NO: 368026 - DNA, 953 bp, Homo Sapiens
  misc_feature (697)..(697): n is a, c, g, or t
gtttcgagtcagaatttaaaatactgtgcagtttaagctacaatacgcttggcctataacttggttccaggcatttatatttatgtcactttgtctacttattatactaacaaggtggaaaaagcaatcccagtctctccaaaagacaagatgtgaaatggagaagtatctgacacctcagcttcctccagttcctataattccagagcataaaaagtatagacgagacagtgcctcagtcgtagaccagttcttcactgacactgaagggttaccttacagtatcaacatgaacgtcttcctccctgacatcactcacctgagaactggcctctacaaatcccagagaccgtgcgtaacacacatcaagacagaacctgttgccattttcagccaccagagtgaaacgactgcccctcctccggccccgacccaggccctccctgagttcaccagtatattcagctcacaccagaccgcagctccagaggtgaacaatattttcatcaaacaagaacttcctacaccagatcttcatctttctgtccctacccagcagggccacctgtaccagctactgaatacaccggatctagatatgcccagttctacaaatcagacagcagcaatggacactcttaatgtttctatgtcagctgccatggcaggccttaacacacacacctctgctgttccngcagactgcagttgaaacaattccagggcattgcccccctgtgcaacatacacaatgccaagtcagtttcttccacaacaggccacttactttccccccgtcaccaaccgaagctcagagcctggaagtcccgatagacaagcagaagatgctccaggaatttaaccccacttcatcctatggctggtacaatgcgtctaaactgggaattcacaatccaatttacccaccaacctgcagtttacttacaaacatc

SEQ ID NO: 368027 - DNA, 1016 bp, Homo Sapiens
tccggtggtgccagcactagcccccatgtcggtctcagagaaccttctccccacctctgagttattctctcagtgtatcgaagatatcagtcaactatcttctggattgcattgatgctattgagaaggcagcctgcagtctaaaagtcatggttttaaaggcggaacacaccaggagccccagcgcaaccctcccctccaatgtgccttcatgccggtccctgtcatccagcgaagacggccccagtggcccttccagcctcgcagatggaggcctagcccacaacttacaggatagtgtcaggcaccgcatcctctacctctcagagcagctgagagtggagaaggccagtcgggatggcaacactgtgagctacctcaagctggtatccaaagcagaccggcaccaggtgccgcacatccagcaggcctttgagaaggtgaaccagcgcgcctctgccaccatcgcccagatcgagcacaggctccaccagtgtcaccagcagctccaggagctggaggaaggctgcaggcccgagggcttactgctgatggcagaaagcgacccagccaactgcgagccacccagtgagaaggccctgctttcagagccccccgagccaggtggggaagacgggccggtcaacctgcctcatgccagcaggcccttcatcttggagagtcgcttccagagctttacagcaggggacgtgcttaggagacagaggatgtggcccagcaacaaaaccttgctgttgcagaacggtaacaggcagagctggaaagaaagccaagaggttcccacatcaagcctcccagcgagtcctaatcacaggctaaagcgagaggtcctcctgactgaacctgcagctgttgcctggagtccctttcggcaggagaagtgtacgcaaggcttgatgggaagaaccaggctgatggtcgcctgcggggacacgtggaatgagagtttacagttcaaaacaatttggctgcgcgaaaagaaaaggctttaacag

SEQ ID NO: 368028 - DNA, 981 bp, Homo Sapiens
ggcgaggcgtgaccgaggggcgaggcgtgaccgaggggctcgccgcggctcctgcgcctgcgcggcggggaacggcgaccggctgaggggactaggggagcgcggtgcttcggtggcggaggtcacggtggcctccatcctaaagggctgcgggcgtcccggacggcggtcccaagcgctgctcacgctgctcttaagtgagccctggacgaggcgcggtgggccctcatagtccgcgccggcgccctcgctccacaccgcggcgtccggccctgggctcccgccgatgtccgcgtgggacttttaggggatttgtttatttttgtacgttaaccacactagaaacggccccagaatgggctgaaacgtgtgctgctgaagctgccacctaaactcccgagagaagcgccgtttctcctccatggcttctcgccgacgccctcgctgctggccttccgggctccctcggttgataaaaggactaaatagtgacggacatttttaaggctacttaagaaatggcaaaaatacatttagaggtgtgaacccgaacacactgcgcgctttaagccccgcgagagccgggggccgcccgcttccgtgcgcccgtagctcctttctcgggtccgggattcgccggtgccggggacagaaacctcctgccttcttagttcatgacgcttgtagatgaacttccctgttttctgcactgcttagaccagaagacgggaaaccgtgactgccgcacccttccctgaagcaggcactgcccgtcgtccatcaaacgcgaggactgccccacctcgtaggaagggacgccgcgggccttgctaaaagcctccggctctggcctgccccgaggcaccctttcccctccccggtttccgagggcggactccattcctctggagccggtgtttccgggttggggcaagcttcaaatgcctttgaataacccccctttactttaaattctggacc

SEQ ID NO: 368029 - DNA, 1307 bp, Homo Sapiens
  misc_feature (1158)..(1158): n is a, c, g, or t
  misc_feature (1226)..(1236): n is a, c, g, or t
cgtcgacgggcttagcgcctcaactgtcgttggtgtatttttctggtgtcacttctgtgccttccttcaaaggttctccaaatgtcaactgtcaaggagcagctaattgagaagctaattgaggatgatgaaaactcccagtgtaaaattactattgttggaactggtgccgtaggcatggcttgtgctattagtatcttactgaaggattggctgatgaacttgcccttgttgatgttgcattggacaaactgaagggagaaatgatggatcttcagcatggcagtcttttctttagtacttcaaagattacttctggaaaagattacagtgtatctgcaaactccagaatagttattgtcacagcaggtgcaaggcagcaggagggagaaactcgccttgccctggtccaacgtaatgtggctataatgaaatcaatcattcctgccatagtccattatagtcctgattgtaaaattcttgttgtttcaaatccagtggatattttgacatatatagtctggaagataagtggcttacctgtaactcgtgtaattggaagtggttgtaatctagactctgcccgtttccgttacctaattggagaaaagttgggtgtccaccccacaagctgccatggttggattattggagaacatggtgattctagtgtgcccttatggagtggggtgaatgttgctggtgttgctctgaagactctggaccctaaattaggaacggattcagataaggaacactggaaaaatatccataaacaagttattcaaagtgcctatgaaattatcaagctgaaggggtatacctcttgggctattggactgtctgtgatggatctggtaggatccattttgaaaaatcttaggagagtgcacccagtttccaccatggttaagggattatatggaataaaagaagaactctttctcagtatcccttgtgtcttggggcggaatggtgtctcagatgttgtgaaaattaacttgaattctgaggaggaggcccttttcaagaagagtgcagaaacactttggaatattcaaaaggatctaatattttaaattaaagccttctaatgttccactgtttggagaacagaagatagcaggctgtgtatttaaatttcgaaagtatcttcanttgatctttaaaaaataaaacaattggagacctgtgaaaacccaccaaaccaagccaatcaacaaaannnnnnnnnnncaaaaagttccccgggggcccactttgcgtcccccttttttggcaacagggggccccaaaagggggcgcaa

SEQ ID NO: 368030 - DNA, 1051 bp, Homo Sapiens
tcccgggatcgtcgacgggcttagcgcctcaactgtcgttggtgtatttttctggtgtcacttctgtgccttccttcaaaggtggtgctttgtccctgtgggtcatctgtactgattgcgccaagcaaagcatttgttctccaaatgtcaactgtcaaggagcagctaattgagaagctaattgaggatgatgaaaactcccagtgtaaaattactattgttggaactggtgccgtaggcatggcttgtgctattagtatcttactgaaggatttggctgatgaacttgcccttgttgatgttgcattggacaaactgaagggagaaatgatggatcttcagcatggcagtcttttctttagtacttcaaagattacttctggaaaagattacagtgtatctgcaaactccagaatagttattgtcacagcaggtgcaaggcagcaggagggagaaactcgccttgccctggtccaacgtaatgtggctataatgaaatcaatcattcctgccatagtccattatagtcctgattgtaaaattcttgttgtttcaaatccagtggatattttgacatatatagtctggaagataagtggcttacctgtaactcgtgtaattggaagtggttgtaatctagactctgcccgtttccgttacctaattggagaacaagttgggtgtccaccccacaagctgccatggttggattatcggagaacatggtgattctagtgtgcccttatggagtggggtggaatgttgctggtgttgctctgaagactctggacccctaaattaggaaacggattcagataaggaaacactgggaaaaatattccataaaacaggttattcaaagtgccctatgaaaattatccaggcttaaaggggaataccctccttgggctaatggaactgccctgtggaatgaatctggtaaggacccatttttgaaaaaatccttaggaaaatgggcacccaagtttcccaccatgggtttaagggggatttacatgggatatcaagggaaaacactcctcttttctcc

SEQ ID NO: 368031 - DNA, 822 bp, Homo Sapiens
agcgggtcgacgggcttagcgcctcaactgtcgttggtgtatttttctggtgtcacttctgtgccttccttcaaaggttctccaaatgtcaactgtcaaggagcagctaattgagaagctaattgaggatgatgaaaactcccagtgtaaaattactattgttggaactggtgccgtaggcatggcttgtgctattagtatcttactgaaggatttggctgatgaacttgcccttgttgatgttgcattggacaaactgaagggagaaatgatggatcttcagcatggcagtcttttctttagtacttcaaagattacttctggaaaagattacagtgtatctgcaaactccagaatagttattgtcacagcaggtgcaaggcagcaggagggagaaactcgccttgccctggtccaacgtaatgtggctataatgaaatcaatcattcctgccatagtccattatagtcctgattgtaaaattcttgttgtttcaaatccagtggatattttgacatatatagtctggaagataagtggcttacctgtaactcgtgtaattggaagtggttgtaatctagactctgcccgtttccgttacctaattggagaaaagttgggtgtccaccacacaagctgccatggttggattattggagaacatggtgattctagtgtgcccttatggagtggggtgaatgttgctgggtgttgctctgaagactctggaccctaaattaggaaccggattccagataaggaaacacctggcaaaattattccataaacaagttattcacagtgccctatttaaatttttca

SEQ ID NO: 368032 - DNA, 667 bp, Homo Sapiens
acatcaaaatgagttattttaatgaatgaaaaacattaaatctaccagtctacagaaaaagaaaatgtgtatttgacatcgtttaaggtggctctaacatcaactccttacttgggaaaactggtatttaaatgtcaagaattaagcttttctcctgtcttcccagcattgacgatttcgaaaaatttttgatactattctacgtaacactgctttagctaagtaagtatatcttcttagttccaagtatcctatccagcctgctctccagtcattcctgcttaggactccctgtggctgggtgaaacaggactctttcccttgctccagatgagagaccaaagctggtttggaagtgggtggcactacaaaggccacagcctcatagttctccagcatcacatccctgtacaaggccctctcggcaggcaccatgatggcccattccttcgtagtgaagtacacagccacgtcctcaaaagccactgattcctggggcctggttgttaaggacacagctgtcatcatctgacctcttttattcctttctgggtaaaggtaaaagtctcaggtgcgtgggctcctggcggcctctgcagcttttcagcaagcagagatggtgggcgccactcgccgatcctcacaaaccaaaacctcgcgcgacccc

SEQ ID NO: 368033 - DNA, 782 bp, Homo Sapiens
cgcgtgggagacgaaggcgtggctgactcggcggggcggatccctttaggacccgaggcaggctctgggcccgccgggtccgttaatctcaccgcgccgcaaggggccacgttttaccacttgatttagcaaccctaagcggtttggaatctgctttgctctcacaggacctcagcccgtcgtgatcagattctcccactttcttttttctttcctggaatggagtgggcagtctttttccatctctaccgaagttgatgttcatttttaatcttttcgcccctcacgcttttgtaataatgagcactagaatgctgcagggttggcctttggcctaaaccatttctagctatggacttgccagatgagagccagtgggacgaaaccacctgtggcttggctgtttgtcagcacccacaatgctgggcaactatccgccgcattgagaggggccatcctcgaatcctcggctcatcctgcaaaactcccctggatgctgaagataaactcccagtgctcaccgtggtagacatcttagattccggctttgcagctcatcatttaccagaatgtacctttactaaggcccattctttattgtctcagagttcaaagttttactccaaatttcatggcaggcctccgaagggtttacctgacaaaagtttgatcaactgtactaacagacttccccaaatttccagtgttgaatttgaatgagacgcaacttccctgccctgaaagatgttagaaatatggttgtgatgtggatcccagaagaa

SEQ ID NO: 368034 - DNA, 1323 bp, Homo Sapiens
gagacgctgcagttcctggacatcatgtgcggcagcaccacgggcggcctggggctgctggggctctacatcaatgaggacaacgtgggcctcgtcatccagaccttggagaccctcactgagtactgccagggcccctgccatgagaaccagacttgcattgtgactcacgagtccaatggcatagacatcatcaccgcactgatcctcaatgacatcagccccctgtgcaagtaccgcatggatcttggtgctgcagctcaaggacaatgcctccaagctgctcctggctctgatggagagccggcatgacagtgaaaatgctgagcgaatcctcatcagcctgcggccccaggagctggtggacgtcatcaagaaggcctacctgcaggaggaagagcgtgagaactcggaggtgagcccacgtgaagtgggccataacatctatatcctggcgctgcagctctccaggcacaataaacagctgcagcacctgctgaagccggtgaagcgcattcaagaggaggaggccgagggtatctcttccatgctcagcctcaacaacaagcagctgtcacagatgctcaagtcctcagcgccagcacaggaggaggaggaagaccccctggcctactatgagaaccacacgtcccagatcgagattgtgcggcaggaccgcagcatggagcagatcgtgttcccagtgcccggcatctgccagttcctgacggaggaaaccaagcaccggctcttcaccactactgagcaggacgagcagggcagcaaagtgagcgacttcttcgaccagtcctccttcctgcacaacgagatggagtggcagcgcaagctccgcagcatgccgctgatctactggttctcccgccgcatgaccctgtggggcagcatctccttcaacctggccgtgtttatcaacatcatcattgccttcttctacccttacatggagggcgcgtccacaggcgtgcttgaatccccctctcatcccattgctccttcaggaattctactctgctttcccaatccagggccctgtttaacaaaacccccaaagctttcttcccccccaaacgggggatactccatcctgaccattaaaaccttcataaatgggggcaacacaggactcaaattatctaattccaaggggaaccctattaaaagtgaggagttaaaaatgttaaggggagtcggtgaatgatgcccttgaaggggcatgcgtcttagtgacgaagcacgcgggtgtgaatttgaggagagattatcacatcgtttatcaccatattaatacctgttatttccagg

SEQ ID NO: 368035 - DNA, 1077 bp, Homo Sapiens
atcaggccaaatcggccgagctcgaattcgtcgagagcggagtagcgggccgtcggttgggcgcagacaggccgcagaagatggagagatggagccaccccaagagacaaataggcctttcagcacacttgataaccgcagcgggcaggtccaagtcctgtccgccaccccgctattgcagaggaatccctacagcagcccggatatcatgcacattaaagggtcggaggcttcttcggtcccttacgccctgaaccaggcacgacggccctgcctaagaacaagaaccaggagggcaccgggcaccggctgctgaacatgctgagaaaaactcttaaagagtctgatagtgaagaactggaaataacacaggagacaccaaatttggtgccatttggggatgtggttggctgcctgggcattcatataaagaactgcagacattttatgcctaagatcagtttacaacattatgctaatttattcattcgcatctctataaacaaagctgtgaaatgtacaaaaatgtgtagcttgctatccaaaaacgatgagaagaacactgtaattaagttcgatgaagtgaagtatttttctgtacaggttcccagacgttatgatgataagcggaataatattttattggaactcatacaatatgacaatagagcaaaaaccgtgctttcttgttagggagtgtccagatacatctttatgaggtaattcagaaagggtgcttcattgaagcaggtccaagtgttgcatggaaacatatttgtctgcaggctggaggtggaatttatgttctcctatggaaactttggtctatgggattttcacatcagttaagaacctctttcagaaaaattactgagccatcccatggttatgaatctttggcaccaaccttccagacaagaaccagatctccgtgacaacacgttatttacacccacagacagtagaaatatcccggcattctttatccccagaactgaatgttactgttgggactccagctgtgccaatcctccaccaggcatttggagtgcgacttggaaaacttcagcaacaagc

SEQ ID NO: 368036 - DNA, 876 bp, Homo Sapiens
cgccccaggtccccacgccccgggccgggccgcagcctcctgggcttcgtgggggcagacccagcctttcccggcagcgagcgctcggtccaggtgcactaggcgctgtgcgggccccccttccccgcggagccatggaggctgtggaactcgccagaaaactgcaggaggaagctacgtgctccatctgtctggattacttcacagaccctgtgatgaccacctgtggccacaacttctgccgagcctgcatccagctgagctgggaaaaggcgaggggcaagaaggggaggcggaagcggaagggctccttcccctgccccgagtgcagagagatgtccccgcagaggaacctgctgcccaaccggctgctgaccaaggtggccgagatggcgcagcagcatcctggtctgcagaagcaagacctgtgccaggagcaccacgagcccctcaagcttttctgccagaaggaccagagccccatctgtgtggtgtgcagggagtcccgggagcaccggctgcacagggtgctgcccgccgaggaggcagtgcaggggtacaagttgaagctggaggaggacatggagtaccttcgggagcagatcaccaggacagggaatctgcaggccagggaggagcagagcttagccgagtggcagggcaaggtgaaggagcggagagaacgcattgtgctggagtttgagaagatgaacctctacctggtggaagaagagcagaggctcctccaggctctggagacggaagaagaggagactgccagcaggctccgggagagcgtggctgcctggaccggcagggtcactctctggagctgctgctgctgcagctggaggagcggagcacacaggggccctc

SEQ ID NO: 368037 - DNA, 1104 bp, Homo Sapiens
tggatcacgccccgggccgggccgcagcctcctgggcttcgtgggggcagtacccagcctttcccggcagcgagcgctcggccaggtgcactaggcgctgtgcgggccccccttccccgcgaccctgtgatgaccacctgtggccacaacttctgccgagcctgcatccagctgagctgggaaaaggcgaggggcaagaaggggaggcggaagcggaagggctccttcccctgccccgagtgcagagagatgtccccgcagaggaacctgctgcccaaccggctgctgaccaaggtggccgagatggcgcagcagcatcctggtctgcagaagcaagacctgtgccaggagcaccacgagcccctcaagcttttctgccagaaggaccagagccccatctgtgtggtgtgcagggagtcccgggagcaccggctgcacagggtgctgcccgccgaggaggcagtgcaggggtacaagttgaagctggaggaggacatggagtaccttcgggagcagatcaccaggacagggaatctgcaggccagggaggagcagagcttagccgagtggcagggcaaggtgaaggagcggagagaacgcattgtgctggagtttgagaagatgaacctctacctggtggaagaagagcagaggctcctccaggctctggagacggaagaagaggagactgccagcaggctccgggagagcgtggcctgcctggaccggcagggtcactctctggagctgctgctgcttgcagctggaggagcggagccacacaggggcccctccagatgctgcaggacatgaaggaacccctgagcaggagaaacacctgagtgtgcagtgcccaaaggttgccccccccaccagacccaggactgtggtgcaaagttcccggacagattgaagtgcttaggaggttttccaaaagatgtggttgcctgatgcccacctccgcggtacccctacctcctcccgaatgaaaagccccaaaagggcctacctcgggctcctccccgaaagggcaagggggttctgccaccaaggaacccaatttgggccttaccccttgggctgtggggccaaaacggccttccc

SEQ ID NO: 368038 - DNA, 1036 bp, Homo Sapiens
  misc_feature (930)..(930): n is a, c, g, or t
  misc_feature (946)..(946): n is a, c, g, or t
ggtccggaattcccgggatgatttgtgccataggagctgtgcatgcatgatgaagtggcacagccactgaacctatcagctaaacccaagacctctgatggcaaatcacccacatcacccacctctccccatatgccagctctgagaataaacagtggggcaggccccctcaaagcctctgtcccagcagcgttagctagtccttcagccagagttagcacaataggttacttaaatgaccatgatgctgtcaccaaggcaatccaagaagctcggcaaatgaaggagcaactccgacgggaacaacaggtgcttgatgggaaggtggctgttgtgaatagtctgggtctcaataactgccgaacagaaaaggaaaaaacaacactggagagtctgactcagcaactggcagttaaacagaatgaagaaggaaaatttagccatgcaatgatggatttcaatctgagtggagattctgatggaagtgctggagtctcagagtcaagaatttatagggaatcccgagggcgtggtagcaatgaaccccacataaagcgtccaatgaatgccttcatggtgtgggctaaagatgaacggagaaagatccttcaagcctttcctgacatgcacaactccaacatcagcaagatattgggatctcgctggaaagctatgacaaacctagagaaacagccatattatgaggagcaagcccgtctcagcaagcagcacctggagaagtaccctgactataagtacaagcccaggccaaagcgcacctgccctggtggatggcaaaaagctgcgcattggtgaatacaaggcaatcatgcgcaacaggcggcaggaaatgcggcaggacttcaatgttgggcaaccagcacagatccccattgccactggcgggtggtgggtaccctgggaccatcnccatgggctgggatgnccttccctaaactgccctcggagcactcaagcgtggcctagcaggcccaaaaccctgggatgcctggtattcaaaagcacttacgggggg

SEQ ID NO: 368039 - DNA, 737 bp, Homo Sapiens
ttcccatcacagccgggaaagcccaactgcttagagaaaaagctgagtcaaagtgcttgggtctcctttttccttaggagccctgggaattgagagaatctgataacttcattgcgagttgtaatatgggaatacgtgaatctactcacagggcttcgggttcagtaggatcgagtgtaaaagttcctgttatggagcttgacatagagaaggattccagtcctctactaaatgaagtttcttcttcccttattggaactgattcccaagcctttccatcagttagcaagccttcatccgcctatccctccacaacgattgtcaatcctactattgtgctcttgcaacacaatcgagaacagcaaaaacgactcagtagcctttcagatcctgtctcagaaagaagagtgggagagcaggactcagcaccaacccaggaaaaacccacctcacctggcaaggctattgaaaaaaagagcaaaggatgacagtaggcgggtggtgaagagcactcaggacttaagcgatgtttccatggatgaagtgggcatcccactccggaacactgagagatcaaaagactggtacaagactatgtttaaacagatccacaaactgaacagagatgatgattcagatctgtactctcccagatactcattttctgaagacacaaaatctcccctttctgtgcctcgctcaaaaagtgagatgagctacattgatggtgagaaggt

SEQ ID NO: 368040 - DNA, 896 bp, Homo Sapiens
tgaatgaattggattggcattagggatttggcccctttgttccaaataatgttcaggcaaccacattctgtaacatccatgggcatctttcacaagctctaaggaattattgggctttccttcaataggtagaattgttgacatctgcaccatgttcaagggcgatcagagcacagcgataatgccgcttagtcggtaaaatgcagtaaaacaaacaccttggttccttcatgatcaactatagtcatatcagcctttgcctttgctaatatttccattgacaattcatggcccagttctgcagccctcattgtgggagtacagcccattcggtcttgcacatcagggtgagcaccaaggtcaaggagaaagctgaccatatcaatatcattggaaactgaggctaagtgcaaagcactaagtccattaatgggttctgtataattgattagttcagggtatccaagcttggtcagcttctctatctgcttcttgtctttgttccgcacacattgaagaactttgtagatctgtaagttctcaagtctcttatctgctaaagccatgcttgaccagctccttgaaaatgctttctggaccaaaactaaagctcttagtcttccgggcgatcagaagccagggatctctgggcacctatgtgcctgggcctgctggggcgaccggggaggcccctgctctcgtcctctgacgctcagcgctggcccagccgcgaccttgggctcccggagcccggcggaggcgcccaggcgtgaatgatgtcccttgggtagggctggtgagctggcgcgcgggacagcagggctgggtgtatgtgtccatgggccccgggtccccggaaggcgagcgcgcgggacaggtgagcgcagggggcgggg

SEQ ID NO: 368041 - DNA, 758 bp, Homo Sapiens
ggctaacaaaatgaattggaaatctgctgaagaggatgttcgggattttttacttttttccttcattatcaactatagtcatatcagccttggcctttgctaatatttccatggaaaattcatggcccagttctgcagccctcattgtgggagtacagcccattcggtctttgcacatcagggtgagcaccaaggtcaaggagaaagctgaccatatcaatatcattggaaactgaggctaagtgcaaagcactaagcccattaatgggttctgtataattgattagttcagggtatccaagcttggtcagcttctctatctgcttcttgtctttgttccgcacacattgaagaactttgtagatctgtaagttctcaagtctcttatctgctaaagccatgcttgaccagctccttgaaaatgctttctggaccaaaactaaagctagtttttacctcagtttctgcatctgtgaactggcaatagcaatggtgcccacttcatgggactcttagtcttccgggcgatcagaagccagggatctctgggcacctatgtgcctgggcctgctggggcgaccggggaggcccctgctctcgtcctctgacgctcagcgctggcccagccgcgaccttgggctcccggagcccggcggaggcgcccaggcgtgaatgatgtcccttgggtagggctggtgagctggcgcgcgggacagcagggctgggtgtatgtgtccatgggccccggcctcgtccga

SEQ ID NO: 368042 - DNA, 734 bp, Homo Sapiens
ctctggctcagagtttgcgatccgagagcgggatcgcgctccctcggtccttcctccctcccctcttgcggctcccgctgtcatctggagccgctcctgccgccccctggcggcgaccgcgggaagggccggcccccatccgcacccctgaccccggaggtcaacaacgggatggtccctgggtcccaggggaagagacatcacccagtaggagggagtacggtctagacagaggccacgagggcgggagggggcgagagtggagagtggcccagctggccaggtcgtctaagtgagaggaaaagggagagggcggttgagaccaggccctgaattccgcgttcatcttatcctgaggtattcagtgccgagtgtggccttggtgctaggattcaaagaggaaaggaagaaaactttccattctaaaagaaactccacgtgaggcgaagaagatgaaatatagtcagaaaaccataccagtaggtggtagttaagttgataaatgatgcatacgacatcctatagaagactgtcaccaccccacctcactgatcagccctctgcctacagccacacccacagaacattcagccatttctcctgtggttcccagcctgcagcacagcgtctgcacgtggaactctggaatgctgacctacagtctgagttcctgtgcccttgcctggggctgactctctacttgacctgtaacccacaactggggcaagagaaaa

SEQ ID NO: 368043 - DNA, 972 bp, Homo Sapiens
ctggtcctgcccggagttacgggatctctggctcagagtttgcgatccgagagcgggatccgcgctccctcggtccttcctccctcccctcttgcggctcccgctgtcatctggagccgctcctgccgccccctggcggcgaccgcgggaagggccggcccccatccgcacccctgaccccggaggtcaacaacgggatggtccctgggtcccaggggaagagacatcacccagtaggagggagtacggtctagacagaggccacgagggcgggagggggcgagagtggagagtggcccagctggccaggtcgtctaagtgagaggaaaagggagagggcggttgagaccaggccctgaattccgcgttcatcttatcctgaggtctgtggggacctgttgaaggactggggcaggggacggacgcgggcatccttccatttggaacagccattccggcagcatcaggatggggcggaggcaaagcggggagtgggcgaggcaagtggtgctgtaaacctgtgcgagaagggggcggtgactctaagggcaggaaggagccctggtcacacacacactcccacgcaaggtattcagtgccgagtgtggccttggtgctaggattcaaagaggaaaggaagaaaactttccattctaaaagaaactccacgtgaggcgaagaagatgaaaatatagtcagaaaaccataccagtaggtgttaagtttgataaatgatgcatacgacatcctatagaagactgtcaccacccccactcactgatcagccctctgcctacagccacacccacagaacattcagccattttctcctggggttcccagcctgcagcacagcgttctgcacgtggaacttctgggaatgctgacctacagtcctggaatttccttgggccctttgtcctgggggcctaacttctcctacttggacctggtaacccaccaacttggggc

SEQ ID NO: 368044 - DNA, 866 bp, Homo Sapiens
ccagcctccgctaggggaccccctccatggcttcccaccgggttgttccaggcctcagcttcgccgaaaggcctcaccacctccgacctccgcctgccctggggatgctcccagccctgctgcggcagaacgcgacatgctaaccggaatccctaggccgcctgtctcctacccatacttagaggccccgctcagacggtccttaaaacgtctgaaaggccgttcctgccagagtccctgctacctgttacctccacccctatttagtcctagtggacagcctcgctcaccttccctgggatgacacttctggcggctgagatgagcgagcctctctgggctctgccgccgggtgtgggctgacctgcctacagctggggcctgataaggcagcagcaaaagggtggaggggaggcagtgttgaagctggggcaagtaattttccccaatttacagggaaaaaccgaaattcagaaaagtttaatgtcacccaggggctggagcccagacctctggcagctctcactttcacaatgcccttgggctgactaggctgcagaggggtttcaccccaaccccagggcacctcaagtgtccccaccaaaccttcctaacacctgtccactaagctgtactaggcccttgcaactgacctatgggacctgaggcctggcccctcatggctccctgtcaccaggtctcaggtcagggtccaagcagtgccctgacgctgacgtgtggagccaggagccacccaattcccgtaagggacaggtttcaccaaattccccggaatggggcctgtgggtgaggtcaacaagtgacagcctaccaagccagaacaggattgggggtcgggtacccac

SEQ ID NO: 368045 - DNA, 783 bp, Homo Sapiens
cgtctggggcgccggcgggtgcgtttgaatctggtccgagcgcggtgaaacggcgggtccccgagcccaggttacaaaataaatgccatttgaacagtgccatctgtcatggaaaaacgtgagacgtttgtacaagccgtgtctaaggagctggttggagagtttttgcaatttgttcaacttgataaagaggcctctgatcctttcagcctaaatgaattactagatgaattatcaaggaaacagaaagaagaattatggcaaaggctgaagaatttattgacagatgtgtcgttagaaagcccagtggatgggtggcaggtagtggaagcccaggctgaagacaatatggaaaccgaacatggctcaaaaatgagaaaaagcatagaaataatttatgcaattacatctgtgattcttgcttctgtgtctgtaataaatgaaagtgagaactacgaagccctactggaatgtgttattatattaaatggtattttatatgcattacctgagtctgaacgaaaactacagagttctattcaggatttgtgtgttacctggtgggagaaaggcctgccttgccaagggaagacacaggaaagacagcctttgtcatgttactaaggaggagtctggagactaagacaggtgcagacgtatgtcggctttggcgtatccatcaagctttatattgcttggattatgattggaggaagtggagaaagttaaagatatgttacttgagtgcttcataaattattaataatatcaagaaagaagagg

SEQ ID NO: 368046 - DNA, 867 bp, Homo Sapiens
tgaattcacccgggccctatagctacaacctcatgttgcccagctctttcaattataaaggcagcccaattgaactgcaatatgtcaggtattctgaacgattagaaattaggtgattgaaatctttcgtgaacgatctgtgaaatctttgcatattgaatatgtctcccttcataatgtacttttgaaacatatgctagttcagataaaacaacaggttctgcagggaaaaggaggaggacctgatgtttctaaaattcgtggttcaggttcatccagttgtagaagctcatcaagagctaattttgctgcattggatctagactcctttttattttgtcccagtccagtcttgtactgaataccatccaccacagcacaaaaggcaaaatatggtcccataacattacctgttgtcacagtttccttaaggtcaagctgaactcgctgcatttgtgcaaactggtgcaaggctgacacaggatttatctctccacgtttgtatttcattataaattccttaggtattttttttggaggaaggacaggatttgaaatagatgaaagattcttggaaagcaacggctctggaaaattacccgttacttgcgtaaccttggatgccatcttggacaggccgtaactttctgaggaccatcctgtgggtgtagttatcgtctttgtcgctggttgaactggcaggttctttttcagcatctgggcaaagctggggacctgcgaactctgaaaccaatgattgttgctagccattttctcacctcccagcctcaacctctcgcttcaggccgctctgcgcgaggttcacagggtcaggccgcatctttcaaaagaggcctcgcgtcgccc

SEQ ID NO: 368047 - DNA, 768 bp, Homo Sapiens
agcggggtttcgtggttgtatagacatttacccgtggccgtgtacctggagctggcatctgactcaacatttggaggaggcctgtagagctctttacctgtgccgctcgtttaaccatctgttaccaccttgactgttcaaaccccccccttcaagtgtggcttgcctttctgaggtaattttccagagccgttgctttccaagaatctttcatctatttcaaatcctgtccttcctccaaaaaaaatacctaaggaatttataatgaaatacaaacgtggagagataaatcctgtgtcagccttgcaccagtttgcacaaatgcagcgagttcagcttgaccttaaggaaactgtgacaacaggtaatgttatgggaccatattttgccttttgtgctgtggtggatggtattcagtacaagactggactgggacaaaataaaaaggagtctagatccaatgcagcaaaattagctcttgatgagcttctacaactggatgaacctgaaccacgaattttagaaacatcaggtcctcctcctttccctgcagaacctgttgttttatctgaactagcatatgtttcaaaagtacatttatgggagacatattcaatatgcaaagatttcacagatcgttaaagaaagatttaatcaactaatttctaatcgttcagaatacctgaaatatagccagttcattggctgcttttataattgaaagagctggacaacatgaggttgtagctataggcacaggtgaataca

SEQ ID NO: 368048 - DNA, 1158 bp, Homo Sapiens
cggctgtaagagaactccacaagagagtcagaacgaaaatgtgcaacaagtgcggcggctcctaccatggcaggtgattcgaggactcagcacgaggcgagagtagggaccaggaagagccggaaaacccgcctgtgattggccgtccacgggtatcggtcgttgtgattgggtgaggcccagacagacagctgcgttttgaaccgcgtagggttctgggtagcaaaggccttgcaaggctcccccatggagagagccagacccgagccgccgcctcagccgcgcccgttgcgtcccgctccgcccccgctgccggtcgagggcacctccttttgggcagcagccatggagccccctccgtcgtctcccacactgagcgcggcagccagtgcgaccttggcctcgtcgtgcggggaggcagtggcgtccggcttacagcccgcggtgcggcggctgctgcaggtgaagccagagcaggtgttgctgctaccacagcctcaggcccagaacgaggaagccgctgcctcgtccgcgcaggcgcggctgttgcagttcaggcccgacctgcggctcctgcagccgccgacagcgtcagacggcgccaactccaggcccgagttgcacccggtgcagcccctggcgctgcatgtcaaggccaagaagcagaagctggggcccagcctggatcagtcagtggggcctcgaggggccgtcgaaaccggtcctagagcctccagggtggtcaagttggaaggccccgggccggccctcggctacttccgaggggacgagaagggcaagctggaggcggaggaggtcatgagagactcgatgcaaggcggggcaggcaaaagcccggcagccatccgagaaggtgtgatcaaagacggaggaacccgagagactcctcgaggactgcaggctcggcgcggagcccgcgtccaatggcctggttcatggcagcgcggaggtcatcttggccccaacgtccggtgcctttgggccgcaccagcaagaccttaggatccctttgacgctccacaacggtcccccctggggcccggatccaagtttcagggagctccggcttcagagctgataagattgaccaaaggtccgctgaaaccaggtgctaattaaaaatgcagtcctaactgg

SEQ ID NO: 368049 - DNA, 1177 bp, Homo Sapiens
tcatccggagaactcagaacgtaacattgtgtcccaatccctgcgtgggcgcagggtactcctctggatatttcatagtatagagttcccgtgtcaccatgtcagtctcacgacttctgttgtgttcgcgtatctcagctgagccctagaatccatgaccgcatgttgttccggagtatcctattcttgtgcaccaaacgtcggtgaaatccaaggtgcgagaaggggtagcccttaacagtcctctgaatggtttgactctcaggtgagtcctcaatgcggggttcttgggctcaagattcctgcctggtcttgtatttggtctctgcaattaatttgataatgtgcatctgctctttctgttcggcattggctttgcatgtccaacttgtctgcatcctcaatacttggggtgccccggcccttgaaggtcttggccaccacagcagtgggcttgtgcttcacctgagaaggcctgccagaatacctggcacagtgcctccacgtcccgcccgtccaccacataagtgttccacccaaaggcttcgcagcgcctctgatagatgtttatgcagtgcctcggcgggcaatgcaccactgtgtcccaggcggttcacatcaaagattgccacaagattgtccagactgtagtaggaagcaaaggccattgcctcccagacagagccttctgaggactcgccatcactcatgaggcagaacacccggtagctggccctgtcgaagtacttgccagtatatgccattccacatgcaactcccagtccttgtccgagccatcctgttgccacatccacaaacgacagtctctttgcgaggacaaatcggtcgttgtccggattctctggatctgactgcttgtacctcatgatgtagaagaacagcacagacatgatctcagaagaactgctacatgatgtagggtggccggagctcgtggagcatgtggccctgatggaatggattcgcaagcggctggccatatcttgcaacacctgcaaggtgcccctgtcaggtctggcctcctccgggaactcagccctcgcctcagcatccgccattagtccaacccctttggagtctgaagacccactcctacgtctccggcgtctgaagagcgaatggcgcctgcgagctgcccagtgcgtttaagtccgct

SEQ ID NO: 368050 - DNA, 837 bp, Homo Sapiens
ctcccctccccccactcctctcagtgggggcccctccagtccctgagaattggtactacgaaaaggtgaactcctgggcagaatcttgcctagagcttgcggagtccagccaggcccctgctgaagggccccagaccaccggccacttctcccccgtccatctgaccagctgggcccctgcgcccacctggcctccacgttccctctcctctcacccacacccctggccatggctaactactatgaagtgctgggcgtgcaggccagcgcttccccggaggacatcaagaaagcctaccgcaagctggcccttcgttggcaccccgacaagaaccctgacaataaggaggaggcggagaagaagttcaagctggtgtctgaggcctatgaggttctgtctgactccaagaaacgctccctgtatgaccgtgctggctgtgacagctggcgggctggtggcggggccagcacgccctaccacagccccttcgacaccggctacaccttccgtaaccctgaggacatcttccgggagttttttggtggcctggaccctttctcctttgagttctgggacagcccattcaatagtgaccgtggtggccggggccatggcctgaggggggccttctcggcaggctttggagaatttccggccttcatggaggccttctcatccttcaacatgctgggctgcagcgggggcagccacaccaccttctcatccacctccttcgggggctccagttctggcagctcgggggttcaagtcggtgatgtcatccaccgagatgatcaatggcccacaggtcccaccaagcgcatcgtggaagacgg

SEQ ID NO: 368051 - DNA, 311 bp, Homo Sapiens
agagcactttgcccggagcccagcgtcctcccctgagttcgctgagtctcccgggaccagcaaaggctgcgcgccccgcatgcggcccggaggcggggagccctgggaggcctggccgagctgcccgcagggaaatggcggagaaagcgcttactctgcccgagttcagccgggctggggacttggcctgggtcctgaactcggcatggaccagttctgcctctggctgtggaccagggtgtggacctggagcaccgcgggggccagtctcatcggatcagatcgagcagctccatcggagatttaagcag

SEQ ID NO: 368052 - DNA, 1320 bp, Homo Sapiens
  misc_feature (71)..(71): n is a, c, g, or t
  misc_feature (1307)..(1307): n is a, c, g, or t
ccgaattcctcgatgcaggaccagaggggcagagcaagtcagcattggcgccccttcctcagatccctatncatcttgggaaacagtagcccagaggttcaggaagatgttaacttaaatgttcagggtgccccagtctgttcagcatggctgaaatccacactccgtattcttccttgaagaaactgttatctttactcaatggcttcgtggctgtgtctggcatcatcctagttggcctgggcattggtggtaaatgtggaggggcctctctgacgaatgtcctcgggctgtcctccgcatacctccttcacgttggcaacctgtgcctggtgatgggatgcatcacggtactgcttggctgtgccgggtggtatggagcgactaaagagagcagaggcacgctcttgttttgcatcctgtcaatggttattgtcctcatcatggaagttacagctgccacagtggtccttcttttctttccaattgttggagatgtggccttggaacacaccttcgtgaccctgaggaagaattacagaggttacaacgagccagacgactattctacacagtggaacttggtcatggagaagctaaagtgctgtggggtgaataactacacagatttttctggctcttccttcgaaatgacaacgggccacacctaccccaggagttgctgtaaatccatcggaagtgtgtcctgtgacggacgcgatgtgtctccaaacgtcatccaccagaagggctgtttccataaacccctaaaaatcaccaagactcagagcttcacccctgaagtgggagctctctgggagctgcagtgatacagttgcccaggaaattctgcccactttgctgctggtttatcaacctggggctgacccccaggccctggaaaaaatgagacacctgggcccctctgggcttgctggagattcccctctcagctttaatttctccggggggacctcactggcttcctgaaagggggaaactgtttaataaaaggatttgggcgagccaacgagacgcgcccctttgcacggaaactgatcccccccgccaagctgaaatatacggaccgttgcctttgcctggtgctcctcaaagaaatagcgtaaactgcttccccccctcgaagttcaaagccctcttattatgggtcgcccgcggccacgtatacttcctcctcggagggaggcattgtcgttacacactccccattatctattcattaaaggaggtggcaccttctacgccgtgagacttgtctcataaccatctgttgcacgcggtgtggngcttcttttacca

SEQ ID NO: 368053 - DNA, 1753 bp, Homo Sapiens
  misc_feature (963)..(963): n is a, c, g, or t
  misc_feature (1172)..(1172): n is a, c, g, or t
  misc_feature (1343)..(1343): n is a, c, g, or t
  misc_feature (1379)..(1439): n is a, c, g, or t
  misc_feature (1545)..(1564): n is a, c, g, or t
ctccccccccttctcccttatttttttctctgtttggtgcaacggtcggattcccgggattcaaactggccaccatgcctggcttccttctggttcaagcctgcaataaggtccctcttctgtgctgtcttcctgaagccatctgtggagtcaagcagtcatggctcagggacactctgaagtacgtcccagcacatctgcatggagcatcacgaggaacgtggatgaatacttaagacccagcctggcctctaaatcggtgctgagcgttttactcagtacacagcttgggaatcatagaaacgatgcggatctgacagagtggctgtggacactgaagcaagccataccagggcggacctggcctttgccgacacgccacacaatcaacccacctctgccccctggggaggatagaaaatccaacaaaatggcgtggatcaataaatccttcccctgatgcaaccattaaaaccgcaataaaaaattaccacagggcggccgctctaaagtatccctcgaggggtccaaacttacccccacccagcttttcttgtacaaagtgggccctacagcgagtcgtattataactctatgaacttgcccgtcgtttttaccaacctcccgacctggggaaaaatggctacctttgggaatccctcgtgaaacgaaaccctcatattcctggtgggcgtggacttaaattgggaccaaagttacccttacgggacatttttacagccccttaacggtttacccacttacaactctctttccaccggtaactcaaacggaggtccaaaacttaagcctgacaatttttggctctttcgctcgcatcttttaacaacgcgctttttcgccttctaaccttgggggaacgcaatgcgaatttttcctctcccacaacctattattaaccgcttcttgtctcacgagagggggggagcatacctctcaccnagagcggatatttgtgcgatactacgattatcgtccgagaccttttgtagtataaagtccactacttcaccgccccgttaaacaaaacaatttcttttccctaacacctataaggtcctcttcccacctccccttcaacaaagagggtgaggaatgattcgccaccagaccttatttctgcttctccaatgggaggggtgaagcgagcncccatttccttcctcccacccacgaattacccaacaccggcaatcaatctacttggggtgggcaccggactcacttcattaattttgcacccacccaattggaccgccacttaccccccatgttatcccaaaaagtattgaataggagatactgcgaacatatgagaaagncccgggtagggctaatccctcccgagttttctaatnnnnnnnnnnnnnnnnnnnnnnnnnnnnnnnnnnnnnnnnnnnnnnnnnnnnnnnnnnnnncacacccagtgtaaaaaatcaattttgcagctcccttaaaaaaaggcaccacctgggcttcccctcttcttgtgtagcaacaacatcatctccaaaaatataaatnnnnnnnnnnnnnnnnnnnngccattattaggggaacccaccggttttgcgtggcgtgtgttggccctctaaacacaattattttttcccctcaaccccattcagacggaagcgaattcaatcccgtggggtgccgcctattacccccccaaataatcgacaacatcagcctattgttttagtctcccaccctcccatcctttattcct

SEQ ID NO: 368054 - DNA, 772 bp, Homo Sapiens
ggcagatcgaggggtgtcgccctaaaccgatctgtcgacgcctgaaggggcctgaggagattgctaggcttctcagctggggcttcttcaccctcatttttgtccgactggctggactgaagaacctggcagaagccttggggctagggtctcctcaggaagatgaaccctcccttgcagaagcgggagctgccccagagagtctgtgtgagatgaagacagaggcccagccttcgacatccttgctggcaaacacctcatggactggcacagtgatttctgacagtgtcccaggaagtcaaacgtgggaagacaagggttcattgacccggtctgcaacatcttggacctcagaggcccaagtttcagcagcccgggttgcagaggctcaggccaggaccagtcagcccaagcaaatttctgtattggatggcgttaactgcctcagccctgaaccagaaacccacgcatgagaaggtgcagatgacagagaagaaagagagtgaggtcctccttgcccgtccgttctggtccagcaaaactgagtatattctggctcaggtgggcttctctatgaagccatcttgtctctggcgctttgcctacctgtggcttaacagtggaggctgcagtttcgctgccatctacatcttcatgctgttcctggtcggggttcctcttctcttcctggagatggcagctggtcagagcatgcgtcagggtggcatgggtgtatggaagatcattgccccctgggattggtggtgtgggg

SEQ ID NO: 368055 - DNA, 1261 bp, Homo Sapiens
ggggtgtcgcccaaaccgatctgtcgacgcctgaaggggcctgaggagattgctaggcttctcagctggggcttcttcaccctcatttttgtccgactggctggactgaagaacctggcagaagccttggggctagggaatgctgaaatacttttaaagctgataaacctagggaaactgcctcctgatgccaagccccctgtcaacctgctttacaacccaacctccatctacaatgcctggctcagtggccttccccagcacatcaaaagcatggttctccgcgaggtgactgagtgcaacatagagactcagtttcttaaggctagcgagggcccaaagtttgcattcctgtcctttgttgaagccatgtccttccttcctccgtctgtcttctggtcttttatcttcttcctgatgttgctggccatggggctgagcagcgcaatagggattatgcagggcatcattactccactccaggacaccttctctttcttcaggaaacatacaaagctgctcatagtgggagtctttttgctcatgttcgtgtgcggcctcttcttcactcgaccttcaggcagctacttcatcagactgctgagtgactactggatagtcttccccatcatcgtcgttgtcgtatttgaaaccatggctgtatcctgggcctatggggccaggaggttccttgcagacctgacgatcctgttgggccaccccatctctcccatctttggttggctgtggccccatctgtgtacaggtgtgctgctaatcatctttgtgaccatgatggttcatctgtggatgaagccgaatcacctacatggccctgggactcaagcaactcaaaagaagggcttcgaacataaccaccggggggcactgctcttgatgatcacccctttttggccattgtcatccccccccatccccgggatacttttgaatactgccggcatacataaggattccccttcaggccccaaaagcgggaaaacggccctttgaaaaggcctcaaaattccctaccccctaaggtccccagcttacaccccaggttaaaagggttccaaaagggaagaaatttcttacaagttggatggaaacaaagtaccccttccaccttggaaagggggaacctccccaaacctcccttaaatttggggttcccaaaaaacaatatccctcttaaaaaagaaccccacaataaacacctctcttatattaacacctttgcaaaacgggggtatctccc

SEQ ID NO: 368056 - DNA, 1005 bp, Homo Sapiens
atggtctcctgggcagtcctccccgctgggctgcacggacaggattggggctggtgcctctcaagttgtgtcattcaggcaccagacaccctctcctcggccggacactgctgccccggccccaggctttggcctgcagggctctgggccaacctccccgcatcagtgtggtctctgcttgcctaccccacaccccccaggcctgccggggccagtctggggcaggaagggaatgtgctcaaggctgatgcccaggatctggtcaaatctgataaatttctccctcaggtcctaaatccagctccttcccctgccctgtgccaagaaggggggtgagccctggggagacccctccctccccagcccagccctcagggggtcctgcatggccccttcccgccgtgctcagggcctcaccgagcagcttggcctgggtcccttctcctggcgcttggtctcggcgtagcctccatctcgtcattttccaaccccacttcctcccggcctccaagggggttctgagctggctgcttctccgggacagggctcctggcccagcgtttgcagggtgggtccccgctcctttctgaggccaggctggagacagatcttgtggaaaggcaagttcaggcccctctgggggccctggcgctgtggctggaccgtccccagcagggtgaggcccacccacaggagtcccagggctccacacagggctgcagggggcaggactctggggcagcagctggcccctacgtccatcctcggagctgtcgccccgaaggctcccggccagcctgggtcagggtgtgacggcagaagacaccgtgcgagagtccactgtgtgcccagcatgggtggccgcctggagcctcctgccctgtcctgccctgaggcgtcagcaggatcaggccaagctgttcctggcccggggcaggctccagagcgctggtggtgggtgggacggagtgtgtctgtatcccaaaattccgaccagtaccagcg

SEQ ID NO: 368057 - DNA, 1065 bp, Homo Sapiens
  misc_feature (380)..(400): n is a, c, g, or t
  misc_feature (971)..(971): n is a, c, g, or t
cctgggtggcgaattcggcacgaggcgagtgtgccgagaacacgaaatgtgccctgggctgcagccaagacccagcaaagcccagcaaagcccagcaaatcccagcaaaggtcaagtctggccaagtctgtgaagaaaccaagacgcagagaggccaagccccttgccttgggtcacacatgccaaaggatggcagagccagaactcacaaccagatccagaggcaacagggacatggccacctgggacgaaaaggcagtcacccgcagggccaaggtggctcccgctgagaggatgagcaagttcttaaggcacttcacggtcgtgggagacgactaccatgcctggaacatcaactacaagaaatgggagaatgaacnnnnnnnnnnnnnnnnnnnnncagccaccaaccacaccagtctcaggcgaggaaggcagagctgcagcccctgacgttgcccctgcccctggccccgcacccaggaccccccttgacttcaggggcatgttgaggaaactgttcagctcccacaggtttcaggtcatcatcatctgcttggtggttctggatgccctcctggtgcttgctgagctcatcctggacctgaagatcatccagcccgacaagaataactatgctgccatggtattccactacatgagcatcaccatcttgggcttattaatgatggagatcatctttaaattatttgtcttccgcctggaagtctttcaccacaagtttgagatcctggatgccgtcgttggtggtggtctcattcatcctcgacattgtccttcctgttccaggagcaccaagtttgagcgctctgggcctgctgattctgctccggctgtggcggggtggcccggatcatcaatgggattatcatctcagttaagaacacgttcagaacggcaactcttaaggttaaaaacagatgaatggtacattgggccgccaagattcnacacctttgagtttcagctgcttcttgaaaaggaaccagaaaattgaaagactttaacaaactattgcgaccgcatgggacctttcctgggtgg

SEQ ID NO: 368058 - DNA, 754 bp, Homo Sapiens
  misc_feature (247)..(247): n is a, c, g, or t
  misc_feature (335)..(335): n is a, c, g, or t
  misc_feature (551)..(551): n is a, c, g, or t
caagttaccacacaatgggtccacaggttccaccccactgctgaggaattctcactccaactctctaatttcagaatgcatggatagtgaagctgagaccgtcatgcagctccgaaatgagttaagagacaaggagatgaagctgacagatatccgcttagaagctctcagttctgcccaccagctggaccagctccgggaggccatgaacaggatgcagagtgaaatagagaagctgaaagctgangaatgatcggctgaagtcagagtctcaaggcagtggctgcagccggggctccttcccaagtgtccatctctgcctccccgaggcagtnccatgggcctctcccagcacagcttgaacctcactgagtcaaccagcctggacatgttgctggatgacactggtgaatgctcggctcggaaggaaggaggcaggcatgttaagatagttgtcagctttcaggaggaaatgaagtggaagggaggattccagaccacaccttcttttcttattgggctgcattggagttagtgggcaagacgaagtngggatgtgctcgatgggggtggttagacggctgttcaaagaatacatcattcatgtcgacccagtgagtcagctagggctgaattcagacagcgttcttggctacagcattggagaaatcaagcgcagcaacacttccgaaacaccggagctgcttccttgtggctatctggttggagagaacacgaccatctcagtgactgt

SEQ ID NO: 368059 - DNA, 841 bp, Homo Sapiens
  misc_feature (79)..(79): n is a, c, g, or t
cggacagtcgtcccggacactggagtgccgtaatcgcggtgggtgtactctccggcgagggggcaaaaccccgggtttncggtagtctcggctcgagtaccgtctctggacgagtagccctcatcccgcgggcccaggtagggtcgcggcgcgggggcagcggctcccgggcgcggtgggcctgagtagccgtctcgcccccgcacggccagggccctcccgcgcattccaccgccgctgctgcgagccgggcccgacggcgcggccctcttggggggtgggccgaccctgcgcggcggcggcccacgcttcatgggcatcggggccctggagggccgcaggtcgaaatccgccgcgtagccgccgtcatcatcgggcccgccccgggatggggaacgccgcgggccgccgccacccccgcgggttccgcgcaggaacctcgggcgaccgcggctgcggggaggcggcgggccccgccggctgctctcgaacgccggtttggtggcctgggccaccttgatggccttaccatccagggacttgccgttcatgtctctggcggcggccttggcgtctgcggggctttcaaaggtgacgaacgcgaagcccctcgacttgttggtttctcggtctttcatcaggagcacctcgacgatgcggccatacttgccaaactcggcttcgagggctttctcgtcggtttcgaggttgaggcccccaatgaacagcttccccgggcgatccgcttcaaccatgtttgccggtcgaacggtcggtcagtgccggtgggaggcggtgaggcggcgccagtcgcagccttcgagctcgctcgtcgagggcg

SEQ ID NO: 368060 - DNA, 986 bp, Homo Sapiens
gggtccggaattcccgggatggacgcggcctcgggggagccctaccgggacggagccgcggggcctgcgacttcccccggagctggcctgagggattctcctgtccatggctgccaccaaaactgcgagttatgatgaacatttcaggccagaaaagttaagagaatggccggagcccgagtccgtttctttaatggaggtattagctagagaagacattgatgaagcagtatgtgcaatattatttaaagaaaattccattgtgaaggttacagtcccaccatttgttgatcctctgtttcaaagacagcaagaggtggatgaagagaggagaactggtcttcagtgtgagacaggaaaacgacattccataaaagaacttgaagaaatagagaaggccaggctgcatgccagctcgccctacttcactttcacttcacactgtgtgattccaaaagagtggcataaagcctctgcaagagccaggagtaaaacttacaaatacagtcctgaaaagctcatctatgcagacaagaaacagaaaagaaaagagaaaaagacggccgacctaagtcaggctgcgtttgaaaggcagttcctttcctcaaagctcagccagaagaacaaagtgggtgaaagaaagggtctggtgagcagaggcctggggcggggctggcatgcagggctttgcagcacccacgagcagcacatactggttccagaatgagccaccgccacagccctccctgtcagacaggcacccaagggcggaggaggcatggcccaagaagaagggtgtgacgaggaggagggagaaatggcggtggctcaggctcaagcactgcagctctgacagggcccctcgggcgggaagccttgcatgaaggaactcagacaggggtcaatgtgggacctggaccccactttccggagacatcctggcctttcgaaggtgaaggccaacctgggcaacaggggctttcccc

SEQ ID NO: 368061 - DNA, 1029 bp, Homo Sapiens
gaattatgcccgaggtggtgcaatgacttgtgtaagcgccacaaatgcgccaatggcccaggaggagaacgtgacagttagtaatctcataggcagtgccagtcactcctttgggacatgtgtgcccagtggctccaggatcgtttaatcggttcctaatatcagagtttcagatcccttcaagagggacaacccgctatggttcactccactccaacacaggaacactttgagtctccaatgctctccgaggatcccatccatggcaagctttcagaatggataccaagcttttgtccaatcaagaaacgaaacgagcagtatccagattacagccgcttccaataatacggtttttgggaaatgcactcaacttccaagctacataagttaagatatccactggattggaaacaataatcagtttgcagtgggggctgtactggacaatactggaaatcattaacttgaagatggccacatttcgctggactaaattaaggcgcgtttctcccttttcttggcgtgcacctgctgtgataatcactaggttggagtttgctgtgacaaagtaatctttgctacaaacaatatttggcattttcgtgaaagagctgccatgttgaagatccatcgtctcacccttcagtttgtcttcatcaagatccacaagggcaagttcatcactcaagccttttaataagatgctgatagcgcaggccatgcccaccgatccagttcctatgatggagaccttactgtgatgaacgggcttctcggaagtgaaacgctcaataagctcactcttcacagtcgccatcttgctcacgggtgtgaagagccaggtgccgttgagcgggatgcgcgttgcttgacgcagacacagggccatccccaggcataggaaattcgctcccaccgagctcactctctggctggcccgcacaacaggcacagtccaactcatggctgctcactgaagaagtggagagagagaatggaaaaaagctgctgatccgaacgttgaga

SEQ ID NO: 368062 - DNA, 1069 bp, Homo Sapiens
  misc_feature (1026)..(1026): n is a, c, g, or t
cggcagccaccccagagacgacattccattgaaaaggaaacgcctactaacgtgaggcagttcctgccgccttccaggcagagttcccgctctcttgaggaattctgctacccagtggaatgcctcgctcttactgtggaagaagtgatgcatattcgccaggtcctggtgaaggcagagctggaaaaataccaacagtataaagacatctacaccgccttgaaaaaaggaaagctctgcttttgttgccgaaccaggaggttttccttcttcacttggtcttatacctgtcagttctgtaagaggccggtgtgctcacagtgttgcaaaaagatgcggctgccctccaaaccatactccactcttcctatcttttcattgggaccttctgctctgcaaagaggggaaagtagtatgaggtcagaaaaaccctccactgcccatcatcggccacttcggagcattgccaggttctcctcaaaatctaagtctatggacaaatcagatgaagaactccagtttcccaaagagttgatggaggactggagcaccatggaggtgtgtgtggactgcaagaagttcatttcggaaatcatcagttcaagccggcgcagtctggtgttggccaacaaaagggcccgattgaaaaggaaaacgcagtctttctacatgtcctcgccaggcccctcggagtactgcccttcagagaggacgatcagtgagatctgagcctcgtgcctttcagctgcttttgtgctacgagtcagcgtccgtgcgcgaggacactgagccgggctggctctcctttctgtggttttatttaatgggcttgaatttgcattagatcagatttttgccgcatcacattgttccacagactgaatgctgtgttcgtatcgattgatgaaacgtgacaggtccgccaatttgcttcgttttgcacttgaggaggagggacaacagttttggaaactttactttttgttgttgttgtgtgggcttttgggaaggccagttaggctactntcccttagtttccagttcttttaactgttcccccgaataatct

SEQ ID NO: 368063 - DNA, 822 bp, Homo Sapiens
cttcgcccccggcgcgcagccttcgcccgccggaatcgctgccttatccaccagcgggatgcttacctcgcccgccctctcgggtcaggcgggcccgggaggatgggagggtggctgctgagcgggagccgccacgtcttccacccgacatattgcctagagtttgctgtgacttagatcttgattcagagatggagaaatcaggcccatcttctaccatctctgagcagcagctgcagaggcaagagggatggattaacaccaaaacagacttggctgagcagagtctcatttcatctgagaaatggcttcaactgcatgggcttaagagcaacaaattgaccttgaaacagattttgtcacagatcggattcccacattgtgaagattatgtggcgtctctggggagacctgtggcttctcggtatgctgatggtctgtttccacagctctacagagcagaagatggcagagtatacaatctgacagctaaatcagaactgatttatcagtttgtggaacatttaacacaagctgtggagagctacaagcagcgaatggactggctcaccagcaagagccggcagatttttggtgtcatcttggaacagtgcgtcaccatagtgctggattttggcggcattctggagggggagcttgatctgtgccgagaggctctaacaatggttctccaggagcaggtggctcacataaccgagttcaatatcatacgggtttctcaagagcctgtgaagtggcacggaaaatgctactcctgtgaccgaacagtccatagctactgccatcagtggggttgagaac

SEQ ID NO: 368064 - DNA, 1126 bp, Homo Sapiens
gcccagtttcccagaggccccctccaatttttccaaaagaggggggttgggccatagggggccaaagcggtgggttctctgtgaaaagggggggtttggtgaaaaatcccggaattttggggggggtcccattttcatggttggggggtccaaaacaaggcgctttagaggggcattaaaaggaaggactgggtttggcaattccctcactggttctttggaccttagtccatttcattcttaaccattggttccatgaaagtacctcaggcatgcatttagggcccagggcgaccctttgggaaggcaaaattgaaaatgtggctgctttctatttggggggtcatgagaaatccactttaaaaatggcccaaaatacagcatcttcctgtttgacattgagctcatctttctcaatgatatccttaagttcagtgaccgagagctctaaaaattctgccgagactttcaccatctcctcaaagttgtgcagtatgaacatgtaggccttctgcctcagctcaggacagtagtagtagtccgtgaacttacagatgccgatacaattatccaagcacagctctgacttgaggaactcgcagcaacccctgacgatacccatgatgttaaactggtctgcagcagcaagcagtttctccacattgtccggtgtgataggcacggtccgggtgtatgcatactcaatgattagcttcatcatgtcaggagaaatgccagggatgttgtataccttcttttcagtgttgttccagccacttgtaaacaaagctctaaagtaggaactgcagctacagaggatgttcttatgggcactgaactcaaagccattgaccttgatgaccacgtcgcagagcttgccctctagtctaagctcgttgaagatctcacaggccatcgcactcatcttcctctccatgtgaggctggtggaaacgtgtggaggccgccgcgctctccatctccatggcaccctgggacagcggagagaggctgctttcctagggtgtcggggagggttgtggggggcccctttagccagctgtcgctccttttccctacgtacatcttttgtatagggtctatcaggcaacccatcccgggaattc

SEQ ID NO: 368065 - DNA, 1249 bp, Homo Sapiens
  misc_feature (252)..(252): n is a, c, g, or t
aaatcaaaactttttcttcaaattctgttaaggggggattaaataggcttttctgccccagtttcaaggtaaataaattccggggcttaaatacctttaaaccaccaagggggggaaaaggaagggaaaaggccctttcttagccattttggtttagtgttcgcttaggtaggaaatgtcatatatgcaggaattagttaaattgaatctaaaatggagtggtttaataatttttcttctgtatatctttangccttcatatgtttataaaatgatcaactgaatatgtatacagctatatgaatacacatatatatatgggaaaaggaaaacaagtggaaaagtattgtcttaaagagaagactgcctataacaaaggtcgtattttccttttaaaactatttgcaagtaatttactaatgccttgaaaggtaaagtactactgactgatttaaagtcttcattttatcagaaacaaaggaatataagctgctttgcataataaactggcactacagggtaattttttaaaaaaggaagccataacaaaccaaaacaaacctttatttttgggttgaggtataccttttcagttttttaaatctctgacaggaaaaacagagatcattttataatttttataacagctggtttattagaattaaatgcctctctcaaaataatttaaattcttggtctgacatgagtaatctatacagaaaatccttaaaattggcttgagttaataagccagatttaaacctggatctcctccttcagcactgctcttttgccagtcaacttcttactgtcctttgcttgcaaatatataaataacctgatactcttagtttagtaatttattaatataaatttattcggtatgaacattttagctctgcttgattagatgaaacaggcacacatgctttagctgagaaattccattttctggttctatgtaaagcaacatctaaagcagcagagaggggaaacagttatattttcaaaaatagttaagccagactgtttcctagagatacttcatttatttttcattttcagatactactggctatttttggtagggctacacattaatactgaccagtttagccttcctgactgttaaactattccacaatgaacctgccttcacactgcagacattgtggagatcctttaacatacacatattctaaaatatatgctcaaagtaaaaagatccaaattcacaagagtatgaaat

SEQ ID NO: 368066 - DNA, 859 bp, Homo Sapiens
ctggtgggtactacaggccctattccaggccctatggcctgtggaacctcaccacgggggggagggctgggccagacggagacatcacctgtggtgtcagccccatggatgagacagagtggatacacagacatcccaaggctgaggacctaagggttgggctcatcagctgggcaggaacctacctcacctttgaggcatgcaagaatacagtcactgcaactgcgaagagtttgggcaggagacagacctgggagatcttggtgagcaatgagcatgagacacaggccgtggtgcgactaaagagcgtgcagggcctctacctgctgtgtgagtgtgatggcaccgtgtgttatggccgcccaaggaccagccaccatgggtgctttctactgcgtttccaccggaacagcaagtggaccctccagtgcctaatctctggtcgttatttggagtccaatggcaaggacgtgttttgcacttcccacgtcctctcagcttaccacatgtggaccccccgaacagccctccatgtccacgtgatcctctacagccccatccaccgctgctatgcccgggctgaccccactatgggccgcatctgggtggacgcagcaagttccctgcctggaggagtgtggcttcctgttgcatttccagagatggatgctaacaactggacgacctctacacaccacttcttgtcccatgtaagaccggcttgttctccccaaacctcatcacagacagcttttcacatgcaagtgcggcctgggagggctgtgggcactgtgtgatggagaaggaggcctgttatatcaacagggacgcatctggtctggggcatgggctgcaaccc

SEQ ID NO: 368067 - DNA, 860 bp, Homo Sapiens
ctgtggtactacaggcctattccaggcctatggctgtggaaactcaccacggtgggagggctgggcagacggagacatcacctgtggtgtcagccccatggatgagacagagtggatacacagacatcccaaggctgaggacctaagggttgggctcatcagctgggcaggaacctacctcacctttgaggcatgcaagaatacagtcactgcaactgcgaagagtttgggcaggagacagacctgggagatcttggtgagcaatgagcatgagaacacaggccgtggtgcgactaaagagcgtgcagggcctctacctgctgtgtgagtgtgatggcaccgtgtgttatggccgcccaaggaccagccaccatgggtgctttctactgcgtttccaccggaacagcaagtggaccctccagtgcctaatctctggtcgttatttggagtccaatggcaaggacgtgttgtgcacttcccacgtcctctcagcttaccacatgtggaccccccgacaagccctccatgtccacgtgatcctctacagccccatccaccgctgctatgccccgggctgaacccactatgggccgcatctgggtggacgcaggcagttccctgcctggaggagtgtggcttcctgttgcattttccgagatggatgctaccacctggagaactctacacaccacttcttgtcccatgtagaccggctgttctcccaacctcatcacagacagcttttcacatgcaagtgcggcctggagggcttgtggccactgtgtgatggacgaaggagggctgttatatccacagggcaccgcatctgctcttgggcatggctgaacccatgaagggta

SEQ ID NO: 368068 - DNA, 771 bp, Homo Sapiens
ggagccctggcgggcacttcctaccgtacgaggcgcaggtgggagacttccgccctcgcgggactggctagggcgtttgaccgccggcggtgaaggggaggcggtgggcgtcttggagaacagagcgagatggagaagcgaggccgaggcgtgaagtcgagccccatccagaccccgaaccagacccctcagcaggctccggtgacgcctaggaaagaaaggaggcctagcatgttcgagaaggaggcagtgagtgcggagactgctaggggcccgagacggctatgtccgaccgtttaagtgaaatcgctccccagtgggccccgctcccgtcaccacccccagagccaaggaggcagcatctcccttttgtgtttcttttttccccagatgcgaaattgaagcctgagactgagttgggcagtcccctttggacttgagtgctaaagttttcttgttttttaattagggccatagaaccctacataagtcgattggaagggtggttacaagatcttcttttcaaatttactcagcttgcggatttcctgagagtactctgagtattattgctttgtactaaaacacagtatgttagtgtatttagtgccattataagcagttttgctagcgaaaaatgagtgtgttgtattaaaaaaataatttgataaaccaggcagaatagtgccatgttatgggtttttaaaacatcagcagtctggatattttgaagaatgtacaggagaaaaaaacttaagttgaaaataccct

SEQ ID NO: 368069 - DNA, 1069 bp, Homo Sapiens
  misc_feature (719)..(727): n is a, c, g, or t
  misc_feature (978)..(978): n is a, c, g, or t
  misc_feature (983)..(983): n is a, c, g, or t
  misc_feature (1042)..(1042): n is a, c, g, or t
ttcccgggatcgcaccggcctcacagcccggcccctgccctgcaccaggccactgccctgttggtgaggagggtcggaggggcgacctccctgccccctgctccaagctccccacccccacctggaacctgccggcaggaagcctggccctggagagttgtcacggcccctccccagatgcccggcccacgagaggccaatggggagcagccaggaggagggactccggtgtcagccaagccagccagaccacgacgcagatggacactgtgggccggacctggagggggcagaaagagcctctgccacacccggaccccctgggctcctgaacagccaccggcctgcagactcggatgacactaacgccgccgggccctcagctgccctcctggaggggctcctgctggggggtgggaagccatcgccccacagcacccggccggggcccttcttctacattggaggcagcaacggggccacaatcatcagctcctactgcaaaagcaagggctggcagcgcatccatgacagccgccgggacgactacacgctgaagtggtgtgaggtcaagagccgagacagctacggcagcttccgggaaggagagcagctgctgtaccagcttcccaacaacaagctcctcaccaccaagatcgggctgctcagcacccttcggggacgggcacgggccatgagcaaggccagcaagtgtgccnnnnnnnnntccagggccaggctgggaaaaggacgcagcagcgcccggccctggaggacctccccgtggacaagcccaggatacctcagggcacagaggggcctgaaaaatggaaagagtttttcccagagaacctaccgcctggaacctcaaaaacgagagaggaggcctttttcaccttgttttgatgaaaccccagatatggatctgcaaggccacagcctccaaccaggggcaaaggcatcttcctgctccgaaanccagnaggaagttcccgccctggcaggccagacccggaaccatggaggacgaccccatcaccancagaaagccgttccggggccccctagg

SEQ ID NO: 368070 - DNA, 1056 bp, Homo Sapiens
tggaccggtccggaattcccgggatccctgccctgcaccaggccactgccctgttggtgaggagggtcggaggggcgacctccctgccccctgctccaagctccccacccccacctggaacctgccggcaggaagcctggccctggagagttgtcacggcccctccccagatgcccggcccacgagaggccaatggggagcagccaggaggagggactccggtgtcagccaagccagccagaccacgacgcagatggacactgtgggccggacctggagggggcagaaagagcctctgccacacccggaccccctgggctcctgaacagccaccggcctgcagactcggatgacactaacgccgccgggccctcagctgccctcctggaggggctcctgctggggggtgggaagccatcgccccacagcacccggccggggcccttcttctacattggaggcagcaacggggccacaatcatcagctcctactgcaaaagcaagggctggcagcgcatccatgacagccgccgggacgactacacgctgaagtggtgtgaggtcaagagccgagacagctacggcagcttccgggaaggagagcagctgctgtaccagcttcccaacaacaatgctcctcaccaccaagatcgggctgctcagcacccttcggggacgggcacgggccatgagcaaggccagcaaggtgccggggggggtccaggccaggctggaaaaggacgcagcagcgcccgccctggaggactcccgtggacagcccaggatacctcaggccacagagggtcctgtagaatggaagagtttttcccagagacctaccgcctggacctcaaacacgagagagaggccttttttcaccttggttgatgaaaccccagatatggatctgcaaggcccacaggcctcaaccaggggcaaaggcattcttcctgctccggaaacccaggaggaagttgcccgccctgcatgccaagaccccgggagcatggagggacgacccccatcaccccagaaggccgtttccgggggccttcg

SEQ ID NO: 368071 - DNA, 1087 bp, Homo Sapiens
ccggggggcccaaaggaaaagttcccaggttgggggtggggggtccaaggccaattgagcccggttaggaggccccccgttcaaacctttttttcccgttccccaagaaaggcgggttcctggaagtaccttttgccaccacccggcgccggaagccccccgaaacgggcgtcttgtgggggaatggggtcgtccctccatgctccggggtcttggcctgcaggggcggcaacttcctccttggttcccggagcagaaagatgcctttgccctggtggagggctgtgggcttgcagatccatatctgggtttcatcaaacaaggtgaaaaaggcctctctctcgtgtttgaggtccaggcggtaggtctctgggaaaaactcttccattctcaggaccctctgtggcctgaggtatcctgggcttgtccacgggaggtcctccaggccgggcgctgctgcgtccttttccagcctggcctggaccccccccggcaccttgctggccttgctcatggcccgtgcccgtccccgaagggtgctgagcagcccgatcttggtggtgaggagcttgttgttgggaagctggtacagcagctgctctccttcccggaagctgccgtagctgtctcggctcttgacctcacaccacttcagcgtgtagtcgtcccggcggctgtcatggatgcgctgccagcccttgcttttgcagtaggagctgatgattgtggccccgttgctgcctccaatgtagaagaagggccccggccgggtgctgtggggcgatggcttcccaccccccagcaggagcccctccaggagggcagctgagggcccggcggcgttagtgtcatccgagtctgcaggccggtggctgttcaggagcccagggggtccgggtgtggcagaggctctttctgccccctccaggtccggcccacagtgtccatctgcgtcgtggtctggctggcttggctgacaccggagtccctcctcctggctgctccccattggcctctcgtgggccgggccaacagggcagtggcctggtgcagggcaggggccgggcatcccgggaattccggaccc

SEQ ID NO: 368072 - DNA, 1249 bp, Homo Sapiens
  misc_feature (709)..(794): n is a, c, g, or t
  misc_feature (848)..(883): n is a, c, g, or t
  misc_feature (1053)..(1053): n is a, c, g, or t
  misc_feature (1219)..(1219): n is a, c, g, or t
tggcgaattccggacgaggaacagaggcggctgcgggagccctggcctccagtgcaaaggggccccctccgcctcatcctcccagctgagcgtgtccagtcaagcctccaccgggagcacccagcttcagctgcacggtctcctgagcaacatcagcagcaaggagggcacctatgccaagctggggggactctacacccagtccctggcccgccttgtagccaaatgtgaggacctcttcatgggcggccagaaaaaggagctccacttcaatgagaataactggtcgctcttcaagctgacttgtaacaagccctgctgtgactcgggggatgccatttattactgtgccacctgcttctgaggaccccggcagcacctatgctgtgaaaatctgcaaagcccctgagcccaaaacagtctcctactgcagcccgtccgtgcccgagcactttaacatccagcaggactgcgggcctactcccccccttcaggactgtcaaccaagaaacagaatgtcacgacgcacaccactgtaccctgcgttctcccccctaataacacccccactttctctcaattccccgttccgatgactccctcttcccccctccgacgccgtccccactgtaacaccccgtattctactaccccccaatccctcccccgccctccacacccatagagtcgtcttttccgccatcctctnnnnnnnnnnnnnnnnnnnnnnnnnnnnnnnnnnnnnnnnnnnnnnnnnnnnnnnnnnnnnnnnnnnnnnnnnnnnnnnnnnnnnnaggctattcattccgatacatacccaattaccccacatatagccacctcacagnnnnnnnnnnnnnnnnnnnnnnnnnnnnnnnnnnnntccgtaacaccaccgcgccccgcataatcattctatcccacctaaatgaacataccccaccgccccatgctcgcacacctctctaaccacacaccacctgatttacatacctcggatcacctattatgcgtggccccacgaatgatcgacaaacaccctacacatcaaanagcgctaaaactgtatgcccttgcacctctcagatgacagtttttccgcccgctacgctcactctgttcgcctcgctggcgtctactagacccccacccaccgctataatcttatcccgcgaacacccaccgcctgaaagaacagctccccacaaaccccgccccnacttctcaccttctcccacactatttgcag

SEQ ID NO: 368073 - DNA, 1145 bp, Homo Sapiens
gggtccggaattcccgggatttagcaggtctttctgcagggctgagctatcgctagggaacccacggtgactgaatcaaagggaagaaagacccaagacctggatctcccttttacatggaccctaaagcaaaggaaaatggcaaatgcacgacagcggcctcctgaacatcaccaaggtatccttctcagaccgaggtaaatacacgtgtgtggcttctaacatctacggcaccgtgaacaacacggtgaccttgcgcgtcatcttcacttctggagacatgggtgtctactacatggtcgtgtgcctggtggccttcaccatcgtcatggtcctcaatatcacccgcctgtgcatgatgagcagccatctaaagaagactgagaaggccatcaatgagttctttaggaccgaaggtgcagagaagctgcagaaggcatttgagatcgccaagcgcatccccatcatcacctccgccaaaactctagagcttgccaaagtcacccagttcaaaaccatggagttcgcccgctacatcgaagagcttgccaggagcgtgcctctgccgcctctcattatgaactgcaggactatcatggaggagattatggaggtggttgggctggaggagcaggggcagaattttgtgaggcatactccagagggccaggaggccgcagacagggatgaggtctacacaatccccaactctctgaagcggagcgactcccctgccgctgactcggacgcctcatcgctgcacgagcaacctcagcaaaattgccatcaaggtgtcagttcaccccgcagttcaaaaaagagcatacagatgaccaagaggggtggacagtttggaagtcaaaaatgtagaaggagacagaactgtcgggcggaaaattccccccaaactgcagaaaccttctaccgatgtcaccgtcccaccgagctaacatcctgaagagccaaccacctggtggaggtaccaaataagggtactgccgcccggcttacctgggaagccacaaagcccgccagggaccctgtgacaaaaaccccgtgctttattttaccaaagccttgttttaataccaaccccccaaaaaagttttgccatattcagaaaaatccggggggtgtgctctcct

SEQ ID NO: 368074 - DNA, 1150 bp, Homo Sapiens
  misc_feature (838)..(838): n is a, c, g, or t
aagtgctggtacggcccggatttatgggatgtatcatggtgccgggcggcatcatgaagtctctaaagaaggattcccgcctcagaataactccgaccatgattattatgaggcctcatgagaatgtcaacagaaaagaagcgggcaaagggacctgaacaacccacacccacaattcaggaagagcctgaacctgttagcaatgtcctacaaggagatgacattcttgccttggccattaagaaggaagacttgaaggagcaacacattcctcgccttactgaaaaggaagataaacgtgtcatcacccagaaatttatcatccgtaaactcaaacccatggatcctaggaggaaggtctgccaccttgtagcacgtcctgcgaatcctgatgaagccacaaagcctctggactactccggtcccggtgacagcttcgatggcagtgaccagatcctgccccaccacatcttggggagtctccaggattttaagagaattgcacttgctcgagggaacacccagctggctgagcggatacctacctcaccctgtctgatgaccctcatctctgctgaaggagagtcaaagcaaaaagccccaaaagaagagaagagacctccctgggccccacctcctcagcacaactttctgaaaaactggcagcgtaacacagccctgcggaagaagcagcaggaagccctcagcgaacacctaaagaagccagtgagtgagctgctcatgcacaccggggagacctacagacggatccaggaggagcgggagctcattgactgcacacttccaacccggcgtgatagagctgggagaacagtgngttctggagtcgactgggatacttgggagatgagatgacaggtctggtcatgaccaagacaaaaactcagcgtgggctcatggagcccatcactcacatcaagaagcccccactccatccgcggtggagacaggattaccagcccagaggggacgcttcataccgctaaaccctgggatcggagtctggtttctgatctacccgacgccaaggagctgcagaaaattcatgggaaaaaactggtatttcacccacccaagaataatggatggcccctggaaagggggttggggcaaaggggtgggcccccta

SEQ ID NO: 368075 - DNA, 1808 bp, Homo Sapiens
ccgtctcctgtgctcaagcccagtgctcccggtgggtcaggtctccggaatgcgtaaacaaaagcaaacagctgagcggcggagggcgcaggcgacagatgtgggtgttccctgagaaatgtgtggcgacttcccggagcagcgggtctgtgaggcaacgatggaagacactgcgctccacagcatagcaggaggccccgccccgtgtggcgccaagtaaaagataattcctcagaagccgtcggccaccggcgcttcgcctcgtcccgcgccaggcccagcctctcccccagaccaccggtgccatgcggattccccaggcgggaccccagctcacgaggcccactggccgaagctccccacaggatagagagccgctcctgcgaggccaagcttccgagaggcggcctgcgcctagcacgcaggcgcggaaagctgggcgccagccttaaactgactcccgccacctgcctcgggccgcgccgtccaccgtttactttcgaacgagcccagcaatagttcccattggccgatgccttgcagttgaatgttgcctgcagactgcgcctgcgctgcgaggctccgcgaggccccgcccggtctgggcacctgaagcccttcggggcagaggagggcggggactcggggcggctctcagcatccgcctggagctcgtggcgctgtgtttccgtgctgtggagttgcctggtccgcttcctccccgcggtgagtctaaggacctttacggatgcggagaaggtggttctgagtcctttttcttttcctgtagcacagtctggtgtgcctagtgtgtttgggctggggagtccttggtgtggcgctgaatgatgtgagtggatgtggcttgtggacctgcactcattccctcttgtcccatacttggagttttggtggagccactttccctgtccctccactgtggagctgcgttcctgtgagggaggaggccctactgtggtggcgaggacatacgactaaacagattctggacggagtttggacgacacgagtgtattcatgcccccaaatcacgacgatcaacaaacgaaattgcacaacttttgacggaacgagttaaccttgtcccatattgttatagtattttttgaacgatcctcgttgtacttgccatgctctcatacatttgtgtaaaaatatgtattggacaaacatttcttcagtgcatctggtaacttttatatatggagacctttacgaattacactcaagtgccctaattgcagaagtatcactgaaattgctccaacttggcattgaatctttaccgtgttcattttgactcaaaggcgtatattgaacagtaccagcaagacagacatccagatcattggtcacctttgccctggaacaatttctgggcaaccctttaaatggctcaccggtgcacttagactaaacacactaaatggtgggcaatggctgtccataagtccacccacatgggtactccatataatagcactcaaacggcatattggcgaaacagcacacccctacacattgctggcactcgttggagacacaagtctaagaatattcaacatatttcaaacgtagcaaacaaaactatttctacaaattcatgatcgaaacgactcacacaataacggcgtacattatcaaaacaaacagtatcaactattttgacactcaaaatcattcacaaagaattacaccttgatagaacaccactaccacatactaaacatcctactctcccaacttatcccacctcttcctatatatgattacaacaacacacatcc

SEQ ID NO: 368076 - DNA, 1843 bp, Homo Sapiens
ccaaataggctaatttccaagtagttccctgttgggaaatggtattttgggggttaaattaattttcccagccccccgttgccatatgtttttaccaaatgtaaaaacccccaagttaaaagttttctttgttaaaatttaagccccccaacagtaatttttgggggaattaccagataggggggaggaaaccaaaacaaaaaaattagaacattcggactcccctgatttaactttcttggtaagcagattcagtagtcttatactggatcagtttggatcccaccataggcattcaccatttctttcaagtcctgaatatacagtatttgcagcagtgagtaaaccgcactagagttcagtgagtaaacccattttctccaagaattcctgaatgttacagtatgaaatccagaaacattatgcaggctttctaaagtaaaaaaatatcccaatgcctgaaaataaacatctttacagttataattctatttcttaaaccttttgggttgtggggtggaaggctgtcatgaaggagaggttatagtttatagataagttattaaaacaactctctctggtacatttataaagattttctttttgcagtaaataatttaggtcaaagtgatgacctcccatgctctaattctgattgattaaaccaacctgaagggtaaactggagactctttggcctgttagtcaataacaaaatggtttgtaaagaaaagaaaaaataaataccatatacaaataagtataactagcattcaagtctgttgcacctgtgtgttttagtgaaagggagaatgaaacttgtatgcatttgacgtgagcaggtattcacacagctaggaaacaggaaaagacggtaggatggcaacatcaccttctattgcacatttagtttaagacagcactttccgttgaaacacaactaccccaatggcatagtcttgtgatgtgggacagctaacgtgatggacgtctgcgcagcaggcccgaggttaggacggccactctgttagtgcaggtgagtgtaggtgcctcctcagctacactatctggaggatgtcacctgagtgcaactgggcaggcccttccccaacacatgatgtaagtcagccacgccaaaaacaaaggcaacccagaaagttaaattacggcagttaaagaaaaatccattccaacagttttaaatttggctgtgcaaaacaggagccttaggctacgtaacaatatccacagttaaaactgtaggttcgtactgtgtgtagtcactctgaaatcagtcctcagggattgagcaggcttttaaatccaaattgaatttctgagttggaaaaagcagtttgggtactgtgaagcatttttctttttaggcccccgctatgagtagctttcattttcgttccactttgtgatccacggttttttttcaaggttatcaatatacttttcatctttgatctctcgctcttctttccggatccttacagcatggtatcggggaacactgtcatcgtacctagagcgtttaaagaatccacacttccatagtataaacactaataaagcaagcatcaagatcccagcgagaatagccactaggatgatccaccaaggtactcccgaatactgagctacagtctttgagggaaacacagtcactcgaacctgagtgcctgcatttggcagcctgatattttcggcagcagcagtcacatcaatgaaggctcgcatgagaatgtccaagtagttcagtttggaatattcctctagaaatgtgctgttccataacctcgagcgcaaataagagacgccttgctgtacagcccgct

SEQ ID NO: 368077 - DNA, 1011 bp, Homo Sapiens
gggcacggttcggaccgcagcttccccagcttgggagacctcatgagccacctcaagaagcagatcctgcgcacggataacatcagcttcatgctaaaacgctgctgccagcccaagccccgagaaatctccaacctgctggtggctactaagaaagcccaggagtggcagcccgtctaccccatgagccagctgagtttcgatcggatcctcaagaaggatctggtgcagggcgagcaccttgggagaggcacgagaacacacatctattctgggaccctgatggattacaaggatgacgaaggaacttctgaagagaagaagataaaagtgatcctcaaagtcttagaccccagccacagggatatttccctggccttcttcgaggcagccagcatgatgagacaggtctcccacaaacacatcgtgtacctctatggcgtctgtgtccgcgacgtggagaatatcatggtggaagagtttgtggaagggggtcctctggatctcttcatgcaccggaaaagcgatgtccttaccacaccatggaaattcaaagttgccaaacagctggccagtgccctgagctacttggaggataaagacctggtccatggaaatgtgtgtactaaaaacctcctcctggcccgtgagggcatcgacagtgagtgtggcccattcatcaagctcagtgaccccggcatcccccattacggtggctgtctaaggcaagaatgcattgaacgaatcccatggattgctcctgagtgtgttgaggactccaagaacctgagtgtggctgctgacaagtggagctttggaaccacgctctgggaaatctgctacaatggcgagatccccttgaaagacaagacgctgattgagaaagagagattctatgaaagccggtgcaggccagtgacaccatcatgtaaggagctggctgacctcatgacccggtgcatgaactatgaccccaatcagaggcctttcttcccgagccatcatgagaga

SEQ ID NO: 368078 - DNA, 876 bp, Homo Sapiens
agatgcccactgacaatttaactgttaacatacccataactgtacatttcagtgtagtatatagctagtgaaggaacattttggtgcgaagcaataaggccttttaactaatcttacatttggcatggatattaatcagactaacagaaagtcatgggaagtttcatccgctctcttttcctgatcactgggcagcacaggttataaccactcttgttttctagctgatcgcttttcaacaaacaggatctatggcctgcgatatgtaaactgaagtgggggttgggaaagaacatagattatagcgtctagaaattcagttcgctggacatctgcagagatctgtgcatcatgctgatattcacatttccaccccaccgttttgggaagtaagagaggaatccacgcatccaggctttcagagatctttatgctgggcttctgctcctaggtttccagctgctttttacatatctgcattgtctgtaggaataagccactttgcaaatagtgagatggatgttacgtcttaatttcttgtccatgtgatgatgaatttttgctcctttagatggtttaattcactctttatatgatgcaattctcttaattctctttgctgctttctttgcacaaagatacttcatgggtcctctactgccgactgtctgggctgcagtgccctggcacatttccttgcagagaaaggacagcaggagtgggcttcctggttccctttctgttttctctgaggccagcaggtgcctggcgtggcctttgcgccccctgctggtcgttctggcagcacacagcctcctgccttgccagtgtgaaacccggtgctgtcttgttccccatccggagaattccggaccg

SEQ ID NO: 368079 - DNA, 1109 bp, Homo Sapiens
  misc_feature (798)..(799): n is a, c, g, or t
  misc_feature (804)..(807): n is a, c, g, or t
  misc_feature (814)..(816): n is a, c, g, or t
  misc_feature (821)..(821): n is a, c, g, or t
  misc_feature (827)..(827): n is a, c, g, or t
  misc_feature (829)..(829): n is a, c, g, or t
  misc_feature (1024)..(1033): n is a, c, g, or t
caggctggtacgccccgagttatgggatggctttggcttctgatagtcatggactcactaggctgctgaggaagatcaataatacctactggaatcagtcatgagaagtcaagcatggaaattgtgaattgtatgtgtggccagaccagtacctccaagtgttcagaagatgtgtgaccagacaaaacacagtaaatgctgcccagcaaaaggcaatcaatgctgcccaccacagcagaaccagtgctgccagtcaaaaggcaatcaatgctgcccaccaaaacagaaccagtgctgccagccaaaaggcagtcaatgctgcccaccaaaacacaatcactgctgccagccaaaacccccatgctgcattcaggccaggtgctgtggtttggagaccaagcctgaagtctcaccccttaacatggagtctgagcccaactcaccgcaaactcaggacaagggctgtcaaacccagcagcagccccatagcccacaaaatgagtccaggccaagcaaatgagagcagaagaagtcaaacaaagaagaagtccctggggccatgcctttcactttgtagggtgggggattactgagagtcaggctagacctgtgtttagagaagcagttttcacagtgactaccatttccacccaatgagaggctcctatttcccatcatagctccctaccctagggaggcctccatctggaaatgggaggatgaagaggctagaatcatctttcctagtgatcctgacatttagacagcacagaaataaagagcaataaaaagaaaaannaaaannnncaaaaannnacaanaccccnancacaaacaaaaaaaggggcggccgctctaaaggatccctcgagggggcccaatttacccgtacccagcttttcttgaacaaaggggcccctatagtgaaccctattataacctaagccctgggccgcccttttacaacctccggaatgggaaaatcgccaccttgggaatctttttgaaggaacctttacttctnnnnnnnnnncaataattggacaaaactccctacagaaattttaagctcctaagggaatattaaaatttttaaggggaaaaagggt

SEQ ID NO: 368080 - DNA, 1017 bp, Homo Sapiens
  misc_feature (242)..(242): n is a, c, g, or t
cggaggctgagtattgcatgccgggcggcatgccggctccgcgtattgggcccccgggcacctgcgtggtgcatggcgctgggagcccccgggcacgctcgtggcggtggcgcggcatcccaccctcgcccggatggcgtccccagaggcggcgttggcccgcttttcgtgctagcgcgttcgcctgtgcgcgcggtgtgccccgaggccccgggtctggttttctgctgccgcagtgcccnctgtgcctggtggctggacgccgtggagtgaccatgccctggcccggctccgagcgctgtccatgcggagcgctgtccactgcgccgggcactgcgggggcccgggccccgaatgccctacccgggcccggcggcgcacacggcagcgaccccgtgcggccagtgctgccgcccgctctccagctttgtgcgctgaccacaatgctgagcagggaagcagcagcttgcaggcccatgtgactggtagctcagtgaccatgcagcccagtgaccggcagccaggtcctcacctgggtcctctcagtgaagccagggtggccgccccagcagacagtgctacagagccaactcctgacaggacaaggtggagcagacacctcgcagtcaacaagacccggcaggaccaggactccccgcacagtctgaccgacttgcgaatcaccaggaggatgatgtggacctggaagccctggtgaacgatatgaatgcatcccctggagagcctgtactcggcctgcagcatgcagtcagacaccggtgcccctcctgcagaatggccagcatgcccgcagccagcctcgggcttcaggccctcctcggtccatccagccacaggtgttcccaaagcagagggtgcagcgctcccagcctgtgcacatcctcgctgtcaggcgcctttcggaggaggacaccagtttaaaaactcttctttgtcgggcatccccaatccctttcctggaactctgttggccctgggaagccccctgtggctcac

SEQ ID NO: 368081 - DNA, 1127 bp, Homo Sapiens
gcagggctgaaacagtctgttgatgtgcagccatgggggacgtcctggaacagttcttcatcctcacagggctgctggtgtgcctggcctgcctggcgaagtgcgtgagattctccagatgtgttttactgaactactggaaagttttgccaaagtctttcttgcggtcaatgggacagtgggcagtgatcactggagcaggcgatggaattgggaaagcgtactcgttcgagctagcaaaacgtggactcaatgttgtccttattagccggacgctggaaaaactagaggccattgccacagagatcgagcggactacagggaggagtgtgaagattatacaagcagattttacaaaagatgacatctacgagcatattaaagaaaaacttgcaggcttagaaattggaattttagtcaacaatgtcggaatgcttccaaaccttctcccaagccatttcctgaacgcaccggatgaaatccagagcctcatccattgtaacatcacctccgtagtcaagatgacacagctaattctgaaacatatggaatcaaggcagaaaggtctcatcctgaacatttcttctgggatagccctgtttccttggcctctctactccatgtactcagcttccaaggcgtttgtgtgcgcattttccaaggccctgcaagaggaatataaagcaaaagaagtcatcatccaggtgctgaccccatatgctgtctcgactgcaatgacaaagtatctaaatacaaatgtgataaccaagactgctgatgagtttgtcaaagagtcattgaattatgtcacaattggaggtgaaacctgtggctggcttgcccatgaaatcttggcgggctttctgagcctgatcccggcctggggccttctacagcggttgccttccaaaggcttgctcctgacacactatgtggcatacctgaagctcaacaccaaggtcaggtagccaggcggtgaggagtccagcacaaccttttcctcaccagtcccatgctggctgaagaggaccagaggagcagaccagcacttcaacctagtccgctgaagatggagggggctggggtcacagaggcatagaatacacattttttgccactttaaaaaa

SEQ ID NO: 368082 - DNA, 863 bp, Homo Sapiens
  misc_feature (683)..(732): n is a, c, g, or t
gggatcaggctcagaaagcccgccaagatttcatgggcaaggcagccacaggtttcacctccaattgtgacataattcaatgactctttgacaactcatcacagtcttggttatcacatttgtatttagatactttgtcattgcagtcgagacagcatatggggtcagcacctggatgatgacttcttttgctttatattcctcttgcagggccttggaaaatgcgcacacaacgccttggaagctgagtacatggagtagagaggccaaggaaacagggctatcccagaagaaatgttcaggatgagacctttctgccttgattccatatgtttcagaattagctgtgtcatcttgactacggaggtgatgttacaatggatgaggctctggatttcatccggtgcgttcaggaaatggcttgggagaaggtttggaagcattccgacattgttgacgatctctgtggcaatggcctctagtttttccagcgtccggctaataagggacaacattgagtccacgttttgctagcgtcgaagcgagtacggctgttcccaatttccatcgcctgctccaatgatcactgcccactgtcccattgaccgcaagaaagactttggcaaaactattccagtagttcagtaaaacacatctggagaatctcacctgcacttcgccannnnnnnnnnnnnnnnnnnnnnnnnnnnnnnnnnnnnnnnnnnnnnnnnngacgtgccccatgggtgcactgcaacagactgtttcaggccctggctcgtggctctctgatgtatgcctcctgggaccacgctgctctggagacctccagatgccccacagagagagcgtcggggatcctc

SEQ ID NO: 368083 - DNA, 743 bp, Homo Sapiens
  misc_feature (20)..(20): n is a, c, g, or t
  misc_feature (23)..(23): n is a, c, g, or t
gcgggaaaaacgtgaggccntgngcacagagatcgagcggcctacagggaggagtgtgaagattatacaagcagattttacaaaagatgacatctacgagcatattaaagaaaaacttgcaggcttagaaattggaattttagtcaacaatgtcggaatgcttccaaaccttctcccaagccatttcctgaacgcaccggatgaaatccagcactcgatccacagtcaagagtaccacttttcacgatatctctaggatatggacatcttcctccttctctgcacatcaaaacttacctgtccattgtcctatgcttctggggtgctgcactctactttataaagggtatcccatcgtcctgtgtaagccccgagtctgctgcaccgggtgataatgccagactgcttgggcgctgctgcacatcctcaccaaactcctgaactcctctctggaccacacatctcctgtgtgggctctgtctcccacactctgtttctggcacaaatctacgtctcttcaagaaagcctcatccattttaacatcacctccgtagtcaagatgacacagctaattctgaaacatatggaatcaaggcagaaaggcctcatcctgaacatttcttctgggatagccctgtttccttggcctctctactccatgtactcagcttccaaggcgtttgtgtgcgcattttccaaggccctgcaagaggaatataaagcaaaaagaagtcatcatcca

SEQ ID NO: 368084 - DNA, 869 bp, Homo Sapiens
agcggggtttccgttaaaatggcgccctggtggccggcggcgcccgcgccttagcctgtcaggagcagggagcttgcggggcgcaggaagggcgcgggccgcggtccctgcgcgtgcggcggcagtggcggctctgcccggaccaccgtgcacggctccgggcgaggatggcgaccccggaccagaagtcgccgaacgttctgctgcagaacctgtgctgcaggatcctgggcaggagcgaagctgatgtagcccagcagttccagtatgctgtgcgggtgattggcagcaacttcgccccaactgttgaaagagatgaatttttagtagctgaaaaaatcaagaaagagcttattcgacaacgaagagaagcagatgctgcattattttcagaactccacagaaaacttcattcacagggagttttgaaaacataaatggtcaatactctacctcttgctgagcctcagtgaggacccacgcaggcagccaagcaaggtttctagctatgctacgatatttgctcaggccttaccaagagatgcccactcaaccccttactactatgccagggcctcagacccttcccctggagctaccaagatcggagtgcccagtcagcccagagctccggcaggcgtgggcagcagtggcatcaggcagcattggccttgtgtgccctcagtggcccagagccttgcgccacaaatctctcctcccaggaacagtctaatcaagctccaggagtaagagattgcccttcgacagcagtggagtcacgactcgcttgactttaacttgcaaatcagcttcttcacagccatacttcaaaagtgtcccagtgcgggtctcgcacatgacaagtccag

SEQ ID NO: 368085 - DNA, 808 bp, Homo Sapiens
agggataccaagctgttcagctctccctgttctgtattattgccgctttcttgcctggtgtgccatccacactattcctccgagtcttcctgcccagcttgacatcaactcttgttcagtcttaatggacggaccctttgaagttcttcctggacttccctgcagcatttgaccctgtggaggtgacaaattagtacttacttagttttctgtctttcactccattgagtgaccctttcccttaccgttttctgtttcttctgccatcttcttaaatgcagcttttaccccttgatgatgccatcattggttctctgtttcttgtcatttactgtgacttcagtcctactggtggccctcaaatcggttactcattcaaccatccagtaaatatttactgcatatgcctactttgtgctccgtcttaaggaacttaagaagacaggcacattctttaccttctagtgaggaagataaatgctgagcaaataatgacaagtgagatcagtgttataaaggacggtagaatgccactgattccagtagggggtgagtatgggtgtcagaaaaagcattctaatacagagacacacgtaacactgagacctgaattccgtatctctcctcggagctgcaaacatatatatagatatctcccttctggaaattttccttgggtacctcaagagcagcatgtccaaaatgtaattttatatctatatatcctctctgtccttcagtgtttgctgttctcaactaatggcaccacagcactcagatgataaagccacacacccttggagttatc

SEQ ID NO: 368086 - DNA, 1414 bp, Homo Sapiens
  misc_feature (45)..(82): n is a, c, g, or t
aagaagatcatatggggacctggagttcaccgcggtggcgggcgnnnnnnnnnnnnnnnnnnnnnnnnnnnnnnnnnnnnnnatcaggccaaatcggccgagctcgaattcgtcgagagcggctggctgcggctcctcagtcggcggcggctgctgctgcctgtggcccgggcggctgggagaagcggagtgttggtgagtgacgcggcggaggtgtagtttgacgcggtgtgttacgtgggggagagaataaaactccagcgagatccgggccgtgaacgaaagcagtgacggaggagcttgtaccaccggtaactaaatgaccatggaatctggagccgagaaccagcagagtggagatgcagctgtaacagaagctgaaaaccaacaaatgacagttcaagcccagccacagattgccacattagcccaggtatctatgccagcagctcatgcaacatcatctgctcccaccgtaactctagtacagctgcccaatgggcagacagttcaagtccatggagtcattcaggcggcccagccatcagttattcagtctccacaagtccaaacagttcagtcttcctgtaaggacttaaaaagacttttctccggaacacagatttcaactattgcagaaagtgaagattcacaggagtcagtggatagtgtaactgattcccaaaagcgaagggaaattctttcaaggaggccttcctacaggaaaattttgaatgacttatcttctgatgcaccaggagtgccaaggattgaagaagagaagtctgaagaggagacttcagcacctgccatcaccactgtaacggtgccaactccaatttaccaaactagcagtggacagtatattgccattacccagggaggagcaatacagctggctaacaatggtaccgatggggtacagggcctgcaaacattaaccatgaccaatgcagcagccactcagccggggtactaccattctacagtatgcacagaccactggatggacagcagaatcttagtgcccaacaaacaagttgttggtcaaggtactcaaaaattgtaaagcaggatgtcagtgaatttgaattctgaacgtcagtttgaagatgagtctacttgaaattttttaatatgaatttaccaatatcaacaggaagacactgaggactatactctatctaggaagatcatccaagctgtgccccacttacctttttagacttaagctgcctctggagacgtacaaacattaccagattcgcacagaaccactagcactattgcccctggagttgtatggcatcctccccagcaattcctacacagctgctgaagaagcagcacgaaagagagaggtcgtctaatgaagaacagggaagcagtcgagagtgtcgtaaaaggagaacga

SEQ ID NO: 368087 - DNA, 716 bp, Homo Sapiens
aagggcccaagtagggaatttctgtgcttattgactcacctcaggagcaaatctctttctcccctaccattgcttttaccctgcaagggattcagtttcctgattataagttctgaggcactggatcctatttcttgagggaggcagagaccaaaacctttgaaatatgagacccactaaacgagcacagaatagagtttggtctgtccctttgttctgtctctgacagtagtagcaagagatgctttatgggaagaacacagtagctgccttcggtgaagtcaatttctaaaggttagggatgtgagcctctttgacttgccctgtaataactcattctggctccatcattcatgtgagctcctctaagcccttctggaacttatttattctttcagtctttattggattccaaaggatagaagcaacccctgagacttgtggttgagttgtgccctcatccatcagctgtggactccaatggtgaagtaatggttctctgtagaaaattatctgctggggttcttttcttggctctgccactagaaagctatgaccctgagtgaagtccttcaatctctctgagcctaggtttcctagcctagaaaacagaagtgggagcatctggcaatgcctagttcatggggtggctgcattctgaaggcagggactgtaccccattcatcattgcatccccagggctgacatggtcccgg

SEQ ID NO: 368088 - DNA, 792 bp, Homo Sapiens
  misc_feature (720)..(720): n is a, c, g, or t
catcaatcaagaggaacttaatccaggttcttctgctcactgggtcagaagcatccgatttcctgtcatcggttgcggttcagccatgttaatactgaaagtataagaatatcataatcccagagtgatataaagacctttccaaggaagatgagatacccggaggctgtgaaggagaagtctgaaggatttgaacgcgttcaaatgaaaacctttggttcagcaaaacaccagaaacaaattcaaaagataaaatacactccggagaagcccattctctcaacgcatctgacagttcacaaagagcaactgcagtccaacttaaaaaataaagaaaatggtaggaaaatgggcaacatgcactgaggcaatatataagaagaaggaatgcgcaattaatcaacaaaagcctgctctttcctaacgagtgaagatacaagcttagtaaatattaaaatttattgaagataaaaatggacacttccggccatatataaaagcattgttggtaagagagtggggtaattgacatgctcctgggaaataatacgcattcagacaacctctaatgagtgaatccactgggggtatccactaggaatagaaaacgagcaccaatgcccaagtttgtggtccagaatttgagcagcgatctaacaaagtagagtctccccctgtgtcatgggccccacttcttaagcaaagaagaatgcctcattntggtaactcacccagataaacagaaattttttttgataaacagagaatactcaagtaagcaaagagaaagag

SEQ ID NO: 368089 - DNA, 839 bp, Homo Sapiens
gctaatacattgaatatttgctccgagttcaatactgtgtcatacatggtcatagctagtaaagccagatggggctcaagtgtggactcattatgtcatcaaggtcatagcatctaaaatattaaagcccttataaagatctgagcagtcaactccaaacatccacatgacaaagtccttcaaatacagatctcattactcttactcatgcaactgctttataaatagtgtgcagatatgtatttatatttgccttaaccttcgaaatctagggacataaatcttgtctttgttaacaataaatcaaaaataaaaatagacaggaatgtgctacacttttccctccacgaacagcagctttcaaggcaaatttcttggtataaagctactaaatgtatattctatgtctttggcctttactatttataaattcagagcaaagttaaaacattagaacgatgggtaggatggatattaagaaatagtcaaggagaaatataggtccaaaatgaggatttcttctcttcagttttctgtgtttcacttgttctgctccttcccaaaatctaaattgagccactggaaggagatatgaagaatcttctatgctttggtagagaagtcacttattattttggatccatttccaccacttcacaatcatttgaaaggccacacgaatctatcactctttgttttcacccagcataaggagagttaaaggtgagacaccaactctacaaggacttgcaaaccggtttcggaggaacgtgtgttttccggccctttcccaccttccgctccttacttctcgtgtgcgcgtcgttgagactcccccc

SEQ ID NO: 368090 - DNA, 695 bp, Homo Sapiens
catacacattctcagtactctgtactcatagcaactgcttatatatagtgtgcagatatgtatgttatatttgccgttaacctgtcgaaatctagggacataaatcttgtctttgttacaaagtatgataaaaaatatttaatagacaggaatttgctacactgtttccctccacgaacagcagctttcaaggcaaaattctttggtataaagctactaaatgtatattctatgtctttggcctttactatttataaattcagagcaaagttaaaacattagaacgatgggtaggatggatattaagaaatagtcaaggagaaatataggtccaaaatgaggatttcttctcttcagttttctgtgtttcacttgttctgctccttcccaaaatctaaattgagccactggaaggagatatgaagaatcttctatgctttggtagagaagtcacttattattttggatccatttccaccacttcacaatcatttgaaaggccacacgaatctatcactctttgttttcacccagcataaggagagttaaaggtgagacaccaacgggcagcggcggagctatggccagggactagacgctgcgtctgaggacgcgtccccagcttgtcgacccggcagaggcggctagtccacaaccataacaaagctcttcccaaaatggctgatcccgggtta

SEQ ID NO: 368091 - DNA, 791 bp, Homo Sapiens
cccgtggcggttgaggggcagtggtggcggcggaagcccaagtcgatgctgatgttgatgctggtggcggctgtgaccatgtggctccgaccgctggtcacagctcagctctgtcgttctcgcacagtgaggacaggaaaagtgtttaatctgatacaggacgttcaaggggaccgcctgtattttcatcctacaacaacacgcttgattaaacatccttgcgagaaaaatatagcactatatctagggaaacaagtttttttcacaatggataactttgagactagtctccttccatttaccatccctacatcaatgcaggtcggcgtaccagaagtgacatcagcacattttgctggttcgttattgctgttagtagtggatcaaaaagtctatatttatgattatgaaaataattcttggagcatgtctttaggtataaaacaccctgttacacatgtctctggtgataattgttgttatactggaagtttgttttgtgtgcatgtcagtaatttggtttttgcatatttccgtggagatcagatatcccagacttatatatattattcaaatactgggggattcagtttttggaagtatcactatgacagacaggcagaaatcattgggtctttaggcggaatcttccactttttttctttgtcacaggttgcgatgcttgtagtgaatcacagggaagggcatgtccaagtactcagatcacccctcaaccggagttcgggctgtcttttgactataatgggactctagacatcctcatcgccccg

SEQ ID NO: 368092 - DNA, 1184 bp, Homo Sapiens
  misc_feature (73)..(73): n is a, c, g, or t
  misc_feature (918)..(948): n is a, c, g, or t
  misc_feature (1047)..(1077): n is a, c, g, or t
gaattctgaccagaaggcagtgaaattcctggcaatttttacatcaatggaggcaaacactggacccatggtncacctgaggcagacacaaccagagcccacccagcccaaggcatctgtgctgttgttgggcccggagccggggatggcctgggatgagacacagcccccaaagatgaaggagatcccagttcgcctcaggttacagacgggcaccccccaggagtccctgcccacctacacccagaccctgagggaactatgtgagtgagggtcctggccaccccacccccaagctggtctttggggggctgtgggaggggcccgctgaaaggagcccaggcccagagcttgcttcctgtggccagtgctggagcaacgccccctgatcacagctgacctggaagtccccagccccaccaggtaccaggtgccgagcccgtccgtacgagagtcctccccacacccccactacagcatcggctgcaagcaccagggccgaggtgtgtgtcccctccctgaggcccaaccaccgggcctgtccctcaccctgggaatgggggcctctgcctctgtgctgaaacccccacggcctgaggggccctccacccttccctgcgttcacctctaggctcaacacctgtaaggaggcctggagacaggagggctagggctgcggcacggccggacattcgcgacactatcgttctgggcgcccaacgcggcttcccttggagcactgctcccagcgggcacctgtcctcccgtcgccggggtcttcctctccttttgcccttcgtccttccattcccccgtctttcccgtttgttcctttccccggccttgcttcctttcctccgccgttttttttaacccatacgcgttctctctcccgcctattccgcgttttttcgccgnnnnnnnnnnnnnnnnnnnnnnnnnnnnnnngactccaacttatttgtcttctttgtaccttttgccacgcttgcgccgctgtccgcgtggcccccgctcctttcgcgctcttttccagtgcgctctttnnnnnnnnnnnnnnnnnnnnnnnnnnnnnnngccgatcgccttttacgcgcgcggcatcccgcttacgcgtgtccggctggggggtggcgcaaagtcctgcttatgcccattgtcgccgctattccctccccgtctcc

SEQ ID NO: 368093 - DNA, 1497 bp, Homo Sapiens
  misc_feature (1068)..(1121): n is a, c, g, or t
  misc_feature (1422)..(1432): n is a, c, g, or t
ggggctgctgtatctttaatgctggggcccaagtaagggcacagatccccccacaaagtggatgcctgctgcatcttcccacagtggcttcacagacccacaagagaagctgatggggagtaaaccctggagtccgaggcccaggcagcagccccgcctagtggtgggccctgattgctgccaggcctgggaccttcccactgccccctccactggagggggtctcctctgcagctcagggactggcacactggcctccagaagggcagctccacagggcagggcctcattatttttcactgccccaagacacagtgcccaacaccccgtcgtataccctggatgaacgaattaattacctggcaccacctcgtctgggctccctgcgcctgacattcacacagagaggcagagtcccgtgcccattaggtctggcatgccccctcctgcaaggggctcaaccccctaccccgacccctccacgtatctttcctaggcagatcacgttgcaatggctcaaacaacattccaccccagcaggacagtgaccccagtccccagctaactctgacctgggagccctcaggcacctgcacttacaggccttgctcacagcttgattgggcacctgaccacacgcccccacaggctctgaccagcagcctatgagggggtttggcaccaagctctgtccaatcaggtaaggctgggcctgaactagccaatcagatcaactctgtcttgggcgtttgaactcagggagggaggcccttgggagcaggtgcttgtggacaaggctccacaagcgttgagccttggaaaggtagacaagcgttgagccactaagcagaggaccttgggttcccaatacaaaaatacctactgctgagagggctgctgaccatttggtcaggattcctgttgcctttatatccaaaataaactcccctttcttgaggttgtctgagtcttgggtctatgccttgaaaaaagctgaattattggacagtctcacctcctgccatagggtcctgaatgtttcagaccacaaggggctccacacctttnnnnnnnnnnnnnnnnnnnnnnnnnnnnnnnnnnnnnnnnnnnnnnnnnnnnnncccccaaatggaaattgtatttgccttctccactttgggaggctcccacttcttgggagggttacattttttaagtcttaatcatttgtgacatatgtatctatacatccgtatcttttaatgatccgtgtgtaccatctttgtgattatttccttaatattttttctttaagcagttcattttcgctgaaatacatttatttaaagaaaaatctttgttactctgtacatgaacaaacccattttcgctataaataaaaggtaacttgtacaaaatacgtaccatgccacccccttttannnnnnnnnnntctatggcttaccccattttcccctctttgcctcccacgttaaccgcaaagccgacacattcgca

SEQ ID NO: 368094 - DNA, 783 bp, Homo Sapiens
cgcgagagtacccctgatgagctacttcgcccacccgcggagcttgcctggagcatcagccaccccaggccgggctccccccactggccttgtctcagctctttaacccggatgcctgtgggcgccgggtgcagacagtggtgctgtatgggacagtgggcacaggcaagagcacgctggtgcgcaagatggttctggactggtgttatgggcggctgccggccttcgagctgctcatccccttctcctgtgaggacctgtcatccctgggccctgccccagcctccctgtgccaacttgtggcccagcgctacacgcccctgaaggaggttctgcccctgatggctgctgctgggtcccacctcctctttgtgctccatggcttagagcatctcaacctcgacttccggctggcaggcacgggactttgtagtgacccggaggaaccgcaggaaccagctgctatcatcgtcaacctgctgcgcaaatacatgctgcctcaggccagcattctggtgaccactcggacctctgccatttggccgtatccccagcaagtacgtgggccgctatggtgagatctgcggtttctctgataccaacctgcagaagctctacttccagctccgcctcaaacagccgtactgcgggtatgccgttggcggttcaggtgtctctgacacaacagctcagcgtgaccacctggtgcagatgctctcccggtaacctggaggggcaccaccagatagccggctgcttctgccgtgtcctatggtgtttgtg

SEQ ID NO: 368095 - DNA, 943 bp, Homo Sapiens
  misc_feature (61)..(158): n is a, c, g, or t
  misc_feature (582)..(641): n is a, c, g, or t
gggactcttggcctgtccctcacatccgatgcaccctttttgtcagattatcaggatgagnnnnnnnnnnnnnnnnnnnnnnnnnnnnnnnnnnnnnnnnnnnnnnnnnnnnnnnnnnnnnnnnnnnnnnnnnnnnnnnnnnnnnnnnnnnnnnnnnntgagccaccgcgctggcctaattaaatgttcttatctaaacttggggaatggaagacatcgtaaaaggagctcaagaacttgataacgtaatcaagcaaggatacttggagaagaaaagcaaagatcatagtttcttttggatcggagtggcagaagcgatggtgtgttgtcagcagaggtctcttctactactatgctaatgagaagagcaagcagcccaaagggaccttcctcattaagggctacggtgtacggatggccccccacctgcgaagagattccaagaaagaatcctgctttgaactgacctcccaggataggcgcagctatgagtttacagctactagtccagcagaagccagagactgggtggatcaaataagtttcttgttaaaggatctgagctccttaaccattccatannnnnnnnnnnnnnnnnnnnnnnnnnnnnnnnnnnnnnnnnnnnnnnnnnnnnnnnnnnntatttatgaagtcttgccagatgaagagcatgatctagaagaggatgagagtggcactcgacgaaaaggagtagactatgccagttactaccagggcctatgggattgccatggtgaccagccagatgaactgtccttccaacggggtgacctcatccgtattctgagcaaggagtataacatgtatggctgggtgggtgggagaactgaacagcctcgttgggattgttccaaggagtattccctgctgaggagagatgacagatatctcctcgctaagatgtcatcatcattgccctgaa

SEQ ID NO: 368096 - DNA, 809 bp, Homo Sapiens
tggcagaatctgttaaactgacaaagcccacgtctccgggtctctgtctcggggagtcgggactattgggtcaccccgggtagtcgagactctagactgagctgtctcggtcactcaggaggcagttggcagggtattcgtggtcagggaggtgacccgtggtcagcagggtcaggccacccagggacaaagggtgctcctgcaccgggccttggagaaggacagagcggtggggacttggggtcagcgggggagcctccgcggatggggagtcaccacctgccggcaatcagccatgactgcctttgcactgtccatgctctcagcccaccacctcctccccctgccattgcagtggctaacactggagacgaagaccaagacaccacagcctttctccagtacctctcaaatcagcacagacaaggacaaaggcctcaatccacaactgctgaagatggaccctggccacatgggatggtcagacacgcctgcccagctatctgcaggcgaagaggctcagaagaggtttaggggcctgaaggacatcttgcttccatgtccatatgagcaggctatttctgctccatgagtcaattttgccatataaaatacttaatttcagccattccagggtgctataggatgcacagcttcccatcagcccacctgaactccagccatgccattttaataccaggaataaggtcacctgctttcctgccccttaggaggccagagccgtgggaagcaaaatggcacttctgtttacctgttatattattttggtcatccttatatgcttggaa

SEQ ID NO: 368097 - DNA, 1289 bp, Homo Sapiens
ggtccggaattccctgggatgtccggagcccggcggagcccggacctggtcggggagagctgcctccacggccgggcacccagaccccaccgtcgcagtcgccaccacctcagtccatccttggtaccggcaatgggcttcgtatcctccagtgcacttgtaactgacttggacacggaatactaagaactcacttctgtcctcatcccagtcgcgccggcggtgaccatctcggctcttttgggcttaactgccgctcctctggactctgtctgactttgggggcaccatggaccaaagtgggatggagattcctgtgaccctcatcattaaagcaccgaatcagaaatacagtgaccagactattagctgcttcttgaactggaccgtggggaaactaaaaacgcatctatctaacgtttaccctagcaaaccattgacgaaggatcagagattggtgtattcgggcagactgcttcccgatcatctgcagctgaaagacattctcagaaaacaagatgagtatcatatggttcatctagtatgtacttctcggactcctcccagttctccaaaatccagcaccaatagagaaagtcatgaagcattggcatccagcagcaattctagttcagatcattcaggatcaacaactccatcatctggtcaagaaaccttgtctttagctagtgggttcttcctcagaaggattgaggcagcgtacccttccacaagcaaaaactgaccaagcacagagtcaccagtttccatatgtaatgcaaggcaaatgtagacaaccaatttcctgggcacagctgctccacctggattcccagtgtatcccgcgtttagcccactgcagatgctatggtggcaacagatgtatgctcatcagtattatatgcagtatcaagctgcagtttcagctcaggccacatcaaatgtcaacccaacccagcctactacttcacagcctctaaatttggcacatgttcctggagaagaacccccaccagctccaaacctagtggcccaagaaaatcgacccatgaatgagaatgttcaaatgaatgcacagggaggtccagtactaaatgaagaagacttcaatcgagactggctagactggatgtacacgttctcacgagctgcgattctccttagcattgtatacttctattcttcttttagtcggtttatcatggtaatggggagcatgctactggtttatttacaccaagctggatggtttccttttaggcaagaaaggaggtcatcagcaagctcct

SEQ ID NO: 368098 - DNA, 721 bp, Homo Sapiens
agcgggggctgcaggctgcgggcgcttggttcggcctggccggcggcggctcctaacaccgggcgggggctgcggcggcacttccgggtggccttctccatgtggtctcgggaacgtgaaggggcggggcctcgaggtcaggggtcagcacctccctggttgccgtggcgactgaggcgcgcgacgcgggcgcaatggcggggacccggggcttgatgctgcttgggcctggcccagtggcgggtcctagggacgtgggtacctgcagaggccggcagatggagattcagaaacataaggacaacaagaaacttccccaaggtatcattatagtctttagacttcagacacacaccacacctcaaatatatacacaactgaaaggaaaattaaggaagtttttcaaagaaccctattccgagtaagaagtgtgttgcatgaatttctaagagccagaaaatgcatgacacaggagaagatgtaccctcatctgttcagtgagagatgtgcaaatcaacatcaacacagaactgtgaagaaaaaagtatgtctctgaaaagcaacttattcactggagatgtgaggagccatccgcaacatcacaattctatagacatcaaaccgcatgaagcatttcggatctgcttaaagactggggcgatttccatctggacacagcgaccatccctgtgtcattaccaatgaattccagcacttcccg

SEQ ID NO: 368099 - DNA, 1186 bp, Homo Sapiens
ggaattcccgggatcgcacctacagtgtaggacttccattttactctctagtctggttctggggctgggcatagaactggttggagttgatataaagatcagggttacagctcctagagtggagtattttgggctgagacgatggggttttccagatattggatcatgtcatctgcaaagaaagacaacttgacttcctctcctcccatttgactacactttatttctttctcttgcctgattgccctggcctgaatttccaatactatgttgaattaatgactcaatatatgactaaaagttcaaagtgaaacaatgataattcagataggaaaatatgtggcagtatgctaaagtctaaaaaggaatataaaacgtctgtgagatacctaacatcagatttatagaaacagaatagaatctgactacacagacttagtcttctccactccgtgttcctgcagctagagacatgacctaacaccctgatgaccactctcagggaccttgagtgactggccggtgcaccatggaacttaaagtatgggtggatggagttcagaggattgtttgtggagtcactgaagtcacaacttgccaggaggttgtcatagccttagctcaagcaataggtcgaactggaaggtacacccttatagagaaatggagagatactgaaagacacttagcacctcatgaaaatcctatcatatccttaaacaaatgggggcagtatgctagtgatgtgcagctcattctacgacgaactgggccgtctctcagtgagcgacccacttcagacagtgtggctcgaattcctgaaagaactttatacaggcagagtctgccccccttagctaaactgaggcctcagattgacaaatcaatcaaaaggagggaaccgaaaaggaaatcactgacatttacaggaggtgccaaaggattaatggacatttttggaaaaggtaaagaaactgagtttaagcaaaaggtgctgaataactgcaaaacaacagcagatgagttgaagaagctaatccgtctgcagacagagaagcttcaatccattgagaaacagctggaatctaatgaaatagaaataagatttgggggagcaaagtataattccaacctgaagaggaaatgtccggctagaagcaaaagatcaaagaaaggatgtagaaat

SEQ ID NO: 368100 - DNA, 1035 bp, Homo Sapiens
  misc_feature (788)..(788): n is a, c, g, or t
ccggtccggaattcccgggatagcgcatgcgcgtcgggcacagcgcgtgcagcctcgtgcagctcttctggtctccggcgcccgcccctcagacgtaatgttgaattaaagaaaatactttatcagaagaagatggccactgcccagttgcagaggactcccatgagtgcactggtatttcccaataagatatcaactgaacaccagtctttggtgttagtgaagaggcttctagcagtttcagtatcctgtatcacgtatttgaggggaatattcccagaatgcgcttatggaacaagatatctagatgatctttgtgtcaaaatactgagagaagataaaaattgcccaggatctacacagttagtgaaatggatgctaggatgttatgatgctttacagaaaaaatatgtatacacaaacccagaagatcctcagacaatttcagaatgttaccaattcaaattcaaatacaccaataatggaccactcatggacttcataagtaaaaaccaaagcaacgaatctagcatgttgtctactgacaccaagaaagcaaagcattctccctcattcgcaaagatttatatccctaatgcaaaatctggggcctttacctaatgatgtttgtttgaccatgaaacttttttactatgatgaagttacacccccagattaccagcctcccggttttaaggatggtgattgtgaaggagttatatttgaaggggaacctatgtatttaaatgtgggagaagtctcaacaccttttcacatcttcaaagtanaagtgaccactgagagagaacgaatggaaaatattgactcaactatactatcaccaaaacaaataaaaacaccatttcaaaaaatcctgagggacaaagatgtagaaagatgaacaggagcattatacaagtgatgatttggacattgaaacttaaatggaagaacaggaaaaaaacctgcatcttcttgacttgaagaaccaagttagttttgtgaggagatgaaattatgaggtcttaagaaagc

SEQ ID NO: 368101 - DNA, 1183 bp, Homo Sapiens
tatcttaaactgggaatcagttgccatctatgctatcaacctccttcctccctacatatcactgaatgaacgacaagaaactgttgctgttgccccccagtgccccactctgctggccaggagggcgggcctggggcctagtcggactgctcctgagacgatgcctggctgggctcacccgacagtacctctgcatcctggtcatcagtgttctccttcgtcagtatcataacaggacggtcagtgagaaacgatgatggagctgctggtgacgtggcggggggaggaagtggagcgcagacgaggtagcctggcgggaggaactggggctgcggtggaaacggtggaaggggcggcaagtggcggcggcggcggcggcaggtagtagcttggcctggaagtctcctcctggttctgacaccaagcctccgccttggtactggcctgcgggacacatgccggaagccctgctgcagggggacgccaggaaggggcgtccaggtagcccagcgggaacgggcagtaggggtgcatgctggagccaaccagggtactcagggcccaagtgcacggtccgggttgatgttcagagggcgcactgcacgtggggaaacggagggaagaggtgcgcaggcgcactgggccagggcggagctgaggggaggagcctcccgaccgcgaaccgggagggaagagtgcgcaggcgtccttgcgctaacgtgccggcaggaaaattctgttattctggaggaggagcctccagcccaaggaaatggcgggaagaggtgcgcaagcgcagtaggactcggctcctcgaagcctcccccggaggaggaagcactgctaagtcgactggacgccattttgttcttgcatgccggaatggcacaaactacagctaaatgttaaaagccctctgaaccgcccattcctttctgtttctcgtttcctttttgcgaaaagttacccaatccaaatccctgttcgaagaagggtttctcaaagcggaaggtccgttacccgtggaaaaacttctctccaccccgaacccctatgccagctccccatccgggctggcctgggctgccagctccgggagtcgaccgcgggaccaaggccacgacttaccaaagtcggtgaacagtgggccgggcacggtccgcatcggcctgcgcaggtctag

SEQ ID NO: 368102 - DNA, 1629 bp, Homo Sapiens
  misc_feature (1343)..(1351): n is a, c, g, or t
cggcgggcggcgaggagcgcggagccggagctggacgccgcgcctgccaccgccacctgcgcggcagtcatcaagatgtcagtggcacccccagtaccggagctccaagttccgtcatgtctttggcaaaccagccagcaaggagaactgctacgactccgtgcctatcacccgcagcgttcacgacaaccacttctgtgccgtgaacccccacttcattgcagttgtgactgagtgtgctggtggaggggccttcctcgtcatccccctgcaccagacagggaagttggacccccactacccaaaagtctgcgggcacagaggcaacgttttggatgtcaagtggaacccttttgatgattttgagatcgcctcctgttctgaagatgccacaattaagatctggagcatccccaagcagctgctgaccaggaacctcacggcctacaggaaggaactcgttgggccacgcgcgcagagtaggcctggtggagtggcaccccacggccgccaacatcctcttcagtgctggctatgactacaaggtgatgatctggaacctggatacaaaggagtctgtcatcacaagccccatgagtacgattagctgtcaccaagatgtgatcctctccatgtccttcaacaccaacggcagcctgttggccaccacctgcaaagaccgcaagattcgggttattgacccccgagcagggaccgtcctccaggaggccagctacaaagggcaccgggccagcaaagtgctgtttctggggaacctgaagaagctgatgtccacaggcacatcccgatggaacaaccggcaggtggccttgtgggaccaggataacctctctgtgcctctgatggaggaggacctggacggctcctcgggcgtgctgtttcccttctatgacgcggacaccagcatgctctacgtggtggggaagggagatggcaacatccgatactacgaggtgagcgccgacaagcctcacctgagctaactgactgagtaccgctcctataacccacagaaggggatcggtgtcatgccaaagagaggactcgacgtgtcctcctgcgagatcttccgcttctacaagctgatcacaaccaaaagcctcatcgagcccatctccatgattgtgccccggcggtcagaatcctaccaagaggacatataccctccaacagcaggggcccagccctccctgacggcccaggagtggctcagcgggatgaatcgagaacaaatcctggtggtccttaagcctggctctgagctgctgagaccccccccactggctgcaaaaaagactatcttcaatttcatgggcccacgnnnnnnnnnggctcttggaatcaaaccgaaaagttggccgcaaaaaaatgagttggaaggtccttcttccccagcctgaggctcaagttatctcacacgccccacatttaaatattacacgctatagcaatcaaaaaaccaccgcacggagatgatgtgtcccctgtgcgcggtacgtcattgacactcctaactcttaatctccgcgcctatccgcatttcaccaacgcaccacacacttctacttcgcaccccatagatacctctttctcttgagcagccctcca

SEQ ID NO: 368103 - DNA, 739 bp, Homo Sapiens
  misc_feature (680)..(680): n is a, c, g, or t
agttcccatccagtatcacaggaagtgctgcaggcaacagatattgacagggtgtttgactggatcgcatataaaaagggtgctgctttaataagaatgctggctaattttatgggccattcagttttccagaggggtttgcaagattatttaaccattcataagtatggtaatgcagccagaaatgatctctggaatacattatcggaggctttaaaaagaaatgggaaatatgtaaatatacaagaagtaatggatcagtggacactccagatgggttatcctgttatcaccatcttgggaaacacaacagcagaaaatagaataataattacccaacagcattttatctatgatatcagtgctaaaactaaagcacttaaacttcagaataacagttacctgtggcagattccattaactattgtggtaggaaatagaagccatgtgtcttcagaagcaattatttgggtgtctaacaaatcagagcaccacagaataacttatttggacaaaggaagctggctgctggggaacatcaatcaaactggctattttagagtcaactatgacctaaggaactggagattattaatggatcaattaatccggaatcatgaggttctttctgtcagtaaccgagcggggcttgatcgatgatgccttcagcctagccaggnctggtaattgcctcagaatattcctctggagattatcagatagctgtctgaggagaagg

SEQ ID NO: 368104 - DNA, 905 bp, Homo Sapiens
  misc_feature (874)..(874): n is a, c, g, or t
  misc_feature (886)..(886): n is a, c, g, or t
cactagtaaacatccagttgcctaatattgtttatagttgttttatctgcaaaatacattagagcatttcaaattacatttaattataagataaacatttaagatagttatataatttatttgtaataacgtgaattaagcttggaagcttagctatcacttaaaatccactggcaggtttataatactttaggaagtagttaaaagtaatttgccattataaagaaatagtttaagctctgaaaaatttctcagacattttaaaaaattgctgcagggatactaggcaaatcgaactaataaactaagccatcgataaattgtacattcaaatccatactagatcaaatagtgcactttggattatagtgaggtagggcaaagaaatacagtcagatatattttgaactgttaaattatataaacttaaaatacttttacctaggttttactcgaatatccaaaaagaaaaatttagaattcagatgacaagtatttcttgaattcaaagacagaattgtaaaaatctttgaggtacatataaataaaaaatacaaaggccacaagatatattttattccaacataaaatatgctcatataaaaataactcaggaaatataaaaaaattacaaacatttttgcacagatcctctatataaaacatttacctggggttaaacactgaaaatacacttctgaaactagtatgagttgaactattttcttcggataccaagtatacacaaaataaaagcccttcatctgggagagcatgggcaggagggaaaacaacttttagcatcaatctatatttatttctctgttgctcgaatataaaccaatgatgacgagaggagaaactctgggggttnattttaacaaanttaaattcacattttgctg

SEQ ID NO: 368105 - DNA, 1197 bp, Homo Sapiens
  misc_feature (723)..(732): n is a, c, g, or t
ggaccggtccggaattcccgggatccagaatccagaaaagaataattacgatattttcaaaatggaaagttcccatgccaaagagtttgccttcttcaccaaactatgatttcgtgatgttcttaaaggctcaagaatggggcatgagtacacactgtgtgctaaggaaagaatatttggattgaattgaacccctgcagaacgtggactatttagagacctgaatttggccttgggtgaatacctgccttgggttggccaactagcagtcaacagcaatgagccaaaagagacaaaccaagtttcaaaatggcaaatcaaagacttcagaaaatagctcagctaaacgtgagaaaggaatggttgtcaatagcaaagagatttctgatgcagtcgggcaatcaaaatttgttctagagaaccttcggcattacacagtccatccaaatttggcccagtactataagcctttgaaggccactgccctgcagaaattcctggctcaaaacaggaaaaacaccagcttcatgttaaaagtaacacagtatgaccaggataagacgttactgattatgaccaacaacccacctccctgctcaatcacccagcaagacaaggagagtgcatcaaaatatttttccaaggagttactgctcaaggtcatggaaagtcatcatcagcacaaacccactgagaacctctggctgccccgcatgcctcagnnnnnnnnnngttaagatctaagctgaaaccaatcttcccctttgatactgtcggatgatcccacatcccagcgagaacaatgggtttaggtttttccactgacaatgattttcaagaacgaaagggaaagtattcaaaaagtctaccgcctttgagggacccggaagaaaaatggtacccctcgcttcaccctttgctcccagtcccttgagagaaaatattgaggaaaaagatgctttcccaagaagttcccccgagggggaaaggccccattttccaaaagggaattccgggaaaccactggaaacctccaatccgctttctgggaaaaaactgggccacccaaaaaccgccgcccccggggaaaaagggcccttttccgcaaagggggaggagccccccccaaaggggatttattccaaaaaagggcccccggcccattccggggtggaaacaaagaaaccccctttagtc

SEQ ID NO: 368106 - DNA, 791 bp, Homo Sapiens
taggtcgacattactgaagacggcgccgagcccagtcgaagagctccagagccccggcaggacaccttctggcgttcccctccagctcgctgctctgcagcactgggcactggagatctctcaacgtgctcagtgctacttttggctgatgctcctgaatttggtacttggaaaaatatgacatcattgtcgattcttctgaacctgttttatgccaagccaaaagaaaatcaaatttcaatggcttcttttctttgaaagaccaagatattctttcatacttcttagaatccaagtttaaggataattccatcaaatcaatggaaacaataaatttcataatttttctgccagaaaactgagatggatgaccctgaagtccagtttcttcataagtgtctttatccagtgacaaaattaatttcccatttggtagcagggcaacagtattatcttcatcaatatgtgtattgtatgttagtgcatagcaagaacctttctttataaaggtactgatgaattcaggtgtaattaattcatgaagaggtaaattcttcacaaagtaatagggtccagtgttcatgaccaggtttttcagttcttccgatagtatcccacattcaggaatgagaaatgaaaccctgtagttatagtagtgcgtctgcacaagatgccggtggcgcgacttgtggttgccgaagttggatttctcgcaaaccagtaagtgccgcggcgcctcccgaagccggcgcagcgtggccatgctctcctgggttcctggtcctcccgct

SEQ ID NO: 368107 - DNA, 510 bp, Homo Sapiens
caaggctctggcagttggccagcacaccactacgcatgtgtgtcaactctagggttgggtgctggggttgcggctttcggttaacaccgcaggcaccacacctgttggtgttcagatggagcggcacactagtcatcctaacagaaaagttccagccaaagaggaagctaatgctgtgcctctctgtagagcaaaaccctcccccagctatattaatcttcaagcaagttccccaccagccacttttctgaacatccagacaacaaagctgccctcggttgatcacaagcccaaggaatgcctaggactcctggaatgtatgtatgcaaacctccagcttcagacccagctcgcccaacaacagatggctgtttggaacattttacaggcatctgtgacacaactggctcctgggaggggaagcaataactcttctctcccagccttatctcctaatccattgttaaatcacctgccccaattcagtaaatgaatcgtggaacaaacacg

SEQ ID NO: 368108 - DNA, 850 bp, Homo Sapiens
  misc_feature (800)..(808): n is a, c, g, or t
tgcgactcggctcctatcggaccgtgaaggctaagaaaggcttcacagttcccactcttttggtctagccttagcaacaggtggactagagaggcgggactccagccagcacatgggggaaagacctgccggcttggcgcagggtgaagtgggagttgtagtcttaccgggccggactgcgcagcctttttccgggcacactgggagttgtggtttatcgcctctggactaatggctattggaacaggctgagatctgctggagacaacttaggaaattatcatagtgaaaatactaacatggattgttgatcatctgatgctatgattctttcccaggcaccacacctgttggtgttcagatggagcggcacactagtcatcctaacagaaaagttccagccaaagaggaagctaatgctgtgcctctctgtagagcaaaaccctcccccagctatattaatcttcaagcaagttccccaccagccacttttctgaacatccagacaacaaagctgccctcggcccaaggaatgcctaggactcctggaatgtatgtatgcaaacctccagcttcagacccagctcgcccaacaacagatggctgtttttggaacatttacaggcatctgtgacacaactggctcctgggaggggaagcaataactcttctctcccagccttatctcctaatccattgttaaatcacctgccccaattcagtaaatgaattgtggaaccaaaaacatcactaacgcggacatgacgggaccgtaaacaggaaacagaaaaacagacgcnnnnnnnnncggacaaagaaacccccgtggggggggcccatttgcgcgcgc

SEQ ID NO: 368109 - DNA, 732 bp, Homo Sapiens
  misc_feature (614)..(676): n is a, c, g, or t
caggcgccaaggctctggcagttggccagcacaccactacgcatgtgtgtcaactctagggttgggtgctggggttgcggctttcggttaacaccgcagattggaacaggctgagatctgctggagacaacttaggaaattatcatagtgaaaatactaacatggattgttgatcatctgatgctatgattctttcccaggcaccacacctgttggtgttcagatggagcggcacactagtcatcctaacagaaaagttccagccaaagaggaagctaatgctgtgcctctctgtagagcaaaaccctcccccagctatattaatcttcaagcaagttccccaccagccacttttctgaacatccagacaacaaagctgccctcggttgatcacaagcccaaggaatgcctaggactcctggaatgtatgtatgcaaacctccagcttcagacccagctcgcccaacaacagatggctgttttggaacatttacaggcatctgtgacacaactggctcctgggaggggaagcaataactcttctctcccagccttatctcctaatccattgttaaatcacctgccccaattcagtaaatgaattgtggaacacnnnnnnnnnnnnnnnnnnnnnnnnnnnnnnnnnnnnnnnnnnnnnnnnnnnnnnnnnnnnnnntaacaacactaccacacataaacacacctatcaccatattaacctcatcctcacca

SEQ ID NO: 368110 - DNA, 1201 bp, Homo Sapiens
aaggtgctggtcgcccggattacgggattccggctgcagcgcacacgtctcctgcgcctcctcctccggagcgtcgctgtccgtcgggttcatccctcgcagcagtctccaggcgagagagggggccagagtgctcgcacttctcctaggggcaccatgcccaacgacgaggcattcagcaagccctctacaccgtcggaagcccctcacgcccccggggtaccgccgcagggcagagccgggggctttggcaaagcgtctggggcgctagtgggggcggccagcggctcgagcgccgggggcagcagcagaggaggcggctccggctccggggcgtcggacctgggtgccgggagcaagaagtccccgcggctgcccaagtgcgcacgctgcaggaaccacggctacgcctcgccgctcaagggccacaagcgcttctgcatgtggcgcgactgccagtgcaagaagtgcaacctgatcgccgagaggcagcgcgtgatggccgcgcaggtggccctgagaaggcagcaggcccaggaggaggaattgggtatcagccaccccatcccactgcccagtgcggccgagctgcttgtcaaaagagagaacaatggcagtaacccgtgcctcatgactgagtgcagtggcacctctcagccaccgccggccagtgtccccaccactgcagcttcagagggacgtatggtcatccaggatattcctgctgtcaccagcagagggcatgtggagaacacacctgacctggtttcagactccacctactacagcagcttctaccagccgggctctgtttccttattacaacaatctatacaaatgcccgcagtactccatggcccttggctgctgattcctgcttctggcgaagggggaaatccccccgggggaccccccggggaagacaagccttcgggggcctccccggaacctaatgtgcctggcccccaccggtaaacccttggccaaatgaagaaccctggacaaccgccatgccaagaagctccccattacacgaatggcttttttaactacccggccgtccctttttactcggggcccagaacggtcgcccccaattccttccccttttggaagcaggctcccctcccttacaccgtaaacccccgggtcgcagggtattttctcccccgcccaaccaagtcaacaaaatttggtgcct

SEQ ID NO: 368111 - DNA, 1210 bp, Homo Sapiens
  misc_feature (910)..(910): n is a, c, g, or t
  misc_feature (960)..(960): n is a, c, g, or t
atcaggccaaatcggccgagctcgaattcgtcgagagcggggctggcgccggaagtctctactgaggaaagctatgaggatactctgttcgtaagctcccggtgaattttgttccacagactcggaagaaaggttggataagagttcactggagattgacaagtactcgggatagtgaaaagccggagttggaacatggatagccgcttgcaggagatccgggagcggcagaagttacggcgacagctcctcgcgcagcagttgggagctgaaagtgccgacagcattggtgccgtgttaaatagcaaagatgagcagagagaaattgctgaaacaagagaaacttgcagggcttcctatgatacctctgctccaaatgcaaaacgtaagtatctggatgaaggagagacagatgaagacaaaatggaagaatataaggatgaactagaaatgcaacaggatgaagaaaatttgccatatgaagaagagatttacaaagattctagtacttttcttaagggaacacagagcttaaatccccataatgattactgccaacattttgtagacactggacatagacctcagaatttcatcagggatgtaggtttagctgacagatttgaagaatatcctaaactgagggagctcatcaggctaaaggatgagttaatagctaaatctaacactcctcccatgtacttacaagccgatatagaagcctttgacatcagagaactaacacccaaatttgatgtgattcttctggaaccccctttagaagaatattacagagaaactggcatcactgctaatgaaaaatgctggacttgggatgatattatgaaagtagaaattgatgagattgcagcacctcgatcatttatttttctctgggggtgctcttggngaagggtttgggacttggaaagagtgtgtttacgaaaatgggggttaccngaagatgtgaaccatattttgtttggattaaaacccaataaaaaccaatcctgggggaagacctaagacttttagaatccaaaggcttggtcttttcgaaaaacaaagggacccctggcctccatgggggatccaaaggaacctgtgaaacggttaaccacaggacgggggactttcatttcatggctaagggctggacactgtgacttaatttttcccccggaggaacctggaaaattgccaaaaataa

SEQ ID NO: 368112 - DNA, 1264 bp, Homo Sapiens
  misc_feature (73)..(158): n is a, c, g, or t
  misc_feature (1039)..(1039): n is a, c, g, or t
  misc_feature (1114)..(1114): n is a, c, g, or t
cggtccggaattcccgggatgtccagcacagcctcacagtgcagagcatgagctttggagcctgcccccaccnnnnnnnnnnnnnnnnnnnnnnnnnnnnnnnnnnnnnnnnnnnnnnnnnnnnnnnnnnnnnnnnnnnnnnnnnnnnnnnnnnnnnnttctaggaaatgatgccagtgaatgcgtagtcccagcctcagcacaggggagccaccttgaagctctcaaatatcactgttgtgaatacagagagggaaaaccaactgtaacgtgccacccaaataaagctcattactagtcctgtccagcaacgtgcctctcctggccctagagttcttggaaatagcccaggccaaagagaaggcctttctccccatggtcagccacacgttccacatgcgcacagaggagtctgatgcctcacaggagggcgatgacctacccaagtcctcagcaaacaccagccatcccaagcaggatgacagccccaagtcctcagaagaaaccatccagcccaaggagggtgacatccccaaggccccagaagaaaccatccaatccaagaaggaggacctccccaagtcctcagaaaaagccatccagcccaaagagagtaacatccccaagtcctcagcaaaacccatccagcccaagctgggcaatattcccaaggcctcagtgaagcccagccagcccaaggagggtgacatccccaaggccccagaagaaaccatccaatccaagaaggaggacctccccaagtcctcagaagaagccatccagcccaaagagggtgacatccccaagtcctcagcaaaacccatccagcccaagctgggcaatattgccaagacctcagtgaagcccagccagcccaaggagagtgatatccccaagtccccagaagaaaccatccagcccaaggagggtgacatccccaagtcctcagcaaagcccatccagcccaagctgggcaatattcccaaagcctcagtgaagcccagccagcccaaggagggtgacatctccaagtccccangaagaagccatccagccccagggagggtgacctcccccaagtcccctagaaggaaggccatccagccccaagggnagggtggacatcccccaaagtcccctagaaaggaagaccaatccaagccctaaggaaaggggtgaccattccccccaaggtccccaaggaaaggaaacccattccacagcccccaaggaaaaggggtgggagcattcccccccaaaagtc

SEQ ID NO: 368113 - DNA, 577 bp, Homo Sapiens
atcaggccaaatcggccgagctcgaattcgtcgagagcgggctcacgtgaagaacgccaggagctgtgaggcagtgctgtgtggttcctgccgtccggactctttttcctctactgagattcatctgtgtgaaatatgagttggcgaggaagatcgacctatcggcctagaccaagacgctacgtagagcctcctgaaatgattgggcctatgcggcccgagcagttcagtgatgaagtggaaccagcaacacctgaagaaggggaaccagcaactcaacgtcaggatcctgcagctgctcaggagggagaggatgagggagcatctgcaggtcaagggccgaagcctgaagctcatagccaggaacagggtcacccacagactgggtgtgagtgtgaagatggtcctgatgggcaggagatggacccgccaaatccagaggaggtgaaaacgcctgaagaaggtgaaaagcaatcacagtgttaaaagaaggcacgttgaaatgatgcaggctgctcctatgttggaaatttgttcattaaaattctcccaataaagctttacagcttctgcaaag

SEQ ID NO: 368114 - DNA, 825 bp, Homo Sapiens
tagggtcctagggaatgaagatggagaggtgcccctagttggcagcgactgtggagaaacaatgggacggggcccgtgggaggtcctgcctagcacggaagctgggccagctccagacgttctctctttgaaagtggagccgtcagatccgccgagggatttgagataggattaaaataaaggagttacgaacgacacccctgtttttggcccaatgggccgggcagtaagataaactcagacggagaggggaggaggagcgggcctggcgggcaggcgcaggaagctctcggtggagaggcccgggagagcagcgctgagccggctaactgggagtggacggtgctaccggggatgggagaagagcagaagtgagggaaggccgcccgcgccgaagccctggggcgccccagccgaggaagagccgggaaagggcgtcgccgctcatgtaggtagggaacgtctgggtcaagctctccgagggtcgaggccattgcgagccgcagggtggggaccgaggctgctcggcagccgtcacggagccgccaggcaggagagcgccgaggagccaaccgcacccaaccaacgcaggagcttctgcctaacagcgaaagcggacgttctgcggccacaagcaaatgtgcaaaacaacctcgcagagtggacaacgagcaaggaaagccagtttctagaacatgccaataacgtgacttttgcggcgctcagccgaagctgtgccggggcctaggcgcgcccagagggtgccaggacctgagtcgcctctccccactctgccccttccccgcccaccggccgggccccgga

SEQ ID NO: 368115 - DNA, 882 bp, Homo Sapiens
  misc_feature (611)..(611): n is a, c, g, or t
  misc_feature (618)..(618): n is a, c, g, or t
  misc_feature (693)..(693): n is a, c, g, or t
  misc_feature (709)..(709): n is a, c, g, or t
  misc_feature (713)..(713): n is a, c, g, or t
  misc_feature (724)..(724): n is a, c, g, or t
  misc_feature (741)..(741): n is a, c, g, or t
  misc_feature (793)..(793): n is a, c, g, or t
  misc_feature (815)..(815): n is a, c, g, or t
  misc_feature (831)..(831): n is a, c, g, or t
  misc_feature (842)..(842): n is a, c, g, or t
gacagctctttggctggctttttcgcagagttcgtttgagaaggttatcttggcattttaacagtgatgtcaatacaaggttatgcaaacctccgtaatcaatggagcataataggagaatttaataattgcctcaggaagaacttttacagtggatcaaatacagtaccacatcagatgctgtctttgcaggtgccatgcctacaatggcaagcatcaagctgtctacacttcatcccattgtgaatcatccacattacgaagatgcagacttgagggctcggacaaaaatagtttattctacatatagtcgaaaatctgccaaagaagtaagagataaatgttggagttacatgtgaattattatgttttagaagaggcatggtgtgttgtgagaactaagcctggttgcagtatgcttgaaatctgggatgtggaagacccttccaatgcagctaaccctcccttatgtagcgtcctgctcgaagacgccaggccttacttcaccacagtatttcagaatagtgtgtacagagtattaaaggttaactgagaaggatactacccattttactatggcacaatgccgtgtgtcaaaaacaatcaccccnttggccntattcacattaataaaaatcacaagctttaataacagacacttaaaaataagataaaaatggattgaaagtttcnctgattactaaaaggnaaantacttttctgntcattgaatgtcagccntattaagcttgtcatataagttattaaatcattcatgtcatactgcataaanaaatgttcatttcagaattttnaagaaaaatgtatatnaaagaacaatnaattttaataaatcaagggtacgtaagtcctttttcatcc

SEQ ID NO: 368116 - DNA, 1099 bp, Homo Sapiens
  misc_feature (145)..(145): n is a, c, g, or t
atgcgataacccttggaagggtcgggggtcaatgcggtgcgggtgagggacaaggaacgtggctgccgactcgccaaaggggggggtgccggtaggggcaggcgcctgggagccccggtggggcgggaggcagcggcggggcggnccaggaagctgtgggaattggggcggggcgtctttggggcttctggcagatggcgggttcctccgcgagagccgagaaccgcctactccaggaggaaagcccgagggttgtgggtcctgctatagccagggccaagctccaggaaatcgtggccattcaggggtagtttgcagcctcatttgtaacattattgtgttgtcctgtgcatttccaatgcattacataaagacatggtcgcttttaggagaaatgtctgaaaaactaagaagatgcagaaaggaactgactgcagccattgaccgggcctttgaaggagttagttattcccaggagtgcacaggccagcagaggctggaactgagcgccgcgccgctctccttctcgctgcccgtgcacaggctcctctgcagaagacatcctctggcagcctgctcttctgctgctccttttgctgctgtcccatgtgctcctgagaatgagaaccctgcctttgcaacaaaccatgccccggtaaatgcaaaaccacatgctctgtgccccgagagaaaacctctaaccagcaaggaaaatgtattgatgcattcctccattttggcacctgaaagagagtcttggagaactgcaggagagggggaaaactggagaaaagaacaatttacggaaagatatggagagagatttgaaggctgactcaaacatgccactcaacaattctagccaagaggtcacaaaggatctgcttgatatgattgaccatacaagcatccgaactattgaagaattggctggaaaaatagaatttgaaaacgaattgaagccacatgtgtggtcattgccaagattcacccttcaaagaggaagcctgggccctgctcatggacaagagccctcagaaggccacagatgctgaccctggcagctcaaacaggctttgatgatcataatatgttgaga

SEQ ID NO: 368117 - DNA, 1090 bp, Homo Sapiens
  misc_feature (908)..(908): n is a, c, g, or t
gggtccggaattcccgggatggacggtgggcaggcgacggtggcgtgtggatggaggccttcgcccttggcccagcgcggcggggcaggcggcggacccgggccgccggctccctgctctctcgggccgccatcctcctctttatctccgccttcctggtgcgggtgccctcatcagttggacacttggttcgattaccaagagcttttcgcttgaccaaagattcagtgaaaatagtgggatcaacaagttttccagtgaaagcgtatgtcatgctccatcaaaagagtccacacgtgttatgtgtaacgcaacaactgcgaaatgctgaactgatagacccatcattccaatggtatgggcctaaaggaaaagttgtttcagaaaaccgcactgcacaaataacatccacaggaagccttgtattccaaaattttgaggagagtatgagtggaatttatacatgtttcctcgaatataaacctactgtggaagaaattgttaaacgtcttcaactaaaatatgctatatatgcttatcgtgagcctcattattattatcagttcacagctcgatatcatgcagctccctgcaatagcatttataatatttcttttgagaagaaacttcttcagattttaagcaaactgcttcttgacctttcatgtgaaatttccttacttaagtctgaatgccatcgcgttaaaatgcaaagagctggtttgcaaaatgaattgttctttgcattttcagtttcatctctagacactgaaaaaggacccaagcgatgtacagaccataacttgtgaaccttacaaaagacttttttaaggctaaaaatctcatagagagattttttaatcaacaagtaaaaatttcttggcagacgtgcagaaccattacctcanatatactatattgaaagtactctcccaaatggtttggattaatcgctgctttccgggatatggaatgaatgttcagccaccatccaaaatgcctgaagggctgggggatctgcacccctggactctatacccccccggatgagaatccttggccttcagcaataccaacctggtgtatggaa

SEQ ID NO: 368118 - DNA, 1296 bp, Homo Sapiens
  misc_feature (653)..(653): n is a, c, g, or t
cagcctctctttaaactgaagtaccccagctctccttacagcgctcacatttccaaatcaccaaggaacatgtccccaagctccggccaccagtctcctgctggcagtgcaccctccccagctctctcctactcctcagctggatctgctcgctcaagtccagcagacgctcccgacatagacaaactgaaaatggcagccattgatgaaaaggtgcaggctgtccataacctgaagatgttctggcagagcacaccccagcattccacagggccaatgaagatcttccggggggctcctggcacgatgacttccaaaagggatgtcctcagtctgttgaatttgtcaccacggcacaataagaaggaggagggagtggataagcttgaactgaaggagctgtccctgcagcagcatgacggagctccaccgaaagcccctcccaacggacactggcgcaccgagaccacctcgctgggctcactgccgctgcccgccggccctcccgccacagcccccgcgcgccctttgaggcttccttctggaaatggctacaagttcctgtctccagggaagatttttcccttctttccaaatgcttaaagcatcttttatacccactgactctgagcagcctgcagatgggggcctgngcgtttgcttcagcccttccctgagtgcagtccccccacagccaccagcaccctcatgatgctgtgctctgcaggcgaggggcaccaccacgtccaaagggctgccacacacactggtggcttttctgggccacattcaccaaaagccaggacttctgtggggctggtacaggaggctcatggaatttcctacacacttcaccaaatgtttgtttacctttgaactccctgcttctcatctttgatatgattcttcaccaggattttgtacaaaaatgatccatggttcctggggtggggagaggaaagggagcacatattttgctaagaggtatatatgcagtaccttttatacacagaaatacaaatagagctttttcctaaggctttcggttgctggttgggggtgggatatatgaaatttcagttgaattctacaggaaagtgttatattagcccaaaacagaaaaatggtttttaaaatgccaatgatttgtaattaaattgtagcaattttggtctcatgatagtgtaatatctcagcaacaatgcaataattcacattgaaacagcgcttccattctgaactactgctctgcaaatgtcttttgggtcccgctgtcaaccaaacttgaattttctt

SEQ ID NO: 368119 - DNA, 1020 bp, Homo Sapiens
ctgggtatcttgagatccaaagttacagtggaaagttgatcaataagcccaaatgtttcgcttccagttcagaatagcatgtgttgtaattcttccgcgttccttcctgtgaatggcaacctctgttttttgacccagtcattctcgccagatctctagataactgcccttgtcaaatgagctttacagcattctgtgtggcccattccttcttttggtccagttgcaacaaagtttccttgattattttctttctagtatcttccagagtgattttatagtgttctgacattttctctgcattctctttaactgtgttgatgtcattttgtaaggaggtaatgagtttagcatgtcggtcactcgcctacattcttgtactcctcccaatattccttttcactgagtttctcaagaaatagtttctcagcattacttatttgcatgcgcatatctctcaagtttttttcctggtctctttcaaacttccatttttccttcatcgcttcttcaacatcctctcttgttacaactggcaatccctctgccttctcttcactcagttcctttagtagatgccgtatgtgccaaatctgttcttcttttaagcggctatttctttcatgatatttttggttctttttcctaagtgtctttatttgaaacatgaattgctccacggcatcttcctttatttgacattgatagtctagaagtgcttcactggtaggcagtttaatttcttttggtggcccgtcatgtgtatcctttttatttgctttccctgagttttccattgtgctggttagctatgaagaaatatacctgaatcaaattcagagcctgcctttcgagagggcaaataatgtatccaggggttctaccgcaaggcggagagatgggttaacattctgatcagattaaaaaggcctgccctccttctcatctcctgggtggagaagaggagtggcctatcagagccgttcatcccgttacaccggagcagtaccagccttggga

SEQ ID NO: 368120 - DNA, 1411 bp, Homo Sapiens
  misc_feature (477)..(509): n is a, c, g, or t
  misc_feature (525)..(525): n is a, c, g, or t
ggagaggaggaaaaatgcgctgatgtgagggcgggcgggcgggcgggagggagggacgtggaggagccggggaggggctccttagaagaatacgcttctgtcgctcgcctgctcgcttttcgctcggcattgcggccagccagccgggcactcggggggcacgcgcggccacctgctagagctctgccccctaccccacccgccgagctaggtctggggtgtgggacccatggtgggggctcctgcagccactgcccgtgtgcggaccgcacggagctgacccactcctcccagcaccgaggaagaagcaacggagccctcagcaggcgaccggcctccccgcccctgaccaccctgcttcccggctgcctttgtggccgcagcttctcgccgcctgagcctgagggccggcgggggctgcggctgcgcactggccgagcgatgcccagctcgctgttcgcagacctggagcgcaannnnnnnnnnnnnnnnnnnnnnnnnnnnnnnnnagggggagagaccctnggattgaccaaagagccctgcagctcgcgctcgaccagctctccctgctgggggctggacagtgacgagggcgcctctctgtacgacagcgagccgcgcaagaagagcgttgaacatgaccgagttgcgtgccagtacccagttctgagcatgtcgccgagatcgtggggcggcaaggttgtaaaatcaaagcgctgcgggcgaagaccaatacttacatcaagaccccagttcgcgggggaggagcctgtctttgttgtgacgggcaggaaggaggatgtggccatggctcggagggagatcatctctgcttgccgagccacttctccaatgatccgcgcctcccgcgaataagaacacgggcactcaacggcgcggtgcctgggccgcccaacctgcccgggcagaccaccatccaagtgcgggtaccctaccgcgtggtggggctcgtggtggggcccaaaggcgccacaatcaagcgcatccagcagcagacgcacacgtacatcgtgacgcccagccgggataaggagccggtgttcgaggtgaccggcatgccagagaacgtggatcgcgctcgagaggagattgaggcgcacattgctctgcgtaccggcggcatcattgagctcacagacgagaacgacttccacgccaacggcaccgatgtgggcttcgatctgcatcatgggtccggcgggtccggcccaggcagcctctggagcaagcccacccccagcatcacgcccacccccggccgcaagcctttctctagctaccgcaacgacagctccagctctgcttggcagtgcttccacagactcttatttcggcgggggggaccagccaacagcggagcggcctacccagcggcctggggggacta

SEQ ID NO: 368121 - DNA, 779 bp, Homo Sapiens
  misc_feature (334)..(409): n is a, c, g, or t
ggaggatacagaggttgtgatgtatccaataaagcctgtggaagcccaacaggtttctcagaggaaggtgggagattgagtggcatatctatgtctacaacacaaaagacataccaagctgcacgtgcattcagtgactagaagctgtgagagcacagaggctccaccatcttgccctggaacaggactggaaaaattcttgctctagagctcctacagggaggccaaggcttcatcatgcctgcatcatggcttggcatcttctgtacaatgcagcctcctttccccttttcacaggtgttgaattcctaagtaaattttgatccaccacccnnnnnnnnnnnnnnnnnnnnnnnnnnnnnnnnnnnnnnnnnnnnnnnnnnnnnnnnnnnnnnnnnnnnnnnnnnnngaggcgggcgcgggggcacacacaagtctctcggcgcgggcggagggcgcagccaggggcgcgcgcagacccagctctgttcggggcctcaaagaagaggagcgcacgggggacagcccgagaaggaggggagtatatcagggtacatctataagaagcgaagggcagcaggaggagcggtgcatccaaggataaatagcaccggaggaaccagaggcgaaaaatcgcggggagacctcatggggctcacgaagagacgcaaaaactaccagagggagggtcaaagacgcaagggcgtggacacacgaggggggacccaccgagacagaacctgaaaaaagattcaatacagcggcccagagccaataaa

SEQ ID NO: 368122 - DNA, 681 bp, Homo Sapiens
ggggagggtaaatagtgggccaggcaggaagatggcggcggtagcggaggtgtgagtggacgcgggactcagcggccggattttctcttcccttcttttcccttttccttccctatttgaaattggcatcgagggggctaagttcgggtggcagcgccgggcgcaacgcaggggtcacggcgacggcggcggcggctgacggctggaagggtaggcttccttcaccgctcgtcctccttcctcgctccgctcggtgtcaggcgcggcggctggcgctggcgggcacttcgtccctcctcctgctcccccccaaaccggagcgggcactcttcgcttcgccatcccccgacccttcaccccgaggactgggcgcctcctccggcgcagctgagggagcgggggccggtctcctgctcggttgtcgagcctccatgtcggataatcagagctggaactcgtcgggctcggaggaggatccagagacggagtcttgggccgccctgtggagcagctgccggagatacctcacataaagtggaacaaactacattcaatgggtggcaggatcgtagggtagtatttgaaaaataatgctctgagttactacaaatctgaagatgaaaccagagtatggctgccagaggatccatctgtcttagcacagctgtcatcaccacctca

SEQ ID NO: 368123 - DNA, 881 bp, Homo Sapiens
acctggcactgaatccagagagtggctgactacatcgacaaatgcagcctccttatcttgatgatagtaggaaagaactgggaatcctcccttgctccggaactgggaactaccaacaattattggtttgcttgctatccggggaacataaagttctctggggtaagtttcacaaatctcgtagtcccggttggcatcagacaactgccagtgtgagtttggcactcccatcctctgtatattcctcagcgagatcaatgagctgccagccttgtagtcgttctgaatcattttgtttgggattataagaaaatgcatagagatcttcatattttgcttgttttgacagttgtagcaaagagttgtaaatatcatggcaatctctttctctgggaacaatgaaatgcacagttctgaagttcttgcactgtatcacaagggggcatccagaagtagtcaaagcaagtttctctactgaggcaatatggtggtgtaatatccaggtttctttttgatgagagtcgataaataatagatgtgtagccgtaagatacagtgttcctgttaatgacttgttgctggtactgaatcggtcaagtaattttacttgttcgaccttggtcgtccggatatgctccatcgcaaggagacgtcagccggcagccggtctcacaggcgtaccatacggctacagaaacagggcggtgacagcgacagagagcaagcgggaactccctccaccagccagcgccgcgggtctgtctgccggccccggtggcgtcaacggcgcaggtgcagccggtgagcgccgtctcctagaaacacttccccaaaccccgcggcctcccgggggactcggggcaggcagacagagcgtgtgt

SEQ ID NO: 368124 - DNA, 998 bp, Homo Sapiens
gaacgaaggatggggcgtggctctgtcaccaagggcgtggtcatggagtagaggcccgggctcctgggtgaggccggcaagtttggagcgtggtcagacaataggggcgtggctacggctcgcggagcgcaaccaacgctctagaccagacctgggctcgagaccataactgtttggctttaacacctccccacctgcccccgcaaggcggcatctgctggtcctgctgctgctcctctctacccgggtgatcccctccactgcagctcctatccatgatgctgacgcccaagagagctccttgggtctcacaggcctccagagcctactccaaggcttcagccgacttttcctgaaaggtaacctgcttcggggcatagacagcttattctctgcccccatggacttccggggcctccctgggaactaccacaaaaagaagaaccaggagcaccagctggggaacaacaccctctccagccacctccagatcgacaagatgaccgacaacaagacaggagaggtgctgatctccgagaatgtggtggcatccattcaaccagcggaggggagcttcgagggtgatttgaaggtacccaggatggaggagaaggaggccctggtacccatccagaaggccacggacagcttccacacagaactccatccccgggtggccttctggatcattaagctgccacggcggaggtcccaccaggatgccctggagggcggccactggctcagcgagaagcgacaccgcctgcaggccatccgggatggactccgcaaggggacccacaaggacgtcctagaagaggggaccgagagctcctcccactccaggctgtccccccgaaagacccacttactgtacatcctcaggccctctcggcagctgtaggggtggggaccggggagcacctgcctgtagcccccatcagaccctgccccaagcaccatatggaaataaagttctttcttacatctaaaaaaaa

SEQ ID NO: 368125 - DNA, 1004 bp, Homo Sapiens
agggccgcaatcagagaacaccgccaggacttccaggacttggtctccaggactgaggtcaactgacgtgggcgtggtctgactgtgtgggcgtggccagggaatgaactcacggctctggcttaaggggtgtggtgaacgaaggatggggcgtggctgtgtcaccaagggcgtggtcatggagtagaggcccgggctcctgggtgaggccggcaagtttggagcgtggtcagacaataggggcgtggctacggctcgcggagcgcaaccaacgctctagaccagacctgggctcgagaccataactgtttggctttaacagtacgtgggcggccggaatccgggagtccggtgacccgggctgtggtctagcataaaggcggagcccagaagaaggggcggggtatgggagaagcctccccacctgcccccgcaaggcggcatctgctggtcctgctgctgctcctctctaccctggtgatcccctccgctgcagctcctatccatgatgctgacgcccaagagagctccttgggtctcacaggcctccagagcctactccaaggcttcagccgacttttcctgaaaggtaacctgcttcggggcatagacagcttattctctgcccccatggacttccggggcctccctgggaactaccacaaagaggagaaccaggagcaccagctggggaacaacaccctctccagccacctccagatcgacaaggtacccaggatggaggagaaggaggccctggtacccatccagaaggccacggacagcttccacacagaactccatccccgggtggccttctggatcattaagctgccacggcggaggtcccaccaggatgccctggagggcagccactggctcagcgagaagcgacaccgcctgcaggccatccgggatggactccgcaaggggacccacaaggacgtcctaaaagaggggaccgagagctcctcccactccaggctgtccccccgaaagaccca

SEQ ID NO: 368126 - DNA, 854 bp, Homo Sapiens
gggcatctccaggacaggcattcaggcagagcaagctccaggtttcaccacaatgcccatccctgcctccccactccacccacctctgccttccttactgctgtatctgctgcttgaactggcaggagtcacacatgtgttccatgtgcaacaaacggagatgtcacagactgtatcaactggggagtcaatcatcttgagttgcagcgtacccgataccttaccaaatggacctgtcttgtggttcaagggaacagggccaaaccggaaattaatctacaatttcaaacaaggtaactttcccagagtaaaagagactggagacaccaccaagcctggcaacacagacttttccacccgcatccgtgaaatctctcttgctgatgctggcacctattactgcgtgaagttcataaaaggaagagctatcaaggagtaccaatcaggtcggggcactcaggtgtttgttactgcagagcagaatccaagacctcccaagaacagacctgcaggcagagcaggctccagggcccaccatgatgcccatacctgcctctcggccctgcctgagagaaacagcacaaactatttcgtccaaccctgcttgctgcctccggctgctgggactcacaggcttgctgtcaaaataatccaaacagggaaggaacgtacaagtaaaataacaaaagccccccatactcttctgactccctggagacagctactttttaggagtttcatttgccttcttcaagagagctttcttccactgacattaaatgccagcttgatcgtacaataaatctgtctatttacctgggtccattcaaaacacaaaagacacccaaaaacac

SEQ ID NO: 368127 - DNA, 1058 bp, Homo Sapiens
agctaattgactagggaaggatcaggaagacaagacacatcaaaaaggggagggaatctacaatggaaggacacaagaaagatcagctggattaagtagtcatgattatgcaaagccatatccagagaccaaggtgtaaagcaggtcggagaaaatggaaatctcaagattggctcagtcaaaaagaaacattatcagtttgaacatggaccttgaaagggatacgcagagaatagatgaagcaaatcagaaacttcttctcaaaatccaagagagggaagataagattcagaggctggaaagtgagatcattcagacgcggggcctggtggaagatgaagagtgggagaaggagaaccgcaccacgatggaaagggaaagagccttgcaggagctggaggaagaaacagccagacttgaaaggaagaataagacgttggtccacagtataacagaacttcaacaaaagcttacaaggaaatcacaaaagataaccaattgtgaacaaagcagtccagatggagccctagaagagacaaaggttaagttacaacagctggaagcttcctatgcatgccaagagaaggagctgctcaaggtaatgaaggagtatgcatttgtgacccagctctgtgaagatcaagccctctacataaaggtagagcttcttgaagtacccaggaaacgttgaagaaaatagaagaagaactagaggctctgttcctttgagagagaagtatcaaaactcgtgagcatgaaccctgtggaaaaagagcataccagcccaaaataattgaggggtactcctaccccaaaagacagcaagattattcagtaaaaagattttttgctgtctctttttcctcaccctatttttcctcacactggtggagctaattgtttttttcatgtaaaatttataaatccaaatctcctcgtcaatgtactgccccaggtaacgtggccaggaacaccttggtggaaagctccaaggctttcttcttttccatttctccaccttgtaacacgaaggcatgggttcccccctgtgatcccct

SEQ ID NO: 368128 - DNA, 1594 bp, Homo Sapiens
  misc_feature (170)..(170): n is a, c, g, or t
  misc_feature (236)..(236): n is a, c, g, or t
  misc_feature (660)..(715): n is a, c, g, or t
  misc_feature (744)..(768): n is a, c, g, or t
gggggggagataaagtgggcagcggtatcactacataatagtgatcggcggtcggaatcggtgatagctcaccggcgcgggagagtgagacgaacagcgcgaggtgcacttaaggtagtccgcgccgagggggaggggcgggggcgtggtcgtaaaataataatcgctgngggcgtaggccgcgcggacagggtgtaacacgtgacgcgccgctggtcacgagaacgggtagcatnttgcgtcggacagagcgtcagagggtcgcgtgtttcgggtgggcgttatagggggcgaggcgtgtccatataaaggcggtggccgaagagagcgtacgccgggtgggtcgcggcgaaacataagtctggagattgtgcggggggtggaaggagacgaaaaacgtgcgggcgagggtgtaagccgcgcgcatgggaggcgatcggggcgattatagcggcaaacaataagcggctaattcgccgcacaccgcccgaaagaacgtcttggagggggcaaagggtcggataaatcctgccccaaagggtcaaagaggtggacattccggtgggagggcgtttaggtgaatgaattaggtaggagtccgaggaggggcgacccgcgggcgaagtcgggacagtgttggttagggggaaaccgaggctnnnnnnnnnnnnnnnnnnnnnnnnnnnnnnnnnnnnnnnnnnnnnnnnnnnnnnnnatcggccctcgagaaaaaggacgcttttnnnnnnnnnnnnnnnnnnnnnnnnntactcgcagcgtcggggccgacacgaggtgcacgcgacagacgggccccccacccctcccagctccagaagagcattgagaatggcccccaagtctggccaggaggttaaagaaaccgaggaagaggctctcctgtcccccacagagcaagagtcggtcagtggtcacctgggacctccagcaggcgcacctgcagcccccgagactcccacgtgcctgccagacaccacgccccaccccacaccggtggtctgctctgccgacccgcagtaaggaggagagggaggactggtgagcctcctgggccaggtggccaggggccggcctgagtaagcagcagggtctgctgccgctgcaggttggctcttgagtccctggaccctcgcacactgcggctgctgtggagacagcgagaactggagatccaggccttgcggtgggccatccagaatggcgaggacgcccggctctgccacatcctggaagaggtggcggggcttccgcccaagaggagctcccacagtcaggagaaactcctgcagaaccaggtccagaagctgatccaggagttgaaggaacagaaggagcgagcccagtgggagaaggagcacctggaggagcggctgctgcagaccacccgcacgctccaagagatggaggccgagctgcagaacttgcagaagtcctgcctcctgcagctggcccgctcctcgtgggtgggccgcatgctacgatcccagactggcagtgtggaggtagtgacggcagagactctgatggacccaagcgacctctctgaaaacattcaggcccccaccggggagag

SEQ ID NO: 368129 - DNA, 1325 bp, Homo Sapiens
ccggaatcgcgggcaaagatggcggcggccaggtgttggaggcctttgctacgcggtccgaggctttcattgcacaccgcggctaatgccgccgccacggctacagaaacgacctgccaagacgtcgcggcgacccccgtcgcgcggtacccgccgattgtggcctccatgacagccgacagcaaagctgcacggctgcggcggatcgagcgctggcaggcgacggtgcacgctgcggagtcggtagacgagaagctgcgaatcctcaccaagatgcagtttatgaagtacatggtttacccgcagaccttcgcgctgaatgccgaccgctggtaccagtacttcaccaagaccgtgttcctgtcgggtctgccgccgcccccagcggagcccgagcccgagcccgaacccgaacctgaacctgcgctggacctcgcggcgctgcgtgcggtcgcctgcgactgcctgctgcaggagcacttctacctgcggcgcaggcggcgcgtgcaccgttacgaggagagcgaggtcatatctttgcccttcctggatcagctggtgtcaaccctcgtgggcctcctcagcccacacaacccggccctggcccgctgccgccctcgattatagatgcccagttcatttttactgcgtgccctggtgaaagaaattattcctcgtgctcatcgaagaggtcgaattgatgacttgcgataccagatagatgataaaccaaaaaaccagattcgaatatccaagcaactcgcagagtttgtgccattggaatactctgctcctataaaaatccccactataaaatgtaaaccagacaaacttccattattcaaacggcagtatgaaaaccacatatttgttggctcaaaaactgcagatccttgctgttacggtcacacccagtttcatctgttacctgacaaattaagaagggaaaggcttttgagacaaaactgtgctgatcagatagaagttgtttttagagctaatgctattgcaagcctttttgcttggactggagcacaagctatgtatcaaggattctggagtgaagcagatgttactcgaccttttgtctcccaggctgtgatcacagatggaacaatacttttccttttttctgctaccagctaaatactttggccactgactacacaagctgatcaaaataaccctcgtaaaaatatatgtgggggtacacaaagtaagcctctttatgaaacaattgagcgatacatgatgtgaccggtttccactgatgatcgttctacttcagatagttcactttctactgaatagaccaaaagaagaaa

SEQ ID NO: 368130 - DNA, 826 bp, Homo Sapiens
gtgacctcaccctccaacatggcggcggcggtagattagggccgcgggtcggagcactcaccgccgctgggggaccctgtcggaagcaactgccgccgccgcctctttcatctcttctggggcaggggccaggccaggttttacacatccataagtagacctttttggagcctcaccagccaattcaatggcgtcctcttctactgtgcctctgggatttcactatgaaacaaagtatgttgttctcagctacttgggactcctctctcaagagaagctgcaagagcaacatcttccctccaccccaaggggttcaactagatatagcttcacaatctctggatcaagaaatttttattaaaagttaaaactgaaattgaagaagagctaaaatctctggaccaaagaaatttctgaagccttcaccagcacaggctttgaccgtcacacttctccagtgttcagccctgccaatccagaaagctcaatggaagactgcttggcccatcttggagaaaaagtgtcccaggaactgaaagagcctctccataaagcattgcaaatgctcctgagccagccagtgacatatcaggcatttcgggaatgtacactggagaccacagttcatgccagcggctggaataagattttggtgcctctggttttgctacggacaaatgcttttggaattgacaagacgtggtcaagaacctttgagcgcactgctgcagtttggcgtgacatacctggaggactattcggcagagtacatcattcagcaaggtggctgggtatgagctgttatatattaaaaatattttcttga

SEQ ID NO: 368131 - DNA, 1210 bp, Homo Sapiens
  misc_feature (320)..(320): n is a, c, g, or t
cgctaaatgagggggaaaacgggtgcttgccgttttcggtaagggttcaggtttgttgtgtgtttttgacccttattttttcttccaagtttttgcaaaccagggaagtttagccaggggcgggtttttttcaaaccggggaaccacttcttgggtcaaggtttcccttttcccccaagcaggggaggtgggcagtaatatgtggaaggcaggggagctgggggtttcaggaaattccttctggcagcttccgcgcgggcaaagaccccagaaagccccagcagcctttttccatgccctcggggcacctcttctttctnccacgtgcacaatgtcagaattagaggagtggttctcactcttctctccagctccgttgctgtctaagcttttcacttcttcaggatccattgcaatctgctgccaggactcagggcctagtgacactggcaggctttctgtgtgccaactctggctagctgacagtgacacaggtaagctctcagactgccaggaagtggtcacagttggagactctgggggactgacttgtccagagttgtcgctgggcaggatgtaaatgtcattgctatcttctgcagtgattccagggtattcctcctcctctgactcaagactaaacacagtgccccagccaccttgctgaatgatgtactctgccgaatagtcctccaggtatgtcacgccaaactgcagcagtgcgctcaaaggttcttgaccacgtcttgtcaattccaaaagcatttgtcgtagcaaaaccagaggcaccaaaatcttcagaaatttctttgtccagagattttagctcttcttcaatttcagttttaacttttaataaaatttcttgatccagagattgtgaagctatatctagttgaaccccttggggtgaggaaagatgttgctcttgcagcttctcttgagagaggagtcccaagtagctgagaacaacatactttgtttcatagtgaaatcccagaggcacagtagaagaggacgccattgaattggctggtgaggctccaaaaaggtctacttatggatgtgtaaaacctggccctggcccctgccccagaagagatgaaagaggcggcggcggcagttgcttccgacagggtcccccagcggcggtgagtgctccgacccgcggccctaatctacccctcgtgccgaattcgccacccaggcc

SEQ ID NO: 368132 - DNA, 1254 bp, Homo Sapiens
gctactggctgaaaggtgtcagctactctgatatcggcactctggcctggatgatcactctgagcgacggccctccaataatttcatcgactggcctggccatcggtgcttccttcactgtgtcagttttccaaggcatcagcacctcggtggccatcctctgtgaggagttcccacatgagctaggagactttgtcatcctgctcaacgctgggatgagcatccaatcaagctctcttcttcaacttcctttctgcctgctgctgctacctgggtctggcctttggcatcctggccggcagccacttctctgccaactggatttttgcgctagctggaggaatgttcttgtatatttctctggctgatatgttccctgagatgaatgaggtctgtcaagaggatgaaagggaagggcagcatcttgattccatttatcatccagaacctgggcctcctgactggattcaccatcatggtggtcctcaccatgtattcaggacagatccagattaggtagggctctgccaagagcctgtgagactggaagtcgggccctgggctgcaccgatcgacagcccaaggacttaccatccacaatgcaccacggaagaggccgatctatgaaaaactgacacagactgtattcctgcattcaaatgtcagccgtttgtaaaaagctgtatcctaggaataagctgccctggtaaccagtctctagctagtgcctcttgccctctcctcacctccttttctctcagtgactctggaacctgaatgcagcttacaagacaagcctgacttttttctctgattaccttggcctcctcttggaaccagtgctgaaaggttttgaatcctttacccaacaatgcaaaaatagagccaatggttataacttgggtagaaatatcaagagttgaatccatagtgtggggcccatgactctagctgggcaccttggacctccagctggccaatagaagagacaggagacaggaagccttcccattttttccaagtctgtttaattgcctattacctctctcaaagagaacctgaagtcagaacacatgagcagggtgagaggtgaggcaaggttcatcctgaatgggagaggaagtcgaaccactgctgtgtgtccttgtcaggatgctcacttgttcctactgagatgctggatattgattttgtaacagcacctggtgtttcacggctgtccgagtgagctaacgtgcgtgcggttgccaatga

SEQ ID NO: 368133 - DNA, 600 bp, Homo Sapiens
  misc_feature (47)..(289): n is a, c, g, or t
aaaaacacttacggctaggtacgaggctgggtggtgaattcggcacnnnnnnnnnnnnnnnnnnnnnnnnnnnnnnnnnnnnnnnnnnnnnnnnnnnnnnnnnnnnnnnnnnnnnnnnnnnnnnnnnnnnnnnnnnnnnnnnnnnnnnnnnnnnnnnnnnnnnnnnnnnnnnnnnnnnnnnnnnnnnnnnnnnnnnnnnnnnnnnnnnnnnnnnnnnnnnnnnnnnnnnnnnnnnnnnnnnnnnnnnnnnnnnnnnnnnnnnnnnnnnnnnnnnnnnnnnnnnnnnnnncgcacacaaccaagcttaggagccgactgttaagatgccccagtgacacggacaagtttctcctccgcaacccaatgagagctgctgaccacgagagcatcgcgggaccgccaaaggattctggaaaatgtggtcccgggtggccagtgtgcgctgaccttcacctgaaggtacggcttgaaggaaacttctggagggtggggtggtgttgaagagaaggcacaattgtcaccattttgttcaacatgggcgtttcctttgtgcattgatttgcatttttaaaggtatccattacacaatatgtttatcct

SEQ ID NO: 368134 - DNA, 1298 bp, Homo Sapiens
gctgcagcagagccctctgcagtaccttgtgccatgctctcattactcttgattgccattgacagcttgatgtaagtcaggttgtagatgagcatgagagtgtggagcagagtcggcgagcgcaagtcgagcccatcaacctggacagctgtctccgtgctttcaccggtgaggaagagctaggggaagatgagatgtactacgtgttccaagtgtaagacccactgcttagcaacaaagaagctggatctctggaggcttccacccatcctgattattcaccttaagcgatttcaatttgtaaatgatcagtggataaaatcacagaaaattgtcaaatttcctcgggaaagttttgacccaagtgcttttatggtaccaagagacccggctctctgccagcataaaccactcacaccccagggggatgagctctctgagcccaggattctggcaagggaggtgaagaaagtggatgcgcagagttcggctggggaagaggacgtgctcctgagcaaaagcccatcctcactcagcgctaacatcatcagcagcccgaaaggttctccttcttcatcaagaaaaagtggaaccagctgtccctccagcaaaaacagcagccctaatagcagcccacggacttaggaggaggagcaaagggaggctccggctgccccagattggcagcaaaaactaaactgtcaagctagtaaagagaacttggactgccagcaaagacacatggggctgggcagatatgtgagctggcctgacgccttgagtcgagggcatgtgctggggggcagccaaccagagttggtcactcctcaggaccatgaggtagctttggccacatggattcctttatgagcatgaagcatgtggcaatggctacagccaatggtcagcttggcaaaccacagtgaagaagacagccactgcatgaccaccagagaagatactcgtattaagcctatgtatacatctatatgcaatctcgtgcccattcaggaattctgggctgaggggccattacgtcacttatgccaccaaccccaaactgcacacgtggtacctgctcacaatgcacagcagctggtacaggaaccttcaacacgggactggcacattcgaccgaccggacttctgtcctacattgcagcaccttatgaagccagcaggggaatagcacgacatgcccaactttctggccaaagcactgatggtcaacaagattgcacacaccaagacagcatggatgaacgaactatgactccggcttaccagaacgtaatggg

SEQ ID NO: 368135 - DNA, 1097 bp, Homo Sapiens
  misc_feature (949)..(957): n is a, c, g, or t
ggtccggaattcccgggatcgctgtcttggagtcttgatctgtcgtcggcgggtcgctggcacaggactaaacatggctgaggctgggctccagccagatctggctggtggacagcaccgcgtgggcccaggatccacccagagcaggcaggccttgctggggccccagtcaagtccacttccagtgaggagagccagccgggaggtcagtgccagagctctggtggagcccagaccctgccttccctgagggccgcccctgtcgccgccctggggtccctgtcctcctatcctgactcctgccccagggccaccacccctgaactgtgccctggggcccccaccctccacctggccgactccagctctgggcctgtcagtccacctgggtcctctctgggccctgagtgcctggaccctctgtgccaagcaccagcaagcaaaggggatgaccttgggcacccccaaggtgctgagactacagccagtgagcccctgctgggggccaaagccatggagggtgcctgggcccttccaacctggaaggaggaggggagagagcaggcagcagggcagggggaagaggcaggagtgcccgatctgcacagagccctacgggcccagagagcgccgcctggccctgctgaactgtagccacggcctgtgtgtggggctgcctgcacagggctgctgggctcggcctccagtgccgacctgggccgggtgcgctgcccgctgtgtcgccagaagacgcccgtgctgggatgggagatctgccggctacaggaggaactgttacaggccgaagggggccctcaggccaaccccggccgaaaaggcccctgattcctatccaccgcaaccctgggcccctgcgggcttccctggaaccaccgcctccaagttgggccttccgggtagggcccccggggggaggccctgggtcttnnnnnnnnntttctgccctctgggaatcccgcccttttcctctcccccccctcttcttccccttctgggactccctgctactccctctcctctccgccctttcataccctttcactccccctttagtatctccgccgcccccccgtctc

SEQ ID NO: 368136 - DNA, 1220 bp, Homo Sapiens
  misc_feature (406)..(406): n is a, c, g, or t
gtgagataaggacgcttatccagctgcgggtcgacgcgcccgatatgttaggtctgctcgccacgtgtacggtcgcttacccccacctgagcttcgagcagcgcggaggggcgccccactggggtacttttatgagggacgaaaaaggaaggcgcaacagggatgggggacaccgccgggccggatcccgggggcattgaggaaaaatatctctcccttctgaaactgtccggattggggggcaaaccgggggagccctctgcttctgttgccaccccccctttggccccccggggtgggtggttaaacctggcaagccatcctcaaggggatgccctggaaccaaccggggggatggtgacaccccggtgtggggtattggggagcaccccacacggcccacatncttgcatggtgagacccttactgacacctatttacaagcaaggcttaaaaagaagcatctggggggcgccgggtgaaggcaaatcttcagggctctcggatcaaactgggagatttggggttggagaagcaggcagcaggaaatgaatctgtcttctgttcatatctggctgcaaagctcacaaacgctcaagctcaggctgcagcaaggttttgagaagtccagcctcaatcatcttgttttttaatcttcaatcatcttttgagtttccgtcctctacctccaccatcttccagccgcacaccccttctttctagtctccaaacactaagctggcttcccctggagacttcactcttgttccctctgcctggaattctttgaagccagaactttgcaagccccatcctttctcatccttctttattcagctcaagatgtcgccatctcagaaaggcctcccttcaacatccaagcattctctctcccatcaccctgttttttcttcatagctcttcttgcaaagtgcagttatttattacatttttgtttcccctgccaacctgggaactcaatgagggcagcgatcttgtctgacgtggtcgccacggtgttgccagttcctagactaaggcctggcccttggatggcgctcaagaaggagtaagaaattcctttaacttagggaattctggaatcgctttctcccggcagagccgactctaaccaagtgggaaaggcgaggtccgtggctgcctgtggcccagggatgacccgctctcgacgaattcgagctcggccgatttggcctgat

SEQ ID NO: 368137 - DNA, 819 bp, Homo Sapiens
ggaattcccgggatgggcaaacggcccctccaggagggagccgggagaattacgcagctccatgtaggtccacgtttaggttgggaggatctaccatgaagaaggtcaagaagaaaaggtcagaggccagacgccaccgagactccacctcccagcatgctagctccaattccacctctcagcagcctagtcctgaatccacaccacagcagcctagccctgaatccacaccacagcattccagccttgaaaccacctcccggcagccagcattccaagcccttccagcacccgaaatccgccgctcctcttgctgccttttatctccagatgctaacgtgaaggcagcccctcaatccaggaaagcagggcctctgactcgcgccggcccgcattcctgctcctgtgccacttgcccctgcagctccgcttgctggcgtcgtctggggctatgccatagccgcatcttcgatgtccttctgcctcgggactggcagatggcgccagggagaggactccccaacctgctcaccttctacagaaaatcttcaagaaaaccctccagtcatcgtaacgcgtgtcctccaagccctcggaactgtggctgtggctctgggggctctaggagctgcctactacatcactgaatccttgtgaacaagcccctaggcccacagtctggcagacctccaccagccccaggagttgataggtgatggcgctgggagaagatgttcagaatatctcaaaagccaagtccagaagatccagtttccatcaaagggacctctcttgtcaccaaaatttacaaacaagaac

SEQ ID NO: 368138 - DNA, 1154 bp, Homo Sapiens
  misc_feature (1049)..(1049): n is a, c, g, or t
gtggaccggtccggaattcccgggatcggggctggggatccgagtgaggcgaggggagggactgggaagaagagggggaaagtggggcatccgtagggcgtggaggagagcggtcccaagccctggggccctaggcttctccgaaaggccgtccgttcccatcacccgagggctgtaatccctcccgcgggtgcggaagcttcctcatctccctacctcccactgcactgccggtttccctgggttaccaaggagaagccagcgcctctacaccccagatccctacctgtttcaaggacctgccagtctgagaagcttcttgtcataaggccatccacgggccacgcacacctaccttgccagcctccagcatgcaggataccgtaacgacatcagcattgttggaccccagccactcctcagtctccacccaggacaattcctccactggaggacacacttcaagcacaagcctacagctctcaaagccttcaatcacaccagtccctgcaaagtccaggaacccacatcccagggccaatatcccgtcggatgcgccggatcattgctgaggatcctgagtggtcactggccatcgtgcccctcctcacagagctctgcattcagcacattatcaggaacttccagaaaaaccctatcctaaagcagatgctcccggaacaccagcagaaggtcctgaaccacctgtcccctgacctaccactggctgtgaccgccaaccctgatagacagtgagaactactgggctccgctgctgcatgcatcgctggccccgtgtgccacgtggcccacccatggcggccagctggaaacgcatgttcttccgaccggcaccctggagaaccctgctaaagcactttatcccagggaacaccagacccctgcgggtgatccctcgacctgctgccggttctggccggaattacctgcgccagggtcccccctccgaatcagttccctttcgccgggggaaatttccggggccaaatttcggggcggggggaccaagtccgaactctcgggcaccnaggggaaaaattggagggacccccccggttggacccctaaccaactgggggcaaacttggtaaattggccctgaacccacctggaagggaaatgggaaccctgcg

SEQ ID NO: 368139 - DNA, 556 bp, Homo Sapiens
ggggagaagggaggagttattcaggcctccgccagcttcaaggccctggggatggtctttcacctccctctttctgatctctttttcatgctcctccttgctccaaagaaaagccggatggcaaaagagcccagaacctattggaactgacaaaatcaagtcacggcgcctacaaagatgaggggcagattctggctgccttttaatttcgtccttcacctgatatctgtgccagagaatgataaaaatcataataaaggaaataatggaagaggagacttatgttactggggacatctaacataattattttcctgattcagtggcatggttcagtcttccaggagttctgctacagagaagagagtaacccccatccatcatggccaaagcacccagtcaggctccgctctggatccagcccgacaaatgcaacccttgaatagggtttgtgcaagcaaactggatgacgaccgaagaaaccctgtcgcttctgagaagacacccaatccaagaatgtgagttctggaaatgtcattaaatgtcagttatatac

SEQ ID NO: 368140 - DNA, 666 bp, Homo Sapiens
cacgagttgctatatctgcaagggtccaagcggatcacctgtatgaaagtgagcgacatgtttgcggcctggggcgagcacaggccagtctgccgagatttaggacaactgcttttaaaaagttagtggagaagaagaaagctaagaagaaattcggtcagaaacgtaggagaaaagccaaaaagcgtcactgaagccaaagaatcccgcatgtgtgatgcccaccttcgaggcccctcgggcatcatcacctcccccaatttccccattcagtatgacaacaatgcacactgtgtgtggatcatcacagcactcaacccctccaaggtgggaggagacccagggaacatacaatgcaacaaggagggtctaagtgtggaaactcaaagtctaagactgaggaatagaagttgtcttctgggaaacagcaaggacaatggatgctgtgtgcctaaccctgttcatggaactggcctacaggtgagatacaggtgtatccaaggactgcctatccactcaccttcagacatctccttcagcaaaaagcatagtctctaagctcacagtatgttttatgagatgagcattcattcattcattgatgtagatatgcctctgcccttgaggagtgtgcacgtaagagtgaagaacaggtctgaaaaaaaa

SEQ ID NO: 368141 - DNA, 923 bp, Homo Sapiens
  misc_feature (89)..(188): n is a, c, g, or t
ctgacggccaaacgtttcctagacgttgtcgttactgataagaaactacatttcccagggtgcagtgagggtagcgaccgggctacacnnnnnnnnnnnnnnnnnnnnnnnnnnnnnnnnnnnnnnnnnnnnnnnnnnnnnnnnnnnnnnnnnnnnnnnnnnnnnnnnnnnnnnnnnnnnnnnnnnnnatgagccaccgcgcccagccttgggggaagttctttttaccgtccatcatccatggccaccacaccttctgcttacgagttatttataataagtttaactaaaagagaacgagagaacatcccctgaaacccaaagtgtgtcattctatacagctttcctgcctgcaaaagaggaggagcagactcatccagcaaatcacctaaaaagtttgaagatcaaaaagcctagctccagtttcagatccttcccctacctttctgaacactagtttcttcctctgaaaaacgaaagagggaacgggaccgtagagtggagtgggcacaagaatcgcaagtcccttctggctatgacgctgcaagactctaggtacagtttaggactccgggcattcagatccccgggacttgtcaagttctcctcattgacatttttgatatttcgtgacaacacaaattcatcacattttgtgctgtgtgtcatatgtgggaaggagattttaaaaaagatggccttttgaagttaatggatagctgtgttacagaagaaaacatgccttcaagaagttatcggatagatatgttacagaagaaaaagacgttgtttcatttttgactttgcaggaaaagaatatgtaacacatcagaattcttctctcctccctggccttagtcgagtacctgaggggcattaaagcacttcctccttgcaacaagaaagaaagaaaaactaacaac

SEQ ID NO: 368142 - DNA, 804 bp, Homo Sapiens
ctcaacctgtagcctgtgacaatcattatcgaaggcaattaagttggaatatgcaaggttggttaagttggcccaagaagacaccccaccagaaaccgattatcgtttacatcatgtagtggtctactttatccagaaccaggcaccaaagaaaattattgagaaaacattactagaacaatttggagatagaaatttgagttttgatgaaaggtgtcacaacataatgaaagttgctcaagccaaactggaaatgataaaacctgaagaagtaaacttggaggaatatgaggagtggcatcaggattataggaaattcagggaaacaactatgtatctcataattgggctagaaaattttcaaagagaaagttatatagattccttgctgttcctcatctgtgcttatcagaataacaaagaactcttgtctaaaggcttatacagaggacatgatgaagaattgatatcacattatagaagagaatgtttgctaaaattaaatgagcaagccgcagaactcttcgaatctggagaggatcgagaagtaaacaatggtttgattatcatgaatgagtttattgtcccatttttgccattattactggtggatgaaatggaaagaaaaggatatactagctgtagaagatatgagaaatcgatggtgttcctaccttggtcaagaaatggaaccacacctccaagaaaagctgacagatttttttgccaaaactgcttgattgttctatggagattaaaaagtttccatgagccaccgaagttaccttcatattccacgcatga

SEQ ID NO: 368143 - DNA, 1011 bp, Homo Sapiens
catctgattgtcttaacagtacatggggtaggtaagacaggtatgataatcccttaattgtttcctgtttcttccgttgtttttccatgtgtctaagagtttccaatcttgattcaggagtaaacaaacagggcttattccagaattccaagtcatcttcactgttgtctaatttctttgtgttgtgttcctctgtgtctggtgcctgtaggtggtctttgctctctaaagaggaaagagtagcatttgatgtctgtgtaccaacgtccatcgaagcctgcgttacttctcttgtcttcatctttgatcctcttcttggtgtttcctctgagcctcttccttgagtttggctcgtttaagacagtgatctttttcctgctctctgatttgtggttcaattactgaatagtcctgcaatgccttaatcctttctgaaggctctatttctttaccatccaaccactttaattgtggaagagttgctaccacgaactccctatagtggtcaaaggaagcacatgggttccccatgagaaagagctccttcagatggatattgtgctgcaagtttttaatgctgctcagctctccaatgaaattcacagtcaggtcaagttttgccagctcttcacatccttccaagttttctattttttcaatgttgtttaaagctaaattcaaatattcaagtttcttgagtttgctaacattttcaattttcccaataagattattttgaagatagagaatttttaaatcccggcaccatttatcaatgtgttctagtctttctatttcttgctgatgcaacgagagttcctccagggaaaaaatgacacagtcgttgtgttcagcattccgtctaataagatcttctgtgatccagcccatggcgcctctccagttcgctgaccccgcaagccggacccggacctcgaatgacgcttttcacccttcacccctgctcctcagcgcgtccccgtcggaattcaggagccatggcaacccgct

SEQ ID NO: 368144 - DNA, 654 bp, Homo Sapiens
tgctcatatgtgcacacatctttacgatgttgttatcgaaggacggtctcaattcaaggtcaaattcaagtgagatatttgccgagaaccactccttatggaatgatatctggatcccaccacagtccagctgaatgttggtgatgttgatgctgctctcttgctgctgctggtgtttcctgccgctgattagccagcccaccagcctggggccacttgtgctgaggcattcagtctgtccccaaagtggatgttctgaattcggctttctgcgttgtgctttatgaggccctgagcaataattcttgccagggtggatttgttgtctctgtgggcttgggccaggccaggccaaggctgcttgtgtggtgccaagggcaaggccagcaacccgaggaagatgaggagcctccagagtggacacatcatagggtctgggacctgcagatgtcaagagtgtcagatggggcctgggcagacggctttgagggtggcagtctggagggatggtctaatggttttctgcagaaagatgacatcagaattagcccccagcatgctgtggggaggggctgcactggacctggcgctgccaccagggcttgctcacactcccgctctcgacgaattcgagctcggccgatttggcctgat

SEQ ID NO: 368145 - DNA, 850 bp, Homo Sapiens
tgggacctctgagggtagcttgccgcatcagtcaacctggtacagctccagcagctcctgcaggagcctctcctcctcctggagcccaccagactgctcctccaagaacctgctcctcccagctgagcccctccttcacggatctggggttgcccatggcttgcagcttctgaaacaagcccttgcagctctctctctctgcccggctcagcaggcttaggttcagggtgaagcgcccagtgctcgccaggctgcataggatccccagcaccgctgcccggtcagccggccccacgtgatcagccagtgccaccagcagctccccaagaagtccaaatcccacatctgtctggaagaggcagccgagccttggacccccaagctgcagtagagcctggtagcgctctggcccacttggcaagtgtcgtcgccaatcacgatagaagtcagcagacgtctcgggctggaggggggctttctccggggagatttcagtggccacatcctggaaggtccttccctgaatagtgtgacagttccagggcacagttctctttcctcccatcttatccttccgctccagtggcttcagatgtgatgcaaggacaatacccctgaactcctcataggaagccaccctctgttccactgcccgtaacttggcagcattctcccgtttgtacttctcatcagcagtgagtgcagcctgcagctctttctccaaagccttgaagttgatgatgtcattcctttccatggcctgtgccttcatcccagcagtcccggccttggtccccttgctttctttggggatccactgataaaccagaacaggagggcaaccccgcgc

SEQ ID NO: 368146 - DNA, 982 bp, Homo Sapiens
tgtacgtccaagatggcggcgccctgtaggctggagggactgtgagtgaccatgaaagacaccaggttgacagcactggaaactgaagtaccagttgtcgctagaacagtttggtagtggccccaatgaagaaccttcagaacctgtagcacacgtcctggagccagcacagcgccttcgagcgagagaatggcccaacaagcaaatgtcggggagcttcttgccatgctggactcccccatgctgggtgtgcgggacgacgtgacagctgtctttaaagagaacctcaattctgaccgtggccctatgcttgtaaacaccttggtggattattacctggaaaccagctctcagccggcattgcacatcctgaccaccttgcaagagccacatgacaagcacctcttggacaggattaacgaatatgtgggcaaagccgccactcgtttatccatcctctcgttactgggtcatgtcataagactgcagccatcttggaagcataagctctctcaagcacctcttttgccttctttactaaaatgtctcaagatggacactgacgtcgttgtcctcacaacaggcgtcttggtgttgataaccatgctaccaatgattccacagtctgggaaacagcatcttcttgatttctttgacattctggccgtctgtcatcatggtgcctgaagaaaccaggccacgtggcggaagtctatctcgtccatctccatgccagctgtgtacgcactcattcatcgccttatggaatgtacccttgcacttcgctccttttgcgtctcattacagtatgacagacacacctggaggactgcgaagaaagggacaagcgcatgaggagcctgtgcgactcactcgggatcagtgcgcgggtacagggacatggactgggacctcgagagggagagatacgaaccatgagttggacagtggcacagatccgggaccacaaacccacgaggag

SEQ ID NO: 368147 - DNA, 941 bp, Homo Sapiens
agcgggccttgccccgccccttccggaggctcgccgtacgcatgcgccctccgtcccgcgctttgttgcgaaagcgagggggcgaggtgctgcggtgctagagcgcggctgcgaccggacgctgcgggcggggaggaggatggagactgtggcgtccgctgcaacggttggggctgcgcgtgagaaggtggcggtgtaggcacctgcgctcggggaaggctggcggcggcggccgagccatggcgggagacccccttctctgggctccctgaagtctcggggagccgtgacccatgggatcgttgagcagccgggtgctgcgccagccaagaccagcccttgcccagcaggcgcagggtgccagggcggggggctcggcccggaggccggacactggagacgatgcggcgggccacggattctgttactgtgcgggcagccacaagcgcaagcggagcagcgggtccttctgctactgtcaccctgactcggagacggacgaggatgaggaggagggggacgagcagcagcggctcctcaacacccctcgaaggaaaaaattaaagagtacatctaaatatatttatcaaacattatttttgaatggtgaaaacagtgacattaagatttgtgctctaggagaagaatggagcttacacaaaatatatctatgtcaatctggctacttttctagtatgctcagtggttcttggaaagaatccagcatgaatattattgaactggagattcctgaccagaacattgatgtagaagcactgcaggttgcattgggttcactgtatcgagatgatgtcttgataaagcccagtcgagttgttgccattttggcagcagctttgtttgctgcagttggacggtttaaatacagcagtgtggtgagacaattgaaggaaaacagttaatgtgaaaaactgtatgtg

SEQ ID NO: 368148 - DNA, 879 bp, Homo Sapiens
tttggtgcccatgtcgagtggcagcccgtttggcgaatttgtgctaactggcataagcaatggtaaagtcgtgtcggtagcgtttgtccagatgggtcttgtaaggagatcttgctgggggattcctccattcacagttactcctgtgattgaatctatgtaaggatagtagccaagtctatcaacataaaatattgtaacaccttgcccggtggcgtttattcgggggcttcctatgaaagagaagaggctcatatctagtggctcatcaaattttccaagacaaaattcacttggggcattccaggcccagaggaaaggcacatttggaataacaggaggtgctctgaaattcagagtcaagcaacatggaatcagaaggaaggtgaaaactatctgggatactccacttgatttaacaaagcttctgaaaaagatgtgcttgaattttagcactcccattgtaaagagtaatgactatgaaaacatttatttcttcctacacactttggtttacccaatatctgatgcaaagtatgagcacagatgaaagggaatggaatgaattcactttgatggataaagaggtataatgattaagttacatttaaatattattattcttgtttcatgtttcaggattgtttttcaagttgcatcacctataaccagaagtctgctttcaaaatccagccacccaatgtctcttcagtagttatcaaggcaagaagttggctggtctcaatgtcttcctagagcattggctagtcattagcatcccttgctaggaaggaccttatgaggtgctgctaaccacctacactgctatcatactttctgaatttatgtgaagcccccaaagcaaggtttaacaaagag

SEQ ID NO: 368149 - DNA, 1111 bp, Homo Sapiens
  misc_feature (982)..(982): n is a, c, g, or t
  misc_feature (985)..(985): n is a, c, g, or t
ggaattcccgggatgtaggaacgccgagtcggctgccgtggctgtgctgagggtggcggccggatagctgatgttctaatcatgtcagataaagatgatattgagactccactgctaactgaagcagcccccatccttgaagatggaaactgtgagccagccaagaattctgagtctgttgaccaaggtgccaaaccagagagtaaatcagaacctgtagtttccactcggaaaagaccagagaccaaaccttccagtgaccttgagacttcaaaagttctccctattcaggataatgtttccaaagatgtaccccagaccagatggggttattgggggagctggggcaagtccatactctcctcagcctcggctacagtagctacagtaggacaaggcatttcaaatgtcatcgagaaggcagagacttcccttggaatccctagtcccagtgaaatttcaactgaagtcaagtatgtagcaggagagacaaatgccaaagagaatgaaaactcctccccagtggctggggcatttggtgtattctctaccatctctactgctgttcagagcacaggaaagagtgttataagtgggggtttggatgccttagaattcattggaaaaaaagacaatggatgtgatagcagaaggggatcctggatttaaaagaaccaagggtctgatgaaccgaaatgctacactatctcaggttttacgagaggcgaaggagaaagaagagatacggacctccaatgaggttaccgtggaaacagacaagaaaactcattatgggctactctttgatgaatttcaaggcctttcacatctagaagctctggagatgctttcccaagaaagtggaaataaggtgaaatctatccttaatcctctgaagtggagaaggaataaaagactctaaaaggtggaattagagcaccttcaaggaaacatttttctctaaccagaattttggtggaanaanagggaacaacaggaaaaaaggggggatggagaatttttaccccgggacattaacacaagcctgttttttcccaggctggacacgttttcctctccaaacccaaagaaaaaatttgtgcccaggggg

SEQ ID NO: 368150 - DNA, 810 bp, Homo Sapiens
ggccagagcccgtgctcttagctactaagctgtactgctcttcattttgctgatgttctaatcatgtcagataaagatgatattgagactccactgctaactgaagcagcccccatccttgaagatggaaactgtgagccagccaagaattctgagtctgttgaccaaggtgccaaaccagagagtaaatcagaacctgtagtttccactcggaaaagaccagagaccaaaccttccagtgaccttgagacttcaaaagttctccctattcaggataatgtttccaaagatgtaccccagaccagatggggttattgggggagctggggcaagtccatactctcctcagcctcggctacagtagctacagtaggacaaggcatttcaaatgtcatcgagaaggcagagacttcccttggaatccctagtcccagtgaaatttcaactgaagtcaagtatgtagcaggagagacaaatgccaaagagaatgaaaactcctccccagtggctggggcatttggtgtattctctaccatctctactgctgttcagagcacagggaaagagtgttataagtggggggtttggatgcccttaaaaattcattgggaaaaaagacaatgggatgtgataagcagaagggggatcctggaatttaaaaagaaccagggtcctgatgaaaccgaaatgcctacactattctcaggtttttccaggaggcgaaggagaaaagaagagattccggacctccaatgagaggttaccgtgggaaccggaccaggaaacccctttagggggctactccttgaa

SEQ ID NO: 368151 - DNA, 803 bp, Homo Sapiens
tgtcttcctgagagacagtagatttagaaagtgaggatcagagggtggaaaataaaagctgtggtccccaggagtcctgaacatctggggacagcgggaaaacatgagtgactccaaggaaccaagggtgcagcagctgggcctcctggaagaagatccaacaaccagtggcatcagactttttccaagagactttcaattccaggcagatacatggccacaagagctctacagggtgtcttggccatggcgccctggtgctgcaactcctctccttcatgctcttggctggggtcctggtggccatccttgtccaagtgtccaaggtccccagctccctaagtcaggaacaatccgagcaagacgcaatctaccagaacctgacccagcttaaagctgcagtgggtgagctctcagagaaatccaagctgcaggagatctaccaggagctgacccagctgaaggctgcagtgggtgagttgccagagaaatccaagctgcaggagatctaccaggagctgacccggctgaaggctgcagtgggtgagttgccagagaaatccaagctgcaggagatctaccaggagctgacccggctgaaggctgcagtgggtgagttgccagagaaatccaagctgcaggagatctaccaggagctgacccggctgaaggctgcagtgggtgagtggccagagaaatccaagctgcaggagatctaccaggagctgacggagctgaaggcggcagtgggtgaagttgccagaggaaatccaagctgcaaggagatctaccaggagctgacc

SEQ ID NO: 368152 - DNA, 694 bp, Homo Sapiens
aaatgctgccctccacctccgcctctgccgccgccgccggggcggttccccgcgctctaccctgcactcggcctcaacgggctcccgcagctcggctaccaggccgccgtgctcaaggagggcctgccgcaggtctacccgccctatctcaactacctgaggccggattcagaagccagccagagcccacaatacagcttcgagtcattacctcagaagatttgtttaatctgtggggatgaagcatcaggctgtcattatggtgtccttacctgtgggagctgtaaggtcttctttaagagggcaatggaagggcagcacaactacttatgtgctggaagaaatgactgcatcgttgataaaatccgcagaaaaaactgcccggcatgtcgccttagaaagtgctgtcaggctggcatggtccttggaggtcgaaaatttaaaaagttcaataaagtcagagttgtgagagcacttggatgctgttgctctcccacagccagtgggcgttccaaatgaaagccaagccctaagccagagattcaactttttcacccaggtcaagacatacagttgattccaccactggatcaacctggttaattgagcattgaaccagatggtgatctatgcaggacattgacaacacaaaacctgacacctccagttctttgctgacaaggtcttaatcaac

SEQ ID NO: 368153 - DNA, 847 bp, Homo Sapiens
ccaggaaggactaagtaggttgtctgttgctttttccagctttcctactagccgatcagctcttgtcccaggtggacctcctgatcctccggaacctcctgggccctgtcccaggcagctttggaaagagcattctgaaccccgttcctgtacccggggggagtcggaggtgtgattcacagcctccttggagctctcagcctttgtttgttgttggaaagaccacagcgtctactacaacttctacacgatagtacacgggatgttctcttcaccagtgaacaaacattcctcttctctgaatgtacccatgagaaaagagtgccaaaaaagtgacacaggcatactgctgagataaggcaaatgtgcagcaagtcacaggaatagcagtgctcactgggtgctggtacagtttcaggtattgggctgggagttgtccagtcgtcaccttctttaatcttcacgacaactctaacatcgagtgctgtagttcccaatttactggggcaaaaagacaggttacgtcactggctgaaacgggctgacctcagtgtcaaatccaggttttgctggtcacagaaacaaagcttttaaaaatctctccaaatactacctctaggattcctggaggccagacaccctaaagaccagcaggagcctctgacactccatccacgcccccactacagggaactggtgattacacgatgaataaacgcatcttacaagaatgggagccaccacttagggccaagctatttgtgactaaacaagcaaacaaaagaatctgctcaaggtgaaatttgatcgttgcccattgactctcaggtgataactaacccgggaa

SEQ ID NO: 368154 - DNA, 776 bp, Homo Sapiens
ctctgatggagtccctgcactcactcaagcttgcatttggatggtgacacaagaatccatgctgaaggctgccttgcctctctttaccagattcatcatcagcaatggactgcggaccgagcacggggtgtttgagatcacactggagactgtggacagagccctgcctgtggtaaccaggaacaaggggttgagactggcccaaggggccgtgggcctgctttcccctgacctccttcagctgaccgaccctgatacacctgcggagaacctcaccttcctcttggttcagctcccccagcatggccagctctacctgtgggggacagggctacttcaacacaatttcacccagcaggatgtggacagcaagaatgtggcctatcggcactcaggaggggactcccagactgactgctttactttcatggctacagacgggacaaaccaaggctttattgtgaatgggagagtgtgggaagaacctgttttattcaccattcaggtagaccaattggacaaaacagctcctcgtatcacactcttgcattccccttctcaagtggggctcctgaaaaatggctgctacgggatttacatcacttcccgcgtgttgaaggcatcagaccctgacactgaggacgatcagatcatctttaaaattctacaaggcccaaaaacatggacatctggagaacacaacaacaggtgaatttatccatgagaaatttagccaaaaggacttaaacagtaagactattctttacatcataaac

SEQ ID NO: 368155 - DNA, 740 bp, Homo Sapiens
cgctggcggagcggctgggcggcgggccgggcccggggccgcttggaatggcgcctcctccgccttcgccccaactgcttctcctggcagccctcgcgaggctcctgggtcccagcgaggtgatggctggaccggcggaggaggcgggagcccattgtcccgagagcctgtggcctctgcctccgcaggtgtcaccaagagtgacctacacacgagtgagcccagggcaggctgaggatgtcaccttcctctaccacccctgtgcccatccctggctgaagctccagcttgccctcctggcctatgcttgtatggctaacccttccctcacccctgacttcagcctcacgcaggatcggcccctggtgctgactgcatgggggctggcgctggagatggcctgggtagagccagcctgggctgcccactggctgatgaggaggcggaggaggaagcagaggaagaagaaggcatggatctactgtgaaagcctttcagggcctgctccctccgagccaactcccggtagagggaggctgtgccgaagagggtgtgtgcaggccctggctctggcctttgctctgcggagctggcgagcccctggcacagaggtgacatctcaagggcccaggcagccctcttctagtggtgccaagaggcggaggctgcgggctgccttggtccccagcccactcgctcagcctgggatgggcacaggggtggtagaggaaggtgacatc

SEQ ID NO: 368156 - DNA, 844 bp, Homo Sapiens
agcggagtctgatgaacactgctctcctgcctagagataccactgagtccagaagcaagacctgtgagagtgcacagtgccacttcgccccatggctgaagatggtttgcccaaaatttattctcatcctccaacagaaagcagtaaaacaccaactgcagcaaccattttctttggggctgacaatgctattcccaaatcagaaacaactattacttcagaaggagaccacgtcacttcagtaaatgaatatatgctagaaagcgatttttcaacaactacagacaacaaactgacagctaaaaaggaaaaactcaaatcagaagatgatatggggaccgactttattaagtcaacaactcacctacagaaagaaattacctctctgactggcactacaaactccataacaagagactctattaccgaacatttcatgccagtgaaaattgggaatatttcatcaccagttactactgtttctttaatagatttttccactgacatagcaaaagaagatatcctcttagctaccattgacacaggagatgcagagatctcaataacctctgaagtctctggcacactaaaggacagcagtgctggtgttgctgacgctcctgcctttccacgtaaaaaggatgaagctgatatgagcaattataattcctccatcaaatccaatgtccctgctgatgaggctgtccaggtcactgattccattattcctgaggctgaaatccctcctgctcctgaagaaagcttcactactattccagacataactgcccttgaagaagagaaaataaccgaaaattgacctaagtgtaaagaagatgacacc

SEQ ID NO: 368157 - DNA, 831 bp, Homo Sapiens
tcggaggaggccctcttacacctcaaggcaggtggcactggcagggcctggaactgtctttggtaggaagttcccatcttgtctcgtgtagtcccacttgagggtgttggggcccccgaggtggcaactgggcgcgcgaggctgcgggcgcgcgtcgtggggtggaaagagcgcctggtgcgtggtgggcgggatgcgcaacttgtcgcggtcgccaggaggcagggagtcgcggtcgaagatgaggcgcgcgccgcggatccgctctcgggtgcgcgccggcagctcgggccagccgtaggcggcgtgcgcgttggagaggccgatcccggcgtgcgcgtcctcgtgcaggtgcaggttgccggcctgcatggcgagcgtgcgttcccgcgcctgcgcttgcagcagctcccacggcggcgtggatggcggcgggaacgcgcggtgcgcctccgacacgcgctcttcccggtcccagcgcgggtccattgggaaaagcagcgcgggcggcggctgcaggctcggcggctcccgggtggcagccgggtaggcaaagtcccggtgcgacgtggtgcgcatggtgccctcgtgcagccgcaggtcaggccccagcgagaagtgcgaggccttgaggaagtccagccgggacatcgggcacgggcgcgagcacggcaggagggcgcctgtggccatcgcgggacaccagccacctcaagggatggcgtgtgaatcaatgagttttagaaaattcacttagctacagaccagatctttgggtctccctctgtccctggtctctcagaggatcctcatttccatcccgagaattcc

SEQ ID NO: 368158 - DNA, 1086 bp, Homo Sapiens
ggaagggggcgccaggcagcccctgacctcacttggaagaggagagaaagagagtcgaagacgccctgtcaagatgccactcacctaaacgccagaaacatctccccgactaaggacaggccgacccccagcaggaccagcgccacgagcttccccatggtctcggggtgcccagcggcgactgcgcggcgccgagagctctcgggggcgcggcgggcggttcctgcctcgcgtacggattggggcccgctcggcccgcccgcacacgcctcctacttacctgagcggcccgggtgccgcagcatgggcgctgacgagtcccgccgagccccgccgcccgggttcaaggccgccttcacgcccacgattccttgttttttgggcagaggtcaaggctcaacggagagggagcccgggaccgagttgtggtgggagtttgctcctaacacccgcgaaatcctacctcaattcctcagatggcctgagggagaaaccggagggcccgggaatggcggggagctccagttcagagccggaactccggacttctgcaaggccagacgtgaggcgacactgaattgctcccgagacgcgggaagggcgaaggcaatcgaagcgaagagctttaactcatcttctccaggattcggggcacgggaacctgtctccttgaccttcgtgccttacctcggagtgtgctgcccagacggacttgtgaatagctgcgtctgtccccatagttaacgggagaaggaaacaccaggagaaaagaaggacaagacaggaaacgggaagaggagcagaggcgaggaaggggaaggtcatttccttggcagggtaggccctctttcttctaggtcttgagttcctgccaggcaagaaatgctctttcccctctcctgatgaacaccaggttggagggggaggaactgaagatgcgggaagacttgggggagttcgggcgaagtagccacattcaaggcatgatctattttatttacggacacgacctgacactattaagttctggtagggtccaccggagtaaactactctggtgacgcagagcaagaatttggcaatcct

SEQ ID NO: 368159 - DNA, 965 bp, Homo Sapiens
tggggcgataactcgtagttttatacattatcgaagttatggatcaggccaaatggcgagctcgaatcgtcgagagcggggagtagcggtggcttaagccgcgcggagcagcgcaacctgggtcgctccctgcttcgccgccgcctccggaccgagccagcggagtcagtgtcctagagaccctgtaacaccacaaagcggacgaaggagtccatgttggggaacttggcagcggagtgactgggacctgggaacctactgtggggccgcggccggaccgagcgcctcgacctcggtctgaggaaacccttttccaaagagaaatgaagaagaaaactgtatgtaccctaaatatgggagataagaagtatgaagacatggaaggtgaagaaaacggagataatactatttccactggtctgttgtacagtgaggctgacagatgcccaatatgtcttaattgtctattagaaaaggaagttggttttccagaaagctgtaatcatgtcttctgtatgacttgtattcttaaatgggcagagggacttttcacataggttatttgatttcttctttatatcagccttgtggaataaccagagcagatacgatagtgtccttccattttacagatgaggaaacttggattttatgttctatgacttggtcaagatctcatagtttaagaggcagaagtgaatttagaactgattttctaattcctgtttttaatttagtgtggactaatttcagagtctgaattagagatattaccgtcatagacagtgaataagaaacaagacattcgtgacttttaatgtattatgttgactcaattgggccaatacttgaagtaatattaatttatatagccttatggcttgaactgttagtaaaaaattttggtcatattatgcgatattttctaagtaatatttgtcagcctgtaaaaattgtaaggagat

SEQ ID NO: 368160 - DNA, 670 bp, Homo Sapiens
gctggggccagctggaggccttcagtacagccccagccaactctcactgaacagctggagcaccgacaccctgggcactcatttcaaatcatgaaatgctacttcacagatcacaggggagaacagtcacccaccgatgggaccaccctcagcttgaccagccctgagtccactgaggagagtgtggaagtgttctggccagggactatacagagagaagggtcgtccccacggccggggcctgccattccccgggaggagggcctctacttcgctgccagggaccgggggatgcgggactggagcagctccccatcctcagagtcctccgagtaccagtcctactcccagtaccagtcgtgctgctcctgcatgtgcgatgaggacaatgctgctccgcagagtgtgtgtgccttctacacgcacgtgcagactgtgcggggtgtggctgtggcctgggagacggaggccggcttcgagccggtcaccaggaagcccccgcatccatgaagcccagttcatcaagaggcagaggtggaacggctcctccttcgacaatggcttccaacaccgatcatgcgctgggacctggaaggcctgccaagagcaactgcagccccgagcccgaggacatagacctgctggagtgctgcctgcaggagctgcggga

SEQ ID NO: 368161 - DNA, 752 bp, Homo Sapiens
cgcgccggagcgggacacgcatgcgccggtctggacccggcacccagtaacggactcggagctcctcccaccggaagtgggcagccgcgcagcgggaagagccggccgaagcgtggcggccacagactgtgggtaccgggtccgagggactcgcgcttttctctccgtgccatggcgccagcgaaagccacgaacgtggtgcggctgctactaggctccacagcgctgtggctttcgcagctcggctccgggacggtcgccgcgtccaagtcggtgactgcccacttggccgcgaagtggcccgagaccccgctgctgctggaggcaagtgaatttatggcagaagaaagtaatgaaaaattttggcagtttttggaaactgtgcaagaattagcaatttataagcaaacagaatcagattattcttattacaacttaatcctgaagaaagctggacagtttctagacaatttacacatcaaccttttaaagtttgctttctctataagggcatactccccagctattcagatgtttcagcagattgcagctgatgagccaccaccagatggttgtaatgcatttgtggttattcataagaagcacacctgtaaaattaatgagattaaaaagctgctgaagaaagctgcttcaaggactagaccttatctatttaaaggagatcacaaatttcctacaaacaaagagaacttaccagtggtgattctctatgccgaaatgggtactagaac

SEQ ID NO: 368162 - DNA, 868 bp, Homo Sapiens
cgggattgacacagataagcacaagtatcccatggttctggtcgtgtgactttcaataaccaacggagttacctgaaagcagtcagcgctgctttgtggagatcaaaaccaccaagttcacaaagaaggttcagatgacccctacctagaagattctctgtgtcatatctgcagttctcagcctggtcctttcttctgtcgagatcaggtctgcttcaaatacttctgccggagctgctggcactggcggcacagcatggagggcctgcgccaccacagccccctgatgcggaaccagaagaaccgagattccagctagaggagctggccttgcccagtggcctgtggcgcccaaagctggcaggtcaggcaagcagcctgtaccaccctgccactggcgaccagggagctggcttcccaaggacaagggaaaattgtagtcacctttgcacttgctgaatctgtctttgtttctgcactaattaatgcacattgagttttgtcaggttttgttttcagggggtgtaccaagggcaaggaccctctggcttaacctccaagcgactctgtagttttcccagattttagttcctcaattttgccaggaattgaaaaaaggcggggaaataaaacaatgatcatgatgcataataaacaaaacaaccttcaggttgctccccaaaagggtcattggcaggcgtatttgcaccgcgggattgcctataaccccccatggggttatcttttttaaaaaaaccggctttaacaattcccctgggacaaaaacggcaggggggaatagttccccgcgtctctcatgggggccatccttgcgttgccctaacaggcccttccctttttttacccc

SEQ ID NO: 368163 - DNA, 723 bp, Homo Sapiens
  misc_feature (446)..(446): n is a, c, g, or t
agacaggagagggaaagcggggctccctcctccaacggctctcaggcacagccacgcctccagcgctggcgccccgcctcgtctttgagttggcagaggacctggcccgcccccaccccaggcagaggctcagaggcgccccactttcccccttcaaaaggcgggccgggccgcgtgctagggcatccctccctgggaaggtgagtgggatggcgagactgagccagcacatgggaggcttcccagcacgtgggaagatcgggacttccctgctggggtgctccccgcggggctccgcacttagtcctgcccgaaggacgcttttcgccacccccggggttgccttttggttggccgcgagccctttaatgcgcggtagggggcggagccagatcttaaattctggcggtagggggcggagcacggcagcggagggagaccagaantggttagggagctggacccagagaagagcaagctcgggatcgggtaataggggggcccgacagtagtgtgtagcgaggactggccctccgggcagggcctcgcggctggaatgggcccccgcgggaggaccgcggggaattgatggagctgggcggggggaacggagcccgacgaggccgctatggccccggactcgaaagaatgccaaagaggggctcaaggagccacggtcgccggcggtggcgaaaagacagggccaagcctcaaggctcatcc

SEQ ID NO: 368164 - DNA, 963 bp, Homo Sapiens
gaatcttcagctaaaccgggaaccattagtcaagacttcctgttacactggctataaagcatctcaacaggtggattccagaaaaggtcacagcacttacaggaaacaactgaggaaaacatccttgagttttcatgttaacaaatttctggatctgaagcacttgttttaaaagatgtcccttggaagatttgtcaatttttgttaatacaatcacataaggtaatgcaaattcttcacacatttctatggcaatattgtctgttttttgaattccaacaacgctatccactaataaaaatgttctcttcaagttccttcgttcttttagataggtctctaccatgtcaacaaaatcttcaggtgctctaaagccataacctggcatgtccaccactgtaaaatgttttccaactttgaaaaaattcattttctttgtgtgtcctggttttttggagactctgacttcaacctcaggggccagtgaaaataaagccttgattagagatgattttccaacattgcttctgcctataaaacacacctctggccgcggaaggtccggggcgtggtcgatacggacggcggagctgacgtagtcgatgcggttccgttcagtggccgtgaagatgttgtccgccctggctatgtcctccgggcttgggtcaaagatacgcaggtgaaggtcttgcctcccgtagggggcgaggaaccgctctacttcctgcagcgggtacagcagcttcctcagctgctgcttcggcagccgcagcacctcagcaaaagcttgggacgtgctattatagcggctcagtcgctctagcaccgcaggcatttcaaagagtcttcccgctcccagccgcagcccgggcgccgccattctcccttcccagaagaccggcagcagagattttactcctgtggcctgggttgcgcgtgcgtgacttcccgctgccgcgacgc

SEQ ID NO: 368165 - DNA, 1427 bp, Homo Sapiens
  misc_feature (162)..(222): n is a, c, g, or t
caccttcgtgctgtttggagccatgctggcagtgcctgcaagggccatgttgcctttgtttcctcctgcaccgatggtgccgccccagctatggctgcgctcacctgtccaggggcagaattggctgctgccacactcaaggcacctgctacggtgcctgtnnnnnnnnnnnnnnnnnnnnnnnnnnnnnnnnnnnnnnnnnnnnnnnnnnnnnnnnnnnnntcagcaagttctgtagatgttttggggatggatgcattgagcacattagtgggtttgttaaagtcattttggagtccctcccctccagcataagcagcagaggtggccccacacacctcagagaccatgtggaggctttggatgctgacctggtcctgatccccctttccttgaaggttcacggctcccaggctcctcctgtcttcctgaaacacaggcatccacatcatgtcttcagctggaatgccacaggtactgctgttactctcccatgggtggccgcaagaggtaaattagtttttcccaataggcaaagaggtcatcccgtgtgtcaagagcgggacacaattgcagatagcaagatctgccagtggcgaacttcaggcgcagctgttgtttctcatggtcttgaacagagatccgtacaaacctcaggggcagaagcctggtgagctctaagttctttgctgccttgcgtttttttctcttggtggcctggccatgtccagcatactcttcggcagccggtgccggtcgtgccagtagcatgacatctgggagtgggaggatggggctggtacgtgcaatgcccatggtcaccatacggacacggttgtgcacatcaatcacttctccccttttggtgatctggataaagtcgctctcaaatatcggtgcatacttgaatatatcgtactcccccttgtacagttgtcgctgcagtttccccatggtggtgttgaacatgctcatgctggagccactctgggccgtataatacggcagcagaaaatcagcattcatggttgtctttcagcacaacggcagcactggtgaggcaggtctctgggtcttccttggcctcggtggcagatgagggaccagtggtgctcctgggtcacaaagatgtctctgcagctggtctctcaatcccaccccaccccacaggcccccactgttgcctcagagcctcccagaggccggggtgggggtgggagcacggatgattgctgtggggggtgctgtagggtgcctggactccagactcttccaagacgtagagatgcagggtgggctccagagaggttttcttctggacctaaccccctgacctccacctctgatttttttaattacagtttgtagtctctctccctgagagagactacaaactgtagtcctagtgacaggaagatcccgggtat

SEQ ID NO: 368166 - DNA, 818 bp, Homo Sapiens
ggggtcgaagggcttgcttccggagagcgggaaggctaaaacgcggtagctaaactgcagccaactttggttgtgtgtggaaaaggctttagccatggacaggagtggctttggagagatatcatcccctgtaatccgggaggcgagaggtgacacggactgcacggaaacagagtgctcagaaaagagttttacttcaggcatctcaagatgaaaattttggtaatactacaccaagaaaccaggttatccctcgaactcctagctcatttcgacagccttttaccccaacaagccgaagcttactaaggcagccagatatttcctgcattcttggaacaggagggaagtcgccccgacttacgcagtcttcagggttctttggaaatctctccatggttactaatctggatgacagtaactgggcagctgcattttcatcacagcgttccgggctgttcacaaacacagagccccacagtataacagaagatgtaactatcagtgctgttatgttacgtgaggatgatcctggagaagctgcatccatgagtatgttttctgatttcctgcagtcttttctgaagcactcttcgagtacagttttggatctttgtggaagagtatgaaaacatctggtggtagtcaggtgaatatactgagtaaaatagtgagtcgagcaacacctggacttcaaaaattttcaaaaacagccagtatgctctggctccttcaaaaggagagggtcacagggaggctgctggccttccttgtatagagaagaatacggcctgcattttaaaaaagaaaaggggatt

SEQ ID NO: 368167 - DNA, 1435 bp, Homo Sapiens
  misc_feature (58)..(73): n is a, c, g, or t
  misc_feature (110)..(154): n is a, c, g, or t
  misc_feature (267)..(267): n is a, c, g, or t
aaccggccgagaggggtgagtcaacccgacgccgagcccgcgcggaagtgtggattannnnnnnnnnnnnnnncgtgaccggaaagcgggcgtgaagggggaacgagaannnnnnnnnnnnnnnnnnnnnnnnnnnnnnnnnnnnnnnnnnnnntggcgccaatgtagagtgctttacaggatggtctccacaggcgttgatggggcggggcgcccacacacctagggacaaacgggcgataacgacgcccttcagcgggcgcccgnagggcggcgcggaggccgggctttctgggtggccgtaggcgccgtttttcagggggtcgatcaacgcggcgatgcggtttcgcgttgacacactgggggctggtccgagggcgctcgtagcgcggcggagcgggtgctgggctttgggggaaaaaagggacatccttttgctaaccagaaattttgttagccctctggaagggttatgtgattccgttaacatatgccagggggatttcagcaatatcctgctccattgtagaaaacagcaatctgatccttttctctcctcaatcattaacgagattatgcatttggggtgtgataatcctccagggacaagtattctcaaatcatacgtttcagtttcttcttaaggtgcttaacaaagtctcgtctcatacatcttgctgcttccttgatgatggattcaaaaaatcgcttcctgactgcagtaggtccttgcactccttcaagcatttcgaagattttttcatatttttgtccaacgcatcggagttccttcactaatttacgttttatatcagcattaatttctcgttggcttttgggagaggaggctgtttctctgcattctaggtcatctccagagaaactgctggtaacgtttcctcccacaggtgcattgctaccaggtttctgcatcatcctatctttgctgaaaccagtgaagtcatcaatctgagaatccaattggctgggtggaatagcatgtcctgtcataagcttctttgctttggacatggcagagcctgcaataaggctgtctcctgctccttgtttccttgccaacagggccatcctctgccttttctgatacgaaggactgtcacattccctgggacgtttaaacacagtttcaggatctacagccaccttctctgttttatcggtcattgtttccttgctggaggagagacggcggcacctcacaaaatggcagtgaagttgtggcgcctccccactggtggcactttctagaaacctgccctctgggagttgtgggaaatgtgccccctagggcacctgggagtgatgtgcatggggaggcgtctcaccagaagcaccgatcccgtttggcccaagggggatgggaggaagggaagtagccagccacagcgtgcctgccccagccgaacactccgct

SEQ ID NO: 368168 - DNA, 882 bp, Homo Sapiens
  misc_feature (782)..(814): n is a, c, g, or t
cattggggttcaaagagtgatttaaacccccctgtgtttcctccgcccaagcaaggcagggttgacaacctttgggaaggggggggaattgctttcccccccacaaggggggaagcggctccctccatggtttgggacagtttttggcgacaaggcacccagtttcaaaatccaaaccttagtataaccaagtactcccataaaaagtgtgcttaaggcaaagaaataagcacatttggataatacaaatatccagaaacaatggaaaagaaaggcttctattagagaacagaaggcttagcatatatgagtgcgcaatgatcctgatagctacggatactgtttttatttacagtggcaaaaactttattactacagaaggtcactgacagacaatctactggctggttaattgtttcaaatttgattctttatcaagcaaaaatatcacacaacctgatcaacacacacacaaacgcttcagaaatcacttaactatcaagatggagcagactatgagagctatttataaaacacgaatatttgcatggaactgcttaatatcagaaaattccaagaactgtcaaaggcagcatttgaaaatagttctgacaccttaagatggaattaccatccagaaagccactactttgaaaggaaatctgagctatgaggatggtcatcatggatgaaaaggtcgattttcctaatcattatcaggacgcatttacaaaaagctgtaaaacttcaaaggagaaaagtattttccttaatcaaccatnnnnnnnnnnnnnnnnnnnnnnnnnnnnnnnnnttagtttgcttgcgagttatataaagacacaggttactgtaccctcattttcttctatttgttttttc

SEQ ID NO: 368169 - DNA, 764 bp, Homo Sapiens
gctgcgcccgcgactcctctcctcctccgtcgtcaccccggcctgccctgccagccccgaacttgcccgcgcctgggcgggcggcccctcagaccacggggctggcggtgcggttgggatgggaccgatgtggcgcatgcgtggtggcgccactaggcgcgggagttgctgcggcggggacggtgctgcggacgtgccgagggccaggccgcgtccggctgggctcgtggtggtgggcagccccagcggcggcggcgtgcggcgtgaggctgacgaggccgcgcggacggcgcccgacagcagctggaggagcggtttgccgacctggcgggagccacattggaggccatccgtgcgcgggacgagtgggaccggctagaactgcgcgggtgcgtcaggagaacgcccggctgctggctcgagaaccggcggctgaagcgcgagaaccgcagactcttccgtcaggcttgcggctccccggcgaaggcggcgacgggacgcccgggaggcacgccgggtccctgaagaggccagcacgaaccggagggctagagacagcggccgagaggacgagccgggcagccccaggccctgagggcccgacttgagaagctggaagccatgtaccgccgggccctgctgcagctgcacctcgagcagcggggaccacgtccgagcggggacaaggaggagcagcctctacaggaacccgactccggcctccgctcccgggactcggagcccgctgggccctggctgtagcc

SEQ ID NO: 368170 - DNA, 494 bp, Homo Sapiens
ggaagcatgtagctgctggcactgccttccctcagagaactgaactgttttcggaacctcggccaacagggatgtctctttataatagtttggagacagctactaccacagaagaagagatggaactctagaaaccaatttctacactaaagttgtcaaatgttagaagaatcctgtggtcagttatgagactctttgcatagtatagggacttgaaagttttatgagacgggtgtaataatatctccacctgagatttgggggtgggactcttattttgggtagccatttattgacttcacctttttgccaaggaagtttgtctcaagggaaaagcagttttctgtggggcttattaaaggaatgttggtttacattgtcttcaaagacaagtatagaagctgtatgtgtaagggtgacttaaatcatatgtcacattgtctaaactattcagacacttggagaatattctccttgaattaaaaaagatgatt

SEQ ID NO: 368171 - DNA, 1013 bp, Homo Sapiens
cctggggctgcttgttcctgtggtaatgtggcagctgggaccatggccacgcttcagtctgcctggcgtcacataagccagcccacagggctcctgcagcttgtcctttctggctggaagctctgggcatatgcctgggactgggtctttccagagagggctgcagccagggccctgccagcctcgtggggccacagcggctctcacaccagcatcttgctggataggagcagttccaggagctctctgtagtcacaccgtgatcatcgtcactgacctatgaattcaaggtagctgcctgccatggctgagaggtgtgcctcagctttaatcccatctcacgtgatggagctccagtgcctgcaagaagtctcaccagagtaagaagtggaggatccaggcccaggagcaattttgccaagaagtttccgtacaggttgtcgtggctgacagagcccgaccctgagcccctgcagccctgggaggtcacaaactgactcgaacacggtgcagctgcccctgcaagaagaggttggtgccaacgaggtccatcccagtccgagggctcggggctccagattttacagtcaccgtcttggctcctgcccggcaccactacccagcaccatcaccacctccaatgtgcaacctttgggaactcaagttgctgagtcgccgcttccccagacaactcgccttcctgctgtccacccggtcacactgagtgctgcctgcccccatgaccagcaaggcggcagggctgtccaggtgcctctcctagagactgggctctgtgtgtggccttcttattggccacttctccttggcaggctctgggcacgtagccacagagactttagttaagggatccagccttcatgggcattcattagaccgggagtggttggtggtcccccaaaaaagctaacaccaagttataaactgcagttccaacccattccggctggattgacactccaacacaccacaacagggggggcgcataaagtccg

SEQ ID NO: 368172 - DNA, 733 bp, Homo Sapiens
  misc_feature (16)..(16): n is a, c, g, or t
  misc_feature (29)..(29): n is a, c, g, or t
tgcaggctggttacgncccccggggttantgggcatggtgtcgatgcaagagaggggtcaaatcccagccaataagcatagctgtagtaaagtaggattctacctggattggtgatacccgttcatggacttgttacggcttagctaagactagatgacatggtacccaagtgaatggcgagagcacgtaccatgcccaggagaatccaggtactggcgacactcaagccaaagcagacagtcttctactgctacaaatggggtgagacgcaaaggtaagttcacatattggagaatcactaacatttgagaaaaccaacactacatgaagagaggcataaaactcaacaaacaagaatgaacactggagcaaagaggaatacttataagagtatcacagtcagagtatcttcagagtgactaagagagagtattgctatcctagaaactacgaatgtggctgttatgaaaaataaccaaacagagaaggcagaacaactgcatggacagcgctgaagaatacatctgtgagcgtgaaacattcagctgtgaaatcctcctagaaagccagtgtaataataacaatgaagtgaacagtatgaaacacaacatttagagttctgaaggatatatccattactcaataactccaatatccatctaagagagtttctagaaggaaaaaagttcaaaaacaaagtgggtagtagaagaagaatttcaagaaatgaac

SEQ ID NO: 368173 - DNA, 699 bp, Homo Sapiens
  misc_feature (643)..(654): n is a, c, g, or t
tttatagtgtaacattcatgtcatggaaaagcttttttgccattgtacacgtaagaacacggatgtttttgagaaaatcacccacaccattatcagaaattgtttcttggatctggttcacaggcgccgtcgctaaattctcccaagatgatgatgtattgctctccatcctcctcgcagctgagcgcgtcctcccagggctgcccgagcgctggattccagcgagtgccacccacgtgtaaacatcctttagaggggagaagcggctcacttgcttatctcgagggttcatccgagccccgcctctggattcttttaggtttagggacgctcataaaggctcccaggcacttggaagcagtgcatgaggatggtggcagacatgctggggaaacggaggagaaaaaacatgaccatccaaaacagaatcaaagtggtgcctcagatgtttccaactacctgttacacaagtttttgtgtggatgaaataagagcctaaatatatcctcttataattaggcaattggtcgagacccaatgtaaattatggggatattggggtttacatccataattaaaagaaaaaatccggtgttgaaggtttactccaaagaagacaaagattatttccccccacctgccnnnnnnnnnnnnttaggaatctattggaaagaaattgctcagacctttttgaaaaga

SEQ ID NO: 368174 - DNA, 692 bp, Homo Sapiens
ggggtccggcagtagagctcgctgcagatccgggctctgaccatgatttggcgccgcgcggcgctggcggggacgcggctggtttggagcaggagcggctcggcaggctggcttgacagggcggcgggagctgcgggagctgcggcagctgcggcctctgggatggagagcaatacatcatcatctttggagaatttagcgacggcgcctgtgaaccagatccaagaaacaatttctgataattgtgtggtgattttctcaaaaacatcctgttcttactgtacaatggcaaaaaagcttttccatgacatgaatgttaactataaagtggtggaactggacctgcttgaatatggaaaccagttccaagatgctctttacaaaatgactggtgaaagaactgttccaagaatatttgtcaatggtacttttattggaggtgcaactgacactcataggcttcacaaagaaggaaaattgctcccactagttcatcagtgttatttaaaaaaaagtaagaggaaagaatttcagtgatgtttatactaataagtttgctagtacagtgtcagttatttaaagtggtaatgcccgataatgtcttttaaatgtttgaggatgttttaaatacatgcattgtcttcacgaagaagatgtaaaaataatgaacaataaattgcggtggaaacctc

SEQ ID NO: 368175 - DNA, 1174 bp, Homo Sapiens
gcacgaggctgtggcccgagcgtcctgtggagaagccgcgaagcgcgggcgacccgggggtcgggcgggccaggtccgcgaggccgcggcggcagctgtgcaggcccggggagcagccggccgggcgagcctcggattaaaaaaatggcaaactcctttgcagcgaggattttcactaccctttcagatctgcagccaaatatggctaatctgaaagttatcggtatagttattgggaaaacagatgtcaaaggctttccagacagaaaaaatactggatcagaaaggtacactttcagcttcaccattcgggattcaccagcacattttgtaaatgcagcttcctggggcaatgaagattacatcacgtctctttctgacagctttagggttggtgactgtgtgataattgaaaatcctctgatccaaagaaaggaaatagaaagagaagaaaaattcagccctgcaactcctagcaactgtaaactgttgctcagtgagaatcactcaacagtaaaagtttgttccagttatgaagtggacacaaagttactttctttgatacatttacctgttaaagagtctcatgattattattcactgggtgacattgttgcaaatggacacagtcttaatgggaggattattaacgtgcttgcagctgtgaaatcggttggagagccaaaatactttacaacttcagaccggagaaaaggccagaggtgtgaagttagactctatgatgaaacagagtcgtcttttgcgatgacatgtcgggataatgaatccattctacttgcacagagctggatgccacgagaaacagtaatatttgcctcagatgtaagaataaatcttgacaaatttcggaactgcattgacagcaactgtaatctcaaaaaccattattacaactaatccagatataccagaaagctaacattctgctgaaattttatacgagaaaaataacagaacacaaatgttctggatggatgacattgacagttatttcaaagaatccataaatttaagtacaataagttgatgtctaacacagttgaaacaattaaagggggaaagctttgacagaactgacggacaaagctgatccttcctaatgggcttcctttatgcctacatttgcacactcaccatcgcaggattgaactac

SEQ ID NO: 368176 - DNA, 1050 bp, Homo Sapiens
  misc_feature (795)..(795): n is a, c, g, or t
  misc_feature (917)..(917): n is a, c, g, or t
  misc_feature (919)..(919): n is a, c, g, or t
  misc_feature (946)..(946): n is a, c, g, or t
  misc_feature (960)..(960): n is a, c, g, or t
  misc_feature (1006)..(1006): n is a, c, g, or t
ggtccggaattcccgggatcagcttctggcaggatatgagctgatgcctgccccgattctacagacaccatgagatttaatccagagactgacttcactatagaacccacagttgtatcaatggttggggaaagatagtggcaacaggcaaaggagaaacagctctgacatacaaagaaaatgagtatgctaaagccaagtgggcttaaggcccccaccaagatcctgaagcctggaagcacagctctgaagacacctacggctgttgtagctccagtagaaaaaaccatatccagtgaaaaagcatcaagcactccatcatctgagactcaggaggaatttgtggatgactttcgagttggggagcgagtttgggtgaatggaaataagcctggatttatccagtttcttggagaaacccagtttgcaccaggccagtgggctggaattgtttttagatgaacccataggcaagaacgatggttcggtggcaggagttcggtatttccagtgtgaacctttaaagggcatatttacccgaccttcaaagttaacaaggaaggtgcaagcagaagatgaagctaatggcctgcagacaacgcccgcctcccgagctacttcaccgctgtgcacttctacggccagcatggtgtcttcctccccctccaacccttcaaacatccctcagaaaagcatcacagccagcagcacaaggaaccttcagctacgcctccgatcagcaaccttacaaaaactgccagtgaatctatctccaacctttcagaaggctggctncaatcaggaaaggaagaaagagagctcaaaattcggagacagagtattggttggtggcactaaagctggtgtagtccggtttcttggggagaccgactttgccaaagggggaatggtgtggncntggaattaaatgagcccacttggaaanaatgatggcgctgntgctggaacaaggtatttttcagggtcacccaaaatatgggctggntcgcctcctgtccccaaagttaccaagaatgggctttcccttcc

SEQ ID NO: 368177 - DNA, 872 bp, Homo Sapiens
gtggcggcgacggaagcgcagtgcacacccccatggcccgggctttggtccagctctgggccatatgcatgctgcgagtggcgctggctaccgtctatttccaagaggaatttctagacggagagcatggagaaaccgatggttgcagtccaccaatgactcccgatttgggcattttagactttcgtcgggcaagttttatggtcataaagagaaagataaaggtctgcaaaccactcagaatggccgattctatgccatctctgcacgcttcaaaccgttcagcaataaagggaaaactctggttattcagtacacagtaaaacatgagcagaagatggactgtggagggggctacattaaggtctttcctgcagacattgaccagaagaacctgaatggaaaatcgcaatactatattatgtttggacccgatatttgtggatttgatatcaagaaagttcatgttattttacatttcaagaataagtatcacgaaaacaagaaactgatcaggtgtaaggttgatggcttcacacacctgtacactctaattttaagaccagatctttcttatgatgtgaacaattgatggtcagtcaattgaatccggcagcatagagtacgactggaacttaacatcactcaagaaggaaacgtccccggcagaatcgaagggattgggaacagactaaagacaacaaagcccaggactgggagaagcattttctggacgccagcaccagcaagcagagcgactggaacggtgacctggcatggggactggccagcgccgatgctccagaaagccccgtacaggatggctgaaacagagggatcataaagacgtctggctcaccgtaagatgagaa

SEQ ID NO: 368178 - DNA, 823 bp, Homo Sapiens
ggcccttggtcccagttggtcttcttacggttcagtctctggagtttctggggcttcccgtatcctcttcctcttgagttttggtttttgagaaagctcccttaaagaatctttcgtgacatggtcctgggatcttggctgcccaggcagggggctcccttgacctggggtctgcatgttggacagccgctccttcatgccgctgatgttgctgtgcagcccccatgcatggcagagcttgggcagactgtcttcccggtcggccagcaaggacctctccggcgcatccgaggcgcagaatgtcaccaggaacttggccggctggctgctcttggtgtacttgtaaagtcggcgaagctgctttgcttccagctccgagaagagggagatgaaccgccagagcatctttctccagtgtttgatttcccaggcttggcagtaatgctgcagaaaggtgttgatgtggtcccctaggaccacaaggctctgcttcatgtacttcagcttcttcttctggggaaggtccctgggcaggtgcaactttcgcaggaacttcttcagcggtcttaggtattctttacaagttttgaaggtgtcctgatccaggcccttggcatggcgcatgagcgagtctctagcagggctggcagctggagcttgtctccaggcatgacacactttgtcacctgctctagtggcttgtccccttcacccccttgcccatctgaggcctccatctcagcaggtgtgccggtacgcgctccagggtggcactccccacgtcccctctggcttctgacccactgcttctgtgacctagccg

SEQ ID NO: 368179 - DNA, 1304 bp, Homo Sapiens
  misc_feature (279)..(279): n is a, c, g, or t
  misc_feature (921)..(921): n is a, c, g, or t
  misc_feature (1063)..(1063): n is a, c, g, or t
  misc_feature (1155)..(1155): n is a, c, g, or t
  misc_feature (1180)..(1180): n is a, c, g, or t
  misc_feature (1182)..(1182): n is a, c, g, or t
  misc_feature (1267)..(1267): n is a, c, g, or t
attttaatacagcaccttttttggttttgaagtttatgaacccgttgttataaaaatggacctaataacagcttctactctgtgatgacactttattaaaatcagctcatagtggaattataagccaactgttacataaggtttacagaaagtttaaccttgtgaaggacagtgttgagcaagaactcccttcctctccaaaacaacctattgtttgatagacaatcgacattaaaaaaaactaatattgatccaacacggaggtatctttaccttcanggtttgggtggaaaagctttcttggaacatctgcaagaacctgagcctttacctggacaagttgttcaacgtttactttatgtttacattatcgaaaccaacgttttcgttctaaacctgttccatgtgcctgtgaaccagattttcatgatggctttttacttgaagtacacagagaaagcttgggtgatggaactagaatggctgattcaacaacaatgttatcaataagtgatccaattcatatggtgctaatcaaaacagacatatttggtgagacgactttagtagcatcatattttctggaatggcgatcggttttgggctcagaaaatggagtgaccagtctgactgtggaacttatgggtgtaggcacagaatcaaaagtttctgtgggaattttaaatataaaacttgaaatgtatccaccactcaatcaaacgttatctcaagaagtagtgaacacacagcttgctttggaaccgtcagaaaactgcgagagaaagagcgattattccttggatatgctaagcagtggtggagagaatatttgcaaattcgaccctcacacaactcacgactggttaagatttttgcacaggatgaaaatgggataaatagaccagtctgttcctatgttanaccacttcgagctggacggcttcttgatactccaaggcaagcagcaagatttgttaatggtccttggttatgaacgagcccctgttattggaggaggaggtaaacaggagcagtggtgcactctgctggcccttctctgtanaaacaagggtgactgtgaagatcacgctacccttctgtgcaggcttcttcttgggatatggattaaaagccttttgttgtggttgggaccanggcaaaaggagtacctcatgcatgngnttatgggctggtgaaactgatggggccattcctttttttgggaggagttaaacaggaacacaggtacatccattaaacctaccanatcctggatggaccttcccagttgcttgaaaagcccc

SEQ ID NO: 368180 - DNA, 938 bp, Homo Sapiens
tagtgatggaggaagtgacccagaaacacagaaagaaaaaagtattcagaaacagaattcattaggttcaaatgaagaaaaatcgaaaactcttaagaaatcaaacccatatggagaatggcaagaaattaaacaagaggttgagtctcatgaggaggtagatttggaacttccaagcactgaaaatgagtatgtatcaacttcagaagctgatggtggcggagaacccaaagtggtatttaaagaaaaaaacagtcacttctcttgggagttatggcagatggagtggccccagtcttcaaaaagagaagaactgaaaatggaaaatctagaaatttaaggcaacgaggtgatgatcaatagttgcaggagagctttttgtacatgcttttaggacagaatggagacttatacacccaaagtttatctgtgtttgtttgtaagtattatgatgctaaaaatttagatttattctaaatgtatttgatgtgaattaaaataaatattttttcatgtgaaatttattttggttcctaaaatggaagcctaccacattgcattgtaatacagtgtattatgttcagtgtctaaaaactgctaattaagtcataatttaagatgctatgtatctgttatttaaaacatggagaaacagggcctttattccattcatattcataagagcatatttatcctgcattgaaaatgcattactttgcacattgatattaactgtgtccaacaaataagtatcggagtacgtgagaatattcccagcccagtgatgattggttctgaggctgatgtgagaaagctgatgtaaaaaatgtatgcatattggcttacctttactcaatttaaagtcaaaagccaacagccaggagcagctcaggtacttcagatgtgcttaatatggagtgaaaacggaccagaggtgc

SEQ ID NO: 368181 - DNA, 665 bp, Homo Sapiens
tctctaggacctgtgagatataataaggcacatcaagtgcggaagaccgttccctgaggtccctgggaaaagagtgccccatctcccgcaatttggaactggcccatgatagccgtagcataagggttcttagggtagttgcaatcatccctcgctgttgtaaggccctgtgaactgtaccttgagcttgccacccggattgctgtttcgtgggtgtccgccctacccctgcccgttgttgggttgtgttttttggtaacacaaaattacccaaggtatagtaaacaaagaagacacagacaataaaaactaacagatgccacattttgcaaacatagcatttggctagaggcagaattataaggtatacatattaaaacatacatccaagactctcctcctcaatttgaaaccatgtttatcaagtttttacttcattgtatataagccaaaaaattaagagaaccttgatttgttcctgaaatacaagatttgcttgtattattactggaccaggtagactggatatgtgaatgtttaattcatagttagctagctttaccatcatctcctgaatcagctgctgaggatgcctgtgcctctgcccataactatatatagagtatgctttcaaaacaatataggccgggtgtggtggctcacac

SEQ ID NO: 368182 - DNA, 1393 bp, Homo Sapiens
gccggaggtgtccggcgggctgagttccggtttatcgctggtctgcccacacctatacggcagtgtaccaccacggggctagagggtgcgggggagcgcatcgcgaaaaaatatctgtatctccatatttatggtggatcactatgaaggtaaaaagaacgtattctcatggtacttacagagctggcccaatgagacaaataagcttggtgggagcagttgatgaagaagtaggagattatttccctgagttccttgacatgttggaagagtcaccatttttaaaatgtacactgccatgggggacgctatctagtctaaaattacagagtcgaaaagatagtgatgatggtcccatcatgtgggttcgtccaggagaacaaatgatccctgtggctgatatgccaaagtcacctttcaaaaaggaaaagaactaccaatgaaataaaaaatcttcagtacctacctcgaacaagtgagccccgtgagatgctctttgaagacaggacaagagctcatgcagatcatataggacaaggttttgaacgacagactacagctgctgttggagtgctgaaggctgtgcactgtggagagtggcctgatcaaccccgtataaccaaagcatgtaatatgtattcatgctgaagatttcttaccaagtaagttcaacagaatgcagttagatttacatgaacctccactgtcccagtgtgtccaatgggttgatgatgcaaaactgaatcaactgaggagggaaggcattcgctatgccaggattcagctatatgataatgacatttattttattccaaggaatgttgttcatcagttcaagacagtttcagctgtatgcagtttagcatggcatattcggctcaaattatatcactcagaggaggacacttctcagaatacagctactcatgaaacaggcacatcatcagattccacatcatctgttcttggacctcacactgacaacatgatttgtgctgtaagcaaagcctccttggattctgttttttcagataaacttcattctaaatatgaattacagcagattaaacatgaacctattgcatctgtaagaatcaaggaagaacctgtgaatgttaatattcctgaaaagactacagcactgaataatatggatggcaagaatgttaaagcaaaattggatcatgttcaatttgcagaatttaagattgacatggattctaaatttgaaaatagcaacaaagatttaaaggaagaattgtgccctggaaatctaagtctagttgatacaaggcaacacagttcagcacattccgaatcaggataaaaaaggacgatggacatttttgtggctagagtttgcaatataaccattctaaaaatcctgtttttt

SEQ ID NO: 368183 - DNA, 1265 bp, Homo Sapiens
  misc_feature (1242)..(1242): n is a, c, g, or t
gcctgggtggtgcaaaaacgtgctttcccggacggggttgaaggggagaaagggagaggtcgggcttggggggctgcctcccgcggctcagcagttcctctgaccatccgaggaccatgcggccgacgggtcatcacgtcgcgcatcgtgggtggagaggacgccgaactcgggcgttggccgtggcaggggagcctgcgcctgtgggattcccacgtatgcggagtgagcctgctcagccaccgctgggcactcacggcggcgcactgctttgaaacctatagtgaccttagtgatccctccgggtggatggtccagtttggccagctgacttccatgccatccttctggagcctgcaggcctactacacccgttacttcgtatcgaatatctatctgagccctcgctacctggggaattcaccctatgacattgccttggtgaagctgtctgcacctgtcacctacactaaacacatccagcccatctgtctccaggcctccacatttgagtttgagaaccggacagactgctgggtgactggctgggggtacatcaaagaggatgaggcactgccatctccccacaccctccaggaagttcagggcgccatcatacacaactctatgggcaaccacctcttcctcaagtacaggttcccgcaaggacatcttttggagacttggttttgtgctggcagatgcccaaggcggcggagcgatggcctggcttcccggaggggccctttgccagccactcccagggctcaggggtggatttgccgcgggcaccgctgtgcgccttgtgaaaaaggaaagggcactgttggtactccacaattagccacctgcggcaaccctcggtggagggggcgcctgtggggccgtgacttaccgcgcgcccccccgcgatattccacccgagtggccggagcaccgctatccctcgcggtggtgggccgcaagcaccccgattgtcctttatacgccccaatcggttcacgtcgttgagaccgcccctcggtgccggtaacgctctcttgtcgcgccaatcgcatcggcatcctgctatcccgcctggcgccccggtcatcacgcactacgcctggcaccccacgggatccacgctagcgggtgccgcggcacgcgaaagcagatcaccgtctggagggaacgacgagactacgttctccgcacggcgccacttcggcttacctatgtaggcactgcccacgggtacantttaactgctaatcaataatcga

SEQ ID NO: 368184 - DNA, 817 bp, Homo Sapiens
ggctgtgggcgctgctgctggcgctgctgcgggctcgggctggactcaggaagccggagtcgcaggaggcggcgccgttatcaggaccatgcggccgacgggtcatcacgtcgcgcatcgtgggtggagaggacgccgaactcgggcgttggccgtggcaggggagcctgcgcctgtgggattcccacgtatgcggagtgagcctgctcagccaccgctgggcactcacggcggcgcactgctttgaaacctatagtgaccttagtgatccctccgggtggatggtccagtttggccagctgacttccatgccatccttctggagcctgcaggcctactacacccgttacttcgtatcgaatatctatctgagccctcgctacctggggaattcaccctatgacattgccttggtgaagctgtctgcacctgtcacctacactaaacacatccagcccatctgtctccaggcctccacatttgagtttgagaaccggacagactgctgggtgactggctgggggtacatcaaagaggatgagggaagttcaggtcgccatcataaacaactctatgtgcaaccaacctcttcctcaagtacagtttcccgcaaggacatctttggagacatggttagtgctggcaatgcccaaggcgggaaggatgcctgcttcgtgagtgtccatcacaccactcacagaccaggaaagcatcctgtgtacctgtggccttaatacgaccgtcatgccaacccgggaggtggagactgatgcaccaactctgaagaatgcagaaccggaagcttggctgatgccag

SEQ ID NO: 368185 - DNA, 869 bp, Homo Sapiens
  misc_feature (672)..(716): n is a, c, g, or t
ataatttaaaacacaagaaaaaattgtcgtttttatgatttacacttaccagtccttcacctgggttctgcttctcaactagtttatatcctttgtacagtcatcttctgaacaaatactgccctcaggttttttgattcaaaagagaagatgactttttatttttcaacaagtgtttcagaagttcattccctgagtctcctttggcagcaggggccccagcagaatggggaggactctgtgctgaggagacaggacaggctacagcgtttccttctaccttactaccattctgttcctccaatttaggctcctcttggcctgggcaggactctgtctcagccttttccagttttatctcttctgttttggcaggggtttccatggagagcttgtctacttctgaatttgcatacgtctgttgatttggagttgcttgtgagaaatcactattgggcagtttgttctctaattctgtacatagctggcctgctgccatattgggagtggatgggccgactggttccaccgactcttggtcggcttgttgaggaagctcaccgggtgtgctcactgcaggagtagaggtagtttctgagatgcctggagtcggtggggcagttatatctgaatggggagttgatggagccttggtggattctgcatcatcannnnnnnnnnnnnnnnnnnnnnnnnnnnnnnnnnnnnnnnnnnnngggattatatcaccaatacaactgaatgagcgattgggttgatcccggataactgtgtccatgggttatagtagaatcttggccacatgggagactgctattagctactggaggtgctgctggtaaagcaggtgtaaaagaaggcctcactgg

SEQ ID NO: 368186 - DNA, 1236 bp, Homo Sapiens
  misc_feature (683)..(718): n is a, c, g, or t
  misc_feature (838)..(840): n is a, c, g, or t
  misc_feature (865)..(922): n is a, c, g, or t
  misc_feature (1034)..(1050): n is a, c, g, or t
  misc_feature (1116)..(1128): n is a, c, g, or t
  misc_feature (1186)..(1186): n is a, c, g, or t
ggaattcccgggatgtgccagttccctggacaatcccagctgcttcatcttggactgacatggacaccaggcagtaacaccagctcttgggagttggtgggaacaggtgtaatatcaaagctcccagctctgcactctcctgtcacataggaagacctcagaaaatggaggttccttcctttccacctgcactgggggagtgcaatgagcagaagaaaagcgaaggtccctccaccttctgagatcagctgacacctgagcttaggtgcatccctagccctgcagcctgttgcttcccttgaccgccacccccacctccatcttcaaggctgtgctgggcactccaggctgggcctgacgcgttccaaatctgcagctcccctcactctgcatcctgggcctccaccactctccaggagagtgggagacgcctgagccatgggtggcgagaaacggcagtcctgtgccgcctcaatgccccacttgcctccctctcgggaaggacttgtgacatcccctggcttcgcttggccaagggcggtggccgaaaacctaccccagggatggaagaagcacccttggcaacagcggctttggccaagtgaaggggggtgggttggcaataaataaaaaacccatcccctttggttggaaaattcccccccaaaaaacccaaatttctnnnnnnnnnnnnnnnnnnnnnnnnnnnnnnnnnnnnaaaaaagggagggggggggcccctaatttcccccggggtcccggggcccctcccgggaaaggggaaaagcacacaaaaaccgcccggggtttttttgggccctgggccctttttcctttnnntaaaaacaaccccttggcccccacnnnnnnnnnnnnnnnnnnnnnnnnnnnnnnnnnnnnnnnnnnnnnnnnnnnnnnnnnnaaacactctctggggagtctctccccaccaaaaaaagaagggtttttttataagcccctcccgcggttttttttcccccgggaaatctttctcccgcgggaggggtggtaannnnnnnnnnnnnnnnnggggggggcctcctcggggaaaaaaataattttcgcggacacaataacaccacccccccctgcgcnnnnnnnnnnnnnaacccccccgcacaataacaacaagttttttcctttttccaggaaaagagagggaccncccccctcttccgctttttctttgactcaccaacaccccacttagtcgcc

SEQ ID NO: 368187 - DNA, 1058 bp, Homo Sapiens
ggggaggggccattgggggagtggaaacggagcagtgacaggtatcccggagggtgctgctgaggcgacgatggccgaggggcccgaggaagcccgaggccaccctcccgggcaggacgatggcggaggggaccacgagcccgtcccttccctgagaggccctcctaccaccgccgtcccatgcccccgcgacgacccccaggccgaaccccaggccccgggccggcccacagaccccgggcctcgcggctgccgccgcagccgacaaattggagccgccgcgcgagctcaggaagcgcggggaggcggcctccggctccggtgcagagctgcaggagcaggcgggctgcgaggcgcccgaagccgcggcgccacgagagagaccagctcggctgagcgcccgcgagtactcccggcaagtgcacgagtggctgtggcagtcctactgcggctacctcacctggcacagcggcctggcccgccttcccagcctactgcagcccccagccctccccgcagagcttcccttcgggcggcgctgcaggtcccccaggccgcggcgccgccgcccccgcagctgggctattacaaccccttctacttcctgagccccggggccgcggggcctgacccgcggacagctgccggcatcagcacccctgctccagtcgcgggcctgggaccccgggctcctcacgtgcaggcgtcggtccgggccactccagtgacgagggtaggatccgcagcccccttccgaaagcccgagcgagaccgggcgacaggcaggcagagaatatggtattccatccctgggcccacagatttatggcagagatggggggatttccttattcccctccttaaaaaaggcaccatttggcttaaggcattatggccctccggggggaataaagggaaatcccctaaggttggctatggctttttttaatgggaaggaatttggttggagaccccttccaggggaagaatttggcaaaaaaggaggggtggggggcctcttattgccgggattatttggctggggtttctagtgagaa

SEQ ID NO: 368188 - DNA, 785 bp, Homo Sapiens
ggacgcaggacaacgcctgccacgcgtcggaactcggccgcgggacatccacggggcgcgagtgacacgcgggagggagagcagtgttctgctggagccgatgccaaaaaccatgcatttcttattcagattcattgttttcttttatctgtggggcctttttactgctcagagacaaaagaaagaggagagcaccgaagaagtgaaaatagaagttttgcatcgtccagaaaactgctctaagacaagcaagaagggagacctactaaatgcccattatgacggctacctggctaaagacggctcgaaattctactgcagccggacacaaaatgaaggccaccccaaatggtttgttcttggtgttgggcaagtcataaaaggcctagacattgctatgacagatatgtgccctggagaaaagcgaaaagtagttatacccccttcatttgcatacggaaaggaaggctatgaaggcaagattccaccggatgctacattgatttttgagattgaactttatgctgtgaccaaaggaccacggagcattgagacatttaaacaaatagacatggacaatgacaggcagctctctaaagccgagataaacctctacttgcaaagggaatttgaaaaagatgagaagccacgtgacaagtcatatccaggatgcagttttagaagatatttttaagaagaatgaccatgatggtgatggcttcatttctcccaaggaatacaaatgtataccaacacgatgaactatagcatatttgtatgtctac

SEQ ID NO: 368189 - DNA, 1007 bp, Homo Sapiens
  misc_feature (888)..(917): n is a, c, g, or t
gggcccatagtccctctcattcctagcacttgtgaaggagcaggccattgcccctcagaatccagagtgatgtgtatggtctaattagacagggttaaaaatggttgccgggtccagtgaattcctgcggatctgcacaagtactgttatgatttgttctggggaggagtaggtcaggtgcaacctggtgtaagttattcgcctggtccctttagtgcctactgtcatagtctggcaaaggtagagtgacagtgttatgagtttgtgtgagaaaatctggtgatgacctccgtttagggactgtgactgtgtcacatcgtcgagatacataactggaacttttatcactgaaacatgccattgcataaaaagcctcattggaatgttatgagaaatgactataattttcatttgttgaataaaaaatactgtttcatctttgacatggccaatataatctaaaagaactttgtagagagtgtcgctggaggactcgaggatatgcagaatggaagtgggatagatgagcagcaatcctgtcactgcttctcctaggtgatgtttcaaaactgactgaaacatttgttcatagtagtcagcaacatcttttctttctacatttgcttgtatcttggccactagaaacatcctatcaagaaggaatttctttaggtgtagtcgttgtttctcttcttgaaagtgcaggtaattgctacgtgggacttggagaaaaagaagaggttccagtggcaaaggccttttgctgcccttctggttatggaccgaaaaggacatgaggagtcttatttatttttccagatgattccagcttttagcttatcataatatttatgctgccagggtacctctttactgatgaactcgtgnnnnnnnnnnnnnnnnnnnnnnnnnnnnnnctgtgcttctgtcacgcacctgtcctcgaggccctacttgtcctccatcaatcccatactcccgggggggctggataaactcatggcgcc

SEQ ID NO: 368190 - DNA, 1117 bp, Homo Sapiens
cgcgcaggcgcaaagggccaggtgctggaggtgctgtcatggcctgcctcaacccggtgcctaaactctacagatctgtaattgaagatgtaattgaaggagttcggaatctatttgctgaagaaggtatagaggaacaagttttaaaagacttgaagcagctctgggaaaccaaggttttgcagtctaaagcaacagaagacttcttcagaaatagcatccaatcacctctgtttactcttcagttgccgcacagcttgcaccaaacattgcaatcgtcaacagcatcattagttattcctgctggtagaactcttccaagttttaccacagcagaactgggcacttcaaactccagtgcaaactttacttttcctggttatcccattcatgtaccagcaggtgtgacactacagactgtatctggtcacctttataaagtcaatgtaccaattatggtgacagagacttctggaagagcaggtattcttcagcatccaattcagcaagtatttcaacagcttggccagccttcagtaatacaaactagtgttccacaattgaatccatggtctcttcaagcaactactgaaaaatcacagagaattgaaaccgtgctacagcaacccgcaattctaccttctgggccagtagataggaaacacttagaaaatgccaccagtgatatacttgtatctcctggaaatgagcataaaatcgtgcctgaagctttgttgtgtcatcaggaaagttctccactatatcagtcttccaggtgttgtattttctccacaggtctctcaaacaaattctgatgtgggagtcagtgctcaaggggttcagctagcatggctcaaaatcctgcatgatgagtccctctccacaagccctcatggggctctccaccagcacgtgactgatattcagcttcatattctttaaaataggatgtatggatgtgattctgtaaaagcaccccagaattatagagaaacccggcaattacctgtatccaaaaagggatcctaattctcaggtggatttaagcattcgggttactggaggaagaaattgcggaaataatccaggtaatgggaagcgggatacatctttcaag

SEQ ID NO: 368191 - DNA, 838 bp, Homo Sapiens
attctgtctcccaggtggaggagttcagcgtattaccttgactttgccgaagtcctaggcacgcccagtgccctcagagtctcattttgaatccaggcacttagggatgctattttcccacatcaaacatgcttcctcccagccaaagaattctggtgacaggtagtgaagataattgtgtcactcctgcttacaggaatgacaaagcaaaagcaaatgaggagaatgaatgaagtaaagacaaccacaaggaagagagacgtgatggcatccttaagaatgatcttgataaaggaatggtggctgatggggtccatctcctaaaccagccagccttagctagactcccgtaggagcatatgccactagcgagaagagctgcgaccttgcaggggaagacacaagagatcctggagtggtagaaacaaatggggtaatgatgacagtcttcgaggtcttgagagtaacgcagaagcgagaagagcaagtgtcattgtcttcatctttatgaaagatgggttccctgcgttaacgactttctcgcgatatgattaagatttcacattgatgttccaggaaagaaaagtacgattatgcggcttgacaaacataaatttgacgtctagaaacaggtggcaaggacagagataggtttagtccactatccaagaagacctgtaacatggggtacagtcgagagtgaatggtcgtaccagtcataacaagaatgttacctgggagaagtctctgcgtgtctacctgtaactgaggggggtgtaaccatccttgtggaagcgtccactttgatcgacgattgcgttagtcactctgtgcttac

SEQ ID NO: 368192 - DNA, 914 bp, Homo Sapiens
cggctgcagccctgtgtgcgacccggcccgttgccgtagagatgggcaggctggatggagtggggtgcggtgagctgagctgaccctgcttcgccacggggactgcagtgaccccggcttgccggcagggcgggtaacaggttgagccagggtggggctgctcaggggcgtggagccgaggccaggatttctctgaagacccggcacaggctattcctttctgcgacgagcccattgctatggaaaccaaagcgttaggccagcggggattgaggctgcgggatcatgatgggtctctctcccgaagaaccttgcctaaggcttccccaagcggctacttcctgagcgaacccgcccacccgcctgaaggagagagttttccatggacacagcctagcagaaagacgcagccttcgtgcttcgctgactgctgaccactgacccaccgccttgatgacagcaccctcgtgtgccttcccagttcagttccggcagccctcagtcagcggcctctcgcaaataaccaaaagcctgtatatcagcaatggtgtggccgccaacaacaagcgcatgctgtctagcaaccagatcaccatggtcatcaatgtctcagtggaggtagtgaacaccttgtatgaggatatccagtacatgcagggtacctgtggctgactcccctaactcacgtcctctgtgactactttgaccctattggctgaccatatcaacagcgtggagatgaagcagggccgtactttgctgcactgtgctgctggtgtgagccgctcagctgccctgtgcctcgcctacctcatgaagtaccacgccatgtccctgctggacgcccacacgtggaccaagtcatgccggcccatcatccgacccaacagcggcttttgggagcagctcatcca

SEQ ID NO: 368193 - DNA, 800 bp, Homo Sapiens
cccagaaatcagctcgcagaagtgctggtggcatcccgtaactcctcaaatgacgctacatgggaaattaagaaatgtgatctttatctgttggaagagggtccccctgtcactacagtggctcactagggcggaggggcttaaatactacaggatgatgctgactgttcgccgcatggaattgaaggcagatcagctgtacaaacagaaattcattcgcggtttctgtcacctgtgcgatggtcaggaagcttgttgcgtgggccttgaggccggcataaacccctcggatcacgtcattacatcctatagggctcatggtgtgtgctatactcggggactttctgtccgatccattctcgcagagctgacgggaagacagaggaggttgtgctaaaggaaacaggaggatcgatgcatatgtataccaagaacttctatgggggcaatggcatcgtcggtgcacagggcccccctgggcgctggcattgctctggcctgtaaatataaaggaaaccgatgagatctgtttgactttatatggggatggcgctgcgaatcaggggcagatagccgaagctttcaatatggcagctttagtgcgaaattaccgttgtgttaacatctgtgagaataacctatatggaatgggaacatctactgagcagagcagcagccagccctgattactacaagaggggcaattttatccctgggctaaaggtcgatggaatggatgttctgtgtgtacgtgaggcaacaaatttgcagctaactactgtagatctggaaaggggcca

SEQ ID NO: 368194 - DNA, 1121 bp, Homo Sapiens
  misc_feature (885)..(893): n is a, c, g, or t
taaggtgggcactgccccacagtttctctctgcttctggtcagctgggttgtcctgcatggtgacgggtgtcatcccgaacaaatcagatggcatcagaggcactccatcaagtgggagatggggaggaggctgtactgaagaaagaaaacttcaacatgatgaatgcccttgaccaactgccaaaaccctttccaaaccccaagtctatgaaccggaccgtcactaccaaaggactcccactagcctcaaagggcaatttggtcaacttcttggaggatgataccatcaacctactgaagccgctgccagtagaggattcagactgcagctctgatgagaccagcatctctgccttctcatccaccttgctgaaccccatcaaattagctgtgacccagcccaacagcagcttctttgcagggatgctggagggggagctgaacaaactcagcttctccccaatggccaagaatgcagaaaatgaggacctggcgctcggcccctgcccatgcccatcgaagtcccagatggccacaaggggcctgctggaccttgacaaccctgagctggagacagaaacctcctcaacgcactcagaatcttctgtggttgtggacctgccggacacccccttcatctttgagcacacagtcaacaattccacagctgtgatttcctggacctacgccttgggcaagcagccggtcagtttctaccagctcctgttacaaggaggtggccaagacacccaggagaatgagttgcccgaggcaaagaattcgtccatggatcttcacaagaatttggggcactactgtcaagctgatggagctaaagcctaacacgtgttactgcctcagtgtccgtgcagccaacacacttnnnnnnnnnaaaatggtgccaacccctacaaatttgcacccctgggcactgaaattcagcagcttttcctgaaaactacccccatccggatccccgtgccggggcaaggaaaccccgggcaaaaaatcgggttcccttcggccccgaaagaaaattccccaagccttgaaagaatcctgggaaaaccaattttccccccggtaaaaaggggggagaggcgcccccccggacaccccc

SEQ ID NO: 368195 - DNA, 901 bp, Homo Sapiens
  misc_feature (423)..(494): n is a, c, g, or t
ctgtgattctgtctctgagtgactggaccactgaccctcagatttccagccttaaaatccaccttccttctcatgcgcctctccgaatcacaccctgactcttccagcctccatgtccagacctagtcagcctctctcactcctgcccctactatctatcatggaataacatccaagaaagacaccttgcatattctttcagtttctgttttgttctcccacatattctcttcaatgctcaggaagcctgccctgtgcttgagagttcagggccggacacaggctcacaggtctccacattgggtccctgtctctggtgcccacagtgagctccttcttggctgagcaggcatggagactgtaggtttccagatttcctgaaaaataaaagtttacagcgttatctctccccaacctcagctnnnnnnnnnnnnnnnnnnnnnnnnnnnnnnnnnnnnnnnnnnnnnnnnnnnnnnnnnnnnnnnnnnnnnnnncacagacggcggagaacaccagacagagagcaggagcaaagcaccaagaaagaacggggcggcccgcgcacacagaaccgcgcgagaaccagggggaccaaaacaggaagcgcgcggaaacgcaagagaaagaggcaggacgcagaggacgacccacaaacacagacgagagggaacacgaagaagcagaacacgaaccgggaaggagaggaacaagagaaacgagcgagggagggggacgacaccagagtaggagctgaaaggggcatgagagcggaggagagcagagcgacagccagacggagggtgaagccgaagcccagagagggcgcacggaaccggcggaaccaaagacgggcgagcacgcaggcagaagggaagagagagaagcaacgggggggcaggcg

SEQ ID NO: 368196 - DNA, 247 bp, Homo Sapiens
tgggcgggcgtgggcccgtggctcccagctactgagacgcaggcgttcgggccggccaggccgcgctgctcttctcagtggcctcggggtcgctctcgggggcaggagacattctgctgacacatcccaccgcctcaaagctcacggctcacagctgcctgttcttttcgggtcctccatctggtctgggcccagggccagttccgtggggagggccccgggagcccccttctctgactgtctccac

SEQ ID NO: 368197 - DNA, 830 bp, Homo Sapiens
cccccagctgtggccagcccagtgtccgggctgcccaccgtgccagcccagtttcaatgacccacctgagggtttccatcgtgggccaggtgaccggcgcaggcgggcatccggagccaggcagtggccagcccatcccgggcagggtcataggtggggctgcaggcctcgaagccgccatgtgaaggcagcagcgaccccaggcagggcgggccaggttgaccttgcacctgctctcccctcagccccgcggccatgccgaccctggtcgtgggcacgccgcccacctgcctgggggacacacctcagccctgccacaagaacagccagaggcagggccccttctcccatggggccccagggagagcagccgactggaaggctgttgccaagcccaggctctgcgcacctgcagctgaggatgacgtggcagccctgaggtggcccgggccctcccagcagccagacccaccctgggcagctccccacgtggtcgggtctgacgacctcaaggaaccaggcccctgggggaaggcgtgcagcctgcccatgtggtccacaggcccggaggctagggatggggacagctcggtgtcaatcgggccgcctctcgtgctcttcaggggggccacagacgtgtgtgtgtcttggaaggagaggccaccccaggtggtggggccccaggcagaggcccagaaagagtgacgcgcggctaggatgcagctgagagcacaaggatccggggccccagctgtggcaaacatggtgagctgtgcgttccttggggacacttagcacccttcatatgtctacagactacccaaagctca

SEQ ID NO: 368198 - DNA, 951 bp, Homo Sapiens
tgacgcttagtccagcagccatccccccgtttaacttcgtgatattctcctgagggtcattgccacggaacatgtgttgggccaccggaccttgggttccaacatcagggcaaggttatggctggacattctgctgctggtcctggtttttttgcttgtctggtaataggagatcaggctattacttcagtcaaatttacgattaggaggagggagaatgaggaagagcaactggagagcctcaattgcccggtccttgtctggtatattggtcttgtttccttgatcatcaaactgcatcaaatcagcgattttgaggtagtgcattgaagtgttttatgtgtcagcagaggctccggcaactctcctagaaacatcttcagcaaaagtggcaacatcatttgagtgaaattcccctgattccaagtcaatgtcagttccattattgagagcatcccttaaaatctgctgtcggacactattacccggtactctaaacaaccctctactcgcaagtttttgtgtagatactcaatcagttggtatatctgggcaatgccttcctccgtcagtggggacccaaatatcactcctttgttcctttcgcttgagagacatgagagaccggaagaatcctgatgctgggccagccccgccaggcaacttaaggtccacttcccccatcagctgagccaactcagttccaggtaaatcgatgagccttgtgatattgctgaccaccaactcagtgaaaatctcaggtttctcatgtcggagtttctccacaaaaaagtcaggattaaagataatgggctgacctcgaagggaagaatcattgcagatcacaaaactgcagatggcatcactccggccaggattcgcgggctggcacctccccttcactctgtgcctcagtcgccatcttcgtcagcaaacttctttcaccgcccc

SEQ ID NO: 368199 - DNA, 1496 bp, Homo Sapiens
  misc_feature (1200)..(1241): n is a, c, g, or t
  misc_feature (1342)..(1342): n is a, c, g, or t
tgcgctggaggcttcatctttgccgcgctgccgtcgccttcctgggatggagtctcgagctttcttcgttcgttcgccggcgggttcgcgcccttctcgcgcctcggggctgcgaggctggggaaggggttggagggggctgttgatcgccgcgtttaagttgcgctcggggcggccatgtcggccggcgaggtcgagcgcctagtgtcggagctgagcggcgggaccggaggggatgaggaggaagagtggctctatggcggcccatgggacgtgcatgtgcacagtgatttggcaaaggacctagatgaaaatgaagttgaaaggccagaagaagaaaatgccagtgctaatcctccatctggaattgaagatgaaactgctgaaaatggtgtaccaaaaccgaaagtgactgagaccgaagatgatagtgatagtgacagcgatgatgatgaagatgatgttcatgtcactataggagacattaaaacgggagcaccacagtatgggagttatggtacagcacctgtaaatcttaacatcaagacagggggaagagtttatggaactacagggacaaaagtcaaaggagtagaccttgatgcacctggaagcattaatggagttccactcttagaggtagatttggattcttttgaagataaaccatggcgtaaacctggtgctgatctttctgattattttaattatgggtttaatgaagatacctggaaagcttactgtgaaaaacaaaagaggatacgaatgggacttgaagttataccagtaacctctactacaaataaaattacggtacagcagggaagaactggaaactcagagaaagaaactgcccttccatctacaaaagctgagtttacttctcctccttctttgttcaagactgggcttccaccgagcagaaacagcacttcttctcagtctcagacaagtactgcctccagaaaagccaattcaagcgttgggaagtggcaggatcgatatgggagggccgaatcacctgatctaaggagattacctggggcaattgatgttatcggtcagactataactatcagccgagtagaaggcaggcgacgggcaaatgagaacagcaacatacaggtcctttctgaaagatctgctactgaagtagacaacaattttagcaaaccacctccgtttttcccctcccagagnnnnnnnnnnnnnnnnnnnnnnnnnnnnnnnnnnnnnnnnnnctccgactgtcagcactgctccccctctgattccaccaccggggttttccttcctcccaccaggcgcctcaacctcccatctccttataccaaccaataangaaagtgggaccttccttcctggttattgatagtccccttctggcacgtggcttttcccttatgggcaaatggttggccttttccccccatcctttccggggttccctgcctcctttcccgtgggcccttaggccctttgttggggacaacccc

SEQ ID NO: 368200 - DNA, 432 bp, Homo Sapiens
agaggcacaaaagtcaaaggagtagaccttgatgcaccaggaagcattaatggagttccactcttagatgtagatttggattcttttgaagataaaccatggcgtaaacctggtgctgatctttctgattattttaattatgggtttaatgaagatacctggaaagcttactgtgaaaaacaaaagaggatacgaatgggacttgaagttataccagtaacctctactacaaataaaattacggccgaagactgtactatggaagttacaccaggtgcagagatccaagatggcagattcaatctttttaaggtacagcagggaagaactggaaactcagagaaagaaactgcccttccatctacaaaagctgaatttacttcgcctccttctttgttcaagactgggcttccaccgagcaggcaattaagt

SEQ ID NO: 368201 - DNA, 837 bp, Homo Sapiens
cgcccccctccggccagcccgcagccggccgcgtcatgccaggcgctgctcggcggtagggaggtgccctggggccgccgcctccgcccgcccgaagccgcgcccactgcccagagccagagggatggtggtagtcacggggcgggagccagacagccgtcgtcaggacggtgccatgtccagctctgacgccgaagacgactttctggagccggccacgccgacggccacgcaggcggggcacgcgctgcccctgctgccacaggagtttcctgaggttgttccccttaacatcggaggggctcacttcactacacgcctgtccacactgctggtgctacgaagacaccatgttggcagccatgttcagtgggcggcactacatccccacggactccgagggccggtacttcatcgacctgagatggcacacactttggagatgtgctgaatttcctgcgctcaggggacctcccacccagggagcgtgttcgagctgtgtacaaagaggcccagtactatgccatcgggcccctcctggagcagctggagaacatgcagccactgaaagggccgagaaggtgcgccaagcgtatctgggactcatgccctattacaaaggaccacttggaagcggattgtggagatcgcccgggctgcgtgccggtccagtcggaaaggcccgctttgccaagctcaaggtctgtgtcttcaaggaggagatgcccatcaccccctatgagtgtccgctcctcaactccctgcgatttgagcggagtgagagtgacgggcagctttttgagcaccactgtgaagtggatgtgtcttttgggccct

SEQ ID NO: 368202 - DNA, 787 bp, Homo Sapiens
cccgggccgggggaggagtgtctgacagttggcgccgccgggagggagggcgggcggcgcgagtgggcgcgggcccggtgggccaggcgccaggcagcagtgtcagggccagtgagacgatggtctccggtgactatggccacttccgagtggatccagttctttaaggaagccggcattcctccaggacctgccgtcaattatgccgtgatgtttgtggataataggattcagaagagcatgctgctggatctcaataaggagataatgaatgagctgggcgtgaccgtggtgggtgacatcatcgccattctcaagcatgccaaagtggtgcaccgtcaggacatgtgcaaagctgccactgagtcagtaccctgcagccctagcccccttgcaggcgaaattcgccgtggcaccagtgctgcctcccgaatgatcaccaacagcctgaaccatgactctccacccagcacaccccccaggcgcccggacaccagcacctccaagatctcggtcactgtgtccaacaagatggcagcaaagagtgccaaggccactgcagccctggcccgccgggaggaggagagcctggctgttcctgccaagcggcgccgggtcactgctgagatggaggggaagtacgtcatcaacatgcccaaaggcaccacaccccgcacccgcaagatcctggagcagcagcaggctgcaaaaggtctccataggacgtctgtgtttgaccgcctcggcgccgagaccaaggcagacaccacgacaggcagtaaaaccc

SEQ ID NO: 368203 - DNA, 683 bp, Homo Sapiens
ctgaacgccgagcgtcacttcggctcccacggcagacatggcgacattgacagtggtccagccgctcaccctggtacagagatgttgcaagagcaattgaattactggaaaaatctacaggaatctggagaagtaccatgtgcacaatgctacacatccctcaacaaaagtgcttcagagtgagttttgtacagctattcgagaggtgtatcaatatatgcatgaaacgataactgttaatggctgtcccgaattccgtgcgagggcaacagcaaaggcaacagttgcagcttttgcagctagtgaaggccactcccaccctcgagtagttgaactgccaaagactgatgaaggcctggttttaatgtgatgagaggaaagagagcaaaattcacccatttatatctctcgcataattcctggaggggtggctgaaagacacggaggcctcaaaagaggagaccagctgctatcagtgaacggagtgagtgtggaaggagaacaccatgagaaagctgtgaaactactcaaggctgctaaagtacagcgtcaagctagtggtgcgatacaccccaaaagtcctgaaacaaatggaggctcgctttgaaaagctacgaacagccaggcgttcggaagcagcagcatttgctccttcagcagcatgcaaccgctgcagacagcgt

SEQ ID NO: 368204 - DNA, 1037 bp, Homo Sapiens
  misc_feature (142)..(142): n is a, c, g, or t
agtaggctcatttgtccctcacagacagagattttggctgctgcccacacagatgtttattgtttttccaagctccctggtgttaaaacatgcaggtcaagggggttagcaggctgagatgaagctcctctctacttggtcnttcttatcgtaggtgccagaacccttgtaaccactcacatagcctgtgttgtcagtcatctcttcccgtcccgcaatgcccttgcccttgccactctcatcaaagcgctccttgtgggtacctggtgtacatgactggtgtctgtcaaacggtccactgcacccactgttgttgctttagtagcgccagtggtgcctgggtctttgccctccatgagtcccataaatgttctccaggacgtcatctggactcttccctttgaagcgcttctggcccagttccttcactgcctctttgaactgttgaaacgtgatggttcgggcgttcttggccctggtcagttagacagaaatccagaaactttggagcatgaatgcattaccttccaaggtccaactcttgcctcactcagatttggcctcttttgtcctgtcaatcagtgagtgtcttgaagacaaaggatagcacagcgccaggtaccctgtggtgcttggtaggcccactgcaaatgttccaccacgtgaacccttccgtggccaactacctcgcaggttcttctcacccccacctccatatttttggctcctcacttgactttgctgaacacgatgtccacgtccgtggaggtgactgtcttgccatccatgatgccacagtctttgcacagcttggagaagttcttgttgttcatttcagtgccactgcttgatgattctccaaacgcagcaaaccgatggaatgttttttctgcctctgatgccatggtcagctagaggtcggggagggcagtcgtgggagacacttgggggtgaaggagaagggggagggaggacttagagtacccggatggtggtctgacccttcccggccatcccgaaaattccggaccggtcca

SEQ ID NO: 368205 - DNA, 785 bp, Homo Sapiens
cggctacgcaatgctgtctctcttgctgatcctctcaggcctgggccggctgacctccgcgggcccacgccacttattccatcaaaattgaggggaaaccatacacttcctgcttgaaaaacagtcatttttacacccacatttcctggtgtatttatacaacaaatcaggaacattgtatgcagattcttcattttcaaagggtcattgcttttaccaaggatatgctgcagacattccaaaatcagttgtggcactacgcacctgttctggactcagaggattactgcagttagataatatcagttatggtattgaaccattggaatcttcacctacatataagcatgtagtttatcgaattaaaaatgatgctattggtcattcctcctttcaagaaaattatcctgtggctcaatatatagatcagtcctacaggattcttgtcaaatcagacataaattcaggtgccatgctatcgaaaagaactctgaaaatacaaatcattatggataaacgccatgtatgcttatatgggctccacggtggcagttgcagttgagaaagttttccaaactctttggtcttatcaacactatgttttcccagctttatatgacagttatgctgtcttccttggagaatctgggtcagatcacacataaggatttccacaagtggtcatgctgatgaaaatactaccagcgactttttcgccttggaaaacaaaatttttgttcaaaggtctcctgattatgactactttatcacttaataggaaccaa

SEQ ID NO: 368206 - DNA, 760 bp, Homo Sapiens
caatgctgtctctcttgccgatcctctcaggcctgggccggctgacctccgcgggcccacgccacttattccatcaaaattgaggggaaaccatacacttcctgcttgaaaaacaggtcattgcttttaccaaggatatgctgcagacattccaaaatcagttgtggcactacgcacctgttctggactcagatgttttcccagcttaatatgacagttatgctgccttccttggagatctggtcagatcaaaataagatttcaacaagtggtcatgctgatgaaatactacagcgatttttgccttggaaacaaaaatttttgtttcaaaggtctcatgatatgacatacttattaatttataggaaccattctacttatgtgggagcaacatatcacggaatggcatgcgatccaaagtttgcaacaggaattgctctgtatccaagaaaatcactgcagaggccttttcagttgttatggcacagttgcttggaattaatctgggattgacatatgatgatatctacaattgttactgtccaggaactacatgcataatgaatcctgatgcgatatgatcccatggtatgaagttttttagcagttgcagcatggatggatttaaacggatagttctgcagcctgaacttaaatgttttcaggataaaacagtttcaaaaatgacttaccgaaaatcttcaacttgtggcaatggaattttggaacctacagagcagtgtgattgtggctataaaga

SEQ ID NO: 368207 - DNA, 580 bp, Homo Sapiens
ccaccacccaaacccaagagggaccccagcaccaagctgagcacctcatcagagacagtcagcagcactgcagccagtaagagcgggaaaacccctgagaggactgaagcgtcagctaaaccaagaccccacagcgatgaatattccaagaagattcctcctcccaaaccgaagcgaaatccgaacactcagctgagcacatctttcgatgaaacgtacatcaaaaagcatgggccccggaggacgtcgctgccgcgggactcctccttgtcccagatgggcagccccgcgggagaccccgaggaagaggagcccgtgtacatcgagatggtggggaacattctcagagacttcaggaaggaggacgatgaccagagcgaggccgtctacgaggaaatgaagtaccctatctttgacgacttgggccaagacgccaaatgtgacttcgaccatcacagctgttcttcgcagtgtgctactcccacggtgcctgacttggacttcgccaaggcctcagtgccatgcccccccaaggggctgctttgcgacatccctccgcccttccccaacctgctttctc

SEQ ID NO: 368208 - DNA, 811 bp, Homo Sapiens
gcgggagcgtctgtacctctgcggcgtcaatgggagcccgacggaaaactgcgctaaaggcttgtctttcccctgcccgaccgaaggagccgaccttgcctgcgctacagcttccttattttcgtcgcctgttctcctgatcctgcgtgttctaaaaaccccttaggctttccatgggttcccagaccatggcggtggcgctgcccagggacttgcggcaggacgccaacctggcaaagaggaggcacgcggagctgtgcaggcagaagcgggtcttcaacgccagaaacaggataattgggggagacactgaagcctgggatgttcaagttcatgaccagaagataaaagaagctactgaaaaagctagacatgaaacctttgctgctgaaatgaggcaaaatgacaaaatcatgtgcatattggaaaaccggaaaaagagggataggaaaaatctctgtagggctatcaatgacttccaacagagctttcagaagccagaaactcgccgtgaatttgatctgtccgaccccctagcccttaagaaagatcttccagcccggcagtcagataatgatgttcggaatacgatatcaggaatgcagaaattcatgggagaggatttaaacttccatgagaggaagaaattccaagaggaacaaaacagagaatggtctttgcagcagcaaagggaatgggaagaacgcccgtgctgaacaaaaatgcgcagaggccctctacacagagacaaggctgcaggtttgacgagacagccaagcaactccagaagctggaaagcaccaccagaaag

SEQ ID NO: 368209 - DNA, 1060 bp, Homo Sapiens
ctggcagcatcctggcgccccctgcgccctcagcccccactgtcagtctcctgacttcctgggctccagacctccgtggccgtttaccctgtagccaaggtctctcaccctgacccacctctgctagagcctctctagctgtctcgctgtcacatggctggggtggctatgcccaccgggcgcatccaccatttcactgcgcacatgaagaaccgtgggctcatgagaggagctggagaaagctgtggtgcggggcaaggagttgggggcccggctggagcatttgcagcgtgagctggagcaggcggctctcgagcgccaggaatttctgcgagaaaaggaaagccagcaccagaggtaccagggcttggagcagcggctggaagctgagctgcaggcggcggcgaccagcaaggaggaggcgctgatggagctcaagaccagggccctgcagctggaagaggagctgttccagctgcgccagggccccgcggggctggggcccaaaaagcgtgcggagcctcagctggtggagacccagaatgtgcggcttattgaggtggagcgcagtaatgcgatgctggtggcagagaaggcagctttgcaggggcagctgcagcacctggaggggcagctggggagcctgcagggccgtgcccaggagctgctgctgcagagccagcgggccgcaggagcacagcagccccctgcaggccgagaagtctgtgctggaaattcagggccaggaactgcaccggaaacctggaagtgcttgaagaagaagtgcggcgccgcacggcagtccccagaaggagccccgcgggcagcaacacaggtcttgctttccggaccccaaaggccttggccacagtctgcaacgggcggcaagaagggcccagctaaaagggactgctgggggcggaaccaaaaccctcgaggccaacatgcggggccccggaaacttggccccccgcggaactctgcagggccggcacaaaacaactgtcaggcccccacggggccaacccggaaaggcccacgaagggggccccttccttgg

SEQ ID NO: 368210 - DNA, 933 bp, Homo Sapiens
ggggtgagcgcaccggaaaggcccgaactgtttttgggatttgttcccctagcttcgctgggtccggcgggcagaggcggttctgaccgttgggccttgggcgtcgagcaggactcacctgaggcggagagaggccgcttcgcgcctggggctcccgaaagcggccagctgtcctcctgctccccctgagcggggagcgctgcgtctcctgcgggctgcgggagacccttccagactcccgggtgggaaaaccacactgagcgccccgggaggttgccagatacaatactgtatctggcacccctgcccgggtgcccccgcccagttggctggctggctggctagctgtctcccaggtgtgggagttagaaatggagtcaagatatcttcaaaagcaccttggggcctgtttaactcaaggtcttgcagaagtggcaagagttcgcccagtggatccgatagaatatttagcattgtggatttacaagtataaggaaaatgtgaccatggaacaactgagacaaaaggaaatggccaagctggagcgtgaaagagaattagctctgatggagcaggaaatgatggagaggctcaaagcagaggagctcttacttcagcagcaacagctggcattgcagctagagttggaaatgcaagaaaaggagaggcagagaatacaagaactacagagagctcaagaacaattaggcaaggagatgagaatgaatatggaaaaatctagttaggaatgaagatattctacattcagaggaagcaacactagactcaggcaaaacactagctgaaatcagcgatcggaatggagcacctaacttgagcagagtggaagaacttgatgaaccaatgttttctgatattgcattaaacattgatcaagatttgtaggaccaaccaacctaagagcaataaatg

SEQ ID NO: 368211 - DNA, 778 bp, Homo Sapiens
gtttgtggagtaaagcctgccacattgtcaaaatatgtaactggaggattacagtatgcttacctctgattttatttctacagtgctgctataagtaacaatgagtaaatctactaaattatgtggtaagacttcttgtccaagaagcaatatattctgcaatctccttgacaaaattgttaaaagaccctccctacagtttttgggtcagtggggatatcactgttacgaaccaaggatttacagatcactggcaaaaattctgaggtatgtggacttggatggttttgacgcactactcacagattacattgcatttgtggaaaaatcaggataccgttttgaagtaagttttaacctcgacttcactgaaatatgtgtgaatacaattctgtactgggtttttgccagaaaaggtaatcctgactttgtggaattgcttctcaagaagacaaaagactatgttcaagacagaagttgtaacctggcactgatatggagaactttcacaccagtatactgtccaagcccattaagtggcatcacacctctcttttatgtagctcagacaagacagtctaatatcttcaaaatactactgcaatatggaatcttagaaagagaaaaaaaccctatcaacattgtcttaacaatagtactctacccttcgagagtaagagtaatggttgatcgtgaattggtgacatccatgaagatgccaaaacatgtttggtactatgttccagagtgctttctgtcatttcagtcaaggaaataa

SEQ ID NO: 368212 - DNA, 553 bp, Homo Sapiens
aaattaacaaaattctcacctgaggaaaaaggagagactctagtacattcagagtcttgaaacagcaatcaaaaggactgaagtggggttaagaccactttcactatacctcgggaaccacctccatctccagcagaagtgaagttctttcccaagaaacaaagatcaaaggggaaaagcagaaggtcaagaggacatcatgataggaaggccatgaaagtcaaaacacctttgagagccctgaaatcactgtggggattatgactttttaatttatgatgggtgtcataggacaatacagccccagacttctttaggcatttcaagggaacattttagcttagcttggggggaggtattttttctctcttggaacacgtcgagaagtttctcaggaactatgctataccagaagtcaaaataaaagggaataatttggtggccctccttccagagtttgagctgacgaataaacttaccagatatgaccttctctcagtgttagaggacccagctcatgtccaaatgctgataaatcttccagggcaaaggt

SEQ ID NO: 368213 - DNA, 292 bp, Homo Sapiens
cttagaaattgggagaatatgttatgaaatagaatgcacctcccattacttacttttctttttcttctgtcttttagaggtcattttcttctgaggaagtcattcttaaggactgttctgtccccaaccccagctggaacaaggacctaagactgctctttgaccagtttatgaagaaatgtgaagatggctcctggaaacgtttgccttcatataaacgtacacctactgaatggattcaagacttcaaaaaccattttcttggtagaaacagccactttcccattaatat

SEQ ID NO: 368214 - DNA, 1121 bp, Homo Sapiens
ggggtaatggcgattttgtcatggtagaaacagcccaaaggacccccctcgtttggcctcccacgcagcttagtcttgcttttttagggatgtttctcattttttaatttctccagtcccatctggttatattgccaaaacatgtttgtgactctcaaacgttagtttactcccagcatcacttggggagcttgctaagctacgaattccgaggtcccactggagagtctgatttaatgaccctggagtggcggccggataacctgcctgctggggtgattttaacgcagctgatgcgaagaccccatttagggaatcattgggttggcgtttgcaatgcgttcctcccagctataggacaaagaggtgtcaactcaactgtgtcttcttagaagagcccattatttatagtattatgatgacacattcccctccatgaaggagcagatggttttcgagaaaaatgtcttcaacaagaccagccggactgagagtgagattgcatttttgggggtatgaccatcgtctacaagaacagcattgacctcttcctatacgtggtgggctcatcctacgagaatgagctgatgctcatgtctgttctcacctgcctgtttgagtctctgaaccacatgttaaggaagaacgtggagaagcgctggttgctggagaacatggacggagccttcttggttgctggacgagattgtggatggcggtggtgattcttggagagtgacccccagcaagtgatccagaaggtgaattttaggggcagatgatggcggcttgactggaacagagtgtggcccaggttcttcagtctgccaaggaacaaattaaatggtcgttattgaaatgaaggctgtggattcaaggctccctgccccccagatcatttccccaatcctggcaaaagcccaaagatcccagggtcaggagagacccctctgtatccccaggtccctcccagaactgactcctaaggtctccagccagggcttctgagatgcaaaggtttggcctcaggagagtcaccttttctcacggccctggccttaactcatatcttaggcattcctggccaaagggccctaataaacctgcttttgtcttctgaa

SEQ ID NO: 368215 - DNA, 1416 bp, Homo Sapiens
  misc_feature (806)..(818): n is a, c, g, or t
  misc_feature (1129)..(1138): n is a, c, g, or t
gggcaatcacagatgagctcaaacagtgtaaaaacaacctgaagctgctccgagagaaaggaaataatccttccatattacaacccgtcccagccgtattcatcggcctattcctggctttcctgttttggtgtttcggtccattgtggtagagaaagaaaccctggccctggatgcccatgttggctgccctggttgcagtaacagccatcgtgctgtacgtgccaggtctggccagagcttctccatgagagcgttccttgagtccgtacaccgtcctccctctagaagctggcatcacactcatgctggggacaaacagaaccattttcttcctctttacctcttaaaacagcagaagtacaagaatacagctgtagggtcattgctttaaattatataaaatgtatctgtctataaagaagatataaaattgtgactttattctactgtaagcaataatttgcttgcaatttttcatgtaatttttaaattagtatgttaagattctgaatattatggtggcctaaagtaggcttcttggtacaccagattatttataacattaaatttatgagtattttactctgaattctgatcaccagataattcatttttctgatttgataactacccaaaccaaacaaccaatacatacatgggaagagaggccctgtgtgctcagtgcctatcagtttgaaatatatacacatatatatattttttacatatttacgccatttttacttgttatgaaaccactgagctattgggaacaagacttagagacaactatttgcgtggannnnnnnnnnnnnagggaaaaatacgttgggaaaataaacgtgtggtggtgataattgggggaatatgtgcacgcttgttcagccttaatgtgacttgaagatgtggaggacatcaacttggaaaaactttccatgagagtgtattttcttgagcaaactgaagtatttctgggagcaaaaacatagtaattacacaatttcagtgcagtcaaccaaaaggttgagtcaatgggaatgtaatttattaaaccatgtttttaaagagatatttttctttaaaagccaagttactttctcatatacagcattttaggaagcatgannnnnnnnnnctatcatctattcctccaagcatgtttaattgaagaaagtattaatatctctttagataagctggtatggacctaattgggttcatgatgtgtcagagctaattcatgtccagggtgagcgtggtacctaccaacaaatttcctggtggggtatgcaaagggttcattccttttgacggtggtcaatcgggactttcggtaatgaaaagcactattcccaagattaatagggtcctatgcacaatgaagcacctaaaaacacgggttgatattatcac

SEQ ID NO: 368216 - DNA, 940 bp, Homo Sapiens
caggctccacctggccacacagcaggcactgaggctgggagacagcccccagacagatgagtgtcgcgcctctctgagaggtgaatgagcccggacggtccctacctaccaagtcctgaggagcagcggcaccaacgacgcaggcccgccccagcccgccagtgagccgcccatgccctctgctagcccggcccgcccgggcccccgccatgctgatcaccgtgtactgcgtgcggagggacctctccgaggtcaccttctctctccaggtcagccccgactttgagctccgaaacttcaaggtcctctgcgaagcggagtccagagtccccgtcgaagagatccagatcatccacatggagcgactcctcatcgaggaccactgttccctgggctcctacggcctcaaagatggcgatatcgtggttttactgcagaaggacaatgtgggacctcgggctccagggcgtgccccgaaccagcctcgtgtagacttcagtggcattgcggtgcctgggacgtccagctcccgtccacagcaccctggacagcagcagcagcgcacacccgctgcccagcggtcacagggcttggcgtcaggagagaaggtggccggcctgcaaggtctgggcagccccgccctgatccgcagcatgctgctctccaaaccccacgatctgtccctgctcaaggaacgcaaacctcccttggcggaagccctgctcagcggaagccttgagaccttttctcaggtgctgatggagcagcaaagggaaaaggccttgagagagccaagagaggcttcgtctctacacagccgaaccactggatcgggaagctcaggccaaaatagaagagggaaatccggcagacaaaaccattgaagaaaacattgactatagcgatacgaagaggcccccgagagtaatggacaaggtga

SEQ ID NO: 368217 - DNA, 743 bp, Homo Sapiens
agggctatgaaagaggggttttaatgaagagactctttacaaaggtgtaggagtaggcaaaccacgagacagcgcagtctcctaggcctcagagctttggggccccaggacccaggatggagggtatggggggatggggtcaccgggacccagagatgagtgaactttgtgacggtggtagctgcggcctctgttcacttctggaagacatgcgggctgccctgttcctttactgcctccttcttcctttgccagtaaaagaaacatctccagctatggccaggagtagagcactgctgagactcacagcccacagggaggtccgccggttcctggctgggcagaaagtggggtcattgcaggagaggaagtgagtcctgcagtcagcacagctggtgaccttcagtgtggactgtatgtccttctccttcagcccatcagatatcttattcagcctctcagtaaagagattcttgtgcgtgtagatctcttccagaagtactgttttatcatctcgtaacgttttaatggcttggtgtacttgagtgaagaatttggctgtttcttcttccaaatggtcacgatctaggtaccgggctttgagaaaattattatcctctaggaacaaggagctgaatactttgagacaggtgctgtgggttcacctggggtcacccagaagatctgcaggtcaaaatctatcaaggcagacagttctggccagcagcggaggcagttcttcc

SEQ ID NO: 368218 - DNA, 883 bp, Homo Sapiens
ggctgtacggtccggaatttgggatcctgatacacccatctcatcttgggaatgggctagccaaaggtaccagaaaactcaaaggtctttggctaaaatcctctgtatcctccagcagtaacttgccattaggactagaaatactcaaagtccaatgagtaggatttcctctcccctagatagtacttggatgggtgctttccatgcttgccaagggcaagaaggcagtgatgaagttcaggaactccataggcaattcacagagaatgaattcatatcaacttccaaacattaacagttacatgatgcctattcctcctccacttcccccaactgggaaaatcacaagagaaaatagatctgaaacatggagaaggagaagatttcgtccaaccactgctccaaatggcttagaacctcttttgacaaaggattcaagaaggattcataaaacatccttacatagtaatgcagctattacaatgatctatttggggaaaaatgtgcacctatcttctgataatcctgacttccgggatgaaattaaagtttatcagcagcactgtggtggggaaaacctttgtgtctacaaaggcaaactacttgaaaaagagacctttcagtttatttccaaaaggcatcatggtttccccttcagtctcacctttttcctgaatgggatgcaggtgaacaggttaagctcctgttgtgaatacaagcatcggaaaggttccaggcttggaggcaaacgaggctacttgggttgtgtgtgttgagagatcatctccttgctacaagtgcattattgcaatgggccttgacaaaaaaaccgtctttgccgaaattaggaaagaaaagagcagtgagaaaggagaggaatgaa

SEQ ID NO: 368219 - DNA, 1689 bp, Homo Sapiens
  misc_feature (296)..(357): n is a, c, g, or t
  misc_feature (441)..(441): n is a, c, g, or t
ccaacgcaatgttgttcgataaaaactttctctcgggaggtcagagggcccgcccaccaaggacgtggggttagcggccaccccacggggggcttcgggtactttaatttttgaaaaaattttttcccaaaaggaggtaaggaaatgttaatttaggccttgggggtttccaaagggagagaaatacgttcgggggttctaaccggcccgtaaaaccttctttttcatcccctctttcctgttatccgctagagacagaaatgaaaacccatggtttcagggctgctaaaagcctnnnnnnnnnnnnnnnnnnnnnnnnnnnnnnnnnnnnnnnnnnnnnnnnnnnnnnnnnnnnnnaataaggctgttggacaagcaagttggtcagccaaatcctctgttgttgttgatggcttcttgaagcgcttcttcaactgtttnccattgtagaatatttagggaggaagaggacactgaaacatgtcagtgctcttatagggtctctttcattccaactttcaggacagcaaaatgttattttcatattatttaaatctttcatttgtagtctgtcagttcctgtaagaaatacaaggaattttttcttttcttccagagtcaatttgtggaaagccttccaaaacatcactatggtgggatgtgaactgttatatcctggttcataacgtgcattcttttcaaatgttttccaatcataatctgtatttccaacaatcacatccttcagttcttcggggtggaataatttgataatgtcttcgtcgcacattttataaaatcctctccgaaattcttcataaaccgcctttacagagtcgttgaaaatgtaattgatatacttagaaacatagtctctctttgttagtctggttgacagttatgctacttccattaggaattaagtttgtgtcgtttctgtcccagtgcacattaaaatggatgtaaaatacttcctcaaagttatcaccttcatcatccagaagtgtttgcaaattctttcccaaatcaggactgagttctttcaagtcttccaatgatggcatttggtccaaagtttcttaaacagtgccagtgggaaagggaggttggcaacattgcaattgaacagggaaagtccacatagaaccccaaaaaagaagtatcttttcttctcaaatttaggcttgacaggaaaccacatgcaggaagccccttcaggatacatgaacatcccatattccggctggatcatctctgcaaacagacagtagaagaactctttcttgactcctccgaggtcatacccaatttctccactaaatgaaacccataactctttcctcaggtcttcattctcaaattgacttagctgattcaaaacatcctcaatcaagtgattccttctgactgttagatcaaacgtgggcctcaaagcgaattcagactctctttcttcctcaattgctgccgacctaagataagctttatgttttttactctctatttttaaaagtgtgtctgtatgtagtagtttaattttcgacagattattaaagataaatggaaagtgactgaatatgacgcagcattgtacattttctgaagcgtccacagtcattttccacaagtaccttctgcatacttctacaaaaaaattgagacggtgcaagagttcgtctactggaaaat

SEQ ID NO: 368220 - DNA, 1063 bp, Homo Sapiens
ggggccaaaatgtgcccagatatcgatctgggaatgtgcccatcaaaatcagaatgaggacttatcatccccaggtccccagatagatgggcccctcaacagcggcacgtgccttggtactgccgtggtgacaactgaaaaccacgtcgtggggccatcttcaacttcaagcttttaagctgctcggaagttcagccgagagtcttcttgtagctgacattaggcagaagagggaggtggcctgcgtctgatggcttggcacctgcgcgctcctcatcactggaggatgattcatgctgtaccctggtggccaagctgagctgcggcgattgctctccggtgctatgggccatgccagccaagcactgctctggcctactttcctccttgatatgtggtgtttcttcccctccatgaaaaccaccatcttcctccctttttgggcattttatccctcatgatagattccacagtggcctttggcaaaggtttctggaaggcctgcattgccaggaggaggggtgctactgttgtccagttataatatttactcccaatcttgaccacgagataggggtcatcgataatagcggggttgtccacaaactgttgatatgacacagcttgctccaggaatgcatctttcgtgatctcccggtggtcgctgaggcccccgcagagggagatggcgatggaagggaggtccctcagcccgtccgaggtgctctccacgccagctgtccacgcccgagctgcccaccgactgcggggactggttggctgaccgggctccgttgtcgcttgcatgttttgcgagtccggaaggatctccgtttttgggaaaatacagggccgccacttccaggatccatgtctgtgaggtcaatccaagtagacgccgtcagcaccaagatgtcggcttcgtttatctcttttcctggaaggagaatccgtcttgtttgctgtctggactacactggcagaggggggtttgagctcctcgatcatgggcaagagtggcgctgctgctcctaaggtctccaggtcttcttcattcacaaac

SEQ ID NO: 368221 - DNA, 1342 bp, Homo Sapiens
  misc_feature (26)..(26): n is a, c, g, or t
  misc_feature (29)..(29): n is a, c, g, or t
  misc_feature (35)..(35): n is a, c, g, or t
  misc_feature (64)..(64): n is a, c, g, or t
  misc_feature (69)..(69): n is a, c, g, or t
  misc_feature (78)..(114): n is a, c, g, or t
ggggaaatgtactagcacctcaattnatnaggggngcccacttgcgggagtgttcaaccccggncgggntggcggcgnnnnnnnnnnnnnnnnnnnnnnnnnnnnnnnnnnnnnatcaggccaaatcggccgagctcgaattcgtcgagagcggagtggatcggtgggtttatctcaaggcctgagtagccggtaacaaacgagggttcccgggattggaccgacgcagccatgcctctgcgacttgatatcaaaagaaagctaactgctagatctgatcgagttaagagtgtggatctgcatcctacagagccatggatgttggcaagtctttacaatggcagtgtgtgtgtttggaatcatgaaacacagacactggtgaagacatttgaagtatgtgatcttcctgttcgagctgcaaagtttgttgcaaggaagaattgggttgtgacaggagcggatgacatgcagattagagtgttcaattacaatactctggagagagttcatatgtttgaagcacactcagactacattcgctgtattgctgttcatccaacccagcctttcattctaactagcagtgatgacatgcttattaagctctgggactgggataaaaaatggtcttgctcacaagtgtttgaaggacacacccattatgttatgcagattgtgatcaaccccaaagataacaatcagtttgccagtgcctctttggacaggactatcaaggtgtggcagttgggctcttcgtcaccaaacttcactttggaaggacatgagaaaggcgtgaattgcattgattactacaggtggtggggacaagccatacctcatttcaggtgcagatgaccgtcttgttaaaatatgggattatcagaataaaacatgtgtgcagacactggaaggacatgcccaaaatgtgtcttgtgccagctttcatcctgagttgccaatcattatcacaggttcagaagatggaacagtacgtatttggcattcaagcacctaccggcttgagagcacactgaaatatggaatggaaagggtatggtgcgtggccagtctaagagggtcaaacaatgtccgctttggggcctatgatgaaaggagcatcattggtaaagctgggtcggaaggaacctgccatgtccatgaatgccaatggaaagataatttgggccagcattcagagtcccgcaagccaacctaaaagcattgggaaatgctggaattaaagatggggaacgaatgcccctggcaataaaggatatggggcagttgtgaaatatccccctccaacatttccgcacaatccctaatgggggggttgtgggga

SEQ ID NO: 368222 - DNA, 810 bp, Homo Sapiens
ctgactgctcaccgcgagtcaggaggggccggcgggctcacggagggagacagggtgggcgggggcaaaggctaggcgctagggcggcggcgccagcgtagagcggcggtttggaggaaagatgagacgattccagcaagattatggaagagcatagctacatacaaaaggagctagatttacaaaatggtagcttagaggaagactctgtggtgcattctgttgagaacgattcccaaaacatgatggagagcctcagcccaaagaaatactcttccagtctgagatttaaagccaatggagactattctggctcctatttaacccgtctcacaacctgtgcctgcaaagagaagcccttctcctttgggaaccagtgtcagaagcagcccctccttagccaaaatccagggaagcaagcagttctcttatgatggaactgacaaaaatattcctatgaaacctccaaactcctttactcaacactacatccctccctcagtggatatccacttggaagagcagactttgatcattatactggccgggacagtgaaagggccttgaggctctcagagaagcctccctattccaaatatagctcaaggcataaatcgcatgacaatgtctactctcttggagggctggaaggtcggaaggcatctggctcgctcctggccatgtggaatggaagttccctgagtgatgctggcccgctcctatcagcagatcgggagccgaagcatgccttcaaagcccaaagcaagccaggaaaatgagcattcaggacagcctggcgctttcaaccaa

SEQ ID NO: 368223 - DNA, 1226 bp, Homo Sapiens
gggcgcgccgcggtcccaggtggaccccgtcccccggagcccgcccaaccgccggtgcaggcccgctccgtccttgcccaggctccctcgcgggctgtgcggcgcgttcagagatgccgctggttgatttcacggtgctttccaccagcaagaattgggggtggtgccgggctttggcttcggccagcggacttgggttccctggccgccccagctacccgtcttcacgtttccatctgttctcagctggggggtacgggggaagatggctggaaggccccctgcccctgactcccacttcccagcctctctgactgcgggctccttggcctagcaaggtgcagaacacctgccacctgcacctgagagccctcccactccaaagaccttccgcaccaagacctcgtttctggcagtcatgtctcctctgaaataggtggcagttcactttcacaatttttaaactggtgagaaaggacttgaatgtggctagaggagggcaggccggaggccacacatgcaggaaggtgcctgatgtacaagcccatactggccggaaggcaggcctgggtgaggacactctgtagttgagatgaaaatcccctgggggagagaggagaatagagggggcataaacagagagcacagccaggcacaacgcgcaggcgctgagtcaatgagaccctcctgcacatcacacaggtcagagacacggccgcaagcccctcctgtccacatgcccagagtttagagacaccaaggtctcagcatcacctagaacctctgagaaagtcatctcttgatccccttgacacgcaggacttcagagatgcccgggtttcaaaagaagacaagcaaggggggatttcctcagtccacacccccattttccccctctctcccttgccccacgaaaagtgattttataagcacagccagaaatcaaaaccaccaagccatgcttgggaaaaccagggatccacatggggtaaataaacgggaaactacgccttcaaagccagtcatacacctgggccattcctgggttccttccccccccggacatgggaaagggagggtaaaaaagatttctctggagggtgttcccaaaagccccaggggaagtgaaatggtccccgggggaacttgggggcttcttgttgaaggaaggcccaggccccaaaggggaacaaaccctgggcaccaaggccccagttccccctttt

SEQ ID NO: 368224 - DNA, 1019 bp, Homo Sapiens
  misc_feature (892)..(892): n is a, c, g, or t
ggtccggaattctcgggatctgcctcacagaggaagaaccgaggtgggggcttggtgaaggcacaccaggaagagcaggctgcgcctcaccctccagtggagacagagggcagacattctctttggagcacacctcaggctaaatggcaaaaccccaatctcaagtgaacatcatggaactaggggattgtctcacttctccagtggattgaggcagtgctccctctgttctctatgaaatgacggtgtggacaggggatgtggttggcgggggcactgactccaacatcttcatgaccctctacggcatcaacgggagcacagaggagatgcagctggacaaaaagaaagccaggtttgagcgggagcagaacgacaccttcatcatggagatcctagacattgctccattcaccaagatgcggatccggattgatggcctgggcagtcggccggagtggttcctggagaggatcctactgaagaacatgaacactggagacctgaccatgttctactatggagactggctgtcccagcggaagggcaagaagaccctggtgtgtgaaatgtgtgccgttatcgatgaggaagaaatgatggagtggacctcctacaccgtcgcagttaagaccagcgacatcctgggagcaggcactgatgccaacgtgttcatcatcatcttcggggagaacggggatagtgggacactggccctgaagcagtcggcaaactgggacaagtttgagcggaacaacacggacacattcaacttccctgacatgctgagcttgggccacctctgcaagctgagggtctggcacgacaacaaagggatatttcctggctggcatctgacctatgtcgatgtgaagggacactcccgcgaccnagactttcacttccagtgtgactgctggctctccaaaaaatgagggtgacgggcagaacgtccgcgactttggctgtggcaacaacaaaatctgtgaatgaactggaaaaaaccccctacgagatcg

SEQ ID NO: 368225 - DNA, 447 bp, Homo Sapiens
  misc_feature (89)..(89): n is a, c, g, or t
  misc_feature (106)..(106): n is a, c, g, or t
  misc_feature (120)..(120): n is a, c, g, or t
  misc_feature (364)..(364): n is a, c, g, or t
gtgaaactggagcaactgagcctccaacatagacgagcccagctgctagatatcaatgggaagctgcgggagatgctgaagcagtactntggatggcatctcaggntgaggttggaaccngggaaaaagggcttgggcccttttggaaaggggcccaagggccgttcccaaaagcgcccccgaagccttccttttattatggtccaaaagcctaattcaagagcgaacgttatctcccaggcccttggttccatacgttatagcccatccaggtgataaacaacatccaaccacttaaaatataattgaagcagcccagatgatcttccacaacctgtgatctaagggaacaaaacatcttttnccaactcctagcagcattttcttttgttttttgggagaaaagtgtaggggaactgtgggctatttgaacaatatttccagtgg

SEQ ID NO: 368226 - DNA, 1029 bp, Homo Sapiens
aattccttggatcagagacccaggatgctctcctgagaccacagcaactgcagaagctgaagacatttccagaagttcaagcttccaccctctgcaggtccccactgagctgggacccaggtcatccaccccaccccaaatccctggataggaaacccctttctcctcctgctccttgtccccttcatccctgccgcccagcatcctactggcctcagcacctgtggccagaccgtccaagatcctctgaaggcccagctcttgctgtccaccccggcagtaggcaggcagcctggccatgtgccctccggtcagcatgcggtatgaggaagagggcatgtcctacctctacgcctcctggatgtatcagcttcaacatggagatcagctaagcatttgcttcacctgcttcaaggctgcctttctagactttaaagacttgctggagtcagaggactgggaagaagacaactgggaccctgagctgatggagcacactgaggcagagtcagagcaggaggggtcctcagggatggagctgagctgggggcagagcccaggacagcctgtgcaggggggctctgaggcatgggggccagggaccctggcagcagccccagaagggttggaagatgcaggtctggacccccactttgtccccactgaactatggcctcaggaggctgtgcccctgggcctgggccttgaggatgctgactggacccagggtcttccctggagatttgaggagcttcttacctgctcacacctggccaagcttctttccttcatagcaggggtttctcaaagtgggacctgcccccaagggaagcccgtgggtgttgaaacctgggcattaccctggggcaggggaaccctgcccgaaggctgaagccctatttactgggcccctgcaaccttgtcctcccatggtggggcctggctatgaatacccatctaccctaccaggaaaaatggacccctcgaaccggggcccctgaaggaacccccaggggcaactccctggga

SEQ ID NO: 368227 - DNA, 1074 bp, Homo Sapiens
  misc_feature (822)..(822): n is a, c, g, or t
  misc_feature (978)..(978): n is a, c, g, or t
  misc_feature (1027)..(1027): n is a, c, g, or t
tggaccggtccggaattctcgggatcaccagcatgctgtactccccagggccgagtcttccggagtcagcagagagcctggatggatcacaggaggataagcctcggggctcatgtgcggagcccacttttactgatacgggaatggtggctcacataaacaacagccggctcaaggccaagggcgtgggccagcacgacaacgcccagaactttggtaaccagagctttgaggagctgcgagcagcctgtctaagaaagggggagctcttcgaggaccccttattccctgctgaacccagctcactgggcttcaaggacctgggccccaactccaaaaatgtgcagaacatctcctggcagcggcccaaggatatcataaacaaccctctattcatcatggatgggatttctccaacagacatctgccaggggatcctcggggactgctggctgctggctgccatcggctcccttaccacctgccccaaactgctataccgcgtggtgcccagaggacagagcttcaagaaaaactatgctggcatcttccattttcagatttggcagtttggacagtgggtgaacgtggtggtagatgaccggctgcccacaaaagaatgacaagctggtgtttgtgcactcaaccgaacgcagtgagttctggagtgccctgctggagaaggcgtatgccaagctgagtgggtcctatgaagcattgtcagggggcagtaccatggagggccttgagggacttcacaggaggcgtggcccagagcttccaactccagaggccccctcagaacctgctcaggctccttangaaggccgtggagcgatcctccctcatgggttgctccattgaagtcaccagtgatagtgaactggaatccatgactgacaagatgctggtgaaagggcacgcttactctgtgactgggcctcaggatgtccactacagaggcaaatggaaacactngattcgggtccggatccctggggccgggattgagtgaaaatggacctgnaatgacatgccacggaaagggaaaaagggggctcagactcccgatgg

SEQ ID NO: 368228 - DNA, 740 bp, Homo Sapiens
  misc_feature (720)..(720): n is a, c, g, or t
cctccaaatagggaaaatctgcatcctatattttgtccatcagccttgatgtaatcaacacactgtaatgcatgatccaagccctcataccagtaaaaacaagttgtaattggtatcaagaagtacacctatgccaggtttccaagaacagagtaaatattgccaattgtaatatacgcaatccatatcctgaactttagtttctggaattccttgtggtgatatccaataagtagtttctgcccaggaactttgaacttctgatccatttgtgcattgccatggtaaaagcgtgtgtatcttcgcttcaatgcccttgttaagatcaaacccatctttgtaatgtagattcttagtaatgatggtccttcccatgtttcactaccaatgtttcggtattttagttcatattccactgtgcattccttaaaatgatccagagacagtgggggttgccattgcaaatagagataacctaagtatccgggatccactatctcaaaatcctgaggagggttaacttttatctcggtgtctgaagatgaagtacagccaaatgttgtgcttatcagaaaggtatataagcatccgatagccaagcaaacgaaagccatttctccgagatttaaaaccttgatattgcctctctccccgccgacaggcacacttctgaccaggttatggcgacttcaaatagccttcatccggaagaccgttagnactcacgagagtgttcttac

SEQ ID NO: 368229 - DNA, 1301 bp, Homo Sapiens
  misc_feature (82)..(95): n is a, c, g, or t
gtcaccctgcggaagaggcccagaaacaggaagaccttagttaggatgcaattacaattcctgggtacatggcttcctcagnnnnnnnnnnnnnntcacagagattgtttttcaaaaatatcaaatctacaaaaaataaagctggaaaagcaagcatcatgagttcagatacaaatgtaaacaaaagtgcctctccaactgcgactgcagaggaacagccagttgaacctgatggcccccttcctggctcagacaataaccaagaaaagaaagtaagattatctccagccaaaatgtcaaccaagaattctacagatctagttgaatatgttgacaagagtcatgcttttctccccatcattccaaacacccagagaggtcagctagaagacagactgaacaaccaggcgcgtaccatagctttccttcttgaacaagccttccgcatcaaggaggacatctctgcttgcctgcaggggacccatggctttcgaaaagaggaatcgctcgccaggaagttactggaaagccacatccagaccatcaccagcatcgtcaaaaaactcagccaaaatattgagattttagaagaccaaataagagctcgagatcaggcggccacaggaactaactttgcagtacacgagataaacatcaaacacctacaaggagttggagatcttcgaggaagagtagccagatgtgattcaagcattgtgaagctttctggagacattcacttattcaggcaagagcaccggcaaattgagaaagccattcaagaattcgtgcccgccctggaaactctttccaagaacttggacatgaaggtgatgcagctcttaggaaagatagaaactgccagttctgagcaaacctcgaatttaaagatgggccagggggattatcgccacgaaatgaaccttttggaattcaaatttcattcactttcaagtaatctgtaccaaaaagttgagaataataaaaaatggacagaaaacccatttctcaaatatagaaaagaccacctgggccatataaatgaatgtcctgaagtcctaccgggagaaactggaaaagtctgaaaataaaatggaagaaaaaatgctggagctttccaggcaaagaaaagaattttctttaccccccggaaacgggaaaacccaacctaagtaaaagtaaagccttatggaaaaataaattggtccaaaaaagatgggacccaatgggagaaagccagatctggggggggatttaaaggccatggccgaatggaatatccattccgggattttaaatcc

SEQ ID NO: 368230 - DNA, 364 bp, Homo Sapiens
gtcgctggtccccggcaacacggctcaggcaaacgtaagcggcttgtcgcagaaaccaaggggtccacgaaacgcgctaggctagaaggcgggaaggagagattactgacagccgtgccagccaataaaatagaaatcaacagtgagagctcagaaattcccagcactgttttgatgataaggtccaagaacttgccatgtgatccatcactactagactcccacaactgcattagatttgttcaggattttcatataattttcataactggctaagcattggaaatggatggggagaaggcctgatgaaaattactgaggaagcctcttagcctatgtgctctgagagtagtgacacctagca

SEQ ID NO: 368231 - DNA, 1124 bp, Homo Sapiens
tataggtgccgcggacatctgggtaggtggcagcaacacgggggggtggggcggctcgaacgggcggagggtagacacatggattgcttagagaaaagtgcggtgggcggcaatttgtatgcacgggcgtgtaacagctaaacacgcaggagggtggagcgcgtagctcaaatgtggggatcgtgggggcggtggaacgtgcgttaggcgggaccgacaacaccgagacgccggggcacgagggctgcgcaagtaaggccgtaagcttgcgcgaagggggacccagagggttgtgggcgttaacaggcaagacccattggcgcaggggccccggggtctctggggactggggagcccagacatatgcttgggggccgtatagggggggccaccgcttccacctgagggtaagggccgtggggggccagggcgctcagactgggggctatggaggtacatgtatgagtcggctggcccagtgctcatcccgcccagcagccccagggactgtccccgcccccggctggtggggctgcgggccacgcagggggttggagctgatgactgacaacttctggatgtcgttgagcagccccgagatgtagccatccacaggcatcgcgctgccccgcaccactgtcttcatgggctggagctgcacccgtgtgattcgcgaagggtccaccacgggcttggggcgccgcagtgtgtccaggatgttctgccattgtggggggaggcccacaaacttgccttctttggggtcgaaggaggtgtggacacggtgctggaagttctgtggcgctgagatctcagggcgtttcttctttttcttgcggaacatggtgccttccggcgccttccgcctcttcctcgcgactcctcacccggcactgggcctctctcttaggcgctgaggagagggaagacctgggaccttgctgggccagtcctccgcaggccgtggctgctccttctgggcagcggggtcctgcgttctccactgcaggctggtgcttgtctctagcccaggaagcggcactcctttgggatttctcccattaaatcctcaggcatcgacgcaactcgtttggggcgccgagctatctcgaaaattccggacc

SEQ ID NO: 368232 - DNA, 864 bp, Homo Sapiens
gtgaataaaagatgaaatatgctaaggtacagttgtgacaatcacaaaaagagaccaaatagtgattcatccagatgatgtgcttttctccccacctcaaccacggctgtaatgagaactcccttcttaattaaatggaaaatttccgtgccttttaagttaccaatcataaccacacgacatcttcaaatgcctgatgaaacatggggaacacctggttgccagtacctggaacgttatagatgatcactccactggctcccttctcagttgccactttaattttctgtgtgaaggtacaacctccccgttcaataagtgcaagccaggtctctgagtactttgatcggctgaaaatggtattgggattacatgcattttggatttttccctctggtggcactataactcctgccactctcttcaaagtggagcttcttccaaagactccagtctctcccaactctgacaacacatgattcccaacatgaaatgatatgttcatataagccatccaaacaacacttgctctgcaacagttctgactaacaagccaaagaacactgaacttcataagccaggaagaggcagtgttgtttctccaagtgccaaccttgagtagatgcatctctctcttctccgagtgacttaagaaccaacctaacagttgcacatctgttgacaattaatttaaaataacgaagagaaaaaaatcttcaggatacaaacaagatccactgtcttccagcatgtttttgtaagaaattcttaaagatggcttatgagtttcagatgtcttactagagagaggtgaaaaactttagattgaaaaataaatcccctactgttaactctagatactgc

SEQ ID NO: 368233 - DNA, 1141 bp, Homo Sapiens
  misc_feature (973)..(973): n is a, c, g, or t
ggaccggtccggaattcccgggatccgcccgcccctcggcgtctagcttcgtccccgccgtgagggcgggacttcctctcgttggctcgccgtttccgacgctgtccggaagtcgagttagtctagttagtatcggcctgttatctccttttgcgcgacacggtctcagctgttccgcctgaggcgagtgacgctggccgccaacgaggtatacgtactgggaccctcgccctcagtctcgtctccggcgcggctacctgccccgttttccctgtgagttgacctgctccgggccgcgggccgccaatggcaggggccgctccgaccacggccttcgggcaggcggtgatcggcccgccgggctcagggaagaccacgtactgcctgggcatgagtgagttcctgcgcgcgctgggccggcgcgtggcggtggtgaacctggacccggccaacgaggggctgccgtacgagtgtgccgtggacgtgggcgagctggtggggctgggcgacgtgatggacgcgctgcgcctggggcccaacggcggcctgctctactgcatggagtacctggaagccaacctggactggctgcgtgccaagctcgaccccctccgcggccactacttcctcttcgactgcccaggccaggtggagctctgcacgcatcacggcgcctttgcgcagcatcttctcccaaatggcgcagtgggacctcaggctgactgccgtccacctcgtggattctcactactgcacagaccctgccaagttcatttcagtactgtgtacctccctggccacatgctgcacgtggaactgccccacatcaaacctcttttcaagatggacctcattgagcattatgggaagctggcctttcaacctggactattacccagaggttctgggacctcctctaactgcttggaccacctgggtttctgaacctttctttcggccacttaccgccagnttcaatgaaaagcctagtggcagctcctccaagaattttgcgcttggcctccctttatcccttttcaaaatccggggacagggggaagcttcccgcgcaattcctctcaggttttgggattaaagcccatggggaaactgggttccggaacccccaaaaaccaccgaa

SEQ ID NO: 368234 - DNA, 1067 bp, Homo Sapiens
ttctcaagtcatgaatattaggtgtctgtcaatcttggccctagaacatatataagaagtcatctattcaattcatatttacctgacacacagacgaacatagatgcacacagacataaaaggactaaccatgaactgaaaaggtgaccagaaatcattcccacatgacacattcaacccacactaagtgctgcactgttatcttagggtaaaacggctggggtgctggatttccaaacgatggtggtgtgacgcggcctcatgtggaagcatcgtgacttatattcttcttcaagaattatgtgaattcttaaggtcatcttattttactcaagaagtgacctctgtgtgataccgacagacagacaggttttaaaaataatgtacccaaaagaatttagcaaagactttatagtatgtgctagacttaccaatactgtggaattcaatgcaaaagtctaatccaatttggacctcccactgtgtaatactgctaaaaatattatcaacataatgtttgaacataaagttggcctatatttttaaaccacaggttgttagcagatgctttttgtcctgaaggataatactaacaattatatctaccgaaatgaagtgacccaatcttaagctactactaatataaaatacataattgacagatttattgtattttaatgccataaagtaaaaataaatgagaattcaaataagcaacagatggatggaatgactattgtaagggcagttgagtttttgatgtcacctcccaaactttgcaagtaacaactttttaggaggtcaatggtatttccattcttcccccaactcccctcagtaccgcaaaacctccaaatctaagtacttgtcagtattgtatcttcacatatatattaagaaataggaaatacaaatcatatccacacatttagtcaaaaactcccaaatgctgagaattaggctactccctttaaagacagggcacttggcataattgtaccaagcaccttggtgttctgaacgtcctttttttctctgattatccaacagtgacggagaaatgtccc

SEQ ID NO: 368235 - DNA, 1526 bp, Homo Sapiens
  misc_feature (76)..(132): n is a, c, g, or t
gaacaaaggcccggccccccggggaccccaaggttagggaagcaagaaggtgccccggcccacccccccggggaannnnnnnnnnnnnnnnnnnnnnnnnnnnnnnnnnnnnnnnnnnnnnnnnnnnnnnnntgtcctggtctccatcagcagcagtttctagagacgccagagggctggggggcagagggtggggaccggcgaaggggtgcggcaggacgtgagcgggggtgggctgggctgggcgttctctggccgccagctcatcccgctgctctgggctgcctcggccaggtggacgggttaccggagatttattgcactgttttggaagaggcatggggctaaggaccagcgggacggcaggagaggcgggtgggaggcgggcaggcgtcatcgcttggtcttggcgtctcctcgaaccctcccagatcacccaggtgcatgcaggcgccggcgtcctcgctggagctgtgcccatccaccattgtcctggatgatctgtctgaggtagtcggccatgaggttccgcagggaccgcttgtaggggaggcccaggcggtgggggaagagcacagacgtgtccaccacggtgctgtggatgaccttcagggccaggaggtcgctctccaggctgtgtccgatgaggatggtgtcagcgctgaacatgctcagcagaacggcctggacgtcacgcagcgtgacacttgtgtcggcaaggtcagcctccgtcacccccgaaaacctggtgttgtagtccacgatctcgttgtcaggcttcacgaaggtgtcataaaccacgtgcacgtccgtgtcgaccaccgtgacgcgcgtcagctccaggccatatgtggtgtaggacatctcgcagtccagggcgtagatccccgggtgggtgtctcctgagagctctttctcaaaggtcttcacgaagccctcaaggcgctccttccggccatcctgcacgtgttgctttgcgacttggcagccgacagagccggcggcagccgagcagcacatgtactgggtctcccagcctccggccacccggttccggcgcagccgtccccagtggtaataacactcctcgtcccggatgcagcggcctgaagaggacacgaggtactcggtgccacagcggcagcaggtcctgcaggaagagtccttgggcctcttctcctcagctgtgaagatgattgcgcccccgggccgctctgggtgcgggaaggggtagccgttctccttgagctggtcctgggtgagcaggtactccctgaggcggctgtacagggcagcccctttcaggtcctccacccgggggctgcttggacggctgagcgagaagctggtcttggcggccaacctgccccccaacaccacctcgtgggacacaaccctgcggccaccggttttgctgaggccgggcacagcgctgggggccaggcacctgagcttcttgagggtgttcacggccacattcaggtagatttcttgctgggcctcgtgccgaattcgccacccaggcc

SEQ ID NO: 368236 - DNA, 1022 bp, Homo Sapiens
  misc_feature (969)..(969): n is a, c, g, or t
ggtaccggtccggaattcccgggattggagttggcgtcggagcaacagctgcgcgggcggagcagaaagcaagtgattgctttcctttcctcatttttggaagccctgcctaacacacagctgcactgtacatcccagttcctggatggacgaagaaagtgaactgatccagccccaagaccagagctgctgggcctttctgcccgatttgtgtctgtgccgtgttttctggtggctaggagacagggacaggtccagggctgctcttgtctgcagaaagtggaaccagatgatgtattctgctgagctctggcggtacagaaccatcaccttcagcgggagaccttccagggtacatgcatctgaagttgagtcagctgtttggtatgttaagaagtttggtcgttatctggagcacctggaggtcaaattcatgaatccttacaatgctgtcttgaccaagaagttccaggtcaccatgcggggcctcctgtcttgtctgagtaagagcaacaaccgtctgaaatctctttccatccaatacctggagctggaccgcctggtatggaggaacagcatcaggagctcattcatcagcagcttgagcttcttcttaaagaagatgggcaaacgcctggattatctcaacctaaaaggggccaggctgaccgtggagcaaggctgccaaattctcgactccctcagctacatgaggaatgagaatgtgatctcagagctcaacatcgaggactatttcagccatcacctttgctgtctacaacagcccccagttcaaaaagaacatgtccacattccacaatcttgtgtccctgaacctcaactacaactgtatctccgacgagctgccttgagaacttgtgtgagaatgccagcaccctccggaccatcaacatcaaatgccacgttcatgacccccacggaaggttcatctgggggatgtccctgggnccagctgggcaggcaagccacccaatctggaaggggaacttcttccttgaaag

SEQ ID NO: 368237 - DNA, 1039 bp, Homo Sapiens
  misc_feature (895)..(895): n is a, c, g, or t
  misc_feature (953)..(953): n is a, c, g, or t
  misc_feature (987)..(987): n is a, c, g, or t
ggtccgaattctcgggatatctgccttattgaacttcatctttccttcattctcttcaacttccacttcttcttgtatggtcctgttgatgccatcttgtttccgtccccagactcatcatctttaccctctgtcaactgagttcccaccctggttctctctcaagatcttcctctcatagctttcacccttggtaaacaatgaggacacatctcaaaaagaatgatgtaatttaattgccttgagttggctgggccatcatctattataaagtgctcttaaaattaaagctaatttaattctgaagaactaaggattaagaagttaagagctggggttcttacaatatggcttgcagactacaagtgtgaactgaggaggtccccaaagtcacttcttactaagtgaaagcggtgtaaatggctcttatctgaaccacaatgaattcacatattcaagttggcttcttcggaaatttcaggccacaaatggcagtgatgcgaccaggagcagtaacacgattacaagtcgcaatttaggaagggtgctccatcatcatcatttcatgattctcactacagcccagacaggtgggcagagcagtgttctttcccctttaatgaatgaagaagctgagcctcaaacagatgaggggggcttcctgggttcacagagctctaaagggctgagctgtagatccacggccaccatgatgagctaagagtttctggattcagtgcctgctgttgcctcctggagatttgtatcctgattgaaggctggttccatatctgttcaccccagtcacctttaaaattaaagtcctgggcacaaaccattagtctggcaagttacatcactgtgccacttccatccggacagaaagaacccaggntcagggctgacagggaggagcagagccgtcaatgagagcagacctcagaaaccaacgnaggtggagaagaagcacatccacagccccatccntctgaatgctgtgggaaggaagtccacaaaataccacccccttgggagtcaa

SEQ ID NO: 368238 - DNA, 1187 bp, Homo Sapiens
  misc_feature (714)..(784): n is a, c, g, or t
  misc_feature (1024)..(1034): n is a, c, g, or t
ccagtttgttgttttacctaaaaggtgttttccacgtggagtgggactgagaggcacaggtggctgaggggacccgcctgggacgtgaggcgcaggtgtgctcggccccttcatctgtcagctgcagcaatggaatacgtgctggaagtgaagaactctccgcggcacctcctgaagcaattcacagtgtgtgatgttcctctgtatgacatttgtgactacaacgtctccagggaccgatgccaggagctcgggtgctgcttctacgaaggcgtctgctacaagaaagcggttcccatttacatccacgtgttctctgccttgattgtgatcatcgctggggcctgcggcatcaccatcatctacagagtcattcaggagagcaggaaagaaaaggccatccctgtggatgtcgcgctgccacagaagtccagcgaaaaggcggagttggcctcatccagcagcaagttagggctgaagcctgcgagtcctgggcctccaagtgctgggccctcgatgaagagtgacgaggataaggatgatgtaacagggacaataacagaagccgaagaaactgaggactgactgagacgcatgaagaagtggagattgtcagaattatccaaatgaaatggtacagcaggtgcactgttaacagtgtgaatggaatgaccacccaaagagaaacaaacaataaaggggttattttttggnnnnnnnnnnnnnnnnnnnnnnnnnnnnnnnnnnnnnnnnnnnnnnnnnnnnnnnnnnnnnnnnnnnnnnngggggggcgccgcgcgccccaaaaggatttttccccccgggaggggcggcccaagtttttggcgccgctcacccccggttttgttgggacacagaaggggggcccccctaatgagggggccgctttataataaaaggcccaggcgacggggccgcccgtgttttaacaccgggcgctccgagctggggagaaacccgggcaccggggggggaacccgtggggagggagaccctcaagacnnnnnnnnnnnaggaacaataggggccacaccccccccacgagaaattaaagcccccgagggcacaaaattaagatctcacgggcacaagggctcaacacccagcgcaaattagccggcgcgccgaaaagtttgccccacggggatagtctgacgacattctcg

SEQ ID NO: 368239 - DNA, 947 bp, Homo Sapiens
  misc_feature (196)..(196): n is a, c, g, or t
ggattgcccggtcgggactttgaatcagagaggatcagtgagccgttgacaagacaccatggagtcccgatggtgtataagggagcaatctggtctggtgtcggtgtggccacgcagtggtccacaactaccgcagtggcacgtggctgccagtgtggatttctgcctgagttggctgcatctcccaggtgaagtngggggacctcttctcagcgttccagttctcctccatcagacgcagagagaaagtcagcttctcctcgtgagaacaccgtggtcctgaagggcaaccaggtgggcaggatggcctggctgctcacattgccctgcctggggtagcggcactcgatgggaatctctgcgcggttagtcctcacgatggacaggtttcccacggggcgggggtcatggagcaggaaggtgctgtacaccagggcatcgtcagttacctgcatgctgttgccacactcgtggagtccaacctcaaacctgaccacatcttctgtgtccatggagaccagaggctcacaggcctctgggcccaaggtgaggtcagcagccctgatgagcttcccggtgccaaaaaggtctttgctgaccatgaccatcagagtggcctcctgacactccaccagtacgggctgtacggacgtctcaggatggctggctccaccctgtgtcagggccgagtggagatcctgcacagtggcctgtggggcaccgtgtgtgacgacgactgggggctgccggatgccgctgtggtctgtcgtcagctgggctgcggggcggccatggccgccaccaccaacgccttcttcggctatggcaccggacacatcctgctggacaacgtgcactgcgaaggcggcgagccccgcctggcagcctgccagagcctgggctggggtgtgcacaactgcggcctcgtgccgaattcgccacccagc

SEQ ID NO: 368240 - DNA, 1123 bp, Homo Sapiens
  misc_feature (577)..(638): n is a, c, g, or t
cggtccggaattcccgggatttcggcgtctacttccggtgtggcccaggcggggtccgcagaaccagctatgtcggcctacggcatgcccatgtacaagagcggggacctggtgtttgccaagttaaagggctatgcccactggccggcgaggatagagcacatgacccagcccaaccgctaccaggtgtttttcttcgggacccacgagacggccttcctgagtcccaaacgcctgttcccgtacaaggagtgcaaggagaagttcggcaagcccaacaagaggcgcggcttcagcgcggggctgtgggaaatcgagaacaaccccacggtccaggcctccgactgcccattagcctcagagaagggcagcggagacgggccttggccggagcccgaggccgcagagggcgacgaggacaagccgacccacgctggtggcggcggcgacgaactggggaagccggacgacgacaagcccactgaggaggagaaggggccgctgaagaggagcgcgggggacccgccggaggacgcccccaaacgacccaaggaggcagcccccgaccaagaggagnnnnnnnnnnnnnnnnnnnnnnnnnnnnnnnnnnnnnnnnnnnnnnnnnnnnnnnnnnnnnncgtcgacgaggagagtccgttcctcgtggcggtggagaacggcagcgcccctagcgagccgggcctggtctgcgagccgcctcagccagaggaggaggagctccgggaggaagaagtcgcggacgaggagggcctcccaggagtggcatggcgaggcacccgggcggcggagaacgcgacagcctgttatttaccagcggtttccagaagaaccccctggccccgtttccggcttgggggcctgggccggtttcttgggggaaacctgaccccggggggggccaaacttggggacttggccttttccctcctcctcaagcccagtgctttcctcccaaccccgggctccctttagcccggcccggggccccacaggagtggcggtgcccccctggatctctcgcccttcgggggcccccagaactctttgggagtcttttcattctcagtgactcctacgcgttcccctccccgcgtggaacaaa

SEQ ID NO: 368241 - DNA, 875 bp, Homo Sapiens
tcgatggagttcgctgcgtgcccagcagcatggaagtcttgccgtcagggtgaagtaaactgtttcccgttgcagctgactggggagtggagttctcaattgaagccgtcgaacaggctcctcatatatgggttcatgcagaagatagaccaggtcgagcagtgtcaggcaggttgcatgcagcctcagtggctggaaccaaacagccattgtatcctaaaacctctaggagcgtctccacatatgccaggggagtgggcagattaattcggaagttcaaggacttcaaaacgatcaagctctgattccagcagttcttctttagtgtgtagatagcctagagcctggaggaaattcaagactgtaatgttgctgattattttgtttcggaaggaaagtttggctggccagctgaacacatgacacaagacggagagtaaacttgttgacaagctgctgtttcagagccctccaattctgagactctctcttattatctcttggctggattgtggcttgcctgcagatgttctctgcctgttttaccataaacccacgatctggggctccctgaagcggcccagccgccccgaagcctccctcactgcttgctcattctgctgggccaagtgaagcagggcgtcttcaatcgtctctgtggcgacaactccaaactgaaagtcaacgagggaggccgatcgtggcctcatgggtccgtccatattcacgagcctcttggggcacctggacgggttcactggatccacataccgacccccttagctcctctccagtcttctgccacatcctggattcctcgtccccttccaatgagtgtgtcgtcgcctcaagtctgaggaaaacccaattaccac

SEQ ID NO: 368242 - DNA, 1139 bp, Homo Sapiens
aatcttctttcctcacaccaggaacttgggtggcccccaggggtgaaaccaggggagatccacgccaagggttgggggggcccagaagggggttcacccggaggagccctgggatgaatctttcagccccccggaggggttcaaggtgcctttttgtgccagctgccactttgaggggccaaatgtcgggtccagggcacggggctccagaggccctgtgcctgtagctgaagagggtctggggtgcccacagggctggagtatcagagttgagtgtgtgcgggcctggctagggggcccttggggctctccagaaagaggagctgtcagtactgggtgagatcctgggcaggtggtgaagggcccatgagtgggcagctggagggaggtgccagggtcaaagccagggaagggaggcagagagacagcaggttcttggtacagcaggcggcacaccactggtggtggcatggagaagcctggaggcagccagtgtccagggacccaagggccaggaggcaccggagtccaggacaagggcgaggcttccgggggatggctgagcagcagaggcccacaggagttcttcccggggggtgtcggtgccagcaggactgccccatggggggtctgaggctggggtgctatgttctcctttccagaggggacctgtggctgagtggttccctttctgaagtggttgggagctttgggagaggcttcccctctcctcatcaggtgcttctttagctgcgcctcctgctgcctacgcaaggccacctgggcagccatgaccctgcggcgctccaggatgaggacacatttgtgacactcgcaagcctggaagaggcagaggcgcttgtggcccttgagatgggcggtgacaccatggttgcggcagcgggcgcaggttggagagcggctgatggctctcctggggatcagctctgtgctctgggggtctctggtctcatcccagggggcagagtctaaggggcagtggtagccagcaggcatgtcactgggttccatggatcacagcctccaatggagtcagattcagtcaagaagacgcccaaagacactgtgagaaagtggccagaggaaccgccaagctcgatcccgggaattccggaccc

SEQ ID NO: 368243 - DNA, 874 bp, Homo Sapiens
cacaacggaacccaggtgacaggactgcatcaactacaaccagacggcgtagacggggcacacggcccatcggcaaatacagaggtgctcagtgaccacagccaccatgacagcagggcggggcggggggcaaggaagcagcgctgggagacttggagacaccccaaaaaacgccttcctcagaaacactgctgtgcaagaaccgtgcaaatccctaaggcgtctgtgtccgatggccccggccccatgctctgaggtcgcgcaggtgtccaaggccaggaggggcaccgaggagacgaagaagaaacagcacagcagctggggaggtaggaacagcagagtctgagtcaccaaagcccggggctgccactctccagggcgccccaatcccagctccagcggctgagtccaccaagccaggacaggcccaaggaccagagggcgaggtgattcacagtggagctcggaaagacccatccatgcccagcgccttgtcaaaaaccacaggggtcttggtgacaatgcaatttgagggaggccaacatggcagagccagggcttgcaaaatcggctggaataagcatcagacctgctagcaagggtaatctgtgcctgtttacggtgcagcaccagaacaactgaaggaagcgcgggacagacacaagggcggccctcggtgccacggctgggccttggggcagagggaaatgctttgtgtactttctctgggaagcagatgcccaggcgcggctcggcgtctctggcgaccaatgctccgtgaccgctgggcgtgtgtgcgggacatgggagcaatttcacagtggtgggaagtttctctcgtaagcgaaggctctctatactacagatgggccca

SEQ ID NO: 368244 - DNA, 1134 bp, Homo Sapiens
cggggcctgacgtagctgatcccagcctaacctggcccggctggctgctggtgggaggccggcgactgagtaagatgaagatccagtttcagacatgagactcgttgggtgatcatttcattgagatcaacctgaatgaccaggtgtaaagtgcaagagtaatatgctatgactgagtaactatgtttccggtagcccctaaaccccaggattccagtcaaccatcagacagactcatgactgaaaaacagcaggaagaagcagaatgggaaagcataaatgtgctattgatgatgcatggcttaaaacctttgtctctagtcaaaagaacagatctcaaagatctcatcatttttgacaaacagtcatcacaaaggatgagacagaatttgaaattgttggtggaagaaacatcatgtcaacagaacatgatacaggagcttatagaaactaatcaacagcttagaaatgaacttcagctagagcaaagccgagcagccaatcaagaacaacgagctaatgacttggaacaaattatggaaagtgtgaaatccaaaattggtgaattggaggatgaatcactaaatagggcttgccaccaacagaataaaataaaagatcttcaaaaggagcagaaaactttgcaggtgaagtgccagcattataagaaaaaacgaacggagcaagaagaaactattgcttctttgcaaatgggaagtctgtagattaaaaaagggaggaagaagatcgcattggtcactcaaaacagagtgtttggctatctgtgcaaagagttcctcataccgtctggatagacagttgctttgtctaattgattactatggatctaaaattagaaaaattcataccccaagggcatattaaagaagatgaaaggtccgttccgaaaaagaaaaccacctccggaaattcgggatgccctccccaccttataaagggccttttaatggccattaccggaatccacctccgggggatccaaaatcctaaaattgggtgccccttttcaggggaaaaagctgaacctctccaaaaaaatttgggaaaaccgaggccttccgcggccatgtaatttaacatcttttttaaaccccacgggggagaaaaaactgg

SEQ ID NO: 368245 - DNA, 835 bp, Homo Sapiens
tcggcagtcactgaacttgggagctgaagaatactggacggggcttcggagaggaaggagtggtccaggcgcaccccatgggttgcgatgggctcttcttggtgtctgtatggttgctgcaatgctggggtgaaaacaacacggctagaagctcattctgaaatggggagcactgaaattttggaaaaggagaccccagaaaatctcagtaatggtaccagcagcaatgtggaagcagccaaaaggttggccaaacgcctttatcagctggacagattcaaaagatcagatgttgcaaaacaccttggcaagaacaacgaatttagcaaactagttgcagaagaatatctgaagttttttgattttacaggaatgacgctggatcagtcactcaggtatttctttaaagcattctctcttgtgggagaaactcaagaacgagagagagttttaatacacttctccaatagatatttttatggtaacccagataccattgcttcacaagatggagtccattgccttacctgtgcaataatgcttcttaataccgatctacatggccacaatattggaaagaagatgacctgtcaggagttcattgcaaatctgcaaggggtaaatgagggtgtcgatttctccaaggatctgctgaaagctctgtacaactcaatcaagaatgagaagcttgaatgggcagtagatgatgaagagaaacacaaagtctccctcagaaagtactgaggagaaagctaacggaacacatccaaagaccatcagtcgtattggaagtactactaagcccatttggggacacattcctcaatgaatccaa

SEQ ID NO: 368246 - DNA, 211 bp, Homo Sapiens
actttctttagatggagtccattgccttacctgtgcaataatgcttcttaataccgatctacatggccacgtaagtgtggatttgtgaaacttagatccaaaacatgtcgggcttatctctgcttttatgttcaaacacatttattttctgcctccccgtttcccattctctaaatggttcccatggcaggtgaataaaaagaaatctttg

SEQ ID NO: 368247 - DNA, 1035 bp, Homo Sapiens
ggttaaaacaattcccggtgggaggacctgatccatgggcaggtccatcctgtaccttccccaaattacgttgttctccacagcgagcacagcggccaaaggtagtcgtccagcaggtggattttccattgtcatacagcatctgtgttgggtcaggttgctcaagctcatcctctggggcggaatgaagcggcaacttgacgaaggctccagttgccctgaatggccaccctttggctgcaatggtggcgcacaggggggctgaaacaggatctgtgatataggtcttctggggaccagtgactggatacatcccaggagggttctggttccctgctccaggaggagtgtaccctggttcccgtttccaggtatttgggtgaccttgttgaccataggtagggtcagagtcatttctgcccccatagcctggccctgctgcatagtagccttcataatagcgtccctggttgggggcatacccatacccaggctccggctgaagtcctggtggtggaatgtaggcataatccatgcctccccgtgttgaaggaggtggacactgcccagagacaggaactggctgagtgttatagccctggggccctgagccataaatttgtcctgatgaaggggcagccatataatgagggctgggctgggctgacttcacctgcacattaaaggtaggccttgaagaagtggaggccgtggtgtaggaggctgggactggctgaggctggggtttgagtgttccgattggagccacagggatgggtccagcctggggtgcaggctgtggtttcaatgtagacttcttggttgctgttagagggggttggttcgggatgaccattctcttgtgtcctgtgactggggtcgaaactggaggagaggctgttgaaccagtggagcttccattttccagatacttcaaattcctcactcagccaaaaacaccattctttcacgcaaatcttcctttcacaattgcaatttcttctgcctagactgggatcccgggaattccggacc

SEQ ID NO: 368248 - DNA, 999 bp, Homo Sapiens
tggtggcacaggtggtttggtcgcagatgccttgggctggttttgaccgtggtcctggtccggtatcttcagaagttttacgtctggaagctttactttccatgctgttggactgaattttcggtggctagtgggtgacttccctacagctgatttacggctttaaaactggtgatatagctccaaggggtttaatagaaagtgttgttggaacacgtttgggactatgacttaatgattgtgcctcatctttgaactcattttgtgctctgacatcacttgccaagtcttcaaattcagaatccagctctctactttcagtatctactgtcaacccggcagcttcctcttcataacccgattggcatgagcttgacaaaaagttttcttccaactggccaaagttatcttgcagcactgcaccttgattactctggccaacaggcctttcatagtacaccaggactcggtcaccagcctgcttgataagcttcaacacttgcagtgttgatgtgattttcacacctccaatggcgataagtcgatctccccgctgaagatctgcattgcagcaggcgagtttggagccacagtttcaatgatgacgtgcccagcatacccatcagttgactggacaagacgaagtgtaagtccacactttgtaaatttccttttattaattcaaccgtcttaatagaactcctctgtttttcttcccaacactactgcttaactcaagtgtgcatgaacatttgcctctctgtcataggatccaaaatgagtaacctgctacattctaacacgtaactttaagacggccttcagtaagtgcccattgttgtatatggatatgctcttcatcttcttcaaatccttgcagggtctggtatggaaaaaacggcttaaaccacaagaactattaatgctgagaagtgaaaaatttcctagcttttctatcaagttatgcaatcaagcccagacattcagtaccccacccac

SEQ ID NO: 368249 - DNA, 973 bp, Homo Sapiens
  misc_feature (957)..(957): n is a, c, g, or t
actcttccaccttctaatgacttttagtcatctctggaataaaacccacaggctctaagaagtttctaaggcctaggatgatctgactgactcttgcctctggtgcctcagccttagacacttcctgcctctctctactccagccacactagcctcggtgcagttccacatacatcatcctccttcgtctggagcctctggatgtcctgtttctttggcttggaatcctcctacctgctcatgctacttactcacctcgtcagtagcaccacccttcaagtctcagcttaaacatcgctccttagagaagccatccttgttcccttagactagggaacaagggaatctgtggtaattctgtggtaatcttccacagaattttgtactggtaatttacagcccttatgatcctccagtcacttggtcaacatatctcttctatgcaagattgtatcctccaggtctcaggaaccatttctgctgtatctgtggtatatttggtgtggtatatatgtatttgaatgaagcctcagaatgaacaggctaacagttgccaggatcatgaccattctggcaggaaaatggacagaactgctttggacacggtagtagtaagatttcccctgattatcaaaatccaattaggtagattttgtagctgaagtaatgaagtgattacctctagaataatttgttagtaattcaattcagtttatgaggcaaagggcatatctttattttttcagtcaactttagcaaatgttcagaaatttttggaccagatgtataaaagggctaattcattttgggatacctatgaaaacattatatgaaagggattgattttatatttatcacctgggattttctggacctttacagaaacctgcccaaagtggtgtttggaagttttgagacccccctcacacaaacaattttagcaactggcctattggnttgttggggaacttgc

SEQ ID NO: 368250 - DNA, 809 bp, Homo Sapiens
  misc_feature (193)..(252): n is a, c, g, or t
ggaaagccagaaaagtttcagattgaagccaattttcccaggcgagtgctgccctggagtgccttcagaggagtggcccaatccccctacgctacaggaggccggactcagccacacagaagttcttttggttcaggacctaactgacgaatgacatttttttcttcctgtcccctcctaccccagtccctannnnnnnnnnnnnnnnnnnnnnnnnnnnnnnnnnnnnnnnnnnnnnnnnnnnnnnnnnnnttcatattattattattattataatacaatattttttttaaaagactgctgcatccttaggaaggatcagaaaccatgctgcccgtaagagtcacaacctgtgtgtgcgcgcaaggttagcaacaaacgtacccgcttggcaagcccacccttcctgtggcctctgtgcacgcaccttaccagtgaacagagactcttcaccttcgacccatccattgtcccagctgggaaggggacattcccactagttctcattcattcttgcttttatgaaaaataaaagtgaaaaacctccatcaaccagctacttgcagcatctcctgaggacttgcttctcctgcctctggggaagagagggaagagaaagcacagagcagagaagcagagatgttccttgaactgcccacaagttttcaataactttgattttctgtttggtaatgaccacaggcaatgaggctgacataggtatctatcatatattgaaatcctttatttgctaacgagccaattctttaaacgccatgagtttatgccctggggctactaagcccaac

SEQ ID NO: 368251 - DNA, 1531 bp, Homo Sapiens
gagcgaggcctgggtggcgaattcggcacgaggcgccaacttcgccaagaacgctcctaactccaggccatcctgcagcgcagagggggcgctgctgccgggcatcatccgtgaggacgcgcccctggccgtgcggagagagccggcatttgcgggtcactcgggcgcccctgagtgggcggcggcggcagcagacccctctccagggagtccaggacctgccagcgctggggattcttcccgaacaggcgcttgccctctcttttatggagcttgggcccctgccgcagcccggtagaggctgtggaggtctaccgtccggaagcctggttcccagccccgtggcccattcctggctacggggagtggaggctcccacgaggtagcggtggcctgcagcggccccctccccgcagtgaagcatgggccacaagctctcggggagcctcaagtcactggaggtgcgacagccggcgctgcggccggccaagcgggagctgcggggtgcagagcccgggcggccggcgcggctggaccagctgttggacatgccagcggcggggctggctgtgcagctgcaggcacgcgtggaaccccgaggaccgctcgctcaacgtcttcgtcaaggacgacgaccggctcaccttccaccggcacccctgtggcccagagcaccgacggcatccgcggcaatggtgggccacgcccgcggcctgcacgcctggcagatcaactggccggctcggcagcgcggcacccacgctgtagttggtgtggacacggcccgtgctcccctgcactccgtgggctacacggcgctggtaggcagtgacgccgagtcgtggggctgggacctgggccgcagccgcctctaccacgacggcaagaaccagcccggcgtggcctacccggcctttctggggcccgacgaggcctttgcgctgcccgactcgctgctcgtggtgctggacatggatgagggcacactcagcttcatcgtggatggccagtacctgggcgtggccttccgaggtctcaagggcaagaagctgtacccggtggtgagtgccgtgtggggccactgtgaagtcaccatgcgctacatcaacggccttgaccccgagcccctgccactgatggacctgtgccggagatccatccgctcggccctgggccgccagcgcctgcaggacatcagctccctgaccctgcctcagtctctcaaaaactatctgcagtaccagtgagccaagcctgatgggcagcacagacacagacacacaccgcagggcccgatcctcctgtcattcacagtcccatggcacataggggaaaggatctacccttctcctggctccccaggacactcagttctttcaaagacccaggatgtggtaccaaactttgggaaacgaaaggtctcttggccaacagtatctactgccctcgaaggcaagcctcccagggtcagacactcccttcggagccacagagagctgggagtctgacctcctggaaaatcctggcacaa

SEQ ID NO: 368252 - DNA, 1096 bp, Homo Sapiens
  misc_feature (719)..(732): n is a, c, g, or t
  misc_feature (787)..(950): n is a, c, g, or t
tgtttgagtgacagcctccatcagggtcatcctacagcctccaagcgggctttcccctggacaaatgccactgcaacatttatgtgtgaagccaaaatcaccctgcagcagagccaatactgatcaactgaaagtatccatggagtcctcattgacacctcttttctgcagcaaatactggaattcaatgtcaagagaaaatgacctctgctcaaaagggagaagagtctcaatttcagcaagtacctgtcatgaagggtatgaccttaatgattgtacataaaataaaacaaatgaagaaatggaaaacttttagaaattaaggtgtacttgaaaacgaatatctatcatatgacccctgcactccctctgtatcatctcaggaggtttcaggggcctgttgacatgaagtttcgaagtttcatgttggctttggaatggtagcaaaagcctttcctggctgagatgatgcttaaaacacacctcacttattgtacatgttggaaccaggacatgagagacatagaaaaacagaagtcatgaatgtacaacttgaatgagaggcttaacatgcatgaaaatacagatggacctgcaggaaagtgagcaaacatcgctgagtttgttttcttgttcgggagaatggggccggggctggcctggcctcccctggatatactctatagtgcaccaaaaggataaagcatctgtacatgtannnnnnnnnnnnnnatcagaagtgcttagacaagaacagaataagcaggctgtttggatgctacttgtnnnnnnnnnnnnnnnnnnnnnnnnnnnnnnnnnnnnnnnnnnnnnnnnnnnnnnnnnnnnnnnnnnnnnnnnnnnnnnnnnnnnnnnnnnnnnnnnnnnnnnnnnnnnnnnnnnnnnnnnnnnnnnnnnnnnnnnnnnnnnnnnnnnnnnnnnnnnnnnnnnnnacgagagagtttcggtaaatagaacacaattgcggtgggaacgaagaccagggacacagaggcacgtttggaatgatgcagcccgaagggaaggggacccaaggatctcgggccctcagatgccgcaacacgctgggacggttccc

SEQ ID NO: 368253 - DNA, 875 bp, Homo Sapiens
  misc_feature (855)..(855): n is a, c, g, or t
tgagtgcttcggggatggagaaccggcactagccgttccgtggaggcatgttggattcccttgtccccccagcataagcagaagaggtgctgcagatacatcacaaggcttgtagagcccagtctcactctgatccccttctctgtggagctctgcagccactaggcttttgttgtcttcgggtggtgcgtccccagatagaagtgttggggtactgcagtaactctctactggtggcctcaggagatagacaagtttttcccaatagcaaaagagatcttcccgtgtgtcagaagagggacacaactgcagataaaaagtacggccagtggcgagtttcaggcgcagctgctgtttctcatgatcgtggatggagatcttcacaaatttcaagggaagcagtctcgtgagctctagagtcttgacgggcctgcgacctctccccttggcaaaccggccccatctgacatgctgttcacagattttagttggttgggccagaaccatgacgtcaggcagtgggaggatggggctggtgcagacgatgcccactgtcaccattcggacacggttgtgtacatcaatcacctctccctttttgtttatctgaataaaattactctcgaacattggtgcatacttgaaaatgttgtactctcctctgttgtacaattgtcgttgcaggtcccccatggaggttttgaacgcactcattgaagagtagctgtgggctgtgtaataaggtaaacaagattcattgctcatggttctcttcgtttaagacagctccaccagccacaaatagagtccccgagagagagacggagagaaggtaactgcccatctcatcctacncctgcgaccggtatcagcct

SEQ ID NO: 368254 - DNA, 1200 bp, Homo Sapiens
  misc_feature (925)..(925): n is a, c, g, or t
atcaggccaaatcggccgagctcgaattcgtcgagagcggggctgctgctgtgatccaggaccaggcgcaccggctcagcctctcacttgtcagaggccggggaagagaagcaaagcgcaacggtgtggtccaagccggggcttctgcttcgcctctaggacatacacgggaccccctaacttcagtcccccaaacgcgcaccctcgaagtcttgaactccagccccgcacatccacgcgcggcacaggcgcggcaggcggcaggtcccggccgaaggcgatgcgcgcagggggtcgggcagctgggctcgggcggcgggagtagggcccggcagggaggcagggaggctgcagagtcagagtcgcgggctgcgccctgggcagaggccgccctcgctccacgcaacacctgctgctgccaccgcgccgcgatgagccgcgtggtctcgctgctgctgggcgccgcgctgctctgcggccacggagccttctgccgccgcgtggtcagcggccaaaaggtgtgttttgctgacttcaagcatccctgctacaaaatggcctacttccatgaactgtccagccgagtgagctttcaggaggcacgcctggcttgtgagagtgagggaggagtcctcctcagccttgagaatgaagcagaacagaagttaatagagagcatgttgcaaaacctgacaaaacccgggacagggatttctgatggtgatttctggatagggctttggaggaatggagatgggcaaacatctggtgcctgcccagatctctaccagtggtctgatgggaagcaattcccagtaccgaaactggtacaccgatgaaccttcctgcggaatgaaaagtgtgttgtgatgtatcaccaaccaagtgcgcatcctggaccttgggagtccctaccttttacagngggaatgatggacaggggtaacatgtagcccaattatatttggcaccttggaaccggagattaatcccgccgccccctgtacaaagagccttaacttactgatccacccgggaaacccccatcaaaaggggggctggttccgaaagccgggcaaaatggcccaacccacatcctggagggaggaatcccaaccaaacccgctgggtcttaaatgaaaacggggtgttattttggcaaccggtgagagccctcggggggcgttctaaaagagaaat

SEQ ID NO: 368255 - DNA, 845 bp, Homo Sapiens
agcggcggttgctgccggagccgttagagggaggagacaaacgaaccgaggcgggagcggccacgggtgacagcggcagcggcggggccgggctgcgctcccgaaggcgttcctggagggccctgggatggactcagagatccccagagccccagtggacggaaaatctagccccaggcacttgccttggagtctgagtgatgcgcgtcgttggagcgcgaagccggtctccctagcctccgcccgacacagcgtctccaggggttttcctccttttcgcgcctctccttccctcttccccacaccatttgagagcctcaaatggtagtcctgccgccacctctctcccttcgccagcctgccatcgtccccatgggtgcagattatgcgctcccgaagccgcctgcctgccgcgtctgcctcgggcatcagcccacgagtggggagtcggctcagcttgccacgagggaacctcgggttaggaccaatcgcccgggagagagccctcctcgcccccgcacctcctgctccaagtctcctgtcctggttatcccaagttcagggcccacctggggtcacatgggggaacgggtacttgtcttaaggctgtaaacaatagttggaagaaggagttgctagcttttgagaacttccatgatcatccaaagtctgaaacaaagtacgcggtcagcctttcaaaaatacgttgttgggaagaacacaggacacttcacaattccccagacgtttggttcagttgccttggggtttgggcctttgaattcttcactgcttttgtgaaaggtacaggctttaattttaacccccaaggaattatgacttca

SEQ ID NO: 368256 - DNA, 1064 bp, Homo Sapiens
gctgagcccaccaccgggggccgcggttcagctccgccgggcgccccaggctgccgagtgcgctgggtcctacgcgaccgctgacccgcagcgccgccggctcccgtcgccgtagccaccgccagctcggtgcagcccaggcgtttccgggttcccgcggtcccgtcccccaaatgctccggcttccgcctcggctctggcaaatgccgttcccggctcggctctggcagccccagctcggcacttggcagctctgtccctaaggcgacgcacctgggctgctctgctggcagcccctggttcctgcttcaccgtcgcgtggaggcctggggcactgctttctgctacacctctcctaggagcgcgaaacagatggagtaacactcgtcgagggcctctgcgggactgtctgtttgcagagggtgccaaggtgtccactgcgtaaggaagggcaaagtcctttggggcaaagaaccctgagaggaacggggagatggattttgaaagcaaacgaaccctctcctaaaagtgactgtcactgacctgaaaacaaccagattagctatggcaaaggctgccaaccaaccagtggtctgcaagaaggcttgttcttccacttcacccaccctgactgagatcttgagactgaaggaaacccaaagccgtaccaccaatgggcctagtgtcatcaaccgggagaggaaaaagaaaactgggcccagaggattgcagagttatgagggaccaaacccttcctggctgcatggatcacagcattaccttttaaaagtgttccagtagctgtgttggaaaccctctaaccaccgcagcccattcaggtgatgaacaggctgaaatcagtacttcaggttcagctggattatcaaataagcgaataggattatctctttttgttaactcagggctgctataaattaagcctatgtctctttatattggcaatggattaaaccatgtccaagagagacatacttagaaaaaaagtgatattgaaagaaaaataagtaactgtattagagtagaataactgggttttaaaattc

SEQ ID NO: 368257 - DNA, 847 bp, Homo Sapiens
tggcacaacagagagggccaccatgggggaccggaggccacaggaccggccaaggtcccaaggcatggactccaagccctggtactgtgacaaaccgccttccaagtacttcgcgaagcgcaagcacaggcgcctgaggttcccgcctgtggacacccagaactgggtatttgtgacggagggcatggacgacttccgctacgcctgtcagtctcctgaagatacgcttgtttgtcgccgtgacgagtttttactccccaaaatatctctcagaggtccccaagctgaccgcaaaagcaggaagaaaaagctgctcaagaaagcggccctattttccgagctctcgccagtacagccagcacggaaggcgttcgtagaggaagtggaagcccagctgatgaccaagcatcccttggccatgtaccccaatctgggaaaagatatgcctccagatctcctactacaggtgctgaaacagctggatcccgagaggaagctggaggacgcttgggctcgttgtgaggcccgggagaagacaaccgaggtacccaccgagtctggtaaatatccctgtggggaatcctgcccgcggcctcccgagactccggtgtcccgtctccgtcctcagcttcccaagactccggtgtccagtcgccgcccagagcctcccaagactcgggtgtccagtctccgcccagagcctcccaagaactcgggttgttccagtctccacccggaacctccagagactcgcgcatctcatctccgcgtggatcctcccgagactgggagtgtcccatcttctggcccagagcctccaagactctggtgtcaggtgtccacccag

SEQ ID NO: 368258 - DNA, 911 bp, Homo Sapiens
agcggagctccacgctcgcgccagccatgccggagcagttcagcgtcgccgagttcctggccgtcaccgcggaggacctcagctccccggctggtggccgccgccttcgccgccaagatgccccggtaccgaggggcggcgctggcgcgggaggagatcttggaaggagaccaagccatcctgcagagaataaagaaggctgtgcgggcaatccatagctccggccttggccatgtggagaatgaagagcagtaccgagaggccgtggaatccttaggcaacagccacctgtcccagaacagccatgagctgtccacaggcttcctaaacttggccgtgttcacccgcgaggttgctgcgctcttcaagaacctgattcagaacttgaacaacattgtctctttccccctggacagtctgatgaaggggcagctgagggacggtcgacaggattccaaaaaacagctggagaaggcatggaaggactatgaagccaaaatggccaagctggagaaggagcgcgatcgggccagggtgacaggagggatccctggggaggtggcccaggacatgcagagagagcggcgcatcttccagctgcacatgtgtgagtatctgctcaaagccgggggagagccagatgaacgcaaggtcctgacttccttcagagcctcatcaagttcttccacgcccagcacaactttttccaagatggctggaagggctgcccagagccttgttccccttcatcgagaagctggcggactcaagtacatgcactccaatcaggcccaggaggacgaagctacaagaagctgaacccagctccggggaatccctccaagggacactgcagcttgagagcagagagggtcaggccctgaaacaatccccaaaaggaatgccctccc

SEQ ID NO: 368259 - DNA, 1149 bp, Homo Sapiens
  misc_feature (97)..(166): n is a, c, g, or t
ttctcgggatgccgggccgcggagcggggccgggagaggccagccccggggcgcctctcggggcgcggaccaggcggacagcggcagcggcggcggnnnnnnnnnnnnnnnnnnnnnnnnnnnnnnnnnnnnnnnnnnnnnnnnnnnnnnnnnnnnnnnnnnnnnntctctcccaccacacctcggccggcgcagcgccccgagtagattacagcgcggcctttgtcgggcgggcctggctcccggccaggcgcccaaacaataaacaatcccccgggtgcgggcagggggtttcgccggccgcagccaggctctaggtgtgcgctggcgaatatctctatcaaccgcgaggagggaccgggacgggggcgcgggcgccgcggcgggcgctcttaccttccacccacagctcctccacgttggtctcgaggttcgctgcttttgaatcccaccgcgaaggccccaaatatgaggaggcccacaaccaagaacttgccgcagtttttttgaatgtaacaacccagtttaaataagagtctctgaaacttcgctctcagccacagcggcgctttccggccagtagccttcccctggggacccatcagaaaggtggagtgccccccggggatcgcggtccgcggggggcacatctcgttgccctccaccgacccgctgaggcccccaccagcccttggcagggcccgctgggtatacgccctgcgcgacttggcccctcgagaacggaacgcctttgggggaacctccagcgttattggggggccccctcgccctaaagttctcccggcgagcggtattcgggagatttcggcccaatggtgtaaattcaacgcccctctcctatcccagcatgattccctccaaaaatacccgcggccccgggcgcctcttatgaaaggcccttgtccacacctcggtctgggcctcgccacaccacagattgtttatccaacgcgccttattgtggcgtcccaaaacctctgccaccacaatatgctctcccctagtctccaaagcgtcgtattgcacacgggctatgaacctctcctggaacaccatccccccgcttgtatccttgacattggcaatctgcaccctgttcgcctcttaccggactattacctcctccct

SEQ ID NO: 368260 - DNA, 974 bp, Homo Sapiens
gttaccgcttcccggcagccgccattgtcgcgctcggagcccctcagctcaggcggccgaggcggaggcagcggcggcgggatggcggacgccaacaaggccgaggtgcccggggccactggtggcgacagcccgcacctgcagcccgcagagccgccgggcgagccgcggcgagagccgcaccccgcggaggcggagaagcagcagccgcagcacagcagcagctccaatggcgttaaaatggagaatgatgaatcagcaaaagaagagaaatctgacttaaaggaaaaatctacaggaagtaagaaggccaatagatttcatccttattcaaaagacaagaattcgggcactggacgaaaagaagggtccaaatcgtaacagagttttcattagcaacatcccatatgacatgaaatggcaagctattaaagatctaatgagagagaaagttggtgaggttacatacgtggagctctttaaggatgcggaaggaacaatcaagggggttgtggtgtggttgaaattcaaagatgaagaatttgtaaagaaagccctagaaactatgaacaaatatgatcttagtggaagaccctttaatattaaacgaggatcctgatggacgaaaatgctcgtagggcattgcagcgaacaggaggatcatttccaggaggacacgtccctgatatgggatcacggttgatgaatttaccacctttccatactcaataatccaaacaatccctcctgaagtcatcaagtattttgccaggccggtaagacttgggtttcaccaattttttgttggccaatcctggactcccaaagttgggttgggaaagaaaccctaaagggaagttggttccgccataacctgggaaactggggaaaaccggggccaaaatttttttaaggaaaacaccaagggattgggccaaggagaccccaaaaggaaatggggggcccactggttc

SEQ ID NO: 368261 - DNA, 837 bp, Homo Sapiens
ggcagctggcggagcggcccagcccgtgtgcacgtggcgccggcgctgcctttcggttgccaaaattcaggctgtagacggcgagataacaagtttaaaaccccggctaagccagaagagccaaagagggacctcgccaaggccactcctcgctctctaggccgagaatactgcgcaaattctgggaggtttgggcctggcggctctccgttcccgacccccggcgtggattcgttcccgcgctttctggcatgaggggtcagagggcgcgccgacgctcaggcgaacggagcggaggcggcagcggccatgggcgaagcgggcgccgctgaggaggcctgccggcacatgggaactaaagaggaatttgttaaagtcagaaagaaggatctggaacggctgacaactgaagtgatgcaaatacgggacttcttacccagaatactaaatggggaggtgctggagagcttccagaaattaaagattgtagaaaaaaacctggaaaggaaagagcaagaattagagcagctgaaaatggactgtgagcactttaaagcccgcctggaaaccgtgcaggccgacaacataagagagaacgaaggagaaactggctcttcgacagcagctgaatgaagcgaagcagcaactcctgcagcaggcagagtatcgtacagaaatgggagcagcagcgtgtaccctcttgtggggtgtctccagcagtgaggaagtcgtcaaggccatccgccgaggagataaacgcccgaagcacaccagcatcactggtcaaacaatggagaatccgccgacccgccaaccgcgatgcccaggagctggatc

SEQ ID NO: 368262 - DNA, 940 bp, Homo Sapiens
  misc_feature (842)..(842): n is a, c, g, or t
tccggaattccttggatccaaaggcaggcacagactgcacccctgctcagtgctccgggcgcttcaggctggcttgggtcctgctgctccaaccccaagggccctggagcgctccctgatacctccatcactcaccatggccagccagttctgcctccctgaatccccatgtctctcgcccctgaaacccttgaagccacatttcggagacatccaagagggcatctacgtggcgatccagcgcagtgacaagcggatccacctcgctgtggtcacggagatcaacagagaaaactattgggtcacggtagagtgggtggagaaagcagtcaaaaaaggcaagaagattgacctggagaccatactcctgctgaatccagctctggactctgctgaacaccccatgccgcccccgcccttatcccccttggctctggcgccctcttcggccatcagggaccagcgtaccgccacgaaatgggttgcgatgatcccccagaaaaaccaaacagcctcaggggacagcctggatgtgagggtccccagcaaaccttgtctgatgaagcagaaaaagtctccctgcctctgggaaatccagaaactgcaggagcagcgggaaaagcgcaggcggctgcagcaggagatccgagctagacgcgccctcgatgtcaataccagaaaaccccaactacgaaaatcatgcacatgatcgaagagtatcgcaggcacctggacagcagcaagatctcagtccctggagcccccgcaagaacatcgcatctgcgtctgcgtgaggaagcgggcctctcaaccagcgagagaccaaccttgaaagacctggnatatcatcaccggtcccctccggaaatgtgggtttatggtggcatgaagtcccaagcaaaagggtgggaccttcactcgctaccctgccagaaaccaa

SEQ ID NO: 368263 - DNA, 840 bp, Homo Sapiens
acctggatggtcctttatcatgatgcctgtaagcaagtccatgagactccagataaagcttgaatgtctttcagttcagagaaagagaactctcatatccacagggaggctgggcctgcctgggccacgccagaagtccaccttctggggtttcaggccctccagatccccgagaagtgaaagctgcttctcatctttggccaggactcgaagaacctggtcccctgtgaaattcatttggcccaaagctgctgccaggataaagctgaagaccaggagtgtccgcctgtccacgggggatggcccagggcgcgtcccgcctccaggggtgccctgcatgcttcttcctcctggtgagcttcaggggctttccttgggcaccatggcccaggcctcaggacagcacagcacctagaggctggaaagcccagcctcacagggtttgaaggggtatagatgagacaacttgagtgaattggcttggtaaagcctgccctactccattatttcgtagttcagctgttcagacaagccagactcttctagtatcctggcttcagggactctcaaacagtaacattatcaaagggtttaaggacatagaaaagaaagcagttatgctttccacccaagtaacattcagcttcagtagcaatggagataaaagggtgtactgctaaaccatagctcaggaatttaaaaggaaaaaaacagagatagtgctagtcaccaaaagtacccatggggcgtcttcttgttcaaaaacatcattttaagccaccaatgatgagacacctatccctgtacttggcttaagggtgggaaaagagagagagtgag

SEQ ID NO: 368264 - DNA, 1267 bp, Homo Sapiens
  misc_feature (86)..(124): n is a, c, g, or t
  misc_feature (1055)..(1055): n is a, c, g, or t
  misc_feature (1060)..(1060): n is a, c, g, or t
ttgtgagttatagcaaccgttgccttgtgaatcaagcgccatagtcaccgtagtcctggcgactgttacccatcaacaacaactannnnnnnnnnnnnnnnnnnnnnnnnnnnnnnnnnnnnnnccaccacaccatctccatcacccaccaacaacaccacaataatccacagccaagagaccatcatgcagacatcagagactgggtcggacacaggctcgacagtgaccttacaaacatctgtggctagtcaagcagcagtgcctacgcaggtggtacagcaagtaccagtacaacaacaggtacagcaggtacagactgtgcagcaggtacaacatgtctatcccgctcaggtgcagtatgtggaaggaagcgatactgtctataccaatggagcaatccgaacaacaacgtatccttacacagagacacagatgtacagccaaaatactggagggaattactttgatactcagagggagttccgcccaggtgactaccgtggtctcatcccacagtatggtgggcactggtgggattcagatgggcgtcacaggaggacaactcatcagcagctctggaggaacctatctgatcggcaactcaatggagaattctggtcactcagtgacacacacaactcgggcctccccagcgacaattgaaatggcgattgagacgctgcaaaagtctgacggtctgtccactcacagaagctctcttctcaacagccatctccagtggctgttggacaattatgagacagcagaaggagtgagccttcccagaagcactctgtacaaccactaccttcgacactgtcaggaacacaaactggacccagtcaatgctgcctcttttggaaaattaataagatcaatttttatggggctacgaaccaggagattgggcactagaggaaactccaaataccactactatgggattcgtgtcaagccagattcccctcttaatcgtctgcaagaagacatgcagtatatggctatgagacaacaacccatgcaacagaaaacaaaggtacaagcctatgcanaaaantggatggggttgcaaatggtttccacagaaaggggtcaacagacagccacatctgtttgagcaactgtaatttgccaaagcccaccatcatcaacaggtttttagatgcatctcgagcactttcagaagtttggaaaaattgaaaatcttcttttctgccaaaggggactaccctttgaaggatttcaagtcccttgcgaaatcttt

SEQ ID NO: 368265 - DNA, 1165 bp, Homo Sapiens
ggaagggggaggaagtcccgtaacggagacgctggtcaggacgttcccacctcctctgacactgccgagtccgatcggagaggggtcaccgcctccttcagcgaggaggaggggggcggagcccgactcaggatcatggattttcctggtcactttgaacaaatcttccagcagctgaactaccagagacttcatggccagctctgtgattgtgtcattgtagtggggaatagacactttaaagcccaccgctccgtgctggcagcatgcagcacgcatttccgagccctgttctcagtggcagaaggagatcagaccatgaacatgatccagctggatagcgaggtggtgacagcagaggcctttgctgcactgattgacatgatgtatacctccaccctcatgctgggggagagcaatgtaatggatgtcttattggcagcctctcacctgcatttgaactctgttgttaaggcatgtaaacattacttaacgacaaggacgctgcccatgtctccccccagtgagcgcgttcaggagcagagcgcccgcatgcagcgctcctttatgctacagcagctgggactaagcatcgtgagctcagccctcaattccagccagaatggcgaggagcagccagcccccatgagctcttccatgcgcagtaacctggatcagcgcacgcccttccccatgagacgccttcataagcgcaagcagtctgcagaggagcgggccaggcagcgcctccgaccctccatagatgagtctgccatttcagatgttacaccggagaatgggccttcagggcgttcattctcgggaggagttcttttcaccagattctctgaaaattgtggataatcctaaagctgacggaatgactgataaccaggaagatagtgcgatcatgtttgatcagtcttttggcactcaagaagatgcccaggtgcccagccagtctgataacagtgctggcaacatggcacagttgtccatggcctctcgtgcaactcaggttgagactagttttgatcaggaagctgcacctgagaaaagtagttttcagtgtgaaaaccttgaggttggccttggtgagaaggagcacatgagagtggtggttaaatccctcgtgccgaattcgccacccaggcctcgctacttt

SEQ ID NO: 368266 - DNA, 775 bp, Homo Sapiens
tccacacctgatggtgtgactcggccgacgcgagcgccgcgcttcgcttcagctgctagctggcccaagggaggcgaccgcggagggtggcgaggggcggccaggacccgcagccccggggccgggccggtccggaccgccagggagggcaggtcagtgggcagatcgcgtccgcgggattcaatctctgcccgctctgataacagtccttttccctggcgctcacttcgtgcctggcacccggctgggcgcctcaagaccgttgtctcttcgatcgcttctttggacttggcgaccatttcagagatgtcttccagaagtaccaaagatttaattaaaagtaagtggggatcgaagcctagtaactccaaatccgaaactacattagaaaaattaaagggagaaattgcacacttaaagacatcagtggatgaaatcacaagtgggaaaggaaagctgactgataaagagagacacagacttttggagaaaattcgagtccttgaggctgagaaggagaagaatgcttatcaactcacagagaaggacaaagaaatacagcgactgagagaccaactgaaggccagatatagtactaccgcattgcttgaacagctggaagagacaacgagagaaggagaaaggagggagcaggtgttgaaagccttatctgaagagaaagacgtattgaaacaacagtgtctgctgcaacctcacgaattgctgaacttgaaagcaaaccaatacactccgttttatcacagactgtggctca

SEQ ID NO: 368267 - DNA, 777 bp, Homo Sapiens
  misc_feature (688)..(688): n is a, c, g, or t
cgccatcagctgagaatttgagccctgttccagagcacccctgaagaatacgggttttctgttgattatttggtcattcttcttgacttggtcctttctacttcatgtctatgaacccatcctcgaagttcatgatttaacctgagagactctgttgtgttaattaggggctgacaaggaggtggaggaatgtaaagcaatggttcttcagttagcaccatcagggctttgtcatttgaaacagaatgatcatatctgtagctgtttttctggataataccatctgatgtgtcctgtgcctctttagcagaaaatcctagaaggtgcctcctttgatttgcagggctcacactagggttcattctcctggaatcctgttccaacatgcaggtaagaaccatactgcttcttatccttaaaagaaactgcttcttatcctcaaagctgctgctgctctgtgacttggagagccacacacaaaagctgaaattatgttaagatgaaaagagcagggagatcttcaggttttaatgtgaaatagtggaatgagcacaaatttggagacaggagatctgggttcaagatgttactctgagactgctcacttgagtatgtctgggatacttggtcaacttctctaagcctccaattcctcacatgtaaaacatgaaaaataacaatatttcancaggttttcctgagattcaaatgagacaacagatggaacatggtttataaagcccaaagatgacacagagcaggacacttgtcttcctg

SEQ ID NO: 368268 - DNA, 1025 bp, Homo Sapiens
  misc_feature (191)..(191): n is a, c, g, or t
ccatcttcttagacagaagctcactccagagagagaagcttgagacaagccttggaaccttctatgctccaacaagaccacttctggattccactatatggaatatagagatcaaatcagcaaatatgcaaggagattcttccatcacttgctcagaaactcctgttaaagtagtagtatcatttgacaanatggacaaagaatataatagagaagtcaagcatgacttcaagtgttttgacctgagcaattggaaaaacaaaattgttactgacaagattgataagactccagaaagaacaggtaccagaggtttgaaaaggcatttctcctagctgttgacgttggtgctcgtgacctctttatggatattcattaccttgcactagataaaggtgaattggcactagctgaagtggcaagaaaaagagctagtgacattgatgcagaatcaataacctctggggttgcagtttgttgaaatggaagagcactggctttgtgccagacatttcagaactcctgggacccttggacagaggggatatgctaaatgaagcatttattggcctgtctttagcacctcaaggagaagactcatttccagataacctccctccctcttgcccaacccacagacatattttacaacaaagaatactgaatggctcttctaacagacaaataattgacagaaggaatgaacttgaaaaagacatctgttctggatttttgatgactaatacctgtaatgcagaagacggagaactgagagaagacggcagagaacaggaaatcagagatggtggttctctcaaaatgattcactttggtctggtgtaaacattaagaaaaaaagaaaactgccttcttcatatctaaacttttcatggcctgatacagacttaaaatcccccgtgtggatttttaacaagagacagtatgaatcatataaattagttaagagttttgagttgagtgtttgttttcaaaataaagttttattatttcaaaagcaaaaaaaa

SEQ ID NO: 368269 - DNA, 913 bp, Homo Sapiens
ccagcagtgagctgtgagttctgtccttgctggctttcccaagtggaaggctaccctcatctttcactaatggcagactaggacaagcattacccaggcctgcaagcttgttaaggactaggaacccaagcaagaactcaccatgccaatcaaacctgttgggtggatatgtgggcaggtgttgaagaacttttctggaagaatcgaggggatccagaaagcaatcatggaccttgtagatgagtttaaagatgaatttcccaccatcctaagattatcacagtctaatcagaaaagagaacctgcgcagaaaacatccaaaatcaggatggctattgctttagctaagattaatcgagcaacattaattcgtggattaaacagcatatccagatcctccaaatcagtggccaaacttctgcatcctcagcttgcatgcagacttttagagctaagggacatatctggtcgtctgctgagggaagttaatgcgccgaggcaacccctatataacattcaggtcagaacagggttcttgtgtttgaaatcatctcctttccagcaaagaactgctttaactaggcataatatatgcttcatatgcagcactaatttatttggcaggtctgtgttaatgcttgtgcctgaagaaggtaaagaacatcttccaggaagaagaatccataaggcaaaacagagaggagaagtgaaaattgtagaaaagccgttttctgagcctgtgcttttcgggagccttatgtttggctgacaaggtgaattcaaagcaaaagcttataggtcaattgccggaagaaagcagacatttccgcattacccaaagcttcttgctattaagcagaaggtaaaagcatcaagttacattacagggttgaacaatcaggtgtaatgaatg

SEQ ID NO: 368270 - DNA, 1137 bp, Homo Sapiens
gggtccggaattcccgggatgcgtggtttccagctggaggctgggagcgttcgtggcttcctcttttcttgctgacccttcggagctctgggaagtggctgcaccttggcggctccccagagcgcgcggtgctaatcgtgggtcgtcagcctgggtggctgggcccggcttagggcagggtttggcatttccaatggtagggggctcggaccgtccctccgcgggaccctcccgttgggacaaggccgatcgcctgggcggttggagccgctatcctggcgcgagacggtggacaagtcctatattcaagagaagataactttgaacagtttcgaaggatctaaaacgtatgtgtctgcagacatcaatgaggatgaagaattagtagaagagattaatagatcaaaaacgtttgctggctttgcaggtggtgggcctgcctgggcatcggcgcgttggaggagacgccctggggggccttagctgccctgaagcggtagacaggtggcaacgtgggggctcaggagttgacaaacacaagaaatcagcgccgaattgcaggtttatccgcagcttttattttgaagacagtgccacgaaacctgcaaatcctggtgtcccaaatagtcaataccaagttgaaaaccatctgggagaggaaaagcgttgtgctttagacaggccgtctgagactcgtgcagaccggcttttgagagctggacaggtggtggatagatcagactccatacacccgaggagccccgccatgcatagtgaagaagctagattacagtcgtttcacaactgggccagcctctgcccacttgaccccgagagagctggccagtgctgggctgtactacacaggcactgatgaccaagtgcagtgcttctgttgtggcggaaaactgaaaactggggaacctggtgatcgtgcctggtcagaacacaggagacattttcctaattgccttctttattttgggccacaacgttaatattcgaggtgaattctgatggtgcgaatttctgataaggaatttctcaaattcacaagttcctccaggaaatccatcccctgaacggttttatgaagccgggctcattaacttttggggaacgggggtgtcaccccct

SEQ ID NO: 368271 - DNA, 1446 bp, Homo Sapiens
  misc_feature (688)..(725): n is a, c, g, or t
  misc_feature (1257)..(1293): n is a, c, g, or t
ggtccggaattctcgggatagttcctagagctgctgcttattaaaatgtcaacatcttcatcttctagctgggacaacctcttagagtctctctctctcagcacagtatggaattggatacaagcaagttttttgggagagactagtgcacctcagcaaacaagttgggactattagataatcttgctccagctgtgcaaatcatcttgaggatttctttcttgattttattgggaataggaatatatgccttatggaaacgaagtattcagtcaattcagaaaacattgttgtttgtaatcacactctacaaactttacaagaagggctcacatatttttgaggctttgctagccaacccagaaggaagtggtctccgaattcaagacaataataatcttttcctgtccttgggtctgcaagagaaaattttgaaaaaacttaagacagtggaaaacaaaatgaagaacctagaagggataatcgttgctcaaaaacctgccacgaagagggattgctcctctgagccctactgcagctgctctgactgccagagtcccttgtccacatcagggtttacttcccccatttgaaatgtgatggactccaatcttttccaggaaagcactgtttccctcatgtgtgcagtggtgtatcaataaagatagagaacgctattgaaattacnnnnnnnnnnnnnnnnnnnnnnnnnnnnnnnnnnnnnngggggggcggcgcgcccaaagattatccccccaaggggggccccaagtttatcgagtgctaaccccacgatttgctcgggtacacaagggggccccaaaagaggaggagccgaatataaagacgaagaacgcggggcagcaaggatataaaacaaacgctcggaagcgggaaaaaaagtcggcaaccgggggcaccattgggggcaaggggagaaccacataaaccacgagaggggggggaaccaaatgtggggcacaaacaacgctacccccacaagaagatcttaaacagcccccgaggggacaacataaaacacaccctcacaagcgataaacaggggtgtgcacacacaacaacgcgcgccaatagccgcacgcgcctaagcaaaaacagttggagcaccacagcaacaaagcaacaatctgaaggcagaaacatcttatccaccccgcggggaagccagcaggacaaaaacaatccccacacagagcagcccagaaagcgacaaacacaagccacctcacccaaacnnnnnnnnnnnnnnnnnnnnnnnnnnnnnnnnnnnnngacaataacgatgccggacaggtgaaaaaaaggaaacagaaaacaacgagagagagagctagacagaggaacaaaggcggaaaagaagaagagaacggaaaaccaaaacaacaaacaggacagccaaagagacagaaacaacagagcgcgaag

SEQ ID NO: 368272 - DNA, 1039 bp, Homo Sapiens
agcggagctggccgggcactttcaaaatggcggagtgtggagcgagcggcagcgggagcagcggggacagtctggacaagagcatcacgctgccccccgacgagatcttccgcaacctggagaacgccaagcgcttcgccatcgacataggcgggtcgttaaccaagctggcctactattcaacggtacagcacaaagtcgccaaggtgcggtctttcgaccactccggaaaggacacagaacgtgaacatgagccgccctatgagatttcagttcaagaagagatcactgctcgactgcacttcattaagtttgagaatacctacatcgaagcctgcctggacttcatcaaagaccatctcgtcaacacagagaccaaggtcatccaggcgaccgggggcggggcctacaagttcaaggacctcatcgaagagaagctgcggctgaaagtcgacaaggaggacgtgatgacgtgcctgattaaggggtgcaacttcgtgctcaagaacatcccccatgaggccttcgtgtaccagaaggattccgaccctgagttccggttccagaccaaccacccccacattttcccctatcttcttgtcaatatcggctctggagtctccatcgtgaaggtggagacggaggacaggttcgagtgggtcggcggcagctccattggaggcggcaccttctgggggcttggcgctctgctcaccaaaacgaagaagtttgacgagctcctgcacctggcctcgaggggccagcacagcaatgtggacatgctggtgcgggacgtctacggcggcgcccaccagactctcgggctgagcgggaacctcatcgccagcaagcttcgggaagtcgggccacgcccgaccaagagtttctccaaaagaagacatggcgaaaaagccctgcctgcaccatgatcagccaacgaaaattgggggaagcttgggccttgccttccaccgcacgggactggcccaagccctgggaaccgccggggttaatttttgggaaagggttttcttttaaa

SEQ ID NO: 368273 - DNA, 1739 bp, Homo Sapiens
  misc_feature (956)..(1017): n is a, c, g, or t
  misc_feature (1101)..(1122): n is a, c, g, or t
  misc_feature (1144)..(1152): n is a, c, g, or t
  misc_feature (1499)..(1499): n is a, c, g, or t
  misc_feature (1501)..(1501): n is a, c, g, or t
  misc_feature (1623)..(1623): n is a, c, g, or t
gggccagcacagcaatgtggacatgctggtgcgggacgtctacggcggcgcccaccagactctcgggctgagcgggaacctcatcgccagcagcttcgggaagtcggccaccgccgaccaagagttctccaaagaagacatggcgaagagcctgctgcacatgatcagcaacgacattgggcagctggcctgcctccacgcacggctgcacagcctggaccgcgtgtactttggaggcttctttatccggggccaccccgtgaccatgcgcaccatcacctatagcatcaacttcttctcaagggggaagtgcaggcgctgtttctgaggcacgaaggctacctgggagccatcggagcgttcctgaaaggagctgagcaggacaatcctaaccagtacagctggggagagaactatgcaggcagctccgggctgatgagtgcatcacccgagctcggcccggcgcagcgggcgcggagtggcacttttgacttgctggaaatggaccggctggagaggccactggttgacctgccgctcctcctggacccgccctcctacgtgcccgacacggtggacctcaccgatgacgctctggcccgaaaatactggctcacctgctttgaggaggccctggacggggtagtgaagcgcgcagtggcgagccagccagactctgtggatgcagccgagagggcggagaagttccggcagaagtactggaacaagcttcagaccctgaggcagcagcccttcgcctatgggaccctgaccgtgcgcagcctgctggacaccagggagcactgtctgaacgagttcaacttcccggatccctactcccaagcgacgcagcggccagaattggcgtggccgctcgacggtgcttccccgggagccgcgcgcacccccgaaagccgctgcaaattggccagccaacggtctctgcagacacacgnnnnnnnnnnnnnnnnnnnnnnnnnnnnnnnnnnnnnnnnnnnnnnnnnnnnnnnnnnnnnngacccgccgcatatcgcgcagcgccatcaatgacaccccgaccaagtcgcccgaccccccatggggtgcctgtgagcgcttaannnnnnnnnnnnnnnnnnnnnnttcgccctgtatgctcaatgtnnnnnnnnngtcagcgaccttcctctccctacaccaaaccccacaaaaacaatacattccccatggccaccctcctcctactcctctcacccattatcggccaccgcctcccgcggacacccgcgacccactacctccgcgtcgcgtcccatccccctcctatctttcatgcctcttatattcccgctatccaccccccgctcccgtgacacagcttaattgaccgcatggggtgtgcgcggcaggcgagcgtgacaacggcccccgccctccccaatatcaccccctgcctattcacccgccgccacatcctgcttatacgccgaataaacccgccccgcgccgaagcaggattncncttctctcgcgccctatacaccctcatcccccgatccgcccgtctctcgccagatcaatctatatcgccgccccgctaatacccacaagtccgcaccaaccacacacgccggcgcaactatnttactcgaccgcccatgagtgattatagcccgcggctcgctcgccccaatttgtcaacacttcgccccattctcgccccgcccccaaaatccccgggtatccccgataaatagaag

SEQ ID NO: 368274 - DNA, 1126 bp, Homo Sapiens
  misc_feature (838)..(854): n is a, c, g, or t
cggaatttccgggattgcactgtgactgtgcaggtcccaaacagtatggacatgaatgtcctcaagctgcatgttagcagggcttctaattccatctgcaagtgatagtgtgtggagcttagttgcacagagcgcatgttactggaggagatatgggtctgtgtcatcctgcatgggaatgatcctaaaaacaaagtgatcagtgactgctcaggactgtggaaaggtcacttggagcagtgggaaaaggtctggcagaggaataagaagatacaggtcttagaacaagccctgggacttcaaccaagtcatttaacatctggggccttcgtttatttatcctcccagcagataaagcaatacctgccctgtcttcctaaccttggaggggtcaaaaaagtgatgggtgtgaaagcattttgtaaactgtagtgcaagcatacggcaggggagtgaaccatactttcactagcgacttgaatgaggtgataaagaaaaggctcagaacttcagaaaatgcaagaggggcttgaccctggattggcagaggaaagcaatggtgggatcgataccttggagagccaaggaccaaggggttaagggtccatgaggacaggcctggatcatcaggaagctgagtgtggtaagactgtggcttcttcagggattgggtggagtacagtcctgccaagaacacagtaactcagggcttggagacatcacaaaggcaggggctcctagagctgagataatctggagaaaaagatacccatctactgcattctgagattgggttcgacctgtaggtcatcttggatagacgttttccagctcttcnnnnnnnnnnnnnnnnngggacagagaagaacctaatttgacccttaaaggtccacagagccagagtttgcaaatctcctgggtcaggccttattattttattggaaaggaaattgaattcccccgaaaagaaaatgtggatttatgtgaaggtccccccaccaagatttagttgtccaacctgcacactgggaaactcagaaattttctgggtttcccagtttctaataatcttaaacctccccaacactgggttatttgtggcccggggaaagaaaccccccggtta

SEQ ID NO: 368275 - DNA, 770 bp, Homo Sapiens
tcaccaccagcctagctcggacggcaagcggcgggagattttcaaaatgggagcccagaggcaccgcccaggcctcggaaggtgtcagggagaactttccgtggtttcagcgtcgtcgcctggagcggcggtttagagagccgagcctgatgggcgccaaggccggctggctgcttggagcgctgcctcgaagggactgcgtgaaggaagctaatccggagaacccaggccagagcctggaaatatggcgacctgcatcggggagaagatcgaggattttaaagttggaaatctgcttggtaaaggatcatttgctggtgtctacagagctgagtccattcacactggtttggaagttgcaatcaaaatgatagataagaaagccatgtacaaagcaggaatggtacagagagtccaaaatgaggtgaaaatacattgccaattgaaacatccttctatcttggagctttataactattttgaagatagcaattatgtgtatctggtattagaaatgtgccataatggagaaatgaacaggtatctaaagaatagagtgaaacccttctcagaaaatgaagctcgacacttcatgcaccagatcatcacagggatgttgtatcttcattctcatggtatactacaccgggacctcacactttctaacctcctactgactcgtaatatgaacatcaagattgctgattttgggctggcaactcaactgaaaatgccacatgaaaagcactatacattatgtggaactccta

SEQ ID NO: 368276 - DNA, 812 bp, Homo Sapiens
gccccaaggaaagctcagagccaacgggttctccagcccctgtgattcagcacagctcagcaacagcccctagcaatggcctcagtgttcgctctgcagatgaagctgtggccacctcggtcctcactcagatggccagccaaagaacagaactgagcatgccgatacaatcgcatgtaatcatgaccccacagtcccagtctgcgggcagatgatgcctcctctggtggagaggtcctcagccagagctcgcccgcccaagagccaagagagatgtcatcttatcccctcccatctgccttggacatggcaatatgggtggggggaattgtgtgttgtgagtaatggacagatatggggctttttagccatgtggtcatgtacgtttgacacctgtgctgggggcctcccagccccggagcctcatagatcatcccccagggtggggtttctgatgcatccacagccaaaggcctttccagatggtccgaacaatcacccctgccccatgcacgtgtatctgtctcttttaacactaacccttggcacttctaggtttggggtttctcagttccctctcttcccactaagccgtggctgttacctttttgttccttaccagcatgccacttcctgccagatagagggaggctagatttgatgacttattacccgctgaccagccccagcaccccatggactcaggactcaggtctccatagctgcttatttacccgtttcctttttcctcttccttaattctagttaaaacattcacttacggagaatgtaggttacctttgatgtttgac

SEQ ID NO: 368277 - DNA, 1616 bp, Homo Sapiens
  misc_feature (46)..(46): n is a, c, g, or t
  misc_feature (594)..(602): n is a, c, g, or t
  misc_feature (1053)..(1073): n is a, c, g, or t
ccagaaatcttcaatgagctggtttaggtttccattttcagccagnttcagcagcgggaggtgggcccccctcatagctctcaaaactctcctccccctgttttctgacatgcttcttgccttgagagcttctccctttttggcctgctcctcgaattcattgcgatcattcagcttgacgagcaggaaggacctgagcttgcttctcatgggcatagagacgctccagctctcggatctccaggttgtactgagagggtgtccttcttctggcggtctttcatggcagccattcgagccatggcctccaccctctgctcatagccctgagaagattgctcaaatggccaagttcatggttttcttctccatcaacaggcagtgctgaagctgctggtagacattgtcataagcagccttctcaaatcgtaggtctcaaatctcctcccggagcttggcattagtggtcagcatcttgtcaaagtgaacagtgacgagattcaaacgggtttccaaaatgtgaatctgtttctgcagtttccgggggttattggcctcctgcatttttgcgaaaatctgtttttggtttgcgannnnnnnnnccatctgaagaatcttctcatccagttcagccaacagcactttcagggatttaatcaatgcctcatagtcctccttagtttggagcaggagtcgcagctccatgtagttcttctcactccgattcatgttcctcgaggatttcatgagactcaacagtagggtgatctcatcctgctctgtcttcagggtcttgatctccttgtactgactcgcaatcttctgctggtttcggaacttaaaagacttccggctttccaccatcttcctgaactgctgccttagcttccggagctctgcctccgcctgctgctctttggccttctccgaaggttcctggggagtgtcggagtcttttctcctgttcttcttcaacacagacatcttgaaggaaccgcactttgcctccactcagacactgtacccagagagctcaaagccagtgagccttcnnnnnnnnnnnnnnnnnnnnncaatgcccagtggcggggcccggactgcttgtccgtggctgctccggccgcttgtccgacggctgctgcaactgcgcttccgacggtgccgggaggactgcttgctgcgcggcctcgctgcgccacacccccagccccacgcccgggcgttctgggacccctggaacgggcgcctttgtgactcgcacaaacatggacgttctcccctgcaagtccgctgggagggcacagggccctcgggaggagaggacaagagcagctggttggagggaagcttttggttgggggagaggggcgacacactctccagcgaccccttaccagactacccggaccctcatgacgctaagtgacttcttgagtcaatcaacagtcttagcccctccctcggccaacgccatgcaatcgctggtccacctcgccccactcacaccccattcaccgtcttcttagcctacacctacactcatgctcacagcagccctgctaggtacagacttcacacgcagctaactcaaaggagcccagtttttttctactctg

SEQ ID NO: 368278 - DNA, 1096 bp, Homo Sapiens
  misc_feature (312)..(320): n is a, c, g, or t
  misc_feature (880)..(880): n is a, c, g, or t
aggctggaccggtccggaattcccgggatccgtcggaagcgcagttgcagcagccgtcggacaagcggcccgagcagccacggacaagcagtccgggccccgccactgcaaggagatcaagaccctgaagacagagcaggatgagatcaccctactgttgagtctcatgaaatcctcgaggaacatgaatcggagtgagaagaactacatggagctgcgactcctgctccaaactaaggaggactatgaggcattgattaaatccctgaaagtgctgttggctgaactggatgagaagattcttcagatggnnnnnnnnntcgcaaaccaaaaacagattttcgcaaaaatgcaggaggccaataacccccggaaactgcagaaacagattcacattttggaaacccgtttgaatctcgtcactgttcactttgacaagatgctgaccactaatgccaagctccggaaggagattgaagacctacgatttgagaaggctgcttatgacaatgtctaccagcagctccagcactgcctgttgatggagaagaaaaccatgaacttggccattgagcaatcttctcaggcctatgagcagagggtggaggccatggctcgaatggctgccatgaaagaccgccagaagaaggacacctctcagtacaacctggagatccgagagctggagcgtctctatgcccatgagagcaagctcaagtccttcctgctcgtcaagctgaatgatcgcaatgaattccgaggagcaggccaaaaaggggaggaagctctcaaggcaaagaagcatgtcaagaaaaacagggggagagagtttttgagagctattgaggtggcccacctccgggctgctgaaagctggctngagagtgggaaacctaaaccagctcattgaagaatttctgggccaaggaggagaggaattttgctcgggtcacgtaatgtcacggaagcctcaacaaacgacttggaagatgatgcacaagaaggaccccacgaattccgggacgaagaccatccttcctggcaattcccgcaggaaattggtcccacgaagaaaaaccactcgtgtctgggaaaa

SEQ ID NO: 368279 - DNA, 1144 bp, Homo Sapiens
  misc_feature (823)..(823): n is a, c, g, or t
  misc_feature (886)..(886): n is a, c, g, or t
  misc_feature (993)..(993): n is a, c, g, or t
ggtccggaattcccgggatcaggttgagaggccccaagacccagttcctttacagaatcaaccctggggtggctttaggactgggctctttggagctcatccttggacccacagtggagtgctggtccgtgctgatgtcttcagataccaatcaatgggcatttggctccttgcttccactgacctcttgagtactttcaacgatcggtgtcaggagtgccccagctgctgtttctagagcatctctacaacccacggtggcctctcctctctctgcgggccatggacagcacagtcccttcagccctggagctgccccagcggctggcactgaacccaagggagagcccgaggagtccagaagaggaggagccccacctgctgagcagcttggctgcagtccagaccctggccagtgtcatccggccttgctatggcccccacggccggcagaagttcctggtgaccatgaaaggagaaacagtgtgcacggggtgtgccactgccatcctcagggccctggagctggagcacccagcagcatggctcctccgggaagcaggacaaacccaggcagagaatagtggggacggcacagccttcgtggttctgctgacggaagccttgctggaacaggcagagcagctgctgaaggctggcctgcctcgcccgcagctccgggaggcctacgccacggccactgcagaggtcctggccacactgccctccctggccatccaatctctggggcctttggaagatccatcctgggccctccattctgtgatgaatacccacaccctggtcccccatggaacacttngacaagctggtggccaacgcctgctgggctatcaaggaactagacggcagcttcaagcctgancgtgttggggtgtgcgcgctgcccgggggggacactgggaggattcctgccctcctcccgggggttagcaatatctggggaagctctgtggggcaaatggccaccgntgtttaagtggttgccaggggggggctcctcttggcttgccccctttgggccctggcccatccaaaatggacccagcaaacgggcccggcttttccaagcccgggctgaatctaacctcaattttagggaaagggaaggggatcaatttat

SEQ ID NO: 368280 - DNA, 1035 bp, Homo Sapiens
  misc_feature (195)..(215): n is a, c, g, or t
tgggtctcccggccgcagagcctgcaacttggaattttctccccattccctcttctgtgatctcatggccccatgtgttcttgccactgctgaagcacacttcgatttatggccaagcactgatcgatttctgcaaagagctcttcaatgttggtttgtatgagcacaggatgcggtggctgatttctgtgaacnnnnnnnnnnnnnnnnnnnnncttaacttggcatctgtgggaggtactgttttcctcaggtttctgtaccactttctaacacacatcctctccagtaggcttggattctggtcacacaccttgattctgaaacaggcgggccccatcgtgtatcactagggtttgatactggttctttctacagagaggacaggttttccttatttgtgaacttgtcaaaagcctgaagacatgctttgtggaacacatgggagcatgaaagcagcacctgaggacgaagctcgaattcttctttacagatggggcatggttgcacggagtccccttgcaaggagagagcgctgtttcaccttctcccattcatctgatgacagtggaggtggtggaggcccaatgaggcccaacttctgtgccaaagtcaacggcggcggtttgggatcaagaacatattctttttctgagtcttctagtttggggcactgtgtagtttttttaagtccagtatctattattgcctttgtatctctttttagagatttgttctctttcttttgtacttgtgtcttagaatgatctgcaactgaaagatttcgaagttgaagatcatgtaaaatgtgatcttgtaaagcaactgcattgactgccaagttatctttcttagatgagtgacccttattttttaacatgccgaattaggaaaagttgttgcttggctatcacaattctatcatcacatcctatcaccttccttctattcttctgctcgcctcacagctgcggccatcgccggcccggctcggaggaggcgaaagcgaggccgcggacggccctcaccccgaat

SEQ ID NO: 368281 - DNA, 1121 bp, Homo Sapiens
atgggcctcgtggcacgggacgtttcaagtcctggcgtccccgcgagcaagcagcctgatcaggcctcgcagtgggacgttgggaagccggtgttggcagatgctgtggctgggaggagtccagagcttcgccctgtccccgcggggctgagccacaactgcttaggagttttgggcaggatcgatggatgcaggaagcagtaggagtttggagaatgcagtgaataggatctatcatgatcagcttgttccaaagataaacacaagcaagaaaatgtccaccttagcgcacccacctaacatcctggaaatgtcacaagagattaagaaaaactgtggaggtaaacaggtagaaatcacacttgaaagaacaaaaatgacaaagggcatcaaagaaaaacaaagcaatgatttaaagaaagcagcctttaaacggaaggcagaaggtgaagaaaagccaactagaaagaaacaggcaaagataacagaacttgacaatcagttaatcaccatgcctctgcctcacatccccttaaagaacataatggatgtggaaatgaagttggtctacattgatgaagatgggtgttcgctatgagtttgtagagtccttcatgtctactgagagtcagccaacatgccaagctgctgaaatagtagaccctttgagtgtacataatttcagctttctgcctcagattgacaaatggcttcaggtagccttaaaggatgccagctcttgctatagacaaaagaaatacgccttggcagcaggacagttcagaacagcacttgagctttgcagcaaaggagcagttctgggagaaccatttgatgcacctgctgaagatatagcaagcgtggcaagtttctttgagaccaagcttgttacctgttatccacggatgaggaaaccaaatcttgcccctgaatctggacccagggagaattgtttttaaaacccaggcctattttccggaaaccatctttcggtaaagcaacaggggtttaaaatggtctgggaaaaggtattctccaagggttgccctcgaaaaggccaggaattgcctgagactaaccgggtcctgggttttgggggggaaataatgtttatacataat

SEQ ID NO: 368282 - DNA, 1150 bp, Homo Sapiens
  misc_feature (927)..(966): n is a, c, g, or t
cccattcccctcccctttcccctccgctcggcccggtccgggattcccgggatggtatctagcacttctcgaccagggcctaaagctttatgttaaaaggaaaattatatagtagaactgtcaaagacttgagtattttacaaaaaggttttgaaagatcatatactcttttttcaaggacttcattggagaggtttttgtcactcttggagttagaatcaaagaaacctaaggaactttgctttatgcatgtctgggcaagtagtgtgacttgcaagaaatttccgagattcaccattcattgctgatcatgaaatcctctcttttgttacgaggtgttcacttctgttttcacttgccagggacagccaagatagaaacagctgtgacttcaaccccatctgcttctgggcagttcagcaagcctttctcattttctccatcagggactggctttaattttgggataatcacaccaacaccgtcttctaatttcactgctgcacaaggggcaacaccctccactaaagagtcaagccagccggacgcattctcatctggtgggggaagcaaaccttcttatgaggccattcctgaaagctcacctccctcaggaatcacatccgcatcaaacaccaccccaggagaacctgccgcatctagcagcagacctgtggcaccttctggaactgctctttccaccacctctagtaagctggaaaccccaccgtccaagctgggagagcttctgtttccaagctctttggctggagagactctgggtaagtttttcaggactgcggggttggcccaccaagatgattcctacaaaaccaaccaataaggctttcatccacaagcctaactaagtaccccgtccaacccaataagttcaggcgcggccctccgggttctaatttttactgnnnnnnnnnnnnnnnnnnnnnnnnnnnnnnnnnnnnnnnntggtgaacttcttcctgcaaccagccaccctcgttagcaccacccaggaagcccatccaaaattttcctcaaatgcccgcttttggccaagttgtgcacttccccaatggaaggaatcctctgtggggtcatcaaatttgggtggaaatactcctaaggctgggaaaacaatattctcaattgg

SEQ ID NO: 368283 - DNA, 1103 bp, Homo Sapiens
  misc_feature (902)..(910): n is a, c, g, or t
agcgggtttagcctgtggtgggcgctgcgggtgtttgcaggaggttgcagtactcgctgggctgaggtcgtctcgggtgaggaggtcgcgccggaagtggctctagccgtggcgcctcggcgtagtaaggagcctgcaacagagttttgttgtttagggggcgcggcaccgcaccgctcccttcaccttgcagcagccatggcgaaaggcagagtcgccgaacgatcgcagttgggcgctcaccacacgacccccgtgggggacggggcagcggggacgcggggtctcgcggcgcctggcagcagagaccaccagaaggaaaaatcctgggtagaagctggatcagcaagaatgtcactccttatattggtgtccattttcttatctgcaagcttttgttaatgttttcaggtatataaaaattttcctcagcttagtgaagaagaaagagtgaatatgaaggttcccagagatatggatgatgccaaggctctaggaaaagttttatccaaatacaaggacaccttttatgttcaagtacttgtagcttattttgctacatatattttttacccagcttgcaaacattttgctattccaggctctatatttctcagtatactctcagggtttctttatccctttccactagccttatttcttgttgtgtttgtgttcttggacttggtgcctctttctgttatatgcttccctattaagttgggagaccagttgtatacacaatacctacacagagaaagcagtaaaatggccacagccaggttgaacgtcatagagaacattctcattaactacattatatttttgagaataacaccatttctgcctaaattggtttattaatatcacatcctcctgtgataaacgtgccattggaaagnnnnnnnnnattgggtccttttcctaggtggtcgcaccctccctcctttttgtagcccttaaaggcagggaacaacactggtattcaaccttaccaacaaccagggagaaaagctggtttccccgggaaactccaataattttaatctctgaaagaattctgtgggctgggtcctttttccaatttccggcccacgccaatt

SEQ ID NO: 368284 - DNA, 848 bp, Homo Sapiens
agcggagcgcccggcggccacctctttcccgcgggcgggccggggcggggcactgaagggggcggtccaggaccctgacttgtctcgcggttactgggccggcgcgagcacgcgaggctcgggggcggcacggggcggggtttagcctgtggtgggcgctgcgggtgtttgcaggaggttgcagtactcgctgggctgaggtcgtctcgggtgaggaggtcgcgccggaagtggctctagccgtggcgcctcggcgtagtaaggagcctgcaacagagttttgtagtttagggggcgcggcaccgcaccgctcccttcaccttgcagcagccatggcgaaaggcagagtcgcagaacgatcgcagttgggcgctcaccacacgacccccgtgggggacggggcagcggggacgcggggtctcgcggcgcctggcagcagagaccaccagaaggaaaaatcctgggtagaagctggatcagcaagaatgtcactccttatattggtgtccattttcttatctgcagctttggtaatgtaaagggtatataaaaattttcctcagcttagtgaagaagaaagagtgaatatgaaggttcccagagatatggatgatgccaaggctctaggaaaagttttatccaaatacaaggacacctttgatgttcaagtacttgtagcttattttgctacatatattttctttggcaacattttgctattccagggctctatatttctcagaatactctcagggtgtctttatcccctttccactaagcctaattctaggaagagggcagctgagcttggtgcccctctcggatatgcgtccatatagttggaagca

SEQ ID NO: 368285 - DNA, 798 bp, Homo Sapiens
  misc_feature (653)..(665): n is a, c, g, or t
ggggtggagctgctgtccagatacagatcatgagtggcgggtacgatctcaacctcttcgccagccctcctgacagcaacttcctgtgctccgtctgccatggggttctcaagaggccaacaaggttgccatgcagccacatcttctgcaaaaagtgcatcctcaggtggctagccagacaaaacacctgtccatgctgtagaaaagaggtgaaaaggaaaaagatggtccaaatgaataaactccgaaaaaccattggccgcctacaagtcaagtgcaagaacgccgaagccggctgcatagacacacaccccctggcccatcgcaaggagcaccaggactcatgcccctttgagctaacggcctgccccaacgagggctgcactgtgcaggtgctgcgaggtgtcctggatgaacaccgccagcattgccagcagaatggacagcagcgctgccccttaggctgtggggcccaccctggctgcctttggaaaggtgagcaccacaactgctaccgggagctacttgatgccttggtcccaacccatgagcgcaaccggaacctgcttgctggcccttcctggggcccggttccacccggcgcacctttaatcttagccttttttccccccttctgccttgccataacttgnnnnnnnnnnnnnggaatggttcctgtattaattcggctcccgaaatcgcccatggggagaataaaattccgcggataactcccgaaatagccttcacaccgcgcgggcgttcccattagcgcttccgcctagcccattacccgca

SEQ ID NO: 368286 - DNA, 1050 bp, Homo Sapiens
ggaccggtccggaattcccgggatggaaaaaggggctgtgggatttagtggctgggctgcaccccctgggggggcagcagagcccaatgggccagaagggccacaaagactccctttacccttgtggagggactcctgagagcagcctccatgaggccctggaccagtgcatgaccgccctggacctcttcctcaccaaccagttctcagaagcactcagctacctcaagcccagaaccaaggaaagcatgtaccactcactgacatatgccaccatcctggagatgcaggccatgatgacctttgaccctcaggacatcctgcttgccggcaacatgatgaaggaggcacagatgctgtgtcagaggcaccggaggaagtcttctgtaacagattccttcagcagcctggtgaaccgccccacgctgggccaattcactgaagaggaaatccacgctgaggtctgctatgcagagtgcctgctgcagcgagcagccctgaccttcctgcaggacgagaacatggtgagcttcatcaaaggcggcatcaaagttcgaaacagctaccagacctacaaggagctggacagccttgttcagtcctcacaatactgcaagggtgagaaccacccgcactttgaaggaggagtgaagcttggtgtaagggccttcaacctgacactgtccatgcttccctactaaggatcctgaggctgttggaagttgtggggttttcaggaaacaaggactatgggctgctgcacctggaggagggaacgtcagggcacaccttccgctctgggcccggtgacatgctcctgctgtgctaccacaccttcctcaccttcgtgctcggtactgggaacgtcaacatcgaggaggccgaggagctcttgaaggcctacctgaaccggtaccctaaggtgccatcttcctgttctttgcagggagggattgaagtcattaaaggcaacttgatgcagccatcgggcgttttccaggaatgctgttgaggccagcaacactggaaagcagttcaacacatgtggca

SEQ ID NO: 368287 - DNA, 1776 bp, Homo Sapiens
  misc_feature (1369)..(1413): n is a, c, g, or t
  misc_feature (1716)..(1729): n is a, c, g, or t
ctttctccaaccatgaaggagaccccaactcagcctcctaagaaagttgtaccccaagcttcgagtatatcaaggggtaacaaatccaacaccaggtcaggatcaagctcagcatccagtgtcacccagcgttacaggttcagcttttggacctgggacttaccaatcactccagaacctactacggaggttggacattcgtacacccccgaagaggactatagtttctccagaagcatcctgaggtgacacttccacatccagaccaggttcagactcagcattcacacctgactcgagccacagtgtcaacctttggacctggggtttaccatcactccaaaatccatgacagaggttgaaccttctacagccctgatgactacagctcctcctccaggacaccctgaggtgacacttccaccttcagacaagggtcaggctcagcattcacacctgactcaagccaccgttcaacctctggacctggagcttaccataactacaaaacctactacagaggttaaaccatctccaaccacggaggagacctcaactcagcctccagacccgggacttgccataactccagaacacactacagagactagacattccacagccctggagaagactacagctcctcatccagaccaggttcagactctgcatcgaagcctgactgaagtcacaggtccacctacaaagttagaatcttcgcaggattcattggtgcagtctgaaactgcaccagaggaacagaaggcctccacaagcaccaacatatgtgagctctgcacctgcggagatgagactctgtcatgtgttggtctcagcccaaagcagaggctccgccaagtgcctgtgccagagcccgacacctacaatggcatcttcaccaccttaaatttccaaggaaactatatttcatacattgatggaaatgtatggaaagcatacagttggaccgagaaactaattctcagtgaaaattatttgactgaattacctaaggattcatttgaaggcctgctatccctccagtatttagatttatcctgcaataaaatacaatatattgaaagacaaacatttgaatcactaccatttttgcagtatataaatctgggctgcaatttaattacaaaactgagccttggaacatttcaggcctggcacggaatgcagtttttacacaacttaattctcaatcgcaatcctctgactactgtcgaagatccatatctctttgaactgccggcattaaaatatctagacatgggaacaacacacatcacacttacaacacttaagaacattctcacgatgactgttgaactggaaaaactgtaagttattttttcttagnnnnnnnnnnnnnnnnnnnnnnnnnnnnnnnnnnnnnnnnnnnnncttaagtcaggtttattgagatttaattttcatataacattcaccctttataagtgtatagtttgatgagttttgacaaatgtatagttacataaccaccaccacattcccaatataaagcatttctgtcacctcagaaaggcccctcatttccctttgtaggcaatcccttcctcccaccatcagcccctgttagctactaatctgatttctgttcctagttttgtctttttcagaatgtcttataaatgaaatcatgtagcatgtagcctcttgtgtttgacttctttcacttagtattgnnnnnnnnnnnnnngggacggagtctcactgtcactcaggctgcagtgcagaagcatgact

SEQ ID NO: 368288 - DNA, 267 bp, Homo Sapiens
ggtgttggacttatgttacccctttgatatacatcgaagttgtgggtacaactttcttaggaggctgagttggcgtctccttctatggttggagaaagtcaacctctgtcatggattctggagtgatggtaaaccccagatccaaaggttgaactgtggcttgagtcaggtgtgaatgctctggaggttgagctacaactacattagggaactctggagtctgagctggggcctcctgagtagctggggcctcctgagtagctgggg

SEQ ID NO: 368289 - DNA, 963 bp, Homo Sapiens
ggttcctgcagcagccactgccctgcccaatccctcccataccccaccatgttggtgggtacccccaacctgctgacactggatgaagctgatgccacctggaccctcatcaaggataaggtcatcgaggagcactttgggcccaatgcagtagcagtacctttcctgtcagatgcagcctgctatgacctactgggtgtgctggtaaaacagtcccgcccagcccatacccgcctggctttgccaggtcggcagggccggagggcactgaaaccagtggggccactaccaagcctcctggagcaggcaggatctgagggtgccttcgcccactgcactcgggaatactcaccaaatggccgagcagagagagcctatgaagagacgcgaatgttggatggacagccctgcaagatccgcctacatatgggtgacctgcgcaagaaggttgccttcctgttgctgccaccagggcaggtgagcctacagcagactcttccctggctccgaagcacccacagcatctatgtcatctaccaggtcttctcttgttcctggctgcagctggggctgacgtctacagcccgtgagccccagctcctccggctacttcggtcattacctgttgccttctcctgcctcaagttttcactgcagtctaagggcgtgctgggaccacagaagcctctcactaaagacccattgccccatggggccaactggggtcagacccaaacctcagcatcatgccgcctctggcccccacatcagcatctgctgatacaactgaagctgctgatgtgcccccacctgtcccagccccacctacgccaccctcccagggaaggccagaggacaaacccaccagattctcctacaagggcccgaaaccccttctggagggggccccagatactgtcaaggtctatcctcagagttcgacagtgacgactgaagctgagc

SEQ ID NO: 368290 - DNA, 1600 bp, Homo Sapiens
  misc_feature (690)..(741): n is a, c, g, or t
  misc_feature (872)..(872): n is a, c, g, or t
  misc_feature (920)..(920): n is a, c, g, or t
  misc_feature (1014)..(1015): n is a, c, g, or t
  misc_feature (1104)..(1104): n is a, c, g, or t
  misc_feature (1436)..(1436): n is a, c, g, or t
  misc_feature (1479)..(1479): n is a, c, g, or t
gggggcgccccggcggtcgcagtgaagggggagaggggagctgaggcgcggtggggcgccgggagagcgcctccgcggtgggacggagccggactgggccgagcgagggaggctcctgagcctcggaggaccccggggttggctttgggagctgaaagtttcctttggacccctcggaagccccgtgacatcagaggccgggcctggcaggggcaggcaggaaacgtgtctggaggctactgccctctccgcgtgaccttgggcgagcagcctcctcctggggctcagtgggtgtgattttgtaacatttcccagcgctgcgacaggcgcgtcctcgccctgtccaacgctggagcccgaagaattactaagaaaccgacggtctgaaggagggaagaggtgaccggctcaaggcctctccgtgggccagcgctggaccctcctgcacacacgggtcctggacgccacccctctgcaagggatcactccccctccctggccgcaccccccgccttgagcgatagggccgcacccacgcacgccgtgggcgccagttcgccatctccacccctataatgcacccttcacaccctacccttgcgccgctggccaccctcccacatctccgcaccggacgccacaacaccacggaccccctagtacgctacagtgccacacaaccaggcaacnnnnnnnnnnnnnnnnnnnnnnnnnnnnnnnnnnnnnnnnnnnnnnnnnnnnttttcacaaaggccactcacgcgcgtgccaatatccgcctctttactccgcggcccgcgtgaacgacaccgctctgcgctcgtttctcctccgcccatcctcgccctcttgcgcacacaccgcctcgcccnttactctgctccgctctgcggctcgactagctgcatcgagtgcggccncgctagctctgtcacaggcgcagtggcgctctatgaacttagatctctcttccacacactccctaaccgaccagcgggcgcggcgcatgtcgtnntccttcgtcctggtgtctagccggtttccctatttcagacgcagtgtagtattaatacgccctcaacaaactaacaccatcaaggaatnacaagtcgcgcacatcatctattgggaagtctcccacctcggccggaatactctctcgcaccccaatacgcgctcggcggccttcgcctctggtcgagcggacgtgggttcgacatgctcgcagagacttccgggcgcgcccgccggccgcatccctctctccatattttcgcgacacgaaatgtaggtagagggaaaaacatgtatattgttcgctagctcccatcgacggtcacgacgtgtcccaccatctcatctggtcacacacatatatagtccatacctcttgttcttaacatcggggtcacagccgctaacgagcgtctatgtgnactctgcatcacgtcgcgccctgcctccctccccatgcaaggncccgaccccagccctactcaaggctatcggtcataaagctgtgccatgcaatgctggaagaatctctctcacaatgataccggcagcactcgtccagcacgcgagttcgcaaactagagga

SEQ ID NO: 368291 - DNA, 1361 bp, Homo Sapiens
  misc_feature (231)..(260): n is a, c, g, or t
  misc_feature (1120)..(1120): n is a, c, g, or t
  misc_feature (1258)..(1258): n is a, c, g, or t
  misc_feature (1281)..(1281): n is a, c, g, or t
  misc_feature (1321)..(1321): n is a, c, g, or t
gcggcccgggcgcggcgtgggtagagccgaggcggcggcggcggccggcctccgggagcgagagcgaggcgccttccccgcccgggatgtgagcgccgtgcggagcccggggcgggggagggccgggccggaggcgcagccggcaggaaggaaggacggacggaccaggaggaggagcggcggcggcggccggagccggaaggcggggaggggccggccgttgggcccgannnnnnnnnnnnnnnnnnnnnnnnnnnnnntggggagaagcgctctcgtcgcctgcccgaggccggagcggcggggcccgcgcctcctccccccagcgccgcggaggggggaggaggaagatggagacccacatctcatgcctgttcccggagctgctggccatgatcttcggctacctggacgtccgggacaaggggcgcgcggcgcaggtgtgcaccgcctggcgggacgccgcctaccacaagtcggtgtggcggggggtggaggccaagctgcacctgcgccgggccaacccgtcgctgttccccagcctgcaggcccggggcatccgccgggtgcagatcctgagcctccgccgcagcctcagctacgtgatccagggcatggccaacatcgagagcctcaacctcagcggctgctacaacctcaccgacaacgggctgggccacgcgtttgtgcaggagatcggctccctgcgcgctctcaacctgagcctctgcaagcagatcactgacagcagcctgggccgcatagcccagtacctcaagggcctggaggtgctggagctgggaggttgcagcaacatcaccaacactggccttctgctcatcgcctggggtctgcagcgcctcaagagccttaacctccgcagctgccgccacctttcggatgtgggcatcgggcacctggccggcatgacgcgcagcgcggcggagggctgcctgggcctggagcagctcacgctacaggactgccagaagctcacagatctttctctaaagcacatctcccgagggctgacgggcctgaggctcctcaacctcagcttctgtgggggaatctcggacgctggcctcctgcacctgtcgcacatgggcagcctgcgcancttcaacctgcgctcctgtgacaacatcagtgacacgggcatcatgcatctggccatgggagcctgcgcctctcggggctggatgtttcgttctgtgacaaggtgggagaccagagtctggcttacatagcccagggnttggatggcctcaagtctctctncctcttgctccttgccacattcagtgattgatgggcattnaaccgcattgttgcggccagattgcaagggggttgcgaag

SEQ ID NO: 368292 - DNA, 1238 bp, Homo Sapiens
agcgggggctctgttggcggcggcgctagcttcggagtctcccgcgcgcacctcagccgcctcctagcggcgcggcgctcgctcctacgcctaaaatgaccaatgtgtgatttcagtggaataaatggcgtccaaagtcacagatgctatagtctggtatcaaaagaagattggagcatatgatcaacaaatatgggaaaaatctgttgaacagagagaaatcaaggggctaaggaataaaccaaagaaaacagcacatgtgaaaccagacctcatagatgttgatcttgtaagagggtctgcatttgcaaaggcaaagcctgaaagtccttggacttctctgaccagaaagggaattgttcgagttgtatttttcccctttttcttccggtggtggttacaagtaacatcaaaggtcatctttttctggcttcttgtcctttatcttcttcaagttgctgcaatagtattattctgctccacttctagcccacacagcatacctctgacagaggtgattgggccgatatggctgatgctgctcctgggaactgtgcattgccagattgtttccacaagaacacccaaacctcctctaagtacagggggtaaaagaagaaggaaattaagaaaagcagcccatttggaagtacatagggaaggagatggttctagtaccacagataacacacaagagggagcagttcagaaccacggtacaagcacctctcacagcgttggcactgtcttcagagatctctggcatgctgctttctttttatcaggatcaaagaaagcaaagaattcaattgataaatcaactgaaactgacaatggctatgtatcccttgatggggaagaagactgttaaaagcggtgaagatggaattacaaaaccatgaacctcagtgttgaaactattcgaccagaagagacagcctggaacacaggaacactgaggaatggtcctagcaaagatacccaaaggacaataacaaatgtctctgatgaagtctccagtgaggaaggtcctgaaacaggatactcattacgtcgtcatgtggacaggacttctgaaggtgttcttcggaatagaaagtcacaccattataagaaacattaccctaatgaggacgcccctaaatcgggtactagttgcagctctcgctgttcaagttccagacaggattctgagagtgcaaggccagaatctgaaacagaagatgtgttatgggaag

SEQ ID NO: 368293 - DNA, 589 bp, Homo Sapiens
tccacaggggagttagaagaatggaaggtaaggggaaggtctgtcatctacccaggacattcccatgatgagtacaggtcagattgtgccacaaggtgggcctccacgtccctgccctggccctctttcttctgtcactaaccctggttatcattttacaggcttgtaactggatattctaccagagctctcactatattgtcaagcctaagattgaaaaactggaggctttattagtgtttttatatagaaaacagttattacatatgtgttaagtcatttcttaagaattttctaaaatgccaactatcacaggattatttcaagctagtcattgaggtatatgacaaaatgtaaataacaaaaaactgaaatctaccaaaagagcatggagatttttcttaaataataatattgtgctctccacctcacccttgtgtaaaccctcaggtcaggttggttcccctgggtcacaaaatggtaaatgttccatactgacatgccggaggcagcctgacccgttatttggaaagaatttgtgaattatttctgggttgtgttttgcctaagagctgatcttattttcctg

SEQ ID NO: 368294 - DNA, 1107 bp, Homo Sapiens
ctcctccagctgtgcccccactcccctaaaagccttgtattcccccctgcaggttccctctggccccaccaggagaagaagatggcctatgaaaaatcaactgatatctctgatgtctccaggtcaatgttcctgtacccatggctggaatatccagacaagaccaaagaactcagaaaagccatggctcctgttcatctgcccttgtcctgctaccagatgccaaaggaagagtttcccccaagtccagagtgctggaggcagcatccgagcaagccaaactcagtcccgtactgctacttcaagaaacctgagatctacacgcactggcacgacctgtatgatcagcgagaggaacagggaggctgagaagatgttgaggaaaatgagagatgactgtaggtacatcaaagaggtacatcaaacccacatcaaaatgttccatctcccaatgagcaagctgactataaaatctgagatgcgatccaggcccttagagcctacccaggaccccctgaagtggcaaagattaagggaactcacaaaaagcctggaatctcccagagaggatgagcagttctatgcagcacaggctctgggatgcttacgcatcagtgacaagtttgtcatggaggcactacagcaggtggcccaaactggtccagagaaagtgaagtacgaggcctaccgaaccctggccatcctgggttgcctgaataagcatgtgatccgggctctcatcaaacagctgaaggagaaaaatgacggtcaaaggatggagactttgacggggctacgaatggctcttaactcctgggctgctgtctctaaagacaagaagactcaagtccggggatgagggcaagctggtgcctgtactacagacactgatcaagaagtcgtccagtgaagcatctctggaggcagccctgtgcctgggtttccctgaggccttgcagcaacctggtcccaggaggttcttgtttgcagggccctgggccaaaggactcagaaccccccgggatggagggccctttagggatggtgggtcccaggtggatgccccgtgccacttccgccccccaggtctttcaggggcccatcctt

SEQ ID NO: 368295 - DNA, 1194 bp, Homo Sapiens
  misc_feature (188)..(188): n is a, c, g, or t
  misc_feature (815)..(929): n is a, c, g, or t
  misc_feature (986)..(995): n is a, c, g, or t
  misc_feature (998)..(1061): n is a, c, g, or t
  misc_feature (1132)..(1142): n is a, c, g, or t
aaacgaggagtcccacgaagtctttttcagtggcctatttgagaactgcttcaatgccaaatgctggaagcctcgacccttatccatttacatcatcctcggccgggttttcctgctctctgcagttttcttggctttcgtcaccaccttcatcatgatgccctttgcatccgagttcttcccgaggnacctggaagcaaaactttgtgttagcctgcatcagcttcttcacaggggcctgtgccttcctggctttggtgctgcatgccctggagatcaaggctctgaggatgaagctcggccccctgcagttctccgtgctgtggccttactacgtgctgggcttcggcatctttctgttcatagtggctggtaccatctgcctcattcaagaaatggtttgcccttgctggcacttgttgtccacttcccagagtatggaggaggaccacgggagcctgtacctggacaatctggagagtttgggaggagaaccgagctcagtacaaaaggagacacaggtgacagcagaaacagtcatctagcccaggacatggcttctttacccttcttcaagccatgtgagtgtacacatgtagctgtttgtagtcctccccaccctctctgccagtatctgtgcctttgaggagcttcttgcgtgtcagatcaactctccaactccccatactcacagtgattctatctgtgcttgtatgtgaaatttgctaaaagtcctttcaactcttctgagcttcctaagtgacgtttttgcaggtattttcaataaacaagaagggctactttgttcaaaaaannnnnnnnnnnnnnnnnnnnnnnnnnnnnnnnnnnnnnnnnnnnnnnnnnnnnnnnnnnnnnnnnnnnnnnnnnnnnnnnnnnnnnnnnnnnnnnnnnnnnnnnnnnnnnnnnnnggggggccgccctaaaaaacccccctgggggggccccaatttttaccgccccccccnnnnnnnnnnaannnnnnnnnnnnnnnnnnnnnnnnnnnnnnnnnnnnnnnnnnnnnnnnnnnnnnnnnnnnnnnnacaacccggggggtggggaaaaaacccgcccctttggggatcttttttggaaagacaaccctctcttttcnnnnnnnnnnncaaatttggggccacacctccccccccaaaaatttttcactgccttctgggg

SEQ ID NO: 368296 - DNA, 167 bp, Homo Sapiens
gcccagaccctcctccagctccgccagccccagctcctgctagttccgccccagggcatgtggccaagctccctcagaatggaaccggtgggctgtagcaagggtggtgggcctcccagggaggacgtaggtgcgcccctggtcacgccctcgctcctgcagatggt

SEQ ID NO: 368297 - DNA, 802 bp, Homo Sapiens
ggagaagagatggagccccagccttggtcccctttcccacccttcctccccacaaggctgtctgagatgccaccttccacctaaacatcatctcccaaattttaatccttaaccttggtctctgacttctgcttgattccacagtctccacccacatttgcacaaaggaccatcacctgtccttcctggaatctctaaagttttctgctttccttctgtcctgatggccagctctgctaagtcagctgagatgcccaccatctccaaaacccttaaccctactcctgatcctcatcaagaatatctggaccctaggattaccattgccttattcgaaattggatcacattccccttcctcctggggctctctccctttcctaaagaatagcagccatcaagttacagaacaacagactgcacagaagtttaacaatctcttaaacagaaattaaagatattcttaaaaatatggcacggtttcgaagagaagatcacagaagcaaaagaactttccgaggaaaccaatattactgaggatgtgtcagcccacaaagaaaatatcagaggacttgacaaaatcaatgaaatgttatcaacaaacctgcctgttagtttagccccagagaaagaagacaatgaaaagaaacaggagatgatatcggaaaccaatattactgaggatgtgtcagcccacaaagaaaatatcagaggactgacaaaatcaatgaactgttatcaacaaacctgcctgttagtttagccccagagaaagaagacatgaaaagaaacagcagatgatc

SEQ ID NO: 368298 - DNA, 1118 bp, Homo Sapiens
ccgactgtgactctcagcagccggcttgcggagcggttgccgcgtcctctgccgagcttcttgtgcccgcctccgagcctgaggaaacagctgattgatcagcctggctcaggcttggggcggggattggctgattggcagcaacgccacgggacagccaagctagaagcctgaggagccggagagggtgctggctgccgcgcggccgagtgtgttttatggaccatgtgctgctatgtatgcctgaagaagtacttgaaatgcaaatttggggagactttgccatataaatgcttggctggattaagcgcctaattaggatggtttttcaacaagttggagtaagcatgcaatcggtactttggtctaggaagccatatggttcgtctcgaagtatcgtaaggaaaattggtactaatttgtctctgattcagtgtccaagagttcagtttcagattaacagccatgcaacagaatggagtcccagccacccaggagaggatgcagtggcgtcttttgctgatgttggatgggtagccaaagaagaaggagagtgttcagcaagactaaggacagaggtcagatcaaggccaccccttcaggatgaccttcttttctttgagaaggccccaagcagacagatttccttaccagacttgtctcaagaagagcctcagctgaagaccccagcgctggcaaatgaggaagcactgcagaagatttgcgctctcgaaaatgaacttgctgctctcagagctcagattgccaaaattgtgacccagcaggagcagcaaaatctcactgcggtgacttagaattctacacatttggtaccatttaacaccaaaccctccaacttcccccacgggcccctgggctccccctggactgggggcttcacccaaaggaacatctggcggttgaatctggattaaagaaccgaagaagaggaaaaggagcccaatgcctggaaaaaaacttttggtttaagaaacaatccccaagaaaacccggaaatgtgccaaatatgcctaagaggaaccccttaaagaaaatgggaccaggggaaaaacctttccggcccaggggaaaagagtccaaaacacaggaaggtggaa

SEQ ID NO: 368299 - DNA, 810 bp, Homo Sapiens
gccagtaactataacggttctaaggtagcgaggcctgggtggcgaatacaagcccgagaacgaagatagagaacacgagacagaaggagtttcggcatgaaggagcaggatctgcaaagctgaaattgagaatgcttctgtgagaagggcagaagagaggtgtgggaaatggaactggatagactcaaggaatcatggatggcgaactaaataggaacaggttatggaagagactgaacgggcctggaaggcagagatcttatcactagagagccggaaagagttactggtactgaaactagaagaagcagaaaaagaggcagaattgcaccttacttacctcaagtcaactcccccaacactggagacagttcgttccaaacaggagtgggagacgagactgaatggagttcggataatgaaaaagaatgttcgtgaccaatttaatagtcatatccagttagtgaggaacggagccaagctgagcagccttcctcaaatccctactcccactttacctccacccccatcagagacagacttcatgcttcaggtgtttcaacccagtccctctctggctcctcggatgcccttctccattgggcaggtcacaatgcccatggttatgcccagtgcagatccccgctcctatgtctttcccaatcctgaaccctgccctttcccagaccagaccagccttcctcaccccttcctggctcccatggcagaaatagccctggcttgggtacccttgtcagacacccacggaccacacatgccccatgcagctacatacacaaacatcaacaa

SEQ ID NO: 368300 - DNA, 659 bp, Homo Sapiens
tcattgcatgtgccgcccgcggccccgagtctgtctcgagccgccggccggccgtgccggtgtccgtaggcgctgcgccctcggccgggcccatgtgtgtgcggcccgcccgaggccgcccgggctttgcctccaccagcgccctggcctccgctcgggcctccacacgggcctccgaagagctgccgcgacgcccggcccgcagggcaggtaaagagattataaatcttccactgaatgaaaaaaattttcttaaagctgcatatactccaagaaaaaaaccacaaatgtttttctgttttgcctgaatacatgatttaaacaagagatttccacagaagctctgcggccgtcacgatgttctggaagtttgacttgaacaccacgtcccatgttgacaagctgctggacaaggagcatgtgacgctgcaggagttaatggatgaagatgacatcttgcaggagtgtaaggctcagaaccagaagctgctggacttcctgtgcaggcagcagtgcatggaggagctggtgagcctcatcacacaggatccgcccctggacatggaggagaaggtccgcttcaaatatccaaacacagcactgtgagcttctgacttgtgatgtgccgcagatcagcgaccgcctcggtggggacgaga

SEQ ID NO: 368301 - DNA, 824 bp, Homo Sapiens
cgttccgctaccaagagaggcttccggtcagcggagggtttgctccgtctcttggtgaacttgaacagaggcagaggcaaaagcaaaacatttctgcgccaggagatgaggggcggtagagccctggaatggagatgtccttgacgcctgggcagaggctgcagctgcaggaccctgtggccactggagataagtaatggtgccatttgaacacctactggaaacggggcaggaacagtgagtgaccccaggcgagcacaggcaggtgccaggagccaggatgcaaggatgacgcctccggaggccctggcctcactcccacctgggcgctaggagccatccctggggctccagccaggagccctgctgcccaggggcatggccaaacctttcttcctgactccagaagtttctccgccgaacacagttcctgctgttcttcctcacggctgcctacctgatgaccggcagcctgctgctgctgcagcgggtccgcgtggctctcccacaggggcccccgggcacccggccccctgcagaccttgccagtggccgcgtggcgctgggcgtgggcttgctggacagccagagccctgcacgacctcgagtcagcaccagagctgcttgctgggtgtggacatgctgcaggaggcgccctgaaccggctccggcccaggccccctctggcttccctggagccagaaactcagagaagctgcgtcagatgcgtcaacagatgataccaacatcttaattgattgactcccagggaacagaccgactggggcccgaggttgctaagccgaggtcaaggcgaggaccac

SEQ ID NO: 368302 - DNA, 1032 bp, Homo Sapiens
tggaccggtccggaattcccgggatccacatctcccataactgccccagcacatcgtcctgagccgcccaacctgtctccagccaccttctgtggagtctcaaactccatcatctgtgggaccctgtaggccgaagggagaaacaagagtgcagccaccacccctgagccacctgtggctctgctacccacaatttcactgtgaagagtcagctgcctgggccgtgaggtcactgccaccatgagtctgggcatcatggaagaggaagacctggccgagtacttccggctgcagtatggggagcggctgctgcagatgctccagaaactccccaatgttgagggggcgtcggagtccccatccatctggctactggagaagaaaaaggagacagaaatcatgcatcaaactatggtgcagaagaagaagatgtttcagcgcagaatggaaaccctgaacctgcgctgggaggaactgggcgttaaggaagcccaactgaaggctcacatccagaagtctgagcagttcatccaggagaacgaccagaaacggatccgcgccatgaagaaagccaacaaggagcgagaactcaagtgccagcacatgcaggagctgaccaagcgcaagcaggagatggtggcgctgcggctggagcaccagcggctgagcgccaagctgaaggactactacatcttcaacaagtacctagagaaggtggtggagaactccgagttcgaggagatccatgaggtgattgcacgctacaagacgctggtgagcatgcgccacgacctcatgcagtctgcgcaggaaggccaggaggaagatggagcgcgccaaggcccggctggcgcgctacatgggagaaaaaggatgatgagatcctgcagcaaaacaatgagctggcaaggctgcagatgcgcctttgacgtgcccgcagcaatgtcatcctctggggaatctcgctgggggcacatccagaacaccggcagccaagaagaccctcctgctttggcacatttagaagggccc

SEQ ID NO: 368303 - DNA, 839 bp, Homo Sapiens
cagtccctccgcctcctcgggctccagcggtggcggagcgaacgggaccggcccggcttcagagcgcgaggtggagggtggaacgcgggcgcctgaaggagttgttgtctcggcagcgcccgcggagacgtgaagaggtggttgtgggaagagaagtttgcagaactgaaatggaggtcagagcttcattacagaaggttagtggatcatctgattctgtggctacaatgaacagtgaagaatttgttttggttcctcagtatgcagatgataattctacaaaacatgaagaaaaacctcaactgaagatagtttctaatggtgatgaacaattggaaaaagccatggaagagattttgagagattccgagaaaaggccaagcagtcttcttgttgattgtcaaagttccagtgagatttcagaccattcgtttggagatattccagccagccaaacaaataagccatctcttcagttaattttggatccgtctaacacagaaatttctacacccagaccatcttctccaggtggactacctgaagaagatagtgtttatttaataaactgacctacttaggatgtatgaaggtttcttccccacgtaatgaagtagaggctttacgggcaatggcaaccatgaaatcttccagtcaataaccctttcctgttaccctgtatgtaccaaatgttccagaaggttctgtgagaattatagaccaatccagcaatgtggagatagccatcttttccaactctataaggtgttattctgtgccacgtggacatgacggaacaacagagagcaattgctttgcattacagaagagttccctgg

SEQ ID NO: 368304 - DNA, 196 bp, Homo Sapiens
gccctgtgcccctacaccctcacctctttctaatggggtggtaaacgaggaggggcaactcagatgcctaagaagcttgggcccaaatctcagagacagcgtggggctgttgcccccctcacccaggtccagcaggcggcctgttcccccacttataaacaggccaagcgcaatgccaggagctatcagggccgcc

SEQ ID NO: 368305 - DNA, 712 bp, Homo Sapiens
gtaccaactcgattgcatagactttagataaccatgtgaaggggattctaccatcagaggaagaggccaaacttctatcatcatggtggatgtgaagtgtctgagtgactgtaaattgcagaaccaacttgagaagcttggattttcacctggcccaatactactggcctgaggcttccaccactaaacgcaaagctgtagatacctattgcttggattataagccttccaagggaagaaggtgggctgcaagagcaccaagcaccagaatcacatatgggactatcaccaaagagagagactactgcgcggaagaccagactatcgagagctggagagaagaaggtttcccagtgggcttgaagcttgctgtgcttggtattttcatcattgtggtgtttgtctacctgactgtggaaaataagtcgctgtttggttaagtaatttaggagcaaagcaatgctccaagcgaggcctcctgcttcaggaaagaaccaaaacactaccctgaagggccagcctagcctgcagaccccccttgcagggagccttcccttgcactgtgctgctctcacagatcggtgtctgggctcagccaggtggaaggaacctcctaaccaggcacctgtgttaagagcatgatggttaggaaatcccccaagtcatgtcaactctcattaaaggtgcttccatatttgagcaggcgtcaaac

SEQ ID NO: 368306 - DNA, 910 bp, Homo Sapiens
ggcccattcaaggagatgacgcattcatggcctcccctctaacggctattcatacaccatgcaaaacagaaccttccaaatttccttttccaactaaggagtctcagcagtccaattttggcactggagaacaaaaaagatataatccttctaaaacttcaaatgggcaccagtctaaatctatgttaaaagatgacttaaaactaagcagcagtgaagacagtgatggggaacaggattgtgataagacaatgccgaggagtacaccaggaagtaactctgaaccttcacaccataatagtgaaggagcagataactccagggatgattctagtagccacagtggatctgaaagcagctctggatctgactcagagagtgaaagtagttccagtgacagtgaggcaaatgagccatcccagagtgcatctcccgagcctgaacccccgccaacaaacaaatggcaacttgataattggctgaataaagtgaacccacataaagtgtcacccgcctcttcagtggacagtaacatcccatcatctcaaggctacaaaaaggaaggccgagagcagggcactgggaatagctacactgatacaagtggacctaaagaaacgagttccgctactccgggacgagactccaaaaccatccaaaagggatcagaaagtgggcgtgggaggcagaaatctcctgcacagagtgacagcacaacacagagaagaactgtaggcaaaaaacaacccaaaaaggctgagaaggcagctgctgaagagcctcgtggaggcctgaagatagaaagtgaaacccctgtagacttggctagcagcatgccctccagcagacacaaagcagccaccaaaggctcaaggaaacccaatataaagaaggagtctaagtcttcccc

SEQ ID NO: 368307 - DNA, 1024 bp, Homo Sapiens
  misc_feature (864)..(890): n is a, c, g, or t
gtcatagttgtgtagacatgatgatacaccaggaccccctggcagccctcaagaatgtggtctcagtgaattcatctgcgaatgttgggcaggttcagagacatttcaaactccttgcaaggttctctacatgtggcagcatttccaacagtgaagttcagtgtgtgtcatcaacatccaggcatgaattgaacttggaccacatatttatcacgatcttttaagactgaggtagaagaaaatctgtaatattgctctttcaggtaacagtgaaatgtcacattttagagtctcatctacaagaaagacttcagaagaacttcgttcaggaaaattggattcttctgcagcagctcttttgagtattaacctatttttccattttttcaattgaagttcatgttttaatatcagctcatcttctttctttgttactcttatgtcttgctgtattccgccattttgttaggataatggttagcttgtgacaattagatgatctgttgtatcccgcaagagcatatttttaaggtttttctgtctggtcgtccatataagagtgccagtgatgaaatacagatttttgaagtctgaaattgtagcatgtcactgctctgttcattttttcagccaggacgacattttcatttgtacgagctatgtctctccaagtgcaaaaatgagtctttactaaatgtccagtataaaagctacaggcttttatcatcaattccggagtcatcaaagaagattctgaagaccacttttgattataaccatgatcattccctctaaatacctcagcggatcctcaggacatgtaacaagtataccacataacagtgcctcgcagacctgaggaannnnnnnnnnnnnnnnnnnnnnnnnnngcctcgggttggcattgcgtagcgaggccatggcccaaggcctgacggagaagctgcgatagtaccctccccgcgatgggactaggggccgggcgcgtgcgggcgtttgcccggatcccgggaataccggacgc

SEQ ID NO: 368308 - DNA, 884 bp, Homo Sapiens
cggtccggaattcccgggattgtggctgctgctccactttgctgccccggcactggggttctacttttccatcagctgccccagtggtaagcagtgccaacaggccctactctcaggcaatgatattctcctgtattgcaactcctcgggggcgcactggtactatttattcacacaaggcaagaagggcaggctcaccagcctcaccaatatttccaatatggaaataatgcccgagggcagccttctcattaaagatccattgccctcccagacgggcctctaccactgctggaacaagaatggccgccaagtggtgcagtatgaaattgactttcaggatgtcaccaccctgcatataacacacaaggacctgggtcagaggcccctgcagaacgagaccctgcatttgggcagcaaacagctcatttttacctggtgggagccctggcaggactgcaaccgctgtgaggagccgggcgagtgtaaacgcctggggtaccgctacattgaggagcctctggaggaagccatgccctgctggctctatctgggagaggtgctggtgtggtctagccgcttgcggcctgagctgcaggtggaagcctgccacgtccagtgcaccaataacacacagttaagggtggattacgtcatttttgacaacttcaggctcgatgagaagacagaatttgtgtggctcgactgtcccttaggatccatgtacaggcccgtcaactggcgtgccaacgacacccccctgacgtgggagagccagctctccggccaggacttcaccacctttctggacccctccaccggcggcaggcagctgcaggttttccagccggccgtctacaagtgcttcgtgcagcaggagctcg

SEQ ID NO: 368309 - DNA, 1022 bp, Homo Sapiens
  misc_feature (867)..(882): n is a, c, g, or t
  misc_feature (905)..(960): n is a, c, g, or t
tggaagggggctcgaagacgccttagccccccgtgaagaaaaggcttccctccctcccagctccaaatacggtccctgtgatctgagaacattacggcgggcatagagtcgtcttttctttaatggccgtgtagtcgcggcacagccgagggtttctggaattgccttaaacgtatgcgtttgaagagcgtacccttttgtcggagcagtcaccttggagggaccacgcaggctatggcagcccgggttcagcatgtttagggcgagggtgtgctccatggggacctgccttctgatccgttttaccaggcatatatttaaaaaaatgtgtcttcctttccaagtattcacatctttttctactgaccacaaatcagatttaattcaactcacatttattgaacaagctagcctgttttgttttttcactttattcctgcaacagccacgtgatagagggattactatccacgtttcacaaacgataaaattgaggctgccacctgatgttactgaagtcctccacccaccttctttcgttcttttttaagcgtctactatcggctggggatggaatagttcgcgagtcagtttctgccttctgatggaggcagaaatttaaacagccaacacggtaaatactccagagctgcaaaaccacgaagtattttgggagtggaagcagggagaaggtggagggctgactttccgcgcacagggtacaggcgagaagaggtgagatctcgggaaatgcagtcaagtagttcagtaagactcgaatgtgacattgggttgcagaggtgggcagtcacttaggtatatttaattggaaatatatcctcaagtgtcacctcttccaagaagccnnnnnnnnnnnnnnnnccctcttcctctcataccactannnnnnnnnnnnnnnnnnnnnnnnnnnnnnnnnnnnnnnnnnnnnnnnnnnnnnnntccaggtgttggggacacagcagctaaaaacaaaacaaagcaaaaagatcggcgaggcgggt

SEQ ID NO: 368310 - DNA, 728 bp, Homo Sapiens
tcctgggacgcggtctcgggggcgggtccgcccctgaggcccggtgacccttcgcccggggcaggctagcgctgtgtgcgcccacggaagcacccgagcgaccggagaaagaaaaagtggtcaaggggacctccttccaggctctacgcgcctctcattcagagaggtgaggtcaggaaaggggaaggacgaagccccagagcaacagaagtcaggcggtgccaggaacactgagggcggagccaggggaaggcggccgagcgcggccccctctcctcccgggccggggcgggcccgaggcctcgatccgccttccccgcgccgtcctggtcacggccccgcggggcagccatgcctggccgtctgctgcggggcctgtggcagcgatggcgccgttacaagtaccgcttcgttccctggatcgcactgaacctaagccacaacccgaggaccctccgatatgttccagaggaatccaaagacaaagttatctcagatgaagatgtcctaggaacattactgaaagttttcaaggctctattcttaaatgatttcaataaacaatcagaaatcttgactatgcttccagaatctgttaaatcaaaatatcaagacctactggcagttgaacatcaaggggtgaaactgttgaaaacagacatcaacagcaaaagtacctttaaacccagaagacattctttacaagacttgggtttcagtgttgccca

SEQ ID NO: 368311 - DNA, 922 bp, Homo Sapiens
tctgaggccaggagcgctgcgacggagccttgaccgccgttgcccggccctctcccgcgcagccccgggcttccgcaggaatattgggaaaccaaaatgaggcacaatcagatgtgttgtgagacaccacctactgtcactgtttatgtaaaatcagggtcaaatagatcacatcagcctaaaaagcccattactctgaagcgtcctatttgtaaagataattggcaagcatttgaaaaaaatacacataataacaacaaatctaaacgccccaaaggaccttgtctggttatacagcgtcaggatatgactgctttctttaaattatttgatgacgatttaattcaagatttcttgtggatggactgctgctgtaaaattgcagacaagtatcttttggctatgacctttgtttatttcaagagggctaaatttactataagtgagcataccaggataaatttctttattgctctgtatctggctaatacagttgaagaacgatgaagaagaaaccaagtacgaaatttttccatgggctttagggaaaaactggagaacaattgttccctaatttcttaaagttaagggaccagctctgggatagaattgactatagggctattgtaagcaggcgatgttgtgaggaggttatggccattgcaccaacccattatatctggcaaagagaacgttctgttcatcacagtggagctgtcagaaactacaacagagatgaagttcagctgcccccggggacctagtgccacaccagtagattgttcactctgtggtaaaaaacgaagatatgttaaactgcgattgtcttcatcatcatctttatccagtcatacagcaggggtgacagaaaaacattctcaggactcatacaactcactgtcaatggacataataggtgatc

SEQ ID NO: 368312 - DNA, 868 bp, Homo Sapiens
  misc_feature (741)..(741): n is a, c, g, or t
  misc_feature (781)..(781): n is a, c, g, or t
ggggttgcctgagtaaccgtatgatggtggtggtggtggtgtcttcctgtctcaacgatacctattttctagtgctgagatcctgagacaatgaatcatagtgaaagattcgttttcattgcagagtggtatgatccaaatgcttcacttcttcgacgttatgagcttttattttacccaggggatggatctgttgaaatgcatgatgtaaagaatcatcgcacctttttaaagcggaccaaatatgataacctgcacttggaagatttatttataggcaacaaagtgaatgtcttttctcgacaactggtattaattgactatggggatcaatatacagctcgccagctgggcagtaggaaagaaaaaacgctagccctaattaaaccagatgcaatatcaaaggctggagaaataattgaaataataaacaaagctggatttactataaccaaactcaaaatgatgatgctttcaaggaaagaagcattggattttcatgtagatcaccagtcaagaccctttttcaatgagctgatccagtttattacaactggtcctattattgccatggagattttaagagatgatgctatatgtgaatggaaaagactgctgggacctgcaaactctggagtggcacgcacagatgcttctgaaagcattagagccctctttggaacagatggcataagaaatgcagcgcatggccctgattctttttgcttctgcggccagagnaaatggagtttgttttttccttcaaggggaagttgtgggnccgggcaaacactggctaaatttactaattgtacctgtcgcattgttaaacccccatgctgtcagtgaaggactgtggggaaagatc

SEQ ID NO: 368313 - DNA, 605 bp, Homo Sapiens
cttcattcctaatttggaaattaaagtttacctttctgttaatctatgtataaatgttacgcggagttattaatgtggattttaaaattgtaagcaatagaataggaaataaaacaactacctaatacaaatatttctgataagactacaaatatctgactgagctggggattaaagtagaggtaactgtatcttaaatgagtatgatttccttgtaagttaaaaaaattgaaatttaattgtagacttcaatagtccaagttttgaaggatgtttgagctttgtataatgccatttatacctgcagttttacagataatgtttgactgcagtgcctggaaattcctccaaagtttgccttcatctctcctctacagtttggaggtgatggtgcagcagtggaacatctcttgatgcaccacactacttgtgttctgtgaagtgatgaaagtataactggttctagtttgcacactacacacatagttttgtgaagcttcagaaatgttttttcttttccttgtggccaaaccagtttgttaatctgattatattcacctgctaatgatactaaagttaatgtaataaagcatttaaaaattagc

SEQ ID NO: 368314 - DNA, 1424 bp, Homo Sapiens
gttacatttgtgtctagtccagccacgcgggcacaaatattacactgtctgtttatatgtcttgttgttacattgctgtagatgtttacatattgaatatcgctgttatccatacgtttcttttatttatactgctaattaccttcgatatgccatgtactttacgtgatacatgggtactatacatattcatatgtgtggtttatctatgattgtctatttatcgtctcgctttggacaaggatcgttgctctctgtacttgacatcaatatcattgtattgttcgtttcacggatgaactcgtatggcatttgtcgctcatgagctgattgtatatcgtcactttaatggatcttggtagtttgtaatgtttattagtgctagtggtattacactgaataaggactagagctcccgttttaaaggcagctggttgaagtttatgcatatctagttgtatatctactagctgcatgccccttacaacgaccagtatacaggtttagttattagttttagccttcactattgtacttctagggcagcatgttcaatataatgtatataaatccctcatacataatgtaagggtatattatatatgtacacacttttactcctcagttcaagcgaacttctttagaagtaaagtacagtaataacccaaagagttacacgtcttcccagtaaaatattctaatgtgtttaaaaggtgcatattataaagagcagcctgtttttctgtcaatgtgaacatgttcagtctcagcagcctcagatatcacagtccatggatggttctgcatgttctgcctgggtcctcaggaaaggaaccgggcaggtagggacaaaaccatgatactactaaacactctctgaatacgtccattttccctgagcttccttgagcttcttgcagagggcctcgctgccatgaggatctggcttcacatctctgagagatcgcctgggggaggggaggtggaatggctctggcttctccaaccacacgcgacttgtgtgtcttttccctttctcagccaagacgatgaagcagtcctgatgcgcagggtgcaggggcctcggccagtccccgcacaccttccaagtccaaagaagttcctggcctcctgcttggtaggagaggaggaaccttgggctgaatctgacatcatcccttgccagttacaagctttgctttctaaggccacctgggaacactcccgggttaccaaacctgagcatcgtgggcaccacgaagagcttatctttcctctcctgctcagacacccttaagcccactgttgcagtggcagctgaggggttcagaggatagcaccatgatgactgacagctcgaggccccacttcttgcaggaggtgacccacctgtttccggttagccatacatctgcttgaactcc

SEQ ID NO: 368315 - DNA, 1174 bp, Homo Sapiens
  misc_feature (368)..(368): n is a, c, g, or t
  misc_feature (373)..(373): n is a, c, g, or t
  misc_feature (433)..(445): n is a, c, g, or t
  misc_feature (773)..(773): n is a, c, g, or t
taaatgccctgcaccaataggtctccccaccttggtcaagaggttcagtgtatgtgctggcggcacactttcaatgttgtggcaagtagtttaaaatattttctaaaccttcacgccttctgtttgtacagaacctcagtgtcagctacaggtgaaatataagaactttctaacgtctttcttgggcatgcacaccattttgcaatatgcgtgtttttccagattcccaggaatatgtcaaagctcttgaaagccctttacaggctactcatttcccagatttttcttttatggtttttggtcttattctttgccccaaccattatcactttctcagccctcttcaatttaaacaattgctgctgatntgttntggaaaatgcctcaggaaaagattattcacactgagtgaactctgagtcaggtcaaattnnnnnnnnnnnnngtcctttccaggtaactgacagacaagtcaaatagtaacaattttctgaagggggaattcttgagaaactctaaatcaaatccatcccgttttctctgggaatggctatgctgataatttttacagcgtgatttcaaggttgtcggttcccagtgctactgcaaagctgtgcagaaaggaactatgaatacaggccaagaaatatttccacagaagattaatcggttaatctcctcaagtccatggggacttcggctcaaaatattccaaattcacttttcctatgcattattctattcttaatgactcagaagatgttgctggtgtncctcttgggaaaacggctcatcgcttttcttacgtctgatttctttctcccctctgttggtttgccacagatttcacttctttttaacaagttcaaacacatactaataccgatacacttatacagatatgcaacacaccacaggggcgggccgccatgcagagaaccactaccgagaggggcgcgaccgcacgacaaacaaccttgccgtgaccgacaggtggccacaataacacgcagggtgattatagacgagcagaacaaacgagcggcgcatcaacaagacgcgcacgcggaaccacacggctaagaggacccccgggggagacgaacacccctctcggtggggtgatgaaaaaaacacacactccgtgtagatagaacagccaggacactgcagg

SEQ ID NO: 368316 - DNA, 1124 bp, Homo Sapiens
  misc_feature (941)..(957): n is a, c, g, or t
ggaattcccgggatcggcacccacctcggggcagcggcttcacctccccgttctcctcccgggaggccccgccggcctctcgggccccaccgagaccgtgcctcctcctctccttctcccgcttctccttaggtctgcgcgacttggcgttagccgaggcagcggcggcggcggcgggcaggaggagatggtgaggctgagcgtgcagcagcgtaggagggaccagcagtttgcgcggcaccggctgagacaaggaagcggaggctgaggagggaacggccgtgccagcggagaaagagaaactgctccgagaagaggacggggagggagcagcagacagaggggcaaagctccaagacgcggggctgccatagctctgaggcgaaggtgctgccggcggctgcagctgcctgctgttcccgccgctgcccccttctccgttcactctccgcggatgccttcttctcctcagtccggaccttcttggcggacagagaacccggagggtcccgggaggagagttgcagcttgccaaacggttctttctccgagacggtggcggtgggggccgcaggcagcgacacagtgcacgggggctcggcggttccgaccataatgcgctcctgtagtatatactctcctccgcatagccggagcgggggcagggggcgggccctccgcgaggggatagggaaggggcggaagcggccaggccaacaggccggcaatggctccaatggggcaagaccacgctgaggcgatccaacctaagagcccatcaaaggcacaaacattcaaacgaaagggcgggatcgccacaggagacctcttccggagtcagagctcggcggggtgcggctagtggcggaacgcgctgccaggggaggctttccactgtcgctggcgtgactcccgtggcccggggggatccagggaagaannnnnnnnnnnnnnnnnagatctgccatggcccaaggtaacgatcgtctctgccggcaccaaaactgtttaaccttgaccactttcccttcccctttttccctggggggccttttccccctggaatttggggcgttaccaaagctggaatttccgggaatggccccgttctcaaagaaaaaaac

SEQ ID NO: 368317 - DNA, 884 bp, Homo Sapiens
  misc_feature (215)..(215): n is a, c, g, or t
agtctattcacatggattctgaatgacgatcaggaagatattccttatctggagctaccatgatttcagtttcttgatctgattcctaagaaagtcaggtcgttctgaggatcaatatcacgaactgtgcttttggctttcattgtcaggtgatgaagaaggcctgcatattgaacagttgttgagtgtccaaggttgttcggatgggaataccntattatgaaatttaattttggttaatatttttgtctgattagaaaagtaataagtacagtgtggaagtattggaaaatactgatagttgtaaagaagagaaaaaagtgatggcttatccctctctggtaacaattttagtttatttccctcaaatccttttgtcgctacgtagatttttaagtatagttgtgtgaaactatatttacaaacttgactgttgcttttttcttcacaaaattataacatacaagttgtccttgttgacaatgtcatcaacattatttttaataactgcatacttcactattttatggacatataatcaatctcctattgtttggtcatttggtaccttatattttttatagctaatggggtgatgatgaacatttttgtgcataaatctttcagaagccattaactgactacttgagtactaagttaacatatttttatatgaaatgcactcccctgaacatcttgtctatagtgagtctgctctgaagttcttgctctgtgacatggtgttagtcttcttcccttctgcatttacaaccatagttccaataacccctttatgactctggatcctctttaaggtttcctccacctctgccatcgcggaggccgcgaaactctgggctcaggccggcggcacagcctcccgg

SEQ ID NO: 368318 - DNA, 1073 bp, Homo Sapiens
ctcatttcctgtgtcctctctttctttggcaatccaaagaaagtcatctttcagattgtctgctcagagttcatctcaaagcctggcaaggattggagaggtcaataagagtcagcgcctttaaaaagaaatctactcactcttctgtgtgcataaggccgagcagaggttcttcgtctcaagaggaactgacttctgttgagcactcaacacgccacagagaccagccatcttgcaacctcacctcacagcatggagagaggagaccaacctaagagaaccaggaatgaaaacattttcaactgcttatacaaaaaccctgaggcaacttttaagctgatttgctttccctggatgggaggtggctccactcattttgccaaatggggccaagatactcatgatttgctggaagtgcactccttaaggcttcctggaagagaaagcagagttgaagaacctcttggaaaatggacattctccccagttaagtggatgaagtggttggtgctctgcagccagtcatccaggataaaccatttgcatttttgggccacagtatgggatcctacattgcttttaggactgcactaggtctaaaagaaaacaatcaaccagaaccattgcatttatttttgtcaagtgcaactcctgtacattcaaaggcctggcatcgcattcccaaagatgatgaatcgtcacgaagaacacaataagtcattaccttatggcaatttgggaggcaccccccaaagcattttgctgaagccaagcaatttgtgaaacaatgtagtcccatcataagggcagatctgaacattgttagaagttgcacctctaacgtaccatctaaggctgttctttcctgtgacttgacatgttttgttggatctgaagacatagccaaggacatggaagcctggaaagatgtaacagtggaaatgctaaaaattaccagccttccagggggtcacttttatccttctggatctgcgaacgagaaattaatcaggaactcctaatccagggcctagaagtatcatcgatattcaatttttaaaatatttcccttt

SEQ ID NO: 368319 - DNA, 1127 bp, Homo Sapiens
tggaattgaagcctttgagaatgaaatgggattcctgcaacagtccaacagcttgaagaggtgctgggaagacaaggtacttatacatgccctgatcctccgtctctatgtggatatctgcatccagcgtgtcttgctggcggcaaccatgtgctctgcatcctcctttttgctcgtcgcagggtagaacacaatgttgtcaatggtctgtatcaattgccaactggaccacacacttgatgaggaggctggcaaacagtttctgatttgcgtatggtctacccttccagctgtcatctgttgggttagagagctggctctgtcccctctcagagggatttttatctatgctgcttaaagactggcggtccagatccacatccaaatgcttttctgatgaatcttcctccattcctacaggtctccatgtcagcaaaacatgtgggatggttgttttgaaaatatccaacatacagttgcaggtttcatcccagacttcaggactgaatttctctccattggatataactaagttttctaaagcaatttgtactctgatcgcgccaactgtttcataatcttgtttgacacaccactgcaattgtgcaaatacatcagaaagaagaacttcattcaaagcttcataaaactgggtaaaaacatcacaaatagcataaagtgcgtgattgcaggttgttgtcatccactcagatttctctgacagttgctcagggagtttcatattgtcaaaaatccgaaacacaattctgaacaggtcctgccaccagtgcttttcaaaggtgtggccatagctcttcatgatctcaaacatgactgtgagtccccttgttcgtacatctaacttgcatctattaatgatgcaggagagttcgaataagatggggaaccagcctcggacccagactctgtcaccaggagctacattcatgtcatcacttgtgtattcttgtagcacccgaggcctctcagagacgtatttgccacagaagcggatgagccgaatcgcttccatgctcgtgtcagggaaagcggcgttgcaggcgaactctgataagcacttcacagcatcctgaaaggaatcgatggctgcaggaaaatggtgctcc

SEQ ID NO: 368320 - DNA, 1558 bp, Homo Sapiens
  misc_feature (847)..(847): n is a, c, g, or t
tgcccggcgtggatggtagggctcgagtgaagatggaagaactggagcaaggcctgttgatgcagccatgggcgtggctacagcttgcagagaactccctcttggccaaggtttttatcaccaagcagggctatgccttgtaggtttcagatcttcaacaggtgtggcatgaacaggtggacactagtgtggtcagccagcgagccaaggagctgaacaagcggctcactgctcctcctgcagctttcctctgtcatttggataatctccttcgcccattgttgaaggacgctgctcaccctagcgaagctaccttctcctgtgattgtgtggcagatgcactgattctacgggtgcgaagtgagctctctggcctccccttctattggaatttccactgcatgctagctagtccttccctggtctcccaacatttgattcgtcctctgatgggcatgagtctggcattacagtgccaagtgagggagctagcaacgttacttcatatgacaagacctagagatccaagactaccaggagagtggggctacgctgattcgagatcgattgaagacagaaccatttgaagaaaattccttctgggaacaatttatgatagagaaactgccagaggcatgcagcatcggtgatggaaagccctttgtcatgaatctgcaggatctgtatatggcagtcaccacacaagagcgtccaagtgggacagaaagcatcaaggcgctggagatcctcactacctcaaaacagtgcttccctgcaaggaaatcgatagccaatgtgtaaaccagccagaaaaactggtctcctcagccccaaccctctcagcacntgagaaagagtccacgggtacttcaggccctctgcagagacctcagctgtcaaaggtcaagaggaagaagccaaggggtctcttcagttaatctgttgtggcctcagctgctgaggatggacttggagaatagcttccaagcttcaccttgaaagaagcttacatggcagcaatatttctaaaatagtgatacagtcagaggcctcctgtaagggcgagagaactgaagttgatgttgacaggcccacagggaattggccttccctgttcaagtggaagccagtctctgagaatcccgtgctctcctctcttttggtggaggttctgtaggttcaggtttctaccatggactttaggtatatagggcaagtcagcaagaaagcaccacacactcaggaagccttgtctacctttccctagcgtctctagccagccagccccagatactcctcagagacccacttctctcttttgcatggaataaaaagcactcacagtccctgcttttgggattacttatgctgtggaactcataacccaattcacttccttcactgggtcccaccccattgttgtctctggatgaagtctagccatcagtctggtccttcagattcttcgtaaacttttctgcagttgccagagctaagtctccatttggaaactttgatctcaagaactctcttgatggatcccgggaattccggaccc

SEQ ID NO: 368321 - DNA, 1091 bp, Homo Sapiens
ctaaggtagcgaggcctgggtggcgaattcggcacgaggctctaggcctttcggtttgcgcgagcgggcaggaaagcgtgcgtgcggctaagagagtgggcgctctcgcggccgctgacgatggaagaactggagcaaggcctgttgatgcagccatgggcgtggctacagcttgcagagaactccctcttggccaaggtttttatcaccaagcagggctatgccttgttggtttcagatcttcaacaggtgtggcatgaacaggtggacactagtgtggtcagccagcgagccaaggagctgaacaagcggctcactgctcctcctgcagctttcctctgtcatttggataatctccttcgcccattgttgaaggacgctgctcaccctagcgaagctaccttctcctgtgattgtgtggcagatgcactgattctacgggtgcgaagtgagctctctggcctccccttctattggaatttccactgcatgctagctagtccttccctggtctcccaacatttgattcgtcctctgatgggcatgagtctggcattacagtgccaagtgagggagctagcaacgttacttcatatgaaagacctagagatccaagactaccaggagagtggggctacgctgattcgagatcgattgaagacagaaccatttgaagaaaattccttcttggaacaatttatgatagagttaaaagatatacccatcaaaactggagacccggcatattggcctagaactctacatgctgcatcggtctcttttttatcatgaaactgccagaggcatgcagcattggtgatggaaagccctttgtcatgaatctgcaggatctgtatatggcagtcaccacacaagaggtccaagtggggacaaaaccatcaaggcgctgggagatcctcatacctcaaacagtgcctccctggcagggaatccataacccaatggggtaaaccagcccgaaacaaactggtctcccttaagccccaaaccctcttcaggcccctggagaaaaaatcccacggggtactttcaggcccctctggaaaagaacctcaccctggtcaaagggc

SEQ ID NO: 368322 - DNA, 836 bp, Homo Sapiens
ccatacactccactagaatggcctttgtcacaggagattttcaaacagaagagcatgctgtcaggggataggtccagcctggctgtgcagagatggccagacggcggaaggggtggtaagcagcatggtcaggaacatcaggaggtcctgggagtccaagttgcctggagctgagaaccccaggtctgaaattcatccgggagccagcagctccagcttgtctattccatcctcttcttggagaaaaggaagcctctggttttggtatttttgctcctggagataatatttgaagaaagtggaacctgagtggacattcctgtttctactttcgccttccatgggcttctcagcaacttgagactgctcttggtcatcgggtttggtgactaccatagatgtgagaggcgtgacaaagctgtaggcaagtgataaattcagcgcttggttccggagggcctgctgatcagcatcggatgcggacgacagtttgctccagcagctgctggatagtcaggtatgcccagagcctctccatgaagttgtggaagatatacttggggctctggaactccgcctcctgctctgccacactggactccgtttggaaagtgatgttctgtgtaggcagcttcccactgactgtggctgtgagcacatcaggcccccggtcctggagcttcccagccaccaccatctctgagcccttgaagaggagccggaagttgttctgagtgacctcctccacggcattgcttgggtactcgaaggtcactgctgtcagcagtgggttggccacttcctggtagaagtcctggagctgcagggcagagtct

SEQ ID NO: 368323 - DNA, 784 bp, Homo Sapiens
caaaaccaggtagacgagttggagcggaagttcaggtgtcagcaggagcagctgttccagaggcaggcaggagatgaccagcatgtcagctgagctgaagatgcgggccatccaggccgaggagcgcctggacatggagaagagaagatgcagacagagcctggaggactccgaaagcctgcgcatcaaggaggtggagcatatgacccgtcacctggaggagagtgagaaggccatgcaggagcgggtgcagaggctggaggcggcgcggctgtccctggaggaggagctgagccgagtgaaagcagcggcactcagcgagcgtggccaggctgaggaggagctgatcaaggccaagagccaggcccgcctggaggagcaacagcgcctggctcacctggaggacaagctgagactgctggcgcaggcacgggacgaggcgcagggcgcttgcctacagcagaagcaggtggtggccgaggcccagacccgggtcaagccagctgggcctgcaagttgagggcctgcggcggagcctggaagagctgcagcaggagctgagcctcaaggaccaggaaagggtggccgaggtgagcagggtgcgcgtggagctgcaggagcaggaacggccggctgcaggcggagctggcggctcaggaggcgctgaggggagacaggcggcggcctggagcgccagttgaaagttgttggcgagcgaacaccgagaggcgctgctggacagggagagcgaaaaggcgtctctccgggaaaagctgcgggtccg

SEQ ID NO: 368324 - DNA, 991 bp, Homo Sapiens
  misc_feature (924)..(924): n is a, c, g, or t
aagcgaggcctgggtggcgaattcggcacgaggccaagcagttcctcgacttgatggagactattgataagcagcgagaagagatggccaagagcagcagggcgtcggcagcccgtgtagggcagcttcaggaagccctgaatgagaggcactccatcatcaacgctctcaaggccaagctgcagatgacagaggccgccctggctctgtcggagcagaaggcccaggacctgggggagctcctggccacagcggagcaggagcagctgagcctgtcacagaggcaggccaaggagctcaagctggagcagcaggaagctgcagagcgggagtctaaactcctcagagacttgtctgctgccaatgaaaagaacctgcttctgcaaaaccaggtagacgagttggagcggaagttcaggtgtcagcaggagcagctgttccagaccaggcaggagatgaccagcatgtcagctgagctgaagatgcgggccatccaggccgaggagcgcctggacatggagaagagaagatgcagacagagcctggaggactccgaaagcctgcgcatcaaggagggtggggagtccgtgaggagaaggtagggaggcccgctctccactctggccccacaatccctgcccctgagcaggtggagcatatgacccgtcacctggagggagagtgagaaggccatgcaggagcgggtgcagaggctggaggcggcgcggctgtccctggaggaggagctgagccgagtgaaagcagcggcactcagcgagcgtgcccaggctgaggaggagctgatcaaggccaagagcccaggcccccctgggaggagcaacagcgcctgggctcacctggagggacaaactgagactgctggcccaggcacgggaccaggcgcagggcgccttgctacagcanaaacaggtggtggccgaggcccagaccccgggtcagccaactgggcctgcaagttggagggcctgcg

SEQ ID NO: 368325 - DNA, 528 bp, Homo Sapiens; identical to SEQ ID NO: 264688

SEQ ID NO: 368326 - DNA, 618 bp, Homo Sapiens
ctctccttcccaccgcctaccagctcctcccaacaggtcctggccagtctgcggaccgggcggagcaacgtggcggcccttgcccgccagcaatgcctaggagcagccaattcaagcggatcctgaaccgggagtgacccaactgtccgaaaccagccgctccgggaaccaggtgtccgaagtacatctcccggaccttccctggaccagcagaccgaggtggagctgcccaaggtgaccgctgaggaggccccacagcccatgtcccggatcagtggcctacatgggctctgccacagtgccagcctctcctcagccactgtcccacgctttggggtccagactgaccaggaggagcaactggccaaggaactagaagacaccaacaagtggggacttgatgtgttcaaggtggcggagctaagtgggaaccggcccctcacagctatcatattcagcatttttcaggctgctgttcacagacttggaactcctggctgccctctttgcaagcgccatccacgacgtggaccatcctggggtctccaaccagtttctgattaacaccaactcagagctggcgcttatgtacaacgacgcctcggtgctggagaacca

SEQ ID NO: 368327 - DNA, 935 bp, Homo Sapiens
ctttcatcactggatctatccgggtgttcgggcagagtataatcagaggtgagtcgtttcctcaaggcatatgctggatgaatagtcacacatctcaaagtccaccatggcaagctctgaatagctgtcagtttatgtcttacattcactaggataatgcgtgctaataacagtagtataggcttcgaggtcaggctgtagattgattcaccatctagagtgagcaggctcagaacaaatgcatccagtcctttaacctcactgaattgctggaacaaaacagatgacaaaaagtcctgagggtgtaagtcaacagggggccccgtccagttgctctgaacaaaaagttgcaaactgctcacaccaagtagaaatatcaactgttgtctttccgttgtgtccaaatctgttgagtaatccaggaatgttactacctgcttctccaggtagctatcaatcttttcttcagcggttgttgttgaattaaaaatattttgagtcattgaatttaagaatatggcttcatagttcccttccagcagcaattgtaggaaagatccactctctgaaccgacgaccccctcctgtttccattgctgccgctcagcctcagtggggaatcccctcagaattgccagctccggggtccacatcaccccagacaccgctgcagccaaaacaggctcccacgagggccacacgggagtcaacaaaagaaagtgaaaacaggagagtccaaaggcgctgaaatctagtggcgacagttaccgtaaatacacctgcggccctagaattccatgtgcggatactacctcaaggaggcggccataacagcagcgcggggcaccctgggaaaaacacgcacgctctctggtctggcttccgcctaggagaagaacccgagcttgagtaaggagcctgttgggcactccgct

SEQ ID NO: 368328 - DNA, 1094 bp, Homo Sapiens
cgcgaggctggtaccggtccggaattcccgggatccgagtcaccttttccctttctacactccacactctcagtcccccaccccgcccctttccaagcgtgtcccgggccgcagcagcagaaaccgcaccatctccacccccacattctcctcgcgggaagcgcagcagtgcctccaagggttcttaaagcagagatgaataatacggcagctagtccaatgtctactgcaacttcaagtagtggaaggagtacagggaagtctataagctttgcaacagaattacagagtatgatgtattctttaggtgatgctagaaggcctcttcatgaaacagcagttttggtagaagatgtggtacacactcagttaattaatctgttacagcaagctgctgaagtttctcagctgcggggagcaagggtaatcactcctgaagatcttctgtttttgatgcgcaaagataagaaaaaacttagaagactgctaaaatacatgtttatccgagactacaaatcaaagattgtcaaaggcatcgatgaggatgatcttctcgaagacaaattgagtggcagcaataatgcgaacaaaagacaaaagattgctcaggacttcctcaactctatggaccagacaggagaacttttagcaatgtttgaagatgacgaaattgatgaagttaaacaagaaagaatggagagagcagaaagacaaactcgaattatggattcagctcaatatgcagaattctgtgaaagtcgacaattaagtttctccaaaaaagcttccaaatttcgagactggttggactgcagcagtatggagataaaaacccatgttggtccaatggaaatcttagcataatttagcggatgaaactgtggcaccggtaattggatctgggctcttcttgggaagcaagacattggtaccaagggcaggggaacccctttcagccaattccatttcttggaactttctttcgggatccccaactcttctggaaaacactggacacccggtggggggttgaggcttccccggggtaggccatccagccctgggccaattaggaaaggccattccaaggttac

SEQ ID NO: 368329 - DNA, 674 bp, Homo Sapiens
ctgggaaagtctaggggtgggggcagtctccacagcctcccacaagggagttaccaccttgcggcacttctgggtacaagtctcctgctcgtggctgtattccacagtgtagaacttcatatcttgggcttagagctgaattttctgttacgcatgtggatgctccaggtgaagtgcggagcttgttaacagacgtgcatgcctggcctgtggactgtgcagtaagtgttgaaaaaggcactcttccctgacttgatttctttctgcatctcctcccaggggcccgctcctgcttaaaaacaccatgcatgcagactgctgctgggaatgtgacagttggctgttggagacgaagggggcactggcattgagagacctccagactggacatggccctgagtccaggggctaacctggtcttccatgaagacccaaagatgacaccaagtcccccctcctgtggggccccgggattagggtctggtaccatccctcaggcccacccagacatggctcaggtgcctatgttgaatctgctcccaagtcctggcttggctctcgttccagatcttaatgattctttgagtccagtctcagggagaggcctcaggcctggtgtctgaaaacacccccagacctgatgacagcagagctatcgctccagcctccctcca

SEQ ID NO: 368330 - DNA, 908 bp, Homo Sapiens
tgggaaacttcttctgtctcagaatgtggaaggcattcagcagtttcagcttagaggaggggctaaagctaaatacctcgttcgactgaaaggaaacaagaaaggagcatctatgttgaaaattctagctaccacaaggcctactaagcagtcatttccctctcttcctgaagacacaagaatcaaagcctttgacaagctccgtacctgttcctcggccaccgtggcttggctaggcactcaggaaaggaacaagttttgcatctacaaaaaagaagtggatgataactacaatgaagaccagaagaaaagagagcaaaaccaatgtctaggaccagatataaggaagaagtcagaaaaggtcctctgtaaatatttccacagtcaaaacctgcagaaagcagtgaccacagaaacaattaaaggtcttcagcctggcaaatcttacctgctggatgtttatgtcataggacatggggggcactctgtaaagtatcagagtaacggttgtgaaaactagaaagttctgttagttaccttcttatagagatatattatgtagaactccaggagggacattaaatcactttaagtataaactgactactcccacagttgagagaagttgtgacctgtacttgtactatggaaggaaggatatcaacgtgtgtatattgatgtttatataagtaactcttgaaggagacttgttctagcgtgccccatggtacctagtgtgtgtctgatgcccggttgggtgtcaaagattagagggcctcttggaaggaacttggccattccttgctttgaccactgcatgaacctgcttctaaaattattttattaccttaaaaatttaaaattatgccattcatttgcacaaaaccacaaatgcaatcatcctctta

SEQ ID NO: 368331 - DNA, 1148 bp, Homo Sapiens
  misc_feature (1034)..(1034): n is a, c, g, or t
cggtccggaattcccgggatcgggcgggtgccgggggcggaagcgcggccacaagagggggcgattcaccgccgccccccgtgggacctgggtcctctacgcgggaccgcaggggccccgagtcgcgggttgggcaaggtcgcccgctccgggtcgctcggaagggtcatttcacggaccggtcgtctggggccagtgcgtcttgccccgcacggaagacccctcgcttcgaggacacgaaagcttttaaagtgaggattggctcgccgcgcctcccgcagaggggaacgccgcccggacccgcgctcctggggcgggggcctcgtatgctggcgttgccggagcgtctgcggcgctgaaggctgccgagacccagccacatcccccacaagccagcagcccggcagaaaattacataaaatgcagcgcttcgccgagggggtgcgagtcgggggagcagcgcgcagctgcggctgacggctcggccggatccatccaagcatggacaggaaaaacgggactggtggggaagagggtggtgcagacgggccgcagaccctccttaggaagagaagccggaaactagggagtcatgtgcagttagaatcctcttggaagactagtaggatgtgaggttggagaggtggacgacgaacagaaaaattccctagtcttggccaggcttttgacctaaatatgagtttcctccgcgcatccagcctgccctgctctggccccaaagtaccagcagtaacactcagtggtgtccctgccttcctggaatgggcgttaacaattctggattcttactttgggaataacctaaccccacattagacgttaaatggggttcgggtcaaacttcaagggaaggattcatgcctgggacttgtctttggctccccccgctttgccccttgagcaatccccaaccgggggggctccagggtccttacttataaaacccaggggaattccctcttgtaaaacgaataacattctgggcctcccccggaaacaaccgacgcgtgganaccaaaacactggggggcccccttttagaagatcttctcgcaggggcgccaagttttgaccgagaccccctctttttctttaaaaaaggagggcctcctaacgtgggaccgcta

SEQ ID NO: 368332 - DNA, 844 bp, Homo Sapiens
  misc_feature (660)..(660): n is a, c, g, or t
  misc_feature (662)..(662): n is a, c, g, or t
  misc_feature (675)..(675): n is a, c, g, or t
ggagcataaagttgggagtgacaccagagccttctgcaagatgcttctgattctgctgtcagtggccctgctggccttcagctcagctcaggacttagatgaagatgtcagccaagaagacgttcccttggtaatatcagatggaggagactctgagcagttcatagatgaggagcgtcagggaccacctttgggaggacagcaatctcaaccctctgctggtgatgggaaccaggatgatggccctcagcagggaccaccccaacaaggaggccagcagcaacaaggtccaccacctcctcagggaaagccacaaggaccaccccaacagggaggccatccccctcctcctcaaggaaggccacaaggaccaccccaacaggtgaggccatccccgtcctcctcgaggaaggccacaaggaccaccccaacagggaggccatcagcaaggtcctcccccacctcctcctggaaagccccagggaccacctccccaagggggccgcccacaaggacctccacaggggcagtctcctcagtaatctaggattcaatgacaggaagtgaataagaagatgacagtgtttcaaatgccttgaaacataatgtgatcatgctctaacttcaatataccaataaaataatcagcttgcggaaaananatacaaatatttnacattataaaattgtgggcccgcctcgggcctccgagaagactttttaaaaccatccgttttggcgccgcggggccccgtaagggaaaagtgaacatgggccctatgccggtttccctaaggaagatccccgggccatggacacaagggcttggggatccccccccaat

SEQ ID NO: 368333 - DNA, 200 bp, Homo Sapiens
ccatgggctcctgtgcgggtcaagcctcacctgatcagagtcgccacctgcttcatggcacgcagtcccatcgctcacccaagggctgaggagtgcatgcgcagggcgcaggactggcaggcagctccacctgcggcccggtgcaagatccactgggtgaagccagcggggctcctgagtctggtggggacttgcagatc

SEQ ID NO: 368334 - DNA, 954 bp, Homo Sapiens
  misc_feature (73)..(73): n is a, c, g, or t
ggttcttgtggcgatcagtctgttctgcagatggtcaaaagcttcctcaaagtccccgtacatgctctccccnatcacggtggggtggaagtgctcagagatgggattattggaacagtcatagaagaaaagcaagaatccaggatgatttggaaagagtccacactgaactcaaactgacgccgaatggagtcgacaaactttcagctccacgttcttcccagttcttgttggagagggagatcaggctccagcggtcagtgtccgtgcaaaccttcactagcttctgcacatatgcctccttcagagtgactggactgattttgagctttgttcacaccctctggcaggaagttcagaagggaacacagaaccacatctctaaccagctgaaattctgcctctgttggaagagccacatggaagatcaggtccaggtctttgcagcccaagccattgtctttgaccaaaacgtggccagctgcggagccattcagccggacgtcctgcactttgatgcctgcctcctccagccgactgcggacggtctggacgatgtccttcagagttatctccaaggttggaaagttgcctcgtccgtggataggtacaacttcagtcaggacctcatgcagccggctaacctgatcccagttgagcacgctgaaggacatgcaatccctggtacagctgctctcctctgccatcttcaggggatgttctggctggggaaactgggcaatagaagaggaggcgacagaggcaggtccttggcgtgggcaggccccagcaggagcggcgcgacctctacagcccctaggcagcggcaccgagtgagccgtcccgccgccgccccctccgttcttatacggcgggaccacgcccccgtccccgccctgagccgccctcccggggagccaggggcggggcgtggcggagccagtcccctcggac

SEQ ID NO: 368335 - DNA, 747 bp, Homo Sapiens
gggtcatcctccacagccgaaatgttggtaatttttgacatttgtagctctactcggtggtattcataaattgttcttcttcgaacattgggaatttgttggatcctgtggacaacgacaaatgcatcggacagtccgactttcactggatgattggttgaacttatctgtgtgaccaagacaggaatttctttgtatccaaagatgattcgtccatccatgagcagggttgcctggaatgtgaagcttcccaggttataattatcctggagatgtacatggtcccactggaccacaagtgctgtgccattatcaaaatatctgacagttgaatttctggatacactgggatcgaaatttgccattaaaggtgctatgtactgtgtggctgttagcattcgatgtacgacttctccagtgtatatgaaacccccggttgccacagtgatttcacgtaggaaccggcccataaaatggaaaatcgaaggacagattcactcttgcagcttgccgatgagtattggacaatattccatgaatcttcactttatctttttccatttggtctatgttcacccataaatcccggctggcagaatcacatggaccatatattcgagatatatagtaattgtggtctgtatcctcctgcaaaatatacacgatttagtctaattacgaagtctaccactgacatactatgtgaaaatacaccttcagtttttcttaaatcagacctgccaaaac

SEQ ID NO: 368336 - DNA, 617 bp, Homo Sapiens
tgagcgggcgggacgttgattgagttaatgaacttcacgcctcagcgtccaggtctgtaaaatggggtgtctaacgcagaccgtacagcccagctgggtttagcaaacttccgggagccagttggagcctctccccatccctagcggtgatcccagtgtgacgacatgccgcggggggtcctgcggaggccaccctagggcgttgctgctgcctttgggagtgtggagctccaaaccatgtcgctgagaggcggattctgggaggccgggatcctacgcgccagggggatagtgcgaggggtagtgggataaatcttaattcctccggtcccacacaaagcctggaaatccagactccgcgcctctagcactgcaggggccccgacctaagaaccacgggccattaactaataaccctgcgttacaccacaattgcgatggcaagatcacgggaatatatgccaggacatggagagattacattcttcgtcactatatatcactgcaggacaggaaaaatggccacactagtagatctattagacggctactccacattgctagtgtaggcataatgacctcggctatttctttgcaacataagaacgagaatacta

SEQ ID NO: 368337 - DNA, 1109 bp, Homo Sapiens
caaggtagcgaggcctgggtggcgaattcggcacgagggcgggggacgcgccgggaccgcgaggagcgcacgagccttcgaggcggtgaacgagggagggagcccagtccgccgcgggccatgagccaccgggcccggggagcccggccgcggtccgggcagcgctcagccggcgccccagcccgctcggccgcagctgcgcgcctgtagccgcaggtggctgcgatgggacggaagccatgaatggtgccggccctggccccgccgcagccgccccggtcccagtcccggtcccggtcccggactggcggcagttctgcgagctgcatgcgcaggcggccgccgtggactttgcgcacaagttctgccgtttcctgcgggacaacccagcttacgacacgcccgacgccggcgcctccttctcccgccacttcgccgccaacttcctggacgtcttcggcgaggaggtgcgccgcgtgctggtggctgggccgacgactcggggcgcggccgtgagcgcagaagccatggagccggagctcgcggacacctctgcactcaaggcggcgccctacggccactcgcggagctcggaggacgtgtccacgcacgcggccaccaaggcccgcgttcgccagggcttctcgctgcgcaacatgagcctgtgcgtggtggacggcgtgcgcgacatgtggcaccggcgcgcctcgcccgagcccgacgcggcagctgcccccgcgcaccgccgagccccgcgacaagtggacccggccgcctgaagctgtcgcggacgctggctggcaaggtgggagctgggggacattcaaacgcgagggggaccctgccgcttcatggggggcccgagaacccggccgtcgggcctccggggggctcggctccagggggagaagatgcggcctgtcgtctgcggcagggggtgtgtggccaaggaaacgccttcccgcctggggagttctttcgggcgggccccaaaagcttccagggcccccaggggtaagcatccccccttggtcagcccctaatttggaggggtccgaacacaccaagggccccctggaaaaatgccccgaaaaaaggaaaaacccctt

SEQ ID NO: 368338 - DNA, 793 bp, Homo Sapiens
  misc_feature (604)..(690): n is a, c, g, or t
cggtgagccggacgcaggcgtgcctgcgcagtgcgcggaggagtgctgttcgtgtgttcgagtccctgggttgcttcctggggtctgtggtgctgggtgtgctatctgcgtgtgattctctagcgagagattgtgggcgagtgaccgagtgggcaaggggccgtcactgtgtgtgcgtgattttgacagtgtgtggtggtagcttctgactccgcgtgggtcgttgaatgtatgactgggaccgtttagcggtggatacacaactgtgtgcggctgtggaagattgcctcatccgttacgttcccatttccgtggaacaacagttttaccagaaggtttcgaaggaaccttaaagtttggaagcgtaagagtttatctggcggctttggtgtcatcaaatgtgagaagccctggactttacacatcccgagccagtgtgatccagtatgattgggagtccgagtgccagatgccggtcaggacctgttatgctgggtctcagaatgcggaaactctccctgtccgaggtggaacagtttgtccttgagtgaggactggagtcctgagtgactcttttgatttgatcctgtttccctcaaacctnnnnnnnnnnnnnnnnnnnnnnnnnnnnnnnnnnnnnnnnnnnnnnnnnnnnnnnnnnnnnnnnnnnnnnnnnnnnnnnnnnnnnnntgaagctgcatcattgtctggggtaaatacctgaggttcgttgtctcacgccaagggaatcaaggacgtggacacacaagaaatggagtccctgtctgaccgg

SEQ ID NO: 368339 - DNA, 1055 bp, Homo Sapiens
  misc_feature (58)..(58): n is a, c, g, or t
  misc_feature (77)..(77): n is a, c, g, or t
  misc_feature (132)..(132): n is a, c, g, or t
  misc_feature (185)..(185): n is a, c, g, or t
  misc_feature (194)..(194): n is a, c, g, or t
ccaggattcctcacctgctggttgttcctcccagggttcggtgtcctcagtgtggctnaagggctcccagaggactncagggagtgtccccggctcctgggaggtacccagattggcagagactgggcaggncccagagagagggagggcagagggcaaagcaggaaaggggcctgccaccccancctgaggcntaggatgagaaagcagagtcacgtggactgagcaagacacaggccctgtgggaagacgcgatcttgcccaaaaagtggcaagaagggaccagaactcaggtctctgagagctccaccatttcagtggccccagggggtcctgtcttccctccccaacccacaggctaggggcctcctaggtaccctcagggtttcctgcctaccagttcactcctgcctccaggcaacagagaaaacctttacacagggcctcctggagaggaggccttaacccaggactctgaggactggctggtggccccattgcagcttctctgcctgctctaaaaccccatgtgaggccatcgggggctctgaaactaggcagcgctggggcagaggcttttagagcagaggatctcacgctttttggcacactgatgaaagctatggcctctcagaaaaatggcctttgcatataaacataacttaaggtggctcctagaccctaagaactagtctagactgagtcctccatttttggtccagagagcagaggtcaacagggcagaacgagggttagagttggggccctagtgcccccgccccaagtccagggagcctctgtcctgagctgtgcacatatgtgcacacaccagcccctctactgctccccacacacccagcctgcatcttctcaaatggaatccttgaggcagttggcctgggggcattcaggtcaaacaggaagaggaggagaggagaggcctatgaccttcatgtcctggtggctcccgcgggagcatgggaggtgcctgccctgagctcccatagcctcccgaccctggccggtagctctcagggaacttggatgcttccgct

SEQ ID NO: 368340 - DNA, 1240 bp, Homo Sapiens
  misc_feature (88)..(88): n is a, c, g, or t
  misc_feature (919)..(919): n is a, c, g, or t
  misc_feature (1120)..(1120): n is a, c, g, or t
gccccctggctcggacgcaaccactgtcagctcctccccctcctcctccttcatccttcctgacattcactcccttcccccagccaantggttacgtcaggcagacaggccgaagaaccaatcacgacgctgtgctcagaagccgccacgcggaaccggccgaatccgactaataggggcccttggagcggccacgcctcaaccgggcagggtagcttgggcccagtgggcggtgcttctcctgtcagcatgtgggcggagtagggcggggaccagcagccgcagagccgtcctcggcggtggcgacgacgacgacgttgctcagtcttggggtgggctccgcggtgcaggccgagctgcgcggagggctcggcgatcagcggcggcggcggcagtggggaggccgcagcgccatgggggggcgttagacaggctgcggcggccgaggcgaggggcggcagcggttatctggtccgcggcgaccttcggccgggcccgggggtgggaaggcctggggcgggggtcgtccctggttgcacggggccgcggggcggggctcgccggccgtcggggtgcaggaggcctgggccgctgaaaggagaaggcgccgtcggtcgccaggccctgccgccgggccgcttgacgacgacgctcccgcgggggccccgcctgaggaggacgcggcggccggtggcggcgaaggccgcgggaggcccgcggaggatggaggagcggaaggaggagggcgaggccgagatccagggagcacgggcccgagcactggttctccaagtgggagcggcagtgcctggccgaaggccgaacaaggacgagcagctgccccccgagctgcaggaggaggcggcggcgccgcgcagcccgagcacaagcagcagaagctgtggacacctcttccagnaactcggccaccgccgtggcccagactctacaaagaccgagtgtgtcagcagccaggactttctctctgggtccccttccaaaaacgcagccaccgccgtcaccaatctctacaaagaaagcgtggatacccatcaacgaagttttgatattgggaattcaggattgggctatcagcgacgcaattaagggatgtgttggncttggggttaaaaaacgcagaaggaactatttcgtcggaggaaggatttggattcaggctttcctgtgtggggaaaagtttccttccaccacggaaactcttaggaggctcccccaagga

SEQ ID NO: 368341 - DNA, 887 bp, Homo Sapiens
  misc_feature (87)..(100): n is a, c, g, or t
gtttgtgatagcaggtgcagttgagtactacagtaaacattcagtttcagaacttcttctcttacctgctaaaaccaaagagaaccnnnnnnnnnnnnnnacttctgattgttgaacagtcttaaggcagcattaggaagactggcgatttgtgtggagaaatgatggcttgttgttgtctatgcatactttgtgtgtccagtgcttacctggaattttgtctttcccaacagcaacaatggtgtggttggtgaatatggcagaaggagacccggaagctcaaaggagagtatccaaaaattccaagtataatgcagaaagcacagaaagggagtcacaagacactgttgcagagaatgatgatggcgggttcagtgaggaatgggaagcccagagggacagtcatctagggcctcatcgctctacacctgagtcacgagctgctgtccaggaactttccagcagtatcctcgctggtgaagacccagaggaaaggggagtaaaacttggattgggagatttcattttctacagtgttctggttggtaaagcctcagcaacagccagtggagactggaacacaaccatagcctgtttcgtagccatattaattggtttgtgccttacattattactccttgccattttcaagaaagcattgccagctcttccaatctccatcaccttgggggcttgttttctacttttgccacagattatcttgtacagccttttatggaccaattaggcattccatcaattttatatctaggcatatctgcggttaagaatcccatggatgtttcttctttggactattaacaaaatctgggggaggacaacaggtgattttcctgtgttccacatctaacaaagtcagggattcc

SEQ ID NO: 368342 - DNA, 1839 bp, Homo Sapiens
  misc_feature (1327)..(1327): n is a, c, g, or t
gcggtccctcggaccagcgctggaggcgcgtggtgtggacgcgcgcttcggagttggagggcggcgcccaggaccctggtgggagagtgtgtgcgtcgcgctggagggcgggaggcggtgggcgggaggtgccggtcgagggagccccgctctcagagctccaggggaggagcgaggggagcgcggagcccggcgcctacagctcgccatggtgcgccccctgaacccgcgacctgctgccgcccgtagtcctgatgttgctgctgctgctgccgccgtcgccgctgcctctcgcagccggagacccccttcccacagaaagccgactcatgaacagctgtctccaggccaggaggaagtgccaggctgatcccacctgcagtgctgcctaccaccacctggattcctgcacctctagcataagcaccccactgccctcagaggagccttcggtccctgctgactgcctggaggcagcacagcaactcaggaacagctctctgataggctgcatgtgccaccggcgcatgaagaaccaggttgcctgcttggacatctattggaccgttcaccgtgcccgcagacttggtaactatgagctggatgtctccccctatgaagacacagtgaccagcaaaccctggaaaatgaatctcagcaaactgaacatgctcaaaccagactcagacctctgcctcaagtttgccatgctgtgtactctcaatgacaagtgtgaccggctgcgcaaggcctacggggaggcgtgctccgggcccccaactgcctggagctgcggcgcctctgcttctccgacccgctttgcagatcacgcctggtggatttccagacccactgccatcccatggacatcctaggaacttgtgcaacagagcagtccagatgtctacgagcatacctggggctgattgggactgccatgacccccaactttgtcagcaatgtcaacaccagtgttgccttaagctgcacctgccgaggcagtggcaacctgcaggaggagtgtgaaatgctggaagggttcttctcccacaacccctgcctcacggaggccattgcagctaagatgcgttttcacagccaactcttctcccaggactggccacaccctacctttgctgtgatggcacaccagaatgaaaaccctgctgtgaggccacagccctgggtgccctctcttttctcctgcacgcttcccttgattctgctcctgagcctatggtagctggacttccccagggccctcttcccctccaccacacccaggtggacttgcagcccacaaggggtgaggaaaggacagcagcangaaggaggtgcagtgcgcagatgagggcacaggagaagctaagggttatgacctccagatccttactggtccagtcctcattccctccaccccatctccacttctgattcatgctgccccctccttggtggccacaatttagccatggtcatctggtggtgaccagctccaccaagcccctttctgagcccttcctcttgactaccaggatcaccagaatctaataagttagccattctctattgcattccagattagggttagggtagggaggactgggtgttctgaggcagcctaaaaagtcattctcctttgtgaagaaggctcctgccccctcgactcctcctctgagtggaggatggaaaaatactgcctgcactgccctgtccccggatcatgccaaacatatgggaataaagagatagaaacagaaagcacaagcacactaacaattatatccaaagaagactaacaagactctctgaatcacggaaagagtattataacataac

SEQ ID NO: 368343 - DNA, 649 bp, Homo Sapiens
  misc_feature (516)..(528): n is a, c, g, or t
agggaagtggaagagaaagggaattttggaatttatttctttaaaaataatgcaatggaaatatatcaaaacatgtaaacgcccaccttaaaccaaatgttatttggtcatgaggcaccttgctggagtctcagattccaaaagtctcttcttcagactgggtagggaatatgatattttagggacaaagctgaggactggttttaaataggctttaaaataaaagatcaatattatcataatgctatcattctgctaaacggccccaaaacagtagaatttctgctcatgtcctagcaggttcagaagactgcagccaagttcagatgtaaaaacaagaagtagcacttttccaaaggaaaacaacaaaacaaatgggaaaaagataatggaccgcatttcacctattttaatactattttaacaattttttcatctaccaatatatccccaataaataaatataaaagggggggagggtcaatctggggaatcttaattttttatgttttaagnnnnnnnnnnnnnctgcattatttttgtaaagtatttattgagtcacggattattgtgcatcaagcaattgttaatatgacctggtcctatggggtagaacttaggaaaaataaagttggttcttattcaataa

SEQ ID NO: 368344 - DNA, 905 bp, Homo Sapiens
ccgggcctgggggcgagcgggacggaagcaaagctggggcgccggggaggtggaagacgagccccactccggttaccaccaaagaatatgattgtggtctaggggctccagtttctgaagctgaaaactaccagaatactctccagctagaacaagaagtgagaaaccaagatagattcatctcgacactgaaattacagattgaagatctcaaacagacaaatcatggcttggaagaatatgttaggaaactcttggatagtaaggaggtggtaagcagtcaagtagatgatttaaccagccacaatgagcatctttgtaaagaattgattaaaattgaccaactagcagagcaactcgaaaaagagaaaaattttgtggtggattccgccaacaaggaacttgaagaagccaagattgatctcatttgccagcaaaataatattatagtattggaagatacaataaaaaggcttaaatctacttgattcctttgtcaagactttggaagcagacaaagatcactataagagtgaagctcaacatttgagaaagatgatgcgaagtaggtctaaaagtccaagacgcccatcaccaactgcccggggtgcaaactggtgatgtagaacttttgaagacaacaacaagagatcgtgaagaacttaaatgcatgctggaaaaatatgagcgccatttggcagaaattcaggctaatgtcaaggttctttaaatctgagagagacaagatcttccttctttatgaacaggcacagggaagaaattacccgacttcgacgagaaatgatgacaagctgtaagagtctaaatcaacaacggcacatgctattctccggcgagtggagactgcaagagatgttgctttactgattacgaagaatgaccaa

SEQ ID NO: 368345 - DNA, 1241 bp, Homo Sapiens
ggcctgggtggcgaattcggcacgagggggagcggctggcgcggcggaatccagggccgacccgggccggaccgaccccaggcggcgacggaatcagtccccaatgcctggaaattcctcattggattactgtgttttaaacagaatttcgtgaacagccttttatctccaagcggaaagaaagatgtggaaagcttcagcaggccacgctgtgtccatcgcccaggatgacgcgggggccgatgactgggagaccgaccctgattttgtgaatgatgtgagtgagaaggagcaaagatggggtgccaagacggtgcagggctccgggcaccaggagcatatcaacatacacaagctgagggagaatgtctttcaagagcatcagacccttaaggagaaggaacttgaaacaggaccaaaagcttcccatggctatggagggaaatttggtgtggaacaagaccgaatggataagtcagctgtcggccacgaatatcagtcgaaactttccaagcactgctcgcaggtggactcggtccgtggcttcggaggcaagtttggtgtccagatggacagagttgatcagtctgctgtaggctttgaataccaggggaagactgagaagcatgcctcccagaaagactactccagtggttttggcggcaagtatggcgtgcaggccgaccgagtagacaagagcgcggtgggcttcgactaccagggcaagacggagaagcacgagtcacagagagattactccaaaggtttcggcggcaaatacggtatcgacaaggacaaagtggataagagcgccgtgggctttgagtatcaaggcaaaacggagaagcacgagtcccagaaagactatgtgaaagggtttggaggaaaactttggtgtgcagacagacagacaagacaaatgtgcccttggctgggatcaccaggagaaatggcagctgcatgaatcccaaaacagattcactcaagaccgggttacaggaggcaacatccggtgtacagtcggacgaggcaggactccgctgctgtggggtcagcattacaaggcagaagctgggcgagcacgagtcccagccagcactaacctccaacaggattccggcgggaacgcactgggcgtgcacgaaggaccggcacggactccgacatgcgtccaccccttagacgatgtcaaccacgagcgtccctgcctaccaacagaccgcacctgcacaccggaacca

SEQ ID NO: 368346 - DNA, 592 bp, Homo Sapiens
tttgtccttttgaccaaagcttgactcatggaaggtctgcagttgttagagaatcagatagattaagctctacgttgatttctcagctccttagaaaggatccctccaaggacagccgcctctccacacccgggctgtttctccttcaagtgaattgctgcccagcccacaccagaaggtcttccgctcctctccctttgggtgtcttctggtggccaatgtgctgctgtcaggactctcactggataccaaaatcgactgggcagcctccaaagcggtggagtcctgtgctactgccacctccgccttgtaggatcacagagctgcaggacgccttcacccactacaccctgagctggccccgcttgtggctggcattgggggacagcgtgttctggccgcctctgctcctgtatatcgcgtcgtgtgtctttgctgtctgtacgctgatagacatgagagccacaggctggacctgcagaacccttgtgccggccatgattggggctggctttggtgcacatgcaagagttcagtgtggcccccatggcacacccctgctcttctcgggcagcttgggccattagctaaa

SEQ ID NO: 368347 - DNA, 1430 bp, Homo Sapiens
acttgttctcgtgagggcgcgatacagttgctctgttggggtggtgcactttggccacctgattcaggcaggcaatgccaggtgtctccacctggacgtggttctttcatgtctaattactgagttgctcgcagagaggtggtttttgtaagtaatcaccagtgccatcttatggtttcccatgttcttaatggtgattatgttacagtcatcattgattttgatgctcaaattacccatctgtggccaggaggagccccttcagtgtggcttctgggcctttgggcatgtcctcttgtcttgggctagctcctcactttccagcacataagtcgttcccagttttcttcttgtattgtccctgcttcagctctgcaatcggccatttctcccaggagccctggttccttgtggaggagatctgggtgctgagtgtactcgctgctttgggtgtcgctgctcccaggtccctaagggacaacgctgggagtacaagcacacgatgcatactcacatatacctgcacgcgtagacatcacacacacacaccactcacgcttatgcctgcatctgtcatctgtaaattgaaaccatgacaacaccacaggactgatccaagttttctccccttatttttccccctatttgtacctctccaacagtgagaaagctggatcccattgtcctccctaagtttacctgttcaaccattttctgtgcatgtgaccaatctgtggttgctgtgccctgtcacatggccccatccagggctgtagcaccccatgctgggctgtccccttcctccctgaccatgtgctggaggctgcctttcgcctcaagggctgtgatccctgcaccgggctgtccctgggtgtacacctcctcacttgcatgggctctcacagcctgatctgggcctcactgtggggacacctcctcaccccgtgtgggccctgacagcccgtgccaggccactcccctgcagggacacctcctcacccaagcggagtgggcttgtctgggtcaccatggtctgccatcccctgcacacatgtaccctgctcagccccatgctccctgatggagttgtttaggaggggagtgatgtagtacaaagaatgtttttaaagagaactgcagctactgcaaggagaacagcttgcagcagggctcagctggctgtgggagcctgtgtggaagctgtctcagtgactggggagaggcggcagggcaggcccaggccagaacacacacaacagatggcaagactggcagctgggcttgtagggcacagagagactgggatcaagggaaggctgggtcctggccctgtctcccagagctggggaggctgttgaaatttgaaagtgctattagaaaggcaggcagaacatgggtcccagacagttgagaaacttagcactggtgtg

SEQ ID NO: 368348 - DNA, 837 bp, Homo Sapiens
cagtgagggcgcagactgtactggcctgtgcggagcaaggcggtgtttcttgagaggaatgcgcagctgaagagagaggtgggcagcaggcccggtcacctgccaggtgaccacatggccaggtgccgccaccactcgggttacctggccgatgacgaggccagccactccatgtgcagtgcacgggtgcagctgcccaagaagccactggtcccagaaatgcggccagcctgcaagccgggccgtgtgccacacccaccatccacatgtggcagctcagcactccagggccaacgccgaaacaagaggcaccctcagccctttggccactttctggatttcctaactgagagccaggtcctggacagcctggagacagtggtggagaaggcgactgagcgcatggctgccatgaagacggaggctggggtgccgcttgtggaggtgcaggacccagtggaggtgccaagtggtggacggcgggcacatgcccggcccagcctcagcaccgtacaccggcaccgtgtacggccgaccctctgcactggacaccccaacaactacccatccagctccagctccatgtccaactgccatagcagcctcatggccggctgtctgggctcccacagacgggacagtgacctaggtgcccaaggctcattgccaactgtgagggacaaactcctgctggagaagaacctcaagcggctgctacagctggagagggaagggaaagggcctcagtcagtcctgctcccaggagggactccctgctgtgggattcgctgggtagccagacagctttcagtggacacaggagcaggccttgtcctg

SEQ ID NO: 368349 - DNA, 1131 bp, Homo Sapiens
gggtccggaattcccgggatggatgtggtatgcaaataagcaagtggaggccgccagccgacttcctcgcactgtgcagctgctccagtgagggcgcagactgtactggcctgtgcggagcaaggcggtgtttctggttgtctccccaccccacgcagagaggaatgcgcagctgaagagagaggtgggcagcaggcccggtcacctgccaggtgaccacatggccaggtgccgccaccactcgggttacctggccgatgacgaggccagccactccatgtgcagtgcacgggtgcagctgcccaagaagccactggtcccagaaatgcggccagcctgcaagccgggccgtgtgccacacccaccatccacatgtggcagctcagcactccagggccaacgccgaaacaagaggcaccctcagccctttggccactttctggatttcctaactgagagccaggtcctggacagcctggagacagtggtggagaaggcgactgagcgcatggctgccatgaagacggaggctggggtgccgcttgtggaggtgcaggacccagtggaggtgccaagtggtgtgacggcgggcacatgcccggaccagcctcaagcaccgtacaccggacaccgtgtacggccgaccctctgacactggaaacccaaacaaaatacccatccagctccagctccatgtccaactgccatagcaagcctcatggccggctgtctgggctcccacagccgggaccagtgacctaaggtgcccaaaggctcattgccacctgtgagggacaaaatcctgctggagaagaacctcaagcggctgctacagcttgggagagggaagggagccccctgcagcaacagcagggttcacgaaagaagaagccgctgccctcccattctcgtcggaaggtcagccatgtctcaccttctcccaacccgccctttttatgaagaagttcgccggactttcctgaaccccagcagggggaggccttccttggggtcatctccgcaaagttaccaaagttcccaaaaaagggaccctcccgccaaaagcagcttgtggggtttttcttttctccctttcccccaatatacccccccgggtgggctccacgggga

SEQ ID NO: 368350 - DNA, 792 bp, Homo Sapiens
tcctgatgtagatcatagacgtccttgcaggtattgtgggtgcagtgagtctgatagcagtcagtgggcaggagccagggtcagcgcagggtcaggtaaacccaggctgcagaggtcgtccacctggcagcatattgccgatatgcagaatgaggtcacttgtattttgcatagacctcatgaagattaataacacggggacaagactgtgccaattcaagcacagcaatctcgtgtaaaatttctgcccgacaatcctgtcctcttcttctcttttttagaaattttgcagcatattcttggccagtagattttgatatacattgtctaaccacagcaaaatttacctctccctagctctttagatgtaagtatatagaaattattaaagttttccatttttattggaatttgaggagttgtagttagtaggcctgaaatacttcggcaatcaaatctcctcctcgacatgttaggtgattcccaggtctgcttctttagtcacttatttttaccgctccggccgccgcaggttctcccgggactgccccctccagggggccgctgtcccgccccacgccgggggccgccacaggacgagttctctagctccagccgggcgaggcgccagggagctccgaacgtggcaggatccacttttacttttccagacaagggccgacggttgtgacctggcttctcgtgaagtgactcctggcgacagcagcggagaggactaccgaagcttgcagtcgcggtttgaaaactgcagccgcgtctggggcatcgccg

SEQ ID NO: 368351 - DNA, 827 bp, Homo Sapiens
  misc_feature (393)..(401): n is a, c, g, or t
cgaccgtgcaggaagaccagaaggaaagtaatctgccgcatccagaatgaacagaacaaaagcccccgcactccaggaagaagtcaggagcccagtgggggctgcaggtccagcccacaacaacctagacatgtggggtgctccatggctcacgcttatgtcctgcaggctgaagcccgcgccagggtccgcagtctttgttccggacgcagaaccagtgcttcagctggttaccgaggcgtccccgaaggggaaagggtggacacggtgagaatctacagcacagcagatcacttcgtcctggcagcgaccagccctgcccgagcggcacacagcagcctccatgttagaggcagtaccatcagacttcccccctacagcatctctcctgcnnnnnnnnnccctcacggctctaatctcctgcttttgttcatcctccttgtcacagtggggcacctggcactatagagactcagaaaatcggcagatgtggggggtcctgcagcatccaggcagacatgccggcagtcagagaggaaagtcctctgaagcctctagaaggaatggaacaggacccagcactgcaggaagaagtggggcacccagtggcggatgcaggccccacacaccgccgcggtaaacgtataaggctttccctggcccttgcctgtttcctagaagctgaagccgcgcggaggcccaggttcgcccttccacacacggaataagctgttggactggctgcctcacctaggacccgagttgcgccagagaaaatcgcggatgctgctttcccgcgggctgcagtgtctgtccctttagcgacc

SEQ ID NO: 368352 - DNA, 704 bp, Homo Sapiens
gcaaaagactgttgaagtagagagcatttgcccagctcactcggattctttgctggcatgccttcagtttcagttgtcatccagagaagtcaaaggaaatgctgcttggggatgagcatgttgatgataattagaagcatgctttccactgaacttcccgacaacatttgttatgcagaatgtctctgagtgagaactcggtttttgcctatgaatcttctgtgcatagcaccaatgttttactcagccttaatgaccagcggaagaaagatgtgctgtgcgatgtcaccatctttgtggagggacagcggttccgcgctcaccggtccgtgctggcggcatgcagcagttacttccactcaagaatcgtaggccaggctgatggagagctgaacattactcttccagaagaggtgacagttaacaggatttgaaacctttaattcagtttgcctacactgctaaacttgattttaaggtaaagagaatggtggatgaagttgtgcaaatgtgtggagttattaagtgtacataatattgaggaatcctggcttacagtttctgaaaattaagtttataggaatccagtggagaccagcaagaatgcccaagaaaccaaatggttctcatccacacctgtcaggaaaacgaccttaaacctttcacatttggaccagagggatctagaaactgattgaagtgga

SEQ ID NO: 368353 - DNA, 1415 bp, Homo Sapiens
cggcgtgctgttcccgccaattcctgtggtaatccttaccgtggcgagttccgcgctcaatggagacgtttgaccccaccgagctgcccgagctgcttaaactttattaccggaggctctttccctactctcagtactatcgctggctcaactacggtggagtgataaagaattactttcaacaccgtgaattttcattcacattgaaagatgatatttacattcgctaccaatccttcaacaaccagagtgatctggaaaaggagatgcagaaaatgaatccatacaagattgatataggcgcagtatattctcacagacccaatcaacacaatacagtgaagctgggagctttccaggctcaggaaaaagaactggtatttgacattgacatgacagactatgacgatgtgaggagatgttgtagttctgcagacatatgtcctaagtgctggaccctcatgacaatggccatacgcatcattgacagagcattgaaggaggactttggatttaagcatcgtctctgggtatattctggaaggagaggtgttcattgttgggtctgtgatgaatcagttagaaaactgtcttctgcagtacgttctgggatagttgagtatttgagccttgtaaagggtggtcaagacgttaaaaagaaagttcacctaagtgaaaaaattcacccttttatcagaaaatctataaacataataaaaaaatactttgaagaatatgccttggttaatcaagatattctcgagaaataaagaaagctgggataagattttagcccttgttcctgaaacaattcatgatgaacttcaacaaagcttccaaaagtctcacaattcacttcagcgttgggagcacttgaagaaagtagccagcagatatcagaataacatcaaaaatgacaaatatggaccctggctggagtgggagattatgctccagtactgttttccacggctggatatcaatgtcagcaaaggaatcaatcatctactgaagagcccttttagtgttcatcctaaaacaggtcgcatctctgtgcctattgatttgcagaaagtggaccagtttgatccatttactgttccgaccataagcttcatctgccgtgaattggatgccatttccactaatgaagaggaaaaagaggagaatgaagctgaatctgatgtcaaacatagaaccagagattataagaagaccagtctagcaccttatgtgaaagtttttgaacattttcttgaaaatctggataaatcccgaaaaggagaacttcttaagaagagtgatttacaaaaagatttctgaagacagagctcctcaaaccattgtggatatcttctgccttcaaccacagatcaaatacttcaagagccatttaataaatatggcagaactat

SEQ ID NO: 368354 - DNA, 469 bp, Homo Sapiens
  misc_feature (406)..(406): n is a, c, g, or t
agaaaatctataaacataataaaaaaatactttgaagaatatgccttggttaatcaagatattctcgaaaataaagaaagctgggataagattttagcccttgttcctgaaaaaagcttccaaaagtctcacaattcacttcagcgttgggagcacttgaagaaagtagccagcagatatcagaataacatcaaaaatgacaaatatggaccctggctggagtgggagattatgctccagtactgttttccacgggctggatatcaatgtcagcaaaggaatcaatcatctactgaagaacccttttaagtggtcatcctaaaaccaggtcggcatctcctgtgcctattggatttgcagaaaagtgggaccagtttggatcccatttactggttccgaccataangcttcatctgccggtgaaattggatgccatttccactaatgaagaggaaaagaggagaatgaa

SEQ ID NO: 368355 - DNA, 1537 bp, Homo Sapiens
  misc_feature (517)..(525): n is a, c, g, or t
  misc_feature (527)..(527): n is a, c, g, or t
  misc_feature (529)..(530): n is a, c, g, or t
  misc_feature (532)..(533): n is a, c, g, or t
  misc_feature (535)..(535): n is a, c, g, or t
  misc_feature (537)..(898): n is a, c, g, or t
  misc_feature (941)..(1003): n is a, c, g, or t
  misc_feature (1314)..(1314): n is a, c, g, or t
gggcgcgttcagccaaccaatgtgtgcgcggggtatcctgtaggcaagatcgacagctgggcagcaggagaccatgtcactgtggaaatgtcctcccagagccttccgacccctctgggcaggggaagagtggctcaggcagatagtgacctctgtgtccttctggacagggagacagcggcgggcctctcatgtgcaaagacagcaaggaaagcgcctatgtggtcgtgggaatcacaagctggggggtaggctgtgcccgtgccaagcgccccggaatctacacggccacctggccctatctgaactggatcgcctccaagattggttctagacgctttgcgtgtgattcaatcggccacccctccacctcccaccactcgaccgcccccgattcgaccccccttctcccaccctatctctgctcaccttccttggtatttccaaccgccccctcgaccacttccaccccgaccaccggcagcccagccccgacccccaccttcacccccgcccnnnnnnnnntntnntnntntnnnnnnnnnnnnnnnnnnnnnnnnnnnnnnnnnnnnnnnnnnnnnnnnnnnnnnnnnnnnnnnnnnnnnnnnnnnnnnnnnnnnnnnnnnnnnnnnnnnnnnnnnnnnnnnnnnnnnnnnnnnnnnnnnnnnnnnnnnnnnnnnnnnnnnnnnnnnnnnnnnnnnnnnnnnnnnnnnnnnnnnnnnnnnnnnnnnnnnnnnnnnnnnnnnnnnnnnnnnnnnnnnnnnnnnnnnnnnnnnnnnnnnnnnnnnnnnnnnnnnnnnnnnnnnnnnnnnnnnnnnnnnnnnnnnnnnnnnnnnnnnnnnnnnnnnnnnnnnnnnnnnnnnnnnnnnnnnnnnnnnnnnnnnnnnnnnnnnnnnnnaccatttccaattttccctccccccactctatatcggcttccnnnnnnnnnnnnnnnnnnnnnnnnnnnnnnnnnnnnnnnnnnnnnnnnnnnnnnnnnnnnnnntccctggctacttttacaccacacgccaacccctcttatttttcctgtctacaaaatgagacttcccacccatagagggcgcgcccctccatttgtttgtccgtcctcgtccccgccaccgcatccccaccgctttccgaagtcgagttcacaacttactcacgctgtaccataccttaattcatgcgccgtttttcgcccccaacccgtgagagttgccttaaccgaccgagcttccggaggacatacccatcccctcgtaactggtgcatcataataaccgccccaccaagacccctgttttgctgccnccgcactttctggtcgctgctatctaacccaccaccgcctaaatccggtccccatacggcgcgttttgcaaaaacgcgggtgagcatgcacccgcagtcataaggcggcggttgtgtgatacgtgtggctcatatcaccccctctcgtctctacccctcgcccaagtttgatcgacccgccactataggtggcacgacttgtatggcaaatccactgttatgt

SEQ ID NO: 368356 - DNA, 831 bp, Homo Sapiens
tgtgtgtcctacaaaatccccatcaagtacctgcgtgtcttccacccctaccacttggagctggtgaagcccactgagtctgggaaagccgatgaagccactgccaagacccagtgtacgcaacagtcgttcggaagagcagcttcataccccgctacatcggctgcaaccacatggctctggagatctttctccggggagtcaacgagcccctggccaacaaccccaaccccatagtggtgattgcccgggtcgttcccaactacaaggaatttaaggtcagccaggctaacagggacctggcctctgtggggctgcccatcaccccactgtccttccctatcccgtccatgatgaactttgacgtgcctcgcgtcagccagaacggatgccctcagctgtccaagcctgggggacccccagagcagcccctgtggaatcagtccttcctcttccaaggccgagatggagctaccagcttctcagaagacacagccctggtgctggagtactactcctcaacttcaatgaaaggcagccagccgtggaccctcaaccagcccctgggcatctctgtgttgccgctaaagagccgtttgtaccagaagatgctgacagggaaaggcttggacgggcttcacgtggagcggctccccatcatggacaccagcctgaaaactatcaatgatgaggcccccacagtggctctctccttccagctgctttcctctgagagaccagaaaacttcttgacaccaaacaacagcaaggctcttcctaccttggaccacaaggatcctggataagaagctgagaaccatccaagagtcc

SEQ ID NO: 368357 - DNA, 814 bp, Homo Sapiens
agtcagcgggctctgcagtagtcgccgcagcggcgatagggagcggtggggacgaggcggcggcggcggcaggagggggagcaggtgctggcacaagagcagcggcttgggggagccggcagcagcagtaacagcagcagcagccgccgccgccgccgccagtaaacgcggaccgtaccccaggggactacccagaccggccggccctggaaagccgcagctcgggtcccgccgcagtcggcggtgggggatgggcaggcagtggctggtcccgccgtgccgagggttaacccccgcacggtcccaggtcctgagctggaccatgagccctcctccagaaacccctgcgtccgccacggcccaggttaaatggaaaccacccttgggaactggatgcctgtgtagctgttctaccatatcagtgtattgcaatgagtgggggaggagagcagctggatatcctgagtgttggaatcctagtgaaagaaagatggaaagtgggaaaatgttgcactgaaggtggaatcagctcaacaaccaaaacaagttctgaaaatggaagttgctgttttgaaaaagctgcaagggtcggaatctggcagatcttcgccgtagccagtcccgaggcacattcaccattagtaccactctccggctgggtagacagatatggagtctattgaaagcattcattctgtgggattcttgcatcgagacatcaaaccgtcgaacttcgctatgggatcgctttcctagtacatgtaggaaatgttacatgctttgattggcttggtcgaccatttaccagttcctg

SEQ ID NO: 368358 - DNA, 853 bp, Homo Sapiens
ccctttcctgcagtgctccctgcggggcgacgaagccctcagtgcctttggtcaaccagggacctcttacctggtaagatgctagtttcttgcacgacgaccggcccacggccaggcccccaaggactcacccctggctccctggattgttcaaactcgtcccaagctcaagttgtaccggacagcctcctggagtcggaagacctcccgtacacagtcttggcacagagctccttcaggccgcctggcggggctggaagctaaggggcccattgcccatgatacggacccacagcctcaaaggtgtcctctttggagagtggcctcagggtggccaggtgcctctgcagcggctcacagagcctgagcgctgtgcacacctgtgccggggcactgtccggggccccacggagcatgctcaggatggccgaactgtgggcatccaccatccacttgcatccaggctgaagactcctggctggggagccactcacaggtcttcatcaccaaagccaggatgtcagactccgtggcgtcagggttcagcccattgccagcggcggctgctatgtcctggcatacgtcgcagggcagagacttcagcggtgggtttgttccatacaggcaccacttggcagtacacccacagccccgcacctggaagctgtctgcagatcctgacaccacaccgtggagccctttgcacactcctgggggcctgaggtggggctggcctggtggcccccaggaggctgggcaggaggagcagggcacacagcatgctgcccagggactctctggctccagagtacccagcagtggctgctgctataaacctggctctcctcacgct

SEQ ID NO: 368359 - DNA, 384 bp, Homo Sapiens
ggggtcgcttcccggtcagctgcgtccttagcgggagcccgagtgcgggcggtggcgggcttggcggcggggcaggattccaggcaggagccttgcctctcagggtggcgggctctgcgaccctgcgagatggactgggacagaaggcagtgccgggcagcccggccccgctgagcgatcccaccgaagcagcgtgtcctccgtgggagcccgaggtgggtcccacccgcatctcctcttccacaccctcctgggaccccagccctggagaagtagctctggcttgtcttctttttcattaaagataatttatgtatcgactaagaaataataaggtacattcagatgccgaaaaagagcgagggaggcgggaaaaatctttgt

SEQ ID NO: 368360 - DNA, 733 bp, Homo Sapiens
agcggagctggagcccgagtgcgggcggtggcgggcttggcggcggggcaggattccaggcaggagccttgcctctcaggtggcgggctctgcgaccctgcgagatggacgggacagaaggcagtgccgggcagcccggccccgctgagcgatcccaccgaagcagcgtgtcctccgtgggagcccgagcggctgacgtgctggtatacctagcggatgacacggtggtgcccctggctgtggagaacctgcccacgctcagtgcccatgagctgcaccgcgctgtccgcgaggtcctgcagcttccagacatcgccctggatgtcttcgcgctctggctggtctcccctctgctggaggtgcagctgaaacccaagcaccagccctacaagctgggacgccagtggccggagctgctgctgcgcttcaccagttgccccagatgatgacgtggccatggatgagcctttcctgcagttccgaaggaacgtgttcttcccaaagcggcggggagcttccagatccatgacgaggaggtcctgcggctgctctatgaggaggccaagggcaacgtgctggctgcacggtaccctgtgcgacgtggagggactgggaagctctgggcgcccctgggtgtgccgcgttgcagcttgggcccctaccaagcccgtgcgggccggcaagcactgacgactgacgggagaaggctggactccgttcctccctgccacac

SEQ ID NO: 368361 - DNA, 390 bp, Homo Sapiens
ctttttttgtcatcagatttcaactccttctatcagcattttacctgaccagcaatcacaataacacaaaatgaaataaagaggggcttcacttgtttttaaaagcatttatagaaatcaagtcagagagacaaaatatttttcagagggtaacttcagaacaatctctcttccttggtaactgcagaagatgggcatctgaactcttccaagtaccaaaattactgtcacaaaaataatgattttaaaaatagggcaaactttgggaagactacaaccaatgcagtcaacactgagacaggttcccccagagaaaaaccttctgcttcagtggggcccctgcaggaacaagttgctgggctaaggaaatttcaggaggggtaagggagg

SEQ ID NO: 368362 - DNA, 1404 bp, Homo Sapiens
  misc_feature (979)..(979): n is a, c, g, or t
aatttttccaatacggcttgtctctctgtcagtggccgctgctgcctactctggaggcaggctgggcggtggcggccgagactggcgggggtggacgcccgggccgggctgcgcccgcttcttgcagctgtgaattcctttggacaattgatgatatttatcattgtgcccagtttctacaaataaaagatgggtggattattttctcgatggaggcatctggagcataagaacagtaattattttcttcttttccaagagaacagaaagaaataatgaagcatcggatgatttaaaatcccagaggaaaaaaatacttgaagaagtcatggaaaaagaaacttacaagacggctaaattaattcttgaaaggtttgatccggactcaaagaaagcaaaggagtgtgagccgccatctgctggagcagctgtaactgcaagacctggacaagagattcgtcagcgaactgcagctcaaagaaacctttctccaacaccagcaagccctaaccagggccctcctccacaagttccagtatctcctggaccaccaaaggacagttctgcccctggtggacccccagaaaggactgttactccagccctatcatcaaatgtgttaccaagacatcttggatcccctgctacttcagtgcctggaatgggtcttcatcctccaggtccacctttagcaagacctattctcccccgagaacgaggtgctttggatagaattgttgaatatttggttggtgatggtccacaaaacaggtatgcacttatatgtcagcagtgtttttctcataatggcatggctttgaaggaaaaatttgaatacactgccttttcaatgggcctactgttttttcttgaaccctgcaagaaaaaccagaacctcaggctccaagacttcctgagtttaattttgagaagaggcaggtggtggaaggttcaagttcagttggtcccttgccatcangaagtgtgctttcatcaaacaaccagtttaatgaagaatctttagaacacgatgttcttgatgataatacagagcagacagatgacaaaataccagctacagaacagacaaaccaagtgattgaaaaagcatctgactcagaagaaccaaaggaaaaacaaagaaactgagtatgaaggaagcctcagtggattgaaaaccaactccacaatttcctggaacctgattctatttcctgattcctgaaaccaagtgggaaaaacccttgaacggccaaaattactaaaaagccttccccgtgtgcccctctcaacggggtatattttaaacttccacactctgatattaagattcaatcgcccttttttcggtgggccttctgcttcccctttctgacccccttataaagagcaggtttaccccca

SEQ ID NO: 368363 - DNA, 931 bp, Homo Sapiens
  misc_feature (70)..(106): n is a, c, g, or t
  misc_feature (700)..(700): n is a, c, g, or t
cgaaagtttataggacactcaataatgaggcgccaccctgggggctttttaaccggccgggaggcggcgnnnnnnnnnnnnnnnnnnnnnnnnnnnnnnnnnnnnnatcaggccaaatcggccgagctcgaattcgtcgagagcggatgggaaggagttggcccggcttgtctctctgtcagtggcggctgctgcctgctctggaggcaggctgggcggtggcggccgagactggcgggggtggacgcccgggccgggctgcgcccgcttcttgcagctgtgaattcctttggacaattgatgatatttatcattgtgcccagtttctacaaataaaagatgggtggattattttctcgatggaggacaaaaccttcaactgtagaagttctagaaagtatagataaggaaattcaagcattggaagaatttagggaaaaaaatcagagattacaaaaattatgggttggaagattaattctgtattcctcagttctctatctgtttacatgcttaattgtatatttgtggtatcttcctgatgaatttacagcaagacttgccatgacactcccattttttgcttttccattgatcatctggagcataagaacagtaattattttcttcttttccaagagaacagacagaaataatgaagcattggatgatttaaaatcccagaggaaaaaatacttgnaagaagtcatggcaaaaagaaactttacaagacggctaaattaattcttgacacggtttcgatccggactcaaagaaagcaaaggagtgtgagccgcatctgctggagcagctgtaacttgcgagacctggacaagagatccgtcagcgaactgcaggtcaaagaaaacttttccaaaacaagaaggcctaacaagggcctctcacaagttcccgtattcctgggacacaa

SEQ ID NO: 368364 - DNA, 1059 bp, Homo Sapiens
  misc_feature (275)..(275): n is a, c, g, or t
  misc_feature (338)..(400): n is a, c, g, or t
  misc_feature (426)..(426): n is a, c, g, or t
ctctggcggtgagttcgtcgagactctcgatagcagtgccgatagttccttgtgtcatgaagtaatcacatgatgacagggggaatatttgcttctgctcctgagtaccaggaaaagacgcctaagagcaccccagccgggaaattgttgaaaaaaaccctcgggtttcccgcgcgggccttttttattttgggggagaattccaaccgctttagtacggacccaagggtttttcatagaaaccaggtatgagcccagtctcccttccctcgggnggcccccggcccaaacggaagggtttgaaaagcttctggggggccggggggggccggccaggnnnnnnnnnnnnnnnnnnnnnnnnnnnnnnnnnnnnnnnnnnnnnnnnnnnnnnnnnnnnnnnttccaaggacaaggagtgtctttacntggagttggggactggggcctctatagggggcttctggtttctgggctgtaggtttgtgaggtgtgggatcttaagtcaaaggtgggggactagggcagggtatcagaaggtgatgtcatcctcgtacagggacagcagcagcaggacggtccagccgcccagcaggcccacgttgtgcagcaggaagaggagccagggccgcgggtcccgtactttcaacatcgccgggagcatgtcgcagagtgctacgtagaggaacaggccggtggccactgccaggatccaggcctcgctctcctcgctgactccaaccgcgagtgccacgtagagaccagcgaaggccgtgagcgcggaggccaggttcagcagcagtgcttggcgcacggacagccccgcgtgcagcaaggcggcgaagtcccccagctcgtgtggcaactcgtggcagaacacggccagcgaggtggccagcccggtcttccaggaggacgcgaaggcggcgcccacggccagcccgtcggcgaagttgtgcacgacgtcgcccagagtgatcatatagggcagtagcctcaactctgggctcagtctcctgggctcagggttcagcagctccgggctctcctccgccacctccc

SEQ ID NO: 368365 - DNA, 1029 bp, Homo Sapiens
  misc_feature (861)..(871): n is a, c, g, or t
ggggcagcaccgcccctcacccgccgccagccgcctcctcctcctcctcttcggccctccccactcccacccccagccaaggcctgctgaccgcgccgagcgccgagctggactgaccacggctgccccggagacgagagaggaagcagccggcccgcccctgggttcgcgctctcgccgcctctgagggaattgaattgaggcgccgcggctgcgagagctaaaaaggaaggaggagccgccgcgggactgagacgggggcagagccgaagagaccgacacagagaaggaaacgaggaggaggatgtctcaccgggcggccagcgcctggatcagcccgtgactcttaacagcggcgggcctcagaccccagcgcagactcggactttgtctttgggggcccgtgctctgccctccccggtttccgacaggacccagaggagccggcgtgcctctctgccctccagccttcttcaccatgtccaagatgccggccaagaagaagagctgcttccagatcaccagtgtcaccacggcccaggtggccactagcatcaccgaggacaccgagagcttggacgacccggacgagtcacgcacagaggacgtctcctccgagattttcgacgtctctcgggccacggattatggccctgaggaggtctgcgagcgcagctcttccgaagagacgcttaacaatgtcggggatgcggagactcccgggaccgtctccccaaacctcctcctagatgggcagctggcaccggcggctgctgctcccgccaacggaggaggagtcgttccggcccggagcgtgtctggggcgctcgccagtaccctgggggcggctgccacttcggnnnnnnnnnnnggggcaccggcgggcccccgcccgggggctctcccccgggccccggactgccacccctctcagcctcccaccactggagtctcccgctttccggcgctaccccggccccacgccaccggcaacgccccctggaccccgcccgatggacgctcgcccca

SEQ ID NO: 368366 - DNA, 1514 bp, Homo Sapiens
ggtaccggtccggaattcccgggatcaggatcaaggaactggggcggggggtgtttcctggaccccagtcctccgaatcagctcctagagtggaaccaggaaggattctggagccacagaagatagacagatggaaggtggggaccaaagtgaggaagagccgagggaacgcagccaggcaggtggaatgggaactctctggagccaagagagcactccagaagagaggctgcccgtggaagggagcaggccatgggcagtggccaggcgggtgctgacagctatcctgattttgggcctgctcctttgtttttctgtgcttttgttctacaacttccagaactgtggccctcgcccctgtgagacatctgtgtgtttggatctccgggatcattacctggcctctgggaacacaagtgtggccccctgcaccgacttcttcagctttgcctgtggaagggccaaagagaccaataattcttttcaggagcttgccacaaagaacaaaaaccgacttcggagaatactggaggtccagaattcctggcacccaggctctggggaggagaaagccttccagttctacaactcctgcatggatacacttgccattgaagctgcagggactggtcccctcagacaagttattgaggagcttggaggctggcgcatctctggtaaatggacttccttaaactttaaccgaacgctgagacttctgatgagtcagtatggccatttccctttcttcagagcctacctaggacctcatcctgcctctccacacacaccagtcatccagatagaccagccagagtttgatgttcccctcaagcaagatcaagaacagaagatctatgcccagaatctttcgggaataccttgacttacctgaaatcagctggggaaccttgctggggaggagacccaaggcaaggtgccaagaacactccttccttgtcaatctccatcacttcacggctgttccagtttctgaggcccctggagcagcggcgggcacagggcaagctcttccagatggtcactatcgaccagctcaaggaaatggcccccgccatcgactggttgtcctgcttgcaagcgacattcacaccgatgtccctgagcccttctcagtccctcgtggtccatgacgtggaatatttgaaaaacatgtcacaactggtggaggagatgctgctaaagcagagggactttctgcagagccacatgatcttagggctggtggtgaccctttctccagccctggacagtcaattccaggaggcacgcagaaagctcagccagaaactgcgggaactgacagagcaaccacccatgcctgcccgccacgatggatgaagtgcgtggaggagacaaggcacgttcttcgagcccacgctggcggcttgtatgtcgtgaggcctttggcccgaagcacccgaagtgctgccatgaaattattcactggcgatccgggatgccctcatcactcgctcagaaaacctttcctg

SEQ ID NO: 368367 - DNA, 1314 bp, Homo Sapiens
gatgagagggcgtggagaaccagatgggaaactttttgtcccgtgagaacaaagtacaagttatatcagagtctgatcggttatattttgctactttaaggaatagaccaaaaagcacagtaaatacccactatttctccatcgatgaggagctggtctatgaaaatttctatgcagattttggaccgctgaacttggcaatggtgtacagatattgctgcaaactaaacaagaaactaaaatcatacagtttgtcaagaaagaaaatagtgcactacacctgttttgaccaacggaaaagagcaaatgcagcatttttgataggtgcctatgcagtaatctatttaaagaagacaccagaagaagcctacagagcactcctgtctggctcaaaccccccctatcttccattcagggatgcttcctttggaaattgcacttacaatctcaccattctcgactgtttgcagggaatcagaaagggattacaacatggattttttgactttgagacatttgatgtggatgaatatgaacattatgagcgagttgaaaatggtgacttcaactggattgttccaggaaaatttttagcatttagtggaccacatcctaaaagcaaaaattgagaatggttaatcctcttcacgcccctgaagcctactttccttatttcaaaaagcataatgtgactgcagttgtgaggctaaacaaaaagatttatgaggcaaagcgcttcacagacgctggcttcgagcactatgacctcttcttcatagatggcagcacacccagtgacaacatcgtgcgaaggttcctgaacatctgtgagaacaccgaaggggccatcgccgttcactgcaaagctggtcttggaagaacagggacattgatagcctgttatgtaatgaaacactacaggtttacacatgctgaaataattgcttggattagaatatgccggccaggctctattataggaccccagcagcacttcctggaagaaaaacaagcatcattgtgggtccaaggagacattttccgatccaactgaaaaatcgaccatccagtgaaggaagtattaataaaattctttctggcctagatgatatgtctattggtggaaatctttcaaaaacacacacatggaacgatttggagaggataacttagaagatgatgatgtggaaatgaaaaatggtataacccagggagacaactacgtgcctttaaaagtcagagacagccacgtacctcaccatcctgtgcatttaggtcagatgatacaaaaggacatccaagagcagtgtcccc

SEQ ID NO: 368368 - DNA, 1481 bp, Homo Sapiens
  misc_feature (116)..(124): n is a, c, g, or t
agagagtggatggcgggaaacggagaggagtgggaaggtagttctgcatgaggtggggcatggacgcggtctgcagcaataggtgatacccggggtgcgagaaggaaagtgaggtnnnnnnnnnagaaaattgttaagggttctcgtgtagagggtgctaacacgttgtcttgggcaaaggactgtaataaagacgggagggaggtcaagggtggcggggcaagtcagagtgtggttgtgcgggtgggagcagggaaaagggggcggggaggcgaagaaggcccagtgcgattttacgcaggaggttcaagaccctcggcacgaagttgacgcgggggggtgctgccgtctatggaaaaagaggtcatagtactggaagccaagcgtcggtgaagcgctttgcctcataaatctttttggttagcctcacaactgcagtcacattatgctttttgaaataaggaaagtaggcttcaggggcgtgaagaggataacctcataatgttcatattcatccacatcaaatgtctcaaagtcaaaaaatccatgttgtaatccctttctgattccctgcaaacagtcgagaatggtgagattgtaagtgcaatttccaaaggaagcatccctgaatggaagatagggggggtttgagccagacaggagtgctctgtaggcttcttctggtgtcttctttaaatagattactgcataggcacctatcaaaaatgctgcatttgctcttttccgttggtcacaaacaggtgtagtgcactattttcgttctggacaaactgtaagattttagtttcttgtttagtttgcagcaatatctgtacaccattgccaagttcagcggtccaaaatccgcatagaaattgtcatagaccagcgtcctcatcgatggagaaatagtgggtatttactgtggctttttggtctattccttaaagtagcaaaatataaccgatctttcatgaactcacaagccccgattagttcacctgactccgctgccatcttaagcgagatacgcacgggggagggctgggtcgtggccagctgaggtcactcgcaccccgggggcttccccactgcccaggagccaggaagctcacagtcccgaacaacaagcctggccgagggaggcagcaggcgccgaaggcggaggcggcttcggggtcagcgcgccgggcgccccggggacattccgaggggaacccgagctcgctccgcgcggggcgcacacgcccctggctgtggccgctcctatttggactcggctgctgcagctgctgctccgccgccgccgcgcctgggaaacgcagaccagctctcagggcagggcaaagtcttcccccggcttccaaagtgatcatggaggaggagacttctggtcccgatcgcgcccgtggctactcgagcggcagccgggaggacttcagtgcccgcgggctggcagcagctgctccggaccctccgct

SEQ ID NO: 368369 - DNA, 688 bp, Homo Sapiens
ggctggtacggtctgggatgttgggatccttccatgcctactctgcaggcgtcccccaactcaggagagagttccgatatgtaatgacggcccttcctccatctgtgattttccgcgctcctgtaacttgttactctcagatcagatctcctgggcccgacccccaagcctcctgcattccgtcggcgtcggcctctttcccgctctgctgtgtctgcctagctgtttctcacccttttccttcctcgggtcagcgtctgcatcaagagtgagtcttcaatcgtctgccggatgttttcatgatgcgggccaattttgaagctcctggacttcgttcgcgccctggaattgggatcttctcacgtgccctgtgggttttgatctcaggtgttcgtgggcctcctcccacgctccgtttcgctggccacgtgggtggacggctccctctgaccttcctcacctgacaatacccaggcgctccctccacccccttctatgcccacccggccagatggaacgttctttttttcccacctttgtcagcaatttggggcacaggtctattgctgcaatgtccttaatgcccaacaggttaaagacaacaataacaactaagggatccgccccacccgcttaaaggttctcaagcccctccgaggccctaaggaactctccttgccctctccct

SEQ ID NO: 368370 - DNA, 987 bp, Homo Sapiens
  misc_feature (452)..(452): n is a, c, g, or t
caccacctttccaagtcatggcttcattcagccctaaatgggaacacacggcctcagaccccaccatgcatggggggtccccacatacgcacactcacacacccatcacttgcgtggccccccgatgctttgggggacactagactaggcacagcaacagagcagcaattggggtgtctgcagagcctgcacccccagagcaggcagacccatcctcctggctccccagctctgcccatgggtccctggggcctccctgaccccatggcgcccagccctccatcagcccctccctgagtgcaaaccttggcggtggctctgctaagacgaccccaggacccacaagtggacagagggacggagggaggccagcagcatcgagaccacaaggtctcaacagtgtggaatgagcagcagcagcaacaaatgggaaaccgaggacatcgcaaaanaaaagtctgaagccgctgcggcccaagtctcaacttggaagcaacagaaacacagtggcccccgaacaagctgagggcctgaaataagcagggcaggcctgggggcgctgaaagccctctgcccccttggctctgagcagctgtctgggggcaccagctggagttctcaaaatagccacctgggccaccctgtttgcttgctggagcagagaccctgcccgaggaggagaggctggggaaaggggtgcctaaacgtagagccagagaccagcagaggccacctgcccattccccacgccctcagaacgcagctgcacctttcgacgacctctgtaatactgcaggcaggacccagggcagcggctagaccctgggtgtccgaggagagggaggcacaggtttagaaaaaagattttgcttctcttttgtacaaaaatagactcaagtctcattagcagtagctaaaagtggctgtctttgtataaaactagaaaaggcaggcgcgccaccccaagggcctaggagtcttctggcg

SEQ ID NO: 368371 - DNA, 1149 bp, Homo Sapiens
  misc_feature (833)..(910): n is a, c, g, or t
ggaattcccgggatcgcggaaccacgcacagagtctgcagaagtgcacagctttatcgacagcgcttgaagcatggagtctcttcgcgggtacacccacagtgatattggctaccgcagcctggcagtcggcgaggacatcgaggaagtgaatgatgagaaacttaccgtgacctcgctgatggcaaggggaggagaggacgaggagaatacacggtccaaacctgagtacggaacagaagcggaaaacaacgttggcacggaagggtccgtcccctcggacgaccaagaccgtgagggtggcggcggccacgagccggagcaacagcaggaggagccgcccctgaccaagccggagcaacagcaggaggagccgcccctgctcgagctgaagcaagagcaggaggagccgccccagacgaccgtggaggggccacagccggcggaggggccacaaaccgctgagggaccacagcccccagagaggaaacgccgccgccgcaccgcgttcacgcagtttcagctgcaggagctagagaactttttcgatgaatctcaatatcccgacgttgtggcgcgagagagacttgcagcacgcctgaatttgactgaagacagagtgcaggtttggtttcagaacagaagagccaagtggaaacgacatcagagggtgctaatgttgagaaacactgctactgctgacctggccccaccctttggacatggtcttgggtgggggcctattatgctgctcctgctctggatcctgctttgggtgttcctctgggggccccactacctaaaccacctgtgctgcctgggccacctatgccnnnnnnnnnnnnnnnnnnnnnnnnnnnnnnnnnnnnnnnnnnnnnnnnnnnnnnnnnnnnnnnnnnnnnnnnnnnnnngggcttacgcatgggcgcctggggccaccccggcccccgcattgtgacacttgggcccacctgcctggccttggaccgcctccactcccactggcgtacgcgtctcccgcctttccaacgccgccctctcctatcccccccatacaccgtagcttactctcctctacgcccctcttccctacaaacgcgcatggtcggatggagtaccgcccatccgtccctcacataccctctcgctt

SEQ ID NO: 368372 - DNA, 1079 bp, Homo Sapiens
  misc_feature (882)..(882): n is a, c, g, or t
tctcgggattgggagattcctaagtcggctcagctggctccttccctcagtttcagtttccatcttgggtctctgagctgagcagagtggcaccaggctgagttaagtgggactgccctgggcagacctacctactagagcagaatggagcttcggtcctaccaatgggaggtgatcatgcctgccctggagggcaagaatatcatcatctggctgcccacgggtgccgggaagacccgggcggctgcttatgtggccaagcggcacctagagactgtggatggagccaaggtggttgtattggtcaacagggtgcacctggtgacccagcatggtgaagagttcaggcgcatgctggatggacgctggaccgtgacaaccctgagtggggacatgggaccacgtgctggctttggccacctggcccggtgccatgacctgctcatctgcacagcagagcttctgcagatggcactgaccagccccgaggaggaggagcacgtggagctcactgtcttctccctgatcgtggtggatgagtgccaccacacgcacaaggacaccgtctacaacgtcatcatgagccagtacctagaacttaaactccagagggcacagccgctaccccaggtgctgggtctcacagcctccccaggcactggcggggcctccaaactcgatggggccatcaaccacgtcctgcagctctgtgccaacttgggacacgtggtgcatcatgtcaccccagaactgctgcccccagctgcaggagcacagccaacagccttgcaaacagtacaacctctgccacaggcgcagccaagaatcccgtttgggggacttgctgaagaagctcatggaccaaatccatgaccacctggnagatgcctggagttggagccggaaatttggggacgcaaatgtattgagcacccggtgggtgaaaactgaagtgaggctggcgccttttggctggggcttcaggaagcaacggggtgtatggggcttcaccctgaagggcctaccatgacccgctggttcatccatgaaccccgtcccgcccccgggggatgcctttg

SEQ ID NO: 368373 - DNA, 1060 bp, Homo Sapiens
  misc_feature (940)..(940): n is a, c, g, or t
gggtccggaattcccgggatgccagcggcggggtcgctgccgttgaggcttcccgccactgctgctggcggatttgtggggcaaaatttctcgctggctagccttcttttccctcccgcactttggtggggagggggtggatcctcgtttcggtgcccaagttcacgatgacccgagagaactcgaggaagttgtcgccgcggccatttcccccagtgccgcaacttgctggccttggagggggaggagcgccgaggcagtgactgcgacgcaaacatcaaaccagatgcaaacagattcattatctccatcccctaatcctgtgtcacctgtgcctttgaataacccaacaagtgccccaagatatggaacagtgatccctaatcgcatctttgtaggaggaattcgattttaagacaaacgaaagtgatttaagaaaatttttttcccagtatgggtctgtgaaagcaagtgaagcattgtaaactgacagcagctggagtatccacaagggtatggtttcgtcactatttgaaacacaagaagatgcacaaacaacattttacaagaggctgaacaaacttaacttatacaggataacgaagctgaacattggtccagcaataagaaaaccaacaagtacggatccctcgttctagtataatgccagcagctggaacaatgtatctaacaacttcaactggatatccttatacttaccataatggtgttgcttattttcatactccagaggtaacttcggtcccaccgccttggccttcacgttctgtatgtagctcccctgtgatggtagctcagcccatttatcagcaacctgcatatcactaccagggaattaaacatgtcatacaaggaagatggatggactctttgctttccttttacaaaatgtgatgaggccaccacacagtatttacangacagtgggcagtggagtggttcctcaaccttctggcctctcttgctcatttttatacctgcaacccttctgagggtattatccaccagtggaaatgccccccctaatgggggatggttt

SEQ ID NO: 368374 - DNA, 1263 bp, Homo Sapiens
  misc_feature (1174)..(1221): n is a, c, g, or t
  misc_feature (1236)..(1236): n is a, c, g, or t
aggaaacaggagctttgtcctataaccctggttagtagcagctgtacgctcggaatcagggatcaattagtgtctggtgcagctattgaatgtgcaatgtgtcacgtatcgtgtattacacgctacaacataactcatttgtaacccatggtataagctggtatttacaaatataacacagacctttaaacttttccttgaatacaaaatgtcatgcatggtcttagctgcatcaactttccatttaagtcaggactgcaatactgattccagttaatgagcagctaagatccaatctgtctaatacagtgaccccctagccatccgggcctggcaatatacaacttttctttcccctccaagtttgtaaacactccccttccagaaaggcattgtgcaacacaggattatttttaaatgattctgaatttgaattaactttttggagaattctgtgatgcccttagaagaaattggacacgtattgagtgtcacaaagctggggctgggaattgctggtctaatgtttcattagacttaagaacctaaaatttttctcagttgggtggataaaaccactaacgcttagaaactgttttctcatgcagctatgtttctcttatttatgccttgaggactaatttctggttttctagctgttaatgcactgttgaccttcataatggtgccttacgcaagcgatcccttctgtgggggtctcatacaggggtgtgggcgatgcatgctttattaaggctcttgtttcacctggcagtgtactgtatcaacgtataatacagaaaaaaaatctctttaaggtcctccttcacaaagacatagagtgaaactccctttacatgtcagtatttgttcaacactttaggcaacttgactgtcagtgttaaaatggaaaacaggaaaatggaaaaatctgaaccaattctgccacccttgagactttcatatagaccttgcacaacaattgtatagatcacacaccggctgtatttaatatgtaacattttcacacatattaaagatacagaagtattaaaaaacccccaatgttaatgtatttgcttaaaaggcacaagtttcacatatctgtctagctatctgttggtaatacagaaagtatactacttttttaaaaaagtgggcagaattcttgtgnnnnnnnnnnnnnnnnnnnnnnnnnnnnnnnnnnnnnnnnnnnnnnnntctcatcatataggntactctattagccagcccccctaaggg

SEQ ID NO: 368375 - DNA, 720 bp, Homo Sapiens
tagcggtactaaggtagcgaggctgggtggctgaattcggcacgaggctacaaagcaggaaagtatgcttgggagaaggccaagtgagtggggaatcagcccaaagccaggcgtcaaggtctccctcacctgaagctgactttttccccaccttggacagagggcgggagatgccatccccactgaacccagtgctttcaccagccatattagctcccactcaccccccgtcgtggaagcctcggccgtcacacctgcagggccggggcgtgcatggcctcagggatggcctgttcagctgctgggtgactcgggtccaggtgcctcaccacctgctgagctctgtgtgatttctggacgcttctgctcgttgcctttgggctcagtgaagagtctggagtttatctggagtgaggtggccggttcttggtgggatctgagcaggacagacgtctggctccttccctcggctcatggccctcagaatctgcgtcacatacaccccagctctcccgataggtctctgcactcgctgttgcctctgcctggaacagtctccctcctggtgtcattgtctccgtggtgtgtccttcctgaccttccacctccaccagtctgtcccccttggcgacagggactcgttgctcatgttcacccggcaggctggacacttcgtggagggctcaaagctggcagatccggggcgcctctgttctccca

SEQ ID NO: 368376 - DNA, 1813 bp, Homo Sapiens
  misc_feature (1440)..(1493): n is a, c, g, or t
gagcgaggcctgggtggcgaattcggcacgaggctacaaagcaggaaagtatgcttgggagaggccaagtgagtggggaatcagcccaaagccaggcgtccagggtctccctcacctgaagctgactttttccccaccttggacagagggcgggagatgccatccccactgaacccagtgctttcaccagccatattagctcccactcaccccccgtcgtggaagcctcggccgtcacacctgcagggccggggcgtgcatggcctcagggatggcctgttcagctgctgggtgactcgggtccaggtgcctcaccacctgctgagctctgtgtgatttctggacacttctgctcgttgcctttgggctcagtgaagagtctggagtttatctggagtgaggtggccggttcttggtgggatctgagcagagtccattcaggagcaggaaagttcatctcagaccctaaatccagccacgtcatgccacgcttaacacctctaacaacttcccctggcacttaggacagcgtctggctccttccctcggctcatggccctcagaatctgcgtcacatacaccccagctctcccgataggtctctgcactcgctgttgcctctgcctggaacagtctccctcctggtgtcattgtctccgtggtgtgtccttcctgaccttccacctccaccagtctgtcccccttggggacagggactcgttgctcatgttcacccggcaggctggacacttcgtggagggctccaaagacggcagatcccggggccgcctctgtctctcccaggccctgcgtgttgcggtgagaggagcatttgtgtctctgtggtttgctgctggagctggtgaccgggaagagaacaagggagacaagggtgcccagacaggtgcggggctcagccaggaagcaaaagacggggacgtgtccccggccaagagggtcacagatgcaccacaaggcactctgtgtggcacttgggaacagaaatcctgggagtcagtctgcaaagggtggtgggcgttgctcacctgggagaagcctttagagtgggcgttgagcaggccattagctcgtgccctgaggaggtgcatgggcggcatgggctctccatggaaattatgtgggcgcgaatggatgtggctctgcgctcacctgggcgaggacttctggccggtgccggggcactctgcatgaccctggcagaatcgagctgccctgactatgaaaggggaagaagagcatgcctgaccctccaccggcaccccacccctcactgctccacctggggcctgcctctgcgggtggctgggtcctggctgactgttgtgactgttgaggccctggggggggtggcgcatgggagttacgaggactggccccgtggggccccacttatgccccccccacattgtcaagggtttnnnnnnnnnnnnnnnnnnnnnnnnnnnnnnnnnnnnnnnnnnnnnnnnnnnnnnttgctcaaggacccccctgcgttctaaccggtgttaaacctctcccttcttcttttacccctcagtacaccccccccgtcccaatactccttcactgccccccctcattttatctacacgacgcacctcattcccattccccacttacaaaccacaccccctccatcatgcatctaaactgccgacccctaccctctctctcctcctctatcatccgtacctcaaccgcgtccgcattctggtggtccccatgtcctacgacaacctaccgcgatgccgccacgcatctgggacccgccgcaatcgactcttacctccat

SEQ ID NO: 368377 - DNA, 786 bp, Homo Sapiens
  misc_feature (593)..(609): n is a, c, g, or t
  misc_feature (699)..(710): n is a, c, g, or t
tgggtggcgaattcggcacgaggctcctgttactgtcccgcgaacccacatccctacaaagcaggaaagtatgcttgggagaggccaagtgagtggggaatcagcccaaagccaggcgtccagggtctccctcacctgaagctgactttttccccaccttggacagagggcgggagatgccatccccactgaacccagtgctttcaccagccatattagctcccactcaccccccgtcgtggaagcctcggccgtcacacctgcagggccggggcgtgcatggcctcagggatggcctgttcagctgctgggtgactcgggtccaggtgcctcaccacctgctgagctctgtgtgatttctggacacttctgctcgttgcctttgggctcagtgaagagtctggagtttatctggagtgaggtggccggttcttggtgggatctgagcaggtggaggcaatgcccagagctgtggcagccaccttgcagccgtgaagcaccagtgggaatgacagtcaagagaaccacggaagatgccaggcccctggaacccccaggagccagcacctggctttccaaattccgaagggggnnnnnnnnnnnnnnnnnccccccaatttgggtttaaaggggcaaaagaaaacaaggggggcaaaaccttcctgggaaaaagcccgggccccgggaggggaacaaaannnnnnnnnnnnaataaacaccaggtttttccactgtggggagccccttttggaaaatccccccggggggggtcccccgagaaaaaat

SEQ ID NO: 368378 - DNA, 1042 bp, Homo Sapiens
atgtccctgttgagcctctagaccggtttcttgcaacaaaagccttttccaccggttcctggttggccggctgagcgcaggtgtagtgtgcatccggggcaggcacgcgtttctggggccccagtgatgcctctgcttctcccgccctgcagggcgtcccggaggacctgctgttcttctacgagcacctcaggaagggcggcggcgtcatccgcgtggaccagagtctcctgctgtatcgccaccacccacaggcggcacgcactgcgtcctcgaatccgggcagacagttccctccttagaactgtgaggacacagaggtctcggccacctgcctgccgcgtgccgcagcgttaagttggaaagcaggccgccgtccgaggcttgcgtctcggccctacgggacgaccatctggacccaccgcgtccgcttcctggaagagcaggccctgccccgctgggcggccttcaccatctggaacgctggcaagcaggggcgccggctgtaccgcagcttgactgccggcagccagcgcaaggtggtggcattctgtgacgtggacgagaacaagatcaggaaaggcttctatggccacgaggactctcaggaaagacccaagccccgaatccccatcctgcacttccgagccgccggccacccttcgtcatctgcgtgaagctggacctcacagggggcacctttgaggacaaactgaggtcactgcacttgcaaggagggccaggacttccttcacttcagctgacggacccatggcagctgctcccagtgcatcccaggccagcaggagctttgtgagctgcaggcatggcgatggtgcgcctgttccacacccagcaggcgcaaccagagtctcgtgtgtgccgaccacaggagccaagccttttccactgtgtggactcatgtggccaaggctaggcctggtcacccaggaccctcaccacgtgaccccagccaatcgggacagttcaaggaggaggagacccctattacacaggttggaataaaatatttaaatctcgt

SEQ ID NO: 368379 - DNA, 1118 bp, Homo Sapiens
tgcatttagtagaagctatgcctctgatttttaaagaatggtttcaatctggtttaagcttctgagagaatttggataatgggatagatggtaacatttttttcttatccctgttacaggattctagatttgtgcagtaggattgtgggactgtgttttaggagagaaggatgtcttggatgtccagtttctgtggttaatcccttacttgcttatccagtgacagcaagaaactttctgatttaaagtctttcaattgaccaaaactttcttattggattctgtttcagttctcctattaagcactgcagaaacgaaaggaaagcctaggaatatgaaactaattaaaaaggcacttggtgatatgacatagtactatgctagccgttgtggatgtaacagttcatttcttatactgcattgtgccttcccaatgatgtcaaaccctagaaatattacagagatctacttttctggaaaaggggtgagctctgtattgatctgcagtgactctgtttagatattaaagtaggttctgaaaagcgacctgtgtggtccctctgattagactagttaatgtctatgtgatgggcatttatttatctttattagcaaggtttaaaagagcaaattatcaagacacctatatcttttggccagactatataatattttgtcagagtatgtgaagaggagacccaatttccaaatgaaggaactttgctttttctctgtcatgttgaagagctaatatactgtgtagattttcccctaaatatggctttcttagctttatagatgttgagataatatcttttgaggaacacatgtcaagcaggaaccttggcatagatttggtttcagttgttttaaggcttaattaatgaaatgccttaatcagctttccaaacatttttatatatgaatacagcagaccaaggagctggatctcctgctatccttacacgccttgtatctatcaactaaagctgtcattaatgacttgggcaaaatggcaagaggtataataaagtcttcctgtgaattagccagtagggtctgacacaactagtcaactcacaggttcctgactagtaccataccagtcttgtgcagca

SEQ ID NO: 368380 - DNA, 1182 bp, Homo Sapiens
  misc_feature (781)..(781): n is a, c, g, or t
ggctgtacggcccggagtaatgggatcaggctccaagacggccgttcagactgctaggtttagcttcaggggcagcccagggcagtgtagctgcatattgcatggatgaaaggctgaaggctgcctcctcttgcaggctggcttctgagattgcaccttcttctcctgctactcctccaaatctatgacccttcaaggcagagctgacctgtccggtaatcaaggcaatgcagccggccgcctagctacagttcacgagccagttgtcacccagtgggcggtgcatcctccagcccccgctcaccccagtctcccggacaaaatggagaaagcgcctccacagccccagcacgagggcctcaagtccaaggagcatcttccgcaacagcctgccgaaggcaagacggcgtcccgccgcgtcccacgcctccgggctgtggtcgagagccaggccttcaagaacatcctggtagacgagatggacatgatgcacgcccgtgcagccacgctcatccaagccaactggaggggctattggctccggcagaagctgatttcccagatgatggcggccaaggccatccaggaggcctggcggcgcttcaacaagagacacatccttcactccagcaagtcgttggtaaagaaaaacgagggcggaggaggggggacatacccttatcacgccccacagcaggtgcgcttccagcatccggaagagaaccgcccttctgtccccgcccatcatgggtgaacaaggagacccagtttcccttcccgnggacaatctgggtcctctgcagacccccaggtcgtccccccctcctggagccccccagcaggttcaggggacccccagaagcccctggggtggcagggtccctcatggctggccagaatcccgggggggtggggccttccttgccccccccaaaggggcccccatcagaatttccccggccccatggagtctgggaacgcaaaaatggccggccatggccttggtggacccgaaacccttcagaaagcccctgtgccctccctccaccatagaaggggtggcctcccgcgaaaagacacaaaacgggtaaaattggcccgggaaccccacaaaagaccagggggctctccgagaacacccacattttgtccccaaaagggttttgaaccaccgccaattat

SEQ ID NO: 368381 - DNA, 837 bp, Homo Sapiens
atccgtttcagccctgaactgaccaggatgacccgcctacgcggccgtttcagccctgaactgacgaggatgccccgcctaacgcggcccatttcagccctgaactgaccaggatgacccacctacgcgggcggcccgtttcagccctgaactgacgaggatgccccgcctgccccgcatatttcaaccctgaatctgaccaggatgccccgcctactcggcccgtttcagccctgaactgaccaggaggccccgcctgcctgaactgtttcagtcctgaactgcctggactgtttcagccctgaactgaccaggacgcaccgcctgcctggactgtttcagtcctgattgatgcctgtgcagctttgggaggcatgaccgcacctcctcctccctacacaccccagtgggggaagaggagagaaaatacgcctcttccctggctcttcactggagtcttagtgatttggtggagatttccaaggacaggcctccgggagctcagcgccgccctcctgttactgggcagttaggtgtgggaaggaacatactgacaacccatttttcttcaggaaaatcccattcaccacccttgaccttatattgctcagcccaagggtgtacatgggggaagtggtagtcacagggacagtaaggcaagcccaggtctgtgtctaatgactatttcttcttcagatagttgagaatttaaatgtgaatgcaaatgttacgcacaatgaacattactcctaaagacaatttacaccagaccaactatttaggatcagaacctcctgtttaacacaggcttgccaaagtaactgaagactatcccgg

SEQ ID NO: 368382 - DNA, 929 bp, Homo Sapiens
  misc_feature (44)..(80): n is a, c, g, or t
tgtatgatcatatagggcgaatggagctctccgcggggcggcgnnnnnnnnnnnnnnnnnnnnnnnnnnnnnnnnnnnnnatcaggccaaatcggccgagctcgaattcgtcgagagcggggcgggacgaggaaggcattcgccgcctgggggcgctgacgctggagcagccggagacaggttcttgctatgttgcccaggctggacttgaacttctggactcaagcaatcctgtctcagcctccccagtaactgagactacagaactggtggagtctctttcattgcagggatcttatgctggcaaaatccattccattggtgatgccttcagaaattttaaaaatctccgatccttagatttatcaaggaatttgatcactagccttaagggaatccagtatttatgttcactccaagacctgaatttatattataacaacattccttcattagtggaagtgtcccgtctacaaccgttacccttcctcaaagaactggatttgagacttaatcctgttgtaaggaaagatacagattataggctatttgctgtatatacactacaaactctggagaaattagatgaccgaactgtacgtgaaggtgagagaaaagctgccaagctgcattttagtcagttgggcaacagtgaaaattttcttttagaggtggaaaaaagctctagggagaagacaatgaaaaactgtgtaacaggtgagagctctgcatcaaaagtcagtgctaatgttgacagcaggatcgaaatggactcaaacaaaggactttttattcccttccccaaccgggaaataaaggattccctaagtacttctgcaactcagggcaatggtacacgtgatcagaaattagacaccttcccactggggacacagatctgtatggcacgaaccattttcaacagtgac

SEQ ID NO: 368383 - DNA, 750 bp, Homo Sapiens
tgaggggaatgtactcggccgacttgggtcttgctcaggacacacgggctcctgagaggtcaatctttgtctgcgcaagtgttggagcagaccttgtcgtgctggtagaagtccagttccccggagtccatgatcttcctgagcatgatgccgttcatgcggatggctctcttccagtccttcagggtggacttcccggccaggtgcacaaattcctttgggctgattacatgctcgtcgtactgaacacatttcacattgatgccgggacacacaaacttcctccagatgaggttggctctgctgtctccacaggtgatggggtacacaatctcagcttccaggttctccccctcttcagccatcttcactaacacggcttccttgagctgggaggaggctgtgaaggccgcggcagctgccgccgctgcattttctgtctccatgttatcttccgtcaggtcgcccccgtgaggggcacaagttggtcgtcaccaacacggtcttcaccccctccacaccactgccgtgccactgcagatgtcacggagttgtcacaaccaccacctcctccatgtgcacactcacgtcgggagtcgccatggctcagcggaagggacgccacaggccagcagcgtcagtcctccaggctcccaagtcctgggccgcacccgcctgcttaggcacccgcgggggcgcggcgtcgggagctgcgcgcggcggcgatcccgtacccgagggtacagcctg

SEQ ID NO: 368384 - DNA, 802 bp, Homo Sapiens
gtaacgggatcaatgcatcagaattttgaagaacaaatgcaaggcatgaagacccagctaattcagcgtgagtaccttacttcgatgttagacagtggatttgcagttacttagaatctcaggactctggatacctttatttttgcttcaggtggcttttaatcagattcaaaagggaatttagttttctagatattcttcgattatgggaggtaatgtggaccgaactaccatgtacaaatttccatcttcttctctgttgtgctattctggaatcagaaaagcagcaaataatggaaaagcattatggcttcaatgaaatacttaagcatatcaatgaattgtccatgaaaattgatgtggaagatatactctgcaaggcagaagcaatttctctacagatggtaaaatgcaaggaattgccacaagcagtctgtgagatccttgggcttcaaggcagtgaagttacaacaccagattcagacgtaggtgaagacggaaaatgttgtcatgactccttgtcctacagtctgcatttcaaagtaatgccttgccatacactctctgccagtggagccagaaatgacagaccaacacagataccagtgtcctcagatgtctgcagattaacacctgcatgatcactgttcttgcttttttgggaagagacactttgttgcaaccctttttcaagtacttgaaagttgaaaatttgaaatcttggtattgatcatgctttaaggtttatgtaaagaaagtgtactgatgttcttacattaaagctttacaaagatttaaacta

SEQ ID NO: 368385 - DNA, 1087 bp, Homo Sapiens
  misc_feature (382)..(404): n is a, c, g, or t
taggagcgaggcctgggtggcgaattcggcacgagggaaaggttgcgaagatggcgacggccttgagcgaggaggagctggacaatgaagactattactcgttgctgaacgtgcgcagggaggcctcttctgaagagctgaaagctgcctaccggaggctctgtatgctctaccatccagacaagcacagagacccagagctcaagtcacaggcggaacgactgtttaaccttgttcaccaggcttatgaagtgcttagtgacccccaaaccagggccatctatgatatatatgggaagagaggactggaaatggaaggatgggaggttgtggaaaggaggagaacccctgctgaaattcgagaggagtttgagcggctgcnnnnnnnnnnnnnnnnnnnnnnnttgcagcagcgaaccaatcccaagggaacgatcagcgttggagtagatgccaccgacctttttgatcgctatgatgaggagtatgaagatgtgtccggcagtagctttccgcagattgaaattaataaaatgcacatatcccagtccattgaggcacccttgacagcgacagacacagccatcctctctggaagcctctcaacccagaatggaaatggaggaggttccattaactttgcgctcagacgagtaacttcggcaaagggatgggggagagttggaatttggagctggagacctacaggggcctttgttcggtctcaagctgttccgtaatctcacaccaagatgctttgtgacaacaaactgtgctctgcagttttcatcccgtggaatccgacccggccctgaccactgtcctagctcggaaccctagaacaagaacaccgtgggcctacctgcagtgggcgatgggggtattccagtcagccatgaacactagcatcgtcccgaaacactaaaaaccagccactttcactgtgggccctccaactgggaaatccctcacttccttttgcactggatccagctatcaaccaccaaattccaaggattgacgatcggactttcctggggaaagggaatcccctcaaaacaggctttctttttggaaacgggtgggg

SEQ ID NO: 368386 - DNA, 896 bp, Homo Sapiens
  misc_feature (685)..(726): n is a, c, g, or t
ggggtccggagttctggccgacagcaggcgaggagtgggtagcagcgcctatgtgaagttagctaatctgagaaggcccacttctggttccatggatgatggcggttgagcagatgccaaaaaaggattggtacagcatcctgggagcagacccatctgcaaatatatcagacctaaaacaaaaatatcaaaaactcatattaatgtatcatccagataaacaaagtacagatgtaccagcaggaacagtggaggaatgtgtacagaagttcatcgaaattgatcaagcatggaaaattctaggaaatgaagagacaaaaagagagtatgacctgcagcggtgtggtaggtgcttgtgttgaggagccacagcacatcggcaactcttagaagcacactctgcagccattcctggggagcattttccagcatttgcaccaagtgttattgttgcctttattcctcccctccatcactgtttttaattatgccctattcttagcagtgactattgtgtatccattgagaagttaacaaaactactaggatgtggcttcttgtgaagccttgaaagctactttttataacatttgaaaaatgtttaattacacattactaactaatatgctttatatggtttaaaaactttttattaaaataaatatggattaacattttaattgtnnnnnnnnnnnnnnnnnnnnnnnnnnnnnnnnnnnnnnnnnngccgctttcgctttagagcctacctttgtgggtcgcccccggccccccaaaaactttttaaaaccttccctttgggggcggggcccccgttgggacagggaaaatggggccattagctggtttcccaaggaaaatccgggccatgaactaggggcttggaatcccccccc

SEQ ID NO: 368387 - DNA, 749 bp, Homo Sapiens
ggggaagccggtccggagttctggccgacagcaggcgaggagtgggtagcagcgcctatgtgaagttagctaatctgagaaggcccacttctggttccatggatgatggcggttgagcagatgccaaaaaaggattggtacagcatcctgggagcagacccatctgcaaatatatcagacctaaaacaaaaatatcaaaaactcatattaatgtatcatccagataaacaaagtacagatgtaccagcaggaacagtggaggaatgtgtacagaagttcatcgaaattgatcaagcatggaaaattctaggaaatgaagagacaaaaagagagtatgacctgcagcggtgtgaagatgatctaagaaatgtaggaccagtagatgctcaagtatatcttgaagaaatgtcttggaatgaaggtgatcactctttttatctgagttgcagatgtggtggaaaatacagtgtttccaaggatgaagccgaagaagttagcctgatttcttgtgatacatgttcactaattatagaacttcttcattataactaaaattgttcacaacttgaaatgctttaactgtggtattggagacatgatgagaagccgtttgagctttgtccatttccagggaaatggattatttgtcaagcccgattattttgcaaagaaaatataccatttatcaagccagaagaccaccctccggattaataggagaatgggataccaattcactctaatttggg

SEQ ID NO: 368388 - DNA, 1187 bp, Homo Sapiens
  misc_feature (69)..(160): n is a, c, g, or t
  misc_feature (1012)..(1012): n is a, c, g, or t
aggctggtaccggtctgggagtttgggatcgggcggacgagagagctgcgagctaacgggtccggacgnnnnnnnnnnnnnnnnnnnnnnnnnnnnnnnnnnnnnnnnnnnnnnnnnnnnnnnnnnnnnnnnnnnnnnnnnnnnnnnnnnnnnnnnnnnntgactgagggtcgtgctgcggcagcctggcgcccgacatgtgaaggggaacctgccaggggattactgtgagctcacagcaggataggctggccccgggggagtggggatgggcagaacctgggccaggagtattaggaaggagacctggaccctggtagggagctcagcacaagctcgcctgacccagatggtattggacacagtgccccgctgaacagcagctgttcccagcgccagaggaccccacagccacagtaggagctttgcgacccctacgcaactgcagctggggctggggccaccaggagaagggaccagcacctcagatgggaagcagaagggcaagacctactgcggaaaggatctcgatctctgcagcggagttttcccacactcacagagcttcctgtttttgtcctctcagggttggggtctggctcccctcctctggcagaggtttcgggccaggaggtgggacaacacttgcatggaacccaagtcccctgaagcccctgtgctctctgtagtgattggagttctagggcttccccgctgccgggaacgaggggccgcctcattgtctgctcatgaaccacaagggaccccgactgctccagactggattatttcaagccgccaaagagggggacccctagagctggcagccagcaatcccaagggactagagggctgcaatggactgacctccccctcaccagggtggcaggagaggcagagcctctgtggcctagctagtgacggagagacccgatgaagccctaagcaggggccccgcctgactcagggacaggacagccactcctgccaacgtgtgttctccctacatganggagggcgtggcaaaggacccctgccactgtcccctgctgcagcacgtgcccctatgccctttgcatgtggtgccagaataggcaagctacgccgtggctggcccctcaggggcttggggaaaagagtgggcacggtgaccgtcacccgcctgccggggacatgaaggctccccc

SEQ ID NO: 368389 - DNA, 1004 bp, Homo Sapiens
gggcgaggcctgggtggcgaatccggcacgaggggaggatgtgaatggggtgggggcagtcgcccctgtcccccacccttcccttcaagccgggcaggggtggggggaggggccgggctgaggcggcggcggcgactgctccagactggattatttcaagccgccaaagagggggacccctagagctggcagccagcaatcccaagggactagagggctgcaatggactgacctccccctcaccagggtggcaggagaggcagagcctctgtggcctagctagtgacggagagacccgatgaagccctaagcaggggccccgcctgactcagggacaggacagccactcctgccaacgtgtgttctccctacatgagggagggcgtggcaagggacccctgccactgtcccctgctgcagcacgtgcccctatgccctttgcatgtggtgccagaataggcaggctacgccgtggctggcccctcagcgggctgggaaaagagtggccacggtgaccgtcacccccctgccggcaccatgaagtgctccctgcgggtgtggttcctctccgtggccttcctgctggtgttcatcatgtccctgctcttcacctactcgcaccacagcatggccacgctcccctacctggactcagggggccctggatgggacgcaccgggtgaagctggtgcccgggctatgcccgccctgcagcgcctcagcaaggagaggctctccggcaagagctgtgcctgtcgccgctgcatgggcgatgccggtgccctcgactgggtttgacacccccttttgaacggaaacatttccccccggttgggacccgaagagaacactgggatctttccacccggaactcccacaaggcggggggaaccaaccccctccaacccccccgatgcggaagtcccccacaacacccaatgcaaagggggcctcacacacaccccgtcttccccgaataccgcgccctgggccgacggacaccc

SEQ ID NO: 368390 - DNA, 1107 bp, Homo Sapiens
  misc_feature (84)..(95): n is a, c, g, or t
  misc_feature (296)..(353): n is a, c, g, or t
aagaacgcggggtggagttaagcggcgaccgcgggggacggctctccaggatcaccaggcgggggcgagggatattcgcaggcnnnnnnnnnnnntatacggggaaggggcgggacataggagacgagaagagcgggggggatatagtcagggtggcggcgtctaaatatgagcgcccaccccgggggaagcataaagatcaacggggggggcaaacacgataggggagcggctaacaatagcggcagggcggggcgctaaaaagaaaagcggatatccgggccgggagcgcgtgnnnnnnnnnnnnnnnnnnnnnnnnnnnnnnnnnnnnnnnnnnnnnnnnnnnnnnnnnnagcggcgggcagaagcccgagaaggggagcgtgccaatggggggggcgccttgtaatgagggaggagaaaaatctggcgaaagggcggcgcacggggggccgcaggagaaaaacagggagcgggcaagggcaggggagggcaaggggcccgccccagagggtggccagcccatgccaggcggcaccgagacccccggggccggcctgggcccggctcgcccctgctggaccggtaacccgagccagatccgtccagtttgggaatttgccatgacgtcgccacgggagccccgagaaaaggaaggatgaggaagacggccccaaccctctccgaatccttccagctttgcttttcaacccctgacggggcagaggggccttccccaggcctgtcatggcacgctcgtctcttcggaggggcagaggggaggcggctcctaacgggctgaccacggaggagtccgatgtagacagctccgcagcccccagccccaacccctacggagatcacggcgtctgcagcaccacatcctgcactgggacacggggaaccgcgaacaacgggccggcaccctccacgtgccagtagacccgcccctcccagggcagccccatctcacgacaaccgggcatcacacagggagcacggcgcaggagcttgcaccctcccagcgccccatagccgccatctcgggagaccccgcgcgacagaaagcctggctgggcatcccaaaattccaggccagtaacagca

SEQ ID NO: 368391 - DNA, 1196 bp, Homo Sapiens
  misc_feature (287)..(323): n is a, c, g, or t
  misc_feature (995)..(995): n is a, c, g, or t
aaggaaggtaccggtccggaattcccgggatggcagaatggcatgccatttcatccacacagcatttagggaatgcttaaaaacaagcaatttcattatgaacggataactttagcttcggccatcatcctgaaaagggacatcataaattcctatgaaaaagtctctccttcactttgctgaactaaattcaacaaacaaatctcatctacctaagcttaaaacatctagatttaaatacatgaaaacgctgacgtttttcttaggggtatgagaatataggtacnnnnnnnnnnnnnnnnnnnnnnnnnnnnnnnnnnnnnacaaatgcctagtaaacctgcatcagttgcttattataaatataagcatttgaaataggtagcaggagtcaagaaccacgattacatccattttcccagcaagttcctcaccaatagttcactaacaaggagacatcctggctacctctgggaccccctcaaagacctccacttgacaacacaaagcagacagtactacacccttattacagatgaggacaccaaggttacctagaaagcagctgtgtcaataccgcctgctctgtggctacaggcattgcacttcccacctacccgcaagcccaggtgttaccactcccaggagcagcccttacccaagagacagaaagatcccatcaaacgcattccccttcctgtgtcaggatcaagacagtctacagtcatgtcagtgtgtactcctgccaaaactcctaccagcaaataaatttaagagctcagcctcagtctacttaacaacatcatgttgcaaccaggtgaagtcattcagaaatgcataattcaataacaactttagcaccaagatgaagttttatggatctgcaaacactctggtctgccccggggtcccccctttatcccccaaaaaacctccaacatttttcaaggattacttcttttgccgtgggcacctctcccaaaattgaggaggcngaggtaaacattccttaaaaagaagcctttccttttccttggccctggctaattcaggaaagccctcccgagagaggcatgtgaattccagaaggtcttggtccacctctccaaagggagaggggcttaggaagaaaagcctggagattctcaaaaagcgctttggggaaatcaaaaggggccaggggttttctacgggac

SEQ ID NO: 368392 - DNA, 1158 bp, Homo Sapiens
  misc_feature (76)..(76): n is a, c, g, or t
  misc_feature (115)..(115): n is a, c, g, or t
  misc_feature (215)..(215): n is a, c, g, or t
ttagaaaaagaaaagctgtggaaagtccacaaggaaatgggttgctaaaagccaacgggggccagatggttcccanccccaacgcggagggtttcaagtccccagctgttgccantgttagtttagcaagcaaagactcgtaggttgggaaccacgtactttaagtgtataaaggcatttctccctccgtagcgctcgaagccctccagtgtctnctggatcaagtccccaatgttctccctcttctgctggctgtagtcaatgccgtctccggagttcacattcatattcttaaagatgtcagggacagggaggatttgacggtaataaggcacccaggccttgcccaccatctcagctgacacaaccagatgctggaggaccttgagagtgacacagatgacctgtcggtttcggaggttcaaggcattttttatcgggataatgagctgtggaaggacaggtaggatcttgttcccaccgtgttccagcatgtcgtggattccttgccgagcaaaaaactcatagggaaatgtcatttcacaaagcccatcaaaaaacagaggcagataatgatggtaatccagcttctcaatttctaccttccaggcgattttgtttcctttcgaatcatgctcaagggcaattgggaagtcacctcgctcatagaattttcgaaatgctgtgggcttggttggtctttctttaaatgcccctgcagctggagggcctctcacgactgagtttttcatcatggctttgactgtgaaaccctcagaaaccagagagtgaggctggtgcaccgggagcggctgttgtgccagcagcttggtcctcttcggcatcttgtctgggcatttgtttaagctcagggtctctttttctgccaccatcttcctagaaaatgtcttgttctcataaaaagtgtagtaaaagaatcagtgggctttacggatgtgagcaggaggtctggaaaaaaatatcaaaaggcgcgataatggtagaaattcaacccctcgtagtgcccaggttgatccagatgtttggcagctcctaggtgaagggagctggaccctaggggcggggcgggaagagggcaggaccttggctagagctgcacaagcttccaaaggtaagcctcccggttgccaagccgct

SEQ ID NO: 368393 - DNA, 1469 bp, Homo Sapiens
  misc_feature (121)..(154): n is a, c, g, or t
agccgttgcgagctggagacgggagcgcaagcaggagtgtgagggggcaagtcacggcggctttcccaaggttgcaacccactattccgtcgcggctggtcgaacagcgggtgtgtcaacnnnnnnnnnnnnnnnnnnnnnnnnnnnnnnnnnncggaggactcgcgagcgcgcgcaaagaggtgaggcggttgggcagctagggagctgggttacggccgccatgcagccagggcgagctaaggccacgcgagtggtcgtgtcgcctctccgagggagagccgtcatggcccctccggcaagcgtgacttgcccagggaaagcggggccggcgcacacgaaggctttacggggtagggaacggccagagcgcggggcgtgcctgctccccgagggttattgttgggcctcggtgggccccaggggacccgtgtcaggggggactggggaatagattttgctccagccgagagcccagcaggctgcgggctgggcttcgtgccagggggggagtcgtcacagcaacccgagcgagcccgggtggccctccgcccgccccgacctggacccccggaccccgcagcccggggccgcagcaccttatcaaggtcgtccatcagcttcagctgggcccggcgctcgtactcctgccgcgtgaagtcccccttccgggggcccaccgtcctcctcggctggagcccgggcagcaggggctggagtcgccatcgggactgcggacacaagcggggctgggcccggggcctccctcttgggccagcctcgcggcctcctccctccgctgttccttctccacctcctgccagctgcttgcgccgccgcgcctcctctgctcgccgctgctgccgctccagcaggctggcccgcttttgggccatctcgtcctcaggcttgtcttcatcctggggacagacgccgagtccagccagccaccccctccccctacatggctggaggcccatcttccctccacccagcctgcccgccacccacctgtgcttttgttttcatcattgttctaaatgcacttagttggtgcctactgtatgcacagccccacactaagtactgggacacaacagggatgggatacactgggtgccgctcacacacacactgcttaacccaacggggaagacaaaagcagcagacagcagtgagtgccagcaaaagctcgtgttgggcacagacactctacactgcgggaggaccccggcctggcctggagacacccaggaaggcttcccagaggaagtaccctgtagaatgatcaggatttaactaggtgggcgtacagagcagagcgttccaggcagaggggacagctagtgccgaggccctgaggctggagcaaacctactggggggcacggaagtacaagggggccagtgtggctgggacacagagctgaggacagtggcgcaggactaagtcagaagtgagtacaggcc

SEQ ID NO: 368394 - DNA, 1169 bp, Homo Sapiens
gaatttccggatggagatatgacaaaggcagtgtctgtacaagcttccttcatgggccgccctccccactgcctcatccagtaagcgggagcaactacttctagaggtaaatctcacctggctatcgtgcagcgggtaaacaatgagggagaaggggatccattttatgaagttctgggaatcgtcaccttagaagatgtgattgaagaaatcatcaaatctgagattcttgatgaaacagatttatacactgacaacagaacgaaaaagaaagtggctcaccgggaacgaaagcaagatttttctgcctttaagcagacagacagtgagatgaaggttaaaatatcaccacagctcctcctggccatgcaccgtttcctagcaacagaagtagaagcatttagcccatcccagatgtcagagaagatccttctaaggctgctaaagcaccccaatgtcatccaggaactgaaatatgatgagaagaacaagaaagcccccgaatactacctctaccagcgcaacaagccagtagactacttcgttctcattctgcaggggaaagtggaagttgaagctgggaaagaaggtatgaagtttgaagcgagcgccttctcatactatggcgtgatggccctgacagcctctccaggtgaaaataagtccccctcctcgcccatgtggcttgaatcactcagactctctcagtcgaagcgaccggattgacgccgtcacacccaacactggggagcagcaataaccagctcaattcttcgcttcctccaagtctacatccccgattactcggtgcgagccctttcggatctgcagtttggttagatctccagacagcaatacccaaatgccttgatggcatcccggagggacaaaaccccccagtcttcagacagtgaaaacactaaaattcaattgactcctaccggaactgcatgacgggttggccaaacgagaaagccaacctgtcttaacgaaaagaactgtggtggccccccagtaaggccaaaccacaggctgggacaaacgaagggccccatttatagccgcccccttgtttgacaccccgcccaggggcgcgtacccccgccccagtatctcaaaggggccccgggccccggttattggcccccataaatttttaccggggggga

SEQ ID NO: 368395 - DNA, 730 bp, Homo Sapiens
tcccgattagacatcgtgaaggaggagcgaacatcatccaaggggcgctggagctccgcaccaagacggtggaggacgtgatgaccccactccgggactgcttcatgatcaccggcgaagccatcccggacttcaacaccatgtctgagatcatggagagcggctacacccgcattccagtgtttgaaggggagcgctccaatatcgtggacctgctgtttgtcaaagactgggccttcgtggatcccgatgactgtacccccctgaaaaccatcaccaaattttataaccaccccttgcactttgttttcaatgacaccaagttggacgctatgctggaagaatttaagaaaggtaaatctcacctggctatcgtgcagcgggtaaacaatgagggagaaggggatccattttatgaagttctgggaatcgtcaccttagaagatgtgattgaagaaatcatcaaatctgagattcttgatgaaacagatttatacactgacaacagaacgaaaaagaaagtggctcaccgggaacgaaagcaagatttttctgcctttaagcagacagacagtgagatgaaggttaaaatatcaccacagctcctcctgggccatgcaccgtttcctaggcaacagaagtaggaagcatttagcccatcccagatgttcagagaagatccttcttaaggctgcttaaagcaccccaatgtcgtcccgaaactgagaca

SEQ ID NO: 368396 - DNA, 1500 bp, Homo Sapiens
  misc_feature (112)..(112): n is a, c, g, or t
  misc_feature (142)..(142): n is a, c, g, or t
ttgggagaaaaaaaggcacaaaggggggcccgggccggaatttcgaccggggcggggggagcatttacaaacaagccgcgccaccgagaccggaccggagaacccggggccnaactattttatgccagagacgagaaagggnacgaccccgcaagagagaggagccaatgtccaaccgggctaataacaatccaggggggtcactgcgacgttcacagaggaacactgccggggcccaaccacaagacgactcaataggaggaaggtcacatttagggcaggcaaaacataaaggatatagccctcctgagagtagaaaatctaattctaaggcacccaaagtgcagtctaatactacttctgaactgtcaaggggacacctttctaaaagaagctgcagctcatcatctgctgtgatatgtccacaaccagaggattcatacagagccaatacttcagaaagacaaataacggggcaggtgcgtaataaagacaatgctcgaggagtgaatcggagggctactccctaatatttcacgaccactccctctagctctgccgaaaaacctctggcacttcagcagactgaatctaccatagaaattcgatgcgccacatggtcacggcaagaaaggagaccttcattaaccgacgaaggatcgagctgcaaggctggccaaaaagggacgcttccctggggaaaaaagcttcttggcgggccggagcagcagcaggtacttctggggaaggggggagaagttgaatgcccaaacccaagcgaaaagggccccctgccaccgttcctccgaagcggcccagcaaaaacatgtccttatcggggcattcgttacgcgggaggtggcgtgagaagggagcgcacaaaattttcggggcggcgcgcgcctcagagctagaaggcgggtggtaatattgtggataaacagctgtagcaaaacgaagtgtgtctcgaaggcacagtggcctcgggcgcccgcagggtaagaagaggcaccgagctcgtatgggttaagagcaaaaaggccccgggggaaacgttcccatgtcgaggggtccacaggaacagtttgcagaacagacgccaccgagtagctccgcgcacaacaccagaatccccgccccgacgccgcctctggcaagaggtggacccacaccccgaagaaaaaggatccacgccgcgaaacgtaagtaagatggccgcccgacagagggaaaacgaaccggccgaaacgagaattatacgcggggcggaggagagcaccaccccgccccaaggacataaccgggctccactcaggaccatgatgctgccgtgcctggggccaagacacaagcgcccagccgggcctccgtggcacacacagtggggcccggcgggtcctcgcccgcggggggacggaaaagcacgctcgggtccgtcccccgtattaactaggggggaagacaggacctcggacaacaacgctacaaccgggcgtgcgg

SEQ ID NO: 368397 - DNA, 1476 bp, Homo Sapiens
  misc_feature (29)..(29): n is a, c, g, or t
  misc_feature (1229)..(1263): n is a, c, g, or t
gtactagcgccgggcgcacgctgtggtanaccgcggcgctctctggcggtgcggccacacggtcggcagggtgagaaccccggaaccttcggcgaacgtggccccggcgagccttgggggtggttcgaccgcagatatatccgggtcggcccccacccggaatttcttcccttgcggtttcacggaatctggaaaagggggctccatattctccttccccatcccaggggctttttttcaaacccctgggcgtggttcaatttcatccttttcctcaaagataggccatcttggtgatgatgcagcaaccctggggaggcccacctgtattctcttggccaggtgcccatcggagagcaggtagtactggcaggacatggggatgccctcctcccgcgtggacagtctgctccacgatgaagacttcagcctgctgatggtctacttggatggtctggaagccccaggttttgataggtcaaatagcagagtttgccctcggtgtccaaggtcaggaagcgggcattgctgggcaccatccgccgccaggccatcaccctgagcagcaccaggttggcagcctctgagatgaagcccttgattgagctccaggggaaagaagtcactccagtcttcacttcctcaccctccttgatacttctggtcacagccagctgatcatcctgcttcagcaaactcatcttccgttccatggggaggatgaggaacttgatgaagtcttggctgtgctgttccatgagctccagcttctctgagagatagcccaggagggaatttccgcagagcattttgtccaagaagcctcggctagaggcatgcacgaagaggcactatgtcagcatgccgagtttttcctggtatttccctctctgcacctcaatggtcagctctccctgaggctccccggtgtctgagaccatggccagcgtctcagagaagaacagcatctgtagctcctccttgtctggggtgaggggcccgtgggaacagataaagcccctgctcctgggccccaatccaatcctctgaccccatgaccaccagtgtccccacagtccccacctgcctcctcatcccacagccttcctcactggcacagacaggtgaagactcctgccccatgtccccatgtccccggggggccttcccttgaagaatgtctacacacaggcctcaggccttttctgagtcccaggagaatcaaggannnnnnnnnnnnnnnnnnnnnnnnnnnnnnnnnnnctggactttcttccctcctctccagacttgcacccctcccgcacccccaaccccgacactgtctgagctcacggagggagctgaggaagtcgatggcttcagcattggcctctgggagtggcagacactccggacccgagggctggtggtccttagctctggagcctgtggagtaaaccttggaggacatgctgtgggcctgcctctacccga

SEQ ID NO: 368398 - DNA, 1221 bp, Homo Sapiens
  misc_feature (858)..(858): n is a, c, g, or t
  misc_feature (862)..(862): n is a, c, g, or t
  misc_feature (867)..(903): n is a, c, g, or t
  misc_feature (905)..(916): n is a, c, g, or t
  misc_feature (918)..(923): n is a, c, g, or t
  misc_feature (926)..(927): n is a, c, g, or t
  misc_feature (968)..(976): n is a, c, g, or t
  misc_feature (1104)..(1112): n is a, c, g, or t
aattctcgggatccggatagcgccagccccgcccagagagcgaaatcatggagccttccaagaccttcatgagaaacctgccaatcacaccaggctatagcggctttgtgccattcctcagctgccaaggaatgtccaaggaggatgacatgaaccactgtgtgaaaaccttccaggagaaaacacagcgctataaagaacagctgcgggaattgtgctgcgcagtggccactgccccgaaactgaaacctgtcaactccgaggagacggtcctgcaggccctgcaccagtacaatctgcagtaccaccccctgatcctggaatgcaaatatgtaaagaaacctctccaggagcccccgatccctggctgggcaggctacctgccgagagccaaggtcactgaatttggctgtggcacgagatacactgtcatggccaaaaactgctacaaggacttcctggagatcacggagagggccaagaaggcacatctgaaaccatatgaagaaatatatggagttagctccacaaaaacttctgctccgtctccaaaagttttgcagcatgaagagctgctgccaaaatatcccgatttttctattccagatggaagctgccctgcccttggaaggcccctgagagaggaccccaaaactccgctgacatgtggctgtgctcagaggccaagtataccatgcaggtggggaagatgtatctagagccactgtcctccgcaaagtatgcagaaggctagaagcgcagagtctcccaaggaggtgaactttaagtggggcttccaaaaactgccattctcatgttggaatcacgcccagtgagcaataaagaaatttagtaacnaganaaaannnnnnnnnnnnnnnnnnnnnnnnnnnnnnnnnnnnngnnnnnnnnnnnnannnnnnggnnggaagggtaaaaaggattccgtggtaggggaccttactttnnnnnnnnnccgggctttttatggaaaacagggttccctctttggggggtgggccttttaatttttaagacccggggcactcgtaataaaaaggcgccctttttgggaaaaaaccgcggaacccggggaatcttttnnnnnnnnnaactctttttgggcgggaggggaggcaactaattttgtacaacgcttccatggaaaattttttaaaggtcttttaggggtaaataaaagagacgttatcacacgggttt

SEQ ID NO: 368399 - DNA, 1128 bp, Homo Sapiens
  misc_feature (998)..(998): n is a, c, g, or t
  misc_feature (1049)..(1049): n is a, c, g, or t
  misc_feature (1061)..(1061): n is a, c, g, or t
  misc_feature (1078)..(1078): n is a, c, g, or t
  misc_feature (1080)..(1080): n is a, c, g, or t
gggtccggaatttccgggatttgaatgtacaccttgatgggaaaggtggctcatggaatgttttcttatcctttgaacactcctcatttcagaagctttgcttctgttgcaaccaaacatgacacttagcgtgctgagcaggaaggacaaggaaagagtaattcgcagactgttattacaggcccctccaggggaatttgtaaatgcctttgatgatctctgtctgcttatccgtgatgaaaaacttatgcaccaccaaggtgagtgtgcaggccaccaacactgccaaaaatattctgtaccactctgcatcgatggaaatccagtactcttgtctcaccacaatgtaatgggcgactaccgattttttgaccatcaaagcaaactttctttcaaatatgacctgcttcaaaatcagctgaaagacatccaaagtcatggtatcattcagaatgaggcagaatacctgagagttgttcttctgtgcgccttaaaactgtatgtgaatgaccactatccaaaaggaaattgcaacatgctgagaaaaactgtcaaaagtaaggagtacttgatagcttgcattgaagatcacaactatgaaacaggagagtgctggaacggactttggaaatctaaatggattttccaagttaacccatttctaacccaagtaaacgggaagaatatttgtgcaagctcacttcttcaggtgtgtcaaccttcatattgaaatatccaagggacctgaaagaaagcttggaaatagttaaccaagctcaactggctctaagttttgcaagggcttgtggaagagcaagagaacaaatttccagctgcagtcttggaaagaatacaagagttatccaatgaagccctgagaaaaattctacgaaggaatcttccagtgacccgcactcttattgactggcacagggatactctctgacttgaattctggtgatgtatcctaaattagggaaatgtccttttaatccaanaaatgggttggggccacctgggaatatataaagaatttgctcccggggttncaaaaacacaanaataaacccaccccccngngcgagtaagtatatattgccgtcgggtgcgcggtgcgtcctccttgta

SEQ ID NO: 368400 - DNA, 1109 bp, Homo Sapiens
  misc_feature (1023)..(1023): n is a, c, g, or t
cggtccggaattcccgggatctcgaagtgtggggtatgactttatctttccctggatctgcatgtggagaggacggagagtgggtgcacacaagccaaatctgagctactatcacactgaagcacacaatggccacgaaaggcatgaggttgaaatccacaaaagaggtgttccctctggcacatgtgtgcaacgacacaaataagatgacattaattaacccccaaggagccaaactcaatatctacaagcgaaaagtggaacaggcaattcaatcctatgaaaagcgcttgaataaaattgtttggcgagcattatctcaagaggaaaaagaaaagttagatgcaaacaaaccaatacagtacttggaaaacaaaacagttttaaaccaggctttagaacggttgaattggcccatttcactgaaagagctgtcgatgctggaaagtgaaatcctagctgggaaaatgtacatccagcaggccatggaactccaggaggctgccaagaagaattatgcaaacaaggccccgggagagcaacagaaattgcaaggaaatccaacaaagaaaaccaaatcaaaaagaccagatcccctcaaaggacagaaagttattgcaagatgtgatgaaaatggcttttattttccaaggggttgtgaagaagtgtgtgagccgcaacccaagcactggtgggcttcagttacggagacaccaaggtcgtgtccacctccttcatcacgcctgtggggggcgccatgccctgcccgctgctccagttggagattatgtgtttgccaaaaatgtgatacccaaaaggatttgacttctatgtccctgccattgtcatagcactttcccaatagcatgtggccacagaaaaaatctacacagtttttgaatggtaacaacccggagagaattttggccctcggaatgcaccttattaggatccgcccaaacaaggtatgcggctctcttggctctcatataaagtcaaccccccaattccttgaggattccnaaattaaaagtatttggaaggccaaagaaaccctggctttccctcttctgcgcccttgaaaagaacggaacaccccaggatttccc

SEQ ID NO: 368401 - DNA, 1173 bp, Homo Sapiens
  misc_feature (883)..(883): n is a, c, g, or t
  misc_feature (893)..(893): n is a, c, g, or t
  misc_feature (1085)..(1085): n is a, c, g, or t
gggggagaacaacataggctaggtagcgaggccgggtggtggaattcggcacgaggcagcgtctgaggttgctggtgttgtggccaatgcccccagtcctccggaatcttctagtttatgtgcttccaaatcagacgaaggtctcccagatggtctaagcaccaaagactctgcacagaagcagaagaactcgcctctgttgagtgtaagtagccaaacaataaccaaggagaataacagaaatgtccatttggagcactcagagcagaatcctggttcatcagcaggtgacacctcagcagcgcaccaggtggttttaggagaaaacttgatagccacagccctttgtctttctggcagtgggtctcagtctgatttgaaggatgtggccagcacagcaggagaggagggggacacaagccttcgggagagcctccatccagtcactcggtctcttaaggcagggtgccatactaagcagcttgcctccaggaattgctctgaagagaaatccccacaaacctccatcctaaaggaaggtaacagggacacaagcttggatttccgacctgtagtgtctccagcaaatggggttgaaggaagtccgagtggatcaggatgatgatcaagatagctcttccctgaagctttctcagaacattgctgtacagactgactttaagacagctgattcagaggtaaacacagatcaagatattgaaaagaatttggataaaatgatgacagagagaaccctgttgaaagagcgttaccaggaggtcctggacaaacagaggcaagtggagaatcagctcccagtgcaattaaagcagcttcagcaaaggagagaagaggaaaatgagaatcacccaggagatattanagggctattncaggatggtgaccataaagccgggaagaaacccagaggaggattgagaacgagaaggagggagtttttgcagaagggagcagggatctgaaagcctggaatttgagaaggctttggtgaagagggccgcaaagaaaaggtggtgggagaattggaacatgcgataaaactccaggaaatccgggagtggcgngaaaataaataggggaaccttttttgggaaaaagaactgaaaccggggccctgggaaaggggcaaaagatccttatttcccctagagc

SEQ ID NO: 368402 - DNA, 1144 bp, Homo Sapiens
  misc_feature (133)..(142): n is a, c, g, or t
  misc_feature (195)..(286): n is a, c, g, or t
aaaagaaaagggttcttcccaaagaaattccccagaggggccgtgtttctccccaaccccggggggtgtaaaaaaggcgggccagggcccccgtcttatataagcgccccccttttaggggccccctcttatnnnnnnnnnnggggttggcgtaaaatgggggccccaagggggaatttttaaggggcccctccnnnnnnnnnnnnnnnnnnnnnnnnnnnnnnnnnnnnnnnnnnnnnnnnnnnnnnnnnnnnnnnnnnnnnnnnnnnnnnnnnnnnnnnnnnnntagccttttcataatgatagcatttataagcagaaaattagcgctatttctgttcattatttagttttcctttgtcgctgacttcctatttcctacataggataggtactctgcaataataatttcttcatcttccagagttgagtcaagatagtcttcctcatgctctggaatgtcttccagtatctcattgacggcctcagtctccatgtcttcgtctgttgaggcactagaggttcctgcggagtcagaaggggacgtggctggcggggacaaagagtcttctggcgacagcggcagctcgggaggcaggcttcatccgttgtgagcaagggtctgggcggccagctggacgttgcctctgaacactctcagcgcagcttcggccacgagtgcatcaaaacccatgtacaccaatcggtcaatgttttcctgggaaggactttcttgacggttgtcggtttcaggattggaatcatttaaccaccacatctgaggattgctgagcagaatctgctgggccgcgtgcgtggagtagcccatccctttcagaaacctgatgttctcgaggcggcgtcttttcttctctttttcctccttccttatttgggccagttcctctctgcggttggtaatatgagtggccgcatgatccacgttcccatcacacgccctcaggccaagccgggcttcctgggcagtaaaccccaactgcaacaaattgtccacttttgatggatcaatatatagctctttaaagagctgacgtgccttgttaagatactcataagcctctacatcatttccactgtgatagtttcgaatcccttgaagtaagtagagtatcccgaaaattcc

SEQ ID NO: 368403 - DNA, 1611 bp, Homo Sapiens
  misc_feature (1099)..(1099): n is a, c, g, or t
tacgggcatcagacgcggtgccctcccggaagcagggcaacccccatcagcttggcgagtgcatcaggaaggagtggtgccagtgcctgtgaggtggtggcagcggggtgtccagaggcccttccgtgaccgcagtgctgcacctcctggcactacggccctaccgcaaggctgagctgctgcatagcgactgcagaaggacggcctgactgcaggcggacaaggactgcgctggatggcctcctccagcagtgtggccaacatgagtgctaaggacggcacgatgtacactgcaggactgcatgtacaaggatgtgcagaaggactggcctggctactcggagggggaccagcagctgctgaagcgggtgctcgtccggaagctgtgccagccacagagcactggcagcctccttggagaccctgctgcatccagtacccacaaggcgagcgtgggcgctcggcctcgcccccacagaagcggctgcagcctcctgatttcatcgaccccctagccaacaagaaaccccggatatcgcacttcactcagagagctcagcctgccgtcaacgggaagctgggcgtgcccaatggccgtgaggccttgctgcccaccccgggcccaccagccagcacggacaccctcagctccagcactcacctgcccccgcggctggagcccccgagggcccacgaccccctggccgatgtcagcaatgacctgggccacagcggccgagactgtgagcacggagaggcggctgccccagcccccactgtgcgcctcggcctgcccctgctgacggactgtgcccagcccagcaggccacacggcagcccctcgcgcagcaagcccaagaagaagtccaagaagcacaaagacaaggagagggcggctgaggacaagccccgggcccagcttccagactgtgcacctgccacccatgccacccccggagccccagcagacaccccaggtttaaacggaacctgcagcgtttccagtgttcccacgtccacgtcggagacgcctgactacttgctgaagtacgcagccatctcctcttcggagcagcgccagagctacaagaacgacttncatgccgagtacagcgagtaccgcgacctgcacgcccgcattgagcgcatcacgcggcggttcacccagctcgacgccccagctcggcagctctcccagggctccgaggagtatgagactactcgagggcagattttgcaggaatatcgaaaaatcaaaaagaccaacaccaactacagccaggagaagcaccgctgcgagtacctgcacagcaagctggcccacatcaagaggctcatcgccgagtacgaccagcggcagctgcaggcttggccctagccgccctccccgatggcggggatctgggagggtcgggggagcaaaaggcggtgagagaggatttatttaaaaaaataaacccgaggaagatgctcatctgagccagcaccgccggctttcagggcagcccctgcagacgtctggccctggcgggtggctgcaagcccacctcggccctccctgcgcttcctgagcagtccctgcttatgatgggctccccaggaagcccactg

SEQ ID NO: 368404 - DNA, 1163 bp, Homo Sapiens
  misc_feature (1059)..(1059): n is a, c, g, or t
cggtccggaattcccgggatttcagaggcatcagccccttcctcctcaccagctcccagagttcccatctccatccccaatcctaaagaaggaaatcgatgccacggtcctcaaggagccctggggacccaggcgccctactcgaagatgtggcccacaatcccagaccccggaggattgcccagcgaggccggaacaccagcaggatggcagaggacacctccccaaacatgaatgacaacatcctgttgcctgtccgcaacaatgaccaagccctaggcctgactcagtgcatgctgggatgtgtgtcctggttcacctgttttgcctgctccctgagaactcaggcccagcaggttctgtttaacacgtgcagatgcaagctgctgtgccagaagctcatggagaagacaggcattctgctcctctgtgctttcggattctggatgttttctattcacttaccatcgaaaatgaaagtctggcaggatgacagcataaatggtccactgcagagcttgaggttgtaccaggagaaggtgcgacatcacagtggggaaatccaggacctccgaggtagcatgaaccagctcattgccaagctccaggagatggaagccatgtccgatgagcaaaaaatggcccagaaaataatgaagatgatacacggagattacatcgaaaagccagactttgccctgaagtctataggggccagcattgactttgagcacacgtcagtcacctataaccatgagaaggcccactcctactggaactggatccagctgtggaactacgcacagcccccagacgtgatccttgagcccaacgtgacacctggcaattgctggggccttttgagggtgaccgcgcccaggtgaacatccaattgcgctcagaaggtttaccctgttccaacctcacgctgcagcacatccccaaggaccatctcattgtcaggcagccctggaacccgccccccaaggacttcgtcatctatgggcagggagggctcccccccagggaggaaggggttcctgggggggccatttcagnttccggccagaaaaacatccttccagagggttcccccctcccgaaaccacccgggcccggggggtttttaagtggggggccaagggggaaaatatcctcacgac

SEQ ID NO: 368405 - DNA, 759 bp, Homo Sapiens
  misc_feature (575)..(595): n is a, c, g, or t
  misc_feature (597)..(601): n is a, c, g, or t
  misc_feature (697)..(697): n is a, c, g, or t
ggtggtctaactggtgcaatcatgaagagagttaatggttaacagacattggccaataacaaaacaccccatggactgtgactcgagtatccaacaggcagtcagagctctcctggtctgaaagttgcattgccactgctaactttgggattgcatcagagaggccctgagtggggttgagatgaggttggtttggtttgatgttacacactcctcacctgttctttctgagtgtcctttctctgaaaggatttatgtttttcttcgttagatagtgacttctgagcaagctgatctcccctggcatgctccaacctgattggacaaaggaagctctatggcctgggagagagactattcttaatttttctttcttacaaaaactgatttttcccataaatatttttacttcagaggactaggaccattttgttttgggcccttctgctgaaaatttgtctcgtttaagaggcagctagaatctttaccatatgtatgaatttgtataatttcatttttggatagggataaacttttgcttctgataaaagcctggaatttcatctggtcccccnnnnnnnnnnnnnnnnnnnnnannnnnaaacatgtccgggccgccctcgggcccctccgagaaagcttttcttagaacccatttcgttttgggcgcgcgggggcccccagttaagggtaaagntgggaacaatggggtccattaaccctggtttttccccctaagggaggaatcccttggggttc

SEQ ID NO: 368406 - DNA, 876 bp, Homo Sapiens
accattcttccgttaggacattgaagcaccagccttactggtcaatgaaatttgcatgaaatctaaattgtatttctggaaatagggtcaatgtcgattaatagtagctttgtatagaaaggacagaatgccaaactagcataaaagtggtagttacgtgcagacggtggtagttctggagtcctggaagccacgaggtgctcatccatcacaaggccatcacagccgggtagaaatgcctgaggaaagcagcggagctgaccgtgccagcatttacacagggaacacttcttgggcagccaggtgtcatggggcacagacccacagttctctttgcgcacatcgtgctcacagttccgtccgtagaaggagggagggcaggcacaaaaggaccccagcatgcaggttcccccattcaggcagcaggttctgtttagctccttactgtgctgtatccccatgggcggcacacgctgggaagaccgaggccgaattgcaggctcctcctggggccaaatgctgtcatctctgaaggccaggtatccccgagatggacgagcaaattcctgatggcccagcccggcaactaatcccagttcaaaggctttagaaatggccatgatccaaatcacactgtaagagaagcgggccatcttcctgcagtccatagcttttaacaattagggggaaaagaggcgttagcatcgctttaattcagagtcattgccaaaacagccaaaggaaaacattcatctcctaaagcgaaaatggcaatttaagaagaaaatgagaaattcgttttccccagaaggtcgtagcagaagcaggagcaaggcgtccagggggaaactggaggctttcggccttggacggttt

SEQ ID NO: 368407 - DNA, 1058 bp, Homo Sapiens
  misc_feature (121)..(121): n is a, c, g, or t
  misc_feature (124)..(124): n is a, c, g, or t
  misc_feature (142)..(142): n is a, c, g, or t
ggattctgcccccgttaaatatttatagtaagtatgccttgagtgctgcatggaaggaaatgctcggtcagccactttggtaggaaggatggcccaatatagacaccaggaaaacctcttnggnccacagccatgtccgtanctggtaatccccattacaaaaaatcttttatattctggtaagtagcacattaatgtccccccactgtcacccctgcaagtatcaaaagctccatcttcatcacctggcacaaaatgaagtgttaagaattattccccccataactcctctcagaattacacatcttctcgagaaatataatgcacttctgcatcttgtaaaatattgatagcgttacccttcgtcttttgttcttccccagccacttataaaacactttgtgtttccgtccaggatttggaaaacatcaaaaggtaggcaaataggctgaatatagtcattatacctcactgctttttttaagtgaaaaagtgcaatatcatttacataagattccaaaatgaagtttggatgaataatgattgctttaattgttgatcttcttggtatgaggatagcgtccatgtatattatttagttccaatcacagctgtccacattaaaggatcgctagcgtctttagtgcagtgggcagctgtgaggacccacctctctctcactagggttcccccacatacatgaacaagaacacggccatatttaatctgcaggctcaccacccacggccatgcgccagcttgtgcttcggtgccccctataatccgagacccttgcaacacatccttaagcggtgctgttccacaatcctttgcatgcgcccctccctccctccgccgccggagcctcttgcggacggcctcagcctgctgggaactagccgccggttccggcgaggggccgagcctgtgccttccagagggcgagtagtggtctgagtataagtgagagctccccacaaacaacagcgccacgctcaggagccccagccgcattttggaggctggtgagcaagatggcggcaggtacttcccccgct

SEQ ID NO: 368408 - DNA, 1329 bp, Homo Sapiens
  misc_feature (1104)..(1104): n is a, c, g, or t
  misc_feature (1181)..(1181): n is a, c, g, or t
  misc_feature (1247)..(1247): n is a, c, g, or t
  misc_feature (1258)..(1258): n is a, c, g, or t
  misc_feature (1261)..(1261): n is a, c, g, or t
  misc_feature (1264)..(1264): n is a, c, g, or t
  misc_feature (1267)..(1267): n is a, c, g, or t
  misc_feature (1305)..(1305): n is a, c, g, or t
tggaccggtccggaattcccgggatctgctcccggctgcctagagcggcgcgggtaggccccgttgttctcgtgcgttaatagggaaagctgccttgattatcttgtaattctctaccaaaacaagaataaaaaagaacggcggctgtgtgtttgtgatattttctatcagcaaatttcagttcataccactagttagttctgtggaccagaggctggtttcagaatggaaagacctttgccgagtggtaaacgagagtcctgtgtatggaaactcacatgagtcagctcagtctagaagggtagtaatttctcataatatggataaagctctgaaagaagtgttcgactacagttatagagattacattctgtcctggtatggaaacctcagcagagatgagggacaactttaccatctgctcttggaagacttttgggaaattgccagacagctgcaccacagactgagtcacgtggatgtggttaaagttgtctgcaatgatgttgtgaggactttactcactcatttctgtgacctgaaagctgccaatgccagacatgaagaacagccaagaccttttgtgttgcacgcatgcttgaggaactcagatgatgaagtaagatttctacaaacgtgttctcgggttctggtgttttgtctcctcccctcaaaggatgtgcagtctctcagcttacgtataatgcttgcagaaattctcacaacaaaagtcttgaagccgggtagtggagttactgagtaatccagattacattaaccaaatgctgcttgcccagctggcgtacagagagcaaatgaatgagcatcacaagagagcctacacctatgccccctcttacgaggacttcatcaagctcattaacagcaactctgatgtggagttcttgaagcaactaaaggatcaaattgtagtggaaataatccaggcgactacaattagcagctttccccaactgaagaagcacaaaggtaaagaaactgcggcaatgaaagctgatctcctgagggccaggaacatgaagaggtacatcaaccaactgactgtggcaaagaagcagtgtgagaagagaatccgaatcctgngaggccctgcctatgaccagcaagaggatggggcccctgggatgaggggaagggcctcaaagccagaaagattcttncagtttgaagatatctttggccaatacgtttctaccccgagagcactttgggaatgggtacatggnaaagggatggnacnaanagnaagctctgaatttagtttttttggggaaatctgttggnaaacattttaaaaggaatggctaa

SEQ ID NO: 368409 - DNA, 1078 bp, Homo Sapiens
  misc_feature (1053)..(1053): n is a, c, g, or t
ggaattcccgggatggttcagggttgggaagaagagcagtgggattgccagttaaggttgtggaatcaaagagcaaaggctgttgtgaagtggaatatcaggctcaaatggaggtccctcccgaatgagcactgacacctgtgtgcccggacatccacgagggccccaacacctgtgctcctgacagctccatgcactaagcagggcacagtctggatccaggggactgactgtctctggcattgagcggttggtaatcaataccccaccctccctgttctcagtcacttggggacaaaaaagaaagcctgcagaacacgactgctagcccacctgccagagtagccaaggaaacaggatgcccgctaaagcatgttaaggaaggtgtggagcagctgctgggaactgtcttgatttaaaggaagacatggaggactgctgtatgctaccgtattacacggcccaaagcagccccgcaatgggcatgtttaacacctccatggggaagctgcagcggcaactgtacaaaggcgagtatactatattcaggtatgcacccatgtttgagagcgactttatccagatcagcaaaagaggagaagtgattgacgtgcacaaccgtgcccgaatggtaacaatgggcatcgttcgcaccagcccctgcctcacactacctgatgtcatgctgctggcccgaccagctgctgtctgtgacaatgccaggtgtggtcctgccacccaaaaaagagaaagtccgcctgcagagatcttagaactaaccagcctgcttcccctgatgtttgtgaaaataaccatccacaacagcgtaaaaaaacagctccacctgaagcctgccaccgggcccgctctttttatccttcagctgtgccctcccatccgaatgcaagtggaaaccctttttggttcacctggggaaaaaccctggtttacatcccgggaaaacacccaatgggaagggcttaacagtggaataccaagggggctaatccctaaagctggggaaaacacatttggggacccccactctggggntttgggaaaggaaaaagtggcccaa

SEQ ID NO: 368410 - DNA, 1109 bp, Homo Sapiens
gggggagttcccgcccccagacagaaccctgggttgctgggcaaccgatgcggcccccgcagctggtctctgtggtgctgggagcgagcccagtatagctcccacctcctgcgctggtaacctcccgtcccgcccgcctcccttgttgtcgcctctcctcgcgtcgcggaatccttgcccttggcactacttacatctctccgggtcccacaacaccttagcgcccacctgcttcaaagccaagctccaccgaaagcgaggcagtcagcccccggacatggcctcggcgctgactgatcgcacctctcgggccccgagcacctacacctacaccagccggccccgagcactgccctgccagcgcagccgttaccgggacagcctgacgcagccagatgaagaacctatgcattatggaaacataatgtatgacagaagggtaattcgaggtaacacttatgcactccagacagggccactgctcggacagcctgattctctagagctccagagacaacgggaggctaggaagagggctcttgccagaaaacaagcccaagagcagctcagaccacaaacacctgaacctgtggaaggcagaaagcatgtcgatgtgcaaacagaattataccttgaagaaattgctgatcgcataatagaagttgatatggaatgccaaacagatgcatttttggacagaccaccaacaccactctttattcctgccaaaactggcaaagatgtggccacccaaatactagaaggagagctctttgactttgatcttgaagttaaaccagtgttagaagttttggtggggaagacaattgagcagtctcttctggaagtaatggaagaagaagagctggctaacctgcgggccagtcagcgtgagtatgaagaactacggaatagtgaacgtgctgaagttcaacgacttgaagagccagaaggggacaccgagaagaaaaagacggcgtaagaaacgcagggggaaataatgcacaagcaccacgagacatcccaaaaatcgccgcccgagcatttgcacagcgttacctggttgaccttctcccgtctgtttttggcagccttcaggaaaatggctt

SEQ ID NO: 368411 - DNA, 1085 bp, Homo Sapiens
  misc_feature (963)..(965): n is a, c, g, or t
  misc_feature (976)..(976): n is a, c, g, or t
ggaattcccgggatcagtgactcactcacatgctcacaaattcagcaatttgttcatgatagctgcttggcggggtggataatatcctggtcaaaatgactgagccacatcagtgatgtcgttcctccaaagatgccgtgggtcagatatctgttcatgtggacatcactgccaccccaggaacgggagatcataaagtcactgtaaaagtgattgctattaatgacctaaactggcagaccacagcaatgttccgcccctttgtggaagtttgtatactgggacccaaccttggagacaagaagagaaaacaaggcacaaaaacaaaaagcaacacatggtcaccaaagtacaatgaaaacatttcagttcattctcggaaaggaaaatcggccaggggcttatgaacttcatctctcagtaaaggattactgctttgccaaaaaagatcgaattatccggaatgacagccattcagctacagaacatagcagaaaagggaagctatggggcatggtatcctcttctgaaaaatatctctatggatgaaactggtttgactatccttagaatactctctcagaggaccagtgatgatgtggctaaagaatttgtaagacttaaatctgaaacaagatctactgaagagagtgcttgaaacaaacactgcaagctaaatacataactataattgtttgactactgcatgcatgtgcaaatacatgggaatgtttagttcactacattttcatgtttgccagtactcatgtacgatgtctacaaggtatgtaaaaaacctgctggacttttataccaattctggtctttgggaaatcagtggttccatgaagtgccaaaattatgatggaaaagggaaatatccagaaccacttttaaacatggttattttggtttcctttacccatttcaaattcatttaaacataattttttaaaaactttnnnacccatacctntgtatatcatggggcgggccggttctaaagaaatccctccaggggcccacagtttaacccggtaccccacttttcttggtaacaaagtggtccccccataacggaaccc

SEQ ID NO: 368412 - DNA, 1076 bp, Homo Sapiens
  misc_feature (896)..(896): n is a, c, g, or t
ggtaccggtccggaattcccgggatcgccggccccagctccagccccgcagcccaccgtgcaaacatgcttagacagagaagagattaacttcagtggcttcccactaattacagagattaagaagtggctgcctgaactattttccaaaggatacacattacaaattattgaatagggcagctaaccaagaagatcctattggtttggggggaacacaacttccagcagccacaagggatgctgctactcaggtgccaactgaaacaagctcctccacagaaggtttcgtttaggttttgtgtcgtgatggggaaacagcaaagcaaactcaaacacagcacttataaatacggcaggcctgatgaaattatagaagagagaattcaaactaaagcttttcaagagtatagcccagctcacatggataccgtctctgtcgtggctgctttgaactcagacctttgtgtctctggagggaaagataagacagttgtggcctataattggaaaactggaaatgtggtgaaaaggttcaaaggacatgaacatgagatcaccaaggtagcctgtattcccaaatccagccagttcttcagtgcctctcgtgacaggatggtcatgatgtgggacttgcacggttcctcacaaccaaggcagcaattgtgtggccatgccatggtggtcaccggattggctgtgagtccagactcatcacagctgtgcactggctctcgggacaacaccctgcttctgtgggatgtggtgacaggacagagtgtggaaagagcatctgtctccaggaacgtggtcactcacctgtgctgggtccccagagaaccatacatactacagacctctgaaagataaaaccctcagaatatgggacaggtcggngggctgcagggtaactcatatggttccctgcaaagcagcacatttcagacctactgtggaagaccagggtggatgggacacaagtgtatctcctgcagcaatggctttgggaaggaaaggctggtgaacccaccttgtggggacctaagaacgactccaaaacagatatggggagtataa

SEQ ID NO: 368413 - DNA, 1162 bp, Homo Sapiens
  misc_feature (49)..(49): n is a, c, g, or t
tcttcgggactgtttctggaaggcctggggcggccggcaatttgccttntgcagtctcagggacactcctctgggtccttacaagcagcatcttgagaggtagacagtttccccttcttcacttttgaagaccgcagtctctgtcttggcatctacagtgaggctgagcgtttccttcatggccgccattcatcactgtctcagttaccttgtctgtactttttgcatcctcctctccgtcagagctggcttccatggccacactgcctgccgcttctggctgcactgccagggcagccgcactgggagtcagagggtccatgggttcagtgctggtttccatttccactggagaattactccttaaagaatcttttgtgctcagggaagacgtgaactctgaaaaagaagcccagcccgtctctttagttggcatcggctcctctgtgctccagacatcagatcccacagaatccaatggagcaccgtgggttgtttccattgggacatcaaagttagctgaccagttgggtggttcactcaggtccacctccattttatcctccgtgttggcactgctgggttcaaacaagtcttgctttgctccatcttcttcttcagagtctgtactttcctcactgtctgtactccccgagctggatcgtctttgggattctggtgtgaatgcgatgtgcttttcctcccatatatcttcctcatcagagccaccatcatcaaactgttgtattctttccttacaacatgcttcaaacaaggcaatatttccactttcatttgtattgagagtaaagttgatgtctgatactcgatcaaaagaaacattgccaatgtcatcttgatctgcaaacttctcatcgttgaagccaaactggtcaataaaattggacgtcatttgttgcatctgataatcagaaaaggctagatctaccgtgttcctcttgttagtttctcctaaggagcttgtgtagaacgtctcccatcgttccctgacttcgtcgggaagatctttgataagctgctgcactaatgcactgttggggcccttgtcagtgctgtgcacgatacagttagctatcctcgttaggtgtcccatgtgaccatgccgtcttcctccctcagactgagacaaggtagagcccaa

SEQ ID NO: 368414 - DNA, 1021 bp, Homo Sapiens
ggcctgggtggcgaattcggcacgaggccctgggccaaaatggcggcctacctgcagtggcggcgcttcgttttcttcgacaaggagctggtgaaggagccgctgagcaatgatggggccgctcccggggccacacctgcttctggatccgctgcttccaagttcctttgcctccctcctggcatcactgtctgcgactcaggccgagggagcctggtctttggagatatggaaggccagatctggttcttgccacgttccctacagcttacaggcttccaagcctacaaactacgggtgacacacctgtaccaactgaagcagcacaatattctggcatctgttggagaagatgaagagggcatcaaccccttggttaagatctggaacctggagaagagagatggtggcaatccactctgcactcgaatcttccctgctattccaggaacagagccaactgttgtatcttgtttgactgtccatgaaaatctcaactttatggccattggtttcacagatggcagtgttacattgaacaaaggagacatcacccgggaccggcatagcaagacccagattttgcacaagggcaactatcctgtaactggattggcctttcgccaagcaggaaagaccactcacttgtttgttgtgacaacagagaacgtccagtcctatatagtttctggaaaagactaccctcgcgtggagttggacacccatggttgtggcctgcgctgctcagccctaagtgacccttctcaggacctgcagttcattgtggccggggatgagtgtgtctacttgtaccagcctgatgaacgtgggccctgcttcgccctttgagggcccataacctcattgcccactggtttagaagcttaccttatcattggtcctcccgtgaacgggaaggtttccccccaagtcagaatttacccggccagggaattcccggagctcccaacaagcagattccttaaacatctatggacccgggggccacaaagttcctaac

SEQ ID NO: 368415 - DNA, 442 bp, Homo Sapiens
  misc_feature (35)..(35): n is a, c, g, or t
aatggtccactgagatctctgcctcccaaatgtgnaattcctcagtgaacagcacagcctgctcaaacttcatatttaagcactggacaagacactgtttccaatcctacttatatgaaccagaactctaacctacagtcagctactggtacaactgcttacacacagcaaatggggatgtctgtggatatgtcatcttatcagaacactacttccaatttgcctcaactggcaggctttccggtgacagttccagctcatccagttgcacagcagcacacaaattaccatcagcagcctctcctttagaaacaaatcaagcattttcttgaaagccttcataagtgtattattcagtccttgtgataccaacctgaaaatattaaaacttttttccctctcaactcaaaaggaccatgaataaataaagcacaaaaacctc

SEQ ID NO: 368416 - DNA, 1073 bp, Homo Sapiens
ggtccggaattctcgggatcgcgcgcagctggtcggcccgcggcggtgctgcgcggatccggcgtcggggcccggcatggcgggggccggggccaagccgggccggacccggacctaaatgcctctgttcttctccgcgctgttggtcttgctgctagttgcgcttagcgccctctttctaggccggtggcttgtggtccggttggccaccaagtggtgtcagcggaagctgcaggcggagctaaagattggctccttccgctttttttggatccagaatgtcagtcttaagtttcagcaacaccagcaaacagtggaaattgataacctgtggatttccagcaaactccttagccatgatcttccacactatgtggcattgtgctttggagaagtgcgtatcagaacggacctacagaaagtttctgacctgtctgccccattctcccagagcgctggggtggatcaaaaggaactgtccttcagcccatccttattgaagatcttctgccaactattctccattcatgtagatgctataaacatcatggttctcaaggtggatacctctgagtccttatggcatattcagatcagtagaagcagatttctttttggatagtgatggggaaagggtaatctgtgaggggagcttatgtaagatcaacagcaaaggtctaaaagagtggtcagctggaggacacctgccctagtggagcttttcactgggccctgggacctgtggtcttaagggtgggctttacccagtccggatctttcctggctatcaactgggggatgggtgggacacctcccatgctgtaaatggcatgaagggccctctttccaaaacccaattggctggggccaggggccccaagccttaacaattctaagccgtggttccctgtttcaaaagggggaccgaaaaaacctttatttggagcgcaacttgtgccctggggcctatttcctttcttcccgcaagcttgcccaaacccaagttcaagggtgtaaaatgtggagaaacccccgaggcgggggaattgtgccccttgaaaatatgccgagaa

SEQ ID NO: 368417 - DNA, 1065 bp, Homo Sapiens
gggtttaatgaaagggccgaaaagagttagaaggccctacaggcctttagggtgtaagtttccaaagggggaaaaatggaaaaacaatccccttactggcgggatttaatacattccatctttaacgcaaacatattcccttgggggatatttgtctccctttgaaccctcaacttagctaataaatggcacagacttgtaggacaaaatccagaatcagggagaggaacatcggggagaatgtgggggtgggggtgatgccaaagaggattgtcatcatttcctttaaaaatgacaagtgactaccaaggagtagattctaccatgacctgaatggggtttgactgggtcccgctacaaaccccaagtcaagcttaagttgaaatccttgtaagtctgtgctcttgcctcttcatggtcaggtagaggttcacttcacacacactgctgttaacacagcagctgacgtgacaatgaaaagtcccatcatcacctcatagatgggatagacgaaaatggaaataggtaaaatagggatgagagtcagagaaagaaaattcaaactgatgtctctaggctctgtagagagctgtccgactgggggagctgcacttggttgcaatccaccgcattgttgtttgtattggcatatggagtgacctcaccatccaacaggagcaccctagtcccaaacttagaagccttgtcaggattttcctcctcttcctcatccaggagtggtgttcgtggcaactcctcctctatggcgaattcagggtgggtcatgaagctgtggatggacttttggttgtagggtttctgaatgctttcgtggagggaactatggaacgctttgaccactttgatctgagtctggatacggttcaggccccggaaccagaggatctggcctcggcgcagctccatctcagcatggtcaatctcatccagtccctcggcatccttggtgatctcctctttggtggtgccatgcccagcctccttcaggaacttcagggatcgggtaggtattgcggagatgaacatcccgggaattccggaccc

SEQ ID NO: 368418 - DNA, 886 bp, Homo Sapiens
  misc_feature (310)..(412): n is a, c, g, or t
  misc_feature (465)..(552): n is a, c, g, or t
  misc_feature (589)..(597): n is a, c, g, or t
  misc_feature (637)..(678): n is a, c, g, or t
  misc_feature (720)..(740): n is a, c, g, or t
  misc_feature (744)..(814): n is a, c, g, or t
gaatagcacacatggaaaagtgcacaaaacataaatgtaaaacctaatgatttatcaaaaagtgagcctgggttagcatcacccatgccatggtactgaacagtcaagcagaagacctctgcagggtaattggtgttccaactacttttgtgataatcgcttccttgcttttggagttgtaccacctgagaatgtgtccctaaacactatagtttcgttttgtctgttccttgaactttatgtaaattgaattatacagtattattttgtgtctgccttcttttgcacaagaatacacttgcaaaactcnnnnnnnnnnnnnnnnnnnnnnnnnnnnnnnnnnnnnnnnnnnnnnnnnnnnnnnnnnnnnnnnnnnnnnnnnnnnnnnnnnnnnnnnnnnnnnnnnnnnnnngggggggggcccttaaaaaatccccccggggggcccaatttttcccgcccccnnnnnnnnnnnnnnnnnnnnnnnnnnnnnnnnnnnnnnnnnnnnnnnnnnnnnnnnnnnnnnnnnnnnnnnnnnnnnnnnnnnnnnnntggaaagtggggattttttgaaagaaacccttttttnnnnnnnnnacatattgggacaaccccccccaaaaaatttaacgccccnnnnnnnnnnnnnnnnnnnnnnnnnnnnnnnnnnnnnnnnnnccccaaatttctcgtcgcttaaaaaattttcttctcgggggnnnnnnnnnnnnnnnnnnnnncccnnnnnnnnnnnnnnnnnnnnnnnnnnnnnnnnnnnnnnnnnnnnnnnnnnnnnnnnnnnnnnnnnnnnnnnttggctctcaaagggggttggggggaaaaaaacgccccaccccctttttggagaggggtttttttgtgtttt

SEQ ID NO: 368419 - DNA, 1292 bp, Homo Sapiens
  misc_feature (1106)..(1106): n is a, c, g, or t
  misc_feature (1126)..(1126): n is a, c, g, or t
agcgggcggcgccctcgtccgcttccaagcccagcacagacttcggtttctccgcctccatcccctttacgagaagaggagatcaaaaaatattgccctttaggtgctcgtgatggtcctgtgggttcgttcagttgccagaaaagaatggtaacatgaacagcggagcgtgagagcgtcaccgggggcaagggacgagattgatgggcagagcgctcacttctcagaggatcgcattccgaggaccgcgcgaggaagggacgtcgcggcgccaccacttcctggctggactccgctgacatctgtagcctcctttccaccaggttcccggggctcccagccgctgcctgcagaggagcgtgtagacagcgcgcgagggtccggcacttcgtggacctccatccgaaccggagttctgcccggatcccgagtccctggatcccggtggagcccgccggcaagctggctccggagggagttgaacttgagttcagatggccaactccctctgaatcctgcagattggtgctgagcacgcaacaaaagtttgtagcttctcagtttctggtgcttcgcaggggagaggaaaggaatttgacattaaacacaagaagcagtcagggagccatctcctttaacttttcttctctgttaccatttgcaatgaagaggaaacagaagagatttctgcagatgactttgttgttcacggtggctttaattttcctgcctaacgttggtctctggtctctgtacaaggataagcacctggtgaagtcagcggagcccggggagcagcaggtaagtgccacccagagaaagatcacagaaggattggtaaggcagtgatcctcgcgcggggactcgagaaagccggtgtgggatcgccttgggttttcccccaagtcttgacagagctgattattacaagactctagagactttggggttttaagcaagtagatgttttaagattgcagccagtaacatcgtgacatgtacaactagtaaagaaggataagacagggtcagaagaagagaaagatatctttcaccatttggtcttagggtgatttttgactttgaggtggatgaaaggtaactgntcagctatggaggtgggaanggggttttggggcaagtttcactgacaaggataaggtttttgcttttcattttggaatgcatgtctaggttcaggtggatttggcccaactaaatcatttagattggggaaggggttccttaaaaatcaagccattggttttcccgtaattttgggtggaaaattt

SEQ ID NO: 368420 - DNA, 1354 bp, Homo Sapiens
  misc_feature (64)..(72): n is a, c, g, or t
  misc_feature (188)..(197): n is a, c, g, or t
  misc_feature (271)..(271): n is a, c, g, or t
  misc_feature (288)..(288): n is a, c, g, or t
gttgtgagcccgtgggttctaggagtgggcgggcgacgcccaggtttttccgccaatcccccannnnnnnnncaacccccccttccttttaaatgccccccccattaattaataaggccccagaaagaagtgttccttgagctgctgtcttccttcaagttgccttggtggggaggtgggtccccgtnnnnnnnnnnatgtttggcaagggggggcaccccacggtaaatgctacagtgtgctttaggggcaggggaggggtgtagggacnatgtcatcccctgggtnccaccgagctcaggggccctggacagaggaggcccaccaggctggagccctgggcaaggggaaggctgaggtcggctaggctgaagacgggcagcacaggctgaggtctaagctaaggaattttacccctccctaaccctccttcccgcctacccaagacatttttgacatcagaaagaaaaatgaatctgcaacttcaatagtcaggtcctgtctctgcaaataatgatgctttcgaagtttcagttgaaccgtccctcgcgaaaaagtttctttaaatgtaagagcaggtcctttacaaactgggccacctcgattttggtgtctcggacatgcaagctggaaaactgcccagctgagaccttgtgcgggcagaatccgctaagcatccgtctgggtcttctcggatggcactgcagcctgacacgttgagtcagggattccaagggctgcacagtacatgccagctgtcaggttgatgctccataccatgctgccattgcagagcggagccagtctctgcacgatcaacccctgccgtctgggggcctcaaatttcccttctgcagaatgagtgctgtggagggcggctcctgggcttggcccctgcagccatgtcgccttttcctgctcttccctcgttttcctagaagtcctccagaaacccccacagcagaggccacggcatttgccttggtctgtgcaactcccggagccccgcccgggtgagtcaacgccccttatcccccataaccaccaaaagccctgccgggagcggtgggcaggggcgcccccgcgcgtgggagaaggcgctggcgcggcggttgcggcggcgatggcccgcggagataggggggtggccttatgtaacgggagatgggcccgataagcgggatctgcgcggccgggccctcctccgcggcctccggcggtggccggtccgggaggcaggggtgggcgcgcagaccggccagtctggaagctgcggaggctggcgagggggcggcaaaggtggcggtccgagcgccaggcagggcaagggccggctggacacccgagcacggga

SEQ ID NO: 368421 - DNA, 1244 bp, Homo Sapiens
  misc_feature (50)..(50): n is a, c, g, or t
  misc_feature (206)..(206): n is a, c, g, or t
ttttcccatgaccacttccgtaccatttcattgaatgggaaagcttttcngtccattatcctttcgtattctacataatccagatgagtaagataaaccaatgtttccctcatattcttatacaaatttatggaatctgtatccttcatgaatcttctcacaacttctcctttgatcattctctacaaccaatacttcctctggtntagccattcgactaaccattaataaacggaccttgaataacatgggcaaatatagctgtctcctgggaggaacatcaaaatgttgacttccagaaagcaacggagaggcagatgtagagaatggactctctctatagagttcagcagccaaatgattccagtattcaagacaaattttaaagatttcagtttcttctacttcagataccaacaacatataatgaagggcctccataagagtttccctgagatttaatcttttttctataagttgatcatgttccttaagaaaggtgcagagaaacaaactgagattttgaatgaagttctgttcatcatcttttccatttgagtacgcaagtcgaatattggtatttaaaggtaagcatctgctttagttccatcattgtcagagtaaatagtgttacaaattgttcttcatattggcttacactcacaccagcaatctcagtgaggcacttcagagagacatttcgaaacattggaacattcaggaacttataaatcaatgtgctgattaatttggtctcaaaaatatatcccaggggaatccagttcagaaatctgagcaatgtttccaaggttgcatgtacaagtggagcattttgagaattttccattacaacactgacacagttgaaatatctgtgagaattcattgcacatgctgtcttttaaatgcttagatttgacttgggttatctgtccactagagaaatcaaatacttcttcactcaagagtttaagaatcaccatattattttgacagagactttcgctggtcctacttgctccaacaatatcactgataaaagttggccaatgtttgggccattcttgtttcagtatctgaacaaggatcatatttaatttgtccgatatacaccttttctttctctacacaagttgggtcagatgacgtcttgataatgaggccaacaacgtatttttttattccttcgcactggttccttggaagaatcttccaccttgtttttatcacattttccaaaattc

SEQ ID NO: 368422 - DNA, 1191 bp, Homo Sapiens
gggcccgccaagcgcctcggagcgcgcaggatgcgctgggcggccgccaccctccgtggcaaggcgaggccccgggggcgggccggggtcaccacgcctgccccagggaaccgcacaggcacgtgcgctaagctgcggctacccccgcaagcaaccttccaagtccttcgtggcaatggtgcttccgtggggaccgtgctcatgttccgctgcccctccaaccaccagatggtggggtctgggctcctcacctgcacctggaaggggagcatcgctgagtggtcttcagggtccccagtgtgcaaactggtgccaccacacgagacctttggcttcaaggtggccgtgatcgcctccattgtgagctgtgccatcatcctgctcatgtccatggccttcctcacctgctgcctcctcaagtgcgtgaagaagagcaagcggcggcgctccaacaggtcagcccagctgtggtcccagctgaaagatgaggacttggagacggtgcaggccgcataccttggcctcaagcacttcaacaaacccgggagcggggcccagccaggcgcacgacaaccacagcttcaccacagaccatggtgagagcaccagcaagctggccagtgtgacccgcagcgtggacaaggaccctgggatccccagagctctaagcctcagtggctcctccagctcaccccaagcccaggtgatggtgcacatggcaaaccccagacagcccctgcctgcctctgggctggccacaggaatgccacaacagcccgcagcatatgccctagggtgaccacgcagtgaggctggtgcccatgctccacactgggaggccaggctgaccccaccagccagtcagctacaactccacatcaactccacatgcgcccagctcgagactgatgagtggaatcagcttccaggtgtagggaccccttgaggggccgagctgacatccaaggctgaggaccccagtggggagtgttctgttccggcatatcctggccgtaacgatttttatagttatggactacttgaaaccactactgagggtaattttactagctgtggcctcccacttaactagcattcctttaaaagagactgggaaatgttttaagcaaatctagttttgtataataaaataagaaaatagcaataaacttcttttcagcaactacagaa

SEQ ID NO: 368423 - DNA, 1246 bp, Homo Sapiens
tcgtcatggaagccctcgaggaagctctccagcagcttatctgcggtgtcgatccggtccgcgtactcgcccacaatccagatcatggcagcccgggcctcaggctcatccagggagtccagattctcacacagtgtggcaatcacactctcatacttgttggggtacttgcggaagatgtccttgatgaccacgatggcctcctggaccacatagttgaccttggtctggatgaggtcgagcagcgtgctcacacagcgctccgcagattgctccaccttgatggcgcagcggccaatagcacgcacagccttccgtacaaagtccacatccacttctgttgcgtactctttcagctctgccaacacctgggcgatgttggcctgagaggccaggcggagtcatgatgtccagcgtctccagcttcacgtagataagggtcgttgaacttcacgaagaacaccttcatctcatgcattcaaggatctcaggccttttctgcacgatgagattgatgttgcgcagggccacatactgctagctctggatcggctgacagcagtgtgaccaggggtggggccagcttcttgagcagtgtgccgtagtaatccaagtccttagacaacatctccatgaacttcatcagcaccttcacagcagagagcaccacagcggagttggcatgggagagcctgggggtgacccgctcacagatgctctgggcctcgcggtcgtccttgggcatatagttggcgaggcagtccaggatgaagatctggccccactcggtgcactcattgagggctgtcagcagcttgttgatggactgtgggttcagatcgagcaggttgctgctggggtgagactcggcaatttctgagagcgctgccactgcattggccaccaccatggggttagagtcggagatgaggtcaattaagggtgtccaggaagccctggtcctccaccagctgggcgttgatgtcgtggagcttggccacgcacacagctgctgtcttgcgcacatatggatcctcgtccttcaggcacttccggagtggctcgcacaggtactctgtgatcttgtcaacgcggatgcagcccatggtccgcactgccagggctcggatgagggggttggggtacctcacagtccttaacaaaggtgttgacggccataatgcccacgtcaggcagactcttggcgtaattcatcaagtagaggatactagctcatcagctccag

SEQ ID NO: 368424 - DNA, 1149 bp, Homo Sapiens
  misc_feature (1089)..(1097): n is a, c, g, or t
ggtccggaattctccggatgtgccacgcgagtctcaatcatgctcctcctagtaactgtgtctgactgtgctgtgatcacaggggcctgtgagcgggatgtccagtgtggggcaggcacctgctgtgccatcagcctgtggcttcgagggctgcggatgtgcaccccgctggggcgggaaggcgaggagtgccaccccggcagccacaaggtccccttcttcaggaaacgcaagcaccacacctgtccttgcttgcccaacctgctgtgctccaggttcccggacggcaggtaccgctgctccatggacttgaagaacatcaatttttaggcgcttgcctggtctcaggatacccaccatccttttcctgagcacagcctggatttttatttctgccatgaaacccagctcccatgactctcccagtccctacactgactaccctgatctctcttgtctagtacgcacatatgcacacaggcagacatacctcccatcatgacatggtccccaggctggcctgaggatgtcacagcttgaggctgtggtgtgaaaggtggccagcctggttctcttccctgctcaggctgccagagaggtggtaaatggcagaaaggacattccccctcccctccccaggtgacctgctctctttcctgggccctgcccctctccccacatgtatccctcggtctgaattagacattcctgggcacaggctcttgggtgcattgctcagagtcccaggtcctggcctgaccctcaagcccttcacgtgagggctgtgaggaacaatttgtggggaggtcatcttccctcgaatgggtaactccttagtttcagaacacagactcaaaattggctcttcccagagggcagcagacagtcaccccaaaggcaggtgtagggagcccagggaggccaatcagcccccctgaagactcctggtcccaatcaccctgtggccttggggcctgtgacctgtgaccttctgccagattgtcatgcctctgaagccccctcttacacacttttacagtttaacactgaagcccccaattcctacaacttttccattaaatgccaatnnnnnnnnnttcaacctaatctgaaattggactattaaaagggcaattagggggttcccta

SEQ ID NO: 368425 - DNA, 1402 bp, Homo Sapiens
  misc_feature (637)..(724): n is a, c, g, or t
  misc_feature (897)..(897): n is a, c, g, or t
  misc_feature (1242)..(1243): n is a, c, g, or t
  misc_feature (1372)..(1372): n is a, c, g, or t
gggtggcgcttcctgggcgccgtgggcgcggactgcgcgggctgcgcgggtgccgaggagcgcgaggcgcggggaaggcgcacctggggtggccctggcgtgcgggcggcgacatggaggacggcgtgctcaaggagggcttcctggtcaagaggggccacattgtccacaactggaaggcgcgatggttcatccttcggcagaacacgctggtgtactacaagcttgaggggggtcggagagtgacccctcccaagggccggatcctcctggatggctgcaccatcacctgcccctgcctggagtatgaaaaccgaccgctcctcattaagctgaagactcaaacatccacggagtacttcctggaggcctgttctcgagaggagcgggatgcctgggcctttgagatcaccggggctattcatgcagggcagccggggaacgtccagcagctgcacagcctgacaaactccttcaagctgcccccgcacatcagcctgcatcccattggggacaagatgcaccaaagcaacaccggaattccggtcccgcccccccctgcatcagggaaaacacctttaaaacgacccttcccccgcgtcctcccctggtgggactggggtgcattttccgccannnnnnnnnnnnnnnnnnnnnnnnnnnnnnnnnnnnnnnnnnnnnnnnnnnnnnnnnnnnnnnnnnnnnnnnnnnnnnnnnnnnnnnngcgccgcgcatatcccccactcccccggccaacgctggacgccgcccccttcaccacaactgtgtcgcccccgtcgcgtggcccgcgccgccccccgcgcccgattacgcccagacaacaagaagaagatccgccaacgaaggaaaagacacgcgtcccaaccgccgcacgcnagagcgtgcgccacctacgagtccacgcgccaccgttgctgctgtctcctgacatcgacacttctcggccgccagggtgtccacccgcgtggaccgctccacacagagccacggccgctgaggccggactcagggagtgcggcaactcgccgcacagccgcggctgtaacttggtatactgcgtccgcgcccccctcagcgcgcgctatgacaccgttcctctctctccaccgacacgtccgactcgcgtggggaggagtagagcgtagagagagtggtaccgttccatcatgtacgacacccgcccgcatatcgagtcacttggacaatacgtagtcatcggcnnacggagtaccgctggtggtcaccgctccccgccctgcccggctcatttactcaccccccacacccatccaacggcccacgagctcgagccacaccacgccgggaacgtgccagctgcgccgcgcgcgancagcgcgccactgcaattacaacgtcgagt

SEQ ID NO: 368426 - DNA, 872 bp, Homo Sapiens; identical to SEQ ID NO: 13266

SEQ ID NO: 368427 - DNA, 1099 bp, Homo Sapiens
ggaattcccgggatttacactcctattactcctcaccttcgaagccagcctgtttatattcagtattccaatcacagagaacttaagactgacaatctacctaatcaagctcgagcccaagctgcactgcaggctgtcagtgccgtccaatcaggaagcctggccctttctggaggtccttccaatgaaggcacagtcctacctgggcagagccctgtgcttcgaataattattgaaaacctcttttaccctgttaccctggaagttcttcatcagatattttctaaatttggcacagtcttgaagattatcacctttacaaagaataatcagtttcaagccttgcttcagtatgctgacccagtaaatgcacattatgccaaaatggctctggatggccagaatatctataatgcatgctgcactctgcgcattgacttctccaagctcaccagccttaatgtgaaatataataatgacaaaagcagagacttcactcgcttagaccttcctactggtgatggccagccatcccttgaaccccctatggctgctgcttttggtgcaccgggtataatttcttcaccatatgcaggggctgctggatttgccccagccattggatttcctcaagctacaggtctatcagttccagctgttcctggagctcttggtcctctcacaatcacctcttctgctgtcactggaaggatggccattcctggggctagtggtataccaggaaaatctgttctactcgtcacaaatctcaatcctgatcttatcacaccacatgggctttttatcctatttggagtctatggtgatgtacatcgagtgaagatatgtttataagaaagaaatgccttggtcagatgcggatgccatcagctcgctagcatgaccatctagtggcaaacttatggaaatgctctgtactgcaaatcaagaactccgaggagaacaagtgctagtccaaactgtcgtaagcgctaatccatttccaacctgctcatccttgaggggtgactttaaggtcgaggtattaacagccttggtggagaagctgttctctgaaaccactacctattggatccag

SEQ ID NO: 368428 - DNA, 1515 bp, Homo Sapiens
ggacacaccattatgtctcaggggccggaggaagcagattcatctaggagcttgagttatcgtccttagaggatcacagtactatgctgtgttgggtactgtcttggaattggatctgctagtatatgcttcagcactatcttctgatttggatttgctagtatcagcttgactgctgctttctgatctggtttggctggcatatgtctgagtgctgccttctgagctggattggctggcatatgtctgtgtgctaccttccgatttagattcgctacttgggaattcctcttccttggcgaaccactttttcaactgtttccttgccaaaactattgcggttgttacaatgagaataggaagagcaatgaggaaacctagaagccaggtgttttcagtcttcccagatgctctttccatgattgaacccatatcttcctcaggaaatatggaaaatcctttggaacgtatttggcagtttggaggcttatagcctggcgaacaatggcacttgtttctggaatcacacactccatgtccagaacactgttgtgaacaaacatgtgctgaagccttaattatccttgattctacacattcacgatttacacaaacccttcccaatatcaacactgagagccatttttgacagccagtgaatctggaaactgttcgaggcaatttgtagtctacggttatgcatacagaatctcgtacgaaagcataaatcacatcaccattttcttgatggaaaaggctttcgagtagggtaggtacaaactaatctcccacatataagattcctccatccacagaacacatatttgttatttctatccctaccacagttcccaaatctgtctgattgagattgtatttcttcatagcaggcaaatggagcatttcttgaaccttttccaaatacactctcacaacgtgcatcgagatcatggcagtctccgtcataacaaataaacttattatttttgcatgaaagtccattgattaaagttatgtcaggaccacattctggtgagcttccattacaattttcagcgatgtcacattcaggatgtgctttcggcctacattcaacgcctgattgtaaaatttgacagtctttgcagcacagtcctttataacattttgctccgtctttcagtacacaagttcgaaaatcacaacagcttgcaggtccacattgagcctcagtaccacaatcacagatttcatttccctccaatctgccattgccacagactggtttcggagattttttttgcatttgtggcttattctgaagacatttgacacccacatttgaaatgaaattttgaaagctcctcaaactgcaactgctaaaagtcttcacaccattggattgcacaacttctggattcattatacaggtggattctgaacattgacatttctttgggtcgtcatatgatattcccagactgagtgccagcatctgggtgacaataactgcaaatatcacgggaattccggacc

SEQ ID NO: 368429 - DNA, 1096 bp, Homo Sapiens
  misc_feature (738)..(738): n is a, c, g, or t
aggagccgctcgccggttttgccgcctccgcctttgccttcgcagccgcctccagggcaatttgcatatttctccaaagaaccatccagaacctgagcagcctgtcttcagacagagagaggcccacggctgtttcttgaaatctggcgctgggaatggccatgtggaacaggccatgccagaggctgcctcagcagcctctggtagctgagcccactgcagagggggagccacacctgcccacgggccgggagctgactgaggccaaccgcttcgcctatgctgccctctgtggcatctccctgtcccagttatttcctgaacccgaacacagctccttctgcacagagttcatggcaggcctggtgcagtggctggagttgtctgaagctgtcttgccaaccatgactgcttttgcgagcggcctgggaggtgaaggagcagatgtgtttgttcaaattttactgaaggaccccatcttgaaggacgacccgacggtgatcactcaggaccttctgagcttctcactcaaggatgggcactatgacgcccgggccagagtcctcgtttgccacatgacctccctgctccaagtgcccttggaggagctgggatgtccttgaagagatgttccttggagagcctgaaggaaatcaaagaagaatgaatctgaaatggccgaggcatcccgaaagaagaaagaaaaccggaggaaatggaagcgttatctcctgatangcctggcgactgtcggaggcggaacggtgatcggtgtgactggaggtctagctgcaccccttgttgccgctggagcagcgacgattattggcagcgccggggcagcggctctgggctcagcagccggcatagccatcatgacctccctgtttgttgcacctggagctggcctgaccgggatccagatgaagaaaccgagtgggaaccattggaagaattcacgttttctgccctctgacggagggccaggcaactgcacattaccattggcccgtaacgggggtgggctcccctttctggggaaattaccgcacccctttcaaggccccccgcggtggctggccccttggggccccca

SEQ ID NO: 368430 - DNA, 1324 bp, Homo Sapiens
  misc_feature (25)..(25): n is a, c, g, or t
  misc_feature (73)..(73): n is a, c, g, or t
  misc_feature (254)..(255): n is a, c, g, or t
  misc_feature (432)..(432): n is a, c, g, or t
atcccaaaccctggggtccaagggncttaagaaggggaccccggaaacctttgggtcaagccagccaagcagntctgggccccaggggagggaggccggtaaatttcccccccatttccctgagaacagggtagggtgtggggaagacaggggcattgggagactgtgtctttgtggcccataaccaaagcagggcccagggagatcggaggctatgccagaggggcagggaggggctcccagtgtccactccnnccaggaacattgtccagcaccacctgaggtggctgagcagtgtgcccgctttcttgctgttgccccgagagcagcactggcccacagcagccaggaagggcagcagggtggtggcgggcagctcatgcccaggctccaggtatggaaactgcagtctctgcacctccctttccttcntactctccccctcgggcaaagacatgatcggcattggtgctggagagggcagagggagcccacacaggactcttctcccacacaccaccccatgccctgtggccccaacacctacatgtgtgaccctgaagagggcacagagccagcccactgtgctgctctcggccacccagtgcactgtcaccatgtctgtgactatgggctgcatctccattggccagaattcctgtggctgggaccaagttagggctgctcaggcaacttcctgagatctctgcccctgccctggttagacagcaccacaaactacccgcctccaacctcagccctaactcctgagcctcccttcctctgtcctctgcactctcaccttctccatggcatagagtgggcacagagagacaagcacatgagccccgtgctgccacaccagctcccagagctcctctgcacctgcgaggccagtcagcaccatatgatcacagccagagggcccaccctgcagagcacagctcagttggcttccagagactgagggtgtcccctgcacagcccacaactctgggagcccccagcagccccagccccggaagtacacgtggtcggtgatctctgcaagcacgtggcaagtgttccgtcgtctcgcagataagcagcaggttccctcgacttcgtcaggggcgcttctccatggcgtcgagtgggcacagagagacaagcacttgaggcccgtgcagccacagccagctcccagagctcctctgtccctgcgaggccagtcagcaccatatgatcacacccagagggactcacaggagatggggctgtcctgctcatagccaggcaggggtgcggaagagccagcctcgtccttgatggcctgcagcaagag

SEQ ID NO: 368431 - DNA, 2186 bp, Homo Sapiens
  misc_feature (53)..(53): n is a, c, g, or t
  misc_feature (987)..(987): n is a, c, g, or t
  misc_feature (1016)..(1016): n is a, c, g, or t
  misc_feature (1063)..(1063): n is a, c, g, or t
  misc_feature (1089)..(1089): n is a, c, g, or t
  misc_feature (1169)..(1169): n is a, c, g, or t
  misc_feature (1250)..(1250): n is a, c, g, or t
  misc_feature (1262)..(1263): n is a, c, g, or t
  misc_feature (1368)..(1368): n is a, c, g, or t
  misc_feature (1460)..(1460): n is a, c, g, or t
  misc_feature (1464)..(1464): n is a, c, g, or t
  misc_feature (1469)..(1469): n is a, c, g, or t
  misc_feature (1471)..(1472): n is a, c, g, or t
  misc_feature (1503)..(1504): n is a, c, g, or t
  misc_feature (1518)..(1519): n is a, c, g, or t
  misc_feature (1527)..(1527): n is a, c, g, or t
  misc_feature (1551)..(1551): n is a, c, g, or t
  misc_feature (1566)..(1568): n is a, c, g, or t
  misc_feature (1576)..(1576): n is a, c, g, or t
  misc_feature (1579)..(1580): n is a, c, g, or t
  misc_feature (1650)..(1650): n is a, c, g, or t
  misc_feature (1654)..(1654): n is a, c, g, or t
  misc_feature (1682)..(1682): n is a, c, g, or t
  misc_feature (1692)..(1692): n is a, c, g, or t
  misc_feature (1695)..(1695): n is a, c, g, or t
  misc_feature (1732)..(1741): n is a, c, g, or t
  misc_feature (1774)..(1774): n is a, c, g, or t
  misc_feature (1786)..(1786): n is a, c, g, or t
  misc_feature (1974)..(1974): n is a, c, g, or t
  misc_feature (1990)..(1990): n is a, c, g, or t
  misc_feature (2096)..(2096): n is a, c, g, or t
  misc_feature (2165)..(2165): n is a, c, g, or t
aaagaacgacagggtgatcgccctacgccccccactcttcctctccccgacgnaggcgcggaattcccgggatgtgactcagagttgaggccaatggcggctccaccatcctgtggctatgattcctgaacttgtggtctcctcaggtgatgaggtgaagaaagaaagcctggagaattatgcacgagcttctcactgtctcagcccacaagtaacacacctctttccctcacagcccacactggctggaaccaatcacatagccctgcctaactgcaagggaggccacaaagtgcaacactttctcatggtcacgggtgagcacgaaacatctctccaaatatgggttgggaagattaagagactagtccagaagaaaacagtctccagggagaaatatatctgcggaataggaatccagaaagcaaccaagagagcagaactgagtggatgagaggaattgtcagaccacatctgcagctctgattagtcaaacccgaaatgtgcccgcttgatctattattccgtggaaatactggaatcacgcacatcaataataagaggaaactaaataataccatacttgcgcgggataattcccctctgcccataccctgcattcagcgccaaagtaaaatctatccctacctcctaacggtggttataacgggacgggggcttaagcctttgaaaggtacggttccctttcttaaagacaccacaaacttattaagcggtatcgggttatagcatctacccaaaagcctgttgcctgtcaaatccctttgtcccttgtacactttaaatttccgtcagaacctcccgccccttttatctaaccccaccgttgatcaataaggcatctcgcccgcttctatattatgacccgcctcgccccgcagctattctagctccataggaggggccgcctgaatactcttctacccctctccctgatacatgctagggcttgagtattcctccccntatatcacgtagggggagtggggagcgcncaaaacgaatagggagagcgtctctattacaccgccctcgctgcctngtctccggccccgccccaacggcagngcgaatacgcccaaccgtggccggctcgtggcgggttcacttccagcactatacaaaaaatttgttggaaggcacgcggnccatccagcattatcccacttcttttgaccgccccgttcctaactatacccttttttattaaatttaatttactctcgcancgggagtgcgtnngtcggaacgggtttgtgtgtcaaactaaacccaactaatcgcgtcgccggcgaagggggtaaactgtttcctagagggggagcggtcaataccgatcgtatctancgggtggtgggtggtgcgcccgaagagtgccgccccagcccccggggctgttgcgccgcgattaaaccatacctagggtcgtaacgacaaancctncaacngnnacgaacgccgcatcagatcaactccccaagnnggagtgagtggggnngacaattntgtcctcgcgcgcctgccccggtntcctacagcccacannncaccccantgnngtggggtatcccgcaactttctggaatgaccccgtgttgtctgccttctagtgggattcggcgcggtgcnaaanctatttattagttcccctctcgcgcggnggccgctggncangtggatagaacctagcctcgttttctcgctccttttnnnnnnnnnngtgcattttttttttcgttcctctgtcttgccngtgggcttgtanaaaggggctcgatgcgcaattcgcagataactcgctggctatcaacacatacctcagaggattacattactcaggttgcaccatttacaccccctttgcctaccgcccaatctgggtcctaattaagagttttctctcttcaaggccgcccgtgctttgtttccaataacacgtatgtgtgggccccntcccttaggccccgtngccgcccccaataatgggccagtctccccccctaaccccgccgcgacgtactaaaactttattcctcgccccggccgctccgctcacataacccccccgaaacaanagctggttgagggggttaacataacgcggaccgatcccaaatggcattgatgagtgtacctcccacgangtaaacctcgcctctaatcgt

SEQ ID NO: 368432 - DNA, 1046 bp, Homo Sapiens
  misc_feature (862)..(867): n is a, c, g, or t
  misc_feature (869)..(930): n is a, c, g, or t
  misc_feature (932)..(946): n is a, c, g, or t
  misc_feature (948)..(961): n is a, c, g, or t
  misc_feature (963)..(971): n is a, c, g, or t
  misc_feature (973)..(991): n is a, c, g, or t
gggtccggaattcccgggatctccttctttatgaaacagtgatttcccgtgagtaactctggttctgattttttgtaccggcgcttaaattctttctgtagacattggaaagccacaaagaacgtgactgcagtgagcctcccactggagcagccttaaccaacactttggccaaagcccccccacctcccctgtgtactgtgtgtgtgtttggtggatacagtattccttttcagtgtccctaaagctgtgatggggagtccccacttacctagaaagcattaccagtcacctactctgcattctcagatgtaaaccttgtgtagtgttctttttgcaatgacctatttatttaacctatttatatttatttaatttttactctgaaatgtatccagttacaattgtacttgcttaaagcacatcagatttgttttggacaacacccttgaccattttaaaactggaaaagtgatactgtatcccttccatgggatggatgctttacagtagtcttattattaaagggtgattaatttggtcggggtaaaatgttaatttttaggtgatttttaagaattctgtgccattatgtcttctgtgtggatggttaattgtttaattagtacgtgttaattgtgtgatacagtcttctttgtggaacccaaaatcctctttttagctttatattttataaactgccagattgtacaacttttatgtgcatttttaaagcttgaagacatgagggtcattatctaagttaaacagcctatttttgtgcctcctgtacagttttataattctgctgatggcggcatcttatgtcgagccaaccacaataaaggtagttttttggaannnnnncnnnnnnnnnnnnnnnnnnnnnnnnnnnnnnnnnnnnnnnnnnnnnnnnnnnnnnnnnnnnnncnnnnnnnnnnnnnnncnnnnnnnnnnnnnncnnnnnnnnncnnnnnnnnnnnnnnnnnnnaaagggggccgcgccccaataaaaaaacacccccccgcggggcgggccccacacc

SEQ ID NO: 368433 - DNA, 1030 bp, Homo Sapiens
  misc_feature (360)..(360): n is a, c, g, or t
gggcattggcccaaccttccccaaacaaggagttgggtttttactcccaggggggggctgaaagggagttagcttgccttaggtagacagcaagggaagagcccctggagagcccccggcccaaggtcagagccttatccccacgtaaaatagaaagcagcctggggtggggggaaatcaggctgcaggaaccagtaagggaactagcacgtggcgttgtgcctggagacatgcccgtggctacacagatggaaaaacctccacttggataaaatcttgcacaaacctccaactcactcaaataaggggacaaggctgggcataaaaatgctttcgtcctttgtatagacagtgggctcncaggaagatgtttcttctcatttttgggcatgggcacagtgggcttcagtgggttcccgtggacactctcctttcctttgtttggactgtacgtctgccctctgtgaatcatcacttcagcctctggttggtcccaggccaagctgtcacttcagctcctaataggtcctgggccaggctaagcagcctctgtgaatcatcgcttcatcttctaactggtgctgggccaagctttccagtaggtcctgggccaaggtcccgggacaagctgagtcacgtgttctcgaagacagcctgcagactaagcacctttcttcctctttccagttcatagagaacccagaacgggactcatagtggccaccccattcaggaccccctctctgctggcagagagctttcttctttcgcttattaaaccttcgccccaacttcacctttgtgtctgtactccttaatcttcttgaaggtaaaacaagagtccagttattatctcaaagaacaaaaactgttacatcttggtgcattgcgtaataactggttacagcaggagccagggaaaggccatctcccaaacagacagaaaatacctgaagctggtgatgagcagcttgctgataagacctcaggagttgggtgagtgggctcacatcccgggaattccggaccg

SEQ ID NO: 368434 - DNA, 1025 bp, Homo Sapiens
  misc_feature (772)..(852): n is a, c, g, or t
  misc_feature (855)..(864): n is a, c, g, or t
  misc_feature (918)..(926): n is a, c, g, or t
gattcccgggatggtggcttcatggctagggccttccagtatgtcaaggagaacggaggcctggactctgaggaatcctatccatatgtagcagtggatgaaatctgtaagtacagacctgagaattctgttgctaatgacactggcttcacagtggtcgcacctggaaaggagaaggccctgatgaaagcagtcgcaactgtggggcccatctccgttgctatggatgcaggccattcgtccttccagttctacaaatcaggcatttattttgaaccagactgcagcagcaaaaacctggatcatggtgttctggtggttggctacggctttgaaggagcaaattcgaataacagcaagtattggctcgtcaaaaacagctggggtccagaatggggctcgaatggctatgtaaaaatagccaaagacaagaacaaccactgtggaatcgccacagcagccagctaccccaatgtgtgagctgatggatggtgaggaggaaggacttaaggacagcatgtctggggaaattttatcttgaaactgaccaaacgcttattgtgtaagataaaccagttgaatcattgaggatccaagttgagattttaattctgtgacatttttacaagggtaaaatgttaccactactttaattattgttatacacagctttatgatatcaaagactcattgcttaattctaagacttttgaattttcattttttaaaaagatgtacaaaacagtttgaaataaattttaattcgtataannnnnnnnnnnnnnnnnnnnnnnnnnnnnnnnnnnnnnnnnnnnnnnnnnnnnnnnnnnnnnnnnnnnnnnnnnnnnnnnnaannnnnnnnnnccgcccttaaaaaaaccccccccgggggggccccaaatttcccggttcccccgnnnnnnnnngggaaaaaagggggcccccccaaatgggaggagccgtttttataaaacttgggggccctggtcccctctttttttaacaacactcccaaacgtggggaa

SEQ ID NO: 368435 - DNA, 1133 bp, Homo Sapiens
  misc_feature (41)..(93): n is a, c, g, or t
  misc_feature (1081)..(1081): n is a, c, g, or t
ggaccggtccggaattcctgcgatctgctgcgagccgagcnnnnnnnnnnnnnnnnnnnnnnnnnnnnnnnnnnnnnnnnnnnnnnnnnnnnnggtggccagagcggatgcttgcgggctccctgcggctccactagttttcttcgccccgcccagccgcccactcttctcggctagggaagaagaccagagggtgctcagctggaaaactctggtgtctcagcttagggcctcctccgggaagagctaactgctcccaggtgaagccggtgcccgcgggcggtccgtacaccccgcagccggctcgcaccgctcgagagcctcggccgctgtgtcttccacgtctgcagctcagccagggcgcgcagggcgagtggggtccactggcgggtaaaggggaccaggacggcgaggatggacgcacagacctggcccgtgggctttcgctgcctcctccttctggccctggttgggtccgcccgcagcgagggcgtgcagacctgcgaagaagttcggaaacttttccagtggcggctgctgggagctgtcagggggctgccggattcgccgcgggcaggacctgatcttcaggtttgcatatccaaaaagcctacatgttgcaccaggaaagatggaggagagatatcagattgcggctcgcaggatatgcagcagtttcttcaaacgtccagctctacattaaagtttctaatatctcgaaatgcggctgcttttcaagaaacccttgaaactctcatcaaacaagcagaaaattacaccagtatacttttttgcagtacctacaggaacatggccttggaggctgctgcttcggttcaggagttcttcactgatgtggggctgtatttatttggtgcggatgttaatcctgaagaatttgtaaacagattttttgacagtctttttcctctggtctacaaccacctcattaaccctgggtgtgactgacagttccctgggaatacttcagaatgcatcccggatggcttcgccgggatgtgagtccatttttgtaaatattccccaaaggagtaatggggacagatgggggaggtccctncttgcccagccgcactttttttgcagggcactcaatcttggggcattgaagt

SEQ ID NO: 368436 - DNA, 1088 bp, Homo Sapiens
  misc_feature (54)..(63): n is a, c, g, or t
  misc_feature (995)..(995): n is a, c, g, or t
  misc_feature (1043)..(1043): n is a, c, g, or t
  misc_feature (1058)..(1058): n is a, c, g, or t
agtctttgcccagggtttcttggaagtcccggtttccttcacatgtgactaaannnnnnnnnntgaaaggggtgaatggttagggccttggtgttgaaccttttttcaaggtcagccagtatccctttcccttggtttggaattcattttaagactcaaattaaaaaaaatccagtttagccagcacaaatttcccaaggtttttctgggggtttggtgttttccccccagatacattgtaaaaaggctttattgcacggggggcaaagtactttcctttcttctcataccttccagtgctaagcacctaaataaagagcaatgtgaaattttattaattaaatattaattgcatttttctgatatttcaatgaaaacttctaagaaaaggtgattatatttctatattttggcaagaacactggaaccgaagtcaggaaatataaactggagtctcctgtcacctactttttaagtgagtgactttcgaagagttacaaatttctttgtgcctcagtttcctcctatattaattgtaataattatcagtcctgccttaaatcacactagtatggaatttaacaaggtaatttaaaaattattttctataacataaaactttatgaatttcatttatataactgtctgtggagaaactacttttccctaggatttctttgtagatcctctgaatcagacaattctaggtcttagtatgtgaaatgcacatattttagatagtcgacttatttaaaatgttattctgtttctggatttgcattcttttgccttccaatttgatttgtctgatatgttgtgaagagtatatgactaaatgattataaggtatttctggagttattaaacggtgcttcttgtctcaatggaaataacagtttcattttgtagcttatccattttgactagaagaaagcccagaagtgaatcagggtgtgtctatattttgtacctcctaattgattttcagaaatgantataagtgaaacagaagcgaagggaagattgaaatttacaagctgtgntaaatatttccccantagaaataagcatcccgggaattccggacc

SEQ ID NO: 368437 - DNA, 1846 bp, Homo Sapiens
cttatgtcctgacgcccaggctttggcccccataaaacctttgcccccccaccgggggaggagatggcatttgaacgccagaacctgggggtcctgaaggttcccttgggatccacccgggagcaagttttcacttctatcggagggcccgcattaagggtttgccagaggaggagaaagcccaagggtggttagaagggatggaacgtcacagctgttgggttacagaaaccagggaatctgatgtcccgttttcaggacgcatggcccctccccggagaagatggggcgacagtagggtctaaaaggtggactgtggtacccgggggcaggaagaggaacagttaggcctagatgtaaggagaccactatgctgcttcttcatctacctcacagatggccacagacctttcagtacatgggcggaaacctatttctgaatattccgttttcccaaagttttataaaccatggtgagggcaaatgcttatgagaaactaagggtgtgttcattatattatttatatattatcatcttccctctgaggataacatacaagggtaaataaaaagcagacaaatagctaaaaggtgactcgagctgtaagctctttcaactagagggtgatttttgctttaaaatcatcaggcccgaaaagcaaatcttgaaagcaaaatctaactttggcccactgataacaatgatcctgagtccctccttcattcccaaagtctgtttttccgaggaatatcctccattaatattcattttgtgtcatcattatcacaaagggttaagtgcagctttcacttcattttaggcagagcttctgccccagtcctactgttgacctgctcacttcacttatcggaactcctgcgcggccggcggaagctggatacgttttcattcagtgcatagatccttcgggagaactcttcaaattctcccagaacttgttcgtcacactctactgccacagcactgtccactgggatgcagttaaaatgcttctagctgatcacctgaggcgaaacctgtggcttccagcccgatgatttcttctgcttgctccacagtacagcagagctcagcttctgagactgggtggaactcgcctggaagctggacactggcggacccggcctgctcgctgggtaggagagtgccattgactgtggcccggtgcccggagagggcttctcattgttcttggctagggtgcacattcgcgtggcctccgtttaagctgccaactagatcctctccttttttcttgttttctttggagaagtccaaggaggtatccaaggaggaggatagagatgttatctttctctcggtctctcccatggaggggacggtggtcacaggctgggctaatgctgagttgtaactgggaggaggggttttgtactgaagtctctcattctcagagctggcccgttttcgatgtcctttgtctggtgaagggatccccccagagaagcctacatctgcacccccaaatatggagctttgtctcttaggaacagggattgcactggaggtgtgatgtctgtcactagaagagaaacaaaaacaagaagttactttggacttcagaactcagtgtaagccttctggatccagagacaggcaacagcatacttaggtctgagctaataaaaatagataagaaacaatcttagacaatagttattgcagtgtctcaatgcaaaaaacaacatgaggtatgtgggtccaactttgggagcttccttccagcaggatacagacacactgcaatatatttagagaagagggcccaaggcagggcagggaacagaaaccctgtcctatggg

SEQ ID NO: 368438 - DNA, 1260 bp, Homo Sapiens
  misc_feature (52)..(52): n is a, c, g, or t
  misc_feature (60)..(60): n is a, c, g, or t
  misc_feature (62)..(62): n is a, c, g, or t
  misc_feature (64)..(64): n is a, c, g, or t
  misc_feature (887)..(887): n is a, c, g, or t
  misc_feature (1160)..(1160): n is a, c, g, or t
  misc_feature (1162)..(1162): n is a, c, g, or t
gggaatctcatggatggagcggccccctccttcaccgtggccaccaggcctncatggcgncntntcagcttcagggggcccagggctgcgtcttgtaggcctcggtcaggtcccgtgagcggatgggggcggaggcgtgccctcccgctttaggagcttggcctcccgacgcaggtagtcctcctgtgcctccacgtaggaccgagggatcccttgtgtgatggacccgcggatgtggtgctgctctttgaggtggtgggggctgtgtcgctccggcggaatggcacggcccatgagaccttcgatgctggctgaggagatggctctgcccacgcggccctccatcatgtcataggtgcgcttgggggcggccgtctcatgggggagtcctgagctgcttccgccgtcctccttggagcactgggtcacagacatgcaaccctcataggacaagacgtggcccttcttgccttcgtagatagacgtggcccttgggcaggctgtcctcccggccgcggtccaagcgactcgggctgtcctcgccagatgatcctggtgatggtgcccttgtacaggacgtcagctggcgtgccgtgggtgatggagccgcggtatgtgatggcgctgtccgagggcacccgtgtgctgggaatgcctttggtgatgcttccgcccggaactgagcccagagctgtccctctcagcacggacgcctcctgggctgtgggcacccccaagctctccggtggcccaccctggccccgtggggaacaactgctcctgcttcactccgctgaagggtgccagctttttggggtccatgggcaggggcagccccatggttgaacaaggccaccggggccttggcaatgctctgaattacgggnacgtggaagctgaaccgaacattccttgggagatggcacctatttgcctctcgaggaacgctggggtgcttggcagaggagatgaggggaggcgggttggagatggtgggtgggcgcggcaggacgggccgggcagtgtcatggaagcccaggggcagtgggtgaccaggtggagcgtaggagaaggctgaggggtccggggcatgcggggaggccttgatcacctcacgggggggcacggggaagggcaggccggaagtccagcaagggggntncccaggcagcttctgggcctcggctgcgaaggctaggaagaacacaggcttctctgcctccttgtcggcggggggtgccgggctcacctgtgccgaat

SEQ ID NO: 368439 - DNA, 1182 bp, Homo Sapiens
  misc_feature (621)..(621): n is a, c, g, or t
gtggaccggtccggattcccgggatataagagggggcgggagacaagccctatcagcacatcccacaaaatgggaaaccgaatcacccaggggatggcaaggaatgaccagagggaaagttccagttctgtccaacatgcactaccagccccattttggaaaagaacagatttaatagacctcaccaagacaagaattgtttttcgtcaaaggaaatcaaaggaacaaacaagaggcagtgaccaccagagacttcaccttttggtgtaggaaaacccaagcagacagtgtctacatccatcaaagcccaatgtattaaatatttattgaataagaacccacggactcttccttaccagagccttagattgccatgtgcgtctgattgctccaaagacaagactattgtgattttggccccatatgcattttagagtaacaagtcttaccagaaaaataatagccagccccagcttaattcctagagaaactcaaaccaccttgttaagaacaatcccagaggagagtttatactaaggagcactacacaatgctgtttgccatctctgggccctctaaaagcaagcccaaccttggaaaaggaatgtctgccaccagggnaaacgtggctgcactgctggaggaagaacttgatcatgacgggcaatgcttggaagtaaagaagcatctgctgccttggaaaggcttggtcagggcaatcattgtcacaggccatgttttttctctgactatctcctgggaatttcagagtgactaagtgattactacaattagagccagaagcgggtgtctttccaaaaatcggggtggggcagcaccaaaccatcccccatgcattcagagaaaagccacgacagccgggaagggctctattcccaaggccactctccaggtccttcaaacatgtgcaccatcctctcatgcgctccctaactggggcccatgcctggcctccttggacccaggaatggtccttccacccccggattcccctccccatatagccccccctttacctgttaaaaaactgggggcccagccaaattggccccagtttcccctttcttttgaaagggcctcctttaaaggggcccccgaaaaagggggggtccccttcccccccttttaagggggccattttttttccccaccaattaaaga

SEQ ID NO: 368440 - DNA, 987 bp, Homo Sapiens
  misc_feature (170)..(272): n is a, c, g, or t
  misc_feature (894)..(894): n is a, c, g, or t
ggtccggaattcccgggatcaagactaagtcaaaggaggagagggaacgcggtgggcaggagagaggccaacggccgcccggggcgaggggagccggtaggacgggaccaggactggccgacccggccccgcgcggggaagggggcgccttcctcccacaacacaaaacnnnnnnnnnnnnnnnnnnnnnnnnnnnnnnnnnnnnnnnnnnnnnnnnnnnnnnnnnnnnnnnnnnnnnnnnnnnnnnnnnnnnnnnnnnnnnnnnnnnnnnngccagagaagacaagggcagaaagcaccatgagtgggggcccaatgggaggaaggcccggggcactgaggagcaccagcggtgtcagcagaacataccctccaccctcctccaggaccacgagaaccagcgactctttgagatgcttggacgaaaatgcttgacgctggccactgcagttgttcagctgtacctggcgctgccccctggagctgagcactggaccaaggagcattgtggggctgtgtgcttcgtgaaggataacccccagaagtcctacttcatccgcctttacggccttgcaggctgggtcggctgctctgggaacaggagctgtacttcacagcttgtctactccacccccacccccttcttcgcacaccttcgctggagatgacttgccaagcggggctgaactttgcagacgaggacgaggcccaggccttccgggccctcgtgcaggagaagatacaaaaaatggaatcagatggcaaagtggagacagacgccagctacccccaccaccaacaccatgccaatgaagagagaagaagagggctcccacccctgcccctgcatccaggtagagaccaaagaggccctccagtgggtccgctctcccntggggctggcgaacatgggacatccaggaaccctgacatcacggagttcaccgataccggggggctcccagcaacctgggaccctaacccaag

SEQ ID NO: 368441 - DNA, 1176 bp, Homo Sapiens
  misc_feature (191)..(201): n is a, c, g, or t
  misc_feature (315)..(323): n is a, c, g, or t
  misc_feature (348)..(412): n is a, c, g, or t
  misc_feature (455)..(542): n is a, c, g, or t
  misc_feature (553)..(569): n is a, c, g, or t
ttcacaagagggccccccaccaaaccttgttttgccccccaatcattttaaagagggttaaaatcacactcccatttcaccccctaggttaattccttaaaaaggcccttttttcttttcccaaaaaccttccctaaggggaaacttttggggttcccaattttggttaagcatcttcaagggaagaaagnnnnnnnnnnnacaagggaaagctccgaagccctccttccctgtcgctgtggcacagacatagcccactaacgggggcagcccacggccctgtcaggggaagctgctttacaccccccttttttnnnnnnnnnttggcttctcacaacccatcaaatnnnnnnnnnnnnnnnnnnnnnnnnnnnnnnnnnnnnnnnnnnnnnnnnnnnnnnnnnnnnnnnnncccatggttttttttgctagacacagggactcgctgtgttgcnnnnnnnnnnnnnnnnnnnnnnnnnnnnnnnnnnnnnnnnnnnnnnnnnnnnnnnnnnnnnnnnnnnnnnnnnnnnnnnnnnnnnnnngcacccagccnnnnnnnnnnnnnnnnnatttaacattttttcttttaatcccatccactattacagaacctatgaaattttcttcaacacctctatgtagcatttagaatgtaagctcctgatccaccagaatctgcaagaatggagtcaggagcctcagaaaaggagccacggccacaggcgagcagctcggggacaacgctggctccacagggcagctcctgggccaggcacccgctggcgactacacggagcttgtcttgtggaaacaaacgcgctttcacaaacacagcagtcctgcgacatgaggcgggatgaaactttgaaaggtattttaaagtctagccttgtaacaaaacctcaggacactctgtccccagccttcgtgccccacggggagcttctagaggctgaaggtgacaagtgtgagcctctgctgtgccaccacccaccctgttacatgacagtggcaagctgagctttcacgggatggctggtgtttcacagaccgcccctccatcccgtagcctagttggctggcatggaggtggcgctgctgagcgtcagcctttggaatcactgatcacctcggcgtctgttttcctcgtgccgaattcgccacccaggcctcgct

SEQ ID NO: 368442 - DNA, 1139 bp, Homo Sapiens
  misc_feature (1010)..(1010): n is a, c, g, or t
  misc_feature (1049)..(1049): n is a, c, g, or t
  misc_feature (1109)..(1109): n is a, c, g, or t
ggtccggaattcccgggattccgtatgtccattaaacttcatcaggatcattttacttctccagatgaatatgatgaccctactgtgctctatgaagccatagtatctcatgagaagaacctcgtaatagcccatgaaggggaccctgcatggcggagtgcagtacttgccaactctccctccttgcttgctctgcggcatgtcatggatgatggcaccaatgaatataaaatcatcatgctcaacagacgctacctgagcttcagggtcattaaagtgaataaggaatgtgtccgaggtctttgggcagggcaacagcaggagcttgtttttctacgtaaccgtaacccagagagaggtagcatccaaaatgcaaagcaagccctgagaaacatgataaactcatcttgtgatcaacctattggctacccaatctttgtctcacccctgacaacttcttactctgacagccacgaacagcttaaagacattcttgggggtcctatcagcttgggaaatatcaggaacttcatagtgtcaacctggcacaggcttaggaaaggttgcggagctggatgtaacagtggtggcaatattgaagattctgatactggaggtgggacttcctgcactggtaacaatgcaacaactgccaacaatccccacagcaacgtgacccagggaagcattggaaatcctgggcagggatcaggaactggactccacccacctgtcacatcttatcctccaacactaggcactagccacagctctcactctgtgcagtcgggcctggtcagacagtctcctgcccgggcctcagtagccagccagtcttcctactgctatagcagccggcattcatccctccggatgtccaccactgggtttgtgccttgtcggcgctcttctactagtcagatatcgcttcgaaacttgccatcatccatccaatcccgactgtcgatggtgaaccaaatgggaacccttcaggtcagagcggcctgggnctgttgtggcagcacggccttgcctttcctccaggcagnttccagccaaaggcattcccaggcctggcaaacattcacatttttgtggggtttttttgnggacagaggggaggttagaggcagtgccat

SEQ ID NO: 368443 - DNA, 1145 bp, Homo Sapiens
  misc_feature (278)..(278): n is a, c, g, or t
  misc_feature (922)..(922): n is a, c, g, or t
  misc_feature (933)..(933): n is a, c, g, or t
ggtccggaattcccgggatgcggcggcggcggcggctggagagggtcctcggcagcctctgaggagcgcggggcgcggccatgagcgagtccagcggcagtgcgctccagcccggcaggcccagccggcagcaggcggtccatccagagaacctctctctagactccagttgcttctcttctccacctgtgaacttcctccaagaattgccaagctaccggtccattgcacgtaggagaacgactgtccattcccgggacaagcaaagcggaactttngctaaagccaaccgactcttacagctcccagctggaggacagaatcgctgaaaacctcagcagccattcctcttcgaaattatgcactgaacatctctgagaagcggagactaagggacattcaagagacacaaatgaagtatctctccgaatgggaccagttggaagcggtatagcagcaagtcttggaagaggttcctagagaaggctcgagagatgacgacccacctggagctgtggcgggaggaccatccgcagcatagaagggaaatttggcactgggattcagtcctatttctccttcttgagattcctggtgttgctgaatttggtgatatttctgatcatctttatgctggttttcctcccagtcttactcacgaaatacaagatcaccaacagcagcttcgtgctcattcctttccaaagacatggattaaacaatgtacagtctatccagtaagcaagttctggactcatttacttttacagttatatcatagacttgctttctggcactggtttccctggaggaaactagcctcttttaccgacattacaccatttgatggggtgaaatttcagaacttcacctatgatctggcccctgcccgtatttgttaagcacaatcgccctccctggnccctgagcccncttttggaaaaggggaaaagtccgggggaaaggattcaaaatcaaccttgatttccgaatgggagggagaccttttcagagtttactggcaaccaggaaattttgcccgcgttggggaacttctgcattcccttaaccgcaagaaagggccgggatcttgaaagcccagcaagcttttgcggaacaagactcccaaacaaaattctggaaga

SEQ ID NO: 368444 - DNA, 1590 bp, Homo Sapiens
ggtccggaattcccgggatctgatctccatgtcctgttgtggggcttttacagcctttggattgtgaaaactgctgagagagacttgcaatccagtcacataagtataataaagaaatattggtcctcatggaagaagagcaagatttaccagagcaaccagtgaaaaaagccaagatgcaggaatcaggagagcaaactataagtcaagtaagcaatccagatgtcagtgatcagaagcctgaaacatcaagccttgcttcaaaccttcccatgtcagaggaaattatgacatgcaccgattacatccctcgctcatccaatgattatacctcacaaatgtattctgcaaaaccttatgcacatattctctcagttcctgtttcggaaactgcttaccctggacagactcaataccagacactacagcagactaaccctatgctgtctaccctcaggcaacccaaacgtatggactacctccttttgcttcaagcacaaatgccagcctgatatctacttcttctacaattgccaatattccagcagcagcagtagccagcatctcaaaccaggattatcccacctatactattcttggtcagaatcagtaccaggcctgctaccccagctccagctttggagtcacaggtcagactaacagtgatgcagagagcaccacattagcagcaaccacataccagtcggagaagcctagtgtcatggcgcctgcacctgcagcacagagactttcctctggagacccttctacaagtccatctttgtcccagactacaccaagtaaagatactgatgatcagtccaggaaaaacatgactagcaagaaccggggcaagaggaaagctgatgccacttcttcccaagacagtgaattagaacgggtatttctgtgggacttggatgaaaccatcatcatcttccactcacttcttactggatcctatgcccagaaatatggaaaggacccaacagtagtgattggctcaggtttaacaatggaagaaatgatttttgaagtggctgatactcatctatttttcaatgacttagaggagtgtgaccaggtacatgtggaagatgtggcttctgatgacaatggccaagacttgagcaactacagtttctcaacagatggtttcagtggctcaggaggtagtggcagccatggttcatctgtgggtgttcagggaggtgtggactggatgaggaaactagctttccgctaccggaaagtgagagaaatctatgataagcataaaagcaacgtgggtggtctcctcagtccccagaggaaggaagcactgcagagattaagagcagaaattgaagttttaacagattcctggttaggaactgcattaaagtccttacttctcatccagtccagaaagaattgtgtgaatgttctgatcactaccacccagctggttccagccctggccaaggttctcctatatggactaggagaaatatttcctattgagaacatctatagtgctaccaaaattggtatggtttctatgctgtttcttgtcactggccttgcaataaaactttctactcatgatgc

SEQ ID NO: 368445 - DNA, 1104 bp, Homo Sapiens
  misc_feature (51)..(72): n is a, c, g, or t
  misc_feature (80)..(81): n is a, c, g, or t
  misc_feature (86)..(86): n is a, c, g, or t
ccccgcaccccgagcttagatagtctgcggcttgggccttcctttacctannnnnnnnnnnnnnnnnnnnnnacaaaacnnggccnacaaaacgagctggtaccggtccggaattctcgggatatttcaagcaatgctgttcagctgcctgtttgaagatagtttattttttaaaaactatgtttgcagctgaagagagacatggaaatattgaagaacgtatgagacatttagagggtcaacttgaagagaagaatcaagaacttcaaagagctaggcaaagagagaaaatgaatgaggagcataacaagagattatcggatacggttgatagacttctgactgaatccaatgaacgcctacaactacacttaaaggaaagaatggctgctctagaagaaaagaatgttttaattcaagaatcagaaactttcagaaagaatcttgaagaatctttacatgataaggaaagattagcagaagaaattgaaaagctgagatctgaacttgaccaattgaaaatgagaactggctctttaattgaacccacaataccaagaactcatctagacacctcagctgagttgcggtactcagtgggatccctagtggacagccagtctgattacagaacaactaaagtaataagaagaccaaggagaggccgcatgggtgtgcgaagagatgagccaaaggtgaaatctcttggggatcacgagtggaatagaactcaacagattggagtactaagcagccacccttttgaaagtgacactgaaatgtctgatattgatgatgatgacagagaaacaatttttagctcaatggatcttctctctccaagtggtcattccgatgcccagacgctagccatgatgcttcacgaacaattggaatgccatcaaccaaagaaatccggctaatttccgggaagaaaaaagaaatctaccgaagttgccgtgcctgaaaaaaattgaaaaatagaattgggctaagtggggagccctccaaaggccctgaaatttgggcaagggggtcccccccagggtacccctcccattactggccctctggttaccagctttctatccgcttgggcccagt

SEQ ID NO: 368446 - DNA, 998 bp, Homo Sapiens
  misc_feature (25)..(25): n is a, c, g, or t
  misc_feature (115)..(115): n is a, c, g, or t
  misc_feature (361)..(466): n is a, c, g, or t
aattcccgggatgggaattcttacntctcgataaagattataacaacataggaaaattcttaaatagaattttaggcatggaggtgcatcagcagaatgcgttatttcagtattnttgcggacacacttactgcagttgttcaaaatgccaaaaaaaatggaagatatgatatgggaatcttagatcttggttctggagatgaaaaagtgcggaaaagtgatgttaaaaagtttctgactccaggatattcaacctctggccacgtagaattatacacaattagtgtagagaggggaatgtcatgggaggaagctaccaagatttgggctgagctgacaggaccagacgatggcttttacnnnnnnnnnnnnnnnnnnnnnnnnnnnnnnnnnnnnnnnnnnnnnnnnnnnnnnnnnnnnnnnnnnnnnnnnnnnnnnnnnnnnnnnnnnnnnnnnnnnnnnnnnntaaggaacaacaagaaaactgccatcttagttaaagaagtgaatcctaaaaagaaacttttcttagtttatcgaccaaatactgggaagcagctcaaattagaaatttatgctgatctaaaaaaagaaatataagaaggtcgtctcagatgatgccctgatgcactggttagatcagtataattcatctgcagatacttggactcatgcttatttggcgcggcaatttgcaaaaaagcaagccttgggggcctagtttgggaaaataggcttcggttgcccgcacctattatgcatttatgggggttcagggctgagtggtctgggaacaaaggttgagggtggtcctaagcattctggccaatggcacaaaccgtgaaaaatgccccatccgggcgggttaaaaaccggaaaattgggtaaccgcgcattggtagggtttgatccatttccgggaaaattgggggggccccctcttttggaaatttccctatacaccttcaaaaccatttttcaacagctttggcggttcc

SEQ ID NO: 368447 - DNA, 1106 bp, Homo Sapiens
  misc_feature (991)..(1000): n is a, c, g, or t
ggtccggaattcccgggatatcaccacggggtcacctgcgactcggcctgtgactcgctgtcgcaccactccgaccgcaagccctacctgctgagcccagtggagcaccacccccgcagaccacccatactacacccagcggaactccttccaggctgagtgcgtgggccccttcagcgacccgctggccagcagcaccttcccccgcaggcactacacctcgcagcaagagctgaaggacgagtgtgccctggtgccccgcaccctggccaccaaggcgaaccgcatccccgccaacctgctggaccagttcgagcggcagctgccactcagccgcgatggctatcacaccctgcagtacaagcgcacggccgtggagcaccgcagcgacagccccggccgcatccgccacctggtgcactcggtccagaagctcttcaccaagtcgcactccctggaggggccgtccaagggcagcgtcaacgggggcaaggccagccctgacgaggcgcaggcggcgcgctatggcaaacgcagcaagagcaaggagcggcgcgcggagcccaaggcccggcccagcacctccccgggctggtggagctcggacgacaacctggatggtgacatgtgcatctaccacgccccctcgggcgtgatgaccatgggcaggtgccccgaccgctcggcctcacagtacttcctggaggcctacaacaccatcagcgagcaggcggtgaaggcctcccggagcaacaacgacgtcaagtgctccacctgcgccaaactgccggtcagcctggacaccccgctgctgaagaagagcgcctggtccctcacgctcaccgtgaacccggggcccgggaggtttaccacaaaagcctcgcgggaacatgggaccaggccatgggggaaattccgagtcctggtcagccaggaacgctccctgcccggtacctgccaggttcccccaatatggaagggaccaggttannnnnnnnnnagggtaaagaatgatggaaattccatggccgaaaaaatggcgcgattggccatttattatcaagggccctgggggggaatgaaaaacacggggaaaaattccaaac

SEQ ID NO: 368448 - DNA, 1276 bp, Homo Sapiens
  misc_feature (790)..(802): n is a, c, g, or t
tgggtggcgaattctcgacgagggccgagggagatgcagcgcgcggcgatggtggcatgtggagcctcccaccaccacctaggtcctgagatgcgctgaagcccagcctgtctgccatcatcccccagcatggaccgtgggagcctcctgcccttccagctatggtgcccccggccctttggcacctactcacagaaccagccacgcccgccttctgcggccctcaagccatcagcctgccctgagcctggtggcggggccgagccagaccatgggcctgcccactcagagaacacaccacccgccttggccactgaggtccctgcctcccagccggctccgctcctctcagcagcagctgctggtgatgagggtcgagtcctcctggacacgtggtatgtcatcaagcccgggaatacaaaggagaaggtggccttctttgtggcccaccagtgtggtgggggcagccgggccagctccatgaaggtcaaggggcactggggcagcgatagctccaaggccaagcggcggaggcgctgtcttgaccccaccaaggctcctcctgacccagggggccgggagggcccccctgctgctgaggagggccccgcctcagccggtgaggacgtggacctgctctctgtggccgagatggtggccctggtggaacagcgggcagccctggccctgcagagctacccacgaccgaaccacccagcgcctggagcctttgggtccgccaaacaggtggaaccggtcaagggcgtggggatcttgaacggccggtccnnnnnnnnnnnnnatgtaacccgtgtaacccgaggccgtggcccccttttcgaaggctaaagggaagaccccccccaactaagtgctcttcccccagcgcaaaaaatgtacggatttaaagcccccgcgcggactggccctgtccccggtccgaccgcgccccaacacttttaataaaccgcgcccgtcccaaaccggggtttgtttacacccacccaaatgtcgctctatgaattgtcaaagaacctacccccgccctcgcgctacagtggcgtccgcctctcctacatcttcccgcggaccgcatggcgccgcctcgcctgttttcatctatatatgcgtcccgcgtccgcttgccgttcaaccactcttgtctcgatctgtctgtgactcttgtgtgtgtagcgatttgccactctgacgaagatatatgggctgcatacgcagtccccactgacaactcgtcatatcgcaccaccccttccgc

SEQ ID NO: 368449 - DNA, 1054 bp, Homo Sapiens
ggtccggaattcccgggatgtcacaccctcaggactgtcttcagtggtttgcattgctgggattgctgctgattgaaggaactaagcattgttttcagagtggtgggtcccatcggggccctctgattttcctgggcagctccatctaggagtagggccgagatctggacgataaaattcaggaatataaacaagctggaaaaatctttccagaaaatcaaataatagaatgggttatccagctgctgctgggagttgactacatgcatgagaggaggatacttcatcgagacttaaaggcaaagaatgtatttctgaaaaataatctccttaaaattgttcttcagaactgtacctctcctcataacagctactggatcatctaatcatcatatacggtgtacttggggaaggaaggaaggaaggaataaaagcatgcaactagttaggagattttggagtttctcgacttctaatgggatcctgtgacctggccacaactttaactggaactccccattatatgagtcctgaggctctgaaacaccaaggctatgacacaaagtcggacatctggtcactggcatgcattttgtatgagatgtgctgcatgaatcatgcattcgctggctccaatttcttatccattgttttaaaaattgttgaaggtgacacaccttctctccctgagagatatccaaaaagaactaaatgccatcatggaaagcatgttgaacaaggaatccttcattaagaccattcctggtatcgaaaattttaaaaaatcccttacccttgatgagcaggctaccagaaccctaatggggtagaatattccgaaaatgactcttgggaagacaaaaatttggaattgtcagaaagggaggctggctccaattaattaaaggccaggcaaaaaaagggttccacctggcagaactctgaaggggtacgtggtccaaagtacccgaaaagggccccccaggaaaaaaagatttggggttgaaaggaaacttcacgggggggtgtgtttgaaaaagcccagggaaacctg

SEQ ID NO: 368450 - DNA, 451 bp, Homo Sapiens
  misc_feature (403)..(403): n is a, c, g, or t
taaaattcaggaatataaacaagctggaaaaatctttccagaaaatcaaataatagaatggtttatccagctgctgctgggagttgactacatgcatgagaggaggatacttcatcgagacttaaagtcaaagaatgtatttctgaaaaataatctccttaaaattggagattttggagtttctcgacttctaatgggatcctgtgacctggccacaactttaactggaactccccattatatgagtcctgaggctctgaaacaccaaggctatgacacaaagtcggacatctggtcactggcatgcattttgtatgagatgtgctgcatgaatcatgcattcgctggctccaatttcttatccattgttttaaaaattgttgaaggtgacacaccttctctnccctgagagtctccgtcgaactgggatcctctagatcacctcgcatca

SEQ ID NO: 368451 - DNA, 979 bp, Homo Sapiens
tttttgcacagcagcatcatttatctggtagtagcaagacagccgtatgactttttgttgttgttaaagaaaaataagttgtcaagatttgcctaccaataactttcctatgtcttggctttcatgtccagtgggctagtttccaactgtttgagactcagggtaatcccagaaacctgtgaagcatcggcacaaaggttgtagcgcagatgccaacagatgtgtaggtaacaaacttgtaaggcacttcaatctccagtctccgcctggcctccttgttcctggtgaccaccttgaaccatgagtataatacttgcagtgagagattttgtacaagctgacgaaccaagaggatcaacacaattcccactgcaaatttggtcagacccaaaactaacatgtaggtggtgagcggtcggatgttctgaataacagggagagattcagcgggcttggatacaagctggaagaaatggttgatccagaatcctatggtcactccagccccggcagccagaatggtggtggtgtccgcccgggttgggctgtagtaatcagaaacagggtaattgtaacacaggaagaatggcacaactatgacacacacggggaagagggggctggccgagtccaggcagtcgatgaaggtccaggcagggtaggtgaggacgatgaggagtgcggtgatcaggacgccacccagcacatcctttgggaaggagagaaaagaacagtgtgaaccaatgagtgtttccttgtatacaggtataatttgaatcaagtatggctaatttgatatttaaaacacaatttttgcattgttttattttacagtacatgttcaaagaaagtgtaaagttctaaaactttgaagtgaaaatacgaaaaaatgcttccaacaaccatactactcatgttacgtatcttctttcaccttttttaccttttggaataaattctggatttgttttcttaatga

SEQ ID NO: 368452 - DNA, 1114 bp, Homo Sapiens
gggccaggagggatccccctaaagccccacccgtttgagaaccagctgggagccaaccccaagggaaaaccccggttttcaaattgttctttaataaaaaatggttggaatttattaaaaaatggaattaattgggaaaggggaaaaattggtttggaccttacatagtagatttttagtgtcccaagtgcctggaagagaacttgggatttctctacccccactgggcacgccttctctagcagcaaagatggagcttccagttctccagacggtgatgaggcacaggaaggggcagggggtggggccaatgaagatcctcttgggctgcctgacttccctcagtgtacacatcagctcagcccgaagtggggtgaagatctcccaattgacacgaaccaaggaattcaaactctcctcaggggcaggatacgtctccaggcttaacttgctcagcccactggtgtggcacagacaggtccttcagggcgtcaatagacatgcaattgctgccaaagtagaaggtggtgagctgggagcagcggctcaggccaggcaggatggcactgagttgggagtagtggatctgacagccctccaagatgagggtcttaagagtaattgctgcctctctcgagaccctcgtgttggcagaaactttctccagcagagctccgaggggttcaagactgatacagaactgcagcatgtagctgagattcagatgctttgggtaagcgaggcttgggtactggtagagacacttcaagtcctcttccaataggtagccgcaagttaattccaagttctccaaggggttctagaggcacctgatcagctgtcccaggtgccctctgtggaaggtgaccatattcattttaagaagctggaggtgtttcagcctgaggaacatagagctgattttggcgactgagcattcctcgcggtaattgacgtgtaaggatggcacctggagaaaaatgagtttgcgaagattcttcatctccttcaggtaacaatgaagctttcttatcagatgtggccaggacacatagcaaatttccagctcctgcatactattcaggtggattattttcaatgatcttctgagata

SEQ ID NO: 368453 - DNA, 929 bp, Homo Sapiens
  misc_feature (81)..(89): n is a, c, g, or t
  misc_feature (249)..(258): n is a, c, g, or t
  misc_feature (272)..(281): n is a, c, g, or t
  misc_feature (324)..(406): n is a, c, g, or t
  misc_feature (459)..(565): n is a, c, g, or t
tttttaatccacacaccccccctgtgggggtttcagggcgccccaaaaaaaacccccggggggcggtgttttttaaaaatnnnnnnnnnaaattggaaccccccgggcgccccgggggaaaaaattttcccaaaaaacacaccccgggaaagaaaaatttttcaacccccgaaaaattgttggggggttttttaccccccatataccccggaaaaatggttattttcccctcaaggccgtaaaaccttnnnnnnnnnnttcgcccaaattgnnnnnnnnnnaaaaaagggggtctttccaaaaatccccaaatgggcatttttnnnnnnnnnnnnnnnnnnnnnnnnnnnnnnnnnnnnnnnnnnnnnnnnnnnnnnnnnnnnnnnnnnnnnnnnnnnnnnnnnnnggggtcggtaaaactgggcccccccgggggaatttttaggggggccccccccnnnnnnnnnnnnnnnnnnnnnnnnnnnnnnnnnnnnnnnnnnnnnnnnnnnnnnnnnnnnnnnnnnnnnnnnnnnnnnnnnnnnnnnnnnnnnnnnnnnnnnnnnnnggtcggaaatcatcgcctttatttcttggcgggtctcgagggaaggtcgggaccgggcgggtcctgctggcctagagggcgtcaggggcagccaccggcggctccggatcctcctcgtcgcgagcgcgggggagctcaggtccggcctctccctcgccggccccgacctcgggggcgatccggacctgctccccgaatatctccagatcagccttcagcccgtcattcaccgccatggcgccctcgacctcaggcggcgagtgcagcagccgctccacctaacgcaacttggcgcgcaccagcctcttcagggggagcagctgctccttgcttatctccagggcacggatctcccgggccagtc

SEQ ID NO: 368454 - DNA, 707 bp, Homo Sapiens
gtggcgttctagaggatccctcacgccatgtcacaatagccagtcggcgctgaggcaggcaatgatatgggaaatgatgatgccattggagggaatgtgagcaaatatatagtgcttccaactggctatggtggacagcccaagaaaggacatcttatctttgatgcttgctttgaaagtggtaacctgggccgggtggaccaggtctctgagtttgagtatgatctgttcattaggccggacacctgtaatccacgcttccgagtctggttcaactttactgttgaaaatgtgaaagaatcacaggaaatcttattgataactgaagtgaaaactaagagcttgggcatatcctggatgtaaagaagtaggcccctgtgatagcaatggaagaaagtctgcaggtaaatggtacattgaggcttatgacccagcatctaataaaagcttatttaatgtttttgattaaatgaatgagtaagttgggcctgctcccaagcactaagccctgaggtcagggtgttataagccttattctaaatacccatttctgatacggatagggcttttcatgtacatgcttgatgttcatgggcttgatgactggatgggactaagatataaggtgcaggtctccggtacctgccacttgtaaggtcagggaccttgtgtacatggcgtgagggatcctctagacgacctcgcat

SEQ ID NO: 368455 - DNA, 1099 bp, Homo Sapiens
  misc_feature (163)..(186): n is a, c, g, or t
  misc_feature (313)..(364): n is a, c, g, or t
  misc_feature (999)..(999): n is a, c, g, or t
  misc_feature (1024)..(1024): n is a, c, g, or t
  misc_feature (1040)..(1040): n is a, c, g, or t
  misc_feature (1055)..(1055): n is a, c, g, or t
  misc_feature (1064)..(1064): n is a, c, g, or t
  misc_feature (1073)..(1073): n is a, c, g, or t
ctcgtccgctcccttctccccctcctctttccccctcttttcccacctggtaccggtccggaattcttcggatcgcctaggtctgcaccgccactgccgcccttgccgccgcgcttcgccccggctctgctacgtcaggccgcgcatctctggccaggaccannnnnnnnnnnnnnnnnnnnnnnnagcctcacactgaagtctgggcgcccgcgatcgcaccagcttcttggtcttagagatcctgagctctcggctgacgcggaagcgcagccatccccaccaccgccgccacggccaacacgggtgccannnnnnnnnnnnnnnnnnnnnnnnnnnnnnnnnnnnnnnnnnnnnnnnnnnntgctgcagatcgcccgccgcccaccatggcccagcagcaaacaggtagcaggaaacggaaagcgcccgcggccgaggcgggagccgagagctcgccgtcgcagggcttagccgcagcggacggagaggggccgctgctacccaagaagcagaagcggccggcgacgcatcgcacgatggcgcactatctcaaggcccgcgaggtaggagcgcggggccccgccaggctccagggcttccagggcgagctgcggggctacgcggtacagaggctgcccgagctgctgacggagcgccaactggagctgggcaccctcaacaaggtgttcgcgtcacagtggctgaacgccaggcaggtggtgtgcggcaccaagtgtaatacgctgtttgtggtggacgtgcagtcaggccacatcacgcgcatccccctcatgcgggacaaggaggccgggctggcccaggaccaacagggctgacggcatccatgccatcgagctgaatccctccaagacgcttctggccaccggcgggcgaaaaccccaacagcctgggccatctaccagctgcccaccctggaccccctgttgcctggggcgaccgcattggccacaaggattggatctttcgcagtcgctnggttgagttgacaccgtagcttttnagcgggtttcccgaancggcaccttgggttntttttggcnggattgganccagaatttttttaattggcagattt

SEQ ID NO: 368456 - DNA, 1105 bp, Homo Sapiens
atcaatggctttaaagcggaggtggtcctcctattccccgactttcaaatttagggtaccttcttgcttggggagtcttcaagggtttacatcttagaaggttaagaatggacctgagaagaggaggcagagggaagagaagccttcgtttcagggagcctgggcctgctgtagatttcggaggcctggctcctgatccagcaggtgaggctctgtatcccgcaggcgggccttcatttcctgcaggtgggctcccatatccgagaggtggggctccatatccgagaggtggggttccatatccaagaggtggggctccatatcctagaggtgggggctccatatcctgcaggtggggctccgtatccaagaggtggggctccatatcgcacaggtgaggctctgtatcccacaggcgggccttcatttcctacgggttgggctccatatcctgcaggtggggctccgtatccgggaggtggggctccatatcctgcaggtggggctccatagacaataactgaacaaggcatctgtggagtgcacatattcccttccccagtaattacataaattcccatagagctgaaccagtcatttaaggttctaagtggaaatcctcgggcagcagcagaggcagctttcaccatcaactgggcaaattcaatggcacctccatttctgaagactaatttaaaagtagcttgtccttcccagccaccatatggagctgcctgaatagttcccttaatgaagtttgcagcaaatactggttgttcaacagtgaggttcgtcatcagatcaaatggcatcataaaagacaacatgggatcactgatggagcatgaagttatgaaaatcacccggtatgaagtgagaaacaatgttcctgtctttctaccactaaagacatttgagccttctgatcgctgtgggaaggagagctccacattcggagaccgcttcaagagactttcaccgttagggatgagggctccgcggcggttctcggtgtggctctgattcaccgccatcttgcttcgggcctcctgccgccccgtagatccgctctcgacgaattcgagctcggccgatttggcctgat

SEQ ID NO: 368457 - DNA, 1073 bp, Homo Sapiens
cggcttatgggccccgggaaaaatgggggatataccccattttgtgcccagcccccagaaggtgagctcctgggggcccccggggggccgggagcccaggggacccttcaaggttgatcccctttttccaagccccctttttttccatgaactgcagaggaggcccgagtaggacacacagaaggttactgccccccatccggccccgaccggcaggccacaccacaggaagatgttgttgtgcagctcgcccaggatgcccgagcgccctacaaggggcactgtgctcgtcacctttgtctcagtggagacttccaagaaccagaacctcaccatggcggttcccaacagtgacaaaatagctgctgtcctctgagaaggagagggcaatgactctacaagataccttgttggaggccactacgatgtctttcttccagtcccagacgttgagcaccatgtcatgttggtagcccatggacacgatgtgcttcatattgggtgagaaggccacacacgccacaccatacttgtggcctagcatctccgccacctgattcttctcctccacatcccagatgcgcacagcaggcctatgcccattctcccctgtcactatgtacttcccatcaggggagaaggccagagcactgagagacttcctggcggtgttaaagatgtgctgctgcttgttctccttggggtccaaaatcaccaccacacagtacatgccaggaactgttctagacagagagggggctatggaatcctctccacagctctcagaggcaggccccattctccacattcctgccaggtaggccacatggcctgtgccggggtcacaggttaggccactgctgttctgggctgtgatgccaagcaccttctcgagtgacacccggttctgcaccgtctcctcggaggccgtcgagagtcgcgtccgccgccgtaggcagattggtggggcggggggcggggaggactggcccctccgcgccggaactcccgccatgacagagggcagcttctcccctgcatcgttccgcgcatagcctccatcccgggaatcc

SEQ ID NO: 368458 - DNA, 1079 bp, Homo Sapiens
  misc_feature (940)..(940): n is a, c, g, or t
  misc_feature (968)..(968): n is a, c, g, or t
  misc_feature (970)..(970): n is a, c, g, or t
  misc_feature (976)..(976): n is a, c, g, or t
ggtccggaattcccgggatcgtcgccgccatctgtcacctccactccggcatcagcagccagtcgcccgtgtcccgcctgtctcctcggcggagcctgctgcccgtcctgccacctctctgctctgttcttgtctctgccttcattcccgaatggatctggtaggagtggcatcgcctgagcccgggacggcagcggcctggggacccagcaagtgtccatgggctattcctcaaaatacaatatcttgttctttggctgatgtaatgagtgaacagctggccaaagaattgcagttagaagaagaagctgccgtttttcctgaagttgctgttgctgaaggaccatttattactggagaaaacattgatacttccagtgaccttatgctggctcagatgctacagatggaatatgacagagaatatgatacacagcttaggcgtgaagaaaaaaaattcaatggagatagcaaagtttccatttcctttgaaaattatcgaaaagtgcatccttatgaagacagcgatagctctgaagatgaggttgactggcaggatactcgtgatgatccctacagaccagcaaaaccggttcccactcctaaaaagggctttattggaaaaggaaaagatatcaccaccaaacatgatgaagtagtatgtgggagaaagaacacagcaagaatggaaaattttgcacctgagtttcaggtaggagatggaattggaatggatttaaaactatcaaaccatgttttcaatgcctttaaaacaacatgcctactcagaagaacgtcgaagtgcccgcctacatgagaaaaaagagcattctacagcagaaaaagcagttgatcctaagacacgtttacttatgtaataaaatggccaactctggaatgttggagaccatcactggctgtattagtacaggaaaagganccggttgcctttcatgcatatggaaggnancatggnagcatgaaaaagggaaaatagttaaagttattacctaacagaatttgcccatcaagggtatttttaaacaacccctaaatggattttaagaatccggaccaaa

SEQ ID NO: 368459 - DNA, 611 bp, Homo Sapiens
  misc_feature (334)..(334): n is a, c, g, or t
tatgaggaacccgcaaactgagccacaggtctggtgaattcacttactgaactgtttataggacagtggaaagtagactgtagtactgtttcctttccttaaggtcgtctgctacaaagaaccaccacttcatgtaagagctgctttggactccttaagtttcatacatatgtctgagggcttgtgtagtagagccatgcgtgaggaatttgcaactctcagagcagtctcttggaaccctggggctcctttccatgtttctctgggggctgaaagagtgactcatgtctgggaatggtatgtatggcagagtatgtggggcatttgggtttcnttcactggtggtgcccacatcctctgtcccatgattttccactttagataaggagatagatatttggtttcccacatcttgggagataaagtaaaatgatatttcctcctatgcccatacccacataactaaatctgcatggacagaacagtttaaggggattgttggtttgcaggatacagggggtctttttaagaagatcctggatccatccaaaagaagctaccaatccccaaagcaacctattgggggaaaagggccctaaaaccatcctctt

SEQ ID NO: 368460 - DNA, 1073 bp, Homo Sapiens
  misc_feature (739)..(754): n is a, c, g, or t
  misc_feature (772)..(834): n is a, c, g, or t
  misc_feature (914)..(930): n is a, c, g, or t
ggaattccctgcatcagcctgcggcttctgccctctttctttccctgactggttgggtccggcctccgaggcctgtaccccgccttttccgcataggcatgtgaccagggtctcccgcggagttttgctgagaattttggaaatgaagcatgtggagcgcctatgtcgggggagagaggccgagctgaaggagcacgggcgccggcctcggcctctggggagccgggcccgctcgcctccctgcgcggggctagcccgagcctggaactcgggaggcccaggagcgaagtgaaagccccttctggtcccccagggctccactcccgcagcagcccggctccgtcggcgtcagtggagccccaggcctgggtccgagatgagcgagacgctgctctggctcgcggtcgcccgagcgctcccaaaaccagggaacaggccccaggagagaagcccctagaagtttcctggagcagggagtctcctgtatcctgttagctctgcaaaggaatctggactttattctgagggccttggagaacccctgcaaagttttttaaaaggtggactaagagattggcatttcacaacatgactctccgaattgaaacactaagaagattggcgaaatttaacatttacagattagtaatttaacccaggtgactcgcgatgagggacatggctacccttcacttttggagggagttttaagtgatacagatcttttttgccaagcaannnnnnnnnnnnnnnngagacggagcgtcgttcnnnnnnnnnnnnnnnnnnnnnnnnnnnnnnnnnnnnnnnnnnnnnnnnnnnnnnnnnnnnnnngttcaagcgattctccctgcctcagccctccctagtagctggggattacaagccgcgcggccaccaagaatctgcctaannnnnnnnnnnnnnnnnaaggggaagaggggggtttctccccttgttggccaaggctggtcctccaaacccctgaacctcgggtggattcaacccggcccccgaacctccgcaaaaggggctggagaattacacaggggggggagccacccgggtgccaa

SEQ ID NO: 368461 - DNA, 1022 bp, Homo Sapiens
  misc_feature (109)..(109): n is a, c, g, or t
  misc_feature (350)..(350): n is a, c, g, or t
gaggttcccccacctccaggggggctgggcccttgcaagtagggggccctttcaggttgcgggtggccgccacccgggttccccagaggaatgtggtgctggccagggncgcaggaccagccccggtgggcccgctcccggcaggcccaccccactgcttgccgcggagctggaagatcaccccgtccaccgcctccaggtccaggcgcagctgactctgcagcgagtgcagttcgggcagggaaatggtgccgatgtccccacagccccgcagccccggcagtgtggaggctacgcccaggccctccagctcctcctgcagctgcttcacctgtgcctccacctcctcntttttctgcagcgccagctgccggtcgctatcggccacacgggcacgctccttggcctcctgcgcctctcgctgccaggcatcgcagacctgcttcacctgctgccaggactcctcccactgccggatcttcctcttggcctcgtccagctgccgcctgacccgggccagctcagctccgtttggacttgcactcgaagaggatggggggccggcactcaggatgggggaggggctgggggagaagctgccggaaacaaagtcccagatgctcccggggacaccgttcaaacctagggggctgtaggatgaggctgcagagcccagtgtgcccggctctgaacgcaggggtggcggctgctggggaggcgtcatggctgaggagcccaccggccctgggaggggctgggacagcgaaccgagcggcgaggtggacgcagaggatggcgagtgtagcgatggtgctctgggcagggagccggggatggcgacaggtgcagagccggccagcgacctgggacctgctgctcccaggtcgtggccgtcttgctcttccaggtccttctctagggatgcaatattcacattgctaagatgcaggtctaacgcagaacctaagggagggcccgctcctgaccgccgagtcacgagacccgcaccttgtcggcgcacc

SEQ ID NO: 368462 - DNA, 757 bp, Homo Sapiens
acgacgccccgcccttgggtcggtgctacgtgttcttcgtctctcgtaacccgctgtgaaccggtccgagattcccgggatgggagcatggcagtgagccaaggagacgggaccctctgctttgtcctcatgctgtgctgttggcaagaaactgagctccggccgagaaccgtgattccaggttcacctactgaaataccattcagttcaaaacaggaggatatgtctgaattattagatgaaattctggtccaggagattttggatctgaataaaacaacaccgagcgaaatgccaagtacagcatcaacattatcaacaccgttacatgctggtattgatgagaattatcaagctggtggttctgagaattaccatgaattattagagaatttacaattctctcctggcattgaggacaaaatttccaatgatgaagccaatgctaatgcaaatctccatggcgatccttctgagaattatcgtgggccacaggtgtctcctggcagtgagaagagtgtttccagtaaagaaaagaattcaaagaacactcagtatgaaaatctatccattctggaccaaatccttcaaaatattggaagatcttcaggaaacattttccataaagagcagcagaggaccagcgcacagaggaggagccaaggcagtcagtgaggccgcagccccagaccccctgcgcaggagaggagcctgctagaacccccacccaccagcctccggaacagggcacttgtgt

SEQ ID NO: 368463 - DNA, 1093 bp, Homo Sapiens
ggtccggaattccctggatgtcatgaaccgcgagagcttcgcggcgggagagcggctggtgtcgccggcttacgtgcggcagggctgtgaggcccgccgctcgcatgagcacctcatacggctgcttctggagaagggcaagtgtccagagaatggctgggatgaaagtacacttgaactctttttacatgaacttgcaatcatggacagcaacaatttcttaggcaattgtggtgtgggagaaagggaagggagagtggcatccgcactggttgctcgtcgtcattacaggttcattcatggcattggacgatccggtgatatttctgctgtgcaaccaaaagctgcaggctctagccttttgaacaaaattaccaagttctttggtcctggcacattataaagctggcgtggtgtccactacagtagtccaactgctttgtagtacctattggcaaccggtatgagtctaactctgtgtttcttaacattacgacacaaaagaccaaaggcaaagtatattatatggccacgaatagaccagaagtccttgctttaatatccatgatcactgcaggttttgagcctgctggtgatagaaaatgtcttggaaggtgacgagctgcgtacagacctgaaagcagtggaggctaaagtccaggaacttgggcctgattgcattctgtgtattcattctactacatcctgttttgctccaagggtgcctgataggtaaatgatttgtgaatattgtcctttagctgtttatcagtcttttaaataaaatatactaattctcaaatatgcttaaataacacttcacaataaataggtgaaatggtctgtttctaagagaatagattgacccttgtgggagaaatagcattaacagcttggggaaaccaaccatttgaaatataaccagggaaaaaacatttagtacagggtgggggagcctcccctttatcacctgaagtcgatgcaaaaccggcctcgggttttcttggctcttgggccctgtttcctgatcccccttaacaagggtttttcctaattaaattaaataaaaaagtttctttttctaagcttaaag

SEQ ID NO: 368464 - DNA, 990 bp, Homo Sapiens
ggctggaccggtccggattctcgggatcacaggtggacgcctcagctgatcgtcctccctcccggggaccctgccccgagtcgccgagtagccgcagagtcgcctccgtcgccccgccgcccctgtgtttcggacatggccgcacgccttctccgagggtccctacgcgtcctgggcggccaccgtgcgccgcgccagctgcccgccgcgcgatgttctcattccggaggggaagaacgtctagaaactccttctgctaaaaaattaacagatataggaattcgaagaatcttttctccagagcatgacattttccggaaaagtgtaaggaagtttttccaagaagaagtgattcctcatcactcagaatgggagaaagctggagaagtaagtagggaggtttgggaaaaagctggaaaacaaggactgcttggtgtcaatattgcagagcatcttggtggaattggaggggatctgtactccgcagctattgtctgggaggagcaagcttattcaaattgttcaggcccaggttttagtattcattcaggtattgtcatgtcctatattacaaaccatggctcagaagaacagattaagcactttattccccagatgactgcaggcaaatgtattggtgcaatagcaatgacagagcctgggagctggaagtgacttacagggaataaaaacaaatgctaaaaaggatgggaagtgactgggattctcaatggaagccaaggttgttcatcagtaatgggtcatttaagtgatgttgggattgtagttgcgggccacaaatcatgaagcctccctcccctgcccatggggattagcccttttttctggtgggaaaatggaaaggaaaggatttttttcaggggacgaaaagctacataaaatggggattaaaaagcccgggataccggcagaaatatttccttttgaagaaataaccggttggcccacctttgggcccctactttgggg

SEQ ID NO: 368465 - DNA, 1055 bp, Homo Sapiens
  misc_feature (94)..(145): n is a, c, g, or t
  misc_feature (779)..(779): n is a, c, g, or t
  misc_feature (917)..(939): n is a, c, g, or t
aattcccgggatctagcatgagggtttgttgctaaaattgaggattctatctgacgtttactttttgttgttttttgagacaaggtcttgcttnnnnnnnnnnnnnnnnnnnnnnnnnnnnnnnnnnnnnnnnnnnnnnnnnnnntggactccaatgttccctccccttttagcctcccaagtagctgggtctacaggcatgaaccatcaggcccagataattaaaaaaactttttttggtgaaaacatgatcttgctatgttgctcaggctggttgtctggcattttctttgtcctttattctttatactagctaaaccctggagtatccttgaagcctttactggcatacagagtacctgaatcttactttggagcctagcatgggtcataaatatatctgattcattaacctgtgagacagctgagagaacacagactccttacctgtatctccagggcatatctgggtttttctctgcctaataggattttcctgctttctagttagtaatattgaggaaagaaggaaagggcttatttatccatttgctttttttccactgtgaatccatctgttctttccatgaacattctggggagcacctcctgattaaactcctgtctccctgaccactatcctgctgtcattggacttcttaagcacatgggctactgccccaggacactgggatttgagaggagtttagtggtaattgtcaggtctttcaaagcatttattattccttttatacggagatttcagtattgagacttanaatgaactgaaaaatgagattggacatttaatatttttggatgtaactttttgaagaaagtatgctttggtggcttaaaaattgtatatgattcttaaggtaagaaactttggataatattgcccataaatttaggannnnnnnnnnnnnnnnnnnnnnnggggacagttctcggctcaagtcgccccaggcctgaaagtgcaattgaacctgtaaaatggtgcccaatgccactcccagccctggggcaaaaatggagcggaaactcccatctcc

SEQ ID NO: 368466 - DNA, 1120 bp, Homo Sapiens
ctggtaccggtccggaattcccgggatgatttttcctgcgttggcaaaaaaaccagaacagttgacattaccaatttcacagcaaaaaccatctccagtcctcggaaaactggaaatggtgaaggccgtgcaacttcgagttgcgtgacttctgcccctgaagaagccctaaggtgttgtagacaggctgggaaagaagacgcatgcccagagggaaatggcttttcttacaccattgaggaccctgctcttccaaaaggacatgatgatgatttaactcctttggaaggaagccttgaagaaatgaaagaagcggttggtctgaaaagcacacagaacaaaggtaccacttccaaaatatcaaactcctctgaaggcgaagcccagagtgaacatgagccatgttttatagttgactgtaacatggagacgtctacagaagagaaggaaaacttacccggaggatacagtggaagtatgtgaatctccttttccaagtcaccttcgctaaataaacatgtaacagtgcatccatattttaaatttatcacaactttttcataacttatttccccatttactcctctttttacttaaagaatgtgcatttgatcattccaatgataaactctttaggaatagatgacttgctgtcttgtggaacttctagacttattggttaagtctgttaggaatctatttctccaagacttttccttcttataggtcaaaaggataagtagtccatagtatgaataactgaggggagtgaagtctttttccttattccattggagtcttggcgctgcagcgtgtgtaaagatgtatacgatagagagtattttaaaaacctaagttcttaatagtgaggctatttaaagaaagaaattaaggtagattaagccatcgattgtatcaaagagaaagtgtgaaaaactacttttagaaatctgttgtcaatattgatttttgaagaaactttggtcagtgttaactatgaagaaacatttaaacatttttgctcatttgtaacaagccttgtttaacttgtacttattttgcttgaagcatcacaacaacaggttactcctattcatattatcgtcgatgtatacctact

SEQ ID NO: 368467 - DNA, 673 bp, Homo Sapiens
cgcgcgcgcatggaggatgctcactgcacttggctttcgttacctggtctgcccccgggctgggccttgtttgccgtcctcgacggccacggtggggctcgagctgcccgcttcggtgcacgccatttgccaggccatgtgctccaggagctgggcccggagcctagcgagcccgagggcgtgcgcgaggcgctgcgccgagccttcttgagcgccgacgagcgcctgcgctccctctggccccgcgtggaaacgggcggctgcacggccgtggtgttgctggtctccccgcggtttctgtacctggcgcactgcggtgactcccgcgcggtgctgagccgcgctggcgccgtggccttcagcacagaggaccaccggccccttcgaccccgggaacgcgagcgcatccacgccgctggcggcaccatccgccgccgccgcgtcgagggctctctggccgtgtcgcgagcgttgggcgactttacctacaaggaggctccggggaggccccccgagctacagctcgtttctgcggagccagaggtggccgcactggcacgccaggctgaggacgagttcatgctcctggcctctgatggcgtctgggacactgtgtctggtgctgccctgggcgggactggtggcttcacgcctccgcttgggcctggcccag

SEQ ID NO: 368468 - DNA, 960 bp, Homo Sapiens
cgcccgggctgtccgccgcgcggggaggacgcgagcacccagctttaatccctggaaagtccacgaacaatgaatccatttcatgcatcttgttggaacacctctgccgaacttttaaacaaatcctggaataaagagtttgcttatcaaactgccagtgtggtagatacagtcatcctcccttccatgattgggattatctgttcaacagggctggttggcaacatcctcattgtattcactataataagatccaggaaaaaaacagtccctgacatctatatctgcaacctggctgtggctgatttggtccacatagttggaatgccttttcttattcaccaatgggcccgagggggagagtgggtgtatggggggcctctctgcaccatcatcacatccctggatacttgtaaccaatttgcctgtagtgccatcatgactgtaatgagtgtggacaggtactttgccctcgtccaaccatttcgactgacacgttggagaacaaggtacaagaccatccggatacaattttgggccttttgggcagcttcctttatcctggcattgcctgtctgggtctactcgaaggtccatcaaatttaaagacggtgtgagagttgtgctttgatttgacattccccctgacgatgttactctggttaagtcgtgacaaccttaagaaaaacgagttcgaattaagtcgtgaaaaaccttcattctccttgtccacatgtgagcagcctcaaagaggtatccttatgcgatcctcttcctcgccagttatcctcccattcaggcttcctcccacgcattcatccacggtgactcagcttcgactcctcacgcgcagcaccgctacccctcttgccccccgctctctcgcactctattcatgttccccccgctgtcaccccgctctttcttaccccttgcccttcaccctctcctgccctcccc

SEQ ID NO: 368469 - DNA, 707 bp, Homo Sapiens
cgcagtgccggcgtcatggcggcctccgcgcacggctctgtctgggggccgttgcggcttggcatccccggcctgtgctgccgccggccgcctctgggtctgtacgcgcgcatgcggcggctgcccgggccggaggtgtctgggcggagcgtggctgcggccagcggaccgggcgcctggggcactgaccactactgcctggagctgctgcggaaacgggattatgaaggttatttatgctccctgctgctccctgcagaatcccgaagctctgtttttgcactgagggcctttaatgtggaactggctcaggctggattactcttgctgctgtcttgctgtactgtatgccactgggatctgaacactaaacattgctaagaaacccacccaccaccaggatatttggaagtaacttcacatatggaaaagttaaagactcagtctctgagaaaacaattggactgatgcgaatgcagttttggaaaaaaactgtggaagatatatactgtgacaatccaccacatcagcctgtggccattgaactatggaaggttgtcccagctttggacagcggaaactccttcacagcggctgctatgtccttgtgacacgcttccgtcattttttggagcactttcttattttctgacacaataagatattctaggatccttttgaatctctcccctgcctcacctttggaa

SEQ ID NO: 368470 - DNA, 771 bp, Homo Sapiens
agcggacggggtctgtctgggggccgttgcggcttggcatccccggcctgtgctgccgccggccgcctctgggtctgtacgcgcgcatgcggcggctgcccgggcaggaggtgtctgggcggagcgtggctgcggccagcggaccgggcgcctggggcactgaccactactgcctggagctgctgcggaaacgggattatgaaggttatttatgctccctgctgctccctgcagaatcccgaagctctgtttttgcactgagggcctttaatgtggaactggctcaggctggttaaagactcagtctctgagaaaacaattggactgatgcgaatgcagttttggaaaaaaactgtggaagatatatactgtgacaatccaccacatcagcctgtggccattgaactatggaagtgattgccaaaagagggtttctgtaacaggagccacccacagacctgacagtggtacacctcttctcaggtctgcacaccagcagaggcaggcccagtttctgggccccagattgacttcacagagccccagtaaagatggaaagccagaaacgccccaactgggggattgagaagaaaaagcggatgggaagctgctgttaaaaagacattaatctgactaaaagatgggttatgacaatcgtcgatgaaagagaaaaaaatctggatgacaaagcatatcgtaatatcaggaactggaaaattatgctgaaacacacagagctctcttctttacttagcactagaaactattgcc

SEQ ID NO: 368471 - DNA, 1084 bp, Homo Sapiens
  misc_feature (786)..(786): n is a, c, g, or t
  misc_feature (875)..(875): n is a, c, g, or t
tggaccggtccggaattcccgggatcctgaaggtcaatttaagcgggctgcctcgggattatttagatgccgctgctgcggagaacatctcggctgctgtctcctcccgggttcctgccgtagagccagagcctgagctcgtagtcaacccctgggacattgtcttgtgtacctcgggaaccctcatctcctgtgaaaatgccattgtggtccttatcatcttccacaaccccagcctgcgagcacccatgttcctgctaataggcagcctggctcttgcagacctgctggccggcattggactcatcaccaattttgtttttgcctacctgcttcagtcagaagccaccaagctggtcacgatcggcctcattgtcgcctctttctctgcctctgtctgcagcttgctggctatcactgttgaccgctacctctcactgtactacgctctgacgtaccattcggagaggacggtcacgtttacctatgtcatgctcgtcatgctctgggggacctccatctgcctggggctgctgcccgtcatgggctggaactgcctccgagacgagtccacctgcagcgtggtcagaccgctcaccaagaacaacgcggccatcctctcggtgtccttcctcttcatgtttgcgctcatgcttcagctctacatccagatctgtaagattgtgatgaggcacgcccatcagatagccctgcagcaccacttcctggccacgtcgcactatgtgaccaccccggaaaggggtctccacccctggctatcatccntggggacgtttgctggctgctggatgccttttcaccctctattcccttgataacgggataacacctaccccctccatctaatactaagncaccccctcctggccggcaacctaacaattccatcatcaacccctggcataatatgctttccgaaaccaagaagatcccgaaaaggcgctctggtctcaatttggctgggggttggatccccggccagtcttcccccaaaagaacgcccttcccccccagtgggatgggtaaaccccctttgcccccccggaaggacctctggcatttt

SEQ ID NO: 368472 - DNA, 957 bp, Homo Sapiens
  misc_feature (94)..(109): n is a, c, g, or t
taacaatgtctgatgttcttgaaaatactttttcactttacaagagatacaatatgtgcttcagtttacattttactctccatctaacttcagnnnnnnnnnnnnnnnnggatgctatactaagaaatctttagtatgaggagtatgtatcatagcctcagaaatttcaaaagctgccacaatgtttttccactcctgtaaagtcaaagatataactccctgtttcctgccatggcaactggaatcatttccctcacccatctggttaacattcatcggctccaatattggcagcctgtcttcatcaagccttattcttgcaaaaccatctcttacaataaaagaaacataaaatatattctccacagtacgagaaaaagagtttggatcaatcacaaactcaaaataggacacaggagtatcaggatactttcgaaagtaggtttgcaacaatcccaaaatcctttctacgtttttttctgtcgcttctggataactactcaggtccaacttctgcaactttgtaggcatgttgccattttcttccatcttgcgaacttttttctggtgttcaagtcggggctttggtgcagaacgttctagcttgaatgaaccaaaaacaaaatggaatgtctcagcttttaccatccaggatgttgcttccttttctattgccttccagaaggaaagagctatgctatcatcacaatcactcaacttgtcaggatcgccttccatccaattcagacccacgaacagaaacagaaagtcacaaaatgctaactgattaaagaagttcatatctgagtttaactgctttgccttttctttacccaaatcagaagccataacaagaaaccgggcgtcgagggctgcttctctggttcggctcacgccatcaaagaggacgttggcttcctccagagcctcggttaaggagttgttcgccgagctcac

SEQ ID NO: 368473 - DNA, 760 bp, Homo Sapiens
gccccaaatccggttgcacacctggctcacggcgagtgcggagcagaaagcactactggcgcgggccacagccagccgctttcatctgctaagacctcacctgaaaggcgcaccagtgccctcaaggatcctcccgcctctgcaggatgtcgaggctcctcctcgccgggaggagaaagcggaatcccctccctgcattctcggacagtgccacgtcctccggctgccagcggggcagcgccgctaggtaccgctgcgcgccgcccccgcttcccgccagcagcctcacctttcccggccccgccccgcctgggttctaagggcctgaggctgcgaggcaggcgagggaaggcttggtaacggaggggcggggccgtgcaacccttacctcgactctgaacaggaatgtccagaaaagagtagaggagtgtttctcccttgatgtgggtgggggagggttagtacccgtgggtgacttgcccttctttagataaaaacagcacagagcagtcacctgagaaagagtccggcacatacaatgtgaatctggttaacccaagatcttgaagatagtagaagagaaatgggcttttttaaggatgcagccagccgcgagtagattaccaccattgaagtccctttccctcaggtagagcggcagtcattattttaggacagggacggtaagacaaacactaagcgcaaaaagacagagcttctatccgtaagagctcgagtgtctgggaatgcagtcgcgcca

SEQ ID NO: 368474 - DNA, 895 bp, Homo Sapiens
ctggaccggtccggaattcccgggatcttggagccttctatgggcaagggagcaaaggcggcatgatgtcaatcttcctcatgggctgctacgaccctggcagccagaagtggtgcacagtcaccaagtgtgcaggaggccatgatgatgccacgcttgcccgcctgcagaatgaactagacatggtgaagatcagcaaggaccccagcaaaatacccagctggttgaaggtcaacaagatctactatcctgacttcatcgtcccagacccaaagaaagctgccgtgtgggagatcacaggggctgaattctccaaatcggaggctcatacagctgacgggatctccatccgattccctcgctgcacccgaatccgagatgataaggactggaaatctgccactaaccttccccaactcaaggaactgtaccagttgtccaaggagaaggcagacttcactgtagtggctggagatgaggggagctccactacagggggtagcagtgaagagaataagggtccctcagggtctgctgtgtcccgcaaggcccccagcaagccctcagccagtaccaagaaagcagaagggaagctgagtaactccaacagcaaagatggcaacatgcagactgcaaagccttccgctatgaaggtgggggagaagctggccacaaagtcttctccagtgaaagtaggggagaagcggaaagctgctgatgagacgctgtgccaaacaaagggattgctggacatcttcactggggtgcggctttacttgccaccctccacaccagacttcagccgtctcagacgctactttggggaattcaacgggggacctggtaccggggatttgatatgactttagcccacgcacgtggcttggaaacaagg

SEQ ID NO: 368475 - DNA, 1428 bp, Homo Sapiens
cttgggtggaagcaatgatgtttgggttgaggaggcactgggatgcagcgcccattgtagatggtggaaaattcaggtgtccttgccaagtttgatgggataggtgggtccccacgatgttgaaggtagtgctggtttcctttgctggggctgactggtgtgtttcttgcgttcatctccagggcctctggcaccttcttgccttcccaagcccaactccgcttggtgaaatagttgacagtggcaaattcaatcagtgcagaaaatacaaggcataacagacggctatgaaccagtccatgccgtcgcatatgccactttaggtaaggaatttctggcactgatactcaaggtggtcatggtaagcacagtggtgacaccaaagactgtacggggcaggaacagactctctgttgagccagaacgacacttgtgacagaatgacagtcatgatacatggcaagtaggtctggatcacaaagtagccaatttttcgcttgagatggaagtgggttgtcatgacgacatattctcctgtactagaccggattatctctgtcccaacaacatggcccaaaaggtcatactggttcaagcgagaaccatcctgtgccacttccacggatttgttctttccgagagtccaagaataaaccacttcagctgttgtataggcatagcttccaaacttcagtgggcaggcatgcacatccatgggaaaatcttccaaatgcatgggacactcagcatgaattgttaacctcattgtatagaggagggttccgttgtccaccaatctgagcagcttgttgggcgtggtcatgttatgagccactgagtttcttgccattgtggaagaaggtgtccggtgtccagatcttactagccaggagattgttcagtggaaggatcttcatggggccatcaaatttcagtctttcatcatgccatgtctgccgaaaaaatacatcaatagtgtactccatgtcagtgtctgacacagggccaaaactggtcacgtagatgtcagtcttcacttcagtcactgcatctccaagcccaggtcgcagccggttgtcatagccgtccagaagacgatccaagattctggtgaagatagtgatgttgtcagtgctgtcatcaggaatatctggggcatgcttaggagacagcccgccaatgtcctgcttcacaaagtccccgggttcttgtcgtcttgattccccttgaccagtggttccagggagaatattaatcaggaaaagaatcccaaggctggtcatgtaacagtgacttgtttgtgtgattatcatcttcttaggcacaaacttggagagaccgagctctacagtctgagcggaaaggagagaaggatgaatgaactgaacaagttggaggttgagccctgacagagctcggcttctggct

SEQ ID NO: 368476 - DNA, 703 bp, Homo Sapiens
tcattgtccatcagtccataccatcctcatcatatttttcagtggtgttattgtaatagtctgactgtaaattcttcatcaaaatatctagtatctgtctcagatgttactcgaggtttaaaaggaggtacaagctctttatcatatacatctggccagtttactccagagaagaaacggtgtctcataatttcttttgcatcatctggtcctccaccaaggcgtttatttggatcctttatcaagagccctgaaagcaatgattttgcatctgaagagagtgttcgaggaaatttaatgtcttccattaatattaattcaaaaagtttctcatggtcctggttgtagaaaggtaacctcccacacatcatttcatacatgacaacccctaggccccaccagtctactgctcggccatagtcattatcttctaacacctctggtgccagatattctggagtgccacagaatgtcttcatggtggctgcatctgtgatcccttctttgcaaagtccaaaatctgtaatttttatgtggccatctttgtccagcattagattctccaacttgagatcacggtacacaatctttccggaatgtagatagtccaaggcagagacaatttctgcaccatagaaacgtgtgcggtcctcagagaacacccgctctctcgacaaatggaaaaacagctcgcccccattaa

SEQ ID NO: 368477 - DNA, 398 bp, Homo Sapiens
gatgtgtgggaggttacctttctacaaccaggaccatgagaaactttttgaattaatattaatggaagacattaaatttcctcgaacactctcttcagatgcaaaatcattgctttcagggctcttgataaaggatccaaataaacgccttggtggaggaccagatgatgcaaaagaaattatgagacacagtttcttctctggagtaaactggcaagatgtatatgataaaaaggctgagtcatcactagagagtgggaagggcggcagcagagaatccaaaccccaaagctgatatcacaaagtaccatttctccaagttgggggctcagaggggagtcatcatgagcgatgctaccattgtgaaagaaggttggattccataggggggggatcct

SEQ ID NO: 368478 - DNA, 805 bp, Homo Sapiens
ggggatcgcagccccgcagcccggagagccgccgcccgttcgcgagccgcagccgccggcggcatgaggcgcgacccggcccccggcgttctccatgctgctcttcggtgtgtcgctcgcctgctactcgcccagcctcaagtcagtgcaggaccaggcgtacaaggcacccgtggtggtggagggcaaggtacaggggctggtcccagccggcggctccagctccaacagcacccgagagccgcccgcctcgggtcgggtggcgttggtaaaggtgctggacaagtggccgctccggagcggggggctgcagcgcgagcaggtgatcagcgtgggctcctgtgtgccgctcgaaaggaaccagcgctacatctttttcctggagcccacggaacagcccttagtctttaagacggcctttgtcccccctcgataccaacggcaaaaatctcaagaaagaggtgggcaagatcctgtgcactgactgcgccacccggcccaagttgaagaagatgaagagccagacgggacaggtgggtgagaagcaatcgctgaagtgtgaggcagcagccggtaatccccagccttcctaccgttggttcaaggatggcaaggagctcaaccgtcagccgagacattcgcatcaaatatggcaacggcagaaagaactcacgactacagttcaacaaggtgaaggtggaggacgctggggaggtatgtctgcgaggcccgagaacatcctggggaaggacaccgtccggggccggttttacgtcaacaggttgagcaccaacctgtcatcctg

SEQ ID NO: 368479 - DNA, 1101 bp, Homo Sapiens
cggtccggaattcccgggatgctttaggctgccggatgtctgatctccggataactgaggcgtttctgtacatggattatctgggaaaacaacaataaacttgttttagagcactttgctgcaagggaccaccacctgcacgaccagaatatgacctggtttgcataggcctcacaggttctggcaaaaccagtctgttgtccaaactctgcagtgaaagccccgataacgtcgtgtcgaccacaggttttagtattaaagcagtgccattccagaatgccatcttgaatgtaaaagaacttggaggggctgataacatccggaaatactggagccgctactaccaaggatctcaaggggtaatatttgtattagacagtgcctcttcagaggatgatttagaagctgctagaaatgagctgcactcagctcttcagcatccacagttatgcactttaccctttttaatattggccaatcatcaagacaagccagcagctcgctcagtacaagagatcaaaaaatattttgaacttgaaccacttgcacgtggaaaacgctggattctacagccctgctcactggatgacatggatgcactgaaagacagcttctctcagctgattaatttgttagaagaaaaagaccatgaagctgtaagaatgtgaaatctggcaaagaaaacaggctcccaaaaggccttgaacctatcatgttagtttctcattttaattttatttttggtatcaagactatattgggcttcagaatctattttcctctgggccatttcagactctcatctctctatttaaagggaatattcctgtaagatcagatgaattatcatcggcatttaacgtcagtacacactactgaagagagaattattctctggttacccactaaattatcttccccgcatggctctttccttcgggttgttcctaagcatcctcttctaaactctggggctgaaacgggatggaaattcatggcttaatggaaaattcaatcccctttgaagggactccgaaagacttcccagaccttggatccttttttccctggggtttggggaatggaagtattaatgggact

SEQ ID NO: 368480 - DNA, 685 bp, Homo Sapiens
cagacaccatccacattgaaccccacaatgccagcctctgagcggacagtggcctgggtctccaacatgcctcacctgtcggctgacatcgagagtgcccacatcgagcgggaagagtacaagctcaaggagtactcaaaatcgatggatgagagccggctggatagggtgaaggagtacgaggaggagattcactcactgaaagagcggctgcacatgtccaaccggaagctggaagagtatgagcggaggctgctgtcccaggaagaacaaaccagcaaaatcctgatgcagtatcaggcccgactggagcagagtgagaagaggctaaggcagcagcaggcagagaaggattcccagatcaagagcatcattggcaggctgatgctggtggaggaggagctgcgccgggaccaccccgccatggctgagccgctgccagaacccaagaagaggctgctcgacgctcaggagaggcagcttccccgccttgggtccaacaaacccgcgatatgacagctggacccacaccgatggacatggaccatggcaccaacgaaagaacacaacgaaccgacaagcaccgaacgacaaaaccacacaaaaaccgaagaacaagaaacccaagacaaaagaccgcacagcacaccaacagcacactgacagacaaaaacccaagaaaaca

SEQ ID NO: 368481 - DNA, 819 bp, Homo Sapiens
cgaggcccagcagaaaagacagcgcgctgaccgcccagaggaacagcatcagcagggacttctctgtgtggccgcgacacgtagcagtccaccacgcccgtgcacggagggcgcgtgcaaggtgaacttcttcggggccaggaatccaaagagaaagtagtgcaaggcccctgaaggctgcctccagcagggtccggaggaggaggtggatgatgtagccggcctgaaaagtcgggcacctggaggccgccgcgctccccgaatggccgctgggcagcgtctctgcccggaggccggctccctgggggtcggggcagcggcgtggggcccagcgcggctgatgcgtggctcctcggtgcaggacatagacgctgaagacggcggaggggaggaggacgcacacgccctggatcagccagaaccgcaggtgagacacgggggagaagacgtcgtagcaaacattggcgcatcccggctgcagcgtgttgcagacaaacctctcctgctcgtcctggtagacgggtcgccccgccaagacaatcaccagcatccgcagcagcatcgtgaggacgaaccagagctttcctggaagagaggaagcgggcatggccttcatcaccccgatatacactgcccctgaggtaacagcttttacacagtgtctattggggctgagattgggaaaattgacaacgtcaataagcatgtctttagtttctggttgtaagtgttggacgatgtcgtcgatgttggacacaggggtcgttgctatacttgcccaggctggtcttgaacctcttggcatcaagtgctcctgcg

SEQ ID NO: 368482 - DNA, 717 bp, Homo Sapiens
tcctgagatggccccagatctgcaagagacatttgagagaagctatttattagcagacgtggaagaaatggattctgcacttgattatttagccatgacttatcaatgatgatggattggaaagcagtagctgcccagaagttaaatctgtcttctaaaaagaagaaacatcggccttccacttcttccgctgccgaaccaccgctctttgcaaccagcttcagtgggattctgcagacctcccctcccccagccccaccctgcctgctgagggctgtcaacaaggtgaaggacaccccggggctgggcaaggtgaaagtcatgcttcgcatctgttccaccttggctcgagatacttcagaatccagctctttcttaaaggtggacccacggaagaagcagatcaccttgtacgatcccctgacttgtggaggtcaaaatgccttccaaaagagaggcaaccaggttcctccaaagatgtttgccttcgatgcagtttttccacaagacgcttctcaggctgaagtgtgtgcaggcaccgtggcagaggtgatccagtctgtggtcaacggggcagatggctgcgtgttctgtttcggccacgccaaactgggaaaatcctacaccatgatcggaaaggatgattccatgcacgaacctgggcatcattccctgtgccatctcttggctcttcaagctcataaacgaacgcaggaa

SEQ ID NO: 368483 - DNA, 1013 bp, Homo Sapiens
  misc_feature (140)..(140): n is a, c, g, or t
  misc_feature (153)..(153): n is a, c, g, or t
atggggtggaagggtttgaatcccacccctttggaaaaggggaaacttgttcagggggaaacgggtcctaccagtggaggcgggagtactttctggcagcttctccaggctgtgttgtaagcaactagaaactgtccttngtcagacttttcntggatgctcccatgatgtcatctagctttccccctttgcatatctatgctggtgttataattccggaatcctccatcatgcaatgtccagatgtctccatactggtctgtcactttctggagcctgtgagcctgcatgatattctgacactcaagctcaatgtttctcagttcttcattaagcaactgtagctcatgctccactccctcttgctccccttgattgcattcaattgtgctgcttgagtaatacaggtcatactctccatgatttcgaatcttgcatttgagctccaagagctgcctgaatctttcacagtcctcatctgggttgccaatgcagtctgagtcaatgtattcaccagatacgaggctctcattgtactgaagttcaacacttcccagagtgtcttggctctgccccaggtctctcttgctcttcaaagatgtgctattggggtcctcggctgcattctcctgctctgagctctcatcatttcgcaagctttcatctgtacgtcctactccactgtccttctcatggttgttggatgaggatgttgcagtgtctgttgtgccttcttcttcttcttgcttttttggctgctccacctcattggcagtgggctgcattgcttcattatgctcttcttccaacatctccaagtttaactcctctaagaattcattcctttcatcttccagccagccttcatccagctgaatctctggccttgcaacaagcagcacgattctcttacactcatcgttagacagcaaggccactgcttcttctcgattctggacatcttccccatttatttgcaaaatccgatcccctatcccgggaattccggaccg

SEQ ID NO: 368484 - DNA, 863 bp, Homo Sapiens
gggattcccgggatggccccctccggaaggtgaggggaatggattggactccggtggggaaagcgggtgtctagaagtggtgctaatgggaagagaattctggtttcaaaagaggatgctctgccacaaagagcggctcgcgcgctggcctgggctctagccgaggagagatcccgggagaactccagagctccgggggagcgctcctcggaagaccggggccaacatgcctgtgcgcagggggcatgtggcaccacaaaatacatttctggggaccatcattcggaaatttgaagggcaaaataaaaaatttatcattgcaaatgccagagtgcagaactgtgccatcatttattgcaacgatgggttctgtgagatgactggtttctccaggccagatgtcatgcaaaagccatgcacctgcgactttctccatggacccgagaccaacaggcatgatattgcccaaattgcccaggcattgctggggtcacaagagaggaaagtggaggtcacctactatcacaaaaatgggtccacttttatttgtaccactcacataattccagtgacaaaccaagagggcgtggctatgatgttcctccttaattctgaatatgggacggataatcccaacgcttgccccccacagagggtaaaccccatattacccatccaaactggaaacccggaaaatttttggggtccaaattccccgggcctggacattcctcactttacagaaagcaagtcctttccccccaacaaagacccccgaaagggggcgggtcctcggattccctctaaaccccgggggatggattcactacgcccgtgaaagcatttttaaggcccttcctacc

SEQ ID NO: 368485 - DNA, 1084 bp, Homo Sapiens
gcgtccggaattcccgggatcagacaaggacagctcgttcgaggacctggagcagttcctggggacgtctgagcggcagggccggggccgtggggtacagccggagccccagctgcagcagctgaagaccgcggtggaggagatccacaatgccgtagacaggctgctctcgctgacccttctggccttcgaaggcctaaacacagctgcctccaaggaccgctgcctggcctgcattgaggaaccctttttctccccgctgtggcctctgctgctggccctgtacaggagcgtgcaccgagcccgggaggctgccctgagcaggagcatggagctctacaggaatgcaccccccaccgccattggcatccccaccaagctcctcccccagaaccctgaggccaagggggccactggctacccctactgcgcggcggcccaggagctcggactgctggtcctggagagctgcccccagaagaagctggagtgcatagtgcggaccctgcggatcatctgtgtctgtgcggaagactactgccccaccccagaggccacaccccaggccgggcccccgcccatcgctgcagctgccattggtgccgatgacctgctgcccatcctgtccttcgtggtgttgaggagcggcctccctcagctggtgtcggagtgcgcggccctggaggaattcatccaccaggggtagaccctggcggggcagggtggggggctccgtgcgaagagcagggacctcatccctcaacctaaacggtgggttggcagtcaacacctgggggaggggaaaggcggcgcgctcccgacaaaaaccatgtccttcgggcaaaccccctgcggagtcccccatgtggaaaaagggcacggctgacacccatagtcccacgggtcccctttacatttaacacagatgttctttcccccccatagtccgggacctctgtgttccctacatacccacttacatcacaattaccggcaccgtgagccacaggggacaaaaccgccctaatgcccacggcgccataacactaaggaccaccccacacccgtaggtgcatcacaaaat

SEQ ID NO: 368486 - DNA, 773 bp, Homo Sapiens
tcgcgctccacgcccgcagccgccagacggcagcgcctgcgtccgtgcccgccccagccggtgcgcgggagccgcgggggcaaaggctgcagtggccagcggaccatctctcgtgccctcgctctctgcgctccggggcagctgagccccggccacccgctctccaagatgaagaagctccagggagctcacctccgcaagcctgtcaccccagacctgctgatgacccccagtgaccagggcgatgtcgacctggatgtggactttgctgcacaccgggggaactggacaggcaagctggacttcctgctgtcctgcattggctactgtgtaggcctggggaatgtctggcgcttcccctatcgagcgtacaccaatggaggaggcgccttcctcgtgccctacttcctcatgctggccatctgtggcatccccctcttcttcctggagctctccctgggccagttctccagcctagggcccctggctgtctggaagatcagccctctcttcaaaggcgcctggcgcagccatgctgctcatcgtgggcttggtggccatctactacaacatgatcatcgcctacgtgctcttctacctcttcgcctccctcaccagcgacctaccctgggagcactgtggcaactggtggaacacagaactctgcctggagcacagagtctccaaggacggcactggggcccttgccctcaacctcacctgcactgtcagtcccagcgaggagtactggagcccgtacgtcctccacatcc

SEQ ID NO: 368487 - DNA, 935 bp, Homo Sapiens
ggaccggtccggaattcccgggatttacagaagaaacttctgatttgacttcactcatgccatgttcttttaaagttcttcgaggttgctggctcctctattaccaagaagacatgtttgttaatcactgtgtgttagaagaaggcctctatgctgaccttacttcctgcggttgcccagcatctaaagtcaaatctctcaagcccattgactatgtttttgaagaaccctccatcagcctttttgctctggagcattgtgagggaagagagttacatctagaagaggctgtgaactctgttctgaacaaggacctacacttctacacccagtctgtgtgggtaaaaagtggactatggatagcttatgaaggatccaatttcttgggaagacaaatcctactcaggcctaatgagatcccaaactggacagcattcagcagatggaaaacaattggttccctccgtcctatgaagcagcctgcagtgtacatcagaataaagaaccgtgcccagggtgaatatctgacagtcactggaagtctagcagacaccagggcaacatctgtgtgcatttctccctatagtggaaagcatactcagatctggtactactgccgaggactctttaagtccaaggccagtgatacatgtcttgatgtgattggtggccgggacacacctggagctaaagtagctctatggactgaacatgggcaattcaggcagaagtggagactgaaataaaaatggaactatcagctcttatctcagtgatcaacttgtccttgatgttaaaggaggaaattattgtgacaagactcatgtaattgtaaatcagcccctggaagggagaagaaacacgaaatgggacattgaaatattgtgagaagaatcaacatcctagaaagatccctagaaagagcaagaacgaaa

SEQ ID NO: 368488 - DNA, 830 bp, Homo Sapiens
ggatcggctggcgcgtcccccacgcgggccatcttggtcacggccggcggcggacagagccgcggaggaaccgcgagaccccagggcccagagcaggtccagccacccgtctggctccgtagtccgcgaagtctgcagtaaaggagccgcgtgggacctgggtgccgaagtccctagggcctggcaccgtcgtgccccatctcgtcgggccctcggcttgggggtctcgcagcgccctgccgtcgtgcaccccactactgcccccatttctacagggtgcccacctggtcaccacaccctcttggtccacccgcggatctcagcgtgtggctgacctctggccagcatggtgcagccgcagacgtccaaagctgaaagcccagccttggcagcgtctccgaatgcccagatggatgacgttattgacaccctgacctccctgcgcctcaccaactcggcgctgaggcgggaggcttccaccctgcgggcggagaaggccaatctcaccaacatgctggagagcgtgatggcagagctgaccttgttacgcaccagggctgcggatcccgggggctctgcagatcaccccgcccatctcctcaattacttcaaacgggactcgaccccatgaccacacctccaacctctctgaccgagcccttttccggggacccaggccggttggcaggggtccctgatgcagatggacagattcatgatcttccagggcctcccgtttccgggtgaggcgagcgtgtggcataccttgtgtctcaactgactggggaggcggacaagtgggctatcaccacatgcaaaccgacagaccc

SEQ ID NO: 368489 - DNA, 1054 bp, Homo Sapiens
  misc_feature (897)..(955): n is a, c, g, or t
gggtccggaattcccgggatcgcccgagccgcgcgcggagctgccgggggctccttagcacccgggcgccggggccctcgcccttccgcagccttcactccagccctctgctcccgcacgccatgaagtcgccgttctaccgctgccagaacaccacctctgtggaaaaaggcaactcggcggtgatgggcggggtgctcttcagcaccggcctcctgggcaacctgctggccctggggctgctggcgcgctcggggctggggtggtgctcgcggcgtccactgcgcccgctgccctcggtcttctacatgctggtgtgtggcctgacggtcaccgacttgctgggcaagtgcctcctaagcccggtggtgctggctgcctacgctcagaaccggagtctgcgggtgcttgcgcccgcattggacaactcgttgtgccaagccttcgccttcttcatgtccttctttgggctctcctcgacactgcaactcctggccatggcactggagtgctggctctccctagggcaccctttcttctaccgacggcacatcaccctgcgcctgggcgcactggtggccccggtggtgagcgccttctccctggctttctgcgcgctacctttcatgggcttcgggaagttccgtgcagtactgccccggcacctggtgctttatccagatggtccccgaggagggctcgctgtcggtgctggggtaatctgtgctctactccagcctcatggcgctgctggtcctcgccccccggctgtgcaacctcggcgcccttgcgcaacttctatgccagccaccgcgttgactgaaccggcaccccgggctcctgcaccccggaacgtggccaagcccatccccgcaacgggaaggccaactcctcccnnnnnnnnnnnnnnnnnnnnnnnnnnnnnnnnnnnnnnnnnnnnnnnnnnnnnnnnnnngttactcccgaccccccgccgactctcctgaccgattgatactccgccatcctctccccccccgcagttatccacaaacgccccctccccggcccaatc

SEQ ID NO: 368490 - DNA, 1036 bp, Homo Sapiens
ggtccggaattcccgggatgtgggctctggggaactgtggtgaacattcttctggaccagtcagaatgtagtatggtgcgccgggaggcggcatttattcttcagaatctccttgtaattccaatgcctacagaaattataaaggattatacttggcagggtccctgtgttcatgatgaggactctggcctatcgctcattggaaaacctgcccttcaggctcttttatatcactgccatttttatgaacatttgaatcagatggtaaagcattgttacctaggacggtgtatgtttgatttgaatttttctgcttttgatagaaattcagaaagcaatgatttaaatggtttagatgactcattcaagttttggagggctccatctaggacaagtcaggatcgagatccaagttctctctccacctcagaaacaacggtggcaccttcattggggagtactgaatttcagccacttgtgcagtcaacaacacttctacctgaagcctcccatgaccagtttgtggctcaaggtcaccaggaaagtacatcaccacggccacctcatgattcatctctttctgctcccctgcccaaactgtgtgtttttgttactccatctcttctttcagcaatgtgcagcctcttggacaacctcttgacgattgctccccagagacactgcaaaggcttttcgacaagctcatctcatagaacttctctgtaacattgcagatgctaccctcatacagacatgggtccaggaaatcagagcccctgctgcccttcatcacctccagctgaacaccctccgggctcaaggtttcccttttctcctgggaataacctaatcctcctttggcccaggccttctggcagtcactgttttatttgggggggaaaccttgacccctggtggaatttcaggggaggaacctttggttgaaaaccccctcctttatctcaccacaaataattcctttgtggaaattccccctcaccccttatatgttaacccccaaaaagaaaatgtgttc

SEQ ID NO: 368491 - DNA, 1034 bp, Homo Sapiens
  misc_feature (992)..(992): n is a, c, g, or t
cagtgttctcaggcgctgtggtctcaccttccactggggcaacaatgggccatttccagcagggacggcgcagtgttggcctgcatgcctgactgccacacacctccagaatcaggtgtctgaaaagtggcagtgacgaaagaagagactctcccggccgaggccccagtgcatggagagaaggaagaaatcaatttcctaattggtaccatatacatcagatggatggtttctagtgtgcttccaaaccccacctcggctgagtgttgggcagcacttctacatgatcctatgactcttgatatggacgcagtcctgtcagactttgttcggtccacgggggcagaacctggtctggccagagacctgctggaaggcaaaaactgggacctgacagccgctctgagcgactatgagcagctccgccaggtgcacacagccaatctgccacatgtgttcaatgaagggcggggtcccaagcagccagagcgagagccacagcccgggcacaaggtggagcgaccctgcctgcagaggcaggacgacattgcccaagaaaagcggctttcccgggggatttcccacgccagctcagccatcgtctccctggcccggtcccacgtggcaagtgaatgcaacaacgagcagttccccctggagatgccaatctacacattccagttgccagacctgagcgtgtacagcgaggatttcaggagcttcatcgagcgggacttgatcgagcaggcaacaatggtggctttggagcaggcaggtcgcctgaactggtggtccactgtgtgcacgagctgtaaacggcttcttcctctggccacaacaggggatgggaactgccttttacatgctgcttcactgggtaagctccacagcacagacagagggtggccaggctccaggcctgcgtaaggaaagacatatgctattgaaggaaacactattgaaggaaaagcatacactaaatagagtcaccncatgtcactgtcatgagaaagtccctaaatcgagccggggtc

SEQ ID NO: 368492 - DNA, 1067 bp, Homo Sapiens
  misc_feature (783)..(783): n is a, c, g, or t
  misc_feature (937)..(937): n is a, c, g, or t
ttcccatgcgggcggcgcgggccctgggaggggcgcccggagccagccgcgcagcatgcactggggggttggctttgcttcgtccaggccgtgcgtggtggatctgagctggaaccagagcatctccttcttcggctggtgggccgggtccgaggagcccttctccttttatggggacatcatcgctttccctttgcaggattacggtgggatcatggcagggctgggctccgatccctggtggaagaaaaccctttacttgaccgggggagctttgctggccgcagctgcgtatctgctccacgaactcctggtcattaggaaacagcaagagattgactctaaagatgctattattttgcatcagtttgcaagacctaacaatggtgttccaagtttatctcctttctgtttaaagatggaaacttatttaaggatggctgacttaccgtatcagaactattttggtggaaaactctctgctcaagggaaaatgccttggattgaatataatcatgaaaaagtttctggcacagaattcataattgactttctggaagagaagcttggagtgaatttaaacaaaaaccttggccctcatgaaagagccatctccagagcggtgaccaagatggtggaggagcacttctactggacgttagcttattgccagtgggtggacaatctcaatgagacccggaagatgctctctcttagtggtggtggtcacttcagcaacctgctgaggtgggtagtgtgccacataacgaaaggaattgtganacgcgagatgcacggccacggcattggccgcttctccgaggaagagatttacatgcctgatggagaaggacatgcggtctttagcagggcttttggggtgataagaagtacatcttgggggccccagctttccactcttgacgcccactggtcntgggacccttggccacaggccaatgtgggacctttaccaggggaccagaaccccgaacggcttgaatcaaaagggtggaactgaatcaaacccttgcccctggatactgcgggaaaagggataaacggcc

SEQ ID NO: 368493 - DNA, 475 bp, Homo Sapiens
  misc_feature (76)..(264): n is a, c, g, or t
tccatagttttagagtaccgcaaactcctaaagtactaaggtagaaaagattatataaggggatttaatgtatatnnnnnnnnnnnnnnnnnnnnnnnnnnnnnnnnnnnnnnnnnnnnnnnnnnnnnnnnnnnnnnnnnnnnnnnnnnnnnnnnnnnnnnnnnnnnnnnnnnnnnnnnnnnnnnnnnnnnnnnnnnnnnnnnnnnnnnnnnnnnnnnnnnnnnnnnnnnnnnnnnnnnnnnnnnnnnnnnnnnnnnnnnnnnnaggaaggacaacgtcaccaccaattaagaatcactggtataagtgtacctttgtgctctccaaacctcaatcccctcaaattttgatggtcaacttatcaagaggtgatcagagccaagggtgaggaatcatcaaataataatttgtttacagaaggaaatatctccaggcagtccatctgcttcagaaacttaggctaaatttaaaaaaa

SEQ ID NO: 368494 - DNA, 729 bp, Homo Sapiens
ggtgattgcatcccgggctggaagggcatcaactgccatatcaacgtcaacgactgtcgcgggcagtgtcagcatgggggcacctgcaaggacctggtgaacgggtaccagtgtgtgtgcccacggggcttcggaggccggcattgcgagctggaacgagacgagtgtgccagcagcccctgccacagcggcggcctctgcgaggacctggccgacggcttccactgccactgcccccagggcttctccgggcctctctgtgaggtggatgtcgacctttgtgagccaagcccctgccggaacggcgctcgctgctataacctggagggtgactattactgcgcctgccctgatgactttggtggcaagaactgctccgtgccccgcgagccgtgccctggcggggcctgcagagtgatcgatggctgcgggtcagacgcggggcctgggatgcctggcacagcagcctccggcgtgtgtggcccccatggacgctgcgtcagccagccagggggcaacttttcctgcatctgtgacagtggctttactggcacctactgccatgagaacattgacgactgcctgggccagccctgccgcaatgggggcacatgcatcgatgaggtggacgccttccgctgcttctgccccagcggctgggagggcgagctctgcgacaccaatcccaacgactgccttcccgatccctgccacagccgcggccgcaag

SEQ ID NO: 368495 - DNA, 856 bp, Homo Sapiens
  misc_feature (677)..(712): n is a, c, g, or t
taggtagcgaggcctgggtggcgaattcggcacgaggctccgggctcgcgcggaggccaggagctgagcggcggcggctgccggacgatgggagcgtgagcaggacggtgataacctctccccgatcgggttgcgagggcgccgggcagaggccaggacgcgagccgccagcggcgggacccatcgacgacttcccggggcgacaggagcagccccgagagccagggcgagcgcccgttccaggtggccggaccgcccgccgcgtccgcgccgcgctccctgcaggcaacgggagacgcccccgcgcagcgcgagcgcctcagcgcggccgctcgctctccccctcgagggacaaacttttcccaaacccgatccgagcccttggaccaaactcgcctgcgccgagagccgtccgcgtagagcgctccgtctccggcgagatgtccgagcgcaaagaaggcagaggcaaagggaagggcaagaagaaggagcgaggctccggcaagaagccggagtccgcggcgggcagccagagcccagccttgcctccccgattgaaagagatgaaaagccaggaatcggctgcaggttccaaactagtccttcggtgtgaaaccagttctgaatactcctctctcagattcaagtggttcaagaatgggaatgaattgaatcgnnnnnnnnnnnnnnnnnnnnnnnnnnnnnnnnnnnngccagggaagtcagaacttcgcattaacaaagcatcactggctgattctggagagtatatgtgcaaagtgatcagcaaattaggaaatgacagtgcctctgccaatatcaccatcgtggaatcaaacgctacatctacatccac

SEQ ID NO: 368496 - DNA, 687 bp, Homo Sapiens
cggaccaggctccctcaggaccccatcctttcctgcccggacccgtgaattcatctccttgaagccataacgtccgagctgctggtgcggggcagccctggccctaggcttcctaaccctggaagcgagaggatgagaggaggccggcccagctccttcttccagggtgggggtcattcagcctccactgtgtctgtcttttcttccctggggctccccctcgaggcgaggggccatgcatgtctgggggacccctgccccccaaaaccctctgtctgtctctgtctctttgctgtttgtccaagactcagtgtcccgacccttgttctcgccgtgaatgtcaatgggccaatcctctctgtcctttcagacacacacacacctgtgtccaccccttctgttcgccacaccctgcgtctggccggtccccccactgctgctgctatcaacgccagaataaacacactctgtgggtctcactcgcaattatactataaaacaataaaaatatttaattttatgaaaaactattataacattaactcataacttctcataataacacatacctcataacttacatatctatccacatataattaatataaaatttctttgcggctcccctccgccccttaaaaatctttttataacattttttttggccgcgcggcaccaaaaagtaat

SEQ ID NO: 368497 - DNA, 838 bp, Homo Sapiens
atttctctctttttaaaatctttttaaaagggaattggctgcttaaagccaaagtaatgataacgtatttggagtttatttagaagtaaagtgtgatgacgataacacttaagtgtgaatttttaaatatagttgagtagactgcatcatctgagttagaagcctattccttcagggctcggggtagcttgaatttgtagcaggcacatgacagaaattgtatgtattgtggatctgcatgtgtgctgagtattccctatttctttgatcccttttcccccattttctgctctgctcccccctgaggctgtcttctagagactggggtttcttcataggtttgaacagtgggagataccagaggtgggaggagaaaaagttatttattaccgttcccttcctcctgcctggaccatggtagcttctgtgttcccgtaaggatacagcttcctttgggaagccccatctatggctgtagatctctcggtttcagttgacaccattccctctccatgatcttcagacttaactactactgggtgcttccccaacccactggttgggtgtctttaattgtgaacacatatttgtaaatagtgcctttattaattgttcttgagttaatattctgagtgtgccatttattttctgtgccatctgttaaatgatgagcatttaataaaattgtgataatcagttatcagtacaagtgccgcatagtgcataggctgaaatgtctcaagattcccgaatacatatcagtattttctaatctgtatctggacatgcagtagaaattataacaaatacaagttctttgtgcttttctgctgcatat

SEQ ID NO: 368498 - DNA, 846 bp, Homo Sapiens
cgagttcagcttcccaaacaccagtgttggatattctgtgattgattttggtcctcctccgctgtcccccaacacccaggaatgggaatctggcttggttcgagataggagcttttctgtgtcctaagccctttcatgctagcaggaagactgaaagcaaggtggcccagtgtggggtcatagggcttgatagacctggcactgcctatctgcacttccaggtgccccacctatttatctgagcccacaggtggaaaggggaactgcctcagtgagaacgggcggacggggatgttaggaaaaatacagtaaagttgcaatgaagaggttcatgaagtatgtccttgttcttttggaaactctccgcaaagcgcaaaccagcaaatattgaggggtacccatctagctacttggggtcaggacctcgtcagaccaggttcggatacaatcatctgcgcatcacaggaatagtctcttggcggactcactcactggtgccagttctaagtcacgagacaaaattccactgtctgttccttttgctgtctgaaccttatgtgttactcccttcctttgctcttcactctaatccctggagtttgtgggcttttggttatgtttggttagtagatatcaccgcaatgccctagaacagctatgaagcagaataccatatggccacctcgacattgggacttgggaattcactctcaactggggccatccatgttgtgatgccttgaagtaaaaatggagccagcaggagtaccttctgtaaatgcatgtggccaaaagtgctatttatagggtgcccagggagccgtgatgtacaataacctgagtccc

SEQ ID NO: 368499 - DNA, 1115 bp, Homo Sapiens
taggtagcgaggcctgggtggcgaattcggcacgagggcgcggcggttccggcccagccatggcggacgaggccccgcggaagggcagcttctcggcgctcgtgggccgcaccaacggcctcaccaagcccgcggccctggccgccgcgcccgccaagccggggggcgcgggcggctccaagaagctggtcatcaagaacttccgagacagacctcggctgcccgacaactacacgcaggacacgtggcggaagctgcacgaggcggtgcgggccgtgcagagcagcacctccatcaggtacaacctcgaggagctctaccaggctgtggaaaatctctgttctcacaaagtctccccaatgctctacaagcaactgcgtcaggcctgtgaagaccacgtccaggcacagatccttccgtttagagaagactcactagatagtgttttatttttaaagaagattaacacgtgctggcaggaccactgcagacaaatgatcatgatcagaagcatcttcctgttcttggaccgcacctatgtgctgcagaactccacgctgccctccatctgggatatgggattagaactgtttagaacccatattattagtgataaaatggttcagagtaaaaccattgatggaatcctactgctgatcgagcgcgagaggagcggcgaggccgtggaccggagcctgttgcggagcctcctgggcatgctgtctgacctgcaggggtataaagattcatttgaactgaaatttttggaaagactaattgcttatatgctgccgaaggcccaaaggtaaatgcaagaaagagaggttcccgaatatccttaaccatggtaagtaaacgccttaaaggaaaaaggggagacagaagtaatccccttacttgggacccccggccccccgaaaaccccctgaatgggcttgggtgggagaaaccaggctattaaggagaaaatttttaacagccatttcgggaagaaagggcgccgacccacttactgggaagaagaaacacaagggcccggggacctcccccaaaaaggtaccccacttgtgtctccccccgcgttgaagagggccgggcacacacggggctctttc

SEQ ID NO: 368500 - DNA, 990 bp, Homo Sapiens
  misc_feature (295)..(303): n is a, c, g, or t
ccgcatctaggccccgccgcgttcgccacgcccagcgctcggcggcgccgccccactggcgctggcccgccccccgctaccgagcactctttcgcccggcctccggttctcgccggctctcggacccgcctccgaagacgtggagcgctgcggcgggctgatttgtcaaagatgaaagtgaccttatcagctttggatacttctgagagttctttcacacctttggtggtcatagaacttgctcaggatgtcaaagaagaaaccaaagaatggctgaaaaacagaattatagctnnnnnnnnngatggaggtgcccagttgttgtttagaccatggttaaataaatatgaacaagaaacactagaaaatcagaacttatatcttgttggtgcctccaagattagaatgttactaggggcagaagcagtgggattggtaaaagagtgcaatgataacaccatgagagccttcacatacagaaccagacagaacttcaaaggttttgatgataacaatgatgatttcctgacaatggcagaatgtcaattcattatcaaacatgaacttgaaaatcttagagctaaagatgaaaaaatgatccctggttaccctcaggcaaagttgtatccaggaaaatcattgtttcaacttcctcaattgctttgcctcactcttctatatggcctttgtcttgaaagatatgaagctttagcgccagagcttggccactctcctaattacctcccagatcctcaaccaaatttaatggaatcttttcctccttattgggctccaaaagaaagcatggtgtgcggggtgaaaaaagaaggtgcagggctttaaaaggcgacattggatggctactttatatgaaacaaagtcatccctggaaaaaagaaaatgggaaactttatttgggccaccttttggaaggattaaccttggaagttatttccctgccgttttggggttatgtggaagcctttttcc

SEQ ID NO: 368501 - DNA, 1262 bp, Homo Sapiens
ctcgggcaagatggctatcaagagtatcgcttcccgcctccggggttcccgttcgttttctgagcggcttcgtggctggggctgtagtgggcgctgcgggagctgggctcgcggccctgcagttcttccggagtcagggcgctgagggagcgttgacagggaagcagccggatggtgatgcagacagaaagcattgtaaatttaagcctgatcccaatatccctccaaccttcagtgccttcaatgaagattatgttggaagtgggtggtcacgaggacacatggctccagcaggaaataacaaattttcaagtaaagccatggctgaaaccttttacctttctaacattgtgcctcaggattttgataaatattcctggatattgggaacagaatagaaatgtactgtcgagagctgacagaaaggtttgaagatgtttgggtggtatctgggcctttgaccttacctcagactagaggcgatggaaagaaaatagttagttaccaggtgattggcgaggacaacgtggcagtcccctcacacctttataaggtaatcctggcccgcagaagctcagtatctaccgaaccactggcgctaggggcctttgtggtacccaatgaagccatcggcttccagccccagttaactgaattccaagtgagcctccaggacctagagaagttgtcaggactggtgtcttttcctcatttggatagaactagtgatatccggaatatctgctctgtggacacctgtaagctcctggatttccaggagttcaccttgtacttgagtacaagaaagattgaaggagcccgatcagtgctcagactggaaaagatcatggaaaacttgaaaaatgcagagattgaccagatgattactttatgagccgctatgagaagaagctagaaaaactcaaagctaaggagcagtcagggacccacataagaaagccctcccaatttttatctccagatgggtcataccgtctgtaatgaaacaggcatgcccttcttaaggtaacctattttaagggctttggctttttgctttttaaaaaggttttctcccttaaaaaaatgggggccccccccgggtccttccaaccttggaatgccaacggggggaaaacccttaccctccctataggccccaaaaccttttgggggtttaagaaaatcctccctggccctttgggccccttgagacaagctggggagactaagggggacaccaccctattgccccctttagc

SEQ ID NO: 368502 - DNA, 1882 bp, Homo Sapiens
  misc_feature (1118)..(1118): n is a, c, g, or t
ttttacagaactgtaccatttattatacacacaagtatatcagttccctttgttaacaaaggctggttatagataatatggaatgttacagtaccatcttgccataaaattctagtacgattttgtacttgaaaaagggtgcaaaaacaccagactaataaatctgactgaattgaaatatctcttctttctttttaaaaagctacatcattaacacatacaccacaaactgtacataagctcactttaaatcaccaactgtagatatggatagcatgtatactgtagtgttaattatccctcccatcagtttaattctattaaagccttacactgctgttcattcaggagcctttgttgatgtgcaagcctgtaatatgaattactgaactcaggtaagtagaatttcaaaggaggccaacaacagctgccaagaattatctgcagtaagaaatgtccttctcacagaagactcaattaggagcaaacattttttagactatcttcctgctttcaaatatattgtagccggtcaagattctccattttgaactctggatgctggtggctgcatgaaatccttaaaaggaactagtgcctctttaagtgcagaacagacttctgaagaagaacaggtgatgcattctactaaagttgggtataaggcaattacttgtgcccaggtatttccatcaacattctcaggctgagttttcttaagtgaatcaataagagtactgactgcttttaaaacaaatataatttctgttacttgttgccttggaagagggcatttaccacttaatctttcatcctctatatagcgatgtagtacatcttgggacctctttaaaagcactgagagtgccattcgtgagatgtagccttcttgaggtgttgtgactttattactgaaggaaaactggagtaatgtttcaaaacacattttagaaaattcctctctcaaacgaatatcaatctctgcttctgtaaatgaagatgactgagaatgtattgagcccttgttaagcattgtcattatttgaccaacaaattccttaggaataaaattggcataaggtagtatctcattgctgataagttgaactacctcgacnatcaatattttcatttctttgaaactcttgaatagagagattatctggaggtatgcttttagtaaagagaaaatcttcaaaagtattggctagttctggccacatactgtcaaattttccagaagaagcatgctgccgggcaacaggtagcccaatagaaagaactctgaggagagaggatactgctagtttccatgtgctttcagaagggcaggaatacttcaaactgagaggaaccctaagagtcttaataatattctggagcactttctcattcaccactgctttgtgacacgctgttttttggtataaatccacaactacttctaaagacctttcagcaaacggcacataattcaaggctacccattccgcctgattatattttgcacttgcaacgtgctttgtttccagctgtccatactgtggaggtttacaggaaaattctacaaatgccaacaactggtcaaatatagctggatacattatctgcatgttttctggtcctacacaaatggccttttggagaacatctaaagctgtaagtacagcttcctgtaaacttgtcaaaactgcttcggtataagatggaagaataaaaggggatgcatctgaacttattgggactgaaatagcactgtgcaatatgactcccaacttttgcaagtcatccatattgaaaccagtttttatgtgttggtagagagctggaaatatctgaattaaagctgtaagaaaaggctggctaggaataaaagttagcc

SEQ ID NO: 368503 - DNA, 1028 bp, Homo Sapiens
gacccttggctcgagcattataaacatcgaggtgctggagtcaagaaacagccaacctgaattctgaccaaagctttttccgttgctctcagagattccagaagattaagaaatgtgacacaatcatactgagagagatactgcagcaaagttcgtaatatcttcaaatcctgaactaaggatttagtcttggctccaagctggtgccacaaaggatccagataatgcggattgtcttgtcaaaaggttttccaatagcattttctaaagataaatcttccacttcaagcgatgggttatggcattttagttcccttagacatgcatttaaaatgtccagtatagcagtctgtatagcaagcatggtaggtgtcatagaaacatggatttctacaacttcaggtttgtgctgttctaaaaatgagtttactgctacatggaaccttggccacagatacagtttcctcacaaaaagatttctcatcactctttccacatgacaaaaaccagtatcaaaggcaacagcattgtctgtgaaagctttaataaaaccacgtttgtttttctggcgaaagaggcgcaagatgaatgcttcttgacaagactcgattattctgtgggctctatacaccaagatgccagtaattaaatctgaaggtattctatcagtcaagaagtcaaccacaagtatcctacttgtcgcaaatataacaccaccttgtgtgtaaacttcatagcgactgttgcttgtgatttcatttgttacacggcgagggaggtgttcaactccttctatcttcagctgattgataaaatactcctcctcggccggctgcgtgttgagcaccagcaccaggcaggctgggtggcagtgcagctggagaaagtggtaggggagccggtccgcgccgagcccgcgggcgcacactactagcccgtcagtgtcgagcagttccagcaccagctgtcgctcgtactccagcagcggcgccatggcaatccgtcgagccggctgccctgactccccc

SEQ ID NO: 368504 - DNA, 1092 bp, Homo Sapiens
  misc_feature (764)..(764): n is a, c, g, or t
  misc_feature (859)..(859): n is a, c, g, or t
cagctgggagtggcagagtcggaaagcagcggcgcacccatcgacctcctctacgagcttggtgaagcagaagggtctgcctgacgcccaccttgggctgcccccaggcctggctaagaagtccagctcactgaaggaggtggtcgccggggccccccggcccggcttgctcagcctggccaagcccttggatgcccctgctgtcaacaaagccatcaagtcgcctcccggcttctcggccaagggcctgggccacccgcccagctctccactcctcaaaaagacaccactggccctggcgggctcccctacccctaagaatcctgaggacaagagcccccagctgtccctgagcccccggccggcctccccaaaggcacagtggcctcagtctgaggatgaggggcccttgaacctcacctcaggcccagagccagcacgagacatccgctgcgagttctgtggtgagttcttcgagaaccgcaagggcctctcgagccacgcgcgctcccatctgcggcaaatgggcgtgaccgagtggtacgtcaatggctcgcccatcgacacgctgcgggagatcctgaagagacggacccagtctcggcctggtggacctcccaacccaccagggccaagcccaaaagccctggccaagatgatgggcggcgcaggtcctggcagctcactggaagcccgcagcccctcggaccttcacatctcacccttggccaagaagttgccaccaccaccgggcagccccctgngccactcaccaactgcctctcctcctcctacggaccgaaagatgttcccaggccctggctgcacccttccttgccccaagaagctgaaggcctgnacaaaatacgggtgggagatcaagcggggagatgctggccgggggcccccttcatgggggaactgcaccccatctgaagggtcccctgggggggcaccaccgggaaagaaatgaacaccccctggaaccttgtcgtccccggggcaaaagccggttgccgccgacattccgcctgtggagttcctgccggcggaagttctttcaagaaccgccaagggcgcctgttccaagac

SEQ ID NO: 368505 - DNA, 896 bp, Homo Sapiens
ctgagtgttagtataaaggatgtcgtgcgagtggcaactaggtgaaataatacagatagctagaatcaaaaatgttgacataaaggtgccaggcacctggaaccccagtttctgcaaaggagttctgcagccagctaaatgacagttttctgggctctcatgtttggcacccaagtgacaaagaatagcttaaattccagaataaaactcaaagacttttttcttttcttccagagccttcaaattcactgtgctcttaggtttgccttcttctgacatatactgaaggcagctaaaatgcagttttccgcataaacagctcctcgttgtatatatgcacaggtacctgaagggtatgtctgggagacagcgcctcggactctaaataagtggggcatcaaaggagaaccgtcctcccagagccatgggtagctggggttcctccgagacagccccatccagaatggaaaactggaataggaaattgcttgctggatgaagtccagatcagctgtgctattaagttttcagcaacttggcatccaaagacaagcacttctcttggctctgtttcccagttaaatgagcccgaggaaaataggtaacagttttctccatgccagatccagtcttgcggacaaggagctgaacaatttgctactctcttcagtgtttcttggagattcagattctggtggtgaagttccatttgctctgttggatttctcattcagcttccgagcaagggtttctatcatttccttgagttcgttttctgactcctgtgaagcttcttctgcttgttgccgggctgagatctgtccctccagtttctttttctggtgagttaggtttgcttgctcttgtgttaggaggtcagacacctgggatacaga

SEQ ID NO: 368506 - DNA, 292 bp, Homo Sapiens
  misc_feature (139)..(151): n is a, c, g, or t
cttgcctttttcctcagaagttcccaaacagcaactttgagagcagtggggtgcttggcagctgttctgtgttttccaggaatccaactgagcattgaaatctctcatttgccgacttatttttataggaagccaattnnnnnnnnnnnnngttttcttatagtattggaactacttctaattttaaaatgacttttttgatgtattttttgttaaatactatgtagtgtaatgtataattgctcttgtttattgcttttacaatcatatttattaaacagataatgtctct

SEQ ID NO: 368507 - DNA, 505 bp, Homo Sapiens
  misc_feature (430)..(430): n is a, c, g, or t
  misc_feature (480)..(480): n is a, c, g, or t
agggaatgtttgtgaatacatctggtgtgtactaaaaagctggaaaacccctaagtaaatgcaatatcgatagaaagcgagtttcttgaagagtcatctgctaaactccactagagtcatctctacaataacaatatcaactgaatataaaatattaatgccatggatgatctcagaaatgatttcctacaaagtcccaacctatcctgggaacatttcttatgtgtgcttgggagattgcaagaggacaactcggctctaaaatcgatgcattaacatgtcattgggaattgaccttgccaaaagatgcctccctaaatccacaaggaatctccttgtttgaacacagtttctaatccagctgtaatgaggacagacaacagtcaaatttaacaactgatcaggaggggaagttcatactccttggagntgggatctattctggcacatgcaccggggcccggggtggtggaatggggngatctgatgaggcagtgggaggact

SEQ ID NO: 368508 - DNA, 933 bp, Homo Sapiens
  misc_feature (25)..(25): n is a, c, g, or t
gctctttgaagagagtatgtatctnttgccatcagaaataggcaatcaaaagtgtagagtaacagctgtttctcatgggggcttgttctacaaatccccccttgggctcaacactcggtgagtagggatcaagaggttattgctaggacatcagtttcagggcctagacccatcactcgctaggccagaccttcatgtgtgacatccagctgtcagcaggaagaagtcagtctccactgcctccacagtctccgctgccacgctgtcagccgtgggaacaataaaaagcagccccagaatgtttgctgctgtcgtgcatggacgacaccattgcacataaaagcactagtgctccattattgcagttgggcctcctgaaaacccctagagctggagagggcaagggagaggcttcctctgatcttcagctgaaggactaagcatgacaggatgccaggcttagagcccagctggcctgggtttatgacccattgagactgccgtgccacgatgctccgtcacctcctttgatcctcctgtatgctgggctggagagaacaggaagggctactgacccatttttatagaagcaaccctaacgatttgagcaatggagtctggcacaggctcagcaggtggaggaagagtaagctgtcaggaaagcagcaggggagagtagtagggtcctgacttgactcagggtctttggaaagttgggtgtggcctccaaggtgagaagataggtgtgggccaccaccaggccatgacaggcgggcagtattgcccaggcttctctctccagtctgtcctgcgtggcatctcctttgagggtcagagaagccagggagggaggcaagctggggtcgtctcattatagaaaagagaagactggggctaagaggggatgttcctgccagcatgccagcctctgat

SEQ ID NO: 368509 - DNA, 967 bp, Homo Sapiens
tgtatctgcccttgactagttttcaactaatggcatagatcattctataaacagataatgttagagatacgtatctctaacattagcacagaccttccactgaatatcgaatgctttatgaatgataaagatgtttccggaaagatgaacaggtcacaatttgaagaactctgtgctgaacttctgcaaaagatagaagtacccctttattcactgttggaacaaactcatctcaaagtagaagatgtgagtgcagttgagattgttggaggcgctacacgaattccagctgtgaaggaaagaattgccaaattctttggaaaagatattagcacaacactcaatgcagatgaagcagtagccagaggatgtgcattacagtgtgcaatactttccccggcatttaatgttagagaattttccgtcacagatgcagttccttttccaatatctctgatctggaaccatgattcagaagatactgaaggtgttcatgaagtctttagtcgaaaccatgctgctcctttctccaaagttctcacctttctgagaagggggccttttgagctagaagctttctattctgatccccaaggagttccatatccagaagcaaaaataggccgctttgtagttcagaatgtttctgcacagaaagatggagaaaaatctagagtaaaagtcaaagtgcgagtcaacacccatggcattttcaccatctctacggcatctatggtggagaaagtcccaactgaggagaatgaaatgtcttctgaagctgacatggagtgtctgaatcagagaccaccagaaaacccagacactgataaaaatgtccagcaagacaacagtgaagctggaacacagccccaggtacaaactgatgctcaacaaacctcacagtctcccccttcacctgaacttacctcagaagaaaacaaaatcccagatgctgacaaagcaaatg

SEQ ID NO: 368510 - DNA, 965 bp, Homo Sapiens
cagcttcacgctccatcagtggtctcaccatagaccttctaatcttgatgtgtggctggtgtctattttctaatggtgttggtttggaacctgcatttctttgaaaaagagtgagcatgtgcattttcccagatgcctggtatccaactgcacttctccatgtgtgcattgtcccctgagctggcaagaagatcctactagttggtctgcatgccatgccagctcggcttgcaccctgggggcccaggtaactagctctcaccaacagaaagagatgtgatggacatcaccagaggccagaccagaagacctcgtgtgtgcccccgtccggtgtctgcctgtctgcagctgttgtccacaccaagggtggcctacagagggaagtgaggatccttgggacttcgctccaggacagccctcgctgtccaaatctccacctgctgcagagctgcctccagtcaagcccttgtttccagctttctgtgccctaaataaacttctgctgggattgagccatcagcattctgtggtgggcgtcgctgctgcgaggttgccctcgtgcacacaagctcctcacaggacttccaggatgatatggaagagtgactgagagcagccgccccggtgcttcccaaccttagagggaggtcacgggcagtctccctgcgatgctggccaacagggttctcgctgttgtcgcccaggctggagggcagggtgtgaatctggactcactggcagctcgacctgttggggctcaagtgatactctcacgtcagcctccaaagtagccaaagaccacaggcaggcgtaccatgccccagccccatgatgactttacttttcttctggaacctggtgaatttctggtgttaacatgtctgattgaaccttttgatattctgagataaacttatgtgaccctggattctgtggaattggtagtgatattcaggatttataac

SEQ ID NO: 368511 - DNA, 1026 bp, Homo Sapiens
ccaacctttccatttcatggcaaatgataatatttgtaaggtatagaggtaaatggatgaagcttctcacttggaggtggccaatttgggtgcttaggccactatgagggcaggaaaaaattactatcttggccacaattacaaacttcttagactgcagctccattttggttggaaagcattggttaacaaactcaagaaataatgtgtgaacataattttacaagtatgaatacaaattgaagttcataggctttttgcaagatacatgttgaaatatgtggaaattttcttaagggactcttgaaaatatttcgtaatacatttaattagaaaaagctcaactgagaataagaagaattgaatttccatcctgattatttaagctgataagaacagatactacacttgatcttagccaaaaggccgagaagcgattccatcctgattatttattagctgtatgactatggatatgtcacttctcagcttccatatacataaaatgagaagattagctcaaataatctctatagtttcctataatgctaacattctatttttatcttatttcagaattttatttcattctattttagttcagaatttacatgaatattatttctttcaaaatgttcaccttctgaaatgaaatcacttttattgctccttttgtatttacaggcacataaatactaaaatattttgtacatatacttattttcatcatctttggtaagcactgaaatgaatatatttagttcagtattttcaatgctaattaaggaattggtttggtaccagttttcagaacagacttaaagaaccaaaagattataatttcaaagagactaaattatttatattctactctaaaaggatgcttagaacaagaataagtacagcatccaggggataatattgcatgaccattgggcagaagaaatgcatcaaatcatataaactgtactaaattgatatgctttttaaacattgcctaataaaaatttattgttgttattaccc

SEQ ID NO: 368512 - DNA, 1070 bp, Homo Sapiens
ggtccggaattctcgggatgcgtccgcgtcggcgatccggggtctgggcgcggcgaggtctggtgtggcagatgtggatagctggaccctcctgggtgcctctgcgttatgtcgtttggttgatgcatttggagagaatctgtgctctccacaactgcaggggcaacatgctttcctggcctcttcagatcagggtggctgttcttgggtgctgcaccaaaactccagcagtgggctttcttcaagtggccggctcacctcattcctgccaagacccaggtccgtgttctcacagtgctgccatctttcctccgtgtgagcgtgggctgtgcggagagtggacctcggtgtgtgcggggctgcgtgcactgccatcgctccctctacacgagccggcgtggacccagggctgagctgtgaccacgagggccatcccgacgagccgccatggacccagggctgagctgtgaccatgagggctatcccgacgagctgccgtggacccagggctgagccgtgaccatgagggccatcccgaaactgtgattgttttctgatgaagaaaccaaggctttgtgactaactcaacccctcaagaaggacaaaactagcatcagagccccttgctcctgggtctggcaagaatgcctcttgtttgctgagaggtccacagatttacccggctcaagactgggagatgggaggtgaccaggtcagtgccagcctctctctgagctcctctgagtcgtggcagctgaggtgctcctccgagaatgttctgccatccgtgaggtcgtgtacgcctggaaacttttgttccattgaactctgccagggaactatacttagccacgcgagtggaagcccaggagtggggttctctgaatatccatagttagcaagcccggctcattttcaatcacctaaagcaacccccctgaattatttcgggggccaaaatgaatatttactaggaaggctcttgggccccttgggacctggaagggcactaaccctaacccccccttttggccgcttcgggaaaaaatttttcatactaaccggggagt

SEQ ID NO: 368513 - DNA, 889 bp, Homo Sapiens
gggaaggaagtggatgagtcccgcagagagatgatccggattctcaaggatctgaagcaaaaacacccagagaaggacttagatcagctggtggagatggccaattactatgctctttcccaccaacagaagagccgcgccttctaccgtatccaagccactcgtatgatgactggtgcaggcaatatcctgaagaaacatgcagcagaacaagccaagaaggcctccagcatgagcgaggtgcacaccgatgagcctgaggactttatttccaaggtcttctttgacccatgttcttaccagtgcctggagaactgtggggctgtactcctgacagtggtgaggaaagggggagacatgtcaaagaccatgtatgtggactacaaaacagaggatggttctgccaatgcaggggctgactatgagttcacagagggcacggtggttctgaagccaggagagacccagaaggagttctccgtgggcataattgatgacgacatttttgaggaggatgaacacttctttgtaaggttgagcaatgtccgcatagaggaggagcagccagaggaggggatgcctccagcaatattcaacagtcttcccttgcctcgggctgtcctagcctccccttgtgtggccacagttaccatcttggatgatgaccatgcaggcatcttcacttttgaatgtgatactattcatgtcagtgagagtattggtgtaatggaggtcaaggttctgcggacatcaggtgcacggggctacagtcatcgtcccctttcaggacaggagaagggacagccaaggctgcacgctaaggacttgaagacccatatgcggagttggaattccgactggtgaacctgtgaacaccatcacggtccca

SEQ ID NO: 368514 - DNA, 673 bp, Homo Sapiens
atgagccaccagaaccggacatgctttccttaaaagctaaatattttaggcttgtgtgccattaggctctgttacaactacttaattctgcttttgtaattctatagcacccattgataatacataaacaaatgagcatgaatgtgtctcagtaaaaatttgttcacataaacaggcagtccacccatgaagctatagcttgctgaccccttgtttaaacaatcaattgaattcaaacagaaataaaaggatcttatatatttaaccatgttgataccatttccagtgcttttcattcttctatgtagatccaaatttccttttgatattattttacttctgcctgaaacattttctttaacattttttatagtgttgttttactggtgatgatttctttcaggttctaagtgcctgaacaaaatctttatttcacctacatcttgaaagataatttctctgagtctacaattcccagctgacaatgtttatcttccagtactttaaagatgttgcttcattatcttctaattttctttgtttccaataaaatgtttgctggcattttttgttcctgtgtgcaaactgtgttttcgtcattgcccgccccgagaatttttctttatcactagttttaagcaattttattttagtgtattttgtgcacaccccc

SEQ ID NO: 368515 - DNA, 1624 bp, Homo Sapiens
  misc_feature (75)..(83): n is a, c, g, or t
  misc_feature (616)..(626): n is a, c, g, or t
  misc_feature (1300)..(1300): n is a, c, g, or t
ccagtctgctgctcaagacatcctctcctctggaatgtagagataatacatatcatgctccttttgttaaaacgnnnnnnnnnccccttcaaacacagtccattcatttttcagtatgggttgaaacatccttttcttgatcttgagcttataataacctagtcatattgctcagctcagatatttttactccctctccttaggcattctggttccttaaatatagttagtgtcacagaggataaataaccaaccttatttctaaggtctgagaacacttggaccacatattggttgagctcagccaccttctgattaaagttttcagacttgtaagaactgaaaatttttatggtggaagttctctgagccctcatccattctgtttttaaaaatgcattgcagatgggctatgtgaatatgtttttaaacatctgatattgtgcatgaaacaaaaaacacttgaagttattatgtatacaattctgtgggatgggacttcatgcaggattggttttcaagtttgatttcctgagggattttttagttgtttgtgaaagaaccccaggtctacttttgaaaatttgtattataattgtaatgttgcccatggttnnnnnnnnnnngtgttcagtgatctatgtctccctactactcctattctctgtttcctctgcaggagcttgctgctgttaacagttattcttccaagttgtttcttgtggggagatgggaggtgggaggaaatataaacatatatgtatagatctttcaaaatatatgacggtatacccgtatgtctgagtcttgctgtttttacctggtaatatttagaaacatttattttgagataaaggagagcactttgaagtagaacctgtagttatagaaaagtacagttgcaagtaagccaaagcagagaagtaaatgtatttttcattgttgtatcagaattttgaatttactattttaaaaattcaagagttttgtagctgatctatttcttcccctcagccatcccaaataggtcatttgtcaacagatttaagaatgtttagaaacaacaactttgggaaacgggaaacaatttggtataagtgggtgtgccataacctctctcgtagccattcattcccggatacataccctagagaaactcttacacatgcgtaccaggggatggatttaagcatttgtgtgtaataggaagaaaagaagaaaaaacccgggaagatcccaagtgtccaccaacagtgtgttggataaatacctgtggtatattccaacagtggaattccancagaagtgaaactgaactgcagcctatgtatgtgaacatggacaaaactcaacaatagaaggatcaaaaaaagcaagtcacagaagaatacatcactatggttccatttcaatgaaagtcaaaaacaggctgtcaaatacatgataaaaggaaacgattaagacaaaatctaatgttagccgttttgatggagggagaggtgatcatgagggcaacaggggtcttcagaagaactggtgagggtctgtttctgaagcctgtgggcatttccttttttaatctgtatgtttatgtgcttttgtatgtatgatatttcttaataaa

SEQ ID NO: 368516 - DNA, 768 bp, Homo Sapiens
ctggcgggaggcctcgggctcccctggaagggcgctgggctggcgggtcagctggtggttcttaggtttccttctgtttgttaaaagggacaatgtggccacttctctgtggaaagggagttggttggggggttgagatggcccgtgttcataactcagtttcctgttttgcacgatgtaaaaaccctgtctttttgcacgatacagccaaaagtattggctgatttcttgctgagtgccctcttagttggtgtgtgaggtcttggtgggctcaggccagctgtttgcgagtgtgggaactcataggttctgtctttgtctcttcctttcacctcattctggtagcagcataaaggttaggcaatcactgggacccgcatggtgttcctccaaagaatagggtaaaggagagctgggagggagccctctccgttgggtgactcttgtgtgccctttagacaggctggcctgccggttccacagggtacagttaggacttgagtctttctttttctgtttagagtaggtgagtgagtgatagggtaacatgggccttcaggatgaccccttggaactgtgccgagttccttaaatctcagctgggatcctggacctgggaggccccctgtgagggccagctctggaaaaacctgggagttgatgccggaggctgtggaagaactctgctcgagggcaggggtgccctggaacactggtagttctggggctgggagggagagggggctccggcttttctctgaaatgaac

SEQ ID NO: 368517 - DNA, 1076 bp, Homo Sapiens
tgatgataaatgtggggctaaacgattgtgttagtaatgtaattgatttgtttggaagtgttaaaataagtgaaaattaggttatattaggggaaaagtgtgaccattggttcatcgtttaggggaaaaatgcagaaagtgtaataacattagattgttcacaaaatgtatagccttgatattgatctaccaagtacacttggcacaacatatgcctctacttcagagagtatgtttcgatcaagtttagaacttgtacgataatctgttccttgatcagtatatggctttggaattcaatcatgtctgatatcggtagtatttcagctaaccatgttgtctgactttgtagctggtgatatttcaacctcaactgtgatttaagcagacctaaatttctaattctgctaattcgtgaaggggaaatagactaaatcttaaaagctgcctgaaatcagaacttgattgtaactcagctaagaatgtgaattatttgttctacttgggtggtttaatttaatcgttctgaatatgaacaaaaggttttggattttctaaagatgcagtgttgtttctgttcatcagggttaatatttctaactatattgcttgtaggtgaccccattctggatttgtttggtttggtttggttccagttaaaagagaggacaggaactaaatggggctaaccacttccaggtgccaccttgtgacgagggtaaaatggttcctgcacacagaagttaccacaggggtcaggttactttccttcaaatagcagatttcagtactttatccctcattgtggaaacaagccaaaccaaatgaactctggaaaacctaaaacaaatgtacattttcctttgtgtatgtttccgtggtcccaaatggcaatataaatccagtctttattctccctttgttgtatttatgctgaatcttccctttgccttttcaggatttaggcctgtaagaaactatgcctgattctgtaaaataagtgtaaagaattatatgtacatctctggattttgtgatgaaatattaaaaatattgagtcaagttgttgaaaatgc

SEQ ID NO: 368518 - DNA, 569 bp, Homo Sapiens
gcctgctttcttgttcttttccctcatttcttgttcttcctcagtcctttcctcctcattttccctagagtattccaggccctgacacggtcatcagggaggttcattcttgtgttgctgtgactgccgccagtgccaccaccttgcgaggtgtgttggccgatggactcggtgtcctcagtgtcttctctgtcctccagctccactgaccacctggcttcacccctccctgggccccaggagtccggctggcatggaccacagccacagcacccccgtgcccctcacttggtggttggctttggccagcgggggcccccagcaggaggtcgaggaggaagggagagcgagggcctcgtctttactttcccggcttctttgtgagctgcctggagctggccgagtccagcctctccctccttctgggttccgacaatctctccttctctggtctgtcctgtgggcggctgcagcccggccctgactggcacagggctcttgcaaccgcccctgtggctcacctgctccctccccaacatgaataaaccctcctgaagccacaaaaaaaa

SEQ ID NO: 368519 - DNA, 786 bp, Homo Sapiens
aggccaaatgtatgcgctgatgttacctaccttattgcaccgtactttccttgtatatggtacttgtaatgcaccgccagaagaacacagcataaatattcggtgagctgaaacagaccacattgttacgcaagtaaggcaacaacagttgttgagaatcctttctcagtgatgattgatgtgttcattttactgatctactgtacaagataaaagcatgcacaccagatatagaaagcaatcagatagtctttttttgcttctatttagtaaaaacaaacgactgatagagcaacgatactctagtctcaaaagtatttcattttgcatgtttcaaagattttattttgtgtctaatggaataatcagtgggctataaaatgcataatacccttgcctatgaaaaaagtctatatgatgaatgtatattaaaaagatgtcattttagtccaataattaatattatgtaattgtatttttatcttattatcttacaaaaaagcagtatcaagttattatacctactatgtggccactgtatattctgcttaatcatgacttatgtaaccaaagtgtggccatattaagatcctatgcacactattagagataatatttgaaaatgaataatttattagtattttactaaaaagatctcataaaacccagtatgtttgagtcatgtaacagcaaaattggaagcaccatcagtaaatagttgtatacccgttcctatagtgccagcagaagctataaacaaaaacaccatgtacaaaagtgaagaat

SEQ ID NO: 368520 - DNA, 721 bp, Homo Sapiens
  misc_feature (702)..(702): n is a, c, g, or t
gaggagtattaaaagtaatgctgtgctgcattatttaacgactatcagcaaattatcttgatagattgttcttacaacttgtattctgatgtacagaaccatcatgagtgtggaataaatactggattagaatcctttatcctgggtcttggcttttcccccatttgttaaatttttttagcatatttatattgtggaaattgatgaaacgtcagtagagtcacactttgtgtacagggatgtcttagtgcccagatgacaagtgaattttggagaaatgcatagactgggattgggcatgtggtatatcaataatctttattagaatacttgataatggcagttccctttgtcagtggttgttacatgtgtcatttgattactttgttccatgtcaaagacgtttacttgggataccttttacttggacaatatgttagcatttctgtaaaagttggactcgaaattctttaagataattcacccaattcttttgagaaaagaaaatagaggcccaaagtaatgatgtcagtgctagggctaaaactcagtattctgacagtgtagtgaacctggcacgcacattgaggtttgttttatctcactggttatactggccaactaatgcgcactcagaagccaccttgcaaaaatgattaaatggagcaaacgagtacacttgcaagagtcctactaccgatnggggcgcttaaaacaattt

SEQ ID NO: 368521 - DNA, 1133 bp, Homo Sapiens
  misc_feature (775)..(775): n is a, c, g, or t
  misc_feature (876)..(876): n is a, c, g, or t
gggcttcaagataaagtgtatttgggaataatattataaacccttacaaattttatgcatgtatctactgcatccttcaactctcactagaaaatcttttgaaaccaaatggattaatttatggctatttataatttgctttgacatctcactgttggaaattttttaaagatgagatttgcctttataatgtaaattatgatttttgttttacatgtgggtttctatagttttaattttttcagcttttaagatacgagttttgtgtaatttggtatttttaatcatttatgttattttaaaagctcagaatatcacattgaaattactataaatacatttaaaattatctattttagatctaaggaaatactacagagatatcttcatgggttcagtaacttttcatcagtataacattgggcacggtacagagtgattgtcacataaggtactcgaagatttatttagattaattctattatttacagtaaccttgaattcttctgagttttgcatgtattaaattcaattgaatgcttgaacagtgaagagtaaagtatttatctgaaagaagtttctgggttaggagacagtaatgaatgtatccatttgtacatggtttacatgcttgtggatgctttgtaaacatttccctgtatgtttaaattgtgtttcagcaggatgtaattgcccttgtgtgtagttaaaaatgagtcatcatctggtcctttgtgaaatggaaattccatggtattttctgtaacgttttccngaagctgtttctggagagccacacatttaaatacagacagctttcctgatcaatttgatttattgtgcacctgatttttggtctaaaaggaattattgccncaatatattttatttattctttagattttagccttgtaagttaaagtgctttacatgatgatgtgaaaagctgtttgtccctttactgggtttggggggttgttaaaagatagggaatgaagaatgcaaaatggtttatcgttcaaactgtccactctgatccaaccctgtactgatagtacttcccagtatgatattgtgatgtttcatacaatgcagtgaacataaccaacttgttacctaaataaagaattgat

SEQ ID NO: 368522 - DNA, 713 bp, Homo Sapiens
gttggacatcttcagagacttcttttcaatctaagaataccatgctcggagtaaactaacaactgatgcactttgctgcagagtccaaaggatatacacggaggcttcaagatgtcagagggaaagcctagttgataaggtgttggacttcacacaccaaacttaatagaaactgcaggttcaaatcccagcagggtcaactgagagtattacgatctgctagaaaaactgagcgtgagacactttactgctctttgacaaatttaagagggccttccagactgtctctggagtttatgaggagacataaaaggggaaaaagctttgcgtttaaataaatatactgtcttttagttctgtttaatggggagaaaaatcacatctctgtaacatgctgtgtatataacaaagaaacagaactatcaccttccagatacccaaatgagatccttacagtaagtttaccatcagcatacagtattacagatttctaacattccgttcttgcccaatgcaaatctatatacaataaacctaaaattacccaccaacctggtttttctttagtttttaaaggccatcaaatccttggagatagtatggacctccagctgttaacattcagaaggaacacacttacagccctgtctccattgggcttattactgctccagtcaatggtgcatttcagagctgagaacaattccaatgaa

SEQ ID NO: 368523 - DNA, 712 bp, Homo Sapiens
aattcggaacgaggagatttttagtctttggtctgtgagtcttttaacttacataaaaatatggagaattagcatattcacatatctattttgtgatgtttatcatacggaagttttaaaatatagtaaattcagtctttccacttcttcttgtttatttaagaaccattccctagctagggtcatgaatacattcttatgaattattaatcccatatggatagctagtttccctagcacctttaaaaaatagtttattattttcctcctgatgtataaggccacctttaccaatttacatataatgtacggaaatgtttcttggctctgcattctgttaaattggtccatttatctaactttgcttagtaacccactgtttttatcattgtggtatcataattgattatcacaaatggtagaatgattgtcctcaaagtcttttctggtatatattgatataattgtatagcttttcttggtgtagtaaagtacacagttaaattttctaacattgaaatatcttttagattttcacttccagaatggcaatgtgaagggccctgtggacccactgtcctaggaattagctataactagtgaaaattgtaacaaaaaataaacaccttcctctcatacagagagacacaaacacttaatgccactggaaattgtcctaaaagcatgtagaataaagtaacgcttattcaag

SEQ ID NO: 368524 - DNA, 711 bp, Homo Sapiens
tataaacagggtccgtggacgtataataaggcagaggtgagaaacctaaaaccgatttagctgctttcctaggcatcagttcagctgaaacggtgaagactaatgagggagcaagtgcacaggcaaggctgagggcaaagcactgtcagaaggaacacctgctgcaaaggccctattgggagaaaacctctatgtagctgctttctaggaagtaaaagaccaacatgaccagtgtgtgggagcacaataaagagccaaactagataagactgggaaaaaagcagggtcagaacctggagaagagctggttttctttcagggcaatgggaagccactgaaggggtttaagctagagactagctggatcctattgagcttttgaagatctttctgcctccacacggagactggattagaatgggacaagaggagaagcagagaccagtctaacaagttaagaagctatttcaggaccctctgactctctggaatgccttccattctgttatcagagacatataattgccaatcagaacctttggattaagtattgagataaatagggttgtcatgatagttgagttaaacaaccatattctttacacatttaaccatttgtaattagccttgaaagcctttctgaccgtttttggacaatgactcccatatgttgtttgaaatattaaaatatctcttggacaggcttcgccc

SEQ ID NO: 368525 - DNA, 735 bp, Homo Sapiens
cctgttggaaattttttatttaccactgcaaggtttttgctccaaagtgtcacaccagacatatgactacaatgtctcatgcatctttttgtgctttagttcatgactgcaaaacacacacttagcatttgacaacaggaaacacagagggcagaaacaaatcacaaggactagttggtttaggttacagccacattttacccaggactcctttacatccaagagaaatggaccctgaataactggtctcctagctgattctctgtgcccagctttgtttggagtgatttgtcattcaacccacacaaaaagttgtatctcaaatcaaaatggacagacatatgcaaggtcttaatcaataagtgctcaacaaatagatattgatttgatgcaagaggtggagtcacagattaatgagggcagactcccgattttctatccccgtagaaatctctgaagaaagaaccagatcacctttttgagcaacagtgcattctgaaatggtctctcaccttacctctacctcacaccctttttagaaatgctcactggcatcacacaaggtgttcctttcgaaaatgatgagatacttcacacaggctcagttactataatttgatagtaaattggaaatgtttctggtacaaggtaagctgatgcaaagactactgaaatatttttatttggcagtttgacatctctggataatttaaaattcactaagatggagtttta

SEQ ID NO: 368526 - DNA, 481 bp, Homo Sapiens
  misc_feature (15)..(15): n is a, c, g, or t
  misc_feature (43)..(43): n is a, c, g, or t
  misc_feature (67)..(67): n is a, c, g, or t
  misc_feature (112)..(112): n is a, c, g, or t
  misc_feature (131)..(184): n is a, c, g, or t
  misc_feature (258)..(290): n is a, c, g, or t
  misc_feature (375)..(394): n is a, c, g, or t
aatgccctgtcccanggaggagcaaatctcgcaagtctgaaanacgggcagccttgctgaagctgcnaatgggctcccacccagtttgaacttccccagcagctttgcttanactgtggtggtaaaaccgnnnnnnnnnnnnnnnnnnnnnnnnnnnnnnnnnnnnnnnnnnnnnnnnnnnnnngttcccaggtggatctcagattgctgcgtgtgctggaagcgagaatttcaaaccagtggatcttactttcctgnnnnnnnnnnnnnnnnnnnnnnnnnnnnnnnnncacttggctcctggcttcaggccccctttccaggggagtgaacagttctgtctcgctggcgttccaggtgccactgggatatggnnnnnnnnnnnnnnnnnnnngctcctgcagctagttcagtgtctgcccagttggccgcccagttttgtgcttgaaacccagggcctggtggggtagtcaccagaggg

SEQ ID NO: 368527 - DNA, 638 bp, Homo Sapiens
  misc_feature (118)..(177): n is a, c, g, or t
gaattcccagggatacaggagggaaggcaacggaacagagcacaagggcagacggtgggactagtgggctagggacggtggacgaggaggcccttatattgaggggccagcttagatnnnnnnnnnnnnnnnnnnnnnnnnnnnnnnnnnnnnnnnnnnnnnnnnnnnnnnnnnnnncccactgggacctctgtttgtagtcagagtttgtttggctacttcctttgcaacccccacccccaacctttttctgcatggtagatgaaaaattgaaagtacctctgattggtccctttccacaaccaatgaggctggtcatgggccaagtcttcatttgcataggagtataactttgtaacttcacttcagccttttcccaatcaatcagagatttgcatagggtgtaactttgaaacttgcttcagcctctgataggtcccctccctcaaccaatcagactgattgtgggcactacttcatttacaagggtgtacatcaagtaaccaatgggaaacctctagaggatatttaacccccaaaaaattcggtaaccaggctcttgaaccacttgctcaagccactcccaccctgtgaagtgtaccttcattttcaagtaaatctctgcttatgttgacctc

SEQ ID NO: 368528 - DNA, 1171 bp, Homo Sapiens
  misc_feature (890)..(890): n is a, c, g, or t
gtccggaagtatgggatcatgcagccatgtcggggaaagtggctcagacagcttgcatgtcagcctgccagcatctgtcaacagtccttaatgcagatgctactggacagtgagttaaaacaaataagcatgggagctgttcagcagtttaacttagatgtcatacagtgtgaattgtttgccagctctgagcctgtgccaggattccagggggataccctgcagctagcattcattgacctcagacaactccttgacctgtttatggtttgggattggtctacttacctagctgattatgggcagccagcttctaagtaccttcgggtgaatccaaacacagcccttactcttttggagaagatgaaggatactagcaaaaagaacaatatatttgctcagttcaggaagaatgatcgagacaaacagaagttgatagagacagtcgtgaaacagctgagaagtttggtgaatggtatgtcccagcacatgtagacctcacatggcttgcactcagtgacaccaaatccatggattcaatgttgatcttgagcaagtattggtcatgatacagtaatttgtttacagaatccaaaaatacaatagagaagatacatgagggcttaaacaagaaatagtaataaatatcatttgtatggatttttaaataatcgaatactattttatatatggaacaaaaatgaccatttttttcacgttttaggggaaaatgcaaaagtgtaatacaataaattgtcacaaaattatacctgaaatttgattacaaatacatttgaaaaaccatatgcctcttaactcaataaagtattttttcctagtttagaactttgaagtggataagtctggtattagaatccagaattatgggnctttggcaacttcaaatcacctggttcgtgataatgggagtaatgtgcaccttaccatggttttcctggacctttataggcctttcatgtttcacccctcaaaagggtgagattgaaaggcacgaaaccaaaaagttcttaagttctggtaaatgtcggagggggaaatagacaaatcttataagctgccctgaaatacaatatcgagttatctcagtacaaaatcgtgaacaattgcaccgacaggagggggaaataaacatgccggatataataacaag

SEQ ID NO: 368529 - DNA, 822 bp, Homo Sapiens
aggtgctccgctccagattgagcgcaggtgagctcctgcgcgttccgggggcgttcctccagtcaccctcccgccgttacccgcggcgcgcccgagggagtctcctccagaccctccctcccgttgctccaaactaatacggactgaacggatcgctgcgaggattatcttacactgaactgatcaagtactttgaaaatgacttcgaaatttatcttggtgtccttcatacttgctgcactgagtctttcaaccaccttttctctccaaccagaccagcaaaaggttctactagtttcttttgatggattccgttgggattacttatataaagttccaacgccccattttcattatattatgaaatatggtgttcacgtgaagcaagttactaatgtttttattacaaaaacctaccctaaccattatactttggtaactggcctctttgcagagaatcatgggattgttgcaaatgatatgtttgatcctattcggaacaaatctttctccttggatcacatgaatatttatgattccaagttttgggaagaagcgacaccaatatggatcacaaaccagagggcaggacatactagtggtgcagccatgtggcccggaacagatgtaaaatacataagcgctttcctactcattacatgccttacaatgagtcagtttcatttgaacgatagagttgccaaaattgttgaactggtttacgtcaaaagagcccataaatcttggtcttctctaatggggaagaccctgattgacatgggccaccatttgggacctgaccagtccgctcatggggcctga

SEQ ID NO: 368530 - DNA, 463 bp, Homo Sapiens
actgcacaggccagattcacaaacatgtagcacatcaggaagaacatagagaggatgggggccacctcgtcgagggatgcaatgaggatgccaatctcgcagatgcaggcagtcaggagcagggcccaggtcggctctccattggccttgccatggccaaagacctgcaggaagggcacaatgccatccctcgagatggcctgcagcaggcgtggggcccccgtgagcctctgcagcccagccccacaggtggagaagaaggatccgatgacattacccatggagatggccaggccagagtgcccaccacgaggttgccattcacagcttcgccaaacttgtcccgcaggacgaccccctcaatgcaggccccaaacagaacaacggagctgatgtagacagcagaggtggtggcgatggccaggatggtgccagtggggattgacttctgggcatccctcag

SEQ ID NO: 368531 - DNA, 1154 bp, Homo Sapiens
  misc_feature (47)..(48): n is a, c, g, or t
  misc_feature (73)..(73): n is a, c, g, or t
  misc_feature (318)..(329): n is a, c, g, or t
  misc_feature (579)..(587): n is a, c, g, or t
  misc_feature (609)..(705): n is a, c, g, or t
tcagtacttcagcaagagagaacctaactgtatcttgaggtggtagnnaaacacagagggccagtaacggggncgtaatgacttattgtggataacaaagatatcttttctttagagaactgaaaagagagcagagaatataacatgaaatgatagatttgacctcctccctgttattttcaagtagctgggattttaaactagatgacctcattaaccgatgctttaccaaacagcaaaccaagagattgctaattgctgttgaaagcaaaaatgctaatattaaaagtcacaatgttctttatatacaataatggnnnnnnnnnnnngaggaaaaccctcaagggcatgagcattggatacagcagtagacattttaacaagaagatgaatggcgtccgtgggttgctaactgaactttgaagacccgctacaaaacgcgcagatgtgcagcagattggaaggagacacagatgttcggtttttttcctgtttctgaaaagaaataataatatccaggtcaacagaatgaaaaatgaaagatgatttgcaatgggatgtatgaatacagcagcaagnnnnnnnnntgccataatacaaaaggctccnnnnnnnnnnnnnnnnnnnnnnnnnnnnnnnnnnnnnnnnnnnnnnnnnnnnnnnnnnnnnnnnnnnnnnnnnnnnnnnnnnnnnnnnnnnnnnnnnagtaagagactcagcctgcagattaattagcattctggcagtttagacatcagccagctgccctaaataacccttcaacgtttcttcacttttgcaaggttccacagagtaagacattgggtctattccagctcattcattttatattgaaaaaaataattttaaaaatggtggcttcagctccagcccctttccaaaatttttcaaccccaccctgtttggatttttaattaaaaactagtagttctcttggtgttaaaacacttctgtcctgtgaggtttcccaatggtgtttttcttgtaaatgtgttggacaaatgtgaagatgcattgtagtttaaccatatgcccacatttagtctctttattcctagttggtgagaaacctgtatctttctatgctgcttttatatctgtatgtattagtgatatatctctagtagttaaaa

SEQ ID NO: 368532 - DNA, 665 bp, Homo Sapiens
ggctgaatgcagccgaggggcgagcgcgcgggctcgcacggattagccgtgctttcccatgagccacaaaagaatgcccgaatctgggacatctgtcatcaaggggcaggctgctcaggatgcaagatatggtcaagaaccctctgctctacagttctttgctgttcttgacccacctccttcaaactcggattttccgtttctctcttctcctaagagctgcctgctgccttctgaagctgctttagaaccacagaagcctggatcatctctacaaagggtgcaagatgaaggtgttaggacaacttaaagagacgggaggtgctaggaatcggcaggtgcctgattgccaaggcagggactgatggtgggagatgttgttacagaactgggcttcctgatagcaatgaggatgaaaagattccaaaacaatagatttaaccagcagaatcaagtttctccaggacaagagaaaaagagaatcctgaaggcatggttcccagacggggtgaaatagttaatacagaaattcttctaactcaggcccaaacatctccacactgtccccatcctcaagccctgctgtccaccccaaccctatttgtacaggagccatttaatagagcaaacaggtattcgctatggcagttgattcgtgctgcacc

SEQ ID NO: 368533 - DNA, 1314 bp, Homo Sapiens
  misc_feature (1205)..(1216): n is a, c, g, or t
ccatgatctctaagggagtccctcatccatactggaatgaaagacttcacacaacacaagcacatctcaaaagcaaaatttgacagtaagtttctggaccatgttcagcagtcagtccttaactagtttattctaagatgggtccgcattaaaagtgagagtgtgtatgtgttttggaaggtggggtggtagttcctgacacattaacaaggtgatacagaagaaagacttagattccattcagatgatctggttttgaaaaccagttctaccaccacccaagtaatcttaggcaaggcacttaacctcctggagcctcagttgtcatacataggaagattaatgacatgtacctggcttatctcctttgttgcgtaagtcaagataataaaagtgaaagaatatggcctgttagaagaatcgctgggcttgaaatcagagagtccgggtcaagtcttattttagacactttctaatgaccttaggcaaattccttgcaattttgggtttcttcttctgtaaaatggggctatttcttctgtctcaggacataccacttgggatcaaatgaaaacaccctgatatgaaataaggaaagctatacaccaccacacaaatctgaaatgctattgactgatacaggggccatgcaaatacagggatgttactgtaatctgcttactaaatacatatcagcagctttgagttttcaacccaaaatttgatgatggttgtagaatcaccactctcttggaggctttctttccctccatcctctgcgtcaagacatgcttagtaaatagctttccacatcaaaaaactcacagcctgggttctgagcagtactcgcctatgggaaaataagcagaatgaaagaaaagggcctgacaactctaagagctgctctgcccttgcaaggatcccatctgcaaggatcccatctgcaaggaagggaggtatgaggggagcaaaggaagaactccttccgtcggcacaagttgtttcccagggacgaactctgatccatgacgggactctgcaatggcagcggccacaggttttatgtccccgagcacagtggcctgattactcagttaccaattccatcagcagcctgaggaatgaggttgctatttaacagtagaagaaaaataaaggtagaacctaaggcctggtgatccttagggcacataattagtttctcnnnnnnnnnnnnaagttgaaagtatccagtttatgggtacagttaagagttaataaaaacagcaactattaaatgactaaaagacatcattcctaaaataaaagctcccc

SEQ ID NO: 368534 - DNA, 947 bp, Homo Sapiens
ggcatcttggcctggaggacacgcctgggtgcagcgtgtctgtgctcagtgagggccgatgaaagaaagtgcgtttccttgttgtgcatttaattcagtttagtgttaatgggtgtgaacaaagctctggtgctaggagggaaagttaggaataggcctcccagaggatactccagacagttgacaagacatctgcagcgccctgtcgagtgtcaaggaatttataacctgtggagactcctgaaaatcagcctaatgtcttggggtgcagctgtgcgcatgaggtgctgtgcagatgttgtatggccttgggtcacagactccctactggggctgcagcctattagaccctggggtactgtggataccacgtcgtaggtgaccacatctggacttacagtgcatcacactccaggaccccctgaaccatcacttgccacgatactccgggtcattggactgagactatgaactcttgcaatccatggtgacaggaggtgggcaagtgacatacatacaaggtcgagagcggtaaattcctaacaggagaacataaaggtttcacttctaaaagatccatccaaatatgcgagaaagaagggtacatataaattccaatgtgttacaaaacacaatgttgcctaccgtgtaaaatgagaatccagagtcaattggtgacgtgcagattccgaaggtaagtatttacaacaatcgcagaatttgcacattcctggaacaatgattaaacaagtagattagattgaattaattcctggtagaagtgactttaactgtctggtcccgcgaatgtaccgaagttgtatatacgacaaggcctcgaaactggtgaaacgagctgggaaagtggacataaaaaccattcaatattatatgtacataaaattacatcaataaacaactaggaacccgagaccagggaagcccta

SEQ ID NO: 368535 - DNA, 441 bp, Homo Sapiens
ggggaaccagcattgctatggctccagggatctccttggactgcacaatatgaagaggcggcagctggctcggcttggcttaccgtgtggtagagttatcctactgggaatggctcccactactgaaacgaactcgcttagaaaagttggcgtttcttcatgagaaagtattcacctctgctctctgaagggcatttaggggcatttctatggcaaagctataggtgtatactgtaccaggtgttgcaaaatgattataaaagccagaatgtaagtttggcgataaaatagtgtgttgaggagacttaattgtatccaaggcaggttagagctagtgtatgttactgtgaattgtaatgtagttggattgtacaaattactgcaaatgtatacatgttactcttagtaaataataaacatcttaatatgtcctacggaaaa

SEQ ID NO: 368536 - DNA, 1825 bp, Homo Sapiens
  misc_feature (57)..(72): n is a, c, g, or t
  misc_feature (193)..(226): n is a, c, g, or t
  misc_feature (243)..(482): n is a, c, g, or t
  misc_feature (578)..(591): n is a, c, g, or t
  misc_feature (1158)..(1168): n is a, c, g, or t
  misc_feature (1170)..(1425): n is a, c, g, or t
ggggggaattgatttcacagttcgttaccttagtaggtaacggtaaggttattctcnnnnnnnnnnnnnnnnggttatgaaaacttagggactaaaattaatataaaaattggcataatgttggattgaatctacattttggcagaagttaaacattcccacataatgtcaaaattatacatcatgcagttcnnnnnnnnnnnnnnnnnnnnnnnnnnnnnnnnnngagtctggctctgtcannnnnnnnnnnnnnnnnnnnnnnnnnnnnnnnnnnnnnnnnnnnnnnnnnnnnnnnnnnnnnnnnnnnnnnnnnnnnnnnnnnnnnnnnnnnnnnnnnnnnnnnnnnnnnnnnnnnnnnnnnnnnnnnnnnnnnnnnnnnnnnnnnnnnnnnnnnnnnnnnnnnnnnnnnnnnnnnnnnnnnnnnnnnnnnnnnnnnnnnnnnnnnnnnnnnnnnnnnnnnnnnnnnnnnnnnnnnnnnngcccagcccacatcatacagtttgaaatgaaactttgccacaaccagcctttgctgtagcacacacatatatcactgaacctgtttgaaataaagnnnnnnnnnnnnnncatgattcgtctttgagtacctccaggctgaaagactgttgtaccagtaaaaacttaaaggcacaaattctccttgaagaccttctcccttttatgtggccccatattttatgttgctttatctttgaaattttgcatgaaaaggaaatgaatggattcgaatgaaattgtcctttagagcatgattacttgttcccatggacaaatatttttctccccttgctcttcctggcctgaaacacgggaaaccagagtcaaaagttatctccctctccctgtgatgccttgagatttttttctgcgttgtttaatgcctgaaatccaagtcttcctccatgggaaaatactgttataccaaataattctagatgagtaacaaagatctttttaggccttcattttatgttttttcttaactgttatattatgattgtgacatagattatactactactaatttttggatgtttcaaaaggtcaagaagtaaaagatgttagaaagcaatgagtgagtccttttgatttttaacttattccccatgtccctatacttcgtgtgcttttccnnnnnnnnnnngnnnnnnnnnnnnnnnnnnnnnnnnnnnnnnnnnnnnnnnnnnnnnnnnnnnnnnnnnnnnnnnnnnnnnnnnnnnnnnnnnnnnnnnnnnnnnnnnnnnnnnnnnnnnnnnnnnnnnnnnnnnnnnnnnnnnnnnnnnnnnnnnnnnnnnnnnnnnnnnnnnnnnnnnnnnnnnnnnnnnnnnnnnnnnnnnnnnnnnnnnnnnnnnnnnnnnnnnnnnnnnnnnnnnnnnnnnnnnnnnnnnnnnnnnnnnnnnngaatctccagggcggttgagcccacctctggccccgggcttaattctcttccttctaatgacttctttgcctctccctaaaggaagggttttcttgcttttaaagccgtgatgttattttttgtccatacacttcctttggccctggaacgccttatcccctttgcgggggcaaaaaatccctttttctcctcctcacataatcaacaatactaaactgggaaatggcgccctcccctcagacaaggaaaaacaatatctcccctgagaatatcttttcagaatatcttgctcgctccccgcggagatatcattaaaatatttgaggactctactgcggcataacgatagcaaaaatttttctccagcgggcaatctggaggataaatatcccttcttct

SEQ ID NO: 368537 - DNA, 1582 bp, Homo Sapiens
cggtccggaattcccgggatcggtctgtaccctcggtcgggagatccctgtggcgcgcacatgaccctgtgaccgctgcggacagagccgctttggagccctgtgcgaggccgagaccgggcgctgcgtgtgcccctctgaatgcgtggctttggcccagcccgtgtgtggctccgacgggcacacgtaccccagcgagtgcatgctgcacgtgcacgcctgcacacaccagatcagcctgcacgtggcctcagctggaccctgtgagacctgtggagatgccgtgtgtgcttttggggctgtgtgctccgcagggcagtgtgtgtgtccccggtgtgagcaccccccgcccggccccgtgtgtggcagcgacggtgtcacctacggcagtgcctgcgagctacgggaagccgcctgcctccagcagacacagatcgaggaggcccgggcagggccgtgcgagcaggccgagtgcggttccggaggctctggctctggggaggacggtgactgtgagcaggagctgtgccggcagcgcggtggcatctgggacgaggactcggaggacgggccgtgtgtctgtgacttcagctgccagagtgtcccaggcagcccggtgtgcggctcagatggggtcacctacagcaccgagtgtgagctgaagaaggccaggtgtgagtcacagcgagggctctacgtagcggcccagggagcctgccgaggcccaaccttcgccccgctgccgcctgtggccccccttacactgtgcccaaacgccctacggctgctgccaggaaaatatcaccccaccccggggcgtgggcctggctggctgccccagtgcctgccagtgcaacccccatggctcttacggcggcacctgtgacccagccacaggccagtgctcctgccgcccaggtgtggggggcctcaggtgtgaccgctgtgaggcctggcttcttggaactttcgatggcatctgtcaccgatggccggagtggctgtacagccctgtcagctgtgatccccaaggacgccgtgcgggatgactgtgagcagatgacggggctgtgctcgtgtaagcccggggtggctggacccaagtgtgggcagtgtccagacggccgtgccctgggccccgcgggctgtgaagctgacgcttctgcgcctgcgacctgtgcggagatgcgctgtgagttcggtgcgcggtgcgtggaggagtctggctcagcccactgtgtctgcccgatgctcacctgtccagaggccaacgctaccaaggtctgtgggtcagatggagtcacatacggcaacgagtgtcagctgaagaccatcgcctgccgccagggcctgcaaatctctatccagagcctgggcccgtgccaggctgaggcctgacggccactgccccagaactgaccaggaaggcctgacagctgccctaaaattccagcgccgagacgccgcggaggccgccgagaaccgagagacaagacggagcaggacaaggcaaagcgccgaaagcaggacaagggatgaaggccaggaaacaggggagaacgggagaagggagaggaagaaa

SEQ ID NO: 368538 - DNA, 1104 bp, Homo Sapiens
  misc_feature (927)..(927): n is a, c, g, or t
ccaccccgccaccgcgacacctccgggcactgacgggccggtgcctccgccggcgccgccgacgcgccgcctcccggaggtcctcctgatgccctaggaagacgcgactcagaattgggcccaggagtgaaggccaagaagcccatccagactaagttccgaatgccactcttgaactgggtggcattgaaacccagccagatcaccggcactgtcttcacagagctcaatgatgagaaggtgctgcaggagctagacatgagtgattttgaggaacagttcaagaccaagtcccaaggccccagcctggacctcagcgctctcaagagtaaggcagcccagaaggcccccagcaaggcgacactcattgaggccaaccgggccaagaacttggccatcaccctgcggaagggcaacctgggggccgagcgcatctgccaagccattgaggcgtacgacctgacaggctctgggcctggacttcctggagctgctgatgcgcttccatgcccacagagtatgagcgcacccatcatcacccgctttgagcgggagcagcggaccaatggaggagctgtacaaaggaggacccccttcatgctatgcttcagccgaatcccgccccctgccggaagggaatgacccccctcactttccgggggcggtttccccggaaaacagccccaatggctcctggccgtaaactgggcgcgccctccttggaacgccgcagggtgggcgcccaccggtccccttgccccagtgtccgacccaaatccgcgcgggcgcattaccccccggcccccgcgcgtgacccctaaccgaagccgcccgcaaaacggaccgcggggcgggaatcgccaaaatccggggcttcggccggtcggcaagacccgggcgcggaaccccggccgcagtcgggcgganatgcccgcaccccgccccgcttattcaggagcccgcggcaactcagtaaagccgccataagctcacccgccgcgcggcgcggccagtctcttacgcccgcccccaccactccatatcaccgccccacgaacacggggaaggcgcgcgtgaacatgcgtctaccccgagctcgcgcca

SEQ ID NO: 368539 - DNA, 443 bp, Homo Sapiens
agtccctggcggggcgcggcggtggaaggtgtcgcgtacgggcttcccgagctgacgtggcttgaattgggaggggggcagctggagcctcaggcggcagcgcttctagaaatgctgagccgattatcaggattagcaaatgttgttttgcatgaattatcaggagatgatgacactgatcagaatatgagggctcccctagaccctgaattacaccagaatctgacatggaatttaataatactacacaagaagatgttcaggagcgcctggcttatgcagagcaattggtggtggagctaaaagatattattagacagaaggatgttcaactgcagcagaaagatgaagctctacaggaagagagaaaagctgctgataacaaaattaaaaaactaaaacttcatgcgaaggccaaattaacttctttgaataaatacata

SEQ ID NO: 368540 - DNA, 1035 bp, Homo Sapiens
gcgggtgacgttattaattgaacctcaagtgaattcggagagccagagttgtgacttctctgccctataaatcaggtcccctgcagcaagtcagctccatctttcacagggctgggctggctggatgcgctcgcagccccggctggagtaagagcctggctgtcagccacgcaggtgccctgcacgggacctggggctgggacagggcaccaggcaggcaggaggcctcaccccggggtgcagaaggccccaggggtagcagtttacagaagatgtctcagtcctgtaagtaacaaacagaaacaagccccagcgcttcccggtcccctccccgtggcccgcaccaaaccctaagctgtctcctaaaacttcagctgtttccaccaccacgctgacgaccagaaagacaaaccaaacccatatgaagggcaatctttcaattgcttaaaattaatcagtgcaaagtgaggtaaaagatccccgtttgtcagggccgaggcaggaggctaacacaagcctgcgtctcttggagtccctccccacgtccccctcctcgacatccacctcacagcccagtggggacaccaggttcagcagagggtcctcagaggcacggccgaagagcgccagcaggagggccacaccgaagcctgtggctcgctcaccagcatgcaccggtgcagcaatgtccaggtggacccagactccgggccagtcgaagccgatgtgtgaggcgatgaagaggccagcacaggagctggggctgttgtctcggtccgccactgagttcttcatgtccgccacagctgaggtgaactcgctgaagtgcagctcggggcagtagaccagcgggtgcaccaggtccccacacattcctgcccgccattcacacaggcaggcctcccactcagcgctgttggtgagcaccgcggcgtggtacttccctgtggcaatgccctgggcgggcaggaacccgggaagcgtgtggacgggacggcaggagagaaacacccaaggcaaaagagggaccgggag

SEQ ID NO: 368541 - DNA, 462 bp, Homo Sapiens
  misc_feature (119)..(119): n is a, c, g, or t
  misc_feature (123)..(123): n is a, c, g, or t
aacagccccagctcctgtgctggcctcttcattgcttcacacatcgggtttgactggcccggggtctgggtccacctggacatcgctgctccagtgcatgctggcgagcgagccacagntttnggggtggctctcctactggctctttttggccgtgctccgaggacccgctgctgaacctggtatccccgctggactgtgaggtggatgcccaggaaggcgacaacatggggcgtgactccaagagacggaggctcgtgtgagggctacttcccagctggtgacacagggttccttacctcattttgcactgactgattttaagcaattgaaagattaactaactcttaagatgagtttggcttctccttcccgtgcccagtggtgacaggagtgaagccattcttctcttagaagcagcttagggggcttggtggggtctggagaaaattgtcacagact

SEQ ID NO: 368542 - DNA, 1196 bp, Homo Sapiens
acttaaatatcaaattcaaatcttcagtgttctacttattttgggtgttaattccattatacaccatcttatttcagtaatttccatattgtgccagacaagatataaaaataattcaactccagtcaataataccatctgtcttcatgtgaccaggatgaaaagcttctgctcccaacatggaagccacagtaagaaaagaatctgtctaatccactagcaacaagcagttaatactgtgattcggaataatactaggacattaacattctaattccagcaaacaaggactgactcttttcaaaattcaactttggttaagaaatgctgagtacaactttggttaagaaaccacgaagggtcatggataaagagtcaccagatgccgatgccaaggggtacagacactgacaaaaagtagccccaattaagatggcaggatttgggggtggtgtctttccttcaataacaaatgcgttcagaaggttcaggagcatgatttagtttttctcaaaatgtcatgacatcctgctgaatcttctcccactaggcctgctgggaccagagaaaccgatcgcatttttcaagcatgctttgtatcaaggcccatatgattccagaattccactttcaggtatatacccgaaagaactgaaagcagtgtctggaagacatatttgtatactcatattcatagcagcgttattcacaatagccagaaagtggaagcaattcaagtgtctctgccttttctcagcaatcctcaggatatcgcaggttctggtaaacttctctgacaactcaagggccagaccacattcctgtagcagtgaccaagcccgatctgggcccatggccttagctaacagaagtgccacattctccacattgatgggggaaggcccatcactgaggctcccatttagtgactcctggggggctggcctcgtgctcttgctctgtatgagatgaaggagaagcttccattcctccacggtctctgggatccaaccattgtccccttccatcaggctcatatcattcagatacacaatattggtgaaggcctctcttcttctctccagctccaaacagagaattagatatccaggccagaaaccacaagacctgcagatgtctgtcattttctctttggttataaaatctgcaggaagtttaattagatgaaggatcag

SEQ ID NO: 368543 - DNA, 717 bp, Homo Sapiens
agcgggcgcaggtgagaggccagcccaggcagccgttgtcgggttcgactggaggggcgggggagtcacctgcgagcggctgcgctggcggccagcccgcccaccgcgtctggatcgcgccggcatgccgccggggctgcagacagcacacaccctggaaaggccccggcggggaacgggcagagtccgcgccctgcgtccgcgacaggaggatcggaccttcgccttcgctgtcgccgcgcgccgccgccgcggccgtcggggctattagtgaaagatggtggatcgcttggcaaacagtgaagcaaatactagacgtataagtatagtggaaaactgttttggagcagctggtcaacctttaactatacctggacgagttcttattggagaaggagtattgactaagttgtgcaggaaaaagcccaaagcaaggcagttttttcttgcttaatgatattcttgtatatggcaatattgtcatccagaagaaaaaatataacaaacaagcatattattcccctggaaaatgtcactattgattccatcaaacgatgagggagacttaaggaactggatggctaaatcaagacaccaactaaatctcttgcaggttatgctgccactgctacggagaaatcagaatggatgaatcctataactaaatgggttactgatttactctccaaaaagtgtggaagacacccagtaatgacc

SEQ ID NO: 368544 - DNA, 1001 bp, Homo Sapiens
gtcatacatattgaatgttgacatacactgagaagggtgacgagttttcaataacgtattttagaaaattgttcattttttgcttaaatttatccgaatataagacctataaagcaagacaaggaagcatgggagcactgagtcttttcatgcccagtatccaacagtcagagctatgttttccctccctgttcatgatggcttggccttttccagaatgggtcccaatccccggtggatggggccaccttgaaagagtttgaagttagggcatgtaaaatatggagctggaaggaagcatgctgctattccattggaagcaaaagggagtgtaggccccatagaatactttctgtcgtttgccttctctgcttacatccagtaccctggatacaagccagaaggctcaatttgtcccaaatggaaaatccaccaactaaatatattgctcccattatggacagcaactccagattcattttggccagtcagcaggttgaaagttacaacgtgtccactggtcagtgtctatgttgtaagaatctatatggcgcacaaggatccggtcattattgtagtctaggtcattgcctccaagaacataaagcttcctttgtacagcagccatggaatggtagacccttctctgcagcatggggctacggcttatccacttattctggttaggttcatacaccattagcctgttctgatattgtgccgtattagttactccacctgatatccaaagaagaccatcagccacatatccagcatggcatgaaagggatctgtcaaaggactgaacaaaagtccatttgttcttcttggggcaatatcgctcaactgtaggcagaacctggcgcagttcatttctgcccccaactgcatagaggtattcctccatggcacccagcacaaaatgctcccggcagtttttcatgggtgctatctctgcccaggaattactgcgggggtcatagcgacaggcagtccccgct

SEQ ID NO: 368545 - DNA, 1377 bp, Homo Sapiens
agcggagtttgattccagagccccactcggcggacggaatagacctcagcagcggcgtggtgaggacttagctgggacctggaatcgtatcctcctgtgttttttcagactccttggaaattaaggaatgcaattctgccaccatgatggaaggattgaaaaaacgtacaaggaaggcctttggaatacggaagaaagaaaaggacactgattctacaggttcaccagatagagatggaattcaggggaaaaaaaagacccagaagactcagcttctcctcacctctttcttctggctcagagccctctcgttaactctgtctcagaagaaaagcaatggggcaccaaatggattttatgcggaaattgattgggaaagactataactcacctgagctggatgaagaaggctacagcatcagacccgaggaacccggctctaccaaaggaaagcacttttattcttcaagtgaatcggaagaacgaagaagaatcacataagaaatttaatatcaagattaaaccattgcaatctaaagacattcttaagaatgctgcaactgtagatgaattgacaggcatcaataggcaacatcgcactttccccatcaccagtgaggaaaagtccgaggcgcagccagggtgcaattaaaaggaacttatccagtgaagaagtggcaagacccaggcgttccacaccaactccagaacttataagcaaaaaagcctccagatgacactacggcccttgctcctctctttggcccaccactagaaatcagcttttgatgaaccagaagacagaacgtcctttaagatcagcctgagatatggggttcaggccaaccaattaatccaagcatggagtcgccaaagttaacaaggccttttcccactggaacacctccaccactgcctccaaaaaatgtaccagctaccccaccccgaacaggatcccccttaacaattggaccaggtgcatcatcccctgctcgaccagccactcctttggttccttgcagaagtaccactccacctccacctcctccccggcctccatcccggccaaagctacctccaggaaaacctggagttggagatgtgtccagaccttttagccctcccattcattcttccagccctcctccaatagcacccttagcgcgggctgaaagcacttcttcaatatcgtcaaccaattccttgagcgcagccaccactcccacagttggtaaaaattctctcctctcttttaatccgtttgtggttttgactggctattttttatgatctgaaatccccaaggccctgtgtttctggttgaaattgtttgctgtgtgtcttgctactattacctgactcttcttttaaaaccac

SEQ ID NO: 368546 - DNA, 837 bp, Homo Sapiens
cacacagagctgatctgatcggccggcgacatcactcagtgagaccggccgggcgcgtggcccctgcaggcgaggcgaggaggccagtgccaagttctccgtgacgtcccctggcagcccttccaggctctcgcacccgcaactggcacagacgtaactagaccgccatggctgttgggaatcgtaatgtgcgccctggcggtctctgccctcagtccgggctgcagcgctctgagcgcctttctatctgtccgtcggtcctgctacagcgcaacgatgccagcccgccttgagacctgcatctccgacctcgactgcgccagcagtcagcggcgagtgacctatccaggcttccttcacctgactgaggaagactgtgccagactccaacatggcagcctccgcttcggggccgcccgtcgccggcccgcaaggggctgcagcccaatatctcccgggcgatctgaggttccaggggcacaggacgacgagcaggagaggcggcggcgccgctggccggacgcgggtccgctccgaggcgctggtgcacgtcgctggcgcaggagccggcgcgtcaaggccaacgatcgcgagctgcaaccgagatgctacaacttgaacgtcggcctggacgcactgcgcagccgtgctgacctcgttccccgacagagaccaagcgtcacgcaataatcgatacgctgcgcttcgcctacaactacagtctgggctctggccgagaaagctgcgcctggcggatcaagggctgccggaggcggtgccggggagcgcctctgccgcgcgagtgcgtcccctgcttgcccgggtccccaaggcccg

SEQ ID NO: 368547 - DNA, 868 bp, Homo Sapiens
  misc_feature (782)..(782): n is a, c, g, or t
gtggcatacctgtcttggcactcaggtcgatgacttcagtactttccaagagtgtatcttcactcaattccgtatcatttgggcgatatcaacttgcagagatgaggaagctaatcgagtttgggaccaattatttcactacattgtgtctttatgttcttcattctttgaatatgttttggctatcatcaatgatacttactctgaagtgaaatctgacttggcacagcagaaagctgaaatggaactctcagatcttatcagaaagggctaccataaagcttggtcaaactaaaactgaaaaaaaataccgtggatgacatttcagagagtctgcggcaaggaggaggcaagttaaactttgacgaacttcgacaagatctcaaagggaagggccatactgatgcagagattgaggcaatattcacaaagtacgaccaagatggagaccaagaactgaccgaacatgaacatcagcagatgagagacgacttggagaaagagagggaggacctggatttggatcacagttctttaccacgtcccatgagcagccgaagtttccctcgaagcctggatgactctgaggaggatgacgatgaagatagcggacatagctccagaaggaggggaagcatttctagtggcgtttcttacgaagagtttcaagtcctggtgagacgagtggaccggatggagcattccatcggcagcatagtgtccaagattgacgccgtgatcgtgaagctagagattatggagcgagccaaactgaagagganggaggtgctgggaaggctgttggatgggtggccgaggatgaaaggctgggtcgtgacagtgaaatccatagggaacagatggaacg

SEQ ID NO: 368548 - DNA, 1406 bp, Homo Sapiens
gctgggtggcggttcaaagatgaaatagatgaatttgcaaattctccttcagaggataaggaagaatccatggaaatacatgccacaggcaagcacagtgagagtaatgctgagttaggccaactttactggcctaacacttcaaccctgactacacgtctgcgccggctcattactgcctatcagcgcagctataaaaggcaacagatgaggcaagaggccctaatgaagactgaccggcgcagacggcggcctcgagaggaagtgagagctctggaagcggaaagggaagctattatatctgagaagcggcaaaagtggacaagaagagaagaggctgatttttaccgtgtggtatccacctttggggttatttttgaccctgtgaaacagcaatttgactggaaccaatttagagcctttgccaggcttgacaaaaaatctgatgagagtttggagaaatacttcagttgttttgtggccatgtgtaggcgagtatgtcgaatgcccgtcaagccagatgatgaaccgcccgacctctcctccataattgagccgatcacagaggagcgagcctctcgaactctgtaccgcattgagctgctacggaagatccgcgagcaggttctccatcacccccagctgggagagaggcttaagctctgccagccaagcttggatctgccaaagtggtgggagtgtggacggcatgaccgagacttgctggttggtgctgctaaacacggggtcagtcggacggattatcacatcctcaagtgaccctgagttatccttctgggatgcacataaaaacttaggctcaaaacagagggggcaggtaatacatcttcccttgaacccacgtggcagttggatatgtcccagactcctccaggcatctcatctgctcatattcaagatgagagggtactggaacaagccgaaggcaaagtggaggagcctgaaaacccagctgccaaggagaaatgtgagggcaaagaagaggaagaagaaaccgatggcagcgggaaggagagcaagcaggaatgtgaggcagaggccagcgtctgtgaaacaatgaactgaaaggtgttgaggtcggcgcagacactgggtccaaatctatttcagagaaaggttccgaagaggatgacgaggaaaagctggaggatgacgataagtcggaagagtcttcccagcccgaagcaggagctgtctctagaggggaagaatttggatgaagaaagcaattgcttccatgagcactggtagagatgaaacccgagatggattctacatggaggacggagatccttcagtagctcagctccttcatgaaagaacatttgccttctcgtttgggctaaggatagagtaatggataaacggttagacaacatctggga

SEQ ID NO: 368549 - DNA, 1236 bp, Homo Sapiens
  misc_feature (750)..(997): n is a, c, g, or t
  misc_feature (1006)..(1035): n is a, c, g, or t
gtacccctctctccacactgggaaaaccatttcctggtaagaagaggtagatggatctctaagctttattataattttaaggctcaatgacttacagtttataagatttggaaaaccttttggaccatcagttgaataaattccttacatcttgagggtgtgtcactgttcaatccccatgacaataactacaaggcatatgccataatttaactgttagaaaaaaaaaaaatccacctaaagggcaaaaagtatacttcatatcctgtttctgttctacaagacagaaaacaaatgtctattctcttgctggcctctagaagcagtcctttgagatagagttgactgaaaaccctagaacaaggataatggttaagacatctaccctgtctttctctctacctgtctgtgtctatgaaagcttctagacagctgctagacagctcaaagtgaactattacataaaaactacccttcaccctacatgatatataggatttctctattacagagaatcattataccaggaaatggttttcctgatattctaccaaaatcctgagtaaaagtttgcattattggaagattattagaaatagactaatgtatggtaattgaaaatttaaaaaaccttgtagtagcagagtcctagaaaaccagagagttgaaccaggaaaaaggatggtatctctgacttcagcaggtttatcacttatttaaagctgaggccagccaggcacagtggctcannnnnnnnnnnnnnnnnnnnnnnnnnnnnnnnnnnnnnnnnnnnnnnnnnnnnnnnnnnnnnnnnnnnnnnnnnnnnnnnnnnnnnnnnnnnnnnnnnnnnnnnnnnnnnnnnnnnnnnnnnnnnnnnnnnnnnnnnnnnnnnnnnnnnnnnnnnnnnnnnnnnnnnnnnnnnnnnnnnnnnnnnnnnnnnnnnnnnnnnnnnnnnnnnnnnnnnnnnnnnnnnnnnnnnnnnnnnnnnnnnnnnnnntctgtctcnnnnnnnnnnnnnnnnnnnnnnnnnnnnnngataaagctgaggccaataattcttacagccagagccaaactttaggttagaagaagcacttacagggaattcaggctttggactctttcagtatctattttcagtttcagggaaggagaagcaaagaaggaagttaaagattatactgacccttagagggatgggcagcagaaatatctgctatattgagctatttaccc

SEQ ID NO: 368550 - DNA, 1523 bp, Homo Sapiens
  misc_feature (199)..(199): n is a, c, g, or t
  misc_feature (449)..(460): n is a, c, g, or t
  misc_feature (475)..(563): n is a, c, g, or t
  misc_feature (576)..(589): n is a, c, g, or t
  misc_feature (652)..(661): n is a, c, g, or t
  misc_feature (930)..(930): n is a, c, g, or t
  misc_feature (963)..(963): n is a, c, g, or t
  misc_feature (1007)..(1007): n is a, c, g, or t
gccgtcgaacaaatcacccgggacgggcgggctcgggtgggacggggggcgcccacgacacaagggggggccgcgaaaaaggcgggggcagaggcggatgtagcgtaggcgcgcgcgatagcgtgtcgggtgcacgtacgtccggtcagtcggtggtatgcgcatggtggggcgggcggggggtgacggttggggtggncgtgacggggcgcaggatggcgactgtgagtcacgcctgcctgtgtggctatgatggcggtgggggtgcgtgtcagcaggtctgagacgtgagaggaggaggcgcgtgatagggcatgcgtccgacgccttccgaccggcgcggaaggccataagtcttcacaatgggcaaggggtgtacagtggtttcgatcgccaggggggacgggtggaacagtggggccgcgcaggggggccgtcccccaatgtannnnnnnnnnnncgggtaggggggagnnnnnnnnnnnnnnnnnnnnnnnnnnnnnnnnnnnnnnnnnnnnnnnnnnnnnnnnnnnnnnnnnnnnnnnnnnnnnnnnnnnnnnnnnaaaaagggggggnnnnnnnnnnnnnngaacaccaacatcaataggaaaccttttaaaaaaaagttccccccctttttaataggggaagnnnnnnnnnnccaaaagaaaaaatccattttttctcccggttgaaaaaatccaaacccccgtttgggcttttaggggaaaaaaatcccccgggaatcaaattttttccatttttcctaggcaggaatcagagttttgaaaaaataataatctttttcttttttcatttaaaggattcccacagccattagtggaaaagtttttccaaatcccagagttttcttcctaaagtctgtgttaaatggggtttttccttcttggtgttgaagttgagaaatcnagtttcaacttaattttttcttgatgttgcccncagacaataccacccattacttttatgatatttttgcatacganaaaacatatttatcacagtcattcctatttatagaacctagcatgccaggactgacatgctgacattgaggagtttttaccaatggaaagataactgatgatggagttgttggatttttgtccatatttggcagaatatcatcatcatcttcactgtcctggaaacttggcaacagtattctttgatgctgtaaaggtgttgtactgaaaaaatcatcaaggtcatcttttggcaactgttccagaaattccctcatctgttgcttccttttaagagttcccactttggcagttatcttaatagtttgtttctgatcagcatcacctctcttgccattttggcctttggaattggctggcttcttcttagtgacatgtttctgggatccttttcctctgggattttccatgtatttcctctggcattcttcaggagatcgagaacctacagccgcagctacctctgaccagaaaccaggtttgtgctttggaagagatgcaaaagcacaatgaagt

SEQ ID NO: 368551 - DNA, 629 bp, Homo Sapiens
gaaactttgaaaggcctcaaagctgtccaaatagttattacaaaagcagtatactaacgtatttgttctattcattgaacagctctgaagccatcacttagatctttttttcctcagattctttttattcttaccttattcataattctatcaaaaataggttatctagattcttagattggaacaaatgagaaagtagtacaactctataatcaggaaaatatcttaacaaatacttaaatttagggaaagaagcactttataagcaaagaataataagcatactagtatagaactatttagcgtaggtaatcagatatatctcacaacgctaggggactgtacaatatttagtatttataatggaatattggaataatcaaggaatatttctgtatagtatatccttttaagaatataaggagtgtaaactatatgaagatttctaatgtaagttcgtgtgtgtgttttaatgtctggcacttaaactgtcaaatattgcttatttagaaattcacttattctatcttggtatatctcgattccgctaatcattgctacactaaataaagctgtcgaaatacaataaacgtattacccctttacccaataccagaactatttacata

SEQ ID NO: 368552 - DNA, 639 bp, Homo Sapiens
  misc_feature (192)..(291): n is a, c, g, or t
actcagcgtgcccaagtccgtgacttagtgccaggaccgtgctgtgacccgttatcccctgtcgggttttacctccccccgggagagctcagccctggatcccggcgggcggcggagcctctctggagcccggacgggacagcccaccaggttctgcttctgtgaggggccgaggcgtcattccgcgaagcnnnnnnnnnnnnnnnnnnnnnnnnnnnnnnnnnnnnnnnnnnnnnnnnnnnnnnnnnnnnnnnnnnnnnnnnnnnnnnnnnnnnnnnnnnnnnnnnnnnntgctggaaggtacacatcttgggagtttgccctttgaagctcacctgtggaccttttttcctttcgaaaagaagcataagctgcaataaaaatttggtttcaagataacaaagtcagtccccaaaaatcagtattgagagtcactgacattaaatgatgaagatacgaggatggtgtggggacctttactcttcaaagatgagctatacatgcccctgaaaaggctgtctgaagacaggggaaggctggagatggcaactttggcctctgccaagtactgcgtgctattttctgtatgtgatactatctgttttgtaactcagaggcaacaccatcctcgtctagaga

SEQ ID NO: 368553 - DNA, 758 bp, Homo Sapiens
gtggggaggtttgattcctggagacagtttccccccttgctggttcacaggatagtgagctctcacgagatatgatggttgtaaaagtgtgacagtcccgcactccgttccaccatgtaagatcgtgccttgcttccccttggccttccaccatgattgtaagtttcctgaggcctcctaagccttgtgaaactgtgagtcaagttaaacctcttttctgttatcaagttacccagtctcacgtagttcattataatgtatatatgacctaataaagaaaattggtaccaggagtttgggtcactgctgtaaagatacctgaaaatgtggaagcaactttgaaactgggtaatgggcagaggttggtacagtttggagagctcagaagaagacaggaagaggtgggaaactttggaacttcctagaaatgtgttgaatagttttgaccaaaatgctgatagtgatggggcaatgaagtccaggttgagatgctctcagatggatgatgaacttattgggaactggacgctaaggtcactcttgctgtgctttatgctaacagactaacagcatttttcccctgctcttagagatcatgtgaaactttgaacttgagatgatttaaggtatctggcagaagaaatttctaagcagcaagcatttaagatgtgacctgggtgctcttaacagcatacggccatatgcattcactaagagatggtttgaaattaaaacttatgtttaaagaggaagcagag

SEQ ID NO: 368554 - DNA, 1445 bp, Homo Sapiens
  misc_feature (1002)..(1012): n is a, c, g, or t
ctatgattaaaaacccaagagagtgcagaggagtacaaggcatgcatgtagggacaggagggaataagctagtctctgcaggaggcttcagagacccgtctgggaagtagggctgagactaggctttggagggccttgaagggcagctgagggttgattttaatccttggaaatgaccagtgcagatcaaacatggagctcctgctgccctggtcctcaggagtctggtaactcagtcatgttctgtaggtttgtgctccattttgcataaatcttgcaaacataccaggtggcaggtttgcacagtaacacaaaagcttaaacatgtcaagcaagtggggcattcagcagccacagaaatgtgttcatttttagtccctaatggatgtgattaagcagggctgatgtgtacagatttaaaaacacacacacgtgctggattaaaaacagccactggtttcagtgccagagccagcaaggcctacctgagccaggcggaagcagcagcttgcagatagaaactgccacctgcgagcgcttcttgggtcatgtgcagctccacctcagctggtccctgagccgtggtcatgtgggggtttcgaagggctaagttgaagcaagtaattgcaaaagaacaggtggcactctgagggcaggggaaggagacagaagtttgactgcgtttgaaattatttacagtcagggaaacatctgcgttgctcttgttaagcagcttggtaggcccacccctggctaactgaactttgtgagcagttggggcagttatttgaatatctagtccaaaggtggtagggaggcacgatgacattctggggttactggagtccacctctgtgctgatggggaaagtatggcatgatgaatccaaagcaaccagtaattctttttgaaagtgcaggcatttattttgagctgtatttcataggagtttcatttggtttggttttggtatagagaggtgtccatagatctctattcccnnnnnnnnnnnatcgacaaggcctactacggataaatcagtttttgttgcctgaatacactttgaattagactacagaagccagtttgagctcaaatttcacacttgctgcagacaactctcagtgtggacagtgcctttctgaagaaattaggatgtttttatgactttttgggggaacccgaatagggggtaaggagatgcccccaggccccctgatcctttccgaagccacctggagccaccagaaggggtcctctttcccagggcctatggcgtccggtggggcctaaacggcactcaaggtaggggattggggcttctaagcccccagggctttctcccggaatttaaaagggaggcaagcaacctccccttaagttactttttccaaaaatgggcccttccaggaagaaaccacggtttcccccagagggggaaaagg

SEQ ID NO: 368555 - DNA, 1179 bp, Homo Sapiens
agcggaggtgtcacctccttcaggaagccctccctggtggccccgccctttgggagcacaaaaccctttatgctcccaaagcacaacgcctttatcatgtgctgatgctactctgcttcttcgctggcccggcaggccggtgcacactttgtaggagcgggctttgtcataatcttctttgtagccccagccctagctcagcagcggagcccctcaaacctcgggaactcctccctgcaaaggagccaggacgccctccctcaggctgcctttaaccaggcagggtgacaaaggacctccacagagtaggcggtcactgccttagcagtgaggcctcagggcccgggcaggcacagccagcgggactcgaagcaggctggcgccgaggctcgtgtagccgcctcacagctgcaggcggactgtaagtgcgcgcgcggtcgccatggcagcgcagccgccgcggccagtgggtgagaggagcatggggagctcccgggaggccgcccgtgcgccggccaggtccccggcttgggcctccactcaggccagtactccgggcgcggcctggcggtccagcgcgaatctccagaatctggtctccagaaacattattctaatctgtgtatggaaaaatcccagaaaattaatccttttatattgcatatactccaagaagtggatgaagaaattaaaaaggggctagcagcaggaatcaccattaaacattgctggtaacaatcgcttagtgccagtagaaagagttacaggtgaagatttttggattctttccaaaattttaaagaattgtctgtatattaatggtttggatgttggatataaccttctatgtgatgttggtgcatactatgctgcgaaactgcttcagaaacaacttaatctcatttacttaaacctcatgtttaatgatattgggcccgaaggtggagaattgattgctaaagtgctacataagaatcggactctgaaatacctaagaatgactggaaacaaaattgaaaataaaggtggaatgttttttgctgcaatgctgcaaattaattcatcattagagcaaattagatctgggtgactgtgatctgggaatgcaaagtgtgatagcatttgctacagtactaactcaaaaccaagcaattaaggcaataaacctaaaccgaccta

SEQ ID NO: 368556 - DNA, 754 bp, Homo Sapiens
agcggagcgggactcgaagcaggctggcgccgaggctcgtgtagccgcctcacagctgcaggcggactaatatccagaatctggtctccagaaacattattctaatctgtgtatggaaaaatcccagaaaattaatccttttatattgcatatactccaagaagtggatgaagaaattaaaaaggggctagcagcaggaatcacattaaacattgctggtaacaatcgcttagtgccggtagaaagagttacaggtgaagatttttggattctttccaaaattttaaagaattgtctgtatattaatggtttggatgttggatataaccttctatgtgatgttggtgcatactatgctgcgaaactgcttcagaaacaacttaatctcatttacttaaacctcatgtttaatgatattgggcccgaaggtggagaattgattgctaaaagtgctacataagaataggactctgaaatacctaagaatgactggaaacaaaattgaccaaatacaaggtggaactgttttttgctgcaatgctgcaaaattaattcatcattagagaacattagatctgggtgactgtgatctgggaatgcaaagtgtgatagcatttgctacagtactaactcaaaaccaagcaataaggcaataaaccttaaaccgacctatactgtacagtgaacaggaagagtctaccagtccatgtaggccgcatgttgacaagaaatcgctggctagttgcactacaca

SEQ ID NO: 368557 - DNA, 965 bp, Homo Sapiens
  misc_feature (219)..(227): n is a, c, g, or t
cgtgctgtcttggcccatacgtgtgtggtcggtggtttgtttgctgctctggtgttcttacttctgtgggagctccctggaatatggaatggggctcgagatggcgctttccgtggtgcgccttcagtcctcgtagttggtcgtccccgcttcgctcatgacctgtcccgcgctgttttcgtctcctcgttttcccatggctggcctcccctgtgtttnnnnnnnnngttggttgctgcccagtattaagtgttaccctccgtcttgggtgtccctcttcgtagacttggcgtgcctttccacctcgaatgccacggtaggcagtgcatgctccttggccaggcttgcagcccctctagttccctgccttcgtatagttctttgtcgggtcaagagtcccccatctgcagcccatcccgcgtgcccttctaggcatctgtgggctggaaggaagtggtaaccctgcctgatgtccccctggtagcagtgccctggcaccgtcaccaccgaggatggtgcgagtgtcctacatcgaacacaagcgagcaggtgtcgcctgtgtcactttgctaaaggcgggaggggagaaagaaaggagcggggggagggggccgaggaaacaaatccagatcaccggcggagaaagaagccgtttagcaagcaaagcctcctctccgcgtcccaccccagatgctatactgtcaaaagacactgatgctaatcttttagaaagtcgccataaagggcagagcccctgctccactctagaaccctattccacccagcctggctgtccagtgagtacagagtgacttggctcccccgtatagtgcagcgagaatgcaggagaataggtcctgacactccaggttgagttaagcagtaaaatggaatggcagggccgggcggcgttgcctcgcctctctctcccaacagccagttctgttagccccagcaactgccgt

SEQ ID NO: 368558 - DNA, 1389 bp, Homo Sapiens
  misc_feature (1269)..(1341): n is a, c, g, or t
taaggaatggaactaggctttcgttcaagagtcccccaggaagtccaggggccgcccccgaagacgggtactcttgaaggcttgggccacgggggacaaagagagattaacatggcctgcttccttggaacaggatgcggtttgggccggggcaagggggcaacgtgccaagtttcttttctgattaatgatggctcacgctgctgcgcgtggctcaatgcgctttgtctcccaagcccttagggctggcggagaacggccccagggaatgagtggtaccgcggggcgccccggcgcacacagcaggtgccatcactctggatgggccagttctggatgctcccagtggcgcagaggcggcgacactggcaggcgtccggctgccgccacctcccgggtgtggcgggtctggggcccgggttctccggccagagcagctgtggagccacgtgcaacacgcgcgttgccctcagcccgggcggggaccggacgcatccggagctgcggggaggagccgggcgccgcccccggcggcagtgccagccgcgtgggagggcacggaccggcggaggggcagacgacggaggcggccaagcgggaggaacgggaccgagggatcgaccgaggctggctggcctaggggtgggactggcagagctacggacaggtgggagcagtcagacagcctgagagagggagaccagaacgcaaagagagcgagagcattaagtaggcagggagaggcacacagaaagatagacagcaacactcgcgtgctccctccctccacacgccctcctcttaccgagcgaagcggccaggggcacagagtgggagaggactgtgggcacagaagaccggaagagggacgctgcattgctggtgggacggagggattcggacggacggacagaccagcgcacagactggcagcctgcgagagtggcagctttgagagcagagcacagcaaagcgagaatcccgcgccgagctgctagtcggacccacagacggtcggactgacagacgtgcagacggacagaagagcagacaggaggcgggggcgcgttcactcccggcggccagccggccagagaaggcggcggtggcaccttctgagcgcgtccggagcagagaccagcagcagcaggggcagcggggacacaagccgcgaccgagccgccgccgcagccctggctgccacagctgtgtgggatcccagccgacactgcagaaagctccttttactaagcagttaaataaatcgannnnnnnnnnnnnnnnnnnnnnnnnnnnnnnnnnnnnnnnnnnnnnnnnnnnnnnnnnnnnnnnnnnnnnnnnaatccagccaatcactcattgagaaacaataatattcataacattcca

SEQ ID NO: 368559 - DNA, 978 bp, Homo Sapiens
aaacaggctggtaccggcctggagattaggatggagaagagcggagcagtggtcggagatgtggcgaccggtgcagctctgctcatttccactctgctctgctgcacagaaggcagaagccctggccgtcccctgctgtgttcttcaggagaaacgtcaggggccttcctccaaggttctccagccccacacccctgtggaggaaggtgctctccaccgcggtagtgggggcgcccctgctcctcggagcccgctatgtcatggcagaggcacgggagaagaggaggatgcggctcgtggtggatggcatagggcgctttggcaggtctctgaaggtcggcctgcagatctccctgggactactggtggtgcaccaatgttgtccttcgaggggtggaagagcccaggctacttggaggtgatgtctgcgtgtcaccagcgggcggctgatgccctggtggcaggggccatcagcaacgggggcctctacgtgaagctgggccagggctgtgctccttcaaccacctgcttccccccgagtatacccggaccctgcgcgtgctagaggacagggccctcaagcggggcttccaggaggtggatgagttgttccttgaggacttccaggccctcccccaacgagctcttccaggagtttgactaccagccaattgctgccgccagcgctggcacagtgtgcacagagccaagctgcacgatggcaccagcggtggctgttgaactgtgcatgataccatcgaccctgcgggaccgctttgatggggacatccacaaccctggaggctccttgctgcgggactcgttggagggtcattgcaccccaagctttggctttcacattgggtccttccaggacctaaggggagcctgccaaggagctggacttcgagaatgtacgcgccaagcaaagacgcttgtgcgagggaagctgcgcacttcccctaacttaggtgaccc

SEQ ID NO: 368560 - DNA, 1136 bp, Homo Sapiens
ggtccggaattcccgggatccggccgctgggtcccagcgagggctgagccgggcggtgggaggaggtcaggatggtgggggaacggcatgctggggacctcatggtgcccttagggcctcggctgcaggcatatcctgaagaactcattcgacagaggcctgggcatgacgggcatcctgaatacctgatccgatggagtgtcctgaagtgtggggaagtgggcaaagtgggtgtggaagaaggcaaagcagagcacatcctcatgtggctgtcggctcctgaggtctacgccaactgccctgggctgttaggtgagcgggcactatctaagggacttcagcacgaaccagctggggtttcaggaagctttcctcgagatccaggaggcctggatgaagtggcaatgggagagatggaggctgatgttcaggcgctggtacgcagggcggccaggcagctggcagaaagtgggaccccaagcctcacggccgctgtgcttcacaccatccacgtgctcagtgcctacgccagcatcgggcccctcactggtgtcttcagggagacaggagccctggacctgctcatgcacatgttatgcaatcctgagcctcagatccgccggagtgcaggcaaaatgctgcaggctctggcagaccacgatgctgggagtcgggctcacgtccttctatcactgagccagcaagcatggcatcgagcaggcaccatggattttgaccagtcgctatacattgctggagctgtttgcagaaaccacatcctctgaagaacactgcatggcctttgagggcattcatctgcctcagatcccagcgaaagctgcttttctccttggtgaagcgctacctttgtgtcacgtcccctctggatcagctgaatagcagtccagagctgggagctggagaccaagctccccatgtgccaccagagagaaaaagcgcgggacagcgggaactggagttcagcatggctgtgggcaaccttctctctgaacctgtgccggaacatgggcctgggccccggaactccacgaacagggcatgtcaccttccccgccaacccggtccattttttagccctaaattttagggcccacctttttactccccaccatgtt

SEQ ID NO: 368561 - DNA, 1445 bp, Homo Sapiens
  misc_feature (1427)..(1427): n is a, c, g, or t
gactcactcagagctatgccaggagcccttgttccttagccacagggacctccccagagggtttactgtcctcaagacatggcaaccagcttcttctggagcaaatgatctattcctacctgccctctggcttcattcatggtcatagggcctcagtttttggacagagagcaccaccatttttggccatgcattctcttttgtccacagcccgtttatatccatctggtcaccacctcagtatctcttcttttgtgggtctcatttcaataatgttccagacctgattcagtcagtctcaaataccctttggaataatagtcttctgttctctagcagtgacatttctccagcaacagtggcatattcagaagaaccagaaaagttcatttggcaccaacatttcacatgaggtacttcgagtagtcaaattcgtagagacggaaagtagaatggtgtttgccaggggcagctatgtaaccttgggcaagtgatttaatttctttgagtccaaagttttgcatcatataaggcctcagataactttctccttcagacagaacatgtgggagaataagatccctcgtggcaaaatcccattctttgtccttagcgccagatgccatcacttcttggaaatgtcatcattgcatatttctcctcacactcccactcctccgtttccgcggtcgaagctgccttcggccccgggtggtctcccccgcccgggaccccctgtgcctcccctcccgggctgcgggggagcccctccgagaccatgaggaaattcaacatcaggaaggtgctggacggcctgaccgccggctcgtcctcggcgtcgcagcagcaacagcagcagcatccgcctgggaaccgggaagccggagatccaaggaaacgctccaagtccgaagcactttcagctctgcaagactgttcgccatggatttccctatcaaccctcagccctggcctttgatcctgtacagaagatcctggcagtggggaactcagactgggtgctttaaaggctgtatcctttctttaaattttattttttaacttctactttgttctccccaagtccttctgtgttgctgattagttccaaagaaagtttttattttcctgttggtgtgattagatatatactatgagaaatcatgtgttggcttttcccttgattataattcagcttatatactgctgtgatgtttctcagctcctagtttatagtagctaaacatatatccaaatagaggtctaaagtttttttatgataactattttatttgtaaggagatagaagtttctaaggaaaaatatatctgcttctatactattggtgtgatgaatgaggtatgttaaggatgaggtttaaagacaattacttttaaaaatattatgcatggtagatatgaacttanacctattctaataaatag

SEQ ID NO: 368562 - DNA, 1111 bp, Homo Sapiens
cggtccggaattcccgggatcgccgcagcagccgagtctgacggcgccggttcgctgcccggtccgcccgcggtgagagatgccgtagggccaggtgagctgctgtgaaggactcattcttggtagccggcagttactggcaacttgtgagcttggtgggctcctactaacgcacctgggacaccaggctgctgggctcccctctaggcagcctcccctccaggcagcctcaccagcagctcccctgagccatggagaccccagaggtccccgtgggctcgctaatcgactttgggcctgaggcacccacctcttctcccctggaggcaccaccccctgtgctgcaggacggcgatggctccctgggggacggtgcatcagagagtgagaccactgagtctgcggacagtgagaatgacatgggcgagtcgccctcgcacccgtcctgggaccaagaccgccgttcctcctccaacgagtccttctcctccaaccagagcaccgagtctacccaggatgaagagaccctggcactcagggacttcatgcgtggctacgtggagaagatcttctctggaggggaggacttggatcaggaggagaaagccaagtttggagagtactgcagcagtgaaaatggaaacaggccgggagtggttagctcgactacgtgagtgcccagcgctgcaactccaagtgtgtctcagaggcaacccttctaccgcctggtgcagtcctttgcagctggtgctgtccgagtgtcatcagatggatgactctggggcctgcccagaacctcatgaccatgtggcttcacctactaccacatcggaaaaaccaccgctgctgcccccgggagtccccgggagaagcccgcggggcagcatccaattcctaacctgaaatccgcaaaccacttggcttggccccaaaaaaaggaccatctcccaagcgggctgcttgaagaaacccctcggcccagaatggaaaatgcccagggcctttcttctcggggggcctgggaaacccaacttgaggggggcccttggccccggaggaacctgggaaaaacaagaaacaaacccccaggaaaaaaacggccccagggtct

SEQ ID NO: 368563 - DNA, 543 bp, Homo Sapiens
  misc_feature (15)..(15): n is a, c, g, or t
  misc_feature (40)..(40): n is a, c, g, or t
  misc_feature (46)..(46): n is a, c, g, or t
  misc_feature (70)..(70): n is a, c, g, or t
  misc_feature (77)..(77): n is a, c, g, or t
  misc_feature (91)..(91): n is a, c, g, or t
  misc_feature (114)..(114): n is a, c, g, or t
ccctggttacctgcngcaccccactctggggtatccaggnaagggnaacttccagggaacctttggaaanggctttntcccagtccacagnatgcaccttccattaattttgangaacccaaaacacttttaaactggggagctagagtcctcagggctcagttgcttgtgggtcaagaaacttaacatgtaaagcctttgagccagaggaataaattcttcttcatcttcactttcactgcttagcaacctgactggctgtgtttgtgtgacagtttcagctatttctgggacaggtggtgaaaataactctggtgctggaggacaggaggcttcacaatctgagatgtcaaccactacaatcttctcttccctttcaggctgtctcctctttgttgaagatggttccttcttcagaaaggcaaatgttggcaactcctcagagtcactatcaccagaatccagtgagggtgatgacttctttagagccatcagtatgtgctatcaaataattccctgcaacttctcccgccctgtgccgaa

SEQ ID NO: 368564 - DNA, 813 bp, Homo Sapiens
  misc_feature (715)..(751): n is a, c, g, or t
cggattcgctggaatatctgggagaagctgatgtagccattttcttccgcgtgccctggaccgtgcctggaggctccctgatctggggtggctggcctttctttccttagggagttggagcgagtcaccgagatgttgtcaaaatcctctagcaggccgttgatggaggtttccttgcagggtttgtttcctctaacgattgtcttcataggagccagctggatgggtgtgatgcatgaagggtccaccataggctttggcctgttggccgtatctgctaacaggctgtgccactgctggggaaggccggtaaacttctgctcttgtggatcaaacccagtatgaaccctgtgttcaaagttggacgggccagatatttcaatctttttctttttcttcccaaacatgatgccaaaacctttatatgatggctgtggatgaattaaagactccagaggagtgtggctatttctattctgcaacttttcgctggtgcttgtcagtcttcttcattttttctcagtgttcattttagcaagaggtggaagcatttcaccacagtgtatttctggtggccggctgtcagcgaagcggcggtgcctcagccccttctcagctgctacagcgctcccagcgccatgttcccggtctccccgggcgcacgctgggaaactccgctctcgacgaattcgagctcggccgatttggcctgatnnnnnnnnnnnnnnnnnnnnnnnnnnnnnnnnnnnnncggccgccaccgcgttgacaccccgagtcgccctatatgatctagtacatctccacagactt

SEQ ID NO: 368565 - DNA, 1042 bp, Homo Sapiens
ggatgccattgcaaagaagaatgctgtggagctggaacttgccaagtgctggatggatatgatgtctctgaacagccagttgctggatgccattcagcagaaactgaacctctcgcagcagctggaagcttggcagtttgcttcctcagggctttttactatctggctcctttggtttctgatctagtggcctttctcagttcccgtatcaacagctttagttgtacacccctcctgcctttgaggatgacatgcacagggtcattgaccggcagctgatggacacgcacctgaaagaacggagccagccggctgctgccctctgcaggggccacagcgctgggcggggggatgagcccagcatcgctgaaggcaaacgacctcttctcattcttcaggaaacatttaagtagggaggagtcaggccaccaaagatgggtggacttggaggcagctggaaaggcggtgccaggcaaggcctccccatgcagcttgcacctcagcagctgacctgaaccctcatgctagggaccccaatgggtcccgggaagggcctgctcccatatatcgatcggtgcgcgatggagaccctagaggtagggaggactgcacttggcccacttgcaaagagcatcgcatttggggaccacacggaactggcccaagaccagacgacctgaggccttctcacaaggaaccacgttgctttgacgccactggtacgggccaacatccctagaggggggccccctagcaagcagcgcacaaagcgagcttcaacaaacccagatcgatacgcaaggccgaaccccccaagggcacacgtgatggacatccccttgcacataatcaacgccaaaaatgcgggcgaaaacagacaacgggacatgcacaggcgcaacagcgcaggcacggcgactactacgaggacatgaatacaccccaagggaaccacccaagacaaccgtctgacagcgacaaacacggagcacagtgaacgatacgtcaacctacagcgaccacacaacacacaaacaacaat

SEQ ID NO: 368566 - DNA, 902 bp, Homo Sapiens
gcgttagggccttggttcctggctgtggtctactgggacagtggtgccgtctgtgtcgtcttgggtttaggagtcaggtgggtctatctggtactagcgatttaggacctatcgttggctggcttacttggattcgagtgtagatgagtgctgccccttttgtttgggaaaattgctcaactaggctgctgaaaagtatatatgggggttttcaaattcagtgttgtttggaggcatgagacattaacgggccattaaacgtgtactgcgtaagagcagggtataatgtggtgaggagaggaagagagaaaaaagtaggatagataagtacagattccatcatagaaggaaagataagcttctggacactacctggacacttgcatgttcaagtcccacagctgtgtgcttgttcctgaagtgcttccaatggcttcgcctgtgcccagctctcagcctgcatatggtggccgctcagcagattttcaaaagtaacattaagacagactctttggctcatgccaatgctttttcttgtgcctctgaattcctgctcttgttagtaaaggatgcttgtttgtcaaatgcagggcagtaggacattttctaggaatggctctctaaattcttgttttcagctctttaatgaaaactttcatgtaacaagtctctttttttgagcaggtggttgaaagccacaaggggaaatacatttttaaatattaagaagggccagaaaataatttaacaacaaatagctttttcaacctcctggaccagctttcttgagctctagggaatatgctattttgagagcttaggatctcactaaccttgcattcattcaaagtcatctcctagcttttttcaaacatcatccctaattccgggcggtacagcct

SEQ ID NO: 368567 - DNA, 809 bp, Homo Sapiens
agcagcaaataaataatttattcacactttcaccatattcatatctaattttctagaacttaacttcattaatttctctattaatttccgccaaactgccataaactgtcccgtcaaaaattacctacaaaatacaggttataaaaacacatactattagcaatttgtagtgataccagagcacacacccttattatttactactccaaggagctgttggcaaagcttctcatcttattcttaacttacagaaacaacataattttatcattgactcaaaatagaaagtggtgataactctttttctggcagcactagagctcaattcacagtcttgctaaacctcacagcagatgaaacactagctttgctaataatataatacaaaatgatggatgttaaagactacgcaatagatcttatctactagtaagtaccatcagtcttacagcaatgtacgttttaatatttgcaatgtacgaaataaacgtttacaagatttggaagctccacagatccctggtgttctaggtgagaaaacctagaccagtaaaacctgagagttcaagtgactgcttcccaatctcctgctcccaagcaactaacagccagtcccagtcagagacagtgctgattaggaactgactcttctctacttgtgatgaaaaatcctcttatcagaaaaattgaatactgcccatttcttatcggtatcacggtgacctacacaatctgtgtgatgtgtgtgatgtgcagtaaaggataacaataggggatcacaggggtgctaagttctggcatgctgtcga

SEQ ID NO: 368568 - DNA, 903 bp, Homo Sapiens
  misc_feature (893)..(893): n is a, c, g, or t
ttaccgggatccttgggagaggacccacacagcctcctgtaggtggcaacagtgccacctgtttgactcgtagggctgaaccgaggactgaaaaagggaggaggcagaccactcggagaggagctgggaagcagtgcagagaggagagcggagcggagctgccgctgagcaaaggccttcaccatggccgagtcccccggctgctgctccgtctgggcccgctgcctccactgcctgtatagctgccactggaggaaatgccccagagagaggatgcaaaccagcaagtgcgactgtatctggtttggcctgctcttcctcaccttcctcctttccctgagctggctgtacatcgggctcgtccttctcaatgacctgcacaacttcaatgaattcctcttccgccgctggggacactggatggactggtccctggcattcctgctggtcatctctctactggtcacatatgcatccttgctattggtcctggccctgctcctgcggctttgtagacagcccctgcatctgcacagcctccacaaggtgctgctgctcctcattatgctgcttgtggcggctggccttgtgggactggacatccaatggcagcaggagtggcatagcttgcgtgtgtcactgcaggccacagacccattccttcatattggagcagccgctggaattgccctcctggcctgccctgtggctgataccttctaccggatccaccgaaagaggtcccaagattctgctactgctcctattttttggagttgtcctggtcatctacttggcccccctatgcatctcctcaccctgcatcatggaacccagagacttaccacccaagcctgggctggtgggacaccgaggggcccccatgctggctnccgagaacac

SEQ ID NO: 368569 - DNA, 1008 bp, Homo Sapiens
gcacccctcccgggttacgggatttcttggggccgtcgtgccccgccccagtgcggcggggcgcgggttcgagctgctgctcggcaagcctgggtgtctagggcatgagcggagtgtggggggccggcgggcctcggtgccaggaggcgctcgcggtcctcgcctcgctgtgcctgggcccggccgcccctctcgggctggacgtggagacttgtcggagcttcgagctgctgccccagagcggagtccagcgcggcaggcgcagctgtgctggatgccctggaggaacaaggaggcctccagtccctcttctgctaatccccccttggaagccctccagagccccagcttcagaggcaacatggcggacaagctgaaggaccccagcaccctgggcttcctggaggcggccgtgaagatcagccacacgtcccagatatccagctgaggtgcagatgtcggtcaaggagcacatcatgcgtcacacccggctgcagcggcaaactacagagccagcgtcatccaccaggcacacgtccttcaagcgccacctgccaaggcagatgcatgtctccagtgtagactatggcaatgagcttccaccagcagcagagcagcccaccagcattggccgcatcaagcctgagctctacaagcagaagtcggtggatggggaggatgccaagtctgaggccaccaagagctgcgggaagatcaacttcagcctacgctacgattacgagaccgagaccctgattgtgcgtatcctgaaggcttttgacctccctgccaaggacttttgtggaagctctgacccttatgtcaagatctacctcctgcctgaccgcaaatgcaagctgcagacccgggtgcaccgcaagaccctgaaccccacctttgatgagaacttccacttccctgtgccctatgaggagctggctgaccgcaagctgcatctcagtgtcttcgactttgaccgcttctcccgccatgacatgattggcgagg

SEQ ID NO: 368570 - DNA, 480 bp, Homo Sapiens
  misc_feature (41)..(41): n is a, c, g, or t
  misc_feature (58)..(58): n is a, c, g, or t
cggttcaacccaactccctcaaaaggccacaaggaaatggnaattcctccatccaaangtggggttccagggtccttgcggtgcaacccgggtcctgcaagcttgccatttgccggtccaggcaaggaggtaagatcttgaacataagggtcaagagcttcccacaaaagtccttggcagggaggtcaaaagccttcaggatacgcacaatcagggtctcggtctcgtaatcgtagcgtaggctgaagttgatcttcccgcagctcttggtggcctcagacttggcatcctccccatccaccgacttctgcttgtagagctcaggcttgatgcggccaatgctggtgggctgctctgctgctggtggaagctcattgccatagtctacactggagacatgcaatctgccttggcaggtggcgcttgaaggacgtgtgcctggtggatgacgctggctctgtagtttgccgctgcagccgg

SEQ ID NO: 368571 - DNA, 843 bp, Homo Sapiens
gctggtacggtctgggaagtacggatctcggaaatggggtccaagggtagccaaggatggctgcagcttcatatgatcagttgttaaagcaagttgaggcactgaagatggagaactcaaatcttcgacaagagctagaagataattccaatcatcttacaaaactggaaactgaggcatctaatatgaaggaagtacttaaacaactacaaggaagtattgaagatgaagctatggcttcttctggacagattgatttattagagcgtcttaaagagcttaacttagatagcagtaatttccctggagtaaaactgcggtcaaaaatgtccctccgttcttatggaagccgggaaggatctgtatcaagccgttctggagagtgcagtcctgttcctatgggttcatttccaagaagagggtttgtaaatggaaacaaagaaagtactggatatttagaagaacttgagaaagagaggtcattgcttcctgctgatcttgacaaggaaacaataaacactcccgttcaatatatgaatctgtgtggccgccctcggcccctcaaaaagcttttcaaaaccattcctttggattcggggggcccataagggacatagaacacgggtcctaaaccgcctcctagggaaaacagggccgacaatacaggccttggaattctcccccgtacaaatatcgcccggtagcaattcagcacgtgccgtaccaacacccgtcattggtcagcctccggagctatatgggggcctgaataccgcagtggaaggcttcgtgcacggccgactaatcacatctatccccccctcgccttgtaccgttacggcc

SEQ ID NO: 368572 - DNA, 420 bp, Homo Sapiens
  misc_feature (361)..(362): n is a, c, g, or t
  misc_feature (387)..(387): n is a, c, g, or t
ttaattcatttatcttgaactaagactcactgtttcatcctcttagatgctgctacttgaacaatattgttttgagaccaaaaactagcatattaacacaattcttcttaaacagtcttaagagttttgtttcctttacccctttctttaaaaacaagcagccactaaattttttagtagtgaatttcaaaatcctttttaaccttataggtccaagggtagccaaggatggctgcagcttcatatgatcagttgttaaagcaagttgaggcactgaagatgggagaactcaaatcttcgacaagagctaggaaggataattccaatcatcttaccaaaactgggaaactgagggcatctnnatatgaagggtatcaaggactgtgnacttttaatgtgtaggttttatccatttttatt

SEQ ID NO: 368573 - DNA, 1430 bp, Homo Sapiens
  misc_feature (1212)..(1212): n is a, c, g, or t
  misc_feature (1225)..(1225): n is a, c, g, or t
  misc_feature (1346)..(1359): n is a, c, g, or t
tcaggctgtacgcctcggaatttatgggatagcgtttttgcctgtggagagccggccgacgggagcctgcggcggtgcctgttgagctcgcgctgggctgccgggacgttgtctctgatgcggcggcgtgctgcggggatcgtctccggcactggcgcaccatgtcggtcagtgtccatgagacccgcaagtcgcggagcagcacggggtccatgaacgtcaccctcttccacaaggcctcccacccggactgtgtgctggcccacctcaacacgcttcgcaagcactgcatgttcaccgacgtcacactctgggcgggcgaccgtgccttcccctgtcaccgtgccgtgctggcctgcctctagccgctattttgaggccatgttcagccatggccttcgggagagccgggatgacactgtcaacttccaggacaacctgcacccggaggtgctggagctgctgctggactttgcctactcctcacgcatcgccatcaacgaggagaacgctgagtcactgctggaggcaggcgacatgctgcagttccacgatgtgcgggatgctgccgccgagttcctggagaagaaccttttcccctccaactgcctgggcatgatgctgctctcggacgcccaccagtgccgccggctgtatgagttctcctggcgcatgtgcctggtgcacttttgagacgggtgaggcaagagcgaggactttcaacacgcctgtccaaggacacactgctggacctcatctcgagtgatgagctggagaccgaggacgagcgggtggtcttcgaggccatcctccagtgggtgaagcacgacctggagccacggaaggtccacttgcccgagctcctccgcagcgtgcgtctggccttgctgccgtccgactgcctgcaggaggccgtctccagcgaggccctcctcatggcagacgagcgcaccaagcttatcatggatgaggccctgcgctgcaagaccaggatcctgcagaatgatggcgtggtcaccagcccctgtgcccggccacgcaaggcgggccacacgctactcatcctggggggccagaccttcatgtgtgacaagatctaccaggtggaccacaaggccaaggagatcatccccaaggccgacctgcccagcccccggaaggagttcagcgcctcagcgatcggctgcaaggtctatgtgacggggggcaggngctccgagaacgngttctccaagaatgtctgggtgtacgacaccgtacatgaggaatggtcccaggcggcggcccatgctgatttgcccgctttggccatggctcagctgaaactggagaactgcctcctttannnnnnnnnnnnnnaaaccccattcctctgggcagggggccttaccccgagcttcgacctttccggacccccccgggaagccaag

SEQ ID NO: 368574 - DNA, 815 bp, Homo Sapiens
gctataatgctctaaggtcaacacgtgacacccacgtggagaccagggtcggtacagagaccgtccaggcggagtccccaaccacaccaactggttccggtccacggccaaaaagcttttctggttgggaagataaaaattattgctcaagactgcagtctgaagaccttttgcccgaatttgagttatggcctcagtcatcactgggaactgctttgccactcgctcactggtcaacagagagaaaaatgagtccacaggcacggaggtctttcaacatttcagagcaaagtctcccaaattctcgtaaaaaaccctctgctgttatttctgctctcataaatctcatccagggcccattttcaccaccttccatcaaggcctttaatatagttccagaagggatacgattctgtacctcccattctgcagcgactctccctggagaaggaatgagaactccgcccatgtcgaaaatcaccgctctgtaggtgctgcctccaaggtgtgtccatcggtgggacccctggtgcctgcgctgggtgtgtttcaggaaggctgttctccacacccactggagacggggggactggaaacagctcctgacacacatggtgaggctgaggctcgcggagccagggatcccgcgccgtcagccgaggtggattaggacgaggcctctggagcaagcagaggttaactcgcgactgtgcgaaaacctgcagctcagcctaagtgtggcaccccagcgcaagcaatctccacgacgtccttccgctccgacctcctcaaaattgcgtccggaagagcccgct

SEQ ID NO: 368575 - DNA, 1393 bp, Homo Sapiens
  misc_feature (1332)..(1332): n is a, c, g, or t
gcctgggtggcgaattcggcacgaggggaggtcggagcggaaggacgtcgtggagattgcttgcgctggggtgccacacttaggctgagctgcaggttttcgcacagtcgcgagttaacctctgcttgctccagaggcctcgtcctaatccacctcggctgacggcgcgggatccctggctccgcgagcctcagcctcaccatgtgtgtcaggagctgtttccagtccccccgtctccagtgggtgtggagaacagccttcctgaaacacacccagcgcaggcaccaggggtcccaccgatggacacaccttggaggcagcacctacagagcggtgattttcgacatgggcggagttctcattccttctccagggagagtcgctgcagaatgggaggtacagaatcgtatcccttctggaactatattaaaggccttgatggaaggtggtgaaaaatgggccctggatgagatttatgagagcagaaataacagcagagggttttttacgagaattggggagactttgctctgaaatgattgtggagtcctgcatggaagggatctgtaagccagaccctaggatctacaagctgtgcttggagcagctcggcctgcagccctcctgagtccatctttcttgatgaccttggaacaaatctaaaagaagctgccagacttggtattcacaccattaaggttaatgacccagagactgcagtaaaggaattagaagctctcttggggtttacattgagagtaggtgttccaaacactcggcctgtgaaaaagacgatggaaaattccgaaagatttccttgcagaaagtacctcaaaggacttactgggtatccagaccacaggcccattggaactacttcagtttgatcacgggcagtcaaatccaacttactacatcaggctggctaatcgtgatctagttctgaggaagaagcccccagggacactccttccatctgcccatgccatagagagggagttcaggattatgaaagcccttgcaaatgctggagtacctgtccctaacgttcttgatctctgtgaagattcaagtgtcattggcacccccttctatgtgatggagtactgcccagggtctcatctacaaagacccttccctgccagggcttgggagcccagccacagacgagccatattacacttgccatggaacacagtcctgtggcaaaatttcacagtgtgggatcttgcaggctgtgggacttgaagactatggggaagcaaggctcgacaacctgggtgtttcatccagaagagccagaggtgctttgctgttccttgactggggaantttcttacccttggggcgacccctttgctgatgttggctacagctgcctgggtcattaact

SEQ ID NO: 368576 - DNA, 863 bp, Homo Sapiens
agcggctgcccggcgccggcttccgggtggtgcgagcgagatggggcggagggccggtcttgcagagtagctgcggtgagtgggcgtgtgcgccgagcggtctggcccaagggctgggggccggccgagggtcttcgggagcaggccgcagggcgcggagagatcctgggatcgccgtccgccgctgctacccggcatgtcggcggaggcctcgggcccggctgccgccgcggccccgtccctggaagcccccaagccctcgggtctcgagcctggccccgccgcctacggtctcaagccgctgaccccgaacagcaaatacgtgaagctgaacgtgggcggctcgttgcactacaccacgctgcgcaccctcacgggacaggacaccatgctcaaagccatgttcagcggccgcgtggaggtgctgaccgatgccggaggttgggtgctgattgaccggagcggccgtcactttggtacaatcctcaattacctgcgggatgggtctgtgccactgccggagagtacgagagaactgggggagctgctgggcgaagcacgctactacctggtgcagggcctgattgaggactgccagctggcgctgcagcaaaaaagggagacgctgtccccgctgtgcctcatccccatggtgacatctccccgggaggagcagcagctcctggccagcacctccaagcccgtggtgaagctcctgcaacaaccgcagtaaccaacaagtactcctacacccatgcacttcaggatgaccaacctacttaagaacatcgcaggctgttcgaccaagctggcctgcgcttccacggggcggctactcttcctcaagggatgtcctgggggga

SEQ ID NO: 368577 - DNA, 987 bp, Homo Sapiens
agcgggcgtctgcgcagctgcccggcgccggcttccgggtggtgcgagcgagatggggcggagggccggtcttgcagagtagctgcggtgagtgggcgtgtgcgccgagcggtctggcccaagggctgggggccggccgagggtcttcgggagcaggccgcagggcgcggagagatcctgggatcgccgtccgccgctgctacccggcatgtcggcggaggcctcgggcccggctgccgccgcggccccgtccctggaagcccccaagccctcgggtctcgagcctggccccagccgcctacggtctcaagccgctgaccccgaacagcaaatacgtgaagctgaacgtgggcggctcgttgcactacaccacgctgcgcaccctcacgggacaggacaccatgctcaaagccatgttcaaggcggccgcgtggaggtgctgaccgatgccggaggttgggtgctgattgaccagagcggccgtcactttggtacaatcctcaattacctgcgggatgggtctgtgccactgccggagagtacgagagaactgggggagctgctgggcgaaagcacgctactacctggtgcaagggcctgattgaggactgccagctggcgctgcaaggtgagggccttcggagtccccatgcctatgttcctgggaagagctgcccaagcagggtattagagcagaaaaaaggagatatggggtatggcttggagagcctggctttggctggccataaccccagagaatttgaggtgccatcttctgcatccctgccgcctcaggcagcacccccaccccagcctcatgccaggacctttgcaatggttaaatagctgctctctacttcccactgttcctatgcagccagtcctgctgttacactcgcacctgagtaattatctttcagcacaaccccgatctattctctctcttgcttagaaatcctaaatagctccctcatgtcactaagggaa

SEQ ID NO: 368578 - DNA, 765 bp, Homo Sapiens
tgggaaagataaagcaaaaagaaatgcttcttgctgaatgttttcttcttcttatgtgagtaaaattggaccttttaaaattttgctgtaaatcatgatctattagtggcaataaaaaaatccataggttcttagagttgcatctactttacggtaactgagcatgaataaagacagagtgtttcagggacacgattgcttgattttcaagtagggaagtcctgtgatgtcccctgatgtatcacattgaattcactgatgtctggagctgagactgaaatgagagaatgggacacagagcttggaaggaggtaataggaggtaggttgattctgtgtggatttagaatcagctcagaagagtatttgggttcaggaagtgccacgtatctttgctcactttatcagcagtagaggactaaaatctgggcagggtggcagcgggagtcctattgcctgtttgtagaaaagtgactgtgcctgatggcgatctcaagaggaggagacatggcagggaatgaagaaatgcctcggttgataggtcagtcttgcagctgccagaagattgatgctctctcagcatggacttcaaatacacactgattgttctttactgtcaactggccttaattgttctctaaggatcgctgtagatacgcgagatgttggacacggaggcacacctgttttcgattcttgctgaattcaagctgggtgcgggatcgcgagagagtgttcatgtcacagctgtgtgtgtgagtgtggg

SEQ ID NO: 368579 - DNA, 1423 bp, Homo Sapiens
tgataaaactcctttgacctgatgattgctctaagtcctaattgccatatttatattcccatagtaagagtgtttggagatagtgtttgagctttttttgctggtgttaaaaatgcataatgaaagatggcagagagaggcatattatatccaattcatgagttgtttgtgttaacagcaagcttattttaatcacttaacattgttgatttgtctaatcacagtagcgctattgattaggagcctgacctttagatggttgacttgtgagtgtattcaatatggtgaaatatggtgttgatatatggctgcagattttagaggtgtcattagcaaaggtataggagtaaaataggggttatagtattccttactcaaattctgtatgtgctacagctggctggagtctgtggcatgctcattggtgtaagtcggtaaggactatgctttttgctccacatctctgttgtgggaaagctagtctcttgagcattcttgatcagaatggactggaataatttaacttacgtacttagcccaggctattaagtatatatcataatgagtggcattaaagataccagaaacactgactgaggtctccacctgactactggctgaatgatatgggaggctactagccaatatgaataagaggcagtagccaatgtttcttattctgaatggtcccggttgacttctataagagaaatactcagccttttaattgctgaaagcctggcccatagactacgattgccccttcttagtctaggccacccctgaccttacactgcccccccttgagatattattccgtccccggcggttaactcatttggattaccatcttgggctgccctatccccattataaggttgagcaacctagcatgcccaaatctcttgactaatccccaactccgctctttacttctaattcctccataactccgggaattttttaccttgtccaacccgaagggctccgcaaggagggctgttcatttaaaacggaacgcgaattggaataaatggcccaatggattccccccccttggacaaactacttctccttcccccaacaattaacggccgcaggagctttggggaaacccaggagggttgcgcctgggaaaaagcccgggatttaacccgaaagagcccttcttcttaaagacggacaggagcacccatcttaaagccatcggcctcttaattgctggccccgggacacactgcttagaaacatcccgggaaaaattttcacgggggggaaacactggagaaacccacccttgcctaaatcttcgtggggggccgtaatttttcgggcttcctgggccctgtaaccctttctccagggaaacccggctaccccgggagtaaaaacccgccccgagcgggggccatcttctcttggc

SEQ ID NO: 368580 - DNA, 851 bp, Homo Sapiens
  misc_feature (470)..(470): n is a, c, g, or t
atcaggccaaatcggccgagctcgaattcgtcgagagcggaccgcgagatctgacggcgcggctaccatggcggcggcatttgaagcctcgggagccttagcagcagtggcgactgctatgccggctgagcatgtggccgtgcaggtcccggccccagagccaacacccgggcctgtgaggatcctgcggaccgctcaggatctcagcagcccgtcggacccgcacgggggatgtgctgttggcggagccggccgacttcgagtcactgctgctttcgcggccggtgctggaggggctgcgggcggccggcttcgagaggccctcgccggtgcagctcaaggccatcccgctggggcgctgcgggctcgatttaattgttcaagctaaatctggcaccgggaaaacctgtgtgttctccaccatagctttggactctcttgttcttgaacaagcttaagtacccagattntgatcttggctcctacaagagaaattgctgtacagatacattctgttattacagccattggaataaaaatggaaggcttagagtgtcatgtctttattggagggaccccagttatcacaagacaaaaccagacttaaaaagtgtcatattgctgtggatctcctggcagaattaagcaactcatagaactgactacttgaacccaggcagtatacgcctctttattcttgatgaagcagataagctttgagaagaagggagattccaggagcaaataaattggatttattcttccttggctggcagtaaaaggatgcttggcagtatcaggtgacttatcccgaattatgggtaatgggtttggacaaggacatgagagaa

SEQ ID NO: 368581 - DNA, 977 bp, Homo Sapiens
tggtctccctggtttcgtgccttcttgggccccttccgtgccgttgatgtatccctcctgcctgaccgctcatttcgtcgtgtcctcgatgtcacttctgcagctgtccagctatgagagtttcgtcacccctctggttctgaggtccaggcagggccgttccagggtcagcgcgtcgctcgacgttaggcgttgtaccctgtagtactggaattgcttcagggccacgcagccggccttcggggctgagctcctggccccagtgtgcaaacagagaggagtctgtgaagggctcggcctctgcctcctcaggcttggcaggagcctcttgaatgtgctgcttgatgacattctccaggtggtccagccgctcaataatcttcagagtgtcccctttgtcttcctccagcttcttgtcgggcgccggctcctgcccccgcacatacacgctggcgatgtagttggtgacccagcccacgtagagcaggcagatgatgttagtcatgccgctcaggatcacgcaagtggacaccaaagttttggtcttcctggtgcacaccattctgggctccttcctccatatagagctcccgggggcccttccttgtcgtgcgccccgaactcccccgcgctcgcaccccgtagcacgtccggagccgctgggcacctcagcacctgagtcccgaggttctccaaagcccggtccgctgccggtgtagccgccgtgcccaagtttgcagctcctgccgctggccacccggagagaccttgacaaaggaaaccaggtggatttttttccaaattaaaaatccctgaacccttcctagaggggtcacgggtagccggcagccgcgcgtccagatgtgtacgtctgggaaactttgccactgcctgtgtcggcggccacgccgcttcccatcgccagcgccggctgccttggcggtccgaccggcccgcgctgctaggagaaccccgct

SEQ ID NO: 368582 - DNA, 1180 bp, Homo Sapiens
gaggatgggcgaggtgccttagagcacatgcttcgtaaggcatgatcttgagctcatctgcccttcggttcgactgcccagctcagtaacagggaccaggagccagggccagctgaattacacaaactcaaaggatcgcctggaacgcagatatctgaccaagagatcacagaccaagcacatttcatgagaatttaaatgctaggacaatactacctctcccaatagggcttttgaaccctggttttaaataacaggctagatctgttttcccttaccactcattctgcaaaactcaactggcctaaacatttcgctcaatcttgagttctgcaggttggtccctgagagctaggttggccttgggaatttctgctcaattttaagttctcaagaatctgagggcagccgatttagactgaattagagtcatcctataggtcagaaagaaacgaatgctagacaggtcaagagggccagaggttggttctgataatgccatatgacctcaggcacatctttttgagttttagtttccccatctctaaaaacggatgattggacaacagcaagcttaacagactttccaccttgaaaatacggcacttctctgacgcttagaccttaagtcctgaagcgttgttttctcagcaaaaacagtgcaaagtccttacaggaatctaaggtacaagccctgggcaaccatgaaaactttaaacttcatgcaaagcaacgaagttataaatcctccagctgaacaatttcctgatgatgtgagcatccgtttttgtggggcaagcacagaactgagtcctcatctgtctgaggtttagcaggctgctaacatcttctcatccccctctcctctccccaagctttggcagaaacaagccagccagtagggttttctcaacattctccaacaaggaactgagtggactaatactcaggggtaaggacagtgtaccaaagtgtccatgtcctagcattgtttctttccaaaaggcaaacgctatgctttgggacagtgccagcaattaggtgctttgccaaaaataacttgtcccatgtggcccccatggggcagagactaagatggaaattacagagaacatagaaaagccagaggtttacaaagaacaggcttctccacgacctcgtgcggaattcgccacccagc

SEQ ID NO: 368583 - DNA, 1244 bp, Homo Sapiens
  misc_feature (881)..(918): n is a, c, g, or t
cggggccttggtcgttaaaaccttcgtcgcgaggctgcgatggttcttgtgagggcggaatgccacgggccactttactttcgcgtcgccttgcaattaaactgcgaactcttggaccaaagcgcctgtgtccatcccgtcgtcatcgtagtttaggatctcccacatgggcgtctccttcgggattgcgggagccagagtgcgctggaaaaggccataccctcccacaagcatagctccactgctcacgcccacatcagcttggactcgtgcgagtgggcggtcgggggaattggtttcaacctccttcctggccctccccaccaaggagcatatgactgacatggctctaccctgccccctgccccaagcgtaacaagtgaccactgctctctgggggcagccactggcttcaggttcgcctcctactccattgcctccataattacaagatgctcttagcctgactcccacggactcccatcacccagcgcatcggctctctcggtggggagggcagagaatgtttcactgtccctctgtcttctgtggcatcctttgccttgcagccacagcccagctagcccaggccaagggagtccgacccccaccccgaagcacagggaagttgctgccctttcccgcagtgacaggaatcctctcaaaggttctggaaggcaaggatgcggccatccctggagacgccaaggaccatcatgtgaggtggcttttatcctcctcgcccctactggtacagacgagaagaaactgtgactcagaagttaagcattttcccatggtcactgggctacacagaaaggccaggatttgaacccaagcttctgcttccacccatcttcattaggagtcaagttatactnnnnnnnnnnnnnnnnnnnnnnnnnnnnnnnnnnnnnnaagcttcccaagtactgatgtctgtgtccccagcccagaggttctgatatcattgtctgggtgtggcctagccttggatctgcaaaagctccctaggcagttccactgcatgaagttgagaaccactgatacagagtgacctcacctccccaccccaatggaggtgctatggtttgaagagcaaactcatgttgaaatttaactgttcttgcacctcctgcagagcctgggagctcccagtccagcaaggatgttggatctcatggtcctaagtacttctttgacaccccatcccctcagtaaaataggtttgacccttctccacc

SEQ ID NO: 368584 - DNA, 1589 bp, Homo Sapiens
  misc_feature (35)..(35): n is a, c, g, or t
  misc_feature (1158)..(1158): n is a, c, g, or t
  misc_feature (1441)..(1441): n is a, c, g, or t
  misc_feature (1488)..(1488): n is a, c, g, or t
  misc_feature (1506)..(1506): n is a, c, g, or t
tggcgcacgaccactccgccagagccgcacccacnacaccaatcatgtataactttctcatcaatttgagataaccgggctccggggaatttccctgggaatgctgcgaactcgctccgagcacttctagagtggctacggagtaccatctttgtaggaagctacatgagatcgtgctggatggtgtcgcatgggatatttcccgaagatgctactgattgcaagacgctatactcatgactcatcattgcctaagaacgacgccagggatatctccttcagatctaaaaagggtttggcatgtggccttagaagagcaccctgactcagctgtgactctcgtttgcagccacacatatacatatccatgcctgagatgttgtacgaccaggtacttttcttcattccagttgcaatttcttttacaataatataaatggagggatcaccacaacaaagattatctctttggtagctatttaacctgaaagcgtacgagtctttccattatagaagcccctccgttccaaggaagctagcgatggggctaggtcaatcagcagagttgacaacagggcttctttttgtgcaccagcattccccttcagagagcataacatcctgccagcgtgccaagtttgcagctgaccaaacttctaggttgtactggaattattctagtgcaacactgatcctcatatgaatgcgtttcttctgaatgatgttgactacccttctttacaacaaaactgtttccttttgtaatagccaataagacctcttggctgctcttatacttttttctgcacattatcacacgtcacatgagttcttttcccctcctttaagtcttaatttccatttcttattctgggaaattaaacatgtgttttatttaattacccaaaaaccctgaaaaaggaggcttcggaacaactccctccctattaattgaacacacggcaaaatttgaccttccccaatttttacacggtcaagcctggttatacccccctggtgaaaggcagaggcaatcctcctctagacggcttacttttcccccccacaacaaacatctttcccatttttggtacaaacacccctatcccataaagaacaaccggggcacggagatagaagcgcctcccccactagggntctctatctccacagcctcttttagcggcgtgcccccattcccccgtaaccacccctctttttgtccgcaacctgcgttctccccaccaacatatacctcctacgacccaatcgagcggctctcgccaaacttcctttacctcctcaacccaaacgtgcactacccccgccgccgccaagatttttattacgataccttcccgtgcccccggcggagacacccccacaacaggaggccggcgcgataacacaactcatgtcggatattcggcgactacacatnctcaatacgcttcccctcaaccagcggtggggttcgagtcattcccncttaattcctaataaccnatcctttcctcatattgaaaaaacattgagagcccacaatccccctctgaacttactcactagcccccaagactaaaccccct

SEQ ID NO: 368585 - DNA, 550 bp, Homo Sapiens
catgcctagaagccagaacaactccatgttacactgagttcatgctcctatttactgatcacaaatgagctcattaatgtcatcgaaacatttattgtaacctaacagaccatcacagattggaaacttggtagatagcagagcatggtatttagtgaaaaaggttcaaaatacacaagtaacatacactctgaaaaacatgcagataatttgctgatgaagcaagaagaggggatgcgcatggcaagaacttgccttaccccagattctctatatctcatggtttccttttcctcttgactgtctttacgagtgttttttatttgggaccctcgagcccagagatattaatggatatctgtattcaatatttgacaaaatctaatggaaaccatccatttactcatgataaggcttcatcactggatttctgtgtcttcactagaacaccattgtcatctcatattgatcaggtattttaatctagcacttacatattgttgataaatgaaagctgaattgttacttaataaattcactttgtttagta

SEQ ID NO: 368586 - DNA, 1353 bp, Homo Sapiens
  misc_feature (1119)..(1147): n is a, c, g, or t
  misc_feature (1266)..(1302): n is a, c, g, or t
ttgtttaaccacaaatgtgtgtgctattcaccccatattgcccaaattgttcaagggcctcctaagccctttaacctatgaatctcagcaaggaatgttccgcagttgtattctcttttaaggtatccacctaggggggttattgacagccattatcttcccataagctggtaattagaccaaatggaaaaaaagtcttaccaaaatttggctagtaaatattacacaggcaatacacactgttttaaactctacacctatgccgaaattccttggtcttaaatggcgagtaaccaatgtctgtttgagaatctgttttagaggaatagagggggacgtaaagtcgagaaatgcaagtatttgcagtagaaagatgttggtcatctggtggtcttattgggattgagggcataggctggaatccttcttcactggctggcagtgatgggcttgatgtccaaaagtaaacaagatcttgtcgttctgtcatgctcatcttctctactattgaccagaaccaacgcttgaactgcagaagcttctcagcattttctcctaagaatgaagaatgtaaataaaatatactataccagttgttgttattatctgtagaatattactaatcttcttataataaaaggatacagattaaaacattatttaagacttgggggggagcgtctaattcctaatacaagaaattaagagcatttgcataatgcaaaacctctacagttcattagtcaatcctgactcaatatgaccaaaacaaatgaaccaccagccttaaaactgatattcacatgagttttatctcatctgtatgtcagtattcttatgatctcaagaaatgcagattctcattcattcactgggtggggaatgcagagaggggagaccagagattctgcctgtctaaaacgctttcagatgatgccaatgctactgatctgaggatcatacttggagtggcaagatcttaggcagtttatttggatactgttttccttcctaaatttttggtttgtaaatgagacaaattcttattagtattaaaaactgtattacaaggtagcacaaaaactattacaatatataatttggctgaagctgcttgcnnnnnnnnnnnnnnnnnnnnnnnnnnnnncagtacctttgtgtacataataatcttggaatataggtataatcctttcacagagaacttcttggagcttctaatgtaccgctctcgacgaattcgagctcggccgatttggcctgatnnnnnnnnnnnnnnnnnnnnnnnnnnnnnnnnnnnnncggccgccaccgcggttaacccaggtccccatagtaggttcaatattcata

SEQ ID NO: 368587 - DNA, 2022 bp, Homo Sapiens
gggcacatggacgggaaaatggagctgatagtatcctggatcttggattagtagactcctcagaaaaggtacagcaggaaaaccgaaagcgccatggctctagtcgaagtgtagtagatatggatttagatgatacagatgatggtgatgacaatgcccctttgttttaccaacctgggaaaagaggattttatactccaaggcctggcaagaacacagaagcaaggttgaattgtttcagaaacattggcaggattcttggactatgtctgttacagaatgaactatgtcctatcacattgaatagacatgtaattaaagtattgcttggtagaaaagtcaattggcatgattttgctttttttgatcctgtaatgtatgagagtttgcggcaactaatcctcgcgtctcagagttcagatgctgatgctgttttctcagcaatggatttggcatttgcaattgacctgtgtaaaaaagaagggggaagacaggttgaactcattcctaatggtgtaaatataccagtcactccacagaatgtatatgagtatgtgcggaaatacgcagaacacagaatgttggtagttgcagaacagcccttacatgcaatgaggaaaggtctactagatgtgcttccaaaaaattcattagaagatttaacggcagaagattttaggcttttggtaaatggctgcggtgaagtcaatgtgcaaatgctgatcagttttacctctttcaatgatgaatcaggagaaaatgctgagaagcttctgcagttcaagcgttggttctggtcaatagtagagaagatgagcatgacagaacgacaagatcttgtttacttttggacatcaagcccatcactgccagccagtgaagaaggattccagcctatgccctcaatcacaataagaccaccagatgaccaacatcttcctactgcaaatacttgcatttctcgactttacgtcccactctattcctctaaacagattctcaaacagaaattgttactcgccattaagaccaagaattttggttttgtgtagagtataaaaagtgtgtattgctgtgtaatattactagcaaattttgtagatttttttccatttgtctataaaagtttatggaagttaatgctgtcatacccccctggtggtaccttaaagagataaaatgcagacattccttgctgagtttatagcttaaaggcctaaggagcactagcaacatttggctatattggtttgctagtcaccaacttctgggtctaaccccagccaaagatgacagcagaacaacataatttacactgtgatttatctttttgctgagggggaaaaaatgtaaatgttctgaaaattcactgctgcctttgtggaaactgtttcagcaaaggttcttgtatagagggaatagggaatttcaaaataaaaaattaagtatgttctgtgttttcattttaactttttttatggtgtttaatttggtggttggctgcaactgtgtatccatgtatatggaacttgtaaaaaagttctcgacattccagatcttaagagatgaaatcacttttacctataaaaaccacttttattgcggtttgactgcattgagctctaggatattaaatgataatcactaatattttgccatgtaaattgcctcatttgagtgagggcactttttttgtacatatgatggggccaatgcacaatacttttatcacaatcaactttttctttgtatccctatttcaatgagcagtcagtctcaagaggttactgcacttcagttctaactagacatttgtactaaggtatttcagttatgtaaactcagcctgggcactttctgataactgtaaaatgttttataagatcatgattattgaagatacattttggaaaattttaaatgttcgtgagcagcttaactacttttgtatctagccttttttaagtatcttgttacatttacttttttaaataaagaaattacagaagaaatgtcaagtag

SEQ ID NO: 368588 - DNA, 1065 bp, Homo Sapiens
ctttctgcttcattatgaagataactacaggaatatataacattagttcctgttttccaccctgtgaatttacctgaattcatagaatccttgcgtgctttaagcaaaaaatgtattttgtattgaaattgattcttatctcaattccagacacctatacagtgctggagacacctaccctacaccacgaaatgccagacagtaattcctagatcaaagtaaatgatctaaagcatgcatcacatctgatctggaagtggtccagaaacaggtgtgttgcatcttctgtagctgtaaatagagattctggaagggtgatactgtttccttttcagggtaaataacccatacttgttatgccatcaagccaagcagcaaatgaataatgtcatgaaaacattattagaacaaattaacaaattacaattacaattatcaaattaacaattagaatatagtagcaccatcattctaaaaatttaaatttgatataaatatacatttccatatcagcctaaatttacaaagtcctataatatgtaggatataaggtcaataagttaagaattccagccttaaggacaattttaaattataatttttattcctcagtcaccactgctaatccttcaatttatttcaaagtaacttctggtttttattacatttggaagataaagcaacttatcacatgtaggttacaacttaaaattcgtgtatgagccattgcttatattttctaaatctgacatgacccagggggtttctactgctcctaccaccacccaggacatgcgatgaagattgtgcacgctaccgtgagggcagaagcaggttagtagctgtaggagctgtcacatggatttactataatgcacttgaaattgtgtatgtgaccttatcaggcatttaaggaccataatctctccttgacctaagaaatcagcttgaagtaattcacttagatttcaaattttaatgtggatacccaaggctgcaaatctgttattcagtacctgctacacttttggggttgcctcttttatgcactgttagaattgctcc

SEQ ID NO: 368589 - DNA, 764 bp, Homo Sapiens
cggtccctctccacgttcatgaacgccttcacaggtaagaccagcatcctgaacagaaactgcttttgggtttgccaggcacacccactggaattcagttagtttctgagaaggaatgaggggagtgggcaattcatgttctagaaaaatttttacctctctctagttgaaggacattagaaatttaatccttcaggaaagccacatggtagcgagattgtaaaaactagcgttttaagaaaacgtatgtgaacttttcccagaaaagttcaaaacaattttctcttggagatatcgctacaatgccagagttagtactaatgttgatgtttgacttttagtaagactgacgatagtggatagggtgacgatgaacagtgcattctgtgggggagtgacattgaagagcgggttaaatccatgctgttacagaatgaggtcatctttgtagatgtatgaaagtctctggagaaacttgagagagtttagatattcgctgaagaaagcccgggtgcccgtcgacgtcgcagatcctgagacgggatgggaaagccggcacttggggttatgagctgggacagtctgctgaggccagggaccagagcatggggccactgccccatcccaagaatagctacagcgttacttttcattctcaatttggtggtcttctccttccaaggagtcttccttgaactcaagttggggtgacagcttctccccacttccctcacgatcccataaattccgggcagtaccagctt

SEQ ID NO: 368590 - DNA, 1079 bp, Homo Sapiens
  misc_feature (300)..(406): n is a, c, g, or t
  misc_feature (762)..(762): n is a, c, g, or t
cgagaaagaccagtggtggtcattgggagagggaagatgaaagaaatagtattcccttatgggaaagatgtcatcagaactcaagtgcagtccttacactaaatatgcaaacccttcaagtttaaatcatcccaattgttctgtaataaatcactgttcatattcagattcagctattatttattggagtatccaccaatttattagaaaccagggattttgtttccatttaaatgatgatgattatgataatggctaaatatagtgagcacctcctgttgtgtatcagacattgttccnnnnnnnnnnnnnnnnnnnnnnnnnnnnnnnnnnnnnnnnnnnnnnnnnnnnnnnnnnnnnnnnnnnnnnnnnnnnnnnnnnnnnnnnnnnnnnnnnnnnnnnnnnnaacttgttcaagatctcaaaactagtaatgatggagatgggattggattccaagttgtttggcttgaggccacactcttgtctctcaattgatgaaatgagatttctttgcttagattcccttcaagattgttgttatgtaaaattctttttatagcctcagaaattgaatctcttagtaaaatgccaattcaaaacaaaatattaaacaatgtttaatacataattcttaagaacatatacttactcaaaaaatttctaagtaacacttttttttaaaggtacagatagtaaatattttaggcttctgggccacatggtattgcaattcagctctgcctctgcagtgctaaaatnggccatagacaatttgtaaatagatgagagtggctgtgttctaatacaatcttatttacaaaaccagcagctgacccaacatagtttgccaacctctgttcgtctacctactttaatgagaagaagtaatgtactctgtcaaaatacttacaagttcaatattttatatccatttccttctttatcaagtctttattaagataacatgaagaaaagttataaattagcacatattttaaataaagttaaataaaacctcatttacttctccaatacaaacatatttccctaatggcaaaatttgctcggcttaaaac

SEQ ID NO: 368591 - DNA, 687 bp, Homo Sapiens
ggatggcaaagcaaaaacctgtcagagtcagttataagattttcagtgccccaaaacataagagaggaccagcttttcctggcattgaaagttgagagacatcagaggacttcatctcctaaaacctaattgagctcacaataatgagttttatagagtcgggccttatagtatccttcgatgtgggtgcatgcgaactaacatactctgcaggagaagggattctgcaagtccccagagcagcgtagccaagaaccacagcttcaggaccacccctcctgagccagggatgataacgggctgggtttctggaagtgtttctcaaagtgaaaacttggtcctccgagatgctctatgaggagtggattccatgacgaaatgttcccctcttagagaacgaaggagcctataagcttattaataagcttattaatggctctaagaagcccttcagtaaagaaacttgcttagcttttttaatccagtatttctccaaatttacttggttataaagcctcccctcctcccatgacccaggcagttatctctgtctttgtaatactgtgtgtcatcggcttaaaaaagaaatacctgtatttggtggtggccagccacgctgggaaagagaaagaggcatgattgattttctgcttcctagaaaaaacagacacacaaaccaaaaaaggg

SEQ ID NO: 368592 - DNA, 958 bp, Homo Sapiens
cggatcccttgctcatgccaggtggagctggagagcatgaccacaggcatcctgacaggtggaaatgaagaagcagcccaagctgctcaggcgagtctcttggggacttgtcactgctgaaggttgggcagaagctgggaggtgtgaaagatgcagatgagaggtggacccattaggaaataaggctcaaggtggggtctccttgggctgggccaaactgcttccccacctgccctgtggggaaggaggaagtggaatgggcggtgtgcagaggcactgaagcatcagtaggcatcactgtggaagaagctgccccagcagtgtcgtggtcacagcagtggccagcatgtagtccagcagacagccagctctcccgcagccaagcctggtctcccccaggagacccagagctatgcttcaccatttcctacagggattcaaacacagctactctctgttctccccatcccactcctcaagtgaggaaactgagggtgaagatgtgtgaatggctcagagctgagctggctccgctggtccttcttagtctcagctggtcctgttctatagtgtcctggctgataatccagcaagtggacatgccactcacagccactcgctccatgcaggacatgaaatgtgatgtccagctgctgcagacgtgtctgtgaagttggcatctccaggaattgagaggtaagtagagcacagattcctcctacaacgaaaggaggaggcagggcagaagtacatggacaggcagacagatacacacacacccagggcctcagaacagtcttcagggcagggacaaggccttggcaaggcgagtccagaaccaagatttggtgcaggggttggtgtagtcgcagacagtgatgaacctcaggatgctggggaactctttcttcattgccttgtacttgatggggatcagtcgcttctgatgggcacctgg

SEQ ID NO: 368593 - DNA, 769 bp, Homo Sapiens
atgcaaaactacactagtactcttttatgagaaaatagttactattttgataaagggcaaggagtaatcaaatagttcattttcagagaaaaatattttaaattgctaatgtacatgattgttttggttataatttatttatagaatgtatcttttctatattacattcttaatattcgccagatattatattgaccattctctttagcttcttaatgtggcatatttctactctcctttcccacaaacagcttcatctgtctccaaggttaacattctgaagctggagagtccttggagaaactctgctcagcttttttgtgacatttagaaaaatgcatttggtattctccaaaccagaatgatacattgtctcaaaatctgttagacagctgatgggtgtttttgagcaacgtcttaataattcagttgtttctgttttaattataccattaaaaatcagctttagctttttaattctagaatttaagcatcagtctgttcttataaaagttaggtttgaagtttataagaatataaaatcttaactcacatttgttgtttaatatttctgtcaaggaaaaaagcccccaaaaattgctatcactctataatcctaagtatttttcttttcaattttgtaagtaaaattatatgactatgttcatacttctctaattttttatataatatttttgttaattttactagtttgtgttttatgcctttagtcattaaaataaaatgcaaatgtgttaattcattgaaa

SEQ ID NO: 368594 - DNA, 1003 bp, Homo Sapiens
agcggagtgtcagtggcgagctccgggtgctgtggcccggccttggcggggcggcctccggctcaggctggctgagaggcgcccagctgcagcgtccccgcccgcctcctcgggagctctgatctcagctgacagtgccctcggggaccaaacaagcctggcaggacaaaattagaagatcaaaatggaaaatatgctgctttggttgatatttttcacccctgggtggaccctcattgatggatcagaaatggaatgggattttatgtggcacttgagaaaggtaccccggattgtcagtgaaaggactttccatctcaccagccccgcatttgaggcagatgctaagatgatggtaaatacagtgtgtggcatcgaatgccagaaagaactcccaactcccagcctttctgaattggaggattatctttcctatgagactgtctttgagaatggcacccgaaccttaaccagggtgaaagttcaagatttggttcttgagccgactcaaaatatcaccacaaagggagtatctgtaaggagaaagagacaggtgtatggcaccgacagcaggttcagcatcttggacaaaaggttcttaaccaatttccctttcagcacagctgtgaagctttccacgggctgtaggtggcattctcatttcccctcaggcatggtctaactgctgcccactgtggtccatgactggacagggactatggtcacacgggagttaaaagctaagggtaaggatggtagaagatgaaggaatacaacagtggagggcagaaaacgtcgagggacccagcaggaggccagtagaaaacgcacggggggtgaaccacagagaaggggtcccgagaaggcacattgagggaagagcgcaaatggcggtgcaaagaacgaggaaaactgggcgcggggaccaaaggaagcgaaaggaggaccccataccgggaaccgggtcaaaaaaccgagtccaagggagagcccagacgcaggg

SEQ ID NO: 368595 - DNA, 1013 bp, Homo Sapiens
  misc_feature (12)..(12): n is a, c, g, or t
  misc_feature (26)..(26): n is a, c, g, or t
  misc_feature (694)..(746): n is a, c, g, or t
agaattaaaagncggacttgatctgnacaacgtacctatctcggattctcaattttcacttcgctggtgtctggccaccatctttaccacatcccggtaagctaacatttgtctaccgcttgagccaccagcgtctgaaaacctggaccggattttgcgcgccgaagaggttagccggaggcggtaatgaattccacccagagggacatgctcctcttgcgcccgtcgctcaacttcagcaccgcgcagccgggcagtgagccatcgtccacgaagttgaacacccccatttggttgagataaagcaccacttcaaattcggtgggggggatgacctcgaggccctcgtagcgattgtccatctcgttgagagagctgatgaaccgcggctcctgcacttccacttccttcagtacgtcggaaactactttgcagacttcccggatagttttggcaatggcagctttcctggcttggcatttttcgttgtagtatttattcagatggtagaccagcttggcctgggccgcaatcatcttggggcagagatccggattgtacaccggagtctcgcagtaagctgtgggatccaatgcggctgctagaagctggagccaacttcggtggagaaacgggccgcacactcagaaatggatcacaatgcctttcggaagtgctgcagcgttggtttccnnnnnnnnnnnnnnnnnnnnnnnnnnnnnnnnnnnnnnnnnnnnnnnnnnnnntttcccttccttttatctttgagcccagccgttcttaaagtgaaagactgtcctcccccctctgcttgtctctcttcctcttttccaagaatccttgtgtgagagaccgcatggagagatcaccttctcaggaattaaacaacaaagttgcgctgagacccagcaagctcttccagtagtcaaaactaagcacccctttccgtatttatttgcgctttcccgtaatcattgtgtgtgcagcactgttaatcaaatggaggaaaagtg

SEQ ID NO: 368596 - DNA, 1054 bp, Homo Sapiens
gcctggggaaagttaaaggagcacagatggacagttgctttctgcatgcaagtggccagctaggatccggggggcatcaagccatgatttttatttctgtgctggatgcattagcagctgtgacttggaaggttttatcctgaaggagtggaattgctgcagacgtcttggggttttggtgagcagtagatatttggggacattgtgctgttattgcagagccccacaatgaagatccaggagcatcccagcctatctgacaccaaacagcagagaaatcaagatgccggtgaccaggaggagagctttgtctccgaagtgccccagtcggacctgactgcattgtgtgatgaaaagaactgggaagagcctatccctgctttctcctcctggcagcgggagaacagtgactctgatgaagcccacctctcgccgcaggctgggcgcctgatccgtcagctgctggacgaagacagcgaccccatgctctctcctcggttctacgcttatgggcagagcaggcaatacctggatgacacagaagtgcctccttccccaccaaactcccattctttcatgaggcggcgaagctcctctctggggtcctatgatgatgagcaagaggacctgacacctgcccagctcacacgaaggattcagagccttaaaaagaagatccggaagtttgaagatagattcgaagaagagaagaagtacagaccttcccacagtgacaaagcagccaatccagaggttctgaaaatggacaaatgacctgtgccaaattccggagaccaacttaaagaatcaaaactaaagatatctgaagaggacctaactcccaggatgcggcagcgaagcaacacactccccaagagttttggttcccaacttgagaaagaagatgagaagaagcaagagctggtggataaagcaataaagcccagtgttgaagccacattggaatctattccgaggaagctccaggagaagcgagcggaaacgcgccctgaggacacttaaggatacacgtcgcgaggtaccggctcgatca

SEQ ID NO: 368597 - DNA, 1669 bp, Homo Sapiens
  misc_feature (1169)..(1181): n is a, c, g, or t
  misc_feature (1247)..(1297): n is a, c, g, or t
ttttagcggaattatgtctcctacacctgtttcaacagagctgtcagaaaatggggaaggtgactttaggtatttgggaatgggagatagtcatatcccaccaccagtaccaagtgaattcaatgatgtttcccagaacacacatctgagacaggaccataattattgtagccccaccaagaaaaatccatgtgaagttcagccagactctctgacaaataatgcctgcgttagaacattaaaacttggagagtccgatgaagactgatattttcgatgagtttttttcctcctcagcattaaatgctttagcaaatgacacattagacctacctcatttcgatgaatatctgtttgagaattattgaattaatgctggttaacttttttcatataatatttattattattagaagaacttacaatgtgttcaggtagtgtttatacactggacttgtgtaattacttgtgtaataaccatgaacaaaatgcaaggtttaacctgtggttctgcccatgaagcatgtaatctttcttacacattaaaatcactgaatgtgttctccttttgggtttcattgtggttcttgtgagagtatgaggatttcaaaatgttaaagatgaaaagtggcgtctagtttctgacagtttgtacagtcggatgcattacataatcagatccgaagttttggtcatgtcagtgttatgagtgatctatgtggaggttaacttcccctggaaacctgttgctcgtggcgcttggcccacggtgcccgagttcttgtcctgtgtacagaatatgcagacaaatgaagggtgaagaagaagaagaggagctttatttagtgttagaacagctcagaaggagacccacagtgagcagctcccctgtgtcggcgggcaggtcgtccctcaagtgttcagctctcagcagagaaaagggcctggagaggggtgaactcctctcgctctcagccgagaaacaacccctggagaaggtagcttccggttccccgggagaatggtccagaagttcctggctgctcttccaaccgggcccctgggaaaaggaatacctttctattccataaagcccgggttgtttctggcccgtcctcttacacgggtcttcttggaaggcctttttttccccaaaaaggggggtgagnnnnnnnnnnnnnggttttccttggggtcgtgtcccaacccccctctctgggccacactttttttggggctctgaaaannnnnnnnnnnnnnnnnnnnnnnnnnnnnnnnnnnnnnnnnnnnnnnnnnncaaagagaaaaaatggtccccaacaccttttatctgggggccctggtgggaaacaaaggggccccccacgttttctcccaaaattccctcacatagagtgggtgggaaaaattgggggaaaacccttggggggcctttcttgaacgccttttatgggggcctcctccccgggttctcaggggggcttttctaaggggctgtttcaccccccggggcgttttgaatcttttaaaagaaccgtgggggccccctatacggcgcggggggaaaacccccgcggttttgcgaaaggcgagaaagaatatctttaagagccctcttgaatatggagggccccccacaaaatctccaaggggagaacccccaaaattt

SEQ ID NO: 368598 - DNA, 996 bp, Homo Sapiens
  misc_feature (154)..(163): n is a, c, g, or t
ggaggtggcgcagcatccccgtgctgggggccacggaccccctgcgcccgggggccctatgtggcgttgtcgctgcacggtcggttgggttcggtgcacctcctggggcgtgcgcctaacgtggtgtagttcgcgcgggggctatggcgggggnnnnnnnnnngttgtcagtggattgtgccctttctgagcggtgtgttcgtgcgggggtggtttggtaccaacgccctgcctgtgtcgcttgcccggggacatccaagcggctcactttacgcttcaagtggccatcatggtccgaaacgcggggaaatactctcggaagacaggttgcgataccccattcgccattccgggtatgcgcattggaacgctttccggccggttcctcggggttggcgatggtcgattcgcctgtggccaggaaggctcgaagggtaaccggttgtgccgacgtgtgtcggcggccccgggtagctgcgccacccggggccgaagggccctgcctcggggatgcagcccgggggacgggacgggcacgctcctcagctgcctgtgtctctgggacttcgcggtccttggcgggttccgcccagccacagggtgtcctggctgcgagctgggctacctgcctcccatgccccgtggcagggagcgggggccacaagcagggcccctgggccaggtgccaggggacgccacggggcatccccagcattgctccccagggacgctagggttccaggctgggggtgggctggcgcaggcaggctccaggcgcgctcccccggggccatagagtcagggtcgcatggcgtgggcgttcggcggctccgaggcaggctcggttaccgccccgcggagatcggccgcaggcggcgatgtgcgtggctccctcccagcccgcgggtctgcgtggagcggggctcggacggagcgcggggcgttctgggcgctccgacgcagctggtgtcccccgaccgccgcgggccccccgct

SEQ ID NO: 368599 - DNA, 938 bp, Homo Sapiens
ctgggtggcgtttctcacacgaggcaggggcggggcctctggtggcggtcgggaactcggtgggaggcggcaacattgtttcaagttggccaaattgacaagagcgagaggtatactgcgttccatcccgacccggggccacggtactgggccctgtttccccctcctcggcccccgagagccagggtccgccttctgcagggttcccaggcccccgctccagggccgggctgacccgactcgctggcgcttcatggagaacttccaaaaggtggaaaagatcggagagggcacgtacggagttgtgtacaaagccagaaacaagttgacgggagaggtggtggcgcttaagaaaatccgcctggacactgagactgagggtgtgcccagtactgccatccgagagatctctctgcttaaggagcttaaccatcctaatattgtcaagctgctggatgtcattcacacagaaaataaactctacctggtttttgaatttctgcaccaagatctcaagaaattcatggatgcctctgctctcactggcattcctcttcccctcatcaagagctatctgttccagctgctccagggcctagctttctgccattctcatcgggtcctccaccgagaccttaaacctcagaatctgcttattaacacagagggggccatcaagctagcagactttggactagccagagcttttggagtccctgttcgtacttacacccatgaggtggtgaccctgtggtaccgagctcctgaaatcctcctgggctgcaaatattattccacagctgtgggacatctggagcctgggctgcatctttgctggagatggggactcgcccggggccctatttcccctggagagttctggggatttgaccagccttcttcccgggatctttccgggactgctgggggacccccat

SEQ ID NO: 368600 - DNA, 795 bp, Homo Sapiens
catgttccagatgaaaggcatcccggcatgtccatgacactctgggagagattgtgaattctggagacatctcttcaggagggatagatgctgggtctcttattgactgaatactcctcagaaactctgggtgtggcctgagaaacgtttacaaaacagtttccattcctcctagcttccagtgtccatctgtcactcacaacacagatgataaacagacattattgtgtgttaggtgtcctctgtcatgaaggaagataagagccagcaatatgtcatagatcccagcacagacctgctgcagaagacaatgtttccaaagccacttccaggggctgtactcgctcagtgacaagatgaatgccatccgcttccacagtacaagataaaaatcttagcaagcaagggtgacgaagtgtcttcaaatgcttggcagctttattaaccttgtcttcattttctctcttatacacaaaaactgaagcaaatttgccatcttgcagtacagcgggataaacagcaagtccagagggtaaggtaaatggtggttctctcagtgtatagctctttaaagcactgttctctgatcccatcccttatgcagtgaggcagtactgccactcttcctcaaagccaagcagatctgcaggaaggcggcgggggaggaggccgagggtcttggctctggtaccctgttggcccccctgttgacaccaaccacccctgcctgcctgtaaggctgtggccactacacccacaatcttctgggggccgggtttctcctacacatccgct

SEQ ID NO: 368601 - DNA, 697 bp, Homo Sapiens
tttgattgtctgaagtggtcttatttgttttttgtctcctccccactctccttctggtatacagtgttcatggtgagcaatggccttctctgacttagccatgtccaaatccccaggaactaaaaatgcctacgacatagaaggcatgcaaaattttgttgaatgtgtgaatatacttggagagtttgtttttggttccgtcttctccttggtaccaaagacaaattaaaatgactctccaaagtaaattatggctctatttagttttaagttcttggactaaatgatctatgcactttttttccactgctgataaatataccatgccctgtggacccccttctctctctgtcactattttgtttcctacatctacaaactaagaaagctaggttatcaatgggtatagggcaatttgctccattcacagtggatgcacactccagattgatcattttgccagtaagaattccctggtatatgtttgcacctacagaatttggttgatacagaggtagccagaaggtattattatagtcaatgatttaagtgttgatgtattaatttgccaataataaaattatcacaaaattgttaaaaaacaggaaataatgagagcccaaactagcaattaatgactgacatattaataagaattttttttaaagttggggcagactggaattacaatacttcc

SEQ ID NO: 368602 - DNA, 1155 bp, Homo Sapiens
  misc_feature (716)..(716): n is a, c, g, or t
  misc_feature (1082)..(1109): n is a, c, g, or t
agcgtgtgtgcgctgcggccggatcctatgttagccggagccggggcggttctgggcgtctgctgccgggggcgcccgagttgccggagacgcccggccctctctgcctgccggctgggctgcccaccgccctccctccccgccctgccgccctgggagctccccggaccgtcgccgcggggcccgggactcgctcgctcctccctccttcccaccgggctagggcggcggcggcagctgggggcggcagagaccatcacgggaggaggcagctgcggcggggccgaatcctaatgtacctggctagctggtggtgagtaggggctttggggccaacttggtgggctccccaaggaaacccctttgaaaccaatggatgcattcacgggctcgggtctcaagaggaagtttgatgatgtggatgtgggcatcatcagtttccaactcagatgatgagatctccagcagtgatagtgctgacagatgcgacagcctcaatcctcctaccactgccagcttcacacaccacaatccatcctgaagcggcagaagacagcgtgcaggaggaagaatgtacgctttgaccaggtgactgtatactactttgcccggcgccaaggttttaccagtgtgcccagccagggtggtagctctctgggcatggcccagcgccataactctgtacggagctatacactctgtgagtttgcccaggnaacgggagtgaaccatccagagattctgcgggagcaccctgaggaaaagcaactccctggccccgaaaatgaagctggacccagaattgggaccgggggagtcccggggaaggctgaaggccccgccccctggcatcgagggggtatacacgcgcacctttcgctgtggcccacccgtttccgccgctaccccctatttccccgccgcctaacaccacgacgcatcacaccgaccccgcccgccccttcacgtggagcctttcgcggggcccacgcgctcttccccgccgtaatgagagaccccccaacgcgtcgcagtcccctcccgtcgccgtatatcgagcccccggcccgcaagaccaccgnnnnnnnnnnnnnnnnnnnnnnnnnnnntatcgcctattcgcgccgtcgacgccggacgccctgctaaaacgtg

SEQ ID NO: 368603 - DNA, 582 bp, Homo Sapiens
  misc_feature (494)..(494): n is a, c, g, or t
attgttagccggagccggggcggttctgggcgtctgctgccgggggcgcccgagttgccggagacgcccggccctctctgcctgccggctgggctgcccaccgccctccctccccgccctgccgccctgggagctccccggccgtcgccgcggggcccgggactcgctcgctcctccctccttcccaccgggctagggcggcggcggcagcgggggcggcagagaccatcacgggaggaggcagctgcggcggggccggtaatgggcctaggggtgcggggcggagggtgccgcctcgtcctttctcgggatcggccctcgggcggccgtggaggagtggtcaagcccagagccgtgcggatggaggggtcagaaatgagaggctcggacgggagcggtcggggggcggggaggtcgggtgccgttgggaaggaaccgagtcgggaagaggcgtgggagcgaggggcaccgaggacgctggcccggactgcggnggcagctcgcgggagaccgatgggcggcttggaagcctgcaggattgcagatgaggattgagttcggaatggagtggagaatgatgta

SEQ ID NO: 368604 - DNA, 1042 bp, Homo Sapiens
  misc_feature (205)..(271): n is a, c, g, or t
cctgaattgaaggcacatccttatggaaattgctactgtttctttccagtgacacagtcgtatttttcaatggtggaatgactacgcatttggatgcttttaggaatgactggactgattctaaagagactgtttgagggaaaagttctctgcctgagatgtatgatttaaagcaataagatggcctcgtagtctcagctactcnnnnnnnnnnnnnnnnnnnnnnnnnnnnnnnnnnnnnnnnnnnnnnnnnnnnnnnnnnnnnnnnnnnctgttaaaacaaaagaaaggaaagataggttcctctgtacactgtcctaacaatgtggctgagatgtggctcaaacttggagaaagagacagaataattgcccatctcttctacacaggacaatcagtaatacataggatggatttaaatacacacaccccacgtaccctcttcagagaagaaatgtatcatgaaaggtgcaacacatttgggatccttacacaaataaattactctagattagggatccctcaagaatgcttccaatcacaaattgctattcaggtggctttgctgtagctgtgctttctcaatgataatacccatgctagcacatgtctgagagagggaatgaatcttggaagaagggatttcatggaaaaaaatgaattgagatgatagaacctactactttaaatccccctttctttgcatagctcttatttttcctgtctgtgactgcctaatataagccaattttaatttaaattcagatcagtactcgcacactactcttgaagttaggttcttataagaaatatcctgggacagaaaacaaatattctaaacaccaaagacagccccaaaccaggtcatatcatatcatagattgggagagaaaacagcaggcaaaagaagaaaaagctggcccctcctcagccacaggagaaactaagtttctcataaacgcttacggtctgatcagcatagctaagggctctctgtggtaaagaaggttatgcaaagaatcgtgaccggtagccgagctca

SEQ ID NO: 368605 - DNA, 877 bp, Homo Sapiens
cagtggctgggggactcctctgctcaccttagtccttgatttcgaaggccccaattaactatctgttgtgtcagaatcggcgagtgcaaagtagctgcgccccgctgacgcgctctctcctgggtccgggtatcccagggcatccggagctggggagggttgtgctggactacccaatggcacgcgcagataccgggcacggaagaagggctccgtgttccaaggatggtcgtttacctctcctgagatcagccctaatcccttggtaacttaagcgcctctgaactcggggagcgcttggtggggcgcctccctgcatccacccctacccctggctccttcccaggcccagcatcttatcccaccatactcacccccgacagccccacggccccgcccgtttagaggcgtgcggtgggcacttggtttccagtaccggcgttcagactgtttattggcgactaactctcgttgtgctggacaaatgcttggttacccgggcggagcgcgttccgtctctgcgcggtccggcccggcgggcggtagctcgctgatccctccggcgacagcctccaaggagcgggcgcgctggcgagaacgttcgtgccaccccgggaccaagccatctggctgctgctccggactcccggtacggcgagagccgccgcgcggacgccaaggccgcgatacgctgtctctgggcctcggatgacggccctgcctgccagcggcacgcgactcctcaagccacagagactcgggcagcgactccacccctgcctctcccagactaggcgcgcccaacgacgcagacgacacgggaacaccaccggccacaagcatcgcctcctcaataccacacgctggtacgccacga

SEQ ID NO: 368606 - DNA, 756 bp, Homo Sapiens
ttcctgggtcttcgtatgaggttcaggtgaggggcaagagactggatggcccaggaatctggagtgactggagtactcctcgtgtctttaccacacaagatgtcatatactttccacctaaaattctgacaagtgttgggtctaatgtttcttttcactgcatctataagaaggaaaacaagattgttccctcaaaagagattgtttggtggatgaatttagctgagaaaattcctcaaagccagtatgatgttgtgagtgatcatgttagcaaagttacttttttcaatctgaatgaaaccaaacctcgaggaaagtttacctatgatgcagtgtactgctgcaatgaacatgaatgccatcatcgctatgctgaattatatgtgattgatgtcaatatcaatatctcatgtgaaactgatgggtacttaactaaaatgacttgcagatggtcaaccagtacaatccagtcacttgcggaaagcactttgcaattgaggtatcataggagcagcctttactgttctgatattccatctattcatcccatatctgagcccaaagattgctatttgcagagtgatggtttttatgaatgcattttccagccaatcttcctattatctggctacacaatgtggattaggatcaatcactctctaggttcactttgactctccaccaacatgtgtccttcctgattctgtggtgaagccactgcctccatccagtgtgaaagcagaaaattactataaa

SEQ ID NO: 368607 - DNA, 1807 bp, Homo Sapiens
ggggggattaaatatggagtattgtcgtggccaggcttacattgtctctagtggattttcttccaaaatgaaagttgttgcttctagacttttagagaaatatccccaagctatctacacactctgctcttcctgtgccttaaatatgtggttggcaaaatcagtacctgttatgggagtatctgttgcattaggaacaattgaggaagtttgttcttttttccatcgatcaccacaactgcttttagaacttgacaacgtaatttctgttctttttcagaacagtaaagaaaggggtaaagaactgaaggaaatctgccattctcagtggacaggcaggcatgatgcttttgaaattttagtggaactcctgcaagcacttgttttatgtttagatggtataaatagtgacacaaatattagatggaataactatatagctggccgagcatttgtactctgcagtgcagtgtcagattttgatttcattgttactattgttgttcttaaaaatgtcctatcttttacaagagcctttgggaaaaacctccaggggcaaacctctgatgtcttctttgcggccggtagcttgactgcagtactggcattcactcaacgaaatgatggaaaaatattgaagttaatcatgaaattttggtttgaggaagccacaaatttggcaaccaaacttgatattcaaatgaaactccctgggaaattccgcagagctcaccaggtaacttggaatctcagctaacctctgagagttactataaagaaaccctaagtgtcccaacagtggagcacattattcaggaacttaaagatatattctcagaacagcacctcaaagctcttaaatgcttatctctggtaccctcagtcatgggacaactcaaattcaatacgtcggaggaacaccatgctgacatgtatagaagtgacttacccaatcctgacacgctgtcagctgagcttcattgttggagaatcaaatggaaacacagggggaaagatatagagcttccgtccaccatctatgaagccctccacctgcctgacatcaagttttttcctaatgtgtatgcattgctgaaggtcctgtgtattcttcctgtgatgaaggttgagaatgagcggtatgaaaatggacgaaagcgtcttaaagcatatttgaggaacactttgacagaccaaaggtcaagtaacttggctttgcttaacataaattttgatataaaacacgacctggatttaatggtggacacatatattaaactctatacaagtaagtcagagcttcctacagataattccgaaactgtggaaaatacctaagagacttttaaaaataggctttcttatatttgatatttggaagaaaaagccgtaaggtgtatgtagaccacttaatcactaaatatctttgcctataggactccattgaatacattagccattgataatctacctgtttaaatggcccctgtttgaactctcaagctttgaagacctacctgttcttccagaagagaacgttgaaagtgccatgtttccttttgcgtgatctctgttgatggcactctggaattgtttcagttaagtcattttagacatagcatttattatccctgtggatctctacttggttgggtgttatggaatttcttcgaagaaatatatttttgaaaaagctgcgggaaggaaaggaatacattttttataacaatggtggaattgaaaccccaccaattggaaccttttgaactaaaataaggagttttttaagataattggttaaaaaaac

SEQ ID NO: 368608 - DNA, 1210 bp, Homo Sapiens
gggagtgccagtgtgactcatccacaatgatttctccagtgctcatcttgttctcgagttttctctgccatgttgctattgcaggacggacctgtcccaagccagatgatttaccattttccacagtggtcccgttaaaaacattctatgagccaggagaagagattacgtattcctgcaagccgggctatgtgtcccgaggagggatgagaaagtttatctgccctctcacaggactgtggcccatcaacactctgaaatgtacacccagagtatgtccttttgctggaatcttagaaaatggagccgtacgctatacgacttttgaatatcccaacacgatcagtttttcttgtaacactgggttttatctgaatggcgctgattctgccaagtgcactgaggaaggaaaatggagcccggagcttcctgtctgtgctcccatcatctgccctccaccatccatacctacgtttgcaacacttcgtgtttataagccatcagctggaaacaattccctctatcgggacacagcagtttttgaatgtttgccacaacatgcgatgtttggaaatgatacaattacctgcacgacacatggaaattggactaaattaccagaatgcagggaaagtaaaatgcccattcccatcaagaccagacaatggatttgtgaactatcctgcaaaaccaacactttattacaaggataaagccacatttggctgccatgatggatattctctggatggcccggaagaaatagaatgtaccaaactgggaaactggtctgccatgccaagttgtaaagcatcttgtaaagtacctgtgaaaaaagccactgtggtgtaccaaggagagagagtaaagattcaggaaaaatttaagaatggaatgctacatggtgataaagtttctttcttctgcaaaaataaggaaaagaagtgtagctatacagaggatgctcagtgtatagatggcactatcgaagtccccaaatgcttcaaggaacacagttctctggctttttggaaaactgatgcatccgatgtaaagccatgctaaggtggttttcagattccacacaaaatgtcacacttgtttctttgttcatcccaggaaacctaattgaaatttaaaaataaagctactgaatttattgccgggaaaaccaaaacacaggaagaaagaaaaaaacattgtgggcggc

SEQ ID NO: 368609 - DNA, 822 bp, Homo Sapiens
ggcagcctgggctcactgtggtggccccatacctgcgcacagtggcttctcaggaatggctggggaaggagcaaatgggagtggccgagagctggcaggtgcaggccaccaggccacatggccccttcctgtcagcagatcccaccaatgaggagcagagcacagggtccctctcgggtccaaagctcctgactctgagccaggctgagggtctcactggctgtgggaccttggctgtcacacctcagcctcccctctgtaaagtgggcttgatagcagtaccccagggtgaaatgcagccagggcacaggcccgggctctgtgaggctcaagagccttggggaactgtcattgtccctgtgtaagcatttccagaaggtgctccctggtgaggctgtgtgggcagagaagcagggaggcctggctccccagaagcaggtcagctgtcaggcaggtggccaggactcagccagaagcttctgcagcaaactggataccgcctcagaggccaggtcctccacggcaaagtactccagctcagggccagggcctccacagcagagtactgccggcaaggggctcggacagcgcgtctactccctcgcggtcccggaggctggagtccaagatctcggtgccacagggctggtttatcccgagacctctctcctgcctggcagacgccagcttctcgctgtgtctgtgtcttcatctcttcttcatataaggacaccagtcccatgggaccagggcccaccctaatggtctccattttaataaatacctcttttaggaccccatctccaataccatcttatctag

SEQ ID NO: 368610 - DNA, 1270 bp, Homo Sapiens
ccttcttcaagaacacctggatatacagccgctcaggccgagtgccgctctgttccaggctaaatgttatcgtggtgtccagcagccgccgacctgtctccacgaggtataggttaatggtgtaggtctgattgaagcaagccagagagtcctttgaactagacttctccgaaaagctccccattgacccatcttcagaactgctagttttctgcacttcattccgacaggccatgactgcagccaccgtcttctccccagtggtggcaaagctcactagggcagtctgtgggaagtttttaagcaaactcagcgttccataatggtactgcagcagagcatagtggcttggggacaagtgcaggaagaactgggcccgggaagcgtccactgggttgggctgggtaggcaggacccggggttggaatccacttccaaattctaagtcgagagactgcagtgggatctgtctcaactcccattccgtctccagagccaaagtttggagggaacgttgagctccggtcaggacacagccaggacagccttcatccaccacaccacaggctccagacaggtgctgcagccacggagttgaaaccctaacctgctgaacaatctctccatcttccacattaaacttgacaatgttcacatggctgaagggaacaactccgagggcccacaccaccccagagccgtaagaatacaccatctggtagtggatgctgtcactttctgggagatgttccacccacttgaggtgcccactggagaggtgatggagggcaagtgtagtcttcttcaggactgcgatgtaccttacagactcctgcaggccaaccagcccaagtgcctggaaactgccactgtccagggttatctcccagttcaggcccccgatgttagtctcccaggaacgcatgattcggcctccattggacacagtgatcacatcctgtccgtgcagcagcatggcatccacagccccttctgccgtgcccttgtcaacatggcgccacaagatctccccagttcgggaatttaatgctgcaatcacattcttctctgtggctacaaccaacttcttggatccaggggaaaattccaaggaggcaaacttgaccttcccaacatattgctgtctccaatcaaacttgcccacttggtcttcgtagaccgcggccgcaggaatcagcagcgtagcccaaagccagaaacgagaagcccactcagccgccatgatgcgagcgcatgcaccgcccccgct

SEQ ID NO: 368611 - DNA, 1376 bp, Homo Sapiens
  misc_feature (450)..(510): n is a, c, g, or t
ttgtggttatgattctggaccacacccgcgggtctggatgtttgggtatcgtcctcgacgattcgtagcacgcccgcgtaagtgattggtgtaccatggcacacccagcgtcttcgtacgtcgtggccccgtacaggccgtgcctcggattggttggccggggacccctcgtcacgacgtaggcccgaacaggcaagatctcggacgacccgggggtccctatttgttgtgtcgtgtgcttttgtgtgcgatttaacctagatacagaatgcatgaagattagagtgttttgaccaatgctgcttgctctgtagtgtcacccactgattaatactatttggcacactctatttttgatgagatacctttcccagcctggggcttggagaatacctgggacatgataatctgtgcgacgtgagcgaggctaatagggattttaggtgtttnnnnnnnnnnnnnnnnnnnnnnnnnnnnnnnnnnnnnnnnnnnnnnnnnnnnnnnnnnnnnatggatggttctatgtaattgttctttcgagtatgatcatctgaatgtgtcccatgcggttggtaagttggatgtgtttgggatacgtgggatggggttcaacgggggccctgacgggtcccgcagttaggctccctgagccctcggcttataaatacaggtcttgctttgtgggtgggtgccagagtcctcatgtggcttggaggaaatctttatttctcaaattaaaataaaattgcagcgagagttgttactgtggtgtgtctgagtcactctaggaaaactgttgccaagtttctgaccctggaaatgtaattctcttccccctcctcaccatttctacctggacagagtctgtttttcttcacacaaacacacatacacacaactgcagaaagaaaaaaaatccaaacaattgccaaaccccaagaactgttgccagagatggaggaaaggggaagaggcctggaaggacacccatcttgctgggcttgtccaaatatatggcttctaagagcctgaaagacattagagctcttttcatccaatttacagacaacgaagccgagagaagtgagttggtgacagagctgagggaaacgtttaggcccccgatgaacggtcctgtgctgtgaaagctaccacactgttctagatcacgcggaatattcagtgggttagtttgtaaagggacactcagtgccctctgccttttccccatcctcttcgttccacaggtctggaagccctggtagctcttcctacaggccatctggccatcaggcagtgggccgttgtgcggaattcgccacgcagccctcggacctggaaagtatgggggcggaagagcggcggcgaggagggca

SEQ ID NO: 368612 - DNA, 674 bp, Homo Sapiens
  misc_feature (361)..(379): n is a, c, g, or t
ttaatcactaaggttggagaatatgtttatttaaacctagtgtctcccttaaattttataactagatttttgaccctcactcatctggctttccttgctatagacatgctttgcatacccagcttctagccacatcttccctaagaaaatttcacctggaatcagttccaaaagaaaatcttaagagatagagtatggatctgcatgttgtcagctacctaaagcagcaaaaattcctagatgagaataaaatcagggaaccttgcagtttaaggcacaccttaaatattaaatttttaatccttcaatgcatccagccaaaacaagaaattgcaaatagctaccatccatcaatgcaagnnnnnnnnnnnnnnnnnnncataataagattggttttaattaaagcacttataaacgatggagttatattttgaactttgtccttttacttaaagcagttagagtcttacacatcataactgccacggctaaccattaaaattttccagctccttaaatgatccatcataaacttgtgcttgctgagttaactggactagaggatagctggagggaaaatgaggcattgcaaaagttacagtaataaaaagtgaatggcttcaaaataaggcagaggacataatggctcattttataataaaagctttcagtat

SEQ ID NO: 368613 - DNA, 475 bp, Homo Sapiens
  misc_feature (23)..(23): n is a, c, g, or t
  misc_feature (40)..(40): n is a, c, g, or t
  misc_feature (413)..(430): n is a, c, g, or t
tcaaaaaggggaaaaaaattaanccaccctaagggttggnagaatatggtttatttaaaaccccctagtgtctccccctaaaattttaaaaacctagatttttgaccccctcacctccatcctggcctttcccttgcctatagaacatgcctttgccataccccagcctcctagcccacatccttcccctaagaaaatttcacccctggaatcagttcccaaaagaaaatcttaagagatagagtatggatctgcatgttgtcagctacctaaagcagcaaaaattcctagatgagaataaaatcagggaaccttgcagtttaaggcacaccttaaatattaaatttttaatccttcaatgcatccagccaaaacaagaaattgcaaatagctaccatccatcaatgcaaggnnnnnnnnnnnnnnnnnncataataagattggttttaattaaagcacttataaagaaaaaaaa

SEQ ID NO: 368614 - DNA, 991 bp, Homo Sapiens
  misc_feature (75)..(679): n is a, c, g, or t
cacgggaaggctttgtcgggtgaacaaaaaatagaggcgggtataaccggttttatacgagcggagggttccgtnnnnnnnnnnnnnnnnnnnnnnnnnnnnnnnnnnnnnnnnnnnnnnnnnnnnnnnnnnnnnnnnnnnnnnnnnnnnnnnnnnnnnnnnnnnnnnnnnnnnnnnnnnnnnnnnnnnnnnnnnnnnnnnnnnnnnnnnnnnnnnnnnnnnnnnnnnnnnnnnnnnnnnnnnnnnnnnnnnnnnnnnnnnnnnnnnnnnnnnnnnnnnnnnnnnnnnnnnnnnnnnnnnnnnnnnnnnnnnnnnnnnnnnnnnnnnnnnnnnnnnnnnnnnnnnnnnnnnnnnnnnnnnnnnnnnnnnnnnnnnnnnnnnnnnnnnnnnnnnnnnnnnnnnnnnnnnnnnnnnnnnnnnnnnnnnnnnnnnnnnnnnnnnnnnnnnnnnnnnnnnnnnnnnnnnnnnnnnnnnnnnnnnnnnnnnnnnnnnnnnnnnnnnnnnnnnnnnnnnnnnnnnnnnnnnnnnnnnnnnnnnnnnnnnnnnnnnnnnnnnnnnnnnnnnnnnnnnnnnnnnnnnnnnnnnnnnnnnnnnnnnnnnnnnnnnnnnnnnnnnnnnnnnnnnnnnnnnnnnnnnnnnnnnnnnnnnnnnnnnnnnnnnnnnnnnnnnnnnnnnnnnnatagtacagtggcgccgcgaccgacaaaggaaagcctccgggaggtcaaaagagataccagagagtgcgtcccgcactggaggaagaggaaggtttttaccaagcagcgagtccagagcccgcgccgtcaacgacgcggtgctgccttttttccgagccgctgcgggagggggccaggacacgctcccttaggagagcgggcgggtcacaaggacctggacagaggcagaactgaggccagcagccagctccgccgctgagtccagccctctgcgcagccgacctgagctggcgtcccgagatagccccgct

SEQ ID NO: 368615 - DNA, 827 bp, Homo Sapiens
  misc_feature (330)..(370): n is a, c, g, or t
gggcttgctgctggaaacgcagttccggttaggcggctgagtttgtttacgttgctaacagatctagcccctgctttccctagttccagttccaagatggggaaatccttcgccaacttcatgtgcaagaaagactttcatcctgcctccaaatccaatatcaaaaaagtatggatggcagaacagaaaatatcatatgataagaagaaacaagaagaattgatgcagcaatatcttaaagaacaagaatcatatgataatagattgcttatgggagatgaacgtgtaaagaatggccttaatttcatgtatgaagccccaccaggagcnnnnnnnnnnnnnnnnnnnnnnnnnnnnnnnnnnnnnnnnnccgaatacaaatttgaatggcagaaaggagccccacgagaaaaatatgccaaagatgacatgaacatcagagatcagccctttggtattcaggttcgaaatgtgaggtgcattaaatgtcacaaatggggtcatgtcaacacagatcgagaatgtcctttgtttggtctttctggaatcaatgcaagttcggttcccactgatggctcagggccatcgatgcacccctcggagctaatagcggagatgagaaacagtgggtttgcactgaaacgaaatgtactggggagaaactggaccgcaaatgatccatcacaggagtatgttgcaagtgagggtgaaacaagatccaaaagttgaatttctcacagtcactaacaaccaaacaaaacagaaacttctcaggacatcagatcgactggacgaagacaacaaggcaacacgatagacaccgagcc

SEQ ID NO: 368616 - DNA, 1049 bp, Homo Sapiens
  misc_feature (749)..(757): n is a, c, g, or t
gggattagataagatgttgccgtcataaggttagtggctagccccaatatgttttctaatccgtgttaaagtgaaaattaaaagtgtcaaaataatgctaaactttgaagacttcagctggaagggaaaaggtagatataaatagagttagattattaggacatttatttggtcgatcaaaaatattgtaaaataaaggatggtaagtttggtgtctcagataactgcagaataataagtgttctagataatgtctgccagccaaatggtttttgggtgacggaaacatactgaagctactatcacatttgggattaaagaaataagtaaaaatagaataggaaaaaaccatattgaagcaaggagtgaaacactaccccatagctcactgaataatactggttactccataatgggggaattgggagggtagcacaatgaacttgccctttgcagaaactatgacaaccagtctaaaagaagaagagcaatatgatgctaaagaaatagaaagattcaaattggaatgggaaaccttatgtcttccgaggcataaactagctcataaacatttaaagtcataactcaatcttaaataaagaaaacaatgcctcatttaacaagaatgaatggcagatagagtggtatgaaagacagatttgtgggcgtgatgtagctcaggacagttaaagagaagtcagtgatctattgactcttgtaagtatagctcttatttctaccctatatcnnnnnnnnnaaacccagtccctctaatatagtttataaagcacagaaatactgatagtggatgctcctccatgatatgcaaataagtttatattttagaataatctcctttttaaaaaaagcaaataaactgtgagtaagcactctcagagtgcagccaaatttctgtaaaactctccatggtaaacatgaagaattatggtccagtttatgaaaaaacactcttctgtatcattcctcaggaaaaggtgacccagcaagtcctgaaaagtgtgctttaatttgtttagcagtgaactaaa

SEQ ID NO: 368617 - DNA, 885 bp, Homo Sapiens
  misc_feature (172)..(225): n is a, c, g, or t
  misc_feature (234)..(346): n is a, c, g, or t
  misc_feature (389)..(519): n is a, c, g, or t
tattcttacccgtttcgctacattcgtattctttaccccgactatgtatacaaatctatttctttaccctcgcttatgtatacatatgtattatatacgtccaccttagtgtatacatatgtattatatatgcacagcttatgtacacatatgtattaaatacgcacagatnnnnnnnnnnnnnnnnnnnnnnnnnnnnnnnnnnnnnnnnnnnnnnnnnnnnnngcatagatnnnnnnnnnnnnnnnnnnnnnnnnnnnnnnnnnnnnnnnnnnnnnnnnnnnnnnnnnnnnnnnnnnnnnnnnnnnnnnnnnnnnnnnnnnnnnnnnnnnnnnnnnnnnnnnnntaggggaattatatttttaaatatattatctcatttaattaannnnnnnnnnnnnnnnnnnnnnnnnnnnnnnnnnnnnnnnnnnnnnnnnnnnnnnnnnnnnnnnnnnnnnnnnnnnnnnnnnnnnnnnnnnnnnnnnnnnnnnnnnnnnnnnnnnnnnnnnnnnnnnnnnnaatcccactccagagcactggctcttcccactcctccgtcaggaccacctatctcttgcccatactacccatgtagccaatgaaggtctgtagaataagagaataaatgacatcgacatccatttgtgagttaaaattgatagcacaagaggacaataccatagtcctgagatcatcccagacatagaatgacatctaatcagaggtgcttagagtcagtccccaatgagaagagacagaatccttccattatgttacttcctcattccttatcatggtcttggatgggcatgacaatttccctcgatataatccatttcttgctggttttatccaagttgttctttagtctactaagggaggtat

SEQ ID NO: 368618 - DNA, 829 bp, Homo Sapiens
tggttctgtgttcttgacgtaattaggaggccacgcagctctccaacactccgttaaacaaatatctctttcttagtgaagcggagagaggggcagaaaacgtgcacctcgccacccaccggacaagccgagaggaccttgtctttgcttgaaaagttttctagataaatcgctcgggtggttctaagctatgacgaactagaggctgggcccggttcttctccagaacagcgtgtggatgtaaaggagatgaaatcgtcctcccccactgctttctttttcttccccatataaatcagtcatataattcattcgcattgtttaaggtacattgatcaatctaatggcttgtaatagtctcctaattgccacttgcagactcctgcaggctcagatttgaagagggaaggttccagccaagtccaccttaagcctgagtttgggcgactacagaatccaggaagaacaatctagcatggcatggtcgctccggatctcagttctacaggggagggaacgcaaagggggtgttagtggggatatttgctgttcatttttcccgcaatctcccttccaaatcagtcactgattaatgagcaaagcccatgccacaagttatagattactgtggactgaggatcattttgttaatatcaggcaagaaacttgccttacttgcatccctgtgtctgtatttacagtaacaacttccttagtcaccaaactgatatgcttttagccatacctttttcttcttacttacttatttatagcatcatcaggagttggggataggacataacatgggggaggggtgtgtaaaagggag

SEQ ID NO: 368619 - DNA, 1015 bp, Homo Sapiens
  misc_feature (467)..(467): n is a, c, g, or t
  misc_feature (619)..(643): n is a, c, g, or t
cacttctgcttctaagaggccagtgttatctggagtccataactggaatggagaatgaaagtccagaactgttatcctgtgctgacagcaaatgcaaaccccgtgtcacacagttaaatcaaagctagtgaaagttggccctctgcgaaccaagtggtattcttcaccaaatgccagcatcgttttcatattacatttaaaatgcactgatattcatttgatagaaatatcatctcccagggtggagtgtaggaaaaatactatagacttttctttgcaagtaatgtttttgcaccgtcagttgaataatttatgctcaatctgccacaatgagacttttctatgtacaaatgctatttgcacacactatttgtgtacagatatgttctgttctacagcatcggttttggacgctggggtcatgagatggctcaggcagtactataaacatacactttcaacacacnatgcctcgtgcacacagatttcctgtatgaataccactccacacagggcattgtattgtggactgactcaccagaaattgcacttccaacacagtcttcagtttggggaagaaacactaactcatgatacaacgaacagctttattcttagnnnnnnnnnnnnnnnnnnnnnnnnnccttgttctttagtctatttacagtcatttgaggaccaaacttgaattcttggctccttctggatctgagactcctcctaaactgtaagcaatagtgaagcagtttgaagtcatttctaagacagctcctagtttaaatggggcataatgtagagaagtaggtagccaaatagggacttgagaaagctttgcaggcagctcttcctcattttgagaggattatgctactccacaggatgtcaagcagcttcacgggacaggagtttttggtgtcttaacaggcttatcattttcaaacctttgtctgttccttctttttcttcttctttgatggcaatcataaaatattaaaagagaaaatgtgggtttagg

SEQ ID NO: 368620 - DNA, 569 bp, Homo Sapiens
agcggcggaagtggtgggaggggggccggtgccccaaggaggaggaccatcgagctaaaggtttgggcatggagaacattggtggcatttttatcgtgctcatctgtggcctcatcattgctgtcttcgtggcggtcatggaattcatatggtccacacggaggtcagctgagtccgaggaggtgtcggtgtgccaggagatgctgcaggagctgcgccacgccgtttcttgccgcaagacgtcgcgttcccgccggcgccgacgcccgggcggcccgagccgggcccgtgctgtcactgcgcgcggtccgcgagatgcgcctcagcaacggcaagctctactcggccggcgcgggcggggatgcgggcagcgcgcacgggggcccgcagcgcctcctggacgacccggggaccgccagcggagcacagcgatcacgagtgtacagactactaattgtggaaacgagaatggcacatactgagaatgagacgacaggggaatacaagatgactagcacgggaaagaggaggcggagaaaaccaaacagcatgaggggaacacagtcaaa

SEQ ID NO: 368621 - DNA, 737 bp, Homo Sapiens
tgagccgccgcgcctagccagttcactttcttaatgatgtcttttgatgatggaaagtcctaactgtaatggagttcgctttcccaatgctgactcttatggttagtgcctttggagtttaagaagcatttcctgctccaagatcatgaagatactctcctctgtcttatggaagcttggttatttttgccttcacatttagatctttcatctaccccagatgaatgctacctgcttttaccctgagaactgtgtttggggggaccatgtacccctgaggggctcttcggggcacacagctcttctcttaccatgggcctcagaggcaggcccggagtgagtttcagactttgtgagtgaagcccttcaaaacacgaaatattcccagaaacccagtaagtgcagcagacctactctaactgggggcagtgggaggacgcccacatcctgccccctcagcccctctctgacaccccagggtggccctgaatccaggggccctaggagcccagctttagaatcaccgcgctgggtactcgatggagcttgtctctgatgcagaacactcctagcattctctctcagggctcttttcattggaagtgacctagaggatcgagctcatggtaggcactgaaggctgccacctctgccatacccgcaaggccgatctggccttcaggtcccagcaagtgtggggcaagcgcgggccacagagtagggtgcagggatggggc

SEQ ID NO: 368622 - DNA, 478 bp, Homo Sapiens
  misc_feature (454)..(454): n is a, c, g, or t
gtaatagcttaatgactcataaatgaagatctgtatacttcccactcgaaaaacggaatattgcaggatttgagtacacaacccgtacctttccaacgacagcctccctcccaccagagcttctgctgagttcacttgaaatcacttccttgcatttatttatacttttattaccttgaggtgcatccctaaccattctagttcgattttgcctggtgtttgaactttatattaatggaatcataggacataattcttatatctctggtttctttcattcaactttgtgtctgcgaaatgtatccatgttgcatgcaacgggggctcattcatcgctggttactgattcactgcatgagtatggacacagtttattaaccattttcactggctggatggaacattggatcaatttctaggtttgggggattattatttataatttttggaaccntcttatttgtgtggcccggtgtac

SEQ ID NO: 368623 - DNA, 558 bp, Homo Sapiens
  misc_feature (477)..(477): n is a, c, g, or t
  misc_feature (512)..(512): n is a, c, g, or t
  misc_feature (539)..(539): n is a, c, g, or t
caaacccagctcgctaaccggcgcgggcagagtacagctcccaggctcccgaagcttcccacatctggaggatgacgaccctcccctgaccacatctggagggcgtccagctgcgagccagcggggcacagctctcttctcctggcctggatccccacccccccaacccaggaagactgagaatcccatcatcgcgtgcacatctcatcccaggagggagagaggagctgccgagtagaaagcagactggctgcagggacagaagacaccaagggcaccctcccccacagctgcgcctggacctcctgcgagaagaggaagccttaggggtctttattgtaccctcaagaccccagagagaaacagaagtgctgaggggtcgcaggcaggtctcttaccctctctgggcctcgaatatttatccataggaggctgacggtaactgcctcgcaacttcatttcattgagggttcaatngggacggacatttgcaagaggggtttggcacattncccagaatttttccaaagccagggttngggttgccaaaaaggccac

SEQ ID NO: 368624 - DNA, 172 bp, Homo Sapiens
gagctgggtccgacatgcctcgtgagcatgctcttctcgaccagcctggtagctgtggtcgtgcgctcgcccgcgggcagcgaaaagaggctgcacattctcaacacgaagcggaactcgaccatatgtgagctgaccttccccacagatatccgcgccgtccgcatgaacc

SEQ ID NO: 368625 - DNA, 918 bp, Homo Sapiens
ggaagagggaaaacaggccaatgtgggtccaaaagcctggtaagtcaggaaataccttagaagcaacataggtgaacactccggaaacttggtggaagatacccgagccttaacagggcacagaagcagcaggagccaaagtggaaccacccagtggaaaagtaaagccagcgaagagaaagtcatgcccatagcagagagagagagggccactgacactggccgggaagcaggtcttaggaaagggcttggcgacacccgcagtgcttccaggatggtcacgatgcacgatgcaccaagcgtgcagtccactgtcattccaaccacctagccacccagcccatgctgggtgctaatcaaaagaggattttacttcgctccccagccatatccacagaagcagctattaagatagaggctggcagcatggtctgtgggtgcagaatactcagccaaagaagacggcagaggtgtaccaaaatctgaataaacatgcatctaggccaccaaaaaacctcaatcaaacaaacgaactgaaagacaccctgtcggaatgagaactgaagtctgactgaacgagtcccttgagcaacccagaaattgaaatcttgattaaccagaatactcggggaatgggaatccttattttggaggctttcaaattagctgaggggaaggttatacacaaacacaaatattttcattttactgctattaacagaactttacactgccattccttgcctcgcactttggagagcagtgggcacagatgaattttctccctaggcctgacattttgtgtggccttggtcctgaaaattagtgaccactgcatagaagcccagatgccaagattactggagactgggccagttactttagaagttagagctttaagattgatttaattttttt

SEQ ID NO: 368626 - DNA, 745 bp, Homo Sapiens
agaatcatgagccaccgtgcccagcaaaagatgattttaaacatttatttaggtgggtaggcaacattctaagataataccctggattaccagtctgttgcacacgtgctgtgtcatactttcctcttgagtgtaaaaaaaatgtgtgactgtggtgggaaatcacttatgaaattaggttactcatccgtagactttgtgtttatcaaaatggagattatcctgattgtgctaaacttaatcagaggtgcttttaagagaaagagacacatcacagaaaaacacccctgctggcctgaaagtaagtgactcctaggtagaacatgttgtaagctgcttatggtggccacatggcgggaaaaatgtttatatcttgccatcatttctgcctcctccatgttgcttccagtaaggaacataagaggattctatggcagagggaaacaaaaagggaatctcattcattcaagaaataatcacctctcatctgggatagcttaagagaaacaggagaccacaacaggtccacattaatgggaggaaaaaggtaacctgggtacaagtgctcactggcattatggaacagtatatagtaagctgtagtgaatgatcagactctgggataccaatagtctaccaatcaaggctgaactcattctaattcaatcagcatgtctgcaccattctggtgacacaggtttacactatatattcacagaaatgccatgaagaccagtgggttatg

SEQ ID NO: 368627 - DNA, 616 bp, Homo Sapiens
caggcggtgaggccgaccttggccaggccgtgggtggcttgcttgactaggccagagagtaaatcagtagaattcccacaggccccatctgtggatgtgaggccaaagtccatcggccccacggcttttccgtgctgggagggaggaaagcagaggacggcacagggaggctgggagggaggaaggaaagcagacgacggcacagggaggtgccctactcgcggttcatgtcatcactttcgctttctgacagttccttgggctgctttaagtggatagcagaggccaccttctagatgtagaaagaaactaaacgtccagagtgtgaactggcctgcttgtatctcccctcggcggcagtggtggttgccagcctggcttgcgtttgcccaaaagtaatagtaaagagctctgaccactgctgctcaccctaaacttggggctgctgtacttgtaggctttggaaagcatggaggggtttccacatattaaaaaggaaaagggcaccaggtctgtgctctgtgaccccatcacgcaacggaatgacacacagctatgaagaatgaggctgctccacatatgctgggactgagaaaggtttttgtgttttgtttcg

SEQ ID NO: 368628 - DNA, 1038 bp, Homo Sapiens
  misc_feature (851)..(860): n is a, c, g, or t
tgtgcggccctgtataatatgtggaatttcgccgggtgccatataaatagtgtgttgtgcatagacctgtaactatttcggcattccaagccagatatgtgacataaaacaaagtgtaaaggttccagtggaacggatcatcgttatgaacctataaagagtcagagaacggtagacacatttctcgggacgtcagcttgctgaccttacctacttgggtaatagtatcctggacaattccattgcctcccttaccagtggctatttgccctactctggaaagcttcactaaaggccagtttccccatacctcaggaacgagcagcgtgattgcacccgaagcagctccgtgcccatctccttgtgacattcattgggggaaatgaaatacaggcaaataaatatgcccattataagtcaccatttatcttgcaaaaacatggaaaatgaaacaatcacaggtgtttgaaaagacaatataaagcatatttcctaaaaccttaaagactactgagtgcaatgctaatctgatgctgaaccataattttatggtagtgagactttcattttttaaaataaaaatttatctaatacctaactggaaaaaacccccaacttttaagattaataaaaagtgttttcccttttagcgcccttttgtgctgatttgtcttttaaattttaactgatcacagtttaatggtatttattttcaatacagttacaagttttttcacctacactttccagtagagtcttttgtgtttggagttaaccgttttccattaagataaggtcaaaattcacttaaactattaacaaggggagaaaggaaggattgaaaatggcannnnnnnnnncacttcatttgccttccttagtgaaagagggggcagaaagctgtccaagtcaagtggtgtattctgcaataaattacaggaaaagagggtgtgggaccctaaatatgacttgataaacaatgagctagtgaagacaaacctgtctactgcgtggagattcgtcagtgtatgctgtggt

SEQ ID NO: 368629 - DNA, 757 bp, Homo Sapiens
tatgggatggcggcaatgaggtcagtgactgccgggagtcctgcaggggcggggcggcgccaagcgcggggagcccggctgagtggcagcctaggtgagcgctcaggtagcccgggtgagggccgggaacccagattgaagatggatacgtgacaatcccagggaccgctgcactgacttcatttccttagacaagacacagtgtagggcccggcccgtgttggccccaggactcctttggaatatagctgtggacaatgaatcctgcgagcgatgggggcacatcagagagcatttttgacctggactatgcatcctgggggatccgctccacgctgatggtcgctggctttgtcttctacttgggcgtctttgtggtctgccacaagctgtcctcttccctgaatgccacttaccgttctttggtggccagagagaaggtcttctgggacctggcggccacgcgtgcagtctttggtgttcagagcacagccgcaggcctgtgggctctgctgggggaccctgtgctgcatgccgacaaggcgcgtggccagcagaactggtgctggtttcacatcacgacagcaacgggattcttttgctttgaaaatgttgcagtccacctgtccaacttgatcttccggaccatttgacttgtttctggttatccaccatctatttgcctttcttgggtttctttgggctgcttggtcaatctccaagctggccactatctagctatgaccacgttgctcct

SEQ ID NO: 368630 - DNA, 650 bp, Homo Sapiens
  misc_feature (345)..(367): n is a, c, g, or t
ggggcttatgcctgtattcccaaagtgctgggattacaggcatgagccaccgcgcccggcctatcgtatgaacttttgagggaacacaaacatgcagtctgtagcaaatggtaataggctgaaataaaacacttgttgatgtaaatctgataggtttctttctctccaaggacagctttttaaatatttaacagtatcaataatttttcaggttctgtgagaattttataatttataatttgcagacttaacgtataatctattttgtcctaacaattacaaatatattttttatttcagattgtatatattcctaccagatggagataattacagctttaaaannnnnnnnnnnnnnnnnnnnnnncagacattgacattaaatttttatggacacataataactgtacatatatatggggtagaatgtgatgttttaatacatgtactcaatgtgtaatgatcaaatcagggtaatttgcataatgatttttctgtagggagaaaattcaaaatctactcttctggctattttcaaatatataatatgttattgttaactatactcatcctactatgcaataggacaccagaacttattcctgggttctacatccgtttaaagcaaccaaggattgggaaatattggg

SEQ ID NO: 368631 - DNA, 631 bp, Homo Sapiens
  misc_feature (13)..(13): n is a, c, g, or t
  misc_feature (33)..(33): n is a, c, g, or t
  misc_feature (79)..(79): n is a, c, g, or t
  misc_feature (106)..(106): n is a, c, g, or t
cattcacatgggncatggattaaactccattcncccccatatattgacagtatatgtgccataaaattaatgcaatgtngaataaatggaaaataaaatttcaaantggaattatctccatctggaggatatatacaatctggaataaaaatatatttgaattggtaggacaaaatagttatacattaagctgcaaattataaattataaaattctcacagacctgaaaaattattgatactgttaaatatttaaaaagctgtccttggagagaagaacctatcagatttacatcaacaagtgtaatatgtcagcctattaccatctgctacagactgcatgtttgtgttccctcaaaattcatatgataggcccggcgcggtggctcatgcctgtaatcccagcactttgggaacacaggcataagccaccacgcctggtcaaaatatctactgtttaagctacctaatttatggtattctgttttagcagctgaagcagactaagataccatcctataagctacagaccagcactatccaatagaactttatatgacgagcaaatgttttatatctgtgctatcccttatgttagcccactagccacatgtatccatcaagtatttgaa

SEQ ID NO: 368632 - DNA, 1301 bp, Homo Sapiens
  misc_feature (62)..(62): n is a, c, g, or t
  misc_feature (347)..(466): n is a, c, g, or t
  misc_feature (468)..(480): n is a, c, g, or t
  misc_feature (1167)..(1167): n is a, c, g, or t
gcagctctcgtcgtacaattctactatgagcaacacacgccctctactccgagggaacgganccggaatacatcagatgagaggactccgcccctaaacttcttacatccgggcccccagcacctccaagattgtccacactgctcgaggccggccggtctcggtcctcagacaatccatgtctagctcctctagcatcttcccagtccatgcctgcccatagccccgcctccgtagccttggccccgcccactccctctaggccacgcttgtgtgcatactggggctcccacctatcctagttgaggagagcagatgtttctcccgtatgcataaggagctcaatnnnnnnnnnnnnnnnnnnnnnnnnnnnnnnnnnnnnnnnnnnnnnnnnnnnnnnnnnnnnnnnnnnnnnnnnnnnnnnnnnnnnnnnnnnnnnnnnnnnnnnnnnnnnnnnnnnnnnnnntnnnnnnnnnnnnngagcttagtccacccttacgtattcccctatcctctcctgctggtgattccttacgatgggggccgactgggttgacccagagccccgaaggggtctctccgcctcttccttccacccaggaggagaaacccctcagggcccatcccagacatgctggccactgcagagcccagcctccagtgaaaccgacaacgaggtgttgtttccccgccggtgcacgagtggtatcgccgttcctcttccaggccccacgacgccccccccgtgtttcgggccactgtggcggttgacgctaattacacgagggcagacatcccgaacaataccactggccttcccctatccccgcgcccagtcgcgtttggctcgcgctctggcgccgacgttagcgactgggtccgcgccgttgcccgcgtgtcctttgcccgccacgcccccaatcctctatctcaccctaatttttaccccccccacgacgtaggcgctctatttaagagttcgcagcatctgtgtgttcggtaccgggtccgcccatttcgaccagctgtattattatatacacatcgccgccgcaccgtgtctctatcacccggtccgcgacgcacagcccgtttctatatcgacgcgagttctccttgccaactcgcccacgccaccgtgacccgcgacgtgtatacgattgtatntagattccatctcgtatgtatttgctccctggcgtttgcttaaccacctgtttgttctcggatcttcgtgcgtttttcccgttccctctttaagtttgccacacacctgtaatgaacttggtatgccgtgtctg

SEQ ID NO: 368633 - DNA, 677 bp, Homo Sapiens
  misc_feature (509)..(509): n is a, c, g, or t
gggagaaagtaggccgctgatgatatattcgggcagaactgttgtggtactggcaataagatatacagctccgagctgtaggagagtcggtctgctttggatgattttttaagcagactcagctgctatacttatcacattttattaaacacagggaaagcatttaggagaatagcagagagccaaatctgacctaaaagttgaaaagccaaaggtcaaacaggctgtaattccatcatcatcgttgttattaaagaatccttatctataaaaggtaggtcagatccccctccccccaggttcctccttcccctcccgattgagccttacgacactttggtttatgcggtgctgtccgggtgccagggctgcagggtcggtactgatggaggctgcagcgcccggtgctctgtgtcaaggtgaagcacatacggcagacctcttagagtccttaagacggaagtaaattatgatgtccagggggagaaggaagataggacgtatttatnaataggtatataggaacacaagggatataaaatgaaagatttttactaatatatattttaaggttgcacacagtacacaccagaagatgtgaaattcatttgtggcaattaagtggtcccaatgctcagcgcttaaaaaaacaaattggacagtacttctgggaaaaa

SEQ ID NO: 368634 - DNA, 951 bp, Homo Sapiens
gccatggagctggtttggctggaacctggcctttgtagggaaaacggggagactcaggagccagactcactcttgggacaaatgagaaagagctgagccagtcgttcctgtcggaagggcgggcctgctcatcctggcgagaatttgcttttctgctttataggggattgcaggccaggcccactgacaggagcaccttgagaaccacctgaacacaagagaatgagggtgccccaaagtggaaggaagcttctggcccctgggccgttttgggaagggcccaggatactcacgggggctgaagggcaatgtgaagagtgactgcaagtcctggcattttctgtggtgtcagcaaatgcccctttattttaaatgattccagacatctgggcagcatagcttggccaccatcactcaggcttgatcctgctgttgagctgctcctgtctcctgtttacctcactcctgttgggaaggcccactcgcatgctcctaggctccagagtcccctgtaggtctctaccagcaggtcgcctctgggagaacgtttcatctccaggctctagaaactcctgttgcggaattgctggctttagtagaacaagatatgtcaggatttagaaatcgtattgaactctcctggacttctgctccatgatttcattttgctttcacgaaccagcgatccctaccttggggtgggaaattcaattgtaggcagcaaataactcaaccctcctgtaacccctgaggattataacgaccccattgacccccgatgacagccagcagtttggtgactagagttttttgagcctgccattctcagtagcaagctttggtctggagatggaacgtggagcagggaatctgacagccacgtttctcgtgatcacgtggactggagttgttttttgttatctgggggtggaaaaattgccaatgatcaag

SEQ ID NO: 368635 - DNA, 947 bp, Homo Sapiens
ggggtaggcgttccgagcggcggcggagattgtccgcagtgactacactcatggcaggtcccctgttggcggaccgcagcatttgtgcagagacacaggacaggcctcttggtgggtccctgtgcaggcctgtcgggagttccagtctcgtaccacctcttcccggatcccgtggtccaatggcctctaccagtactggcctcagggccagccagctccgctccctccacagctgcagagcctcttccaagaggtgctacaggacataggtgttccttcaggccattgctacaagcccttcaccaccttcaccttccagcctgtgagtgcaggcttcccaagactccctgctggggctgtggtgggcatccctgccagtttcttgggagacctagtgatcaacactaaccatcccgtggtcatacatgggcatacagtggactggcggagcccagcaggcgcccggctgagagcttccctgaccttgtcccgtgaagcccagaagttcgccttggccagggaagtggtgtacctggaaagcagtaccactgccgtgcacgccctgctggccccagcttgcctggcagggacctgggcactgggcgtgggtgccaagtacaccctggggctccatgcaggccccatgaatttacgggctgccttcagcttggtggcagcagtgggcaggctttgtggcctacgccttctcccaagattctctcactcatgcccgtgggagtcctggctggaccgccgcacggcctccctctctgcagcctatgcctgtggtggagtggagttctatgagaagcttctgtcgggcaacctggccctgcgcagtctcttgggcaaagagggggagaagctgtatacacccagcgggaacatcgtccccagacacttgttccgaatcaaacatttaccctacaccacccgccggaaaggct

SEQ ID NO: 368636 - DNA, 834 bp, Homo Sapiens
tgaagctcaaggagaagaagatggctttttggatgagtctgtaccagtctcaaagacctgagaagcagaggcaattctaagggtggctatgcaggaaggagccaaagaggggtttgcccccaccatccaggccctggggagactagccatggacatacctggggacaagagttctacccacccccagtttagaactgcaggagctccctgcagcctccaggccaaagctagagcttttgcctgttgtgtgggacctgcactgccctttccagcctgacatcccatgatgcccctctacttcactgttgacatccagttaggccagaccctgtcaacaccacactgtgctcagctctccagcctcaggacaacctctttttttcccttcttcaaatcctcccacccttcaatgtctccttgtgactccttcttatgggaggtcgaccaagactgccactgcccctgtcactgcacccagcttggcatttaccatccatcctgctcaaccttgtgcctgtctgttcacattggcctggaggcctagggcaggttgtgacatggagcaaacttttggtagttgggatcttctctcccacccacacttatctcccccagggccactccaaagtctatacacaggggtggtctcttcaataaagaagtgttgattagacctgaatttctccacctataaaatgggtgtgtgaagtgaatgatgtctcaatttgagccctgagagacagggaagtattgcctgctgttccttaggtgggctgtgcctggatgctacactcagtccaaagggtgctacttgcaaaagttggctggggtaca

SEQ ID NO: 368637 - DNA, 652 bp, Homo Sapiens
  misc_feature (250)..(520): n is a, c, g, or t
agcgtgtgggccaccgcacccggccagaactcaatttttatctgttggtgagataatataggtcaagtatatagccttttggtgttttaacttgatccaattgtagaactttaggaattcagaccccgagatgttaaatgactgtcccctgttttaataggtttcctgagtttcagcataattgtcttagttcactgactagttcttataagcataaccactggggggttacgtgcaaggatttcttcannnnnnnnnnnnnnnnnnnnnnnnnnnnnnnnnnnnnnnnnnnnnnnnnnnnnnnnnnnnnnnnnnnnnnnnnnnnnnnnnnnnnnnnnnnnnnnnnnnnnnnnnnnnnnnnnnnnnnnnnnnnnnnnnnnnnnnnnnnnnnnnnnnnnnnnnnnnnnnnnnnnnnnnnnnnnnnnnnnnnnnnnnnnnnnnnnnnnnnnnnnnnnnnnnnnnnnnnnnnnnnnnnnnnnnnnnnnnnnnnnnnnnnnnnnnnnnnnnnnnnnnnnnnnnnccttgtctcttataaacaatactaagaaggacagacaagaaggactttcctgttggagtggggcgttgcggaaactccagaaagccgagggggcatcgggataagtggcccgtaaaacagctgggggcccca

SEQ ID NO: 368638 - DNA, 717 bp, Homo Sapiens
gggggtcgtgggcgcgtgtgtggaatgggaggaggtcgcgctgtccatgggcgtccttggcctgcgccacccagagatgataaatagccaaagacgtcaatggcacccatggacatagtaagcatagtaggagctgaaaaactagaagcaatgacaatgtcaactattttgagcaaaaagaagcagtgtcttcggaacatttgatcataaaaccagaaattaaaggatgagaaaaacatttttctgaagcttatactttcacatttcctagagagcatatttgtgtggatgggggtgggtaaacactcaacaaaagtttctttaaaaagaagaaaccatcctggtttgatgtaatcaatggctgcccactgctcccttcctgtgcctgtgacaatacccaaactgccctgttgcttgcaagctcgcctgagctgaaaagcagccctcacatacagtcagcacctccctggggccctctttacaccctggagaacttcacagggaatctgtgtctgtaacacaaaggcttcctggtccagatgtagatactaaggctgactggttatttaagtcctgcggacttactctgccaaaattatttaatcatgtaaaataatttataattcttataaagtatccccttcataatataatgaatgttggtgctattacatttaagtgcacatgtacagtatacaagattattcaataataatg

SEQ ID NO: 368639 - DNA, 1333 bp, Homo Sapiens
  misc_feature (595)..(695): n is a, c, g, or t
  misc_feature (892)..(903): n is a, c, g, or t
ggaatgccgtgacatgtattggatcttatctgcagactgttattcttttgcgttttgtatcctctctcctcgtttgctgtggtcttgcctcgatggatactgctgccgttggtgtcagaggcttatatttcttttctgtttcttatccgcagtttcgtgttaattgcactgtgcctctgtggtgtctgtagcgctcctcgattagcgtcaatgctaagctcactatactcttgttatattgtgggtccctggctagacggtcaatggtaatgttatctctcagttcgtatttggttctatcttctgttctctgtttttgttgttctctcgcctcatatcatgtggctcttgattgtgtttactttcgctctgaggttgtgctattctttcactcatatctttatcctctcaagcctctgtcgttgtagctcagcatcacatactggtgctggcttaattttcaattcactctgttcggtagcaccctattagtgttcatgatacactcgtgtttgtcgcgttatagttccggtgtgggcccacgtctactatggtgtcgcattttatgtcgccgcgcccctccttctctctcagnnnnnnnnnnnnnnnnnnnnnnnnnnnnnnnnnnnnnnnnnnnnnnnnnnnnnnnnnnnnnnnnnnnnnnnnnnnnnnnnnnnnnnnnnnnnnnnnnnnnnctgctttgagtccatatattttgtggtcaacctgatacgtccatccacattaaaaggcattctatttctttatgtttttttgtatgttgacaagcagcagtatcatgtttgtcattttaatgtagataccattattaggttatctgtcatattacaatatttaagtttttaaattttatgtcctttaagatacattnnnnnnnnnnnngacacatcaactgcaaacgtgaaggggagaaaaagcatggtacccaaccgaatttccacttttcagcaatacttcactcattcttttaataaagttttaagaaatgtcataatgacatgagcttgaaatatctctaggcattttctttgacgctcatgacgtggcactggtgatgttgtaaacagcagaaaacaggggctgccaaatgaccaaattatggaggcacagtcctgctttttcccacaggaacacaccaaatggtgatggcaatgatcttctcacaccacgctggaggagagcgacatcacgcgacgtagctgtattcatctgccgacgcctggctgcgttctatgtattgtttgtctatccagaacttcaatacacttcttaatcatgctgatactgggattaaacctagctcttgactggc

SEQ ID NO: 368640 - DNA, 537 bp, Homo Sapiens
  misc_feature (11)..(11): n is a, c, g, or t
  misc_feature (35)..(35): n is a, c, g, or t
  misc_feature (73)..(73): n is a, c, g, or t
  misc_feature (95)..(95): n is a, c, g, or t
  misc_feature (97)..(97): n is a, c, g, or t
  misc_feature (106)..(107): n is a, c, g, or t
  misc_feature (380)..(380): n is a, c, g, or t
  misc_feature (527)..(527): n is a, c, g, or t
aagaaattcanctgttccctgaaccctgaaacctnttcgcaacctgcagctggcccccacccagggtgcagtntttgtaggcttctaaggaggtntntggagggtnncccgagccaactgtagtgtctataagagctgtgtggactgtgtcttgcccggaacccccactgtgcctggaaccctaagtcccgaacctgttgcctcctgtctgcccccaacctgaactcctggaagcaggacatggagcgggggaacccagagtgggcatgtgccagtggccccatgagcaggagccttcggcctcagagccgcccgcaaatcattaaagaagtcctggctgtccctaactccatcctggagctcccctgcccccacctgtnagccttggcctcttattattggagtcatggcccagcagcagtcccagaagcctcttccactgtctacaatggctccctcttgctgatagtgcaggatggagttgggggtctttaccagtgctgggcaactgagaatggcttttgatnaccctgtgat

SEQ ID NO: 368641 - DNA, 786 bp, Homo Sapiens
  misc_feature (397)..(397): n is a, c, g, or t
taggcaggccacccaggatgaggggatgatgaccccagcaggcccgtgattagcatggaagagcggataagttattgctccatgttgtggagtttcattgtcagcattgtgatatagcgctcaatggcgatggcgaggagactgaacacggaggctggacagggccactaacatactcccttcccgcagaaaccactgggcgggagtgagcttgtaggtggtggccccagacaagagcaggttagctgtgtaggctactcctgccaacaggtctgagagggccagattgccaataaaatagtacatgggtcggtggaatttcttggttttccaaatggtcagcaagacaaagatgttctccaggatgataaagcagcagatgagaatgaacaccacncgaggtcagtttaatgctgttctccttgtccgcgctgatattcagctttcccgtgtagttgtaatgccggacgatgatatcatagttgacgtagtcagagaccgagctgcggtgggccttgaccagcgggacgctggtgggccccatggtgccaaccctgtgtccccaggaagccggggtggcgctactccagacgaacgctagagggcgaggcgagagagccttcactggcttcaggggtggttcgatgagtgatccaggctttttgtgtagcttttccttggctggagagggcctcggaaaccgcagctcgagtcggggtcccctccctccgcagcggagcactccaatggccagtcccgctcgccgcggccagttccctgcctgct

SEQ ID NO: 368642 - DNA, 1048 bp, Homo Sapiens
  misc_feature (915)..(915): n is a, c, g, or t
agcggagtcggtcgggggcagcagcaagatgcgaagcgagccgtacagatcccgggctctccgaacgcaacttcgccctgcttgagcgaggctgcggtttccgaggccctctccagccaaggaaaagctacacaaaaagcctggatcactcatcgaaccacccctgaagccagtgaaggctctctcgcctcgccctctagcgttcgtctggagtagcgccaccccggcttcctggggacacagggttggcaccatggggcccaccagcgtcccgctggtcaaggcccaccgcagctcggtctctgactacgtcaactatgatatcatcgtccggcattacaactacacgggaaagctgaatatcagcgcggacaaggagaacagcattaaactgacctcggtggtgttcattctcatctgctgctttatcatcctggagaacatctttgtcttgctgaccatttggaaaaccaagaaattccaccgacccatgtactattttattggcaatctggccctctcagacctgttggcaggagtagcctacacagctaacctgctcttgtctggggccaccacctacaagctcactcccgcccagtggtttctgcgggaagggagtatgtttgtggccctgtcagcctccgtgttcagtctcctcgccatcgccattgagcgctatatcacaatgctgaaaatgaaactccacaacgggagcaataacttccgcctcttcctgctaatcagcgcctgctgggtcatctccctcatcctgggtggcctgccctatcatggggctggaactgcatcagtgcgccgtccagctgctcccaccgtgctgccggctctaccacaagcactatatcctcttctgcaccaacggtctttcactctgccttctggctctccatcggncaattctggaactgcagaaatctaccttccttgggtcagggactccggaagccgcccgccctgaaccgttcccgcaaaaaacattttccaaagggacaagccgccaagcttctgaaaaaagatcccccttggc

SEQ ID NO: 368643 - DNA, 1026 bp, Homo Sapiens
cccctgagaatattcaccacaccagcgaacagaatatccctccaaaaattcagctcaccagcaccagcacgaagaaaactctattttcttaaccgattaattcagagccacctccactttgccttgtctaaataaacaaacccgtaaactgttttatacagagacagcaaaatcttggtttattaaaggacagtgttactccagataacacgtaagtttcttcttgcttttcagagacctgctttcccctcctcccgtctcccctctcttgccttcttccttgcctctcacctgtaagatattattttatcctatgttgaagggagggggaaagtccccgtttatgaaagtcgctttctttttattcatggacttgttttaaaatgtaaattggcaacatagtaatttatttttaatttgtagttggatgtcgtggaccaaacgccagaaagtgttcccaaaacctgacgttaaattgcctgaaactttaaatgtgtgctttttttctcattataaaaagggaaactgtattaatcttattctatcctcttttctttcttttggttgaacatattcatgtgttggtttattaataaattaccattcagttctgaatgacacctatatgtctgggatactttaatagagctttaattattacgaaaaaaagatttcagagataaaacactagaagttacctattctccacctaaattctctgaaaaatggagaaaaccctctgactaatcccctgtcaaattttaactaaaaagtctttttgttttaaaatttattttcccggccagcatctttctgcaaaaatggtctaaaataggtccgccttggctttgaggttctgttaaaaaggatatttttttcttaaacctcattgggaagtttggctctattgaaccaaataccgttttcccccacctaactgacacttccccgggattctccgaaaatttttaaagcccccttgaaatcacgcctgcggggtcctttaccccgcgtggatgcccttga

SEQ ID NO: 368644 - DNA, 1320 bp, Homo Sapiens
gcgcgaggcctgggtggcgaattcggcacgaggccgcggccgcgggggctagctcggggtcacgcacgccctgcgccgccaggacccgagcggagcctccccgcggcccggccgcgcctggtcctgagcggtaccatgatgtggggtgcaggcagccctctggcctggctctcagctggctcaggcaacgtgaatgtaagcagcgtgggcccagcagaggggcccacaggtccagccgcaccactgccctcgcctaaggcctgggatgtggtgctctgcatctcaggcaccctggtgtcctgcgagaatgcgctagtggtggccatcatcgtgggcactcctgccttccgtgcccccatgttcctgctggtgggcagcctggccgtggcagacctgctggcaggcctgggcctggtcctgcactttgctgctgtcttctgcatcggctcagcggagatgagcctggtgctggttggcgtgctggcaatggcctttaccgccagcatcggcagtctactggccatcactgtcgaccgctacctttctctgtacaatgccctcacctactattcagagacaacagtgacacggacctatgtgatgctggccttagtgtggggaggtgccctgggcctggggctgctgcctgtgctggcctggaactgcctggatggcctgaccacatgtggcgtggtttatccactctccaagaaccatctggtagttctgggccatggccttcttcatggggtttggcatcatgctgcagctctacgcccaaatctgccgcatcctctgccgccatgcccagcagatggcccctcagcggcaacctgctgcctgcctcccactaatgtgcgccaccccgcaagggcattgccacactggccgtggtgcttggagcctttgccgcctgctggttgcccttcactgtctactgcctgctgggtgatgcccactctccacctctctacacctatcttaccttgctccctgccacctacaactccatgatcaaccctatcatctacgccttccgcaaccaggatgtgcagaaagtgctgtgggctgtctgctgctgctgttcctcttccaagatccccttccgatcccgctcccccagtgatgtctagctgagtcttcatgacccttcaaccctgattactacagaattccagaatgttaggctctccagggccttcttttccaaacccccagctccaaaccccccagaacccagctgggttctgggagttctaagaacattggggtgttttccagggttcctgttcaaattccctatggggggccccacctggg

SEQ ID NO: 368645 - DNA, 789 bp, Homo Sapiens
caagtcatctacaatatgctattgtccagagaaaggaacctggacagaactcgaaggagatgtagcagaaccgttggcaggccctgcctgtgtgacagttattctgccctcttgtgtaccatacaacaaataacaccaggaaactctggaatgaacagtatcacattctaggaagcaatggcaggtgacatcactattataataggaacaatgcattctaatggtacaactgccaaaacccacccttggtttctgatgatttataagtaactacaaaagaaagagacctgttcttgaacagatactatgtctataactcagatcgcaccaaacttcctgtggtgacagactcttccatttcagactggttttaacttatcccagctttacaaaaactcttcatgtgaatcttaacttgcaaaaggagaaagataaaatacagaagactggccccagagagacctcagatcagtattgtgcattgtagtctacctgcatgtgatctatgttgacatttcggggatattgtgttcaagaatgattccaaatttgagccaccaaaatacactgcattacagaaatggccacttgattctgtactcttaacctttggctacttcacagactccagtggcaacactgttatggaaaatcatgtaagattaaagagaggcattttcgtttctatacaacttcatttcatacaccttctggcccttacagcacctcatgggatcacgaaaagagaaaagatggttggctctggtaataaatgctttctaccctata

SEQ ID NO: 368646 - DNA, 862 bp, Homo Sapiens
attaaaactctctatgtaaaagttaaaataaaacatagagttgcctaaactgagaagttttgagtcactgtattggaatttcactccctcgctaatattgtatgtgaaatctgctgtgcaacatttgaaaatgaaattatgtttcctggcatttctgtgataactttttgaattcttactagcagtaagattattctgtatccataaggattaatattacttatcctttaacaacaattagcaattgcccctaaagaatgctgttttagctacagcaacattgaaatctttaaataaatgtctcgtattggtagcaaggcaaaaatggtctaacaattctattggtccattttttaaccaaatactttcatctaaatcaagggttggccaacatctgccccactgtctgtttccgctaacactaaaatttcctttgaaacacagccatgctcattcatttatgtactatcatctgtggcctgctcttgtacttcagctggtcagagttgagctagctcgctgagcaaagactaggatggcccacaaagcctaacaatatttactatcttgtcctttacagaaccaaagttcgccaacatctgatctaacaagataaacgtgcagaatctggctgctctaacaccattctggttcacgaatgaagtcatatacaacttaacatcattaaggcgtgagcacttaatcctgtatcccctacaagacattaattgcatacaatgtacacgtcataggacttgacacatgaataataagctccaatattacaaacagtcttgacatgcgtctcacaggacaagaaccgcactgatccacaccatccagaccagtcagcgaaggcgaa

SEQ ID NO: 368647 - DNA, 761 bp, Homo Sapiens
  misc_feature (20)..(20): n is a, c, g, or t
tgcaggctgtcggcccggangtatggatcccttggcctggccctcgagcagtgatgctggggtctcagcccagtacccaaatctcccagactgtggggtgagcatagccatgaccctgaccctcccatgccagaagaatagggctggggtcagagagagggacctaggacctgcctgaggaagactatatggagaaatggggcacacagctggggtcttgcaggatgagtaggagttcaccagacagagacagagaaactacgtgaaggcctgggaatgaacttggttttcccccaggggtgacagggagccatgggagggttcaaaccaggggaggggcagggtgaagatctggggcttggggtgggggtagctgctggccccagagccagcaggctttgtttacccctcactgtttatacctaggcaggcaaacttccctggcgtctgggcccacccgcagacaagacatagaaagatacaagattaggagccctggaatgcgtgttctcgcggtgcacatggagtgggggaggagccaggccagggctagggacctaaagtgcccccagtctccatcctgcagccccagcggccccctgcccctctccagggctgggctgggatgctgggtgtgggcgtctctccctcctctttacctcccacctgcctctcctttctttcctgccctcagctgtctcttgctgtctcccccctttgtctgtctctgccactcccctatctctttgtctccgtgtcac

SEQ ID NO: 368648 - DNA, 910 bp, Homo Sapiens
catccctcactaccatgatagtctacattctgataagctgtgaggccactgccaagggagggagaaatggtcactttctggtggtggttaatgctctgttagatagcttcatccagtcaatagttgaaaagttttcacataatccagtattggcatcagagccagaaatgccctccctaggtccaggaccaaagataaaacaaacacgaggaacatgtagcgtctacacaggaaagtaaagaattatagaattaactaattctacttgaaatcaggagttttataaaacaacatttttagacgtggtcatcttttattggtttccatcatctcttccccttctctctgggaacagttacccgggtattctttgggaagctatcctttctcagctatgtggtttggcaccaccaccatcttcatgagtggaccctgtttggcttgtgtcaatcagtttatcccatccccttggccacagagccattgtgatattgaagaagaattactggctcttctggaaaaagagaagcttttctctcatcgaagagcttacaagaggaagatatttatctggtccctctggtgtggcacaataaggaaaatgttgagacctagaattataggcacttttttttctgttcaacaggggagaatttctcaaaggccttccagggtggctatcattattgggagcctaaagagataaaaggccaataccaaaaggaaaaaacaggtggaacttaaaaccaggagaagaaaacctaaggtcccttggggtggaaccaattccttttttgggaaggcccaccttaagaacccaaaagcctttttaacccttggaaaagcaagggaagacttaaccccttccaaggaaaacttttttttcagcccttaattggtttggaagccc

SEQ ID NO: 368649 - DNA, 883 bp, Homo Sapiens
ggggcatgcgcgagggcagcgaccgcgactcagtctccgcagagcccgggcgggagtagctggtggaccccgttgagctgccgaacttccgggactcccccgcgaccccttcccagcttcccgtccgctccgccgcagcgattgtctcggtgggttgattcggcacaaaccgcccgacccaggggccggtgcgcgtgtggaaggggaagcactcccctcgtggtcgcctggaggtgcgctggaggagggggtgacataaccagggactcgaggtccgccgtgggaatgatccacgaactgctcttggctctgagcgggtaccctgggtccattttcaccctggaacaagcggagtggcctgcaggtatcgcaggacttccctttcctccaccccagtgagaccagtgtcctgaatcgactctgccggctcggcacagactatattcgcttcactgagttcattgaacagtacacgggccatgtgcaacagcaggatcaccatccatctcaacagggccaaggtgggttacatggaatctacctgcgggccttctgcacagggctggattctgttttgcagccttatcgccaagcactgcttgatttggaacaagagttcctgggtgatccccatctctccatatcacatgtcaactacttcctagaccagttccagcttctttttccctctgtgatggttgtagtagaacaaattaaaagtcaaaagattcatggttgtcaaatcctggaaacagtctacaaacacagctgtgggggggttgcctcctgttcgaagtgcactggaaaacaatcctggccgttgtcatggggtcatgtataaccaggtctcaggctggatgctccatggactcctcttggacca

SEQ ID NO: 368650 - DNA, 1049 bp, Homo Sapiens
  misc_feature (952)..(960): n is a, c, g, or t
ggtccggaattcccgggatattttgattaaataaaaattggctttagtaattcaactttatatttaaaataattttaaacttcctgttatggaaaaatttaacatcgaataatacaacgaatcctcatgtaccatcagcttcagcagttataaacctgtgggcagtctcctttcatctataccattgctcattcccatatctactccgccattaagctaatcacaggtgtcatatcaacttaaaaattaatatgactgaaagcataagctgttgtagttccacatatttgcgtaatgtttattagtttctttcctaagactgtatgtcttaagaaatttgccctttgtattttgtatgtgccatttggggaatataaggaaaagttaaatttctggaaattaatgtgttctatgtgtttagttggaagtaattgttatggtagtatcagcttacttgcttttttgttgttgttgttgcagccgagtgctgttttagaaaataaaaagtaaatttaaaatgtgtttttgagttaagctagatatcaccccagagtactgtgatttttcagttacaatccatttgatatattctgcagtaaaattatatttcatgtacagttttcattttgtattgttccttatatcacaattgcaagtattttggttgttcttgttgatatgtaaagaacaaattaactactccttatttgttcatggtatagacataatgaaagacttcaatatagttgaaacaatcttttccacatttgcctgcttttatgaaaatatcattcattcagagtacttgacatttgaatatgtactgtggaaacttcttctttgatattttctaattctcagctatgttccccaaatggggccttgggattctagggcccggggaaagcataatgtgactggggaataaaaaggcagttaattcccccgaaannnnnnnnnaaatccctggaaaggggaaggaaaattttttaccaaggggcaacagggttaaatttggccccccccttaaaaaattttaaattttgggg

SEQ ID NO: 368651 - DNA, 984 bp, Homo Sapiens
tctggtgataatccaacagttttaaaaacattgtataaaaatggttaaataattatttgtattgccatttgcatggacaacatattggttatgattgattcgttgctgttaacctgtaatgtgagttacagttctacacatagggggaatagaatggcccacatgggcattcaggtttatttaccttctgaacactgaggaatgtcacagacttcgtagcgtacctctggattgcttgtgaaacaccagggtcccccttcgttcccctcgaggatttcgacagtagttttcctgtaggtctttaccccgatagctcgaaggcaaaaagctgtgttcgtgtggtatcatggaactccaagggctggacatgtgatgccactcttaggtgatagatactgttcccttgtagctgcgtcctttacccaatgatgcagtttctaaggtagtcttggttttcatagagggtcaaattcatggccaaattcttttttcactccacttgaccatgctatggaaggggaaccagagggcattgtatttcttgctttatcaaaaacaaaagccttgcaagtgaatggaagtcctttattcctagtacatctattagcacattggtctgcagtattcacttttttggtttttatcttcagtgctggatctattttgattagggtagtctttgctgatttcttgaattcatgaattgtatttcttcttttcctttgtccctctgcataggggatggcgatggggagcaggaggagatgcaggaggacatgctgcagcagcagggctggcaggagtttggtcacccacatggtgctgctggacgggctggcggatccctctggaggagatgcctgggtgaaagaatcctgttcggagtcagtgcctaaaagagccagtcggctctgagctgctttttattgcgatgagctaagtttgttgtgtgattaactggaaagatctaggtctgaactcccc

SEQ ID NO: 368652 - DNA, 691 bp, Homo Sapiens
  misc_feature (22)..(22): n is a, c, g, or t
aaaatacactccacagtgtggnaaaaagcccaagcgtaggggctcaaaggccccattacagaatttttgggagtttaaataccccctagtatgccctatgtaaatggagaggatgaaataaagttacaaagttatttatggcccatgccctatggaaaggtgaagtgtgaagtggtcttatgttttctgcctccagactctattttcctgcctcaatataatgggggagtctcttcaacaaattgtgttacaaaaactgaatatccatattcagaggaataaaactagacctctatctcttgccatctaaaaaaaattaaatcaaaacggattagagacaaatctaagacatcaaactatgaaactactaaaaaaaacattggtgaaactctccaggaaattaaactgaacaaagatgtcttgagtaataccccacaagcacaggcagccaacgcaaaaatgaacaaatggaatcacatcagttaacgagcttctaaacaggaagtgaaacaatcaacaaagtgaagagacaacacataaaatgggagaaaatatctggaaactgcctataaggaattaatatacaagaatacataaggtacacaaacagctctataggataaaatctgatgataatatatagcaaaaaatttgaatagaaatttctcatatatagagcttactaaataac

SEQ ID NO: 368653 - DNA, 690 bp, Homo Sapiens
gcggggcggtcagcctcctgtcaccgcctgttccggctatggtcccgtccggtgttctgtaagttggcaacctaggctcctgacgcgaccctggtcctgatggcggcggcgacggccgcggcagccctggcggcggccgatccccctcccgcaatgccgcaggcggcaggggcccgagggcccacaacccgcagagacttctactggctgcgctcctttctggccggaggtattgctggatgctgtgccaaaacaacagttgctccattggatcgagtaaaggttttattacaagctcacaatcaccattacaagcatttaggagtattttctgcattgcgtgctgttcctcaaaaagaaggattccttggattgtataaaggaaatggtgcaatgatgattcgaatctttccctatggtgcaatccagtttatggcatttgagcattataaaacgttaattactacgaagctgggaatttcaggtcatgtgcacagattaatggctggatccatggcaggtatgacagcagttatctgtacttaccctcttgacatggttagggtccgcctagcattccaggtgaaaggggaacacagctatacaagaattattcatgctttcaaaacaatttatgcaaaggaaggtggttactttgggatatgacgaggtctgatggccactatatta

SEQ ID NO: 368654 - DNA, 668 bp, Homo Sapiens
tgaaatagtcattagacagcacagatctattagatctcgtttgacatttctgcaacccttccaggaacttttggtattgaagaggatccttgttttgactgtttcatttctggtactgagaaccctatcaagctagtaagtattgccatcccacaaagtcctacatcctagatatgcagtaccatcagacacctttgcagttatactccaaataccaccagaacttgagagatttccagttaaggttacaataaatgctttcactttcactgttgtaacttcctttggtttgctggccattagaacagacaaatagacaaagggtggagaatacaaatccatggcaatagaaagattaatgctattctctgatgatcttaaagaacaactctgtaaattacaatcattttcattagaaatttgtgaactccttttctgtacatagttgaccacctctctatttaatattttattatttaaggaatggctatctgaactgctggtttgttttattttattatctgtctctaagttcttttctttatttgtaaaatcatgggctaagggtacattactatgaactgaaaaaatactcctgttttggtctctcacagatggacaaccaatgatttgtcttcattagtcatttgttcagatacatttttttc

SEQ ID NO: 368655 - DNA, 1133 bp, Homo Sapiens
  misc_feature (31)..(31): n is a, c, g, or t
  misc_feature (48)..(48): n is a, c, g, or t
  misc_feature (319)..(335): n is a, c, g, or t
  misc_feature (750)..(758): n is a, c, g, or t
gggacccactgttccccaccctccacagaanggaatccctgtggtganggctcccctctttccaaacatatgcccctcaaacaccctcacatgccagattccccatataagtatacaaataaaacgagttcctgtatttttcccaaataattttacaacttgatggtaaattagatgtcaaagataaaactatgcctttaaaaacattaagcttcaaaattcattcagtgttttaagaaatgaattattaaaatcatttttaaaatgacatattaaatgtatttaaatctgggcttttctgtacttaatttttcttctnnnnnnnnnnnnnnnnncatcaagagctggaacatgctgccaggacagaaataatcagaaatgtcttcagtcacagatcctggacatctcagtgttgcttcatagttttcaaagcttgaagtctctctagcagtggaggatgagaataatgccacattgagaacaaccagtcagaaacagggaatcccaagttatctttgttaagtttgattaaagcagaatataagtctttagccttcccaagtttcttggcaaatgcatcagcttgaaactcaaatctgcggcttaggactgttaggcaaaaagaaagaacctcattgtaaggtgaaaaaataaactggaagatgatcaatagtccaataagagtgggttggctatcataaaaaccaaatgcagcaaaaagctcctttcgaccaattaatacagcaaatnnnnnnnnncacaggaaagaattcatctggctaataatgatatttttgactgtatgtcccaacttccagtgccccagttcatggcctagtacagcgagtacctcctcatttttacatccttgtttcttatttttaactttagcttttatttcttcactgttcccttcttcctcattgcggggttccatgccagaatcctcctggatgtctttgtttagtacagagtactcttctagtagagtgtcaaacaaaactattcgcttgttcttgaagaagccataaaaataagcattgctgtgggaagagcgtttagatccttccacaacatacaccttcgtcaaaggaaagtcaatactctttgccattactcaatttcttctttaa

SEQ ID NO: 368656 - DNA, 1074 bp, Homo Sapiens
  misc_feature (816)..(831): n is a, c, g, or t
cactgaaaattcttatgcttgatgaaaaacttaaggctagcctagaagggccaaacatgtccttattgacaaagctggtctttgtcgcctaattagggtatcctagctatgttccatttctagtaaggggctgtagttagatgactcttgtatagatttcagttacttatgctgaagatccctgtgctaggttagcctttagaagttagagttgtggaaagcagtattgttttcttctctagtgattgttaccctacacatttcatggaagcatcttcacaaaatatcggacacagtggaagggggaaaaaaagctacgagattgtttttacacttttagcaaagtttctgtggatgctagtaatttatacttgatcagttgtattctagtaaagaacctctttggggactgtaggaaagcatgttttcgtggttataaaaacacttaaaaaatcctgataattctgggcttgtataatgcctgttgatcttgccctcttaatcagtttattgttattcacaaatgcaaataggttttcaaactacagacagttttgaacagacattaattcttgttttcttctagtcaggagtaatacaagcaaacaagtgtccgttttgaattctgatttgtaatctgaatactaaacatattagacccacctgaaaataatatagccaatttctaggtaatcttactgctttgtgggtttctttccatgtacatctacctcttccagctgttttaagttttctcaagtctgtgcctatgaaatctcatccaacttttgattattcatggattgattatccgcnnnnnnnnnnnnnnnnggctgccatggctatgcctggtctcgtctgcatcaaatatactacatatcagcaactttagagaatgggttcaacagggagttggagagtgaagctaatgtaaaacagtttagtggcagggggaatctttggacttcatttacctctctcattatttctattaccatggctaaaaaagtcagctgctaagttgatatcccttctgtgagcacattcttagcagaagaaacaatccaactacca

SEQ ID NO: 368657 - DNA, 733 bp, Homo Sapiens
aaatcggctgattatgtcaatcttgccctgaaaaatggagctgtctctctggtcattaagtttgggatcaggcgcctttgaagcactagtggagcctgtgaatggaaagtttaatgataatgcctggcatgatgtgaaagtcaccaggaatctgcgtcagcactcaggcattggacacgctatggtgacaatatcagtggatgggattcttaccacaacgggctacacgcaagaagattataccatgctggggtctgatgactttttctatgttggaggcagtcccagcacagccgaccttccagggtcaccagtcagtaacaactttatgggctgtctcaaagaggttgtatataaaaataatgatgtgaggctggaattatctcgacttgccaagcaaggagatcctaagatgaagatccatggagtggtggcatttaaatgtgagaatgttgcaactttagacccaatcacctttgaaaccccagagtctttcatctctttgcctaaatggaatgcaaagaaaactggctccatatcatttgatttccgtaccacagagccaaatggcctcatcttatttagccatggcaagccaagacatcagaaagatgccaagcacccacagatgataaaggtggacttctttgctattgagatgctagatggccacctctacctcctccagtattgtgtggcggctttatgtttcttctagagccctgtggaaaag

SEQ ID NO: 368658 - DNA, 777 bp, Homo Sapiens
  misc_feature (353)..(365): n is a, c, g, or t
  misc_feature (370)..(370): n is a, c, g, or t
  misc_feature (445)..(445): n is a, c, g, or t
ctccctcagggaaataccgtccattccaaagatttagctggaggagaccatgacttggaaaagggatgatgtgttgatgaaatttgccaaggtcagcatctcaccagggccaccaaaaatggtagtttagattcccgtttaacacgcagtcctgatatcagctcccagtttaaccgttaagcaagtcctgatatcagctacatcagaaatgatacccgacatgtttgattcgatgatgggcagcttgggctagatgaaagatctattctggccttggattgggatcctgagttaaaatgcccaccagaagattttgaaaaatatggaaaccatagacatataaacttccttgnnnnnnnnnnnnnctttntgcgaaattaaaagactgcctcagacccttttcaacacaagaaaactaagtgataaagattcctggtatccaatncgtcaagaagccaccactaagaaattggatgtatgatccctgcctccagtagctgttgcatctcaagtgatttttcttacagtagatccttgagaaacaagttagataacttagttgattttcctatcaatgacttggctgtattggaatttctgattaatccaagcgcagggcctcgctgctataatttgattgctgtttccaaccactatggagggatgagaggaaggccctatactgcttttgcaaaataagcatggtggagatgggattattttgatgattactgtaatgtctcaactgcatctgaaggccagattgtgttcaaagcc

SEQ ID NO: 368659 - DNA, 941 bp, Homo Sapiens
  misc_feature (522)..(522): n is a, c, g, or t
  misc_feature (535)..(535): n is a, c, g, or t
  misc_feature (543)..(543): n is a, c, g, or t
  misc_feature (560)..(560): n is a, c, g, or t
tcacctttatccttgttcttttggggaaacgggagagatgaaggcaacacgctgcttctaaaacagctcatacctggctgctcacacagagggcccagaaacactgggtggcacgaggaagctcctccaggattcagaatgaacccagttccattggtggttaactaagaactacttgtctaagaaagtaagtatcagtagatttttttcaatgctttgaagtgccctaatctctagtactgggtcatggtgaagttggaaagtgagggttcaaataaaattagatctgccccctttttaaaggcatctaagaacatcccgtagaatgttcgcattgagtttaaaagcctttgaagctaatatagaagtttaatgcagaaatgtggcaagcaaaggccaacttgcattttagagacagagcttgctagtatagaagtgcatatttctaagaaatgtcctcagtaaaatccattaataaatactaatagctttttcaaattttttccctcccacgtaaaatgnaaaatggaacttnaagacttnacaaggaatggatgtgnagtgggctatttttttcctaaatgcctcacagtctccaacagctcagttaagcactctgatggtctttatggagaaaaataactctgggggattctcgagtcttcttgccttctacagctttccctgtggcaccctccacccccaaccagtgtctttgagcttggtgagactctgcatacattaatatgaaaagctggaaaagaattaagggctagcaatttctacactgagtacttttaaaaaaataagattgacaatggtattcttttcaatatatggatagaaataatatctaaaatctgttctgaaaatattcctaaatcccgggcagagttctgccccagtctaatgtgataaaatggtccccaccgaccgagcct

SEQ ID NO: 368660 - DNA, 1806 bp, Homo Sapiens
  misc_feature (63)..(63): n is a, c, g, or t
  misc_feature (824)..(833): n is a, c, g, or t
ctttgtttgataagtcattgtcttaaagtgtcattcagctttcccactttaaaaagtatatgnctaattatggtcaattaactatgacagcccacagagcctccagtgacagtaaaatactagacatagaagagataaatgaggatttagatcccctccccccagcatcagcaaagggtcactctgctcccacagctgacgctttgaaacgctttctgtttgtagagactaaaatcacccagcaacaggtcaggtcctgataaagtgcctactgcaagaactaccgacgctcctcttccctggatgtgcaccagggactgtcccgtcttcgagtcagagcagcaccaggaagcagagggtgccaagcatggcgagtcacccccaaatatccaggaagacaagtgggcgcagcccaggggaaaggagggcgagcgaatgatgggaagaccggcacggctagcatcgggacaaagatgcagccgccactttggttcaaacaactttaatgacaccacagtgtctgtcctcccccaagtaactgggtatagtgggtgacagatgttgcagtagcttggcagaccctcctcctccacctcccctgaaagctctccaggcacaaagtggagatagaaataggacaatgaatgaagtccccacctcacatccacagacagtatctccaaaccatcatgaggcaggccacggtatactgaaaacaagcatgctagtcccactttggggaaatggcttaaaaagcacaaatagaaatattaccatcatcatctcttgttccaaacctaaccacctttgggaaaggcagcagnnnnnnnnnntgccttcagttttaataatgaggcttgtaaacaatccaaccacataagcagcagcggccccatggcgtctcagccctcagaccctgtatctctgccgcctgtgcagccctgtctgaaccctggagtggcgctgcctgctcaggagggctctgatctcaccagcaaagccaaagcttcatctttggttaatttcactgagatgccactagtgtaaaaactgtgctcttcttggcaatattactaaagtagccacatggcacataacgtgttattttaagttatttgaaaagcaatgtccatctaaataagtgaccacaccgtaataaaaatcatttaaaaaaggaagggagggaggaatggcagaatgaaagaaggagcttaggagagcctcaggcgtgcagtgtgagtatcctcgtgggtctggggaggcgctgctgacgaaggaagcactggttctctgtaggggtctgaccccagcatcagcttcagctcagctcaaagccagcggcacattcaatcgcatagagaagtttacttcgcaaaagtgtctcgtcatagaactcggggagcttcagcaggttcatgcaggtgctggctgtggggagccgctcaaggtcggagcctccgttgtgaatacaaaatgcgggatacaactccttaaaccccaagagagggggtcgagagcagcttgttacaaacttcagcagtttgcgcttttcttcatcagtgaacccttccacaactctccagaagaccttaataacaggatggtctgcagaatagcctcctgaatagtttgtaaaggattttaggtcctctaggcttatgcgaacttgtgcaccagaaattaatacctgaatttcttgcctgatccaccttcggaaccactcgagcctgacgacacttgcatgcccctggcgcaagccagaccctgctgccggatctgcactgttcacacctgtacctcgacgcc

SEQ ID NO: 368661 - DNA, 891 bp, Homo Sapiens
  misc_feature (320)..(384): n is a, c, g, or t
cggattccgggcgcagccgcggtctgagcccggggcgttgaatgcgtggtggaatttccagtctgggaaggggcggggccttggaccgccgggaagtttggtcctcagcgtgcttccgtcctgcagcatgtccggaagaaggtccgggggctggagtcctgggacctagctcgggaccggcctggagatggagttcgactgcgagggcctgagacggctgcttggcaagtacaagttcagggacctaactgtggaagaactacggaatgtaaatgtatttttcccacatttcaaatattccatggacacctatgtgtctnnnnnnnnnnnnnnnnnnnnnnnnnnnnnnnnnnnnnnnnnnnnnnnnnnnnnnnnnnnnnnnnngctcaagtcatctgcccatctcagcctccccagtaactgggactataggtaatacatataacataccaattcgtttctggattttggattctcaccctttcgctccccctatttgcttcttgaagccaactgcaaatatgggaatcttagtcggaaaacatgtggatgctcaaggcagaactatatttgccctatctccaaaactggagccatcctaaatctgtcattgttggattaattaaaagaacatgattgccaagtttcaagaggaacttcccatgtattctctatcatcatctgatgaggcacggcaggtagacttgctacgcctatattgcaaaaatcactgaaggtgtttcagatacaaattcaaagagctgggcaaatcatgagaatcaaacagtcaataaaattactgtggtttggaggtggagaactcggtattgcctgcacattagcaatttcagccaagggtattgcagacaggcttgtcctcttagacctctc

SEQ ID NO: 368662 - DNA, 1337 bp, Homo Sapiens
  misc_feature (48)..(140): n is a, c, g, or t
ggggtgcgggggggtggggcgtggtgcgcgagtggcgtgtgtgggccnnnnnnnnnnnnnnnnnnnnnnnnnnnnnnnnnnnnnnnnnnnnnnnnnnnnnnnnnnnnnnnnnnnnnnnnnnnnnnnnnnnnnnnnnnnnngcgcgttgtgtgtggccggcggtggctggtgtgtcgtagggctcgtgtggtcaagtggtggagtgaggtgtgcagccgggtgtcgtgggctatttggctttttgtgcgacggtgtcgtggggcgtagtgtggtcacgtatgttgggttgttggcgcagagtagtgcggtccgcattggcatattggtttgtggcagcatgggaggtgacactgtggtttgtgacgcggccacagccattcatgggtgatctgtcaccacatgaggttctgctgcattgagttgtattcatcttggcaactccagtttcgacttgtttcaagtttgatttgtgcttgctgccaaattttagccggggctcttttgttgaatttttggtgttcaaaggcaaactagtaggtctcttgggaaggttctgctgcttggggagaggatagatctgagtaggcagaacatcaggaatcaaacatgcttggccatttgcagtctgtgtgaagtcctgctgtccagttgcttctactgcaagttttatgagtgggtaaagcaagctagaactagtactgctcagtgggtctgggccactgaactgtttaagagagtgctccatgagattctcatcagagctttccttgaggttcttatcaacttcttttgggtctagcttgttggtttccaagtcttcttctgtcagctgtaagcagacaggggttggcccaattgactgtgcaacatttgtggtatgcagatttgtttcatctgggtatggcatctcagatatagtagtcatgccagtacttggcgtgagtcctgtggtgtttgtggttgttgtgttggtggagaggctggtgacacttgtttcagggctggggattcgagcttgtgcttgctgtcgttcatagttaattgaatttcggtttttttccctatagtcaaaggtgtgctggacatagaatgctcagaggaaatattcttcacgatgctgtcagtatgatggatggagtcttcaatgtatgaggaggaagaataatctgggtaaggaccaatttttggcacacgcctattatgtgacaggttgcgttcattctgcatagcagtagacattggattgactgttgggctcacagatttgtttctttcccaaatcatcataagttcagccatcctttcctcagcacactgtgcagtaagccgagactcac

SEQ ID NO: 368663 - DNA, 861 bp, Homo Sapiens
ccgccgacctctgagcgggtcagacgcccttgtgctttttgtttctagggacagagtccccaagtgggtgcacgtgttaatcggaaaagtggtcctggagctggaacgcttcctgccccaagcccttcaccggcgagatccgcggcatgtgtgacttcatgaacctcagcctggcggactgccttctggtcaacctggcctacgagtcctccgtgtgagtgccccaagccggcgcggagtaacgcggggcttgcgggggcccccgacacagactagcgggaggagacatattttccgtgtgataaaaacagggcggtgcctgcttgcctagaaacctccagcgcttcctctttgcctctctgggtaaatctgagctgcacatcgtaggcttcgagagggaaagcagattctccgattcaacactaaactttccctctacgtgtagccccgggttttctcttccccaatccaggttctgcaccagtattgtggctcaagactccagaggccacatttaccatggtcggaattggattatccttttgggaatgtcttacgcaagctgacagtggatgtgcaattcttaaagacatgggcagattgcattcacaggaactacttttattggctatgtaggattatggactggccagagcccacacaagtttacagtttctggtgatgaacgagataaaggctggtggtgggagaatgctatcgctgccctgtttcggagacacattcccgtcagctggctgatccggctaccctgagtgagtcggaaaacttcgaagcagctgttggcaagtggccaagactcccttattgctgatgttattacatgtgggtggcaggtccccc

SEQ ID NO: 368664 - DNA, 502 bp, Homo Sapiens
ggggatcgtttgtcgtctcctttacgtgtggttcgtgcgtggccacgtatgtagaggggtttatgtggccgaaggtgtctcccgggcgcaggaaagtcctcttatggtgctttttacctggtctcttggcgcccgtcatcgtgccacttaccgcatgtcgcagtgccatgcttctgtccgttgtttaccactagcctcatcaccttgctggctgcatgaatcaccattacggccacacggaggctcgccgctaggcgttagtcatctaggagagaacgacgaggaggtgtcggggccgccgcatcgtctgccccaggggcaaggtgggaggggctccgctggcagctggtccccgccgccccggccaggctcagcagcggcccggggagcgcctcctgctcccgggctgcatgcctgcgagcgcctggcggagccggcccgggagcgaacggccagtgcttccccggcccagcggcatcagggcggcagcagccagcgctcg

SEQ ID NO: 368665 - DNA, 695 bp, Homo Sapiens
tgggccaccggggagactgtctgttcccgtccctaccagcagggtgcctgccagcccctcgcccacgtacccaagatgctgaggagcacgggcagcaggagcaggatgtgggtggtgaacacggccaccgcggccacgcagatgagcagggatagcaccaggccgcacagggcgctctgcacccctacgatttccatgaatatctgcttccagtgctcgcaggtctggaagccccggcgcaggactgagccctcgggcaaggcctgcagctgctgctggaggaagctctcccagcgcaggtagtccgagtaggtctggaaggaggatttgcccttgtacgtggtcgactcgaaagccatggagatccactgcacgcggccctccctgacgcccactgccccgtgggacagctgccccgggagcaggttgggctcgggcagctccttgcacatcagggtgcaacatctgcaggaaggaggagatgctgtagcctgaaggcaggcactgggccccacccggcttcaccagctcggagttggctgcgactggccttgcagaggtgacacaggtgcgcctaatttccttgagagagctcaaagctgcctgtcgctagacatcacgtgcctctttcggcaaggagtgacatactcagggccagcgcatgatccagtgtcacgggtagctacagtccctgg

SEQ ID NO: 368666 - DNA, 1118 bp, Homo Sapiens
gggctaatgtagcgaggcctgggtggcgaattcggcacgaggtacgacagcagctttgacctcttcaaggaaatggggcacctgtgtcacctctgcaaggccatcgcagccaactccgagctggtgaagccgggtggggcccagtgcctgccttcaggctacagcatctcctccttcctgcagatgttgcaccctgagtgcaaggagctgcccgagcccaacctgctcccggggcagctgtcccacggggcagtgggcgtcagggagggccgcgtgcagtggatctccatggctttcgagtcgaccacgtacaagggcaaatcctccttccagacctactcggactacctgcgctgggagagcttcctccagcagcagctgcaggccttgcccgagggctcagtcctgcgccggggcttccagacctgcgagcactggaagcagatattcatggaaatcgtaggggtgcagagcgccctgtgcggcctggtgctatccctgctcatctgcgtggccgcggtggccgtgttcaccacccacatcctgctcctgctgcccgtgctcctcagcatcttgggcatcgtgtgcctggtggtgaccatcatgtactggagcggctgggagatgggggctggggaagccatctccctgtccatcctcgttggctcctccgtggattactgcgtacacctggtcgaggggctacctgctggctggagagaactgccccccacagggccgaggacggcccgaacgcagcgccagtggcgtacgctggaggccgtgcggcaccgtggccgtgggccatcgtctccaggtgcgctcaaccagggtcatcggccacaggtggacgcgtcttcttcttgcttcatcggcccatttggccaagttcgggccagcatcggtggcgccccaacaggggcgtggtccatcctcttaaaaggctgaccgggggaaacggcccctgcggggcattcagggggcccagctctttactctcgggaccggaattctttacctcaagaccctggtgccatgagtgtgggaccggccctggcttggtgtgctggctcggggcctcgagcaaggggactaaaatcccgtgcgcaaggggccca

SEQ ID NO: 368667 - DNA, 899 bp, Homo Sapiens
tggagtaaatccaacttcctaatctcaggaactaacaccctaatactcattatcccaatgcatatagtcttgtattatatacattattaacagtctatgcaatgaaaaattaaagaaatttcataaaactatttcaaactcagaacataaaatgtaaagaaacaaacatttaatgtacaatctactccatttgccaatgtgtactgagagatacaacctatctacaaacagaatataacaaaaggaaaatgtgacttaagaagtgatctcaggtccatagctcttcggttcttccaaatttgtagatcagagtgctaaaaaatataagtgcattttgaaaaaacacagctagtcccggataaacatcagtattttgggtaacatatgcaccaaaaagaatccacatggaagcaataagtgacccaaacatcaacatgaaaccaatgaaaagccaaactcgagcacctgttcttcctaaacagccgctttcatagctatcacctctcacctgagcattggatacagcatttatcatgaagaaagccaatgtggaaaatacaccacatgtgtgaaaggcatggttcaactgttctggcttaggatacaccacagctgcatcaatcattatccaccagcctgtaaaaaacaatatacctgcgacaacagatgccacagcatttcttctctcactccagtcaatacattcacattctggccaacgaaaattatctaggaagcctgccatttttacttcttaagcataaatttttcattaaatgctgtatcccagcttcctcaaacgcccacgccgacttcaggcgcgcgcgcaggaaggagactgctgcgccacaaccctgccggcgtcccgcggctccacctcagccccgggagcccccgct

SEQ ID NO: 368668 - DNA, 1031 bp, Homo Sapiens
  misc_feature (709)..(739): n is a, c, g, or t
aacgggcactcgccccacgcctcccctcagccccaccgcgcgctccgcttgcctctccaccccgcccgactctacccggcccggtccctgcgcaggcacagcccagagctctggggcggtgcaggcagcctcgggactctccggcgcgccgccgtcgtccccagacaaaggcttggccggcggccccggcccgctgcgccctcgctccccgcctccccagctcttctccgctcttcccccccgcgcttggctcggcgcgctccggccggccgcaaagtttcccgggcggcagcggcggctgcgcctcgcttcagcgatggccgcggagctgagcatggggccagagctgcccaccaggcccgctggccatggagtatgtcaacgacttcgacctgctcaagttcgacgtgaagaaggagccactggggcgcgcggagcgtccgggcaggccctgcacaaccctgcagccagccggctcggtgtcctccacaccgctcagaacttccgtgtagctccgtgccctcgtcgcccagcttcagcccgaccgaacagaagacacacctcgaggatctgtactggatggcgagcaactaccagcagatgaaccccgaggcgctcaacctgacgcccgaggacgcggtggaagcgctcatcggctcgcacccagtgccacagccgctgcaaagcttcgacagctttcgcggcgctnnnnnnnnnnnnnnnnnnnnnnnnnnnnnnncgcaccacgcgtacccgggcgccggcgtggcccacgacgagctgggcccgcacgctcacccgcaccatcaccatcatcaccaagcgtcgccgccgccgtccagcgccgctagcccggcgcaacagctgcccactagccaccccgggcccgggccgcacgcgacggcctcggcgacggcggcgggcggcaacggcagcgtggaggaccgcttctccgacgaccagctcgtgtccatgtccgtgcgcgagctgaaccgccacctgcggggcttcaccaaggacgaggtgatccg

SEQ ID NO: 368669 - DNA, 871 bp, Homo Sapiens
cccggcgtctgcagccggagcctgcctcgcctggctcctgcgcccgccgtccagggcccctgtccaagctcgcggacgccggcggcgttttccagctcgagtgctcagcctagggcaggctctgcgtgcgccccctcgagtgccggcctgggccctgccaggcagaggcgctcttgcgtcaggacggcgccgccggggccccgcgattccaactcgggggtcccggagcggcgcggggcggggacggcctggcagctcccagcagcgaggggcgatccccgccctgcgcagcatgacccctgagctgcccagtgcccttcctgcgccacgttgtacccagagctccgcccgggggagacttcgctgcttgttggagatgcccaggcggtaagggggcgaggactcgggagtgaagataaacgggggatcccgtgtctggactttctccttccaccctcttcccttcgcagctgtgaatcctgggaggggaaggggtggccgcccccgcagcagagagctgaaggtgtccgtggtcagtgagggctggcactgggctctgcaaggaagatctcctcacctccccagcggctcctgggccaagctccccacggagagcccaggacacttgtcccttggacacaagtggtgcagccattgcttgggccaaaaccatgagtgccaccaagaaccgcgaaaggctacttgtacttgacgaggagatacttgccgaaaatgaagtgccgagagggtttccacaaggcattccctctacactcgcgcgccactaaattctcccacagacccgggtttaacgctgcgggccttgaaggccctggctccccatgatatgacacttcctctgacctaccag

SEQ ID NO: 368670 - DNA, 714 bp, Homo Sapiens
  misc_feature (118)..(118): n is a, c, g, or t
ttataactgtatttttatttggtataattgtttattttgttctaatatttttgatctgcaaattggtttaatccacagatgcagagtacatggatacagagggccaactgttttgctnacaggtacttccaaatagcactacagtacatctttgacaaaatttttacaatattccacctttcaatatgaaacagcttaaaaaggcatgggtcaaaaataaagtatagtagtatcacttacgcaaataaagtctcagaatcatacaagcacaacactgttaggactctccctgtttaggctgggaaaaacattatacaaaacattttcttcaaataaaattacataaattgcttagaaaaatgccaaaatcaataatttcaaacatattaaggagaaaaccttgaacattattggaaaatataaactagttattccttgcttttaacagatgagttcttgacaagttttgtgtaaagcaaattctgtaaaccattatcttgcttgcactggaggaacatatctcaaggaaacctaagagaaagtgttctttaaagcatgtgattctcctgtttttgctggatgtctgtatctacataataaacaggcacacttctacatcactgggtattttactcagactgtcatgtttcatctctgtaaattaaacccaagttacttaaaaatcacctgtggtaaaagaagcaagcagatcac

SEQ ID NO: 368671 - DNA, 1142 bp, Homo Sapiens
gtctattattatcatatgtttattattatgtaagtggggaaaccattttttgaaaatatacatctggcatttgccctactcattgagtggtctgaaatgtcactgttaggtgaaattagaatagcctgggacagtttgcactctcaaaccttgaaaagaaaaaagcttgagttataagattaactatctttccattctttgtaggtttgggaaggtttgcagttgctgctcttcagtccaaagtagaacagtatgagcgtgaaaccaatcgcctcaagaaagccctggaacgaagtgataagtatatagaggaactagaatctcaagttgcacagctaaaaaattcaagtgaagagaaagaagctatgaattccatttgccagacagcactttctgcagatggcaaagggagcaaaggcagtgaggaggatgtggtgtcaaagaatcaaggcgatagtgccagaaagcagcctggctcatccacctccagttcttctcacctagcgaagccttccagcagcagactgtgtgacaccagttctgcaaggcaggaaagtaccagcaaagcagaccttaactgttctaagaacaaagacctatatcaagaacaggtagaagtaatgttagatgtgacagatacaagtatggatacttatttggaaagagaatgggggaataaaccaagtgactgtgtaccctacaaagatgaagaactttatgatcttccagctccttgtactcctttgtcccttagttgccttcagctcagtactccagaaaatagagagagctctgtggtccaagcaggaggttccaaaaagcactcaaaccatctcagaaaattggtgtttgatgattttgtgattcttcaaatgtttctaataaagattcttcagaagatgatataagtagaagtgaaaatgaaaagaaatcagaatgtttttcttccccaaagacaggattttgggactgttgttccacaagctatgcccaaaaacttagattttgaaagttcagaggggaacacgatagcaattctcgttggagaaatatcttcaaaattgagtgagaaatcaggcttatgtttatccaaaaggttgaattctattcgctcttttgaaatgaaccggacaaagaacatc

SEQ ID NO: 368672 - DNA, 1901 bp, Homo Sapiens
  misc_feature (1579)..(1579): n is a, c, g, or t
  misc_feature (1581)..(1581): n is a, c, g, or t
  misc_feature (1592)..(1592): n is a, c, g, or t
  misc_feature (1601)..(1601): n is a, c, g, or t
  misc_feature (1845)..(1845): n is a, c, g, or t
  misc_feature (1853)..(1853): n is a, c, g, or t
  misc_feature (1861)..(1861): n is a, c, g, or t
agcggagtcctgttacacctcccgcggccgcgcacagcggcaacccgggcgtgcgggggcgcgcgcggtcagggaggggcctgcggaggcgcgaggcccccggaagcgcctttcccggaaggcagggaggcagcgccggcctccggaggcggcctgggcgatggcggcggagttttgtccataacgtgggcaaccgcgcagctggaggatggcctcactcgggcctgccgcagctggggagcaggcgtcgggggctgaggcggagccgggccccgcggggccgccgccgccgccctcaccgtcctctctggggcccctgctccccctgcagcgggaacctctctacaactggcaggcgaccaaggcgtcgctgaaggagcgcttcgccttcctcttcaactcggagctgctgagcgatgtgcgcttcgtactgggcaagggtcgcggcgccgccgccgctgggggcccgcagcgcatccccgcccaccgcttcgtgctggcggccggcagcgccgtctttgacgccatgttcaacggcggcatggccaccacgtcggccgagatcgagctgccggacgtggagcccgcagccttcctggcgctgctgagatttctatattcagatgaagttcaaattggtccagaaacagttatgaccactctttatactgccaagaaatacgcagtcccagccttggaagcacactgtgtagaatttctcaccaaacatcttagggcagataatgcctttatgttacttactcaggctcgattatttgatgaacctcagcttgctagtctttgtctagatacaatagacaaaagcacaatggatgcaataagtgcagaagggtttactgatattgatatagatacactctgtgcagttttagagagagacacactcagtattcgagaaagtcgactttttggagctgttgtacgctgggcagaagcagaatgtcagagacaacaattacctgtgacttttgggaataaacaaaaagttctaggaaaagcactttccttaatccggttcccactgatgacaattgaggaatttgcagcaggtccagctcaatctggaattttgtcagatcgtgaagtggtaaacctctttcttcattttactgtcaacctaaacccgagttgaatacattgaccgaacaagatgctgtctcagggggaaaggaatgctgcatcaatagattccagcaagtagaaagccgctggggttacagtgggacgagtgatcgaattcagattcacagttaatagaaggatctctatagttggatttggcttgtatggatctattcatggccctacagattatcaagtgaatatacagatcattgaatatgagaaaaagcaaaccctgggacagaatgataccggctttagttgtgatgggacagctaacacattcagggtcatgttcaaggaacccatagagatcctgcccaatgtgtgctacacagcatgtgcaacactcaaaggtccagattcccactatgggcacaaaaggattgaaggaaagtagtgcatgaggacacctgctgcaagcaaggactgtttntntcttttttagntcccctggnaataataatggcacttcaatagaagatggacaaattccagaaatcatattttatacataatttagcattataatacatcttggctaaataataccataccaatctagtgtcaaaaacataaatggccacaaaaaagtagtttgagtgttatgaatatttaaaattgtaagataagaaacagtttcttagagcagatagaaaaatgcttatttaaatcctttgcatgatttaaaaacagattttnccattttncttacaantttaagagaaaagaattgggtttaatggtttaaaaaaaag

SEQ ID NO: 368673 - DNA, 790 bp, Homo Sapiens
  misc_feature (770)..(770): n is a, c, g, or t
tagggaacgttgatctctgtttctgatatgccgggctcatgtctagctggagcctgggcactgctgtctgctttcctgcacaactgtccggggacagctctgagccccgggcctgtaaaggacgggctccatgatcctctggcaaatcctgtaagatgcctgcagtgaggtgccaggttggagcagaggaagagccttacacttcatccctgaagtcacatttgaaggaagaccctcaaggtggagggcttctaagtacatcttcatctttctgggcttaacaatagtttcagttctctttttgaagagaaagatcttgcaacctccttggtgtccaacagtccttttggctgtctcacctcgtttttcttttcttttaatgcataattaatctagatgtcagcaaatgggctgagactgtctgtctggtagatgcagtgtttgtatgtttctactctattacaaaaattaacagaaatatggcttcgctttgtgcaaatgtttatatcacagtctgtaaaatgaattatatttaaaactatccacaaagctagatatttagagaacccttggcagagttctttcgtaaagtgaagacattttcaggtactttaagttcttcaaaagcaggaataactgtgtaaacgtaagggcaaaaggcctttcaggcatgagaggaccacatggaaaacacgtgtctgggcttcaaaaccacccccaggcccctgcctgcctgcgttttacgggcttctttcctgtggctttcattnatgcgtcgtggcttcccgtt

SEQ ID NO: 368674 - DNA, 1273 bp, Homo Sapiens
  misc_feature (669)..(679): n is a, c, g, or t
  misc_feature (776)..(776): n is a, c, g, or t
  misc_feature (1071)..(1071): n is a, c, g, or t
  misc_feature (1081)..(1081): n is a, c, g, or t
  misc_feature (1120)..(1120): n is a, c, g, or t
ggggttatacgcacattggggccggttgcagaaacaacccctctcctgccttccagacagggaggacagtattcttgtgctcttcatataccaagggaatggtgggaaaagtctttgctagagagcatgtggctgtgtgttgtcacttgatattcagcacaggcagctaggatttaaaccctccctgatcttgagacagagaactttacccaaaagatgggactgagttcagatttcagatacattaatcactcatcattgcttagattgatgaaagtatcttttccctctgttaataatctaaccgggaaacacacattctttgtcaatgctcgtatttcactgtccaaacaggttgaaacagttcctcaggctacagtgaagactggattacagaaagggtcggcggaacggggcagtgcagggctctgtcagattcagtgacagctccgtctccgaagcgattgaggaaactgtggactgagattcctgtacaatttcatcccagaaactccagactagtagtctccatgcaagattgctttgtcggccggcttgataaacagtttctctgtcttcgatcttgatttcgccaatcatcattattggcattttcctgcctggtttcttcttcaagactctgaacaattgctttaacagtcaaatgannnnnnnnnnncggtttgagctggatgggtacagcttaaatcatgggtccagcctaaaaaccaccatttaacttacactgatcaatttcaacatggactgtttttggntttttgtttttaaataaagcatcattaatgcacatctgcaggggtttgccaaacagcccaaactgtatacattacaatcattaaaagttcttattttttttaatattagtgccgttatcatggagaacagcatgacagctgtctttggcagtctgtcatttttctagcattttcagaaactcatcggaaatggcggtacctgtgtttcccttcgaaagcctctcagtacagcactcctgttcctctgttaaaactccttgttaatccagtgatcttttaggccaaggaaatattnttgtgatggntggtctggggtccatacaccagcaatgaaggagatagantttgggtactttgggttttttaatcagcattaacatgggcaggcacccctcatttataaatgtcaggaaaacattcagtggaaaacttgttagaatgggatgtggataaccagggttccagtattcctgagccagtctaagcagggcccacca

SEQ ID NO: 368675 - DNA, 506 bp, Homo Sapiens
  misc_feature (229)..(229): n is a, c, g, or t
gccgccgcacagagaaatcttgcatggagactacaagtctggagtttctgggatgaaattgtacaggaatctcagtccacagtttcctcaatcgctgcggagacggagctggtcactgaatctgacagagccctgcactcccccggtccgccgaccctttctggtaatccagtctttcactgtagcctgaggaactgtttcaacctgctccttttttgatcttcttctnttggcacaacctcaagtggatttctctgattcagaacgagttctaattgatcttctctgttgcttcttttctactgaggcctgtaggaaccaggatgttgcttcaggagatgatacactctgcgttggcttttcatttctctggtttggtgtagaaattataagcctgtcttgccccctgacacttatttctgttttgttaccaattccctttgttgaataaacaaattgatcgataaatttcccatcccctgtagcattctgaagagcaaacactt

SEQ ID NO: 368676 - DNA, 969 bp, Homo Sapiens
  misc_feature (797)..(797): n is a, c, g, or t
agcggatggcccggagaggcggaggcctcgggcggccagccgcgcatcggacgaccccgggacagatccgggccgcgtccccgcgttgggagagggatggggactgaggccggagacgcctagacgccgcggatagcgaagtctgagttcctctgagccagggggcaccgaccgtcacgagctaacttcctggaagagctttccgtctattttcaaattctttaccgaagcctcagaggccaagaccagctccctgaagccggctgtgacgcgccgctcccaccgcatcaagcacgaagagctgtaagaggagcgagcgcgacgggggaggccgccctggcgcacccacccgcacgcctcctcactgcttgtgtcgagcggactcccagcccctcattagattgttttcttcccagagcccagggtcgtgatatatacatctaaatagcgttttgcattatttctagatgagtgcaactgtcaaagcaatatgggttcactggtcgtgcttcctgcgggctgagcgcgggctgagcgctgccagtcagcgctcacattaaggctgacagcgccctgcctggctcggccggcgaagctctaattgccctgaaggagaccgcgcgggcgctgcgggtccggcggcgtcggcgcggtcctagcgcccgccgtagcggagccgctgctgcttccccctccttaatcatgtccatctttccccgctctcaactggagcaaacttctattccagacttcagaattcccatttttcacctaagggcttgtttcgccgtaagggngccatccttattaccccaccctctttgtttgttcttttcacaaggaaagtttcccccaaaatttccataggcgcaatgttcaaattcgcgaaacccttgaagtgccttgttggtcccgcgttgttgggggacatgccatgtgtgccctccccgttccaatttcgggcaccac

SEQ ID NO: 368677 - DNA, 658 bp, Homo Sapiens
attaaagctgtggggaacacgattagctttatcgtcgatggattgcctatagctgtacattcctttgagatacaggtttcgctcagatgactaaatgatggttgggtaggcctaggaggatgtgtacgtgtccaaatctggagaaaatctaggttgtggtattaatcttaataagcaccccaatgttagacacagctgcctgcctgacatgtgcctccaggtttatcctacatgtttacaaagctcagttgtaaatctgagtattaatgagaagatgttccatgaaagattttcgaacaacatacattcaataagtgcattcagttaaccataaaggcatttcaaggaaaaactcagactttgaagacaaatgatttgaataaatggataaaaataagcttaggggcttttgcagattcatcactcaactctcttacttcattatccacataaatacagcattattcagatgcattttaaccttcaaataactcatacttcttatcgctgtttttatcataaaccttgagtaaggtagcctcttaaactatttatatacctaacatagataaaataaaaattaaaaagaaggacaaaacaacaggaacttggttgggaatatgtaagaacttttgccatacatctttgaggtaatgac

SEQ ID NO: 368678 - DNA, 1500 bp, Homo Sapiens
  misc_feature (1065)..(1065): n is a, c, g, or t
cgcttgcgcagaagagactcccgggctcttaacgtcgggtatcaggagtttcttcccggagcaaggacccccaagacggaagaggatggccgcggcggctctgaggagattttggtcccggcgccgcgcagaggcgggcgacgcggtagtggcgaagccgggagtgtgggcgcggctggggtcctgggcccgcgcgctgctccgggactacgccgaggcctgcagggacgcttcggcggaggctagggcccggccggggcgcgccgctgtgtatgtgggtctgctgggcggcgcggcggcctgcttcacgctggcgcccagcgagggtgccttcgaggaggcgctgctggaggcgtcggggaccctcctgctgctggcgccggccacccgcaaccgcgagtccgaagccttcgtgcagaggctgctctggctgcggggccgtggccgcctgcgctacgtcaacctggggctctgctcgctggtgtacgaggcgcccttcgacgcccaggccagcctctaccaggcgcgttgccgctacctgcagccccgctggaccgacttccccggccgggtcctggacgtgggcttcgtgggtcgctggtgggtgctgggggcctggatgcgcgactgcgacatcaacgacgacgaattcctgcacctgccggcgcatttgcgggtggtcgggccccagcagctgcattccgagaccaacgagcggctcttcgatgagaagtacaagcctgtcgtgctcaccgacgatcaggtggaccaggcgctgtgggaagagcaagtctttgcaaaaggagaagaaggacagggctccccctgagcccaggcccactcgctggtgccaggcggaggccccgagatggaaaccctggaggcccccgagtcctggcaaactgcttgcctggggtggtgcagttctgagtgtgcctcacctgcagaacagctgagacagatgatgtgcaaagtgttttctcactggatttgcacaagtttggggagcctttctgccccccgtctttgttctttattagctgaagctaattcagagccacctgnggtcccgggagttggggacagcagaacgacttgacacatgttcatcactggcagagctggtcatgacccttttatataagcctttttcatcggggctcagaagccctcccttaaggaggtacccacatttggtccactggactttgcaactcttcctaaggccactttaaattttctttttcaaacttggggtttgttgccctggcatgggggtagtcctggattcccgcaagatttcacactgtaagccagaagaattccttttaggcctagagccttttgaggcccccttaaactgcgccctccccaaccgtcccgcgctatacacgcgccatgccccaacgtgtagatagccccccgccaatttgtattccgcccgctccccgcgttagcctctgtgaggattctaattgcgcggatggttggaaaagcaag

SEQ ID NO: 368679 - DNA, 849 bp, Homo Sapiens
agcggagccacccgcgggaagctcgtggccgggaccccgaggcgggagcgcgggctgggccgggctgggccacgcgcacgggctcggccgccgcccctgccggttgcataccctgtcctgagggcgcggcacggagtgcatgcgggccgctgccatgacgaccgccatcttggagcgcctgagcaccctgtcggtcagcgggcagcagctgcgccgcctgcccaagatcctggaggatgggcttcccaagatgccttgcactgtcccagaaacggatgtgccccagctcttccgggagccttacatccgcaccggctaccgccccacggggcacgagtggcgctactacttcttcagcctctttcagaaacacaacgaggtggtcaacgtctggacccatttactggcagccctggccgtcctcttgcgattctgggcctttgccgaggctgaggccttgccatgggcgtctacccactccctgcctctgctcctcttcatcctgtcgtcaatcacttacctcacctgcagccttctggcccacctgctgcagtccaagtcagagctctcccactacaccttctactttgtggactatgttggcgtgagcgtttaccaatatggcagtgctttggctcatttcttctacagctctgaccaggcctggtatgaccgggtcctggcttttcttcttgccagcagctgccttcctgtggcctggttatcttggtgctggctgttgctatgccaaaatatcgttaccggaggccttatccagtcatgaggaagatctgtcaagtggtgccacagagtctggtttttatcctaacatagccctgtggacacccg

SEQ ID NO: 368680 - DNA, 1300 bp, Homo Sapiens
  misc_feature (181)..(215): n is a, c, g, or t
  misc_feature (335)..(344): n is a, c, g, or t
  misc_feature (477)..(477): n is a, c, g, or t
  misc_feature (1205)..(1217): n is a, c, g, or t
agacaaaaaccctttcctgagttgctcggcatgcactcctgtgctgtttcatgcatgtggatgttccttccgtttgttcctgtggaataactgagtgtgcctgatggcagaacacactgcagtgttatcagtgtctgcatgttttttaatagaacaggtttacttgatctgtcatctgttnnnnnnnnnnnnnnnnnnnnnnnnnnnnnnnnnnngctaaatctataatctgtgtcaatcacttatacctatcaatcatccgtatctattcacctgtcctctatgtctgtcttctctcagtctacatccatctagccttctgtcaatcatctacnnnnnnnnnnaatagaacaagaagtttacttatcaagtcttgaaagggggacatgtttcaattggtgttcaaacaaaaattccagcttgtattaggaaccttggaaatgggtgaagttgtgggagggttttctttgttccatnaatacagaggacaagttcataatttttaggtataacagctaagttgacaaattctaagtttcctcaggtaaatagtcgtaactgtccttttccctagagaagtgcttgctgggatagtaaaaacatacaccatttcatgacttctgcaaatactttccagcggaaagtcagtgtaggtctgttattggctaacatggtcttgctgcgcaggaatgtaaacactgtgtttgaaactctgggaaatccacgtgtgtgggggagattggggacgcttcccatgttgtgggcaagctctgtggctgtgatggctgcagttgccgtgcctctgttggaacgccaagtgcctgcaactcacgtcaatcatagaattgtgacgcacagttggcaaaatagttctttatgctatttctcaaaatttgaggacaaacccagattgggattggaatatgcactgtaaatcaaatttttcttatctacaaagactaatgtaaaaatgattttttcttctgtgcctgattaaattaactgtggtttttaatataaatatttattggtgtgctttgggagaaaaattatcttttcttgaaagaagttatcaaagcaaatttattatcttcacaagttaatgggagaatgtggtttttgattatgggtgatttgaaattgatgtaaacacaacagcttaccattgtgtgaagagagttgtcatgtgctccttatactgtacnnnnnnnnnnnnngataggcaagtgatgtgcttcagaggaggttcctccctaaagatgaagtcgatgcaaataactcaaagcatcactcctcacat

SEQ ID NO: 368681 - DNA, 784 bp, Homo Sapiens
  misc_feature (383)..(383): n is a, c, g, or t
  misc_feature (452)..(452): n is a, c, g, or t
  misc_feature (465)..(465): n is a, c, g, or t
  misc_feature (631)..(665): n is a, c, g, or t
gaagtatggatcaattttagtcagttgataatttcatttaggaaacattgtcttgctcattatagagagttaagactgtgcataaaatactgaagtgcctcttttttattaggctcatatgtttgttcttgcaaagcgagatgcctattgtgattggtgttagatctgtaagaagctgtgttttttccacaagaataatcgacgaccggtttgagagcatctctcgcgttctttttctgtctgcttactgtccttgacaatgtgatcctgcacagtatcaggtgccagttatgcgtccctggaaggttggctcttatcagcaagtcctgcagatatctcttagataaaagtggtttgaaagcgaacacaggtatatttttctntttttgtttaaaagtaaaataaaacctccagtttacactgtggcattcccctcacggtaaaaacaagancaaaaaccctttncccgagttgctcggcatgcactcctgtgctgtttcatgcatgtggatgttccttccgtttgttcctgtggaataactgagtgtgcctgatggcagaacacactgcagtgttatcagtgtctgcatgttttttaatagaacaggtttacttgatctgtcatctgttnnnnnnnnnnnnnnnnnnnnnnnnnnnnnnnnnnngctaaatctataatctgtgtcaatcacttatacctatcaatcatccgtatctattcacctgtcctctatgtctgtcttctctcagtctgcatccatctagccttctgtcaatcatctac

SEQ ID NO: 368682 - DNA, 1107 bp, Homo Sapiens
  misc_feature (700)..(708): n is a, c, g, or t
  misc_feature (895)..(895): n is a, c, g, or t
gagggtgtgtgtgtgagtgtggctggccccagtacctggccaagcccaccacttccacctgggccctacacccccacaatgtgtacccctcttatctgccctggagcctgtacagccatgccacgctacccctgagagtctaaaaagctggtcactaactttgcagacggatgagccttgagcacccagaggagactggggctgtcaacgctgccccttgtcctgccggcttgcatcccctgacagggtccttctaggcttcagactggcaccctgaccatggaaccctgaagtggcactgacttctagagctcagtggcacaccccacgacccctcctcccccttcctccccctcccaccaccagtctttcaagctcccagacggagggctggggacgcgcgatcctgatctcaccgggtagggagcttccatcctgatgctcaactcaacactccctgcgccctggacatgcccgtccacccactcaggagcactgagtcggtgctttcaccgatctgtggccggctggcgaggagccccgcaatggtggcctatgatcccggcggatccccccctggtggctcagcgcctgtatcggtcacacaccgcgcggaccacctcgcaccggagactattctggccgcaatcctcgaaaacgtaccccattcgcccgtcccccgcgcgttaaaagcacccannnnnnnnnaacctccttgtgcctacaaccccgcccgctaaaccgcgcctccacctccggccatctctttccaatctgtgccctccccccccggagctttgcccgacccgttttcccgtgccctaaccgctcgccccacgcgccaactagaaccacctgctccagaacgatattcgacgccctccgcccctgcccnctggaacctttccgcgctaattttactcctccgacctccgttaacacacggcccctcgtccaacggttcgccaaattcgctgacccgcgcgtccacctccacttccggccgccatttcctatcgtcacgctcgcttactgtaacgcgtcgctcgcctctcttaccactacgcgtgcttacgtcctacccctacctctcttcacacacctagg

SEQ ID NO: 368683 - DNA, 925 bp, Homo Sapiens
  misc_feature (426)..(539): n is a, c, g, or t
  misc_feature (843)..(843): n is a, c, g, or t
  misc_feature (861)..(861): n is a, c, g, or t
  misc_feature (877)..(877): n is a, c, g, or t
  misc_feature (886)..(886): n is a, c, g, or t
  misc_feature (895)..(895): n is a, c, g, or t
gctgtgacctagaatgggcgcatgcgccgagcggaactggctggtttgaaaaccatggcgtgggtaccagcggagtccgcagtggaagagttgatgcctcggctattgccggtagagccttgcgacttgacggaaggtttcgatccctcggtacccccgaggacgcctcaggaatacctgaggcgggtccagatcgaagcagctcaatgtccagatgttgtggtagctcaaattgacccaaagaagttgaaaaggaagcaaagtgtgaatatttctctttcaggatgccaacccgcccctgaaggttattccccaacacttcaatggcaacagcaacaagtggcacagttttcaactgttcgacagaatgtgaacaaacatagaagtcactggaaatcacaacagttggatagtaatgtgacaatnnnnnnnnnnnnnnnnnnnnnnnnnnnnnnnnnnnnnnnnnnnnnnnnnnnnnnnnnnnnnnnnnnnnnnnnnnnnnnnnnnnnnnnnnnnnnnnnnnnnnnnnnnnnnnnnnnctaagccaaaatctgaagatgaagcaaggctggaagcaaattttgtctgggtgaaacagttatgtgctgacggggctgttggaccagccacaaatgaaagtcctggaatagattatgtacaaattggttttcctcccttgcttagtattgttagcagaatgaatcaggcaacagtaactagtgtcttggaatatctgagtaattggtttggagaaacgagactttactccagaattgggaagatggctttatgctttattggcttgtcttgaaaagcctttgttacctgaggctcattcactgnttcggcagcttgcaaganggtgctcctgaagtgnggctccttnggtggattngcaaaggatggatggagagggttcctggct

SEQ ID NO: 368684 - DNA, 822 bp, Homo Sapiens
agcgggcgccgagcggaactggctggtttgaaaaccatggcgtgggtaccagcggagtcagcagtggaagagttgatgcctcggctattgccggtagagccttgcgacttgacggaaggtttcgatccctcggtacccccgaggacgcctcaggaatacctgaggcgggtccagatcgaagcagctcaatgtccagatgttgtggtagctcaaattgacccaaagaagttgaaaaggaagcaaagtgtgaatatttctctttcaggatgccaacccgcccctgaaggttattccccaacacttcaatggcaacagcaacaattggcacagttttcaactgttcgacagaatgtgaacaaacatagaagtcactggaaatcacaacagttggatagtaatgtgacaatgattggttttcctcccttgcttagtattgttagcagaatgaatcagggaagatggctttatgctttattggcttgtcttgaaaagcctttgttacctgaggctcattcactgattcggcagcttgcaagaaggtgctctgaagtgaggctcttagtggatagcaaagatgatgagagggttcctgctttgaatttattaatctgcttggttagcaggtattttgaccaacgtgatttagctgatgagccatcttgatgtagctgatctctcagggatagaaagatatttctcatgaagggcagcctaactctgaggaaaacaatgccaattcaagtacagatttcaacacatcttcaacactatgtgaacggttcacatctttacctgtgcaatcagattgatactcagaatatg

SEQ ID NO: 368685 - DNA, 1078 bp, Homo Sapiens
tgccaggttctcctagactggaccagtatttaaaaaatcccaaagatgatgttactcaagccattaccatgaaggaactaaagtcagccctttaagttcgcaaaactttaacataactaccctcagtaaataatttattttttcttcaacaattttcttgctactgtcaaaagtttctggcagactttagtgttttaacctgatacctatggtacatattctacatgccaagtgctagagagtttaagcaaaattttacatggggtatgtaatatgtcggtatttatgatataccagggaagacaagttgaaaatacatgacttagtaagaacgattttccccttaagtactttctaactttttttcttatttcccacttagttacaaaaagtaaataaataatcctatatttttcatttcattgatgcatgaagactcaatgtatgaagataatagtcatcagtttataattacactataggacaaagttttaaaaagttctagtgtgtgtatggctaaatgcctcaaatattttacatttactgataaataacagcattccaaaatcatggacaattatgattaaaagttgtaaaccatatcacagaatatgttaatcagcacatcttcatcagtttacataaagttatagtagtcttattagaagttgtaaaatttggtaacagaaaatttttttcaatacacagaataaaaaaaacatcattgcaaatttaaaaatcatgtaaacttgaattacccttgcagtaagttgtcttaaacattcatatttacaaggtttttaaaacaaatgtgaatagaatccatattaaaagtacattatcattaaagtttaaattaaaaggaaagatacaaaggaaagtcataacaaatagtttctcatgaacatctctaaggtcctacctagcactacttaacgtggatgataacgtgaagctctgcatggtaatctgagagtcaatgcatagatgaagaaaaaaagtaggtactgcttgcgtcgcggaactatcatcttctggacctcaattgccaagacggcatcagtcaggttgcccacag

SEQ ID NO: 368686 - DNA, 829 bp, Homo Sapiens
  misc_feature (254)..(278): n is a, c, g, or t
ctcagatattctggtagaagatatttagataaggtggtggctgcctgtcaagttttttaagttttttaaattatataatgtcagaaaattaaatcacaaatgagccttccagatgtgaggaaaattacttggctgaaaatgacttgcataatgcccaaatcttgaagtatctgctcagatgttgttccatctgaaatgctgccaaatccatctgtattgaggaaagagctatgaggtagtttcagagaaagtgnnnnnnnnnnnnnnnnnnnnnnnnntgctattacagaagttggacagcccaatgtgttaagtattatacacctggaacaagagcagcaaaactgaagctctttggaaagttatggcaacagtggtctgggaattctgggcctttagaaataatcattcccagtgatacagggatgtgcagcatccagacactgcttaatcacagtgagctgccgtcttccctgaataagttgtatcttataacattgaagtgaatgaaaatgtattagtatttgagaatttactattccttcacctccttgcacatgtaaattaaagatgttttggaaaatatgagaacttgatgttcactgccctagagcactattctccaaccttttagattcctgcaatctgttaataaaatattgtaggacaacaactctatagactgatacatgctgctctcaatccatatactacatattaggacagcttttcttttctaaatgagatgaatataaatagaaattccagtattttcttcacctaccccagtgaatcatctttatattttacttgggaaactgctacagta

SEQ ID NO: 368687 - DNA, 1067 bp, Homo Sapiens
  misc_feature (210)..(235): n is a, c, g, or t
  misc_feature (639)..(664): n is a, c, g, or t
  misc_feature (902)..(902): n is a, c, g, or t
  misc_feature (1052)..(1052): n is a, c, g, or t
agcggctgtacatttgattgccatctgtacttcccttggagcagctttgcttattacagccacacctgcatctgttttgactagcccacataacctacacatttttcatccaaagctatcccattaccttatttatgtccatttattttcatatatagtatctgccaaaatagtagcaaaagttttatcaatgtgtagatttcaatcagnnnnnnnnnnnnnnnnnnnnnnnnnngtgatattctaaaagccacacttcttttatcaccagtgcagttttttccatcatcataaacttagttttatgaaaatgttaatatcttggatttaaacattggggtagaaatcaggacaaaatttaaatgtcatatccaggacttaatctcagatattctggtagaagatatttagataaggttgtggctgcctgtcaagttttttaatttcttaaattatataatgtcagaaaattaaatcacaaatgagccttccagattgtgaggaaaattacttggctgaaaatgactttgcataatgcccaaatcttgaagtatctgctcagatgtttgttccatctgaaatgctgccaaatccatctgtattgaggaaagagctatgaggtagtttcagagaaagtgnnnnnnnnnnnnnnnnnnnnnnnnnntgctattacagaagttggacagcccaatgtgttaagtattatacacctggaacaagagcagcaaaactgaagctctttggaaagttatggcaacagtggtctgggaattctgggcctttagaaataatcattcccagtgatacagggatgtgcagcatccaggacactgcttaattcacagtgagctgccgtcttccctgaataagttgtatcttataacattgaagtgaatgaaaantgttattagtattttgagaatttactatttcctttcacctccttggcacatgttaaattaaaggatgtttttggggaaaatatggaggaacttggatgttttcactggccctaggaggcactatttctcccaacctttttaggatttccnggcattctgttttat

SEQ ID NO: 368688 - DNA, 787 bp, Homo Sapiens; identical to SEQ ID NO: 86118
  misc_feature (14)..(14): n is a, c, g, or t
  misc_feature (162)..(162): n is a, c, g, or t
  misc_feature (447)..(463): n is a, c, g, or t
  misc_feature (643)..(667): n is a, c, g, or t

SEQ ID NO: 368689 - DNA, 853 bp, Homo Sapiens
  misc_feature (225)..(271): n is a, c, g, or t
  misc_feature (352)..(456): n is a, c, g, or t
ctgataatggcattatgattgcatggaatggtattgaaagactacgtgctggcttgggcattttacatgacatagaaggcatccgctatgaaccaaaatgtcctcttggagtagacatatcaaaagaagttggagaagcttccataaaagtaccacaattaaaaatggagatatgatttctgctgttcaaaaaagtccctaaagggtctcactctctgacctcannnnnnnnnnnnnnnnnnnnnnnnnnnnnnnnnnnnnnnnnnnnnnntgaactcaagaaatcctcctgctttagcctcttgaatagccgggactacaggtgtgcatgtccatgcccagccaactttannnnnnnnnnnnnnnnnnnnnnnnnnnnnnnnnnnnnnnnnnnnnnnnnnnnnnnnnnnnnnnnnnnnnnnnnnnnnnnnnnnnnnnnnnnnnnnnnnnnnnnnnatgggtgtgagccaccatgcctagccaaaatgtttcttaaggtatacattttgggtcttagaagacttatacatttgtaatatttattactaaatatctcaaagtattacaataaatgttaccatgtgagctactttgaatcaggcttcttgcacaccaatttaacaaatgttaactcttgatatatacactagttataccactcatgtcagtcaataaattttaaggtttaagtgcaggccttttgtttacagaaatcctaatttttttgaaaccataactctgacctgacactaaattcctgtagacatgctaaggaaaatctgcttagtatcgagatcaagaacttccattcaaaaagattattcagttatgttatttgcatattaccattgtt

SEQ ID NO: 368690 - DNA, 572 bp, Homo Sapiens
catccaacaataatgagtcacaatcagaaacatcttctatcagagttacgtttaaaaatgaagcatgctgacaagcatgcctgtgttatattgtgtggagtgctaaaatacattctttttccaaattatcactctcaaaaatttgtccttgttcttcagtttccattatgggagacttatttctttcagactctgcttctggatacagaaatctccaaacatggctttgaattgggtgaactaaagagataacacatttgagacaatattagtcattcatgcattggtaagaagtggttaaaattttgtttcttccctgttattaagagggaactcagacaattaaaatgaccccttataaaaggggttattttgggagtattatggtaaattggaaacgcagaagtaagatagcatggtgaggtgggttatttgatcacaggacagcataaaagctcacatcttaatcaatgtgaggttgctcctcatgcaagcccagagaagctctagccatctggatttttggaccctcttttcctttagaagccctgtgggatgacttgagcctcaca

SEQ ID NO: 368691 - DNA, 1007 bp, Homo Sapiens
  misc_feature (868)..(868): n is a, c, g, or t
  misc_feature (988)..(988): n is a, c, g, or t
ggtcatgtattattgagcaaataaggatgtcctttcttaaaatttctacatttatgttggcttttgtgtaaaatctttattagtttgtaagtttctcaaagaggaggtttatactggaagcagtatttctaaagtacagagattcgaccatggattgaatacagtagtggaggaatgctggtattgtggcctaatttatccttttaaactgtatgtcattagtattagccaaaacctcagagtggagtgtcttgggctgaatgatcttctcaactttgccttgtttcccatctcataaaggctccttctggttcttttcccttccaaggattgtgagtcatgctcacataggcctgggatcttctggatggggtcggggaggatgtgtgggggtttcctgtggctggcccagagttctagccaatggaatcattcaagaatgcctaaagttcaggggtgggaatgccatatattggtgttaatcacttggcactttcttgggcaccaatattagcactgtttcatttttaataactggaagcacttaatgattattttgtttgtttaatttcaacttaaggatattgagggtcagagaagtaaggtttatttcttgtttatgttttctggaatttatagggtgtttgtagaagggataaatgggttacctaatgagccattcttctaggctctgtaaggtatgcccttttggctaggatattttaaaataatttgcaagcttttaatattgtgctttgtagaaatttacgatttttaaaaataatttgcaattgatagattacacttaaatttataaagtatccaattttaagtttcttttctgtttggtcattgttgcttattgtcnattgtgtaggggacacatcctgacattcattgttttgttacttggggcagtattaaccagtggccttgtatggacattcatgctacattatggttaagggtagagagcatttatgaactncccggtccgattagggaat

SEQ ID NO: 368692 - DNA, 585 bp, Homo Sapiens
ccagcccgccccggcggcggcagccgggcaacccgtaccgctccacgggtgtcctcgggcgagcggcggcggtcactcctcgcgcagctgcaggcggtagcggtggtagcggacctggaagaagaggcgctcagccagcgagagggtcatgcccggcagcacgtagtggtcactggcgcccatgtgtctgaagcccagcgactcgtagagcttgtgggcggccaccttgacggccgtcgtgcccagcaccaccgcggagtagttgtgcaccacggcgaactccagcaccttccggcccagcgccttggcgatgcccttgcctcggaaacgtgagtccacagacatccgcagcagctccaccgtgttgtcctcctcgtgggcccgtgcagccacaatgcccaccacgttgccatccagcacggccacccagaagcaggagccgggcggcttcatgtagtactgctcgatgtccgccatgtccgtgtgcagcgcgcactccaggtaggcgcggatcaccttgcggctgtagtagtagcgcaggcccagcagcgcggccggcaccaggcacgtcagcagcagcccgct

SEQ ID NO: 368693 - DNA, 878 bp, Homo Sapiens
  misc_feature (131)..(211): n is a, c, g, or t
  misc_feature (213)..(258): n is a, c, g, or t
  misc_feature (271)..(406): n is a, c, g, or t
ggggatattggaaatcgcattcttcatgtgagaaatgcaccttctcctgctgctacttcttccatgcaatttctggaatgatgcagatgaagtacaacaaagatttgaattataaataatgaaaggagctnnnnnnnnnnnnnnnnnnnnnnnnnnnnnnnnnnnnnnnnnnnnnnnnnnnnnnnnnnnnnnnnnnnnnnnnnnnnnnnnncnnnnnnnnnnnnnnnnnnnnnnnnnnnnnnnnnnnnnnnnnnnnnncccaccaccatgnnnnnnnnnnnnnnnnnnnnnnnnnnnnnnnnnnnnnnnnnnnnnnnnnnnnnnnnnnnnnnnnnnnnnnnnnnnnnnnnnnnnnnnnnnnnnnnnnnnnnnnnnnnnnnnnnnnnnnnnnnnnnnnnnnnnnnnntcagccctgaatccctgactttgttaatgacctgtccttaccaaccatgacctagagaagatttggctttttaagagtttcggagaaagatggcataaaaatagattatttccttaaatcaattttttagcattacgctacctaagctcgtttggtctctcatagacaagaaaatacattatattgtaggttacattcttttaattttgaagagtcacaaaactcacattatttagagcaacaatatttgtatttggaaattaaaaattcatgatttcaagaaaatacataaaatttacatttttgagtagtttgaataagtttctatcttaattataatatttgtaggaaataacaaaacaaactcaaagcctttattatttccagtctctttgtaactgatgtggtatggtatcatcatgaaatctaaacagtggtactcacctgtcccagctatctggaaggccaaggt

SEQ ID NO: 368694 - DNA, 1713 bp, Homo Sapiens
  misc_feature (1622)..(1622): n is a, c, g, or t
  misc_feature (1662)..(1662): n is a, c, g, or t
  misc_feature (1671)..(1671): n is a, c, g, or t
  misc_feature (1689)..(1689): n is a, c, g, or t
  misc_feature (1695)..(1695): n is a, c, g, or t
taaggcctgcggtgttgaatcggcacgaggctgtgtcacgcgctttgtctttgtgtttggttgtatcggggtctctgttctgagtgtgtcttcctctcatgtactcaacacgagtgggcagcagcctgggacggcgtcccctctcccggcggcgggcaagccttgcgctgctccaccctcggcctgggcaccctcacttggcgctggccacctgggccagcctggggccatggtctctctgcagctgaggcccagtggccccttgtggcagtgatcggccctccccgcatcacagggccctggcagcaagcgggaaatgggggcgcacactgtgtgcttgggggtgctgcttgtttaccacacatgaccagactcccagcaggacagagctgctcagtactttacagaaaccaagctgagtcgtttgtgcatgaattaagccggtctgcttccccgtcaccttcgtaacaaaacaagcgtcccctctcccctcgcctcgagcaggtttcttcaggacaccgtggctcgggcttgctccctgtctgcctaggcacgctggtttggctgtgcctgggcaccggtctcacgtgaatgggcactgggctctttgtgaccagcatcgtgatgctcacgtgctaagccgctatgccgggtcctggagagcctgtacccgtctgagttctatgggcttgtcccgctggagcctgcagatgctagactgttggggtgtgtcccgtgatgatatgctgggccaggctgggagctagggcctttctagcagggttgggtggctcagtgagggtgtggaacgttgggggacccacggggcctggctttgggactagacatgccagccccagctgggctggatgggagcctgagtgagccccgacatacgctgggcctttcagctcgccgtgctctggtgacacacaggcggccaggttgggatttgtgtcaattctaggagccatcaagcatgaaagtggttctgtctcctgagcgcaagcctcgccggacccctgggcgaaggcctggacttgcagatgtgtgttccctgtgcgggtggacagagggggcccttatgacccacattgcagccccattccaccaccccttcctccccagagcagtctctgccgagggacagcacctgtgtcccttcgatgccacaacagccagttgaacaggggagccctttgctcaggcagcttctcctgcctctccctcctttctccttccctgccccatccccgtgcccttcttggcctgtggcgctggggagccatggtgtggcatactggggctcctgctccttgggccacttcctcagcccgggccccacaggccaaccacctgccagggctcccactgcactggctgtggcaggaggcttccccatgacccccgtgtggcccagctcggtgaggatgcagttctaggcacagcccctgggacagccagctgcctcccagaacacgtcagcctgctccagggtcctcagtcaccctgggccaagggcaacggtgtcccatggatgtcgaccatgccaacgtcacattccagcaccccttttgcttgatggcgtctggtggtagtcagcatgggggacccacatcctnacagccagaggtgatggtgggacaaaggaaggggagtctnggatgggtnccttaaacgaccattttnttccgnagcggggttcatttcttg

SEQ ID NO: 368695 - DNA, 1071 bp, Homo Sapiens
aaagaagggaagtgattttctcaaggtctacagttttcaatgacggtactatgtattccattatcttctctttaccaaacttaactggattaatataccaatgatcctttcaaattatatgacataaacttatttgctctccaatgttaatcacaattgtatttttttaatgggtaggttcctccttgtcagttattcattgaataataaattggtaaattgtgccaattaattctcaagttaatgattatttaaagaatttaatactaattcattttactacgcacacttacagttagttaattatgttgaaacctactgaggatggtagccgcacacacatgaataaacaagtgtttacttcacaagctgatttactataaattgtaacacacacaataagcaattacattgaaaaaactatcaatatagttactacgaattaccttttaccttgttgctttgttttaaaataggctatttattcaaacatgataacatggtgtattctgataatgtgcaccccaaatgtccagtaagccaaaaaagtaacaattctatgcttacgatacttgcaattaggctttgactttgaccttgcagaatcgagaagacatttggctatcctatctctaaatgaattatgcctcctgaatgaattacttggaatgaaaaaatcgctcaaagaaaggaagcaaaacccctttttatggctgggaaaatggatcccccctttggaccactccaaaagtttgggggtagaccattaacctcttatccacctttcgccaccacgggaaaaacatacacacagcggcccctttacacccacaatggtttcaaatcgaaacctgcaaaacaaacttccttaacaaccctgggaccttcctttttcatacattcaaaaaccccaccaattaacacacattgacacaactcattctttaaacctccccccctcaccgattttcactctccttggcacagcgcttgtcgcaccccccaaaaaattttccacatataacacacctgcaccacacttcttttcacccacaaaaacaaaaactccct

SEQ ID NO: 368696 - DNA, 974 bp, Homo Sapiens
  misc_feature (51)..(87): n is a, c, g, or t
cgaatgtatagactcactatagggcgactcggagtcacgcggtggcggcgnnnnnnnnnnnnnnnnnnnnnnnnnnnnnnnnnnnnnatcaggccaaatcggccgagctcgaattcgtcgagagcgggtgcgcgggagaatgtcgctgggcagggcgtgactctaaactcaagccgcacgaggcttctcagaggttcctctcaccacaaagccccatcacagtacagaaggcttttggcaaaacagtgatttctcagcttttccgaagaggttcctaaatgtggctgtaaccctgacgtgagagtcgctcccgcccctacctacatcccacacatttcaggagtcccctacgtattctacaaaacacagaacgaccatatgagccacttcagtccttctcagcattaggtgactgatttacatcagaataaaacaagagtttcttgctggttttaatgtaattaaaatgcaccatccctgtatgttcccaaaggagtgggaggaaaagtgtttggacaggggactgatcgtcagtaggttttcacagcgtggtttataaaatcacttttaagctctcttccacctagctgtcactgagaattcggtttgagaggaaatgactttctagacgatttttcatctagatgatttttcatcatattcaaccaagagtctttctcatcctctagctctctgaatgtccagaaatgtaatagaaactctgcattgatttccaaaggtctaatttccggaggagccctaactgtcctgtcctgcctacattgcctgccctctaacatcctgggaatgggaagtaacactgggatcggtggccggcagaactgcggaccctaaacaacttcagatcgtcgaccgggccgaggggagaatggcaagagaggactggacaggcccacgaacaacacatacgggtacaatttacccatttcctgtgccgaacagcaaagctccac

SEQ ID NO: 368697 - DNA, 928 bp, Homo Sapiens
  misc_feature (62)..(94): n is a, c, g, or t
  misc_feature (837)..(837): n is a, c, g, or t
  misc_feature (848)..(848): n is a, c, g, or t
  misc_feature (856)..(856): n is a, c, g, or t
taaatgggaggcggaaactctgccgggggcctgtttttttctccttgcggtggcggcgcatnnnnnnnnnnnnnnnnnnnnnnnnnnnnnnnnnatcaggccaaatcggccgagctcgaattcgtcgagagcgggcgggcagcggcaggcggcggcgggatggagcccgagcccgagcccgcggccgtggaggttcccgcggggcgcgtgctcagcgcccgggagctcttcgccgcccgctcgcggtcgcagaagctgccccagcgctcgcatggccccaaggactttctgcccgacggctcggcagctcaggccgagcggctgcgccggtgccgggaagagctctggcagctgctggcagagcagcgcgtggagcgcctgggcagcttggtggctgccgagtggaggccagaagagggcttcgtggagttgaagtctcccgcgggcaaattctggcagaccatgggcttctcagagcagggccggcagcgccttcacccggaagaggccttgtatcatctggagtgtggctccatccacctcttccaccaagacctgccactgtctatccaggaagcttaccagctgctgctgaccgaccacactgtgaccttcctgcagtaccaggtcttcagccacctgaagaggttgggttatgtggttcgacgattccaaccaagctctgtcctgtccccgtatgagaggcagcttaacctggatgccagcgtgcagcacttggaggatggagatggcaagagaaagaggagcagctccagccctcggtccattaataagaaggccaaggccctggacaactccctgcaacccaagagtctngcagcctccancccacctncctgcagccagcccagccaatgcccagaggagaaaccccagggagtcaagccccatgaagggcccagggcct

SEQ ID NO: 368698 - DNA, 987 bp, Homo Sapiens
  misc_feature (38)..(38): n is a, c, g, or t
  misc_feature (78)..(78): n is a, c, g, or t
  misc_feature (92)..(92): n is a, c, g, or t
  misc_feature (406)..(418): n is a, c, g, or t
  misc_feature (519)..(533): n is a, c, g, or t
gtgggaccggaaaaacccttccaaggtccaccccaacnttttaaagaaaccaaaagggaggggaaaaaggaaacccgnaaatgtccatatanaattgttttacctgtgccaatgcctaatatagtaaactcggctgtcccttggaatatccactgtgttgaagtagattccctctaggaccctttgatttccatgagttgggccccaaaccgtggtggaataataacaaaaagaagttaaatgcccacaaattttaatagtgagcttacttgaaggatttaagtaggtttaggaggtgaagaaggccgatggagaaatttacagattaattttggaagctctactctagctatcgaacaatcaaaggaatgcacctatcagctacaaagaacagctagacagctgnnnnnnnnnnnnnataaatgtttctgtgttgtgtcaaaatgatttctggtgatttaaactaacagataatcacagctgctgtctaaattcatagtgttgaaaattacaaaatgnnnnnnnnnnnnnnncatttcattaccggtgaagacggggtcggggttttaaactatttctggtacaatttttttgaaaacttttatgaggagactgggggccaagtagctgaataagggggaaggggatattctggtgcgtaaaaatcttagcagtggttaccaactctacgatatatatataaaaaatatatttaaaacgttcacaaagcgacagctatgggtcacattggtcttggtggtgaagctaaccggacctaatttcctgagtgccgggctaatttggaaacatttttttccatggaccatggataatgctgcaaatcacgaagtggtccatacttcatttacaacagggggtcctttaaatactttggaggatctcattaattggtccatacatggggggccttatggtaacttaatttgttacatcccgaggtggcatattcctaataacttcatctag

SEQ ID NO: 368699 - DNA, 616 bp, Homo Sapiens
aacttctgcacaaaggactcatccatctctgcttatgttgggacagaaagacacttctctggctttttactggcttgaacccaatgggacagagactctctagaaagtttcagggctcacattcacttgttgtccaaaaaatatttttgagtgtctcccaagtgccaaaccctggctactcccacctttgcctgagcccatgagcggtagtctgggggctggatgtgaggagttctgagttggctaggaagacacaaggccacaatggacatggggcaaagtccacttgctggacattggtcccttcccacttcccaagctgtccatcaggctgagagatctggaatgcataccccacactttgaagatgaggaagggcgagtttctcaaagtgtctgtgtgtgtttctcttttaatctgtagtggtttctgcattttgaggtagaaacagaaatctcttttttgagtgggaccactcgggtgcggcttcttagtcttgttgatataataaagcacatgcccactcctcatggagtggagaggagaaaattctaagggaacgtactctgaatgcaaatgtttctgagattaaacactagtcacttgttaaaaaaaa

SEQ ID NO: 368700 - DNA, 661 bp, Homo Sapiens
ctgcaagatggcttccaaggctgatgtattagatgtgtagtggcttcaactgtcagaaagacatggccattatgattgaggatgagaaagctttaagagaaactgtccgtaaaatgggagtgattgattcggaaagaatggatttcgagctgtggccagatgatgaacgtcagtgtgtgtaaaatgcaaaactacatgcttcatgtctgccatctcctgttcttgtaaacctggccttcttgtttgcctgcatcatgtagaaagaattgtgttcctgtcctccttataagatataagattgcggtataggtacacgctggatgatctctaccctatgatgaatgcattgaagcttcgagcagaatcttacaacgaatgggccttgaatgtgaatgaagctttggaggcaaagatcaacaagaagaaaagccttgtcagcttcaaggctttaatggaagaatctgaaatgaagaaattcccagacaatgatcttttgcgacaccttcgcctagtcacacaggatgcagagaagtgtgcctctgtgcgcagcagttgcttaatggcaaaaaggcaaactagatatcgatctggtggagggaaatcccaaaatcagttgacagtgaatgagctccggcagttgtaacacagctgtatgctcttc

SEQ ID NO: 368701 - DNA, 1186 bp, Homo Sapiens
  misc_feature (432)..(440): n is a, c, g, or t
tcccttcaagttcagtgtttaatcagcttctgactaggataaaatattaaggtagtgttctaccttcatagtgccttttaaataattctgtcagtccattttaatgtagcctagatgtgcagagtatgagtgtgtgggaaccggtttggcggaggactgaatttttgttttcttttaacagaaggacatataacatttgcttccttctctcaaatattagtggttacataattaaaataaaatttattgtaaaggtttcagtcaaaatattgatgaaaaagcaatataaaaccaaccatgtgtgtagatatgtatatacacaattatataactatatctacatgtacacttttcatactaagaactagatcaatgtctttaattccttaaatgtcattagctcaagtttgaacagaaacatattacattacnnnnnnnnnaaccaaaggcttcattcatttaataaaacaagaacttacattttatttccttgaacggacagagaaatacctttcatttatcaagtgtgtaaataatgcccatgtgacagaaacatgcataataatctcataagagaatatccagagataaaagacaagttgaaactcagggacattttacccaagcaattaatttccagatggagttgcccttgatcagtcatgtaaccactgggtaagagttctaaactatcagaaagagttctaaactatcagaatcaaaacagacaatacaatagaacatacttggaagctacctggcccaataggttcactcatgtctttctgataattccccctggtcccacctcactccctttctctgtctcttaccacagctaagcagaaattcaaccaagtaactgaccacatgtactgtgtgttgatctataagaaaaactggagagagaacttgaatcatggcatttgtgcgtatgaaattcaatcacatactggcactcatctaagactgatcccacttaaagcacccaaacgggacctacctaattaattcaggagatgtgttactgctcagaagagtcaatcagcagcgtaagtatgatctgtccagcagaattaactggctcatacacatgtaagagagtgacccagctactttgatttcctaattttgaaaacgctaatgattattttagcatttctttttttgcagatgctatggctac

SEQ ID NO: 368702 - DNA, 686 bp, Homo Sapiens
  misc_feature (548)..(548): n is a, c, g, or t
ctcccacacctccggggcaacatcttggggtcattgatcgctggctactgggtgtccacatgctggggcctgtccttcgtcgtgcctggagccatcgtggcagccatggggatagtgtgctttctcttcctcattgaacatccgaacgacgtcaggtgctcctccacactggtgacgcactcaaaaggctatgagaatggtacaaacagattgagactccagaagcaaatcttgaagagcgaaaagaacaagcctctggacccagagatgcagtgcctgctgctctcatgatgggaatgggctccattccacccgataccacgttcgtcatttctccccgggcgacggtgggagtggcacggcgccatcagcttcacaggggccttgaaaattccaggcgtgatagagttctcactgtgtctgctgtttgccaagctggtcagctatactttcctcttctggctgcccctgtacatcacgaatgtggatcaccttgatgccaaaaaggcgggggagctctccaccctgtttgacgtgggcggaatctntggtgggatcctggcaggtgtgatctcagaccgactgagaaaagggcctccacctgcggcctgatgctgctgtcgcggccccacgctctacatcttctccaccgtcagcaagatggggcttgaggccaccatcgccat

SEQ ID NO: 368703 - DNA, 1089 bp, Homo Sapiens
ccgtgaaggtagtgtctctgcttttagttatgtgctccgtgtcctcttgagtcacgtagtacgctctttctctcgtggggtggctcgtgatcactctcgttctccagtactcgtctgcgtgtctcccaggttgcccgtgcttcttccacgtgactttctgctgttgttcttgtccgcgtatcgtcccctcgttatacagccttttcagtctcgttggtcatgcgttctgtgccgttcatgggtatcccggtctctttctgtgtgatcgtgctacttgtttcctccagtgctcttcagggcttcatggtccactgacacgtttcgctgcggatgcgagattcagatgattccatgcgatcttgcgggcgtctgtatgtgtgggcccttgagtgtggtcctgtgttcgtcccactctgtgatgtccctgatggtgcccttgcccgcccggtgactttatatgtacttaacaaggaagtacggtctgaactgtaagtgcagcgctttcacgcatttgagaggtaaagttcttctgatgccggagccgcaggctccagatgcgcagcagcctctagggaagatggggagcatgccatggaacccgtctcagtcagcacagttgtactcgtgctggatacctgcgacggagtagtagtagaagtcatacgggtagctcatcatagttgtcttgtgaggaatgattgtgcatccacagcaaggacctcagcagaaggctcagtcatcggggtcggggtcactgggtaagagccgggggactgcgctgggtctcaccgggaagacactttgggcttgccgtagtaggtaggaaaacagtggagggaaaccgggtagggggaggagatagaaaaagccacccagaacgcagagcctcttctttccccacccctacctgtccacaccacaccagctgagcacatgtagaaaaactatggtattgctgattctgtgacaagaatcttcacccatcggtaacactgccaaacacccacagaacatggcaatgaagccctacatgcttttaaaagaaaacagactgttaagactaacagaaaccaacttagtacggcgaat

SEQ ID NO: 368704 - DNA, 717 bp, Homo Sapiens
atatttaggatcatttccaaatacatcacgtggttgaacctccatatgggtttttctggttgcactgagtatataacacggtttaaacttatgtattgatttataatacaagtatagtgacatttaattttaaatggctcttcaagtttttagactggcttgagagaaaaaaacagaagggtgtcttttttccctctcatcactattaatctaattgtaacatgtaatattattttaattgtaattattctaattgtaacatgtaattgcaaagcaaatatctcctaaaggaatatggagaactcattaaacagtgtacaattcttgatttttccatccatacaagaaaagatgcacgtgatcacctaaatattcgcatttggtatgaaaatgcattaattgtccctcttggaaactcataatagctttttgcttgtttttttctaactagataccatacatagttatgatctaggcaaatgctagctttttataactaggtatcaattcacagcaggtaaaaaagttccaagaacaaatcaatttagagtaaactataaatttccttcaagtaaaatccatatatgaaataactctgacagagaaaatataagacataatccaaccccatgaagactaaatctgaaagggcaatatgatttgggtttctgtggttaaagaaaaactcaactgagtaatttattaaaaccaagtgta

SEQ ID NO: 368705 - DNA, 780 bp, Homo Sapiens
gctgcgggcccgggccatggccgccgccgatgccgaggcagttccggcgaggggggagcctcagcaggattgctgtgtgaaaaccgagctgctgggagaagagacacctatggctgccgatgaaggctcagcagagaaacaggcaggagaggcccacatggctgcggacggtgagaccaatgggtcttgtgaaaacagcgatgccagcagtcatgcaaatgctgcaaagcacactcaggacagcgcaagggtcaacccccaggatggcaccaacacactaactcggatagcggaaaatggggtttcagaaagagactcagaagcggcgaagcaaaaaccacgtcactgccgacgaacttctgtgcagacttctgtcatcggcagcaacggatacatcttaaataagccggccctacaggcacagcccttgaggactaccagcactctggcctcttcgctgcctggccatgctgcaaaaacccttcctggaggggctggcaaaggcaggactccaagcgcttttccccagaccgccagccgacccacacagccacccttggggaggggagtgctgacacagaggacaggaagctcccggccctgacgccgacgtcaaaggtccacagggcacgcaagacatgccgaaggtccgacgtggggcctgcaatgcagccagtaaagatcccagagaaggtcggagaagctagagatccataaggagcgcaaagaggaaatcaccaagacgcatcgcgggacttgggacgacggcagactaacccc

SEQ ID NO: 368706 - DNA, 1200 bp, Homo Sapiens
catacctggacttctggagcccagagctgaagaaggaacgagccctgagaaaagatgaagcttccaaaatcaccatttggaaggaacagtacagagttgtacaggaggaaaaccagcacatgcagataacaatccaggctctccaggatgaattgcggatccagagggagctgaatcagctgtttcagcaggatagtagcagcaggactggcgaaccttgtgtagcagatctgacagaggagaactttcagaggcttcatgctgatcatgagcggcaggccaaagagctgtatcttcttcgaaagacattggaggaaatggagctgcgtattgagactcaaaagcagaccctaaatgctcgggatgaatccattaagaagcttctggaaatgttgcagagcaaaggactttctgccaaggctaccgaggaagaccatgagagaacaagacgactggcagaggcagagatgcacgttcatcacctagaaagccttttggagcagaaggaaaaagagaacagtatgttgagagaggagatgcatcgaaggtttgagaatgctcctgattctgccaaaacaaaagctctgcaaactgttattgagatgaaggattcaaaaatttcctctatggagcgtgggcttcgagacctggaagaggaaattcagatgctgaaatcgaatggtgctttgagtactgaggaaagggaagaagaaactgaagcaacatggaagtgtatcggagccattctaaatttatgaaacaataaggtagaacaactgaacggaggaactaagttcgaaagaggctcaatgggaggagctgaacaaagaaagcggctggtcttcaggctgagattggccaggtgaaacaggagctgtccagaacaggacacagaactactcgccctgcagacaaagctagaaacactcacaaaccagttctcagatagtaaacagcacattgaagtgttgaaggagtccttgactgctaaggagcagagggctgccatcctgcagactgaggtagaaacaattctgggatccgtggggagtcggtttcttggcactttttcattaagcgttacctgtgctggttctcgcaatgtccagaattcgggaaatattgaagtaatgtcatgacttaacttcttcagcagcgtgatcagtcacttgggctaccactgtaacccatcttatttca

SEQ ID NO: 368707 - DNA, 1057 bp, Homo Sapiens
  misc_feature (123)..(163): n is a, c, g, or t
  misc_feature (165)..(335): n is a, c, g, or t
  misc_feature (362)..(463): n is a, c, g, or t
  misc_feature (643)..(660): n is a, c, g, or t
gctttaataaatatttcagatgcctcacagtaagttcactcctttccatactgaggaaacaagaaaagaagaagaggcacatgaagtgtgcttttgggaatagaatttaaaattggattaagnnnnnnnnnnnnnnnnnnnnnnnnnnnnnnnnnnnnnnnnngnnnnnnnnnnnnnnnnnnnnnnnnnnnnnnnnnnnnnnnnnnnnnnnnnnnnnnnnnnnnnnnnnnnnnnnnnnnnnnnnnnnnnnnnnnnnnnnnnnnnnnnnnnnnnnnnnnnnnnnnnnnnnnnnnnnnnnnnnnnnnnnnnnnnnnnnnnnnnnnnnnnnnnnnnnnggtttcatcgtgttagccaggatggtnnnnnnnnnnnnnnnnnnnnnnnnnnnnnnnnnnnnnnnnnnnnnnnnnnnnnnnnnnnnnnnnnnnnnnnnnnnnnnnnnnnnnnnnnnnnnnnnnnnnnncatgtaaaaaagccttggctctctacctattaagaatgtctctttctctatatttagtaagcttcaaactttattgcttcgatttttgtggccctatatttagtattagcacaccttggttttgagaaaaaaacagggctttgtttttttaaataattactagcaactctgtgactacannnnnnnnnnnnnnnnnnagagacaggatcttgctatgttgcccaggctagagagcagtggcttttcacagacaaagtcataatgccctgcagtcttgggctcaagcgattctctcttccttggcctctggagtagactaaatgtgttagtctttgaatggaaaacaactattttctcatcattgggtcaatattgactgatcagtagtaggtcttttaccattctggacataagtctaggtgtagaaatcctttcctttatcatagaggatatggtttacattaccgttgttttcattgtgattgcccctatgtaacaatcatgaatattagattttttaaattgtagaatatcctaatatttatagccagcagcttgttactttgtttgtaaaattgcaaaaaaacaaactga

SEQ ID NO: 368708 - DNA, 1198 bp, Homo Sapiens
  misc_feature (524)..(534): n is a, c, g, or t
  misc_feature (888)..(1067): n is a, c, g, or t
  misc_feature (1114)..(1150): n is a, c, g, or t
tatatttgtggtgatttccccctgaatgactaggaaagttcagcatcttcatgttactggacatttaaaaaaatcaacttttatttgtccaattgttctaagtcaggtctcctggaagcagcatttcaaattaggattcttgtgtaagtgacttactgagagtcctctataagggaatgagaaaaaacagaacagggcagaagaggcaaatatgtggtttcaggagaaatccacacacagcgtaatcccatggggtgctcaggagcataaattgtaccaccgaggccagtgggccaggctgtaatgtcctgcatcagtcactggccatgggccaacctcagaggagaccaaacttcccaggtatcttcaggtaaagtgactctcatcagcccaggacaatcctctggaaaagggtgaagataagtcattagtacccaacatctgaagcactggcaatataggtacaccaccctgggaatggggatctctatggatgctaacagcatgtcatgttgggtattttnnnnnnnnnnnttcttaaaagctaagcatatgaaaccttcctggaatatgtattgtaaatgtactttcctacttgttgttatgtagagacaaatcaatcaaactttgttttctggctttgatgaccatgctcggcaggtctattgcaatccaagattattatttttttaattaacttacattttcctctagtattttacaagtttgttaaaaaatttaaatctgttaatctacctggatttactatgggtgtgtattgggtgtgagatagagatttgacttagttttttcctaaatgatagctgacacttcaatatttaaattaatataatgaagtaataaataataaaatagttggtactttcnnnnnnnnnnnnnnnnnnnnnnnnnnnnnnnnnnnnnnnnnnnnnnnnnnnnnnnnnnnnnnnnnnnnnnnnnnnnnnnnnnnnnnnnnnnnnnnnnnnnnnnnnnnnnnnnnnnnnnnnnnnnnnnnnnnnnnnnnnnnnnnnnnnnnnnnnnnnnnnnnnnnnnnnnnnnnnnnnnnncgagcgccgctctcgacgaattcgagctcggccgatttggcctgatnnnnnnnnnnnnnnnnnnnnnnnnnnnnnnnnnnnnncgccgccaccgcgatgaacccagtcgccctatagtgagtcgtatacat

SEQ ID NO: 368709 - DNA, 2036 bp, Homo Sapiens
  misc_feature (1811)..(1811): n is a, c, g, or t
  misc_feature (1940)..(1940): n is a, c, g, or t
  misc_feature (2007)..(2007): n is a, c, g, or t
ggcctgggtggcgaattcggcacgagggcggatagaggagcgggcgctgggaccgggaatccccgagctgcgccttctggggacgcggcccgggctacgtcggggccgtccgtggggagcggggtcctggaggctgcgcggggctgaggcggcctcgatttgggaactgcctgaagatgccggcctaagcctggagtccaggcatggacttccccacaatttcccgatccccttcggggcctccagccatggacttggaggggcccagggacattcttgtgccttcggaggacctcacccctgacagccagtgggaccctatgccaggaggccccggcagcctcagtcggatggaacttgatgagtcaagccttcaggagctggtgcagcagtttgaagctctgccaggcgatctggtgggcccatccccaggtggagccccctgtcccctacacattgccacaggccatggcctggcctcccaggagattgctgatgcccacgggctcctgtctgccgaagctggccgggatgacctgctgggcctcttgcactgcgaggaatgcccgccttcccagactggtcctgaagagcctctagagcctgccccccgactgttgcagccccctgaggacccagatgaggattctgactccccagaatgggtggagggggcctctgctgagcaggagggcagcaggagctcaagcagttccccggaaccctggctggagacggtgcctctagtcacacctgaagagccacccgctggtgcccagagccccgagaccctggcttcctaccctgccccccaggaggtgcctggtccctgtgaccatgaagacctcctggacggtgtcatatttggggccaggtacctggggtccacccagctggtgtcagaacggaacccgcccaccaacacgcgcatggcccaggcccgggaggccatgaagcggatcatggccctcgatggggacaccacgcccatgatgaatgtcctgaacatcgttcactatgacaccaatatagtcaccgcccaaggagccttccggtctacccttcgacacagtgctacgcctttgatacccgccctcgcgactatccctaaaccaagctatcgttgcacgcgattcatacttcatccctgcctgcctccggcttccgcacgctttttacaccgtgcccttcctgaggcaacccctacgcccactaaaccttagcgcgcggagccccgaaattggaggtgaccgctgtctagttaatcccgaaccgcctttcccggcctcgtcgtcatctccgcttctgatattgcgcggcgtaccctcttaatacccttcctgccaattcttacctaccatcaccaaccgacatctctctctcacctcccagctgcgtccaaagccgtcgacactttgcgctcggtcatattgtgcctatatccaacagcagtcgaagagagctcattgtggccctctccacgattctactttacctcttgcattaaattactaccacgctttgcaatgatcagctaccgtagcatctaagacgataaaacgctgagcataacaccctcgctccactattgaagcgactttcccaacgacgccgtaacattgaatatagtctgttccaagaccgatctgatataagacaaaacggctcctccacacgtcatacgtcgacacgcccgcgcgagaatcagagcatgactcgagagaatcagtacaaatatgatatagtcatcgttactaacacaccaggcagagtacatatggtatatcgactcgacacctcatatctagatncacgtatctgcgacacaagagacaatgcggacacacacctaccgtcgatggctacaccgaagatcgcttggctgggcggtcaactcgcgaaggagagtaaagcaatcaacgcgaccactaccagatacngagagcgatgaagtatcgacaagtgactgatagatagagatatctacgtcatctctcgccacgtcantactaacaaactactctatctgcgtcaac

SEQ ID NO: 368710 - DNA, 857 bp, Homo Sapiens
  misc_feature (795)..(795): n is a, c, g, or t
  misc_feature (847)..(847): n is a, c, g, or t
ggatgcaaaaaatcggtaccagcgcctctatgtaaagttcctggaaaatgtcaataagaaggactacgtgagggtctgtgctcggaaaccctggcatcggcccccagtgccagtcagacgctctgggcaggccaagaaccccgtatctgctgggggtagctctgcacctccccctaaggccccagcaccacctcccaagcctgagacccctgaaaagacgacatctgagaagcccccagcagcagactcctgagacggccatgcctgagccccctgcccccgagaagccctccctcctgcggcctgttgagaaggaaaaggagaaggagaaggtgacacgtggagagcggccattgcggggtgagcgggccaccagcgggacggcagacacggccagagcggagtcttcgccacgggacaacctgccacatcccggctgcccaaagcccggcctaccaaggtgaaggctgaaccgccccctaagaagaggaagaaatggctgaaggaggcaggcggcaacgctacagcaggcggggcccaccaggcagctcctcggactcggagtcctcccctggagcccccagcgaggacgagcgggcagtacctgggcgtctgctcaaaaccagggcgatgcgggagatgtaccggagctacgtggagatgttggtgagcacagcacttgacccagacatgatccaggccctggaggacacgcatgacgagctgtacctgccccccatgcggaagatagacggcctgctgaatgagcacaagaagaaagtcctgaagcggctntcgctaagcccagccctgcaggatgctctgcacactttcccacagctgcaantggagcagag

SEQ ID NO: 368711 - DNA, 1179 bp, Homo Sapiens
cggttctcttacccagacctctgtcccacttattttattagacgttcacaaagttccaacatagtcacttatcctgctgtatgggagccagtcaatcagtgatccatcaatacacgacgtctccactgaagagaatctttcggtctttgtcatgtaagccaatactgcccctggagtgacctggcatgtgcataacagtgagctgtctgtcaccaaggttgatcacatccccatcctgcaggatgagggtgggctgcaccgcctgtacccggaactgtctggccctccagccggggctgggcgcccgcaccacctcgctatcggaaagccaggtcacggtctcaaagttgtccccgcgagccagcgcctcggcctcggcgtggtgcactgccacgcggtcgaactggtagaggccgccggagtggtcgaagtgcacgtgggtggccacggcaagcaatggccgggcgcgaccgcgtcctctttgccctctcggtcctgcaagaggccgaaggagtacaggtactccgggaggctgcgcagccccaggcctgtatcgatcaccacgtcctgctcggagccgcgcaccagccagatgttggcacggttgcccgactcgtagaaacgttcttgaatccagaagataccatcgcctagagacttgtgggcgtaccactcgagcgccgacatgctgggcaggggtgcagccaggcggggtgagtgtgggcgtgcgagtctcccacaggctgtccacacacagggcactgcggctgtgtgaagcggtctgcctgcagccagggaggaggcgtagagcgaggcgggggcgtgggatgcgggggtcggaataggaggaggaaggacgcagaccgacgctgcccgtagcgtgcgctcccgcacccttccgccaggtcggcagcaagcagaggctgcgccaccagcacgggggcgcaggagctaccgcagcctcggcagccgcaccacgagagagctttaacgcaggggccactgcagcagaatggagactcaggtggcgaccgtttcgccaccccgggcgtgtgacagcagaggcccgcagtgagggtgggaagagctagaaccgcccacccactggctctgcagggcgcgcactcccagctggcgcagaaagtgtggggcctcgcgggtgatcccgggattcggacc

SEQ ID NO: 368712 - DNA, 1187 bp, Homo Sapiens
ttcttatcagctaggatgagtatgggagtcgtgtatattatggactatctactctctacttcgtatcagaaagagaattctctggagattaggcgggctaggtgtagcttggacatctttttggctttgtatgtatgtgggtgtattagatcagtgatagcaatgcatgatgtcgttcttcgtgtgttcagggggagtcccagtttttaatatgctgttgctactacgtgagtcggtcagtcgtagcatatggttcaatgttagcttcctcctaaggttttagtaggagaaaagtcccagctcttacttagagctccagcaagccacgtattactgtaacagggttgttcggatttgtacgtatattgatgtaatggtaggaaacgtaagcatcacgtttattttccaagtaaatactaggtgtaggctggattcaacttggtcctttggcaatgggaggggtatggtgaagatggtggtcttggaggtggacatttatccaacaaaatgctactgttagataagccatttttacctagattcctgcatgccttcagaacttctgctgagctggggtatatggacacagacattgatggtatgatctgtggactaggtttgtggttaaccagaagcagatctgttttcatggggctctgagattcttccatcccttctccattaattgtgtgtagcccactgtgagggctgttaaggctggtaacactgtttgtgcttgtctgctcagtggattttggagaaggtgttgctgttgaaatggctgaagatggtgaagaggcaacagagttatcagtctttgtatgaacagctgggtggatgttattgactttgtcacaggttccagtacccacattgttacttggcttttcccatcaacaaggcagagagctgaggattgtctgaacttagtaaacctggtgacttagaatctccatggctaggactgcaaacagcatctgccgtcatctgatggacatgattaggaagtccctcgacactggcagtgctgttaggtgtctctccagtgtgcctgcttgtttcaggcaccgtcaatatgtttcctgaaggcttgctctctttggttaaggtaatgccttgttgtccacctgaggtagcagtgtgagaggagaggtgattgagatccggagaattccggaccggtccag

SEQ ID NO: 368713 - DNA, 831 bp, Homo Sapiens
ttggatccctgcctgccttcgggccttcgctgcgctccatgatctcttggtagaggggcaggtagacatgtgcaggcacaggctgtgcccggaactgcctgtggcactcggcctcttcctcaccctgcctctgggcccgctgcctctcctgctcaaaggaggcaggtgagcccagccactcggccttcttccgggcctcgcgcagcgtcatgcggaatggccgagggacagtaatggatgatgcccaggagctgacgcttctgtgctgggagggaggccgggagcctgagggtggctgggtctgaggcctgggaatgttggagggaaggttgttcagggagctgcagcgccttgtggagccacacctcagagcctgcgggcactggacctgcaccatccccctgtccttgtcttggaagaaactctccaggtcctcctcatcttcagagaggttttcatcactctctgggtcagactgaaagagagactccaacagacaccatctccctttctgcttcagttcctgtaagttctggtaaatgctcccagttgagtcagaagtagaatctatctcctcctctgggctgaggaactcgtcaagtttgctggccctgggcaaaaccagcccatccccggacagctcctctcctgcctctgtgtctgcgaaggactcggggggaaatatctgacggctcccctccgcgcctccgggggctccctcaggcctccccacggtcatttcagctggacagaggcagcagcgacagtgacagcgatagtggcagcagcggtggcagcgagagctatgcggggccagggtccaccccttct

SEQ ID NO: 368714 - DNA, 875 bp, Homo Sapiens
tgcgcttggttaatttttgtattgtagtagagacaggatttcaccatgttaggccaggatggtctcgatctcctgacctcgtgatccgcccgcctcggccttcccaacgtgctaggattacaggcatgagccaccgcgcccggccgggacttttctttttcttctgaggcccccattcagtccgaggaatgtagccttcattcagcgcaacgtactgtttgtgttctcattggtgctctcagacctccagccaggtggtggagagcgagcactgccagccacttcagtgcagggtgtgactgagccgcaaggacagcggggtcaggtgtccgggcgccaggtagttctcagaacttggtacatgtcaacttgtccagcccaactgcagcccaggacagcctgtccctgttcccattctacagacaagacgcggaggcagccgggagggtgaccaaggggagctgttaagccccagatgtctggtgcagggtccaaggatgtgaccacatgaaacagaacacatagaggccgaggtggcaaacctgttctgtggcagggacaagccggggacccgagggtgagaaaggtcctggccccaaatgcagcttgggcctcctgactgtagcacagggggaccagcctccccactgaggcttggtctctagagggtctgcagagatgctggcacctcttgttgtgggcagctttgaatgctgacctccataagatggggcctgggggccagtacaggccctgcatcaggtgccctccaacaaggccctctgcaaaaggcttatgctggttgaccagcccctgagagcaccacttcaagtgtcggggcagttgggaagacaaccacttttccaaaatgtaac

SEQ ID NO: 368715 - DNA, 1520 bp, Homo Sapiens
  misc_feature (678)..(678): n is a, c, g, or t
  misc_feature (1328)..(1340): n is a, c, g, or t
  misc_feature (1437)..(1458): n is a, c, g, or t
aaaaggccagctgtccggcccggatgttaggatattaactgaaaaacttaccctgaagaatgctgctatgctactggaatttgcagcaatgtataggtgcaaaacagttgaaactgtcttgtttacagtttataggattgaatatggcagctttacttgaagcaaggtctcttgatgttttaagcgatggtgttttgaaggatctttctgagttttaccggaaaatgattccagcaatggatagaagagtcattacaccatatcaagatggaccagatattagctatttggaagtagaagatggagatatcttcttgaaagaagaaataaatatggaacaaaatcattcggaaactatgttcaagaaagcaaaaacaaaagctaaaaagaagccacgtaaacgttcagatagttctggaggttataacctttcagatattattcagagtccatcatctacaggattattaaagtctggtaagaccaattctgtggaatctcttccagaactgttgacatcagactctgaaggaagctatgcaggagtgggtagtcctagagatttacagtcccctgatttcacaacaggatttcattcagataagattgaggcgaaagtcaaaccgtatgttaatggtacatctcctgtgtattctagggaagatttaaaaccatggngaaaagtcaccaatacttaaaatatctgctccacagcctattcccagtaacagaattgatactaccagctctgccagttgggttgctggttctttcagtcctgtcagccctcctgttgtggatctcagaactatcatggaaatagaagaaagtagacaaaaatgtggagctacaccaaagtcacatttaggcaaaacagtttctcatggagttaaactttctcagaagcaacgaaaaatgattgcattgactaccaaggaaaacaattcaggaatgaatagcatggaaacagttttattcactccttcaaaagcccccaaaccagtgaatgcatgggcatcttctctgcattcagtttcatccaagtcattccgggatttcttactagaagaaaaaaagtctgttactacccataaatcacgcgctcctgccacacaagcttcttttaaagcgattgctacatttttcagggaccaacaattgtacccatgcttctacccacgctacacccccccaacaacaagacaacctaagctcccgacattaaccctctatcacaatgctccccttacgccagccacaatcgccttcatccaaagcgcccagacactcgatgccccctcccgatttactgcaccgcatatctactnnnnnnnnnnnnnacccaacacgcccccttccgactcaacacacaaaaccgagccccgccgtgcctccaaaccacgcaccgaccccactatccccacgaccatacaacannnnnnnnnnnnnnnnnnnnnntgcaatcagagagacaccaatccacacaacaacctaatacgtagcgcaaactatcacgtgtc

SEQ ID NO: 368716 - DNA, 1343 bp, Homo Sapiens
tgggatctgcgctgcgcgccgcgctgccgcatcgaagctccggccgcttcccccgtcgccagggggggagcctgcgcgccgagacccctgcgtgtctgcgaacagacctccggcctcgggccatcaccccgggcagacgctgcagcccctgtccgggcctcttgcctgccgcccccatgagaaaaaccaacatgtggttcttggagcggcttcgggggtctggggaaaacggtgctgcccggggcgtggggagtgaggcgggggacaaggcctccaaggggcccctgtacagcaatgtgttgacgcccgacaagatccccgactttttcatcccccccaagctgccctcgggccccgcggagggcgagggacaggccgcgctgggcccctccacgtcggaacagaacctggactctgcggccccccgacagagcccacggagcccccggctgcctgccaagctaggcagccgagagcaagagcctgctgaaggcagccacccggccacgtgatccagatcgagagtgccgaggactggctgtccgcaggaggccaactgacgccgacccccaggcccagggtgccatgtacctgccctcggatgccaaaggcccagacgtcctacgggcttcgccatgctggccgagagaccccacacgatggcgcaaggagtctcatgttccacagtgagcacggggctctggcccaggtgggctccccaggggccgggcgccgccgggcagctgccaaggccaacgggggtgatgggggccccagggaggctggcggggccctcatgagccccggccgctacttcagtggcggggagagcgacacagggtcctcggccgagtcctcccccttcgggtcccctctgctgtcccgctccgtgtctctgctcaaaggtttcgcccaggacagccaggccaaggtgagccagctccggcactccgtgggccgccacggctccctgtctgcggacgacagcaccccggacgccagccccgggagccggcgccgcctgacccgccgggcacccccggaacctggccccgagtcgggccaggcgcgtggggagcacacggtccacgtgggccctcggggcaacgtgcggctgcttggcgagtacgaggccggccagggcccgcctgcgggtggaccttgctggccgccgagggccctccaacaaccgcctggtgcgaacgccccgcaggccatcaaactgtctgcgtttgggcctcgtggccctggttgccggggcaaaacttgcagcaagcccgccgccagataccctttcgtgggaaggaaaacagtcggtgccggtcccccccggtctttactat

SEQ ID NO: 368717 - DNA, 962 bp, Homo Sapiens
  misc_feature (97)..(133): n is a, c, g, or t
  misc_feature (201)..(238): n is a, c, g, or t
  misc_feature (739)..(739): n is a, c, g, or t
  misc_feature (848)..(848): n is a, c, g, or t
  misc_feature (878)..(878): n is a, c, g, or t
  misc_feature (895)..(895): n is a, c, g, or t
  misc_feature (907)..(907): n is a, c, g, or t
  misc_feature (921)..(921): n is a, c, g, or t
  misc_feature (934)..(934): n is a, c, g, or t
  misc_feature (942)..(942): n is a, c, g, or t
aaagcaggcggtcggcccgggagttgggatgtatgccagcctgaactatatctaagagacttgtaaaacagaataatgtatatacgctgtgagatcnnnnnnnnnnnnnnnnnnnnnnnnnnnnnnnnnnnnngcttttattggtgtttcactttgaaagagcttttagcaaggttgtgcttttcattgtgctctgtacgnnnnnnnnnnnnnnnnnnnnnnnnnnnnnnnnnnnnnnttagtcatatcacctctgtttcctccccaacaaaagaggcttttcttcttaattacttgtggtaaacaaagacatgggattttcttacatgagattctcatttgtaggaggatgtgatgtcccacagaagacccagacggtctgtgtggcctatttcccccgtcaggttgcacaggtgcatgcaagagcattcttaggagaccactgttttgaaaaacttttgacttgtacgtgttagccttcatgaaatggcagtacagagatgggtccccaaagtggagtgtatttacagcttggtaaattagagacatgcacacacaaagaatcagtagggagaaacaaaaatacaagtcccgttctgtagctcgtggccctttgaatatgtataggaagagttgcttcccatctcagggccctgccaaaaaaagaagaaagctagcctatggtggggctatgccccgtggagtcaaatacggctctgtgttcccatagcagctgcgngagggtttggccgatgaagtacctgctcagcttagctaatcagattgaaggaagacatgtgtcttttcctttttgtttaaggcactcggtcccttattttattcagtangcaggttttttaaaaatcttttattatccnttatgggggtccaaacnttggatttgtcntggaaaacatccantttttgtgggggnttgtggtntcccggtccacccaaacggg

SEQ ID NO: 368718 - DNA, 880 bp, Homo Sapiens
  misc_feature (804)..(804): n is a, c, g, or t
  misc_feature (866)..(866): n is a, c, g, or t
ggctggtacaggcccggagtgtatgggatcatcctcagaggcatttcctcgcgtaaatcctgcttcgccttcagggagtattccctgccagcgtagtcagtagcgagggccaggtcccaaacctgaagagatatggccacgcctctgtcttcttgagcccagacgttattctcagtgcaggaggattggagagcaggaggggcggcactgccgagtgagccagtttcacttgctctcaagagatgtgactctgaatggaaaggcagccaaataggcagttgtgggactggagttcagtgggatggacgcctttatcacaccatgacaagactctcagagagtcgggttctggttctgggagggagactgtccccagtaagtccagccttgggggttctccagcttcatttttttaagagtgaggataataacactgaggacctgaaagtgacaataacaaaggctggccaaaaggatgattccactttgtgttgttggcggcattcaacaacagaagtgtcctgtcagaatcaggaatatttgtttgtgtatgggggtcgaagcgtggtggaacctgtactaagtgactggcatttcctccatgtagggacaatggcttgggtcaggatcccagtggagggagaagtacctgaagcccggcattctcacagtgcctgcacttggcaagggggagcccttattgctggaggtctcggggcttctgaggagccattgaactctgtgctcttttctgagaccaatctcttgtggattcctctgggagtcagtagacatcccagcctnccattaccccaaggtaactcccacaacagctccatgtgctcaatggaaagctgttactgggntggaggggtctgga

SEQ ID NO: 368719 - DNA, 1144 bp, Homo Sapiens
tccggatgaaggcccggcgacacagagccagacccgctcatcccgatctcccagaaggcgactgacagctgactgccagaaggagatcgcgccaggagactgactgctctgtgcccacccggggacccgggcccgttcagccgggctggctggtgcgccctctgcaaagcctgcgccagggaggaggcaggctcaaccttcagattcccagggcctctctgtcgctgtcgccgtcgccgtcgcccgaggtcccagcggctctaccagattgttgtggaggcctctcacccgcacagataatttttctctgtcttctcccagttcgctggtcatggtctctggcctaaagtaccagcatagactgttcctctcctgtggagtctaacactctttgccaaactggcacggtgtcttcctgggaagcaagaaatcactgagggcctgtcagttcctgccagggtggttcgatgctgtccttttctcctactccttccatggtctgcgttggaaaatgtgtgttagttcgaattcagcgagttctcattggggtgaacatagtcctaaaaatgcagttcataaaaatcaaccacacagaggaagaaaaataaataaatcagtaaagcagctcagcaaaaatgcaggtgtggcgggccctggcctctgcaccctcatagaggggctcaacagcatcaacaaaagggggggcgaccaaaaggtgcccttgccaacccccagaggggccaccaaatgagccaaatgggcagcctccttgacccggcccggggggcccaggggaattgaacattagaggaagtgtcttaaacttattttaccaacgcaggtttttctggagggtcccccaacccccaaagcgcgagcggggccgaaaagggccaacgcgaggccggggtccccggtgagaccaaataaacgccccccaaacacgttactcggcacacgcgatacaacaaagcgctgaaccccgcgccgccaacgaaaaaacccgcgcccaaaacctccatccccgaactccattcacctgtctgtacactatgcccgatagggcggagcgccaccttgcccgcctaaagcgcgtgtcgcccaacccgccgcccctgagacccgccttcgccgttatattaac

SEQ ID NO: 368720 - DNA, 547 bp, Homo Sapiens
  misc_feature (429)..(429): n is a, c, g, or t
  misc_feature (435)..(435): n is a, c, g, or t
  misc_feature (448)..(448): n is a, c, g, or t
  misc_feature (478)..(478): n is a, c, g, or t
  misc_feature (486)..(486): n is a, c, g, or t
  misc_feature (494)..(494): n is a, c, g, or t
  misc_feature (531)..(531): n is a, c, g, or t
cccggcgagcaacagagccagacccgctcatcccgatctcccagaaggcgactgacagctgactgccagaaggagatcgcgccaggagactgactgctctgtgcccacccggggacccggcccgttcagccgggctggctgggtgcgccctctgcaaagcctgcgccagggaggaggcaggctcaaccttcagattcccagggcctctctgtcgctgtcgccgtcgccgtcgcccgaggtcccagcggctctaccagattgttgtggaggcctctcacccgcacagatctcccctgcgaccatgtcttccattaagattgagtgtgtttttgccagagaactgccggtgtgggtgagtctccagtatggggaggaagtgttccaattttttgttcttttgtaagacatttcttgcaaaaaaaggttttnccggtngggatttcatttnaaccaaggcaagttacagcgagttgaaccntgggttgnccccattnagtttccttgggttttttggccaattggggagggtantgtttgccaacctttg

SEQ ID NO: 368721 - DNA, 616 bp, Homo Sapiens
  misc_feature (148)..(156): n is a, c, g, or t
ggctgttacttttatataaattctctgcaaaggaaggcctctctatggactacaatttggaggcagccacttgtggtgcctgcttctgttaaacaatgtggatatcaagcccccccaaattatctgttttaatattgaacctagagcnnnnnnnnncccttccctgtccactccatgtaaatgcctttagcatttcagttattgtatatttggtttaaggtgacacttcagcatgccgctaatgtctttgttagtgacagtgcattttgtagtactgtacaagtgttgtgctaacagtaagccatttcttaagttttttgccttgattagggtgccctaatttgagggttttaaaaaaaactatatttttgttaattataaaactgtaaagagctataaaagctattcccatttggttagtcaaaagggttttattgctaaatgtttggtgtaaagttgagacccttttccattttggtgacagatttctttggggaaaaaaggcagctttctgttttataaatgcagacttctgtttattgaatgaagcatatctcagtgtttatctgtcaggttttgaaacatttcatatatgtccaaatacttgggaggattt

SEQ ID NO: 368722 - DNA, 885 bp, Homo Sapiens
agcggccccgtctgcgtccgcgttcgcggctcccgtttgcatcatctccagccggcggctgctccagggaggctgggcgcgatcctctccgcccgcggctccgacccgcactctgcgcctctcctcgcctttctcgcacctgctcctgcgccaggcccggagacccccggggcggcttcccagaacctgcggagcacaactggccgaccgacccattcattgggaaccccgtcttttgccagagcccacgtcccctgccacctctagctcggagcggcgtgtagcgccatggagaagagcaacgagaccaacggctaccttgacagcgctcaggcggggcctgcggccgggcccggagctccggggaccgcggcgggacgcgcacggcgttgcgcgggcttcctgcggcgccaagcgctggtgctgctcaccgtgtccggggtgctggcgggcgcgggcctgggcgcggcgttgcgcgggctcagcctgagccgcacgcaggtcacctacctggccttccccggcgagatgctgctccgcatgctgcgcatgatcatcctgccgctggtggtcctgcagccttggtgtcagggcgcccgccctcgctcgatgcccagcctgcctcgggcgtctgggcggcatcgactgtctgacctactatggcctcaaccacaactgagtgccatcggctgctcgccgtggaccttggcgttcatcatcaaagccaggatcccggtgcgcaagaccctttaagtcccagcgacctgggtgctggaggactccggggctcctccttgtcccaaagagaccgtggactctttcctcgacctggcagaaacctgtttcccccccatcttgttggttccgctttccgtcgatcccctt

SEQ ID NO: 368723 - DNA, 1096 bp, Homo Sapiens
  misc_feature (1014)..(1050): n is a, c, g, or t
ggagatgaataggatttattagtcaaaacgtcaaaggactatcataaaagtaattgtatttttatatataatttttcaaactcttgtatacaaaatgttctcattacacttggtgcaataaattcagaggctgttatgggatgggagatagcaaaattgggaccaatacttttctaattacttaggaaaatgaaaaagtggggcttggttttcctttcacaactaagttgatggagacacgacgctccagagagtctgttattctggctggttttgtttgtttctgtgaagtttagcatcactctccttgtaccaagtccttaggcctttttcaatgtgttctattcgtgcattaaaggcctcttcctgtatttgcagtttttcgtttatctcggtctgaatgccgattaaaatgtcatctgtgacttgatccagcactgattgttacatcttcaatggtgaaaccaactaaaggatccatgtctgaggtgtcagtttctggctgagactcctcagggccttgttcttgatccaacctcttcatttccgtatccaatattgtggggggctctatgaatgttgaataaatatcaaatgagattccttcttccagaggatttgggaaagggccacatgcagacttgacaacctctatcacttgctcagttcctatcacaatttcttccctggcagagtagaacataaactcgtatagcttgtagtgttgaaataagctgatttttaagtaatcaatgatagcattggcttgttttacatcaaagatattccagtcctcactcttttgcgaatgtgttggtcctatttcagccataacttctccaagccattttatgctttcctctaaggacatatgtagtgctccgattcgggcgtggttcccgccggggtcggccctgccggggtcggcccccagggagtcgtccctgcgacatcgccgcaatctcggccgagaccgctctcgacgaattcgagctcggccgatttggcctgatnnnnnnnnnnnnnnnnnnnnnnnnnnnnnnnnnnnnncgccgccccgcggtgagctccattcgccctatatgatctatacatc

SEQ ID NO: 368724 - DNA, 1337 bp, Homo Sapiens
  misc_feature (1148)..(1148): n is a, c, g, or t
gtgagtatgccagccgagtacagcccacatctcttcaccccaccatgagctccggcggccggtgctgcaacgccagacgtccatcacacagaccatccgcagggggaccgccgactggtttggagtgagcaaggacagtgacagcacccagaaatggcagcgcaagagcatccgtcactgcagccagcgctacgggaagctgaagccccaggtcctccgggagctggacctgcccagccaggacaacgtgtcgctgaccagcaccgagacgccacccccactctacgtggggccatgccagctgggcatgcagaagatcatagaccccctggcccgtggccgtgccttccgtgtggcagatgacactgcggaaggcctgagtgccccacacactcccgtcacgccgggtgctgcctccctctgctccttctccagctcccgctcaggtttccaccggctcccgcggcggcgcaagcgagagtcggtggccaagatgagcttccgggcggccgcagcgctgatgaaaggccgctccgttagggatggcacctttcgccgggcacagcgtcgaagcttcactccagctagctttctggaggaggacacaactgatttccccgatgagctggacacatccttctttgcccgggaaggtatcctccatgaagagctgtccacatacccggatgaagttttcgagtccccatcggaggcagcgctaaaggactgggagaaggcaccggagcaggcggacctcaccggcggggccctggaccgcagcgagcttgagcgcagccacctgatgctgcccttggagcgaggctggcggaagcagaaggagggcgccgcagccccgcagcccaaggtgcggctccgacaggaggtggtgagcaccgcggggccgcgacggggccagcgtatcgcggtgccggtgcgcaagctcttcgcccgggagaagcggccgtatgggctgggcatggtgggacggctcaccaaccgcacctaccgcaagcgcatcgacagcttcgtcaagcgccagatcgaggacctggacgacccccggcccttcttcacctactgggcttaccttcgtgcactcgctcgtcaccatccctagcccgtggtgcatctatgggcatcgcgcccgngggggcttctcgcagccatggagacgggtggactcgggtgctgcgggaaaccgcgggggtcttccgaaaaccgtccaggtacggtgcaccagggagaaccttcttgggaccgggggccccagttcggaagggcccctcctcccccctgggggcgccccaaagttttcccccctgcaatggcccccagaa

SEQ ID NO: 368725 - DNA, 189 bp, Homo Sapiens
gagctcggtcccaagttgagcttcgggcggcgcagcgctgatgaaggcgctccgttagggatggcacctttcgccgggcacagcgtcgaagcttcactccagctagctttctggtaggaggacacaacctgatttccccgatgagctggacacatccttctttgcccgggaaggtatcctccatgaaga

SEQ ID NO: 368726 - DNA, 1222 bp, Homo Sapiens
ggaattccttggatcccgttttgcccggcagcagcagcatggacgtgttggctagttatagtatattccaggagctacaacttgtccacgacaccggctacttctcagctttaccatccctggaggagacctggcagcagacatgccttgaattggaacgctacctacagacggagccccggaggatctcagagacctttggtgaggacttggactgtttcctccacgcttcccctcccccgtgcattgaggaaagcttccgtcgcttagaccccctgctgctccccgtggaagcggccatctgtgagaagagctcggcagtggacatcttgctctctcgggacaagttgctatctgagacctgcctcagcctccagccggccagctcttctctagacagctacacagccgtcaaccaggcccagctcaacgcagtgacctcattaacgcccccatcgtcccctgagctcagccgccatctggtcaaaacctcacaaactctctctgccgtggatggcacggtgacgttgaaactggtggccaagaaggctgctctcagctccgtaaaggtgggaggggtcgcaacagctgcagcagccgtgacggctgcggcggccgttaagagtggacagagcgacagtgaccaacgagggctaggggctgaagcatgtcccgaaaacaagaagagggttcacccgctgtcagtttaacgggtgccggaaagtttatacaaaaagctcccacttaaaggcccaccagaggactcacacaggtgaagaagccttataagtgctcatgggaagggatgtgagtggcgtttgcacgaagcgatgagctcacgaggcactacaggaaacacacaggtgcaaagcccttcaaatgcaaccactgcgacaggtgtttttccaggtctgaccatcttgccctccacatgaagagacatatctaaaaaaccgaaaggccagagttgccatggcatcggcatagtgtctaaaggaaacgccatgaggcaggaggctggacttcaggcggggacccaattgcctcgcagaagaaagtctcacgttataaactctgtacacacaaacagaagacaagagatatacaaatgactcacagaaacaaaaagattaaaaagtgtcatggacgacaagtatattttacaaatatatacgtctatacttgatgcgttgcctagccagatggaagaagatgaagaaag

SEQ ID NO: 368727 - DNA, 912 bp, Homo Sapiens
  misc_feature (83)..(83): n is a, c, g, or t
  misc_feature (199)..(199): n is a, c, g, or t
  misc_feature (209)..(209): n is a, c, g, or t
ttgggtgcttaggaagatgattacctaggagatttcacgtttgaaatcatctgaatttgggggatggtgcatatccagaaganaggcaaaccaggaggcacctttctgactttttttgcttgcaagggatcaagcgctgcagagtcatggagtggtctcctcctggaacttgtagcagagaatgaatagtatgctgtcncaggttttcntgaagaagatagctgtgctgggctcccaagccccagatcttgtctcaggagaatagattgacagcctggtaatccagtatctctgctgaacagggaaaatgagcctctctctgatgtttttcccatcagatttgagttcatgaaaggtgttggggacaagccttcatgggctcctaatcgactgtcattcaagtgatcactgtaatgagggctgtctgtaaaacctctagatgaatcataggaaggacttggttgaccacttgttccccaagatgttgtacctcctctttcatcaatacctgatccactgaattgactgcttcccagtgtagttggtctagttttcccactattaacaggtggggaaaacatcgcactgaagtccagtaggtcgctcagctccttgtcggtccctatagcggccatgcgttgttgctggggattcatcttcggccacttctagcaggtcctgccgccccgtctccgcatccaaccaccccgattaaagttcactttggccgggagaacgggcttgggcttccccttgcaccgcccagcggctcggttcactttgccccgcacgagctctcgggtctgggagggggaggcggctttcgggcctggccgccccttcctcccggggcgggctgtcggtccccccgaatagaacttgtgggtctcttcaggcggacatttctttcgc

SEQ ID NO: 368728 - DNA, 823 bp, Homo Sapiens; identical to SEQ ID NO: 249932
  misc_feature (769)..(769): n is a, c, g, or t

SEQ ID NO: 368729 - DNA, 1092 bp, Homo Sapiens
  misc_feature (247)..(247): n is a, c, g, or t
  misc_feature (308)..(308): n is a, c, g, or t
  misc_feature (368)..(368): n is a, c, g, or t
  misc_feature (382)..(382): n is a, c, g, or t
tagcactgaggctacaagatcatagttcatttaaagcccccatccctgcaaggtggtgctttctaccaatatgaatcttttcaacctggaccgttttcgctttgagaaaaggaataagattgaggaagcgcccgaagcaacccctcaaccttcccagcctggcccttcttcaccaatttctcttagtgctgaagaggagaatgctgaaggggaagttagcagggcaaacactcctgattcagatatnactgaaaaaacagaagattctagtgttccagaaactccagataatgaaagaaaagcaagtntatcatatttcaaaaatcaaagaggaatacagtatattgatttgtcttctgatagtgaanatgtcgtttccccnaattgctccaatacagttcaagagaaaacattcaacaaagatacagtgattatagtttctgagccatctgaagatgaagagtcccaaggccttcctaccatggcacgtagaaatgatgatatttcagaaccggaagaccattcggaattggaagaccttaaagatgctaaacttcagactttgaaggaactttttccacaaagaagtgacaatgatttacttaagttgattgaatcaacaagcactatggatggagcaattgctgctgccttgctgatgtttggtgatgcaggtatgcttgacttaattttaagccatgtcgatttattgttacgtcataataatagtaccttctcattaatattgctccacagtttatcaaacacctttatgaattcttacaggaatttgtgaggtattaatagtttcactgtttttccctaaaaagggaagaagtttctcactgataattttactgcttttctaccaatcaaatcttgtaacagtgaagttttgtaggatatattttctctctttttaaagtataatttctagttgcattgtggttttattataggtttacgaatcttagtaggaacataatgtcttagggaaagtcgtagctggtaatcaacattcctttagtaaatattttttcatgtttcaggggcttgggatacaaaaataaatgcatttgaatgagcttgcaa

SEQ ID NO: 368730 - DNA, 1040 bp, Homo Sapiens
  misc_feature (439)..(479): n is a, c, g, or t
ggaattcccgggatccgcggcaaacatggcggtggactcggcgatggagctgttatttttagatacttttaaacacccgagcgctgagcaaagttctcatatagatgtggttcgttttccatgtgtggtttatatcaatgaagtccgagtcatacccccaggagtaagagcccatagcagtctgccagacaacagagcatatggagagacatctccccatacatttcaattagacttattcttcaacaatgtaagcaaaccaagtgcccctgttttcgataggttgggaagcctggaatatgatgagaatacttccatcatctttagacctaactcaaaggtgaatactgatggtctggtgctaagaggctggtataactgtctgacactggcaatatatggatcagtggatagagtgataagtcatgacagagactcnnnnnnnnnnnnnnnnnnnnnnnnnnnnnnnnnnnnnnnnnaaccaagtttgaaaaggaatccaaaacatgctgatggggagaaagaagatcagtttaatggaagccctccaagaccacagccaaggggaccaagaactcctccaggaccccctccacctgatgatgatgaagatgatcctgtgcctctgccagtgtctggtgacaaggaagaggatgctcctcatagagaagattactttgagcccatttctcctgatcggaattctgttccccaggaagggcaatattctgatgaaggagaagtagaagaggaccaacaagaagaaggagaagcagatgaagatgatgtggatgtataggaagaaaaaggatgaggatgaggattgatcgacgttaaggtagacagtattccctgagggagggaagaggaacgaaggaacaagggcccaacaggggaatacaggattgtaccaacagggtgtagagggggatgggattgggcttcatagcacaccaattttttctcccccctgggacggtcaaaaaaatggaggaaactttgggcgccgggacccccccggagaaaagagcgggccccaa

SEQ ID NO: 368731 - DNA, 387 bp, Homo Sapiens
cgtggatcttgtacgtatgacctcccttaccatgacagctctgcacctgggggatggtgctctcccattagaggtgaggaagctatggcccagggatgtaacttgcccgagatcacacattcagcaagtggtggacctgggattcagaccctgctctggtcgattccagataccccatgcctgcccagggcatactggggccagactcctcccacaaccccaagccactgcccgggctcacgtcttgccgggttgttgcataatgtaggatcccgtcctcgagcacaaagtatctcttgtgccagcccttcagaggccacttcctcttcttgagcaggtgaccttcctgcctctcaggcatgacaccctctgtccccagcctgaccc

SEQ ID NO: 368732 - DNA, 1080 bp, Homo Sapiens
  misc_feature (53)..(62): n is a, c, g, or t
agccgccccaattaaccgaggggtgaatggggtaaggaaaacgcccgggcgtnnnnnnnnnnggccggggggggccacaacaggggcaaaaaccggcgggggcccgccaaggggaaaaggccccattattggtgggaaatacgagtcccccatttttttgcccaagggggaaatagggatgggagtgttcgttggggaatccagttacaccagaggggacaaattggcccctttcagggaaatctttttgattaaagggggccaaggaacgcaaggaaaatggggcccgggtgctcccctctggagtctttagggggggcttttctcctaccagttgcgcccagaaaaatgcctaagcaggatcctttttgcagggtccagacccagccaggagggtccccgggccagcacttacccccaccattttttcccgcagagagaggggaacctccagacgttgcccaggccgatggcatagcccacacaggacatgaggaagtcgaagcggccgcttccacgtgtcccggtcggggaggtctgccgccttcttctgcaccttgaccaccaaggttttgggcttgtcattggccacaggggcctcgctgacctcggtggagatctgcccgtcggccaccttgctgccgttggtcgccatgtctcggaatttggacgcaggggtcctggcagatggacgtgcgatgtcacccccggtccacgtggacagcagttttgcggctcaagggcaccctaggaggacggggtgggtaacaggcacagaaagagagtaggaccttggagttgcctcaccctgatggtcgtcgggggtgggtcagctccagaaggcctccttctgccaccttgggtgagatcctgcggccggggctgcgctgcccgggacaggcgctgcgccgggcggctcggccgctccgatgcgctcgggacgcggggccgctcgggctcgggctcgggctgcgctgcgctcccgactcctcggctcctgggctcagcgcagctcaccagcaacccctccgctgtctcggtcttccgagggcgggcggaggacgcggggaagggaccgct

SEQ ID NO: 368733 - DNA, 1782 bp, Homo Sapiens
  misc_feature (270)..(388): n is a, c, g, or t
  misc_feature (539)..(555): n is a, c, g, or t
  misc_feature (1137)..(1137): n is a, c, g, or t
  misc_feature (1591)..(1600): n is a, c, g, or t
  misc_feature (1742)..(1742): n is a, c, g, or t
tttctctcttttccctttcccccacccgccggacaacaaaaaataatcatgatggcaccgagtccggaattcccgggatgtactcagcaccggggagacctccacctcccggagtcgtgacccgggagcacgcgcccagcccctgcaccctccctggcgcgcaggcagcgggaggtctccctctacccaaccatggccgggtgggccctgccagggtgtagctgaacttcttggggtggccccccatcctctgccctcgcccgtctaaannnnnnnnnnnnnnnnnnnnnnnnnnnnnnnnnnnnnnnnnnnnnnnnnnnnnnnnnnnnnnnnnnnnnnnnnnnnnnnnnnnnnnnnnnnnnnnnnnnnnnnnnnnnnnnnnnnnnnnttacccccgacacactttaatcgcgccctccatcccacctacttactcaccctctaacactacaccgcccttccgacactaaccaccctcccaacagccttcattctactccacccctaacctccacgcgacctaccactcttttttctannnnnnnnnnnnnnnnntactgtcttccccttcctcccgccttttgtccctacccctccgattttcccattccactccccccgccgatttctccttaccaattgtgccgccacgccaagctacaatcgcacacacgcacgttattacccctatccaccgcctcagcacacctgaaatccttccttctttctaccccttcccatattacacacccaataaaccgataccatagccccgtctcgccaatcaccctacaataccaccctccttcgtacccatttgcccgcgtttccctcccttcttcccctgtgtcctctttcccaaatccgcttacaattccccctccgcgccctaccgccccgttatcctttatcctccacatctcccatctttcctcttcccgccctttatatttcgactctcccgtacccattcgcctctccctttatcccatcaacatatcaatctacttgccccgcttcattttaccccttcgacgatacgcctctatccctccaccgcccgcgaaataatcatatagaacccgcgctcctgctaatacacattctacccgcgccatccttttgcaccacatttcnctaaccccgctctcgcccctctatttactacgtcagtgttaatccgactccctcctttgtcgcgctttaccataatcgccttttccactcgcacctctttttgtctattctccccgccagtatccctcaccctatcaaccaccctcccatattccatctccccccatccttacgccatctcatctccgataacttcccactctctgaccactataacacatcccctatcccttctgcgctagcgctcgcgtcctcaataatccccgcttacacttatctccgcagcccccaataatcacaccacctcttaaaaaagcattacacccaacgactactcctatatcccccccaaatcggccaaattgtcccctccgtgataacccgacgacctccacgatatttataatgcgtcatcaaccatatgtcacgctgcctttccattaccagagcccannnnnnnnnntgccgtaataaccgcccccgcgccgaccgcccgttttgcgacgaatcgctcctcatcatataaataattcgcctgccgtctaaaccccagaaggcaatctaccttgactcctccacctgtaaccgatgatacgccacacgcnactactccccccacgtctttatccccataccacccgtccc

SEQ ID NO: 368734 - DNA, 1087 bp, Homo Sapiens
gcgtccggaattcccgggatcgggaagatggcggccggcggcggcggaggcagcagtaaggcctcctcctcgtcggcctcttcggcaggggctctggagtcctcgttggatcgaaaattccagtcggtaaccaacaccatggagtccattcaaggcttgtcgtcttggtgtatagagaacaaaaaacaccacagtactatcgtctatcattggatgaagtggctccggagatctgcatatccccaccgtttgaatctcttttaccttgccaatgatgtcatacagaactgtaaaaggaaaaatgcaatcatattccgtgaatcatttgctgatgtacttcctgaagcagctgctctagtgaaggatcaatctgtctctaagtctgtagaacgaatctttaaaatctgggaagatagaaatgtatacccagaagaaatgattgtggcattgagagaagctttgagtaagtgtctttttctctcctaaaagaaaatttttgagtcagtctttacaattacataattttatagatctggtcatgttgtataatagtgaaaaattaagttttgaatctagccctatttttttaaagttaaatatttatgaaaaatctagatctgtttgaattacaatgtaagtagaattggttttagggatggggtcggattttgttttttagtgactacaaaagtcaagcatgttaagtggtaatagccatctggttattttcctgcatttgcgttgagtgtttcaatggttcattgtttgtgttaataaatactggccctgtgcccttactgctggaaaaatttttgccccaggtggtcaagttcttacctaagcctggtttggtaataaaataacatatcaaccaccccctttaggactcgccactttccgacttaaaatcttccccggttatctgcgccccactactccctaatgactaaaaagaccccctatagtctcatttacctatgccactgctaccaccacgactcacgccatagccaataaaaccaccatttccgccgaaaatatatcaaaaatataacacactttaacccaaatgcgcacacacccacac

SEQ ID NO: 368735 - DNA, 905 bp, Homo Sapiens
acgtgtggcggctcgcgacccccggcaacccggagaaggtctacagagcggcctgcgccagcgaacaaaaggatgccacggagaaagaaaaaagttaaagaagtctccgaatctcggaacctggagaagaaggatgtggaaactaccagttctgtcagtgtgaagaggaagcgtagacttgaggatgcattcattgtgatatccgatagtgatggagaggaaccaaaggaggaaaatgggttgcagaaaacgaagacaaaacagtcgaatagagcaaagtgtttggccaaaagaaaaatcgcacagatgacagaagaagaacagtttgctctggctctcaaaatgagtgagcaggaagctagggaggtgaacagccaggaggaggaagaagaggagctcttgaggaaagccattgctgaaagcctgaattcttcccaagggattgttgaagaaacttctgaagagggaaactctgtacctgcttcacaaagtgttgctgctttgaccagtaagagaagcttagtccttatgccagagagttctgcagaagaaatcactgtttgtcctgagacccagctaagttcctctgaaactttggaccttgaaagagaagtctctccaggtagcagagatatctttggatggagtcagaataataagggcagataagggaggttggtaaccaagaaagatgcttgagaaggaagtagcctattttctacccttcctcatcccagtaaacccaggtaatccttgccccgcctaatggtggaccaaattggctcttcccacccccaccaaaaagattgtgaaacccaacatttgcccacgggaaacttgcccaaaggggtctctttggatcggcgagggggacaaaataaaccacgggtaattcggcccctcct

SEQ ID NO: 368736 - DNA, 822 bp, Homo Sapiens
gtggcgcgtggagagcgggaggaggaattatttttaacggtggcgtacaatggtgcccctggtagggggagatgtgtgggggggagaacaaaaatttatttcgggtgtccatcccagtccttgagggggcgggggtttcccgcccagaagttttgctgcgcggggatttcaaggccagccccccaatttcttttttgggccggcttcggagcttttttatttctggagaccctgaaagacagcaggggtgcccgcttgctgcccgctgaagattcttcccccttgctaccccatttgggccagttttgaggtgttcagcgtccccgtctcggtcaggtcgatggcgatctcactcaggctgcgtgctgcatggattttggacttactctgctttctgtccagatagaactggtgttggcttatggccatagcccagatggacttgatcaatgccggacatgcataccacgtgtgcactgcaatgccgctgtgcccaaacgtcctccttgtcactgaagccctgcgtgggtcatgaacttccacggaaaacttcttttctctgaagtacaggttttccaactgtctccattggaatattggaacaaaacaagttcttttcaagttctccgccttcggtcggcctttgttggtttggtcgtggcagtccccagcttggcagacttttcccttccaggagagggaggagaggtggagaccggggagagggacccagcagggaaggcggcgggtgaggggagaggagcgagaggagcgagcgctcaggagggagcggtagccatctgcgtggagtgctgaactcgg

SEQ ID NO: 368737 - DNA, 1653 bp, Homo Sapiens
  misc_feature (467)..(494): n is a, c, g, or t
  misc_feature (1243)..(1243): n is a, c, g, or t
aatataaaccttggggggaaactgagaggtttatgaaagttggcccagaggtcacgggaccacatttccgcggggggccacaatcaggcgctgtaatcgctgtttctcagtgacccgctgtctttctgtgacaagaaatggggctcttgccccaccacggtaagaatggttcttggtcacagataagggaaacacttggccccacgggtggagccttgccacacgttgtgggaactgttttgtaaactcagagattatgtgggctccacgttaggtagcctggttctttaacccgaggagggggaaaccaaacgggagggcgaatatacaatagttcgaagggctttataaagggaaaattaataggtaaaaggaggggaggtaatagccacgatatgaaagaggaggagatttgggaaaaaagtacccccgtaggcctgccaaaaacttttgaagggggaaaaccnnnnnnnnnnnnnnnnnnnnnnnnnnnnactgtctctggaagtttggtcacagtgctttataagtcgcataacctggaaaattaggttaaagcccatatacagaaattgatgaattctttatattcctctactttttagtaataaggtcttatagatcttaaagtactaatagaaacaaagtggatatgcttcctatgacatttaagaagtagtatttctatttacttctttgagagattctatagctttactgaaagacaactggctcaaataggaacaatagtaattagactccccagatagtttctattttaaatgcatgatattttcaagctggtaaatagcttgctttaaaaagacattaaaagcagtagttacagtctctccataaatagaaataaaaagtccatttgaaaggacaaaaagtaaccatgatgtacatatctataaatgttttccccagcacattattatagatcaatcttactccttacatttaaaagatcaattacctcataatgtctataatacaattcaattatttagctgtgttttgcacaagattcaggtgaaactaaagctaaggatctattcacagaacaattaaaagcatttatacagcctacatccaaatatatcttaaattacaatgatgcataataaatatgcatatagaatatggcttacacattaaaagagatctaagttgtgagttataaaatctcaccactcaggctttaaaagcttccaattgtacccttttctaaaatattgcntttaacattgtggagcccaggaaggaagcagatgcagcagaaaacttgttaggatgcatggatcctcctttgcatgatttaatttatggctactcctgattctttccagaccaatttttacctttcacaaagataaattcactgaagctcacaatcattgcaatgcttgtacagtgaaaagttacaacatctaattgtgcttgatctttcttgtcagctaacaatgcataaaggtagtttttcagctttaagcaaaggaaagactttgcacatgctcaggcaaaacatgacaaggaagcagggcctctgagggctgcagtttgtttctgtgtagtaaaatataaaagtcacatcaaataatgttatctgtacagaaaagtgtgggttttcattttcatagacatttttga

SEQ ID NO: 368738 - DNA, 461 bp, Homo Sapiens
  misc_feature (435)..(435): n is a, c, g, or t
actgtctctggaagtttggtcacagtgctttataagtcgcataacctggaaaattaggttaaagcccatatacagaaattgatgaattctttatattcctctactttttagtaataaggtcttatagatcttaaagtactaatagaaacaaagtgggatatgcttcctatgacatttaagaagtagtatttctatttacttctttgagagattctataggctttactgaaagacaactgggctcaaatagggaacaataggtaattagactccccaggataggattctattttaaatgcatgatattttcaaggctgggtaaataggcttgcttttaaaaaggacattaaaaagcagtagtttacagtctctcccataaaataggaaattaaaaagtcccatttggaaaagggacaaaaagtaacccatggatgnacatatcccataaaatggtttccccc

SEQ ID NO: 368739 - DNA, 2102 bp, Homo Sapiens
ataaattgattgaaaagaaagagttaactgttttgtaaagaatgaaaatttaaacacagaagtatgtaagaatgatactagcttttacattacttgtaaaacattttacaatcattattttaaaaacaaaaatactcaaaagggcaacagcactgggtaagaagctctttcattttaatattacacatgcaaatgctaactgaaacttacaagaataggcccatggtaagcggatcgatttttaagataagactttcagaatttcactggaaggtgggaaatcaataggaaagggatctacaaggatgaaggccaaaactcaacccccaaaacctggttatcccagatatgctaatggacagtatgtgctaatgtgttgtgagaaaaccggaatgtttcatcttaattatggaggggaacgccaggttgaatgaagcctgtatgaacgtactacattcatggaaaccattatgaaaagtacacaacctgtaggtggcatttcttcaagcactctaaggggaaaatgacttatgtaacagaacaaaataaatgaggctaaggtttggggctcattctagctatacttctaattataatttactctgggtgacatctgaaataaagatacacatacctctttagaggccatccaatctctttagaagacaattcaactacaaaaagagcctaactggccattttaatatatcaggaacaaagagaagtaagattctgtatacaatgtctgcttcaaaaagattacgtgtattaaaaaatcaagaagaaaaaatcttaacattcaatgataacttcatggtcatttaaaagtccagggactaaaaaaaggtctgtccgtgttaacacgtcttgaaaagggtatgaaggttcatccttcacagtcactcaaacagctgtcttctacccagaacctgaccacaggatgtggccgcaccatcagctgaatcttcatttcaacaagtgacacaggcttgaatgtcgatttcttgagggacagtctggctttgaatccaattataccactttagccagctcctccttttgcccatgagaaaactggggctgctgctgcctcatactttctagcttttccaggtcttcttttagtacaacttctttaaccctctcaggtacctggtatgtcatgagaatgcgctcaggtgtctgccgtatcattctccagatgggctcttcggcgacattaggaaatgtttcttttttctgtacgtcctgagattgctgcccattttgggagattttagaagaataaacactactagtaaggtatatactgctgtcgctgcttcctgatgctgctgaaccagttctggatggggattcgctgggaggtgaccccgtggacagaacagtggcagtaggatgggatggagtcctgctgggaggcaatcccatggacagtgtgctggcagtaggatgggatggattcttcatgggaggcgatcctgtggacagagcgctggcagtaggatgggatggattctccctgggaggtgaccccgtggacagtgcaccagtagtagcaggactgctctcactgccattgttgcctgtaacacactgatactcagtttgtgggcacgtgttccttctcatctgatctggagattcagagggtctgggcatctcttcctgaagtaagtttaacggcaagggtgagctgcttctcgaagtaatgaacgggtgcccctcgctttgtgcctcccacttttcctcctctctcctttggctggtgactgaagggggtgggtccagagttggactcattgctgacgacattgagggtgatatcgcagaagaggctgtcgcccccaggaatggacatggcaaaaacgatggcgacaacagaggacagacagcggggtcaggcaggaaaacggtcataaaagtatccaagtaaggaaaagggaaagctgggtaaggctgcaagccctcggacaagggcggcccatgcaggccttccggtgcagttccgggggctgcgtattctcttccgggtgaggtcgcggctgggaggggaaaagctgggacgaggtaaggggcctgggctccattgggttccgatg

SEQ ID NO: 368740 - DNA, 737 bp, Homo Sapiens
cggtccggaattcccgggatggtggccggcccgcccctccccgggcattggcggctgctcgctgcctcgctgctcgctccgagcctagagccggcagctcgggaggtcggcccgccccctcaaaggctccgggcgggcccgggacctggagggcccgagctagcgggggcgagcggtccggaggtccggtttcggcggctgcatgttgtgcctgggtcagtccaccttccttcgctttaaccacccggctgaagccaagtggatgaaaagcatgattccagcagggggccgagcccctgggcccccctacagccctgttcctgcagaatcacaaagtctggtaaatgggaaccacaccccacagactgcaacacggggaccctctgcctgtgccagccacagttccctggtgagctctattgagaaggacctgcaagagatcatggactcactggtgctagaggagcctggagctgctggcaagaagcctgccgcaacctctccactgtcaccgatggctaatggtgggcgctacctgctgtctcccccaaccagccccggcgccatgtctgtgggctccagctatgagaacacctctccagccttctctccactctcttcaccagccagcatgtggaagctgtgccagccactcacccagtgggcaagagccaggaccttctgtgcccccgctggtacctgcccgttcctccagctaccatctggccctacagccc

SEQ ID NO: 368741 - DNA, 426 bp, Homo Sapiens
  misc_feature (14)..(14): n is a, c, g, or t
  misc_feature (25)..(25): n is a, c, g, or t
  misc_feature (409)..(409): n is a, c, g, or t
ggcacgaggcgtgngcctgccgctnggaatgtgagtttcagccagacctgtggatatctgggctttgggctgtatgatcattgagatggccactggaaatccctatcttcctagtagttctgatttggatttactccataaaattgttttgaaagtggattcatgccagaactgaaagctaaattactgcaggaagcaaaagtcaattcattaataaagccaaaagagagttctaaagaaaatgaactcaggaaagatgaaaggaaaaacagtttattacccaatacactgcttaagtagttcagttttggggaaagggaaataggaaaaaggaggaaaaagccccaagggagatccaaagtccagagttatttaaagtccaaaggggggaggagggagatttcttccnggaccccaaaaaggaag

SEQ ID NO: 368742 - DNA, 1095 bp, Homo Sapiens
  misc_feature (138)..(214): n is a, c, g, or t
  misc_feature (358)..(358): n is a, c, g, or t
cccttccctggaaatttccccacaaaggggcttccagagagaaagagtttcctgtgggccccaagaaaagaaatgagttttgggcagaagggaaaaagtggcttttgggaggggaggggggtttcccaggcaaggagnnnnnnnnnnnnnnnnnnnnnnnnnnnnnnnnnnnnnnnnnnnnnnnnnnnnnnnnnnnnnnnnnnnnnnnnnnnnntaaaaggccaaccagtctaggggattcggaagggccccggaccttagtcctgggaaaaatagggaagccattgcttgtccagttttaattcatttacttaccactgtttcataaggtcaggaagagataggacagaaagtgaancaggaaggttctgtctgtattgtaggcagtgactgtctgctctcccccagcaaattaaactgctcagaagccaccactcccccatgacctccttccttcatcctttcttctgtctcctttttctctttaggatctgcttcccctctgtccttgagtcttcaaaatggagccagcactgggaaggcataggagaggagcaaaggagcaggactagaaacaaacatatatggctaatcgagttactataaagaaatggtaaccgtattggacaaaggtctgcagatgaaggaaactaattctttttcaggagttttccaaaagtgcccaattcacaccaaaattttggaaaatctcatacaatgtgggaaaagtatatagaacccttgcagaagactccatttcctaaactattttgcattaatatcaacgttacaaacgcaataccataggatttcagagcctatcttcacacaaataagatctgaccaaaattgcattgcttagcttaaaaaatactacacaatgtataatttcaagtcttaggttctcagctactaccaaaatatgtcaatatatgaataaactgccttgtgaaaaacatgcagtaaaaggtagatgcaaataagccatccctttagggtagacactatattaaaatttcttgtcatattataaaaccattctacaaaagtaacaccttcttgaaatttcaatcccgggaattccggaccggtcca

SEQ ID NO: 368743 - DNA, 710 bp, Homo Sapiens
  misc_feature (35)..(35): n is a, c, g, or t
  misc_feature (51)..(51): n is a, c, g, or t
  misc_feature (120)..(120): n is a, c, g, or t
  misc_feature (125)..(125): n is a, c, g, or t
  misc_feature (177)..(177): n is a, c, g, or t
  misc_feature (227)..(269): n is a, c, g, or t
cctttaaagttgggcccctccggaaatacccattnggaattggccagcttnggtcctttttggccataaaaccaggcatttccggtaggtccagaatatggcggattatcccaccatcgncctgnaggcaaaacccccctggccctgactctaagagagaacagctggtcctacagntggagcgatcccactggccgagatgcccgcgatatcctaacaacactgtnnnnnnnnnnnnnnnnnnnnnnnnnnnnnnnnnnnnnnnnnnncacctcacattaaataaatatgaatcttgggtatcacaaattacagagagtgaaataactcataattactattaattatgatacatttacataaataatccccaaattcactatcagattaaaatacaaaaaagtatttttttggtaaagtattttaattttgacgaaacagcttccattgttctattaaataacaagataagataatttaatcgtttttgagttgtcaaacttttctttctggggctagaggaaaggatggtgggtggtatcaatatcaatctttactatgccaaagtaaatgtctaaaccagccattccttcatatatgtgatacttttacacttcaatgagaaaataaaacacaaaaatacaatttgacatttgaaaataaaagcagaaaagttgttggaagtggggtaaagtccagggaatccgacc

SEQ ID NO: 368744 - DNA, 1287 bp, Homo Sapiens
  misc_feature (1212)..(1247): n is a, c, g, or t
  misc_feature (1267)..(1267): n is a, c, g, or t
aaaagagcattaacaattcagcttagccagtctaatcctaaatctagatgaagacaagagtgcagtaacagcagtgatcagatctaaaataactaatttagatggaatttagatcttaagagcttacacctcagaatgaagccaaattatcatgacagctttaaaaagtttccaggttcaagaggaagaaaatgtttaacctggagtttgacagctataggtaataggcacactttaaatgactgttttgaaacttcagtgtgcctaagaatcatttccaaatccacaaatgctgccaattcctgggatcatccagagattctggttcagaagtctgatataggggccctgaatcactttttaaaaatagtgggccaggtgatttatcagcaggtggcccatgaatcacttggagaagcactgatttaactgtctatccagtcctgcaaaatcagtaataaatcaacttgccttaatcttttttccatagattccacccgatttttcagctgtccaaagctagcaaggaaactacttaattttcaagcagaaaattctaatgaactatttcgctatcacaggtctcaaggagacagcaaggaccaacagaagtcattaatggcctagagaattcagctggctgaattaaatattctatatagaaatcaagtgctcatgtacttgtgacttaagtcctttcctccaccttaaggcatttccactggcgtcaagaaggagatgcttgtcgttttctcactcaagggctttccaccttccccatgttcctcccaatctgccccaccctgcattcccctaccatggtatttataagcatcatgcccaggggcaagttcccaaaacttaattgaagtgtccctcaataacaaacacctgcagaaccagaaagtccatataccctcacaggaactgagaaggacagagggagaaagagatgcaagtatcttaaaaaagatctccaattcttgtttagaatatgatcccctttcaaaagcaatgcactgcactataggcatttttactataaacagtcccctgcaggcacctacttttccccacttgcattagtcagctggcctttcttttataagtatatacttttgccttgtacagacaatttctggaaggctgaaagaccaaatagatcataaccgaaggcatgagttcaatggaatgtagtgggtttctattgcnnnnnnnnnnnnnnnnnnnnnnnnnnnnnnnnnnnncatggcatttgtcatcccgnggaattccggaccggtccag

SEQ ID NO: 368745 - DNA, 1016 bp, Homo Sapiens
  misc_feature (732)..(806): n is a, c, g, or t
ggtatcgccagtaccatgccaagtgaaataatatatttactcgtctctattatacaccagtgtgtgcctgcagcagcctccacagccacgatgggtttgtttctgttttcttgggtggggagcagggacgggcggagggaggagagcaggtttcagatccttacttgccgagccgtttgtttaggtagagaagacaagtccaaagagtgtgtgggctttcctgtttctaaactttcgctactataaaaccaaaaaaaggaattgagatttcaccaaccccagtgcccagaagagggaaggggagtggctggagggagcagggggtgggacagtgtatcaaataagcagtatttaatcacctctggcgggggcctcgtgcaaggggagactgacaccaagaacagccagtaggttcttctcccctgcactctgctccctgcgcggtaaccccaccactcctgaagcctgcccagtctccttccttccctgcttggtgagtcgcgcatctccgtggttatcccgctgtctcctctccaagaacaagcagagcccgggccactggcccttgcccaaggcagggaagaaggatgtgtgtgtcccaggaaggacaaaaaacgtggatcagtgattttacttgaaaacaagctccatcccttttctatatttataagaagagaagatcttgagtgaagcagcacgcgacccaggtgtgtgtgaattgaatggagacgnnnnnnnnnnnnnnnnnnnnnnnnnnnnnnnnnnnnnnnnnnnnnnnnnnnnnnnnnnnnnnnnnnnnnnnnnnnactttctgggcaaccaaaactaaaataaggaatacaaaagctgtttttccagctgaacagtccatttaagggtagcccagaccttgcagggtaaagtaagaaatcatagtgtccctggaagtcccgtggagtcttttgggagtccttgtggccatccctccggcactgttttttttattgcaggggccaaaaaaccttggaatccggggg

SEQ ID NO: 368746 - DNA, 923 bp, Homo Sapiens
  misc_feature (62)..(62): n is a, c, g, or t
  misc_feature (318)..(318): n is a, c, g, or t
  misc_feature (331)..(331): n is a, c, g, or t
tcctgcgatttcgtactaataagtttctaggtaaccattatttgaagttacagctacagtantcaggtgtacaaaatcttgagttgctttggtctgcttgtcttcataaatttattctcttatgatacttgaggtaccagttgtatttaattttattcattatccctagatagctattaagatacttagattagacctaacccaccatagtcaatccaagactagactactcaatattaaagggtctggaaaatagaagagtgtgttgggcaggtagtttgtaccatttatgaaggtttgttcctttgttaaatttancagcctgtactancttttgaaatccagaagttttaacttccagtggctggtttctgagagagtgccatgattgctagccagcattccatattgggaatatgtacaggagaacctggatgtacttaagagtggcatataattttcacttctgtctgttgaggcatcaaaaaaacaagtttagaaagctggcaacatgaagaatgcattcaaaatataacaggtgcttctttgttgtacgcagaggaattttttcttttgattttgtttactgaaatttgttatacttcaaaagccataacttgaaaaatactggtggcgtcgatggtgagtgatttttatcccacgtgggccttttgctcagttccatggcaattttgtaaattgaccctagccagagaatagatcagtatttcactgataccacgaggaaaagaacaaacaaaacttaaaagtattcatacaccttgctaacctaaaagacagcagggacaagatacatatgaggacaaggtatacacccagttctgaataacttgaagaacaggcttggcaaagaagtaagtttatccaaatcttgaatttctgccaggcatggtagctcatgc

SEQ ID NO: 368747 - DNA, 1106 bp, Homo Sapiens
caattaaaattcggggggggcccaaaccggacaagggggaattttccaaagggggaatcctggattccaccaaaattccttcggaagtcctaaatcgggttttggagtccttgtccccagggttttttaaatgtccctccagcctggggaaccaaacttttgggggcccttaaaagaatggagccgggattggggggttgcctaaacaaccatgagatcccgggcaagggaatactcgtaagtggagtcagagctaaggcagtggtcatcttcccgggtgcaggtgaaaggtatagggaacaggatagcccaggaggatcccaaaatacagtacacagatcccagtctgaggaaatggagcctgctgtaggagactgctagagataagtccctctgcagcccctgcaaatgtgtgatgatctcagccacgagggccttcaagtcctgaagctggtccagggagcagacagaagggtgacgctggcagctggaaacatccacaaaggctatggtaccaagcagcacctgctccaagtgctgacatacatgctcaggactgacaatcaggctgttttctccaatctcaaggatgtgaagtccaaaagtcaggaagccaagccccttcagctcctccagatagctctggagctctgatgcccctgcacagttgcaatcatagagcacagctggcttcagtccccgggccacagccagcacctctccagctaagtgaaggcagatggcttggggtggactccgtctctttcccatgccaagggtctgctgagcagctaccaccagcagctgagggctcggtgatgacatgagatctagaagcaacatcaagaatggcctccttagctagcccgagttcccttccctgggtggcatctttcagccagacacttgaggaggggcgttctttttccacgtccgctacaggttcgggggctcagaaactttttgcggcttcctgcctgctgccagaaaggcagcgagtaaaccacgcccagccgcaagtaacactggaaaacccgcctacgctgggaagaccctcgcagcccgctctgctccagtcccgcaggcatcccgggaattccggaccg

SEQ ID NO: 368748 - DNA, 1598 bp, Homo Sapiens
  misc_feature (1480)..(1480): n is a, c, g, or t
  misc_feature (1564)..(1564): n is a, c, g, or t
ggaccggtccggaattcccgggattttgtttacactggtgaggggaaaacagactactcaaacctcattaatggtggacgcccctccccccaccaagctccagcatcccaggtcgacctcagactgctatgctggcggtgaaaatttcaagccagtggatcttagcttgctagactccataggggtgggatccgctgagcaagaccatttggctccctggcatcagccccctttccaggagagtgaagggttctgtctcgctggcattccaggcagtacgaaaaaaaattcctgcagctagctcgatgtctggccaaacggccacctagttttgtggttgaaacccgggcccctggtggtgtaggcacctgagggaatctcctggtctgtgggttgcgaagaccgtggaaaaagcgtagtttctgggctgggtagcacagtccctcaaggcttcccttggctaggggaggtagttccctaaccccttgcacttaccgggtgaggcaacaccccaccctgcttctgctcaccctccgtgggctacacccactgtctaaccagtcccagtgagatgaaccaggtacctcagttggaaatgcagaaatcacctgccttctgcattggtctcactaggagctgcagaccacaactgttcctaattggccatcttgccccctctcaaattttactgattttatgaagccaaatttattaattttttttactttgcatctggattttaagtcattgcgaaaaaatttttttcccacaccgcaaattatgtaagaatttattcatgctttcttctagtacttacatgggtacaatttttacccttaagtcttcactcatttgagactttaataaaaatatcagcttaccctgtacatcagcttattgattgcctccaataatgttggtattcaaaaattaccctacccaaatgaccactggccatggtccccccgtcccccacttgctctaatgagatataaacatccttggtcgggccgccctctggcccctaaagaaagttttcctaacccctttcgttttgggagtggtagggccccgggttaggtaaaattgccacctcggctccttcaaccctcctctcccctaacgaaaacaccttggaccactggacccaaatgccctttgagattctcctcacccgaataaccaaacaaccgcgcccgtgggcgggtgtaacaccgcgaagccgttctgtgggacaccgaaattcgcctaaattggcaccgccccctcgcaagcgcttcctctcgatcgcggctatcattttcatcctacaacggggagcctcccgatgcgcgaaggtcacctcctagtctccgcaaattacggcgcgcccgccccaccctgtgggacacttctacctcggacatagtacttcgtcatgcgtattattgtcactatcacaacacactgttcctccgcgcgctatcatgtgcggtacctngcgcctacatgcacacacacgcgagcttacgtgtcgagcgtccagattctgagtattatacacgctcggcacctctgacatctnctactcacctccctgtgactttcgcgccgctcct

SEQ ID NO: 368749 - DNA, 1119 bp, Homo Sapiens
agcgggatgtgttattccttctctgcatcgaaggatcaggaagtttgtgctctctgcgtggctaagtttttcacctactaggacgggggtggggtggggagaacaggtgtccttctaaaatacagcacaagctacagcctgcgtccagccataacccaggagtaacatcagaaacaggtgagaatgaccactttaactcaccgggcccgtcgcactgaaataagcaagaactctgaaaagaagatggaaagtgaggaagacagtaattgggagaaaagtccagacaatgaagattctggagactctaaggatatccgccttactcttatggaagaagtattgcttctgggactaaaagataaagaggggtacacatctttctggaatgactgcatatcatcaggcctgcgagggggcatcctgatagagctggccatgcggggtcgaatctatctggaacccccgaccatgcgtaagaagcgactactagacagaaaggtactgctaaagtcagacagcccaacaggtgatgttttactggatgaaactctgaaacacatcaaagcaactgaacccacagaaactgtccaaacatggatagagctactcactggtgagacctgggaaccccctcaaattacagtaccagctgaaaaaatgtacgagagcgcatcgcaaagaacctagtagagaaaggtattctaaccactgagaagcagaatttcctgctatttgacatgactactcatccagtgaccaatacaacagagaaacagcgactagtgaaaaaaactccagatagtgtactagagcggtgggtaaatgaccctcagcggatggacaacggacactagcactcctggtgctaggcccactcctctgaagtgctagagaaatgccttccccctcccggaccgaggcaagtatggaggggggaaatgaatcgagccaaggacttagtagaactggacccctgaaagggaaaggaaaaacccctagggccaccgaaatgaactggggctttgcctggcaccccttcaataaaacttaaaaccccgccaggggggaatatcccccttttccccggctgggccgggggactggccaaaacccctcttt

SEQ ID NO: 368750 - DNA, 1690 bp, Homo Sapiens
  misc_feature (790)..(868): n is a, c, g, or t
  misc_feature (1296)..(1330): n is a, c, g, or t
tgctgggggaaaaacaagggggccccccagcccctttttttctttcccaaaaaataaattccccggaatttttagggggaggccaatttgtttattgcccggggccctggagcaagtttccaggccttcaaggggaacggatttccctttttttcctggctctttctggtcaaaggttactgggggttctgagagagggggcacaagccaagggcctttcttccattttcttcaaccatatgtgtgcacattaagggcagatttacctagggagtaagatgctcttgccccaggtgggcctttcctgtgcggtcagtttatgagtgaaatttctaagcaaggtactcactcctccacccttttaagacctcctgtgtccatttgattgttcaggtgatatctctcctttttctagattgtttcagaaacccctaggaaaagccgcgcacgcagtaatcatgaaagactggccttcacccgtgttctggaacccgaggtttgctgctggaagcctccaaagtacttagtgtctattgtttcccctgtgtgaaactttcactcccacctctactaatacaaacaagaattactactctgaaacagtagtcatcaatcagaaatattctcttaagagaaaaggtgttctttactctgaccttcttttcctagcttttggtccgttacccgcagaaacttcggggcaaacctacagtgtacttatcagcctactccatgcaatggaccactaataatagctaacctttacggagctcgactatatgccaggcannnnnnnnnnnnnnnnnnnnnnnnnnnnnnnnnnnnnnnnnnnnnnnnnnnnnnnnnnnnnnnnnnnnnnnnnnnnnnnccagcgacagtgattgtgttgttgggaattaccttagataaaataatcaaagattaactttaggccctgggcctagaaaatcccactagaattgagaggaaaccaagggttggatgaagattggtagaagtgtgttctcatacacatgcacacatgcctccctttttatatagctcacacataaatgttgtaatctgtagtcaacagactgttttgaaggagagcctcatgtcttgtcagacccttaatcctttggggaggagattccctggtgagtggccaagcaagctcttagtacctccatgaacccttatacttgtccctctttctcccaagttgagccatgtccaagtaaccgacgtataaggggaaaggaagagtgtcatgaaccactcaactcttctctgtcccctatatatctcaggttnnnnnnnnnnnnnnnnnnnnnnnnnnnnnnnnnnnatagataaagaagcttttatggaagatttaaagtgatttaagatcaaagaggagtggcttttccaacagaaggcagccagaggaggaggggcatgtgagagttttgctgtggctgctcaggtccgcttctgtttagtgcacaaaatttcccttctgaaattgaattccagtttcaaataagagaagtagagggaggaggaagggaacataactagcaggtgcaatatcttctctgtttatcaccacaatattttaaaaagaaaaaagcagtccgcaaaagatacagtttagatgcctatccaggtcccacccacttgggattactgaattgatttgtgcgaaataaaatgctttgaacag

SEQ ID NO: 368751 - DNA, 1123 bp, Homo Sapiens
  misc_feature (961)..(961): n is a, c, g, or t
ttctgatcctttcaatatacgttcttcagggtcaaaattcagtgatagtttgaaagaagatgccaggaaggacttaaagtttgtcagtgacgttgagaaggaaatggaaaccctcgtggaggccgtgaataagggaaagaatagtaagaaaagccacagcttccctcccatgaacagagaccaccgccggatcatccatgacttggcccaagtttatggcctggagagcgtgagctatggacagtgaaccgaagcgcaatgtggtggtcactgccatcagggggaagtccgtttgtcctcctaccacgctgacaggtgtgcttgaaagggaaatgcaggcacggccttccaccaccgattcctcattcacagacatcagtcagacaagaatcctgggagcagtaatttacagaaaataaccaaggagccaataattgactattttgacgtccaggactaagaagatcatgatgcacttagataaaagaatgattaggtatagtggagacttatttgccagcagataaatcatgcccgttcccctctgcctggcagaatcacagtctcacatactgtcttgtactgacacatccaaagcatgagtgtgtcagaaatcccttgtctattcctgtctgtataaagtgtttcattatgaccagatctctgattgtatggtcactaggtatgcaatcacgcattcaaagaggctctttacaccatcactgtgattgctctgagagttgagggactattgggcctttatttggacaagccaaacttttagccttgaaaccaactttatgccactaagtcatagcctcagttgtcccagttatttgtcctcctggaaaatgcctgaaacatcagacagacattgctggcttttacccaaactgaatcaaaatctttaagagcacaaatgaattttttaagtctgaaataacccaataaggaattgggnatacccatattccgaaatcacccctgggtattcttaaacccggccattcataccctaagtctttttgcccaaaaccctctccttgggtataatccagcctgaactttattttggccattttccatggggatcaggttttaaaccctaaaagggggggtccag

SEQ ID NO: 368752 - DNA, 1100 bp, Homo Sapiens
  misc_feature (703)..(796): n is a, c, g, or t
  misc_feature (800)..(808): n is a, c, g, or t
  misc_feature (1068)..(1068): n is a, c, g, or t
gggtccggaattcccgcggatgaaaaatcattaaaaattcagtcctctgaaggctaatttctttaaatcatttaacctaattgtttaaggtatagattggaatttttctcagcactctcttgaaaacaggtgacagtggaaccctgttaggttcacaaatcctagactttgattatatagcccaggctcaaatttttctcgaatgttacgaacattcaaagcattaggagtcttggtttcatttcttaattttttttcttctgggtatatttgagactcatcttggattcaaataaattaataatagtctcatgaaaccgataaaaatgggagctccattgaacatgagagacattgattcgtagtttctaacatcctccaaatgaggagcccatccctaatttagatgcttctttcaaaggaggctcctttccttcgttatccataatatagtcacaccagtcctgaaaaaacatggaacagactccagatctttatatttcatactctaaagtcgtacaagccaatctgcatttcctctagtggaaactgtatagctggtcatctttccaggacccttttatcaagaaacaatgcagcttctacatttgtgctgcttctacaccaaaacagctggaatgtatatagtatggttctggatgctcttgtatacctcactcttcatttctcacctaacccatgnnnnnnnnnnnnnnnnnnnnnnnnnnnnnnnnnnnnnnnnnnnnnnnnnnnnnnnnnnnnnnnnnnnnnnnnnnnnnnnnnnnnnnnnnnnnnnaaannnnnnnnnatttggtggacgctaaaaacaggggccaggcgggggcccgattccggacctccgctgcgagaaaccgacatccctcctttagctcacgggtggagatcaaccgcgaaccacactactataccactttcgcgccacaggacgcaacgcacatcagatgcggaccgccatagccatcaccaggttccctgaacgatagacgggggggacggctacgtagcgacgcatgcgtgcagaaaggagagtaacgcgcggtaccaatnttacgcggaataacctcccctcacacatatga

SEQ ID NO: 368753 - DNA, 280 bp, Homo Sapiens
attacggctaggtacgaggcctgggtggcgaattcggcacgaggcctaaatgtaaactggcgtgacaggagttccgggattgtccacagcacggactctgatacaactatccagtccgctgcagggaccggtcactgtgtcacagggttctccagagggccagaactaacaggatatatgtatatattgaaagggagtatattagggagaactggctgacaggatcatcaggcaaagtcccactatagtccatctgcaagctgaggaaggaagaagccag

SEQ ID NO: 368754 - DNA, 1942 bp, Homo Sapiens
  misc_feature (1374)..(1445): n is a, c, g, or t
  misc_feature (1723)..(1723): n is a, c, g, or t
  misc_feature (1830)..(1853): n is a, c, g, or t
atacggtcctaggtagcgaggcctgggtggcgaattccgacgaggggaaggcggaggagaaggacagcttgagccgatacgacagtgatggggacaagagtgatgatctggtggtggatgtttccaatgaggaccccgcaacgccccgggtcagcccggcacactcccctcctgaaaatgggctggacaaggcccgtagcctgaaaaaagatgcccccaccagccctgcctcggtggcctcttccagtagcacaccttcctccaagaccaaagaccttggtcataacgacaaatcctccacccctgggctcaagtccaacacaccaaccccaaggaacgacgccccaactccaggcaccagcacgaccccagggctcaggtcgatgccgggtaaacctccgggcatggacccgatagcctcggctctgcgcacgcccatctccatcaccagctcctatgcggcgcccttcgccatgatgagccaccatgagatgaacggctccctcaccagtcctggcgcctacgccggcctccacaacatcccaccccagatgagcgccgccgccgctgctgcagccgctgcctatggccgatcgccaatggttggttttgaccctcaccccccgatgcgggccacaggcctcccctcaagcctggcctccattcctggaggaaaaccagcgtactcattccatgtgagtgctgatgggcagatgcagcccgtgcccttcccccacgacgccctggcaggccccggcatcccgaggcacgcccggcagatcaacacactcagccacggggaaggtggtgtgtgccgtgaaccatcagcaaccccacgaggcacgtctacacaggtgggcaagggctgcctgaaaaatctgggacatccagccagccaggcagcaagagccccatctcccagctggactgcctgaacagggacaattacatccgctcctgcaagctgctccctgatgggcgcacgctcatcgtgggcggcgaggccagcacgctcaccatctgggacctggcctcgcccacgccccgcatcaaggccgagctgacgtcctcggctcccgcctgttatgccctggccattagccctgacgccaaagtctgcttctcctgctgcagcgatgggaacattgctgtctgggacctgcacaaccagaccctggtcaggcagttccagggccacacagatggggtcagctgcatacacatctcccatgatggcaccaaaccgcggacagggggcctggaccatatggtgcgctcctgggacctgccgtagggccaaccgataccggcgcctgattttcccttcccagattttctcacctgactaccggaccgccgagcgagaggctatgnnnnnnnnnnnnnnnnnnnnnnnnnnnnnnnnnnnnnnnnnnnnnnnnnnnnnnnnnnnnnnnnnnnnnnnntcggcctgggaagtaaaggcgcgatacaacacccatgacaaccgcgctcctcccctagtagccgaacacccagccgcccctaaaagccgccgcgtggcgctagacaacccccacctgccatccgaatacggcccggatgcacaaacgtcttatgcgctccgcgcctccgcgccacgttccccaccgtttgcgtccccacacgcgcccgcttctctgcgcccacattacccgccacggtcgcgtctgccgttatacgcccgtgcgttaccccacccatntatcctctcttttcgtccaccaaccacaatataaataacgcccctcgtcgccaccgcgatatgatctccccccctataccgcccgcaccacgtcgtgctagtctttnnnnnnnnnnnnnnnnnnnnnnnnatatccggcccactcgccggcgtggggagtgaacgaggatacacgctcccccccataatatattaccgcagccagtcgacataagaaca

SEQ ID NO: 368755 - DNA, 1068 bp, Homo Sapiens
  misc_feature (967)..(1023): n is a, c, g, or t
gtccggaattcccggggatcaatcacagcaagcattatgaccagtatacggaaagaatgcgtgacgagaagcttcacgagctgaaaaaagggctcaggaagtatctcttaggctcgtcagacaccgagtgtcccgagcaaaaacaagtgtttgcaaacccaagtccaacccagaaatcccccgtgcagcctgtagaggacctagctgggaacttatgggagaagttacgtgaaaaaatcaggtcttttgtggcatattctatcgcaatcgatgagatcacggatataaataataccacccagttggccatattcatccgtggtgtcgatgagaatttcgatgtgtccgaagaacttctggacacggtgcccatgacgggtacaaaatctggcaacgagatctttttgcgtgttgagaagagcctgaaaaagttctgtatcaactggtcgagattagtaagcgtggcctccactggcaccccagcgatggtggatgccaataacgggcttgtcacaaaactgaagtccagggtggcgacgttctgcaagggtgcggaactgaagtccatctgttgtataattcatccggaatcactctgtgctcagaagttgaagatggaccaccccatggacgtggtagtgaaagtccgtgaactggatatgctccccggggactgaaccacagcgagttcacaaaacttggctctatggagctgggaaaggccaaggatggcaccccctcccgggacttacccggaagaattaaggggggcttccagtccggggggcttggggcctaaaggagaatttttttcgaaatccctttggaagaaaaaccgaatttccgtccgtggccctcccacaggcggaaaaccccgtgcctctaaccggagccttcagtagcacttgcgaatccgaagaacttgggcctttcttgggtggaccttgaaccacccgctctccgacannnnnnnnnnnnnnnnnnnnnnnnnnnnnnnnnnnnnnnnnnnnnnnnnnnnnnnnngaaggcttgccctcgattccgggcggcgtcccctgcccaaaattt

SEQ ID NO: 368756 - DNA, 822 bp, Homo Sapiens
  misc_feature (298)..(308): n is a, c, g, or t
agttcgacggagactctcataaaaggtccaacccttcacattttataaattatgtagatcatgttttgttaggagcacttttatgagagacattttccatgactaaataatcagcattagtcagtaaatcctttagaactgggttttgaaatgggagttttatcatattaaatcatttcttgtagtcttacattttttgttgttgttctggaatctacctgtaaaggaaagtagacctggattcatgtgggctcttccatggcttaagtgttgcccaagagattttgtaggtaacgannnnnnnnnnnctggccacaatgccagatactaagctaatgggtctatcatacacatgcttgcagtagtttcatgaagtttagtctcgggcgtgaaattttaatcaccaatgaaggagagaggcacctgtaggtaaatttactttagtcatattttatataaaacaagggttagtattcatgtaacattgagaagtttgggaataacagcagatatgattaataaaagtcataaccatactcaagagcttcttagattttcatttatggcaagttataattacatgtaaaagtagtcttgaacaggtaaatattgagcctttttaataggatgtaacctttgtagagcccaaattctaaagaacaaaattggcaatccaattaaactacatgcaaaataagtgtgatacatgcatctacaaaaacagtgttctcattttttctgggtatgcaaatgattggattgtttctccttggatctctgtatgtacaggtaaagaatagtttacagatccctgctgaaatt

SEQ ID NO: 368757 - DNA, 1067 bp, Homo Sapiens
  misc_feature (55)..(55): n is a, c, g, or t
  misc_feature (914)..(914): n is a, c, g, or t
  misc_feature (1034)..(1034): n is a, c, g, or t
gggtccggaattcccgggatctccttcctttctctgacacagcttcagcaccagngaaggtgggctccttgctggccccacctggagctcctctgtccagctgtttatgcacacagcaacctgggcatgcctctcccaagtgcctaaccgtgccaggtgctgggttcaaaaacctccccctcaagagaggctgccacatgcctcgtgttgagagaccaatgccccaggagctgtgggatccctcctccccaacagagccaaatcctttctttcagggctttcaagttccactcatcctggggacccactccttcctgatcttgggcctcgccgctgcccacgtgtaggaatcaagtcactctctggaccgctacgtgttgttctgggcttaaacccttgctgagtgggtcggttctgaggaaggcagaaattgcctcttgttttatgtgtcttcctattcctctgtccagtcccctgtggacacagggtaggtgcttaataaggatggaatcttggactgtctgaaggaccctcattgctcattggtcccctgcccccgcccagctccaaacaccaggtgtgtaccatgagccagggaccatgctgtattttgtcccctcccatttcatcctcatgatgccttgagacaggcattgttactcttatctccatcttagagatgaggaaactgacgctctggtgacttgcccaaggtcatacaggtggaaacacaaagctagtatttccaccccaatctgtacaactccaaagctcagattcatttatcagatgggcaaagtgaaactccgagagctttaatgaccatggagtcagtcccctgagcctggactataccccccaagctccaaaactggccagccccaaaaaaatttgttccacgaccccctacttgnggtccacacccagaaagcaattctccccaattctcccaaccgccccaaggggaaacacatcccaaccccggagaggaaatccccacccgaaaaggtggatcccacaatttggccccatancccagatcacgggggtgccatttgaaaaaaggc

SEQ ID NO: 368758 - DNA, 254 bp, Homo Sapiens
caaatagctggttgttcaacaattactggcccatgtaagcaaaaacccattgaagtctttgagatacatatatatagtgagatagggcctctggctgaactcaaacttgtggactcaagggatcctcctacctcagcctccaatgtggctaggactacaggcgcatgctactgcgcctggctcagtccctaatttttaaccgcaaaaggattctcaaaccaagctgtctaagaactactaggttcagtgattcc

SEQ ID NO: 368759 - DNA, 802 bp, Homo Sapiens
gcgtggtcgcggccgaggtactgaagtgtaagttgaaaccaagttgcagtgggaaatcaaaggtgaggtagcttatttgaaaccagcaaatgagacaggttggacagttttaaaatctcttctaacaaagaaactgcacggcagcaaggactagcggttctcaaagcccttctttttcagtgttctcattcaccttggcacccaagtatgtttaacaggccatgcattaaaaataaatacaaaaatataaaagccgcttaaagggaacttacaaactgacaatctctcctctgtatttgtgttcatagtggctgggagtttaattatatgcacaaaagttaggagccacttgtttctgcacagactgtaggagcaagatgaggagatgggcaggttttggtaagagcccccagttctggtggacaggcatacttgtggccattgggtgcggcattgctgggaggaccacgtcttgggaggcgattgacttttggtttgaaatttccctttaaacaagaagagatggctcacattttccatatatatctcaatgaatgtactgtattactgttttaaaaatttgatgaaataataatgaattggtctccttttgttatctggaccttgtttaatttgtttaagggtttttgtatacaaaagtttacatttttatgtatatttttcttgtgtaaaaactgatgtaatatgtgtatgaaacactgtatgtattatctgtatatagtgtgacaaaatcatttttctttctttcttttggatgtattaataaatcttgctgtgaagt

SEQ ID NO: 368760 - DNA, 1356 bp, Homo Sapiens
  misc_feature (1019)..(1019): n is a, c, g, or t
aattcccgggatgtcgcgggccggaccgggtcccggggcggtgggagccccggccgggcagaagggcttggcgggccgttagaggaccgccacggctgtcgagtcccctcccttgttggacttgcgcgccctggcgctcggaacctccggcgctgtgcccaccccgctctagctcgcgtctcccgactccaattagagcagcccgacggccatggaggctgaagagacgatggaatgccttcaggagttccctgaacatcataaaatgatcctcgaccgattgaatgaacagcgagagcaggaccggtttactgacatcaccctaattgtcgacggacaccattttaaggctcacaaggctgttttggctgcttgtagtaagttcttctacaaattctttcaggagtttacccaagaaccattggtggagatagaaggtgttagtaaaatggcctttcgccatttaattgagttcacatatacagcaaaattaatgatacaaggagaagaagaagccaatgatgtatggaaagcagcagagtttctacaaatgctagaagctatcaaagcccttgaagtcaggaacaaagaaaactcagctcccttagaggaaaataccacaggaaaaaatgaggccaaaaaaaggaagattgcagaaacttcaaatgttatcactgagtcattgccatctgcagaatcagaacctgttgaaattgaggtagagattgccgaagccacttgaagtggaagatgaaggcatcgaaacattagaggaagtggcttctgccaagcagtccgtaaagtacatacagagcacaggttcctctgatgattctgctctagcactgttggcagatattaccagcaagtaccgtcaaggtgacagaaaagggcagattaaagaagatggctgtccatctgaccccacgagcaaacaggagcacatgaaatcacactccactgagagtttcaagtgtgaaatattgcaataaacgatatcttcgagagagccgcatggnaaacagcacctaaatttgttacccaccttgaagaaggtggagtcagtaagaagcaaagaactgggaaaaaaattcatgtatgtcagtactgtgagaaacagtttgaccattttggacattttaaagaacatcttcgaaaacatacaggtgaaaaaccttttgaatgtccaaattgtcatgaacgatttgctagaaatagcactctgaaatgtcacctcactgcatgccaaactggagtaggggcaaaaaaaggaaggaagaagctctacgaatgccaggtctgcaacagtgtgtttaacagctgggaccagttcaaagatcacttggtaatacacac

SEQ ID NO: 368761 - DNA, 1072 bp, Homo Sapiens
  misc_feature (39)..(39): n is a, c, g, or t
  misc_feature (57)..(57): n is a, c, g, or t
  misc_feature (80)..(81): n is a, c, g, or t
  misc_feature (291)..(291): n is a, c, g, or t
  misc_feature (315)..(315): n is a, c, g, or t
gttgcaggccaggaagggggttggaagaaaaccagccgnttgggaagggaaagatgncccgaaaggagaaaacccatgannctgatataaaaagcgaggggcaaaggacaaaccaagaggacccctctgggaacccagtccaacagaaaggaaagccacagcagaaaagaagtatcattgaaaagctcagacatccagaaatgctactcaaagtgtaattcttagcaatgacattcaaagccactcctcctggctttgccaaatataatcatcaggtccttctgacattcncaggaagcagaatcattcctttcnctggtccagtccaagtgctgatgtaattgacctgacactgcagagactgttgacaactcaaatgtaccctcccaccatgccacctctcttcctctgcacatctagtctcttcaaaacaaagcaaaacaatgcatttaatattctccctgcaaaaatcctaagacatttctggagattttgatgcataataatgtaggattccatgcatgaatttttataaaaggggcacgatgtgtattaacagcccctctcagcgaatgcttgtttatacaacatggaacattttttaaaattgtggataccaactgtctagagaaaaattggagcgcaagggaaagaaataacttctcttgatctttctagtgggaagcaaatataagagatggtgactgacatccccacccagctgccaatggaggtactgatggcagacgaagcaccaaatgagtaggtgaacaaggacccagcagggagggtctaagtcagatgaacaggtggaagcagcagcccagagagctggagaggcagaagtcagggaaaagacatagtagccaaagaggaaatgcatggaggtgttggtgtttgaggtctaggccttcctaggacaggttggagcccgaaatgcatcctttcttcctttatttcaatcagcagcatcattctttcagacatgtagctttaaaatcttatcccttctctccaacaaacaaggtcaactgccaagccttactgattccactttggcaatgcccttcac

SEQ ID NO: 368762 - DNA, 1363 bp, Homo Sapiens
  misc_feature (173)..(173): n is a, c, g, or t
  misc_feature (214)..(215): n is a, c, g, or t
gggtattagaatgacatttcctatgaatgtctacggtctgttttaggtgtttgctaaacttctatggcttccagggtcttcttacaatgcattcctttaacttgtccctggaagcattgctacccattttcagcttctctgcctctcttctgatacaaggacagaagaattgngtagatattcaccttttaggggtgcaagtatagctttaagnnttgtgcagtgaaaatgttgaaaagtgagtaacctcgatattaaaatcatccttgacatgaaacagggtgaagagaagctgtccgtggcggctggtgttggctggcattggcactgggctgtgctgacctagccattacaattccaggggctaagaaggctcagggcagacaaagtcaagaggaggaagtttttgtggacaatgaaaagttattttcgtacctttctaccaaaaccaagtttcaggaaaataactctatgttgtttattttcagtgacacttatgtaaggccctgtgagttgtatttatcctgtatccggcactgctaagcttttcaaggtatctttccaatcctgctggatgtgggcagtcaatgggctgcagggctgggcaaacctccccttaggccagttcaggcacgggcatttgttccttatccagggattaacaaaggtactacatctttccagccattcagcacgttgtacaacttaactttgtaacatagtccgtcggtttactgaggcactggcgagtcccagggctgataaaaaaccttccctagagggaataccagagttagctgggtatagaggtggctcaaaggaagtgtccgtgggtcagggggaggaatgaacaaaatggcgctgttgctttggctcagactcctagaatgcttgacaagactagagagttttttggaagaacctcatctcactatagttacttatttcacttttgttatatatgtatttattagagcatttgaatattggtacctttaaaagggtcatttggtgttttgctgttgagctggtttttgagtcatagatcttggcttcctttagaagccacttaacttccatacactataataaactgtgaacatatttttgttacctaatgcatccactgatgaacatgcaaactttgggcataatgtgaactaaaattgaaatggaaaatgttagtggccattttgcaacaatgaagaggatacccctttatctagatgaaaaattggatttcttatcttttaaaatatcttggaacggtttatttgctccagaaacttaagttaagcatgccccaacttttccgtttggtttatgcctttgaaagtgaaatggttttacctttttccctggg

SEQ ID NO: 368763 - DNA, 771 bp, Homo Sapiens
tgaaccaccacacttggcccagtctcctacttttaaatgggggcagcatttgccttccaggcttttccttgtgctttccaatcaacaatgaaaaacagccagagaagaagagtctaattgtggacaggtgtttgcaagtggttgaaccaagtaaatatttccatggaactgtcagcaccgacttcttccccatagacatttgatgtcagttttcagaatgagattattttttctaatttttaccagtcaagctttgctagcaggaactgagaacattcagaagtctgcctccaaaggcaggaagtttacctagtttcatctgaatagggtgcaaggccatgccaaggggaagtatttgcattattccctagcagaacctcgtacaaggctgccaactccatccgcctagtgaggatacagtgatattcaggccaaattgaatttcttcccccggggaagattattttgctcctttgctctctgttttgttttataagtaaaaggtgtggttgtgaaatccatcttttgtgtcctgctgctgatcaatctcaacatgaccccagggagctcgggcacaggggcctttccctgaccagctcccctgttgtttcttaactggctgcctggccacctcttgctccagttgtaatgacttttgtcatgtaagcatgtctgaaaggagtcacagtcaactcctcagggtagcccttcaaaacaagcaagtggattataagtaatggatatttcactttcccacacctacggacaaaa

SEQ ID NO: 368764 - DNA, 1036 bp, Homo Sapiens
  misc_feature (980)..(994): n is a, c, g, or t
agcggagttgcaactgttgtgctgcagcagatttggtctgagtctgggcagagcccctttttatggagcaaccctcccgatttgttacagcaagagcctggtgcaagtgatctttgccttcccatcgcacacaaaggcaaagagctccttaaagggacctgcctgctcctccgtgcagctgcaaacccgtgtcggtgcaggctcagcaacccaggctttcgctcgagaatgagtggggaggggtcttgaggagcccccacgtcctcccggagcggaggcgggagggagctgacagccggagtggatggagaccaccagtccgaggggacccgcttgcgattagctgcttcttgggatgctccgcgcgccagttgagcatcctgcctgtggtccaggggatgctggcggcgcatcttgcggtaagcctgcgctgatttgagccatcgcccagaagcgagcccgcattcagacaccgcggaccggctccgcgaagggctgcgtgcagtcaccatgaatgctcagctctaggcttctgtaaaaacctccaccactgcatggatttggctgtttaatcagccgagattacagcccgggaagatttgcaaacctgattctccctccagctgctgtgacaacttcggggccgtctgtttacttctctgggtccccggggactctttcctgcatcgcagccccttgtgccactttgtgggcttggctcgaaagtcagccgccaggactcctcggacggcatccccaggaagggggaagcaagggagggcttaaaagaaaagcagaaatccccgcaactgctcaacctctcgtgactgcctgtgtttctggggttcctgagaggggaccgtgcgcctgcctgggggaaacaatgccaagtcctccatagccctgcacagaagcaccaatttgaaaaaatccggaaatggtggagggacccaaccttctggaacacagcagaagacttnnnnnnnnnnnnnnnaaatggtgggggggaaccgcccatccccgggggccccaaaaa

SEQ ID NO: 368765 - DNA, 717 bp, Homo Sapiens
  misc_feature (66)..(66): n is a, c, g, or t
ggccgcggggctgcgcggcggtggcggcggcgctcctcctggtgctgctgggggcccgggcccagnggcggcactcgtagccccaggtgtgactgtgccggtgacttccacaagaagattggtctgttttgttgcagaggctgcccagcggggcactacctgaaggccccttgcacggagccctgcggcaactccacctgccttgtgtgtccccaagacaccttcttggcctgggagaaccaccataattctgaatgtgcccgctgccaggcctgtgatgagcaggcctcccaggtggcgctggagaactgttcagcagtggccgacacccgctgtggctgtaagccaggctggtttgtggagtgcccaggtcagccagtgtgtcagcagttcacccttctactgccaaccatgcctagactgcggggccctgcaccgccacacacggctactctgttcccgcagagatactgactgtgggacctgcctgcctggcttctatgaacatggcgatggctgcgtgtcctgccccacgtaattcctagctgtcgtgggatggagggaagggcggctgggagcagagcaggggcctggggtggggcaggtgctgactggttacaggaataggaagaggggatagggaggagggaagaccttggccctgtgatgggtgggcccccactttcaggcaaacttagatggcaaaagagcaatctg

SEQ ID NO: 368766 - DNA, 1144 bp, Homo Sapiens
ggtaccggtccggaattcccgggatcaaaggcctatgtgtggccaccccagtccagctccgggtgttccgcgagttccacctgcacctccgcctgcccatgtctgtccgccgctttgagcagctggagctgcggcctgtcctctataactacctggataaaaacctgactgtgagcgtccacgtgtccccagtggaggggctgtgcctggctgggggcggagggctggcccagcaggtgctggtgcctgcgggctctgcccggcctgttgccttctctgtggtgcccacggcagccaccgctgtgtctctgaaggtggtggctcgagggtccttcgaattccctgtgggagatgcggtgtccaaggttctgcagattgagaaggaaggggccatccatagagaggagctggtctatgaactcaaccccttggaccaccgaggccggaccttggaaatacctggcaactctgatcccaatatgatccctgatggggactttaacagctacgtcagggttacagcctcagatccattggacagctttaggctctgagggggccttgtcaccaggaggcgtggcctccctcttgaggcttcctcgaggctgtgggggagcaaaccatgatctacttggctccgacactggctgcttcccgctacctggacaaaacagagcagtggaacacactgcctcccgagaccaaggaccacgccgtggatctgatccagaaaagctacatgcggatccagcagtttccgaaggcggatggttcctatgcggcttggttgtcaccggacagcagcacctggctcacagcctttggtgttgaacgtcctgagtttggcccaggagcaggtaggaggatcgcctgagaaactgcaggagacatctaactggcttctgtcccagcagcaggctgacggctcgttccaggacccctctccagtgatacacaggagcatgcaggggggtttggtgggcaatgatgagactggggcactcacagcctttgtgaccatcgcccttcatcatgggctggccgtcttccaggatgagggtgcagagccattgaagcagagagtggaagcctccatctcaaaggcaaactcatttttgggggagaaagcaagtgctgggctcct

SEQ ID NO: 368767 - DNA, 276 bp, Homo Sapiens
gcgaaaggcgcagctccagctgctcaaagcggggacagacatgggcaggcggaggtgcaggtggaactcgcggaacacccggagctggactggggtggccacacataggcctttggtgttggacaggctcaggccatggatctcccacgtggtcagagagtcggggagccacagtgtcaatatttgaaagcggtccactgtttccactctccagagccagttctctgggaagaagctgcgcacgggaatgtcatcctcatcaatcaggtcctccgg

SEQ ID NO: 368768 - DNA, 989 bp, Homo Sapiens
  misc_feature (283)..(305): n is a, c, g, or t
ctccacagcccttgtgtcagctgtcgaagtttagcaatactatttccaaacatgggccagtaggcagccagcaggcaccagaaagctgagtgctggcagaaaaagcctcagacacctatagcagtccaaacagtgactcatcctgctattgccaggataaatatgggaataaatggtatttttctctaagcaggaagaattgtcaaaatgcttatcactttataaaatataacagattgtgcctgatcatgttttgaaatgttctaaccattcactcgccggnnnnnnnnnnnnnnnnnnnnnnngagtttagtaatagctttcacttgttttccctctttctaggaggcctggagaacccaggagtttccaagctgtgctgccacccgagctctggatccacctggctgtggtggcctgtggcaatcggctggaggagacgctggtcatgctcaaatcagctgtgctttttagccacaggaagatccaattccacatcttcactgaagactctctgaagcccgagtttgataagcagttacgccagtggcctgactcatatacaaagaagtttgagcacagaatctaccccatcacattttctgttggaaaccctcaggagtggaagaaattgttcaaaccctgtgctgcccagagactctttcttccggtgattttaaaggatgtggactcacttctctacgtggacaccgatgtcctctttctgagacctgttgatgacatctggaagcttctgaggctgtttaattccacccaggttgcagccatggcccctgagcacgaaatccccaagattggctggtacagccgctttgctaggcatcctttctatggctctgcaggagttaattcaggagtcatgttaatgaatttaactcggataagaagtacccagttcaagaacagcatgattccaacaggcctgacattgggagacatgtagtagcctgagtaccagcagtgccagt

SEQ ID NO: 368769 - DNA, 1456 bp, Homo Sapiens
  misc_feature (55)..(55): n is a, c, g, or t
  misc_feature (1367)..(1367): n is a, c, g, or t
  misc_feature (1398)..(1398): n is a, c, g, or t
gcccccaccggaagggtaactgacctcctaaatcgggcggaccctgcgagggtanaatcggcgtgtggggcgcatacttcgtatacatacattatcgaagttatggatcaggcaaatcggcgagctcgaatcgtcgagagcgggtccactccgggagcggagacggagaacaggttatgtgggagccggcgggggcatttgccggcgacacccgagcggggggcggaaggggggccacagctcgcagcaggagctccgggctagaccgtggcgccggcagcggcccctgggctggaggaggatgatgaggagcgacggaagcgacgcgggggtacgctgctgcgcggcgcccggtttcgtgcccgcggccgactgcgcagcctgtccgcgagtctgagatacttacagagagctacaatggaaaagtcctggatgctgtggaactttgttgaaagatggctaatagccttggcttcatggtcttgggctctctgccgtatttctcttttacctttaatagtgacttttcatctgtatggaggcattatcttacttttgttaatattcatatcaatagcaggtattctgtataaattccaggatgtattgctttattttccagaacagccatcctcttcacgtctttatgttcccatgcccactggcattccacatgaaaacattttcatcagaaccaaagatggaatacgtctgaatcttattttgatacgatacactggagacaattcaccctattccccaactataatttattttcatgggaatgcaggcaacataggtcacaggttgccaaatgcattacttatgttggttaacctcaaagttaaccttttgctggttgattatcgaggatatggaaaaagtgaaggagaagcaagtgaagaaggactctacttaggattctgaagctgtgttagactacgtgatgactagacctgaccttgattaaaacgaaaaatttttctttttggccgttccttgggtggagcagtggctattcatttggcttctgaaaattcacataggatttcagccattatggtggagaacacatttttaagcataccacatatggccagcactttattttcattctttccgatgcgttaccttcctttatggtgctacaaaaataaatttttgtcctacagaaaaatctctcagtgtagaatgccttcacttttcatctctggactctcagatcaattaattccaccagtaatgatgaaacaactttatgaactctccccatctcggactaagagattagccatttttccagatgggactcacaatgacacatggcagtgccaaggctatttcactgcacttgaacagttcatcanagaagtcgtaaagagccattctcctgaaganatggcaaaaacttcatctaatgtaaccaattatataatggttttcccctttttgatta

SEQ ID NO: 368770 - DNA, 933 bp, Homo Sapiens
aacctgccctcgagctgggttgagggccaacaaagggccattttcaccaaaaggattattgcgatgcccataaaatcatccccgtgaccttcctgcttccgagtcccatggcctttgccaagggcatgtactcccctaagaggcctttctgcctagaaagatctatgactgggtcccaaagtggaggcctaggtttttgctgggatttagatattttcaggcaccattttgacagcattcaggaaaacggttattgaccccatagactagggtaagaataaaggcaataaatttggtctgactcagaatataggagatccatatatttctctggaaaccacagtgtacactaaaatgtgaaattgaaggttttgttaaaaagaaaaagataatgagcttcatgctttgtttaattacataatgatttccattacgctatttctgtgaaatgcagcaggttcttaaacgttatttcagtggcatgggctggaagcttatcacaaaaagccatgtgtgtggccttatcagaacagaaagagacaggctggtgcccaaggctgctgcctgctccaccttttgccagctctggacatctgaggacgtcccggcagatctggaatggggccctcaactgaccatttgcttctcagaatttcagtttgagacatgagaggtataatcagttacttttctccccccagagaaacccttttgtgaggggagaggagctatggtatgtggttcagctgaaacacatacaactgcatccttttggagtactttgccaacaaaaacagaccaacagaccagatggtgtccatgttcaatatcatgtcttgatggacgcagctgatgacctcaaatacttgagtggtctcatggcgccgccctcgtcccacggctccgcgatcccgggaattccggaccggtacc

SEQ ID NO: 368771 - DNA, 949 bp, Homo Sapiens
  misc_feature (44)..(44): n is a, c, g, or t
ataaaatacacgaaaataatatagcgcaccccgagaaagaaganatagggtggtaccggtccggaatttccgggatcgggcgggggtgcggctccaggaaaggagcgcggcctccaggaagccggctggccgtgatgctgcccactggtggtcccccgctcccggggtccccggccggccaagcaggagggctctaactccgtgaggaccccagcattatttctataattgtttgtgagaaggactgaatcccagagcattgccttgttgctgacctttcagtatggggaggattggcatctcctgtctttttcctgcttcttggcattttagcatatctccagtagggtgtcctcgaattctgaataccaatttacgccaaattatggtcattagtgtcctggctgctgctgtttcacttttatatttttctgttgtcataatccgaaataagtatgggcgactaaccagagacaagaaatttcaaaggtacctggcacgagttaccgacattgaagctacagacaccaataaccccaatgtgaactatgggatcgtggtggactgtggtagcagtgggtctcgagtatttgtttactgctggccaaggcataatggcaatccacatgatctgttggatatcaggcaaatgagggataaaaaccgaaagccagtggtcatgaagataaaaccgggcatttcagaaatttgctacctctccagagaaagtcagtgattacattcctccacttttgaactttgctgcagagcatgtgccacgggcaaaacacaaagagacacctctctacattctctgcacggctggaatgagaatcctccccgaaagccagcagaaagctattctggaagaccttctgaccgatatccccgtgcactttgactttctgttttctgactctcatgcagaagtaatttctgggaaacaaga

SEQ ID NO: 368772 - DNA, 958 bp, Homo Sapiens
cggtccggaattcccgggatagcctttgcagaacagcctgtctgttctgctcctagacattagagagataatacggctgatagacaacaagaaggtattccaagctgcacaatgaggcccaggagacccttggtcttcatgtctttggtgtgtgcactcttgaacacatgccaggcacacagggtgcatgacgacaagcctaatattgtcctaatcatggttgatgacctgggtattggagatctgggctgctacggcaatgacaccatgaggtatggtttctagtggtaatagacgtgtcatccaaaatcttgcagtccccgcaggcctccctcttaatgagacaacacttgcagccttgctaaagaagcaaggatacagcacggggcttataggcaaatggcaccaaggcttgaactgcgactcccgaagtgaccagtgccaccatccatataattatgggtttgactactactatggcatgccgttcactctcgttgacagctgctggccggacccctctcgtaacacggaattagcctttgagagtcagctctggctctgtgtgcagctagttgccattgccatcctcaccctaacctttgggaagctgagcggctgggtctctgttccctggctcctgatcttctccatgattctgtttattttcctcttgggctatgcttggttctccagccacacgtcccctttatactgggactgcctcctcatgcgggggcacgagatcacggagcagcccatgaaggctgaacgagctggatccattatggtgaaggaagcgatttccctttttagaaaagcacagtaaggaaaactttccttctctttttctccctttcttcacgtgcgacacacctctccccaccacgggacgattttcactggcaccagcaagcatggcttgtatggggataatgtggaagagatggactccatg

SEQ ID NO: 368773 - DNA, 732 bp, Homo Sapiens
  misc_feature (683)..(683): n is a, c, g, or t
gctgggcctggctgtgcgagtggacggccgccggcccatcggagccaggcacgccgcgatcccggagcctgagctgtggctggcggtggggcctcggcaggatgagatgactgtgaagatagtgtgccggtgcctggctgacctgcgggactactgccagcctcatgccccagggccctgctgaaggcggccttcatctgtgcagggatcgtgcatgtccactcggaactccagctgagtgagcatgctgctccgcaccttcgggggcggctttgagctgcacacctggtctgagctgccccacggctctggcctgggcaccagcagcatcctggcaggcactgccctggctgccttgcagcgagccgcaggccgggtggtgggcactggaagccctgatccacgcagtgctgcacctggagcaggtgctcaccactggaggtggctggcaggaccaagtaggtggcctaatgcctggcatcaaggtggggcgctcccgggctcagctgccactgaaggtggaggtagaagaggtcacggtgcctgagggctttgtccagaagctcaatgaccacctgctcttggtgtacactggcaagacccgcctggctcggaacctgctgcaggatgtgctgaggagctggtatgcccgacttcctgctgtggtgcagaatgcccacagnctggtacggcaaactgaggagtgtgctgaaggcttccgccaaggaagct

SEQ ID NO: 368774 - DNA, 1098 bp, Homo Sapiens
  misc_feature (951)..(999): n is a, c, g, or t
cagacatttaagagccttaatcttgggtgttgtatgtttggtccacccttgaacattttctttgagactacctggtaccatatcagcctggccagccgtgtctgcaaggcccaggggcaggaccaggtaggtcctcctgacgcttcttgaagcttctcccgcgtgtcggcagccaccctcctcgttccgtgtgacctgcagagaagcttcagggggcatttattcaattttctaggagcccacgaggctgcaggtgagcggtgacgtctgtggttcccaccgcaccgccgcgctccttggtcctctcgctgtctctggcgggcagtaatgttccaggtgagcttgggctcctaagacaccaggcagggtagggatccagtggggaagggcaccggccccttaggtccttcgcagtagggatccgaaaaaggtcttgaagaaatagaaagggagagttggaagtagatcaaagggaaagaaagaaatcctaggagattttctatctgaaggcaccatgaagagatactccctcttctgggccgggtcctcaggtcgtctggtgaaccgagttccgatctacgttggagaccaaaccagttgactttggcttgactcctagtgaagaagccacgctttgtcctcccctgtttagctcttgatcctgaagcacttgattagggctttgaattccagggatgcaaatgagaagtttgtttttaatgcacttccttgaagtaagagtatttgaaagtatttttgcgaagaaaaacatttccttttgcactgaagacattcagatgtgaggaagatcactcagctggggaaagcaaatgctgttgagaatgtctcacaaacacaaattacatgtcagcaggtaggtttgaccctcaggttgggcacattttaagtgcactgttggtggaatttaagatgaatctaggacattcatgnnnnnnnnnnnnnnnnnnnnnnnnnnnnnnnnnnnnnnnnnnnnnnnnncacattctgaaaattacataaccagcacaagaaaccggctttatgccattttcacaagcacatgaaagatgatactttaaatggcaatgcttcataaat

SEQ ID NO: 368775 - DNA, 553 bp, Homo Sapiens
gtatccttttgcttctgcctggaggactcttaagatttcttgcagcatgggttggtgaattcttttagcttttgtattttttcaatgtccttatttcactcacagttatgaaattttatttttgcatagaattctagattaactttttttctctaggtactttaaaaaggtggccatttatgaagcattgtcatttaaaatatcaccctttctttccctatgtttgtaaatatggcgtaaagccggtttccttgtgctggttatacaattttcagaatgtgtatttaaatttaaaatattaaattgtactaaaaaactaaaaatattaatcatgaatgtcctagattcatcttaagttccaacagtacacttaaagtgtgcccaacctgagggtcaaacctacttgctgacatggaatttgtgtttgtgagagcctagtgattttccttacatctgaatgtcttcattgcaaaaggaaacgtttttctttgccaaaatactttaaaatattcttacttcaattaagtgcattaaaaacaaatttctcagttgc

SEQ ID NO: 368776 - DNA, 842 bp, Homo Sapiens
agcgtgtggtcgagcggcgtcgtggggttaccccgcccgcgccagcgctgcgtccctggccgctacccggggagagccggaggatgaattgaacctcgcagccgctgctatctccagtgctcatcacaggatgtggtgtctatctgaagaatattttactttcaaaggaaagatgctgtctccaaatgataaaatgttaggaaaactggatccattttatcaaccttcagtgtccaagcagaagaccagtgcagaaatcataagtgaagcaagaaatgcattaagaacagttagaacccaaagaccatttacaccacaggaggctcaaagaaaactattcggacctgcatcctcaagaacatcagaaaatagacctccttcctccttcagcctccatgcatccagttttgagtcatctgattccaggcctatctctggcacacgtcttagtccactagagctgaaaccgaaagttccagcatctcccaccagagaggaggattcctgcttttcctttcctaagcccccagtggaccctgcgaagattagaagagtaagcaacgccaaggctcgcttattcagggctgcctcccagcgggcccttctgccagacagatcccttcctcccctccgactcaaagaagacagtggaatccaaagaaacagttatgatggggcactctatggttgaagatcaatgggatttattaaccaaaatcaaatgctatttgccacttaaagagtcacccacttcaggctaactgatgatggagggcttcagtgaaataacggggcaagacatgttccaaggaaccacatctttaccatctcatctccagaag

SEQ ID NO: 368777 - DNA, 1001 bp, Homo Sapiens
  misc_feature (197)..(197): n is a, c, g, or t
cttccacgtcctctcccaggaacattcttagctcggactcttgaagaatctctttagatttggtggcaaaagccttatagaagcagtaagaggcttgaccacgccggaagagtcctggagctaaagctggaagacactcagctctctaagcaggggctcggccaaacatgggagttaagtgctgcttgtcttcccangtgtggtttgaaccctgtgagcctgagacagagagggccaggcaccaaccacaaggcgggaaagtccatgggtagaccctccccctggagggaagcatttctagtttatgctccttgactggccagagtgtaaaaatgttcataacgccattgaagggattatttcttgcatgcatatgctgaatttttttaagcaaatggatcatggcaccccaaaatgaaagttatagaaagctgtctacaactgtggagttggtagctggtaacattgttgtctcaagaacaactcacctctctccctaggactaatttttgtctctctcagttgaacatgttttgtcattcaagatcagtcaggtgcattctggcaactgacatacttgatggaggattgattcggtagagagcagtagaaatcttgttctaactgtgcctggtgagagactttggccccctccctccctataaggctgtggaacctgaggaagtagatacttgaagagattctgtttaggaagaaactcactctcttttggccagttgaatttatagagcattttgattcttacaaagatggccagtatcattttaccgccaaggctcccaaggccccaagaggtgtacctttttcagatgcccattttacaggcggaaaagctccatgaaaccaggaagcaactggcaagcaaaatctggctctgtgcctcaggtggggcccagagcccttccccgagaactgctgatgtctgtaaccacttggggagcactggcaaaaattacaggtttctgggtttgtgagcgcaa

SEQ ID NO: 368778 - DNA, 1193 bp, Homo Sapiens
catgtggcctccacctcggccgccctgcccagctgcctgcccccggaggtgcccacgcagctgcctggacaaaacatgaaaggctcccggagcagcgctgactcctccaggaaacactgaggcagacgtgtcggttccattccatttccatttctgcagcttagcttgtgtcctgccctccgcccgaggcaaaacgtatcctgaggacttcttccggagagggtggggtggagcagcgggggagccttggccgaagagaaccatgcttggcaccgtctgtgtcccctcggccgctggacaccagaaagccacgtgggtccctggcgccctgcctttagccgtggggcccccacctccaccctctgggtttcctaggaatgtccagcctcggagaccttcacaaagccttgggagggtgatgagtgctggtcctgacaagaggccgctggggacactgtgctgttttgtttcgtttctgtgatctcccggcacgtttggagctgggaagaccacactggtggcagaatcctaaaattaaaggaggcaggctcctagttgctgaaagttaaggaatgtgtaaaacctccacgtgactgtttggtgcatcttgacctgggaagacgcctcatgggaacgaacttggacaggtgttgggttgaggcctcttctgcaggaagtccctgagctgagacgcaagttggctgggtggtccgcaccctggctctcctgcaggtccacacaccttccaggcctgtggcctgcctccaaagatgtgcaagggcaggctggctgcacggggagagggaagtattttgccgaaatatgagaactggggcctcctgctcccagggagctccagggcccctctctcctcccacctggacttggggggaactgagaaacactttcctggagctgctggcttttgcacttttttcgatggcagaagtgtgacctgagagtcccaccttctcttcaggaacgtagatgttggggtgtgttgccctggggggcattggaacctctgataggtggggagcggaacacctggcatcattccccagcacttgcattaccgtccctgctcttcccaggtggggacagtggcccaaagcaagggcctcactcgcagccacttcttcaagaagctgcctgcacactggtcttggagcatctgcccttgtggccttgga

SEQ ID NO: 368779 - DNA, 1507 bp, Homo Sapiens
  misc_feature (157)..(157): n is a, c, g, or t
  misc_feature (225)..(232): n is a, c, g, or t
  misc_feature (234)..(240): n is a, c, g, or t
  misc_feature (1450)..(1450): n is a, c, g, or t
ctccaccccagggtggaaaagaaagatggggcttccatcttgcaggatgaagggaaaaggccaattgggcgcacaggcatttcagcaaatgtagatacagggcacccaggtaggaggcaggaatgggcttaccccagcaaccctgcctttttagctnccctgctagtgttctttccctcctcccccagttttccagttaaaagtaccccttggcctgggctttannnnnnnnannnnnnnaagattaagctggagagaaaggggatacacttgggcaagaatggatattttgtgctagattcatggaattttctaagtgtccaggagttttggttttaagcaccggcaagagctccctttggaaatttcagtgtggccaaatgattatcaagcattgcagcatctctgccagcctcccacccttagaaaggtggcagagtgagagtttaaatacccttggaaatgtgtttcatctcagtaatatttccactgggtatccatgacatacagtatggtctgccagggctgcaggcagagagccataagcaaagagaatccacagacccgctgaacagggactcaagccttctcctaaatctaagctttgccaaaaggttatcaacttccaggaccagcctagagaaataaatttaaattccagagagtaggctaggtgatgtaagtgactgactgaaaaaacaagtatcaataactcttaaagttttcagttagaaatttctgtaagttagcctcaagaaactccactactaaactggaaaaccatgactaggaacaggaagcggccctggggtagaagcattctaaagaattgtgacccaactgcatcaatatctgatttcatcttttattaaaagctgagagttaaagaactgtagggataactaagtccacctcaaagtccagacagaaactgccctcccaaagaaacaatgtttctttaaaacaaataccacaccttcccagatattatgggtaggtaagtgactaggttttgcagattaatctatagctgcccatgtgcatgtagtccagaaaacatgccaagaaggaagagctctgaaccagacacagaaaggcagtgtggcttcctcgctcaaggggaatgcaaagggctaagagccctggcttcaagcagctgttatcctagatgaggaaaatgcaaacagattcaatctctgggatattgctgccaacatgctaagcccttcaccagttgccttgattcgaagcagttcctctatgtatactggctaaatgatggactccggcagtgaaacccacatactcagcaggctgcattctaatgagaatgaaggaatttaactaatggtgtttgagctggaaaggtaaggtctgagagtcccagtgagctggaaacccaaaaaaagagaagaccaatccacctcaaaataagaaagaaaaacaaaantcatttaaaggtactctaaagatgagttctttacttctggaagaagaatccttttct

SEQ ID NO: 368780 - DNA, 713 bp, Homo Sapiens
tcatgaaggcgcgggaccggggaaggcccacacagctggccccggcctttacggctgccctgtgtccgactgcctgagaaactaacggcctgctctctgatcccccaccccgccaccctgcgccccgcaggtctgagtaacatcattggcatcagagtgtacatatctgccaattccggagacccctccaagagcgactccaaaaagaatagtgactcatacggctggtccttctacttcggggctctgtccttcatcatcgccgagatggtcggggtgctggcggtgcacatgtttatcgaccggcacaaacagctgcgggccacggcccgcgccacaggactacctccaggcctctgccatcacccgcatccccagctaccgctaccgctaccagcgccgcagccgctccagctcgcgctccacggagccctcacactccagggacgcctcccccgtgggcatcaagggcttcaacaccctgccgtccacggagatctccatgtacacgctcagcagggaccccctgaaggccgccaccacgcccaccgccacctacaactccgacagggataacagcttcctccaggttcacaactgtatccagaaggagaacaaggactctctccactccaacacagccaaccgccggaccacccccgtataaagaccgcgggcctcgccagaagaccgcgggaggagggcgcggtccc

SEQ ID NO: 368781 - DNA, 1083 bp, Homo Sapiens
  misc_feature (92)..(155): n is a, c, g, or t
  misc_feature (222)..(283): n is a, c, g, or t
ggtggggagggaagttaaaaaagagaggtcgcaaagggtggagggtagtaaccaagacgggcaggcttaacagggaaagaagtttacacgannnnnnnnnnnnnnnnnnnnnnnnnnnnnnnnnnnnnnnnnnnnnnnnnnnnnnnnnnnnnnnngataaagcaagcgaagaaaaagcgcaggaggatccgagagcgacagaagtgcagacgcatgcaacgnnnnnnnnnnnnnnnnnnnnnnnnnnnnnnnnnnnnnnnnnnnnnnnnnnnnnnnnnnnnnngtaaaaggaatgataagggagcggcccagaaaaatatcgggaaggcgataggaaggagaagggggaaggaaataaaggtgagggagggcaaacattggaacctttgtaataagcggtaatcgatggaaacatgagaagggggacaaaaaatgcggtacattcgaaaggcgttaagggaacaatacctgttcgggccatcaagcggggggagcgagaagttgccctccaccctgtagcggtctgcggggatcttgctcataggagggggcagtgtgccgcagttgatactggaccagccatcggtggaatctgtgtaagagtcctggtcgctggtgtgtccgcactgccactcccggagcacgtggaccgggagccagcgctggttgaaaccacagccagcacccacggtgcccctcttggaaggggggactgagctcctcaaggaagctgggggcacctccacaggagaggctggccctaggtgcttgtttaggtcccagaacctgtcagtctgatgagcggcctcaaatggggggctcccttcggggtccggacagaagggcccagtccagggagcaccccagggctgggcacccctcccacccacaccgtcccacgcgttgcctccggggccgtgtctgctcgagctcccacccaggtccaccacaaggacccggttgctcttctcctcctggtggaagttcccaatgccgctgtcactgttgctgctggtgctgttgttctggtgggcatcggcgtccccgtacagaaaggcgcgggcccgcaatcccgaaaattcc

SEQ ID NO: 368782 - DNA, 1076 bp, Homo Sapiens
  misc_feature (968)..(1025): n is a, c, g, or t
gattcattccatggggccgccaccggcccatgagccccggcctcaaagtttgcggcgggcgggcgggcgcggagcctccaagatgccgttccacccggtgacggcggcgttgatgtaccggggcatctacaccgtgcccaacctgctgtcggagcagcgcccggtggacatcccggaggacgagctggaggagatccgagaggccttcaaggtgtttgaccgtgacggcaatggcttcatctccaagcaggagctgggcacagccatgcgctcactgggttacatgcccaacgaggtggagctggaggtcatcatccagcggctggacatggatggtgatggtcaagtggactttgaggagtttgtgacccttctgggacccaaactctccacctcagggatcccagagaagttccatggcaccgactttgatactgtcttctggaagtgcgacatgcagaagctgacggtggatgagctgaagcggctgctctacgacaccttctgcgagcacctgtccatgaaggacatagagaacatcatcatgacggaggaggagagccacctgggcacagccgaggagtgtcccgtggatgtggagacctgctccaaccagcagatccgccagacttgcgtgcgcaagagtctcatctgcgccttcgccatcgccttcatcatcagtgtcatgctcattgccgccaaccaggtgctgcccagtggcatgaagtagacgccccctggatgccccctcccccgcatgccgaggcccgtggtccgcccccacacaacggccgcttgcaaacctctcccttggcccgctccctgggccgcccacctccgtgaactttaaggccctggaaatccagcggagtccttccccaccccccaggggtcctttcccgggaagttgtcgccttcccttgaacccgcgccatcccgatcctcgtatgcccaggcctctccgcttnnnnnnnnnnnnnnnnnnnnnnnnnnnnnnnnnnnnnnnnnnnnnnnnnnnnnnnnnnacagttccctcagcccttctcttgagccgccctctgccccgcacatttatc

SEQ ID NO: 368783 - DNA, 1100 bp, Homo Sapiens
ggaattctccggatgggcaggcccaggtcaggaggaggtagagagagggcagccggagcaccccaaggggtgcctcaagagcaggtgggggcggggagccgagggggcgggccggccatgtcccacgggacctactacgagtgtgagccccggggtggccagcagccactcgagttctcagggggccgagctgggcccggggagctaggggacatgtgtgagcatgaggcctccattgacctctccgcctacatcgagtctggggaagagcagcttctctccgatctctttgccgtgaagccagcgcctgaggccagaggcctcaagggccccggaacccctgccttcccccactacttgccgcctaaccctcggccctttgcctaccctccacataccttcggcccagacaggaaggcgctggggcctggcatctacagcagcccagggagctacgaccccagggctgtggcggtgaaggaggagccccgggggccagagggcagccgagctgccagccgaggcagctacaatcccctgcagtaccaagtggcacactgtgggcagacagccatgcacctgcccccaactctggcagcacccggccagcctctgcgcgttctcaaggcccctttggccactgccgcacccccctgcagtcccctcctgaaggcgccctccccggctggccccttacacaagggcaagaaggcagtgaacaaagatagccttgagtaccggctgaggcgggagcgcaacaacctcgccgtgcgcaagagccgagaaaaagccaagagggcgcattctggagacgtatcacaaaggggttgaagtacatgggacaccaaccgagcgtcttccccccgcccgccttggagcatctcccccccacgaagttcccgtaccctttctcggcaaccgtccttcccgcccagcttccccggagcggccggccacccctcccctaaacgggccgtggccgtggctatttacgttccgagatcccatcgattacgcctttcctcccgcgacccatgggccctctccttcacaccatcgcttccctttccccgcagccgcctcccccccttcccgtcgcg

SEQ ID NO: 368784 - DNA, 1140 bp, Homo Sapiens
  misc_feature (592)..(592): n is a, c, g, or t
ggaccggtccggaattccctggatgcgaggggggttaccaaaggcctattgcttggcctcgagcaagcctggcctatcccctgtagggggtgggtgaggggcgaggctgaggaagaagagaaggggaattggggcgcttgaggggattataatttctttaaaaagaggggaggggagaggccatggccgtcccagccaagaaaaggaagatgaacttctcagagcgggaggtggagatcatcgtggaggagctggagctgaagaagcacctgctggtgaaccacttcaacgccggggtacccctggccgccaagagtgcggcctggcacggcatcctgagaagggtcaacgccgtggccacctgccgcagagagctgcctgaggtcaagaagaagtggtctgacctcaagaccgaggtccgtcgcaaggttgcccaggtccgggccgccgtggagggtggtgaggcgccggggcccactgagtgaggacggagctggggggcctgggacaggcggtggcagtggcggcggtggcccagctgtagccccagtgctgctgacccccatgcaacaacgtatctgcaacctgctgngcgaggccaccatcatcagcctgcccagcaccacagagatccaccctgtggccctcggaccctcggccaccgcagccgcagccacggtcaccctgacacagatccccacagagaccacctatcacacgctggaggagggcgtggtggagtactgcacggctgaggcgcccccacctctgccaccagagacccctgtggacatgatggcccagcatgcagacacgtcggtcaagccgcaagcgctcaagagccgcattgctctcaactccgccaagctgatacaggagcagcgggtcaccaacctgcatgtgaaggagatcgcacagcacctggaacagcagaacgacctactgcagatgatccgccgctcccaggaagtgcaggcctgtgcccaggagcgccaggcccaggccatggagggcacacaggctgccctgagcgtcctcatccaggtcctccggcctatgatcaaagatttccgccgctacctgcagagcaacacagctaacccggcaagcgcctctgccctgggcaggtggcccagaatg

SEQ ID NO: 368785 - DNA, 1169 bp, Homo Sapiens
  misc_feature (517)..(530): n is a, c, g, or t
gcctggtacgcggtccggaattcccgggatgaaggattataaaagagcctttccataaattttctgcatgacttgccaagaactgtaagttgtaaatctgttttgttgcttcagagagaagtaggaaggaggaaatggctcatttctactcagctctggaaacaacccttgccttatatctgtcctgggctactcctgccgttctaggagttaatccaccactaatctccggtctcagggttgtcagcatcagtaactgactaccgtggtcggttcctctgtggcttttagatcatttctacagtactcacatttaggtcatcagagccacctagtggcacctcccttccttgctgctttcagtttttctgcgttgagctgtgtcatcactggctctggtgcatttgggctgctgggccatccacctcccatagcaggacatgtggcttacctaggtgtgggctctggggaggagggctgatttcaagaggaggttgagtgagagaagacaggttcnnnnnnnnnnnnnnaagcaaacgttttaaaaatttataaaaacactataatgccattactattattacaaattgtttagaaaaatagttatgtttgcaaggagggatagggaacgtatataatcctgtctctccagtaggagctatttttaccctttgtgaaattcctcatagtctttgcctcaattggaacaaattttttacaatgatggaatcctagaatttttttctgccctttaaccttcctaattggtaatcctgaaacaccccttttcttggttttgcttggccagtccctccataaattaatccattttttaaaatggatgcccatccccccgttcacacttggaattgggatgggaactcgggactcttaaattggagcttgtccccctttcctttatgtggagcctctttgcgcaacgctgaccctatgggccgcatctgtgccagggcacgggacagatagcgccgcttgcagaggcctcggggcaaacaggtctcggggcgccgcagacaaacgggctgccacccggctgtcgcagcgtccaccagctcacacgacccgctcactctccccgatcttcccgggagcctgttgtggagatcatattagtcccagcgtatgtattactcaatcctttgacactc

SEQ ID NO: 368786 - DNA, 1298 bp, Homo Sapiens
  misc_feature (21)..(21): n is a, c, g, or t
  misc_feature (84)..(84): n is a, c, g, or t
  misc_feature (355)..(355): n is a, c, g, or t
caacacacctgaatacgacancgtttttgaaatacaattacagaccctgaaacaataaatattccctataaaactgaacataanttttcatgttgaaaatgatggttttgtaaaagaaggaagctggatggcgaagaagtacctcccacagtgtttgcgttttacaaatgacaacagcccctgtgctcagcagattaaatgagtgtgaaatcaagactaatttcaaacaggtcttccaagttaacagcacagtaaaatgttaaagtggaattaaaataagtcactcatcatctaaaatactatagttcataacaatttttattaaagtgacccttctaggttaacacaaactaanaaacttcctggctatccctaaattctagggtcagggctgggggtgagtctctgagaacagaggaagtctccactcccagagcaccactgcacaccacagtcgtcttctaacctgcacaggcttttgtgtagccgtagccacatagccccaagcaggtggcagcaaggaccaagtgtcacctgtggccagagtgaggccaggtggctgctgctcccaattcaaggcctgcccttgtcaaaggtaaaatgaatctaaaatatcctatcaacccaactttgtcccactgtgtcctgagcagcggccatcccacagggagtgtgctggggaggagcctggtctggccgactgcagacagcaggctgtgcactgtctgcgaaggacttgaggacaatgacaaaactgcccacaatacacctgcttccactggcacagtgctgagcaaacccccatcagccggaccaggacccccacccctacctcagtcatttcttgaaaatactatatgcctggatggtcagcatgcttcaaaatattacccgagagttatatgcaaaaaggccaacaactataggtaggctagaaaaaaacacaaatgtggacctaacacgtaaccatggagttcaaaggtatccaaccaaaaagatgaggcctgtcgggctgttggagagacaccctgctgtaagaatgtcccaaaggaagcatgctccttgctcatccagtataggaatcagatgaatataatacaaataattttctacctgctaattacagtcaatttgacatcactgccaggtaaattagtggtaatttctaacattctacataaaacaataaaaatggtacccaaagggatcaaaaccaatttcgttgacaaaaagtcctaaaatatgaatcagaatatttcttttaaaataagcaagaccccgccaggtgcagtggctta

SEQ ID NO: 368787 - DNA, 713 bp, Homo Sapiens
  misc_feature (106)..(163): n is a, c, g, or t
  misc_feature (176)..(264): n is a, c, g, or t
ggtccggaattcccgggatgtcaattcaagagctgtttctaggatctttctctccggcaaggggttgttgcactagatttccccagagttccaagttctagttgtnnnnnnnnnnnnnnnnnnnnnnnnnnnnnnnnnnnnnnnnnnnnnnnnnnnnnnnnnngtagaaatagatnnnnnnnnnnnnnnnnnnnnnnnnnnnnnnnnnnnnnnnnnnnnnnnnnnnnnnnnnnnnnnnnnnnnnnnnnnnnnnnnnnnnnnnnntgagccactgcacccggcccctatttgaagacgtcttttgtaaaagctagcttctagaacctgagaaaagctcttttctcagaggagatactccttttgatatgttaatgattaagagtggttgcccaggcctagtttcagtggcagaataggattggaattaaaaagcagaactcatctggcttcagcagattgccaccaagaggatacaggtggtcaggtcctggctggctttgtctttgggcctgggcaggcttaggatttgactttctttgaagtacctgatgctgattgattccactaatagtaggaagcaagagacttaactatgagggacgttatgtgaatcttaagtcttaccagtccttgcattagtacattaaatttggatgttttggaagcaaattcatatgatcgtgagtgatttctccaaagaaaaaaagccttgt

SEQ ID NO: 368788 - DNA, 1214 bp, Homo Sapiens
  misc_feature (74)..(74): n is a, c, g, or t
  misc_feature (207)..(295): n is a, c, g, or t
  misc_feature (308)..(331): n is a, c, g, or t
tctgctgaaaagcccagaatgagtttctgcttttttaattcccaatccctatttctgcccactgaaaactaggnctggggcaaccactcttaatccattaacatatcaaaagggagtatctcctctgagaaaagagcttttctcaggttctagaagctagctttacaaaaagacgtcttcaaataggggccgggtgcagtggctcannnnnnnnnnnnnnnnnnnnnnnnnnnnnnnnnnnnnnnnnnnnnnnnnnnnnnnnnnnnnnnnnnnnnnnnnnnnnnnnnnnnnnnnnatctatttctacnnnnnnnnnnnnnnnnnnnnnnnnttatgtcctaaaatattaaagggtcactaaaagccacaactagaacttggaactctggggaaatctaggtgcaacaacccccttgccggagagaaagatcctagtaaacagcttcttgaattgacaggtcagaactgtttttataataaaaacgataacaactcttcaataatcatttgagaaaatcagactgttaagccattttctcccatgaacaggacactgacctgcccacatcttgaagcatattctgttgtggaagtgggttggcaaagtagtctgaggcaaggcaaagaaatacaaactgagccctagaaaaggttagggaggcaaatcaaaggaaactggaatcaaacatcagcttcacatggggaaggctttaactggataactggaatgtataaagaacacttaagaacagcccctcagtctgaggaattggctttatttagataggaactctcaaaatgggagacaagttcttctcatgttttcaatagcagtctgaatagcttttgtaaattctcttatgtcttttctcctgatctctgacactaggggagactcaagtaaaagctttgacctatcactcatcttttcctggcaagagatagtgttcttcaaagcactagcttggataaaaccaatcctgagatcctaagctggctagaaaaaacaaatcttccccaccgctcaaacactggcctctttccttacctttcgcaagcaatgaacttaatgcactaggcattagcaagggaatcgttcactagctgcttccatcactgggcctgccatgtcccagcacttcacacctggaacacagtgcctcgtgccgaattcgccaccccaggcctcgctaccttagaccgcaggagtactg

SEQ ID NO: 368789 - DNA, 865 bp, Homo Sapiens
  misc_feature (317)..(340): n is a, c, g, or t
  misc_feature (353)..(441): n is a, c, g, or t
ccttttctagggctcagtttgtatttctttgccttgcctcagactactttgccaacccacttccacaacagaatatgcttcaagatgtgggcaggtcagtgtcctgttcatgggagaaaatggcttaacagtctgattttctcaaatgattattgaagagttgttatcgtttttattataaaacacttctgacctgtcaattcaagagctgtttctaggatctttctctccggcaaggggttgttgcactagatttccccagagttccaagttctagttgtgccttttaatgaccctttaatattttaggacataannnnnnnnnnnnnnnnnnnnnnnngtagaaatagatnnnnnnnnnnnnnnnnnnnnnnnnnnnnnnnnnnnnnnnnnnnnnnnnnnnnnnnnnnnnnnnnnnnnnnnnnnnnnnnnnnnnnnnnntgagccactgcacccggcccctatttgaagacgtcttttgtaaaagctagcttctagaacctgagaaaagctcttttctcagaggagatactccttttgatatgttaatgattaagagtggttgcccaggcctagtttcagtggcagaataggattggaattaaaaagcagaactcatctggcttcagcagattgccaccaagaggatacaggtggtcaggtcctggctggctttgtctttgggcctgggcaggcttaggatttgactttcttttgagtacctgatgctgattgattccactaatagtaggaagcaagaaacttaactatgaagggacgttatgtggaatccttaagtcttaacccattccctttgcattaagtaacatttaaaaatttggggattgttttttgggaaagccaa

SEQ ID NO: 368790 - DNA, 1212 bp, Homo Sapiens
  misc_feature (347)..(349): n is a, c, g, or t
  misc_feature (356)..(357): n is a, c, g, or t
  misc_feature (366)..(367): n is a, c, g, or t
  misc_feature (375)..(375): n is a, c, g, or t
  misc_feature (395)..(419): n is a, c, g, or t
  misc_feature (436)..(497): n is a, c, g, or t
  misc_feature (500)..(512): n is a, c, g, or t
  misc_feature (546)..(641): n is a, c, g, or t
  misc_feature (649)..(734): n is a, c, g, or t
  misc_feature (866)..(918): n is a, c, g, or t
ggctggtaccggtccggaatttccgggatgtgtcaaccgcattattactgaaaaggctgtgtttgatgtggacaagaagaaagggttgactctgattgagctctgggaaggcctgacagtggatgacgtacagaagagtactgggtgtgattttgcagtttcaccaaaactcatgccaatgcagcagatcgcaaattgaaatatggatatttgtaccaggctgcgtgtttttcattttaaacacacaagatttaattgaaaggacatcaataatcataattgtgtatttaacaggtggttttttattagttttcttgtgtttcagactttatggcagccatataaannnctgttcnntctaggcanntgctgtgnaacaattttttttaaatttnnnnnnnnnnnnnnnnnnnnnnnnngggggggaggccccccnnnnnnnnnnnnnnnnnnnnnnnnnnnnnnnnnnnnnnnnnnnnnnnnnnnnnnnnnnnnnngtnnnnnnnnnnnnnagagcaacacaaaaaaagaggcgaggggcaccgnnnnnnnnnnnnnnnnnnnnnnnnnnnnnnnnnnnnnnnnnnnnnnnnnnnnnnnnnnnnnnnnnnnnnnnnnnnnnnnnnnnnnnnnnnnnnnnnggccacgnnnnnnnnnnnnnnnnnnnnnnnnnnnnnnnnnnnnnnnnnnnnnnnnnnnnnnnnnnnnnnnnnnnnnnnnnnnnnnnnnnnnnnaccccgcggccgcgcgcgaccgcctcagggctacccgggagtgctgcccggcagccacaccagagagcggagcgtgcgccctccacccggacgagtggggcagcgggcacacgagactaccgcccgaggacnnnnnnnnnnnnnnnnnnnnnnnnnnnnnnnnnnnnnnnnnnnnnnnnnnnnngcacgcttactctccacgacgccgccccccactcccccgaggcgccgcgcgtcgccgcccgtaatcggcgcactggacgggcgggaagtgcgcccgcgccgcgcccggccgcgctagcggcaagcaccctccaggaaagcggccgccgcgtaagctggtgctggcggtggggagtggaactgctcagcgcgagccatcgcctgtgcaggcggctctgatctcgacagacccagcgccgagcccgtacgccccgtcgagtcctccggcccagctggattcagagccacgagtaca

SEQ ID NO: 368791 - DNA, 795 bp, Homo Sapiens
tcgatattggggggaaggtaggaagggttggcttgaaggcaaaaagtaaaaaggggctttagagccatcttccaaaaaagaggggttggccaaaaggcggtgatttgggacctcccaagtaatgggacattcctagagggcccctgggggcaccttcaagcccctgaaatgggtcagcagctccccattcccagagagcaaagggcaggcaccactggaaccccggaaatctgtctgtagcgtgtgaaccacagagacttggctcacatccaccaggctcagcttctgggcctcatactccagcaacagccccaccttctctggctgcccaataccctcaactggggctttctcgttggccaacatggtgtaccacttgcgctgggcataggtgaacacccaggaacgatcatcaacaccaatgcagctatcccgggacatgtccacatctgccactcctatccggaactgctgggagcgcttcactgtcacttcccagtagtgtctgccactggtgaccgctgtgtctgccagcaccactgcccactcccggaagcgctccacattcaaggccaccttggtgggctccaatcccaccaagccatatttgacacccgtatcatctctgaagagtgccaggctgctgtgggcggttttttcttccagtttgaaactgacgcctctctgggcctctgtggaggcaactcccaatcgtttggctccccagcggcacaagcgcaaagaacgtgcaaaaagcagcgccatcttgcgccttggatgaaccgggcacccgct

SEQ ID NO: 368792 - DNA, 613 bp, Homo Sapiens
  misc_feature (213)..(349): n is a, c, g, or t
cggtccggaatttccgggatcgtgaatgccccaccctcagcctggccccatccccttaccttccccaagtcccagaacacacctgagtccataggcccggcagcctctgcaaggaacctggttaacttatgttgttatatagcgtcgaaatgtctatagtgtctttaaattattgtgacctacactgggtaccggagagggggatggctgcgnnnnnnnnnnnnnnnnnnnnnnnnnnnnnnnnnnnnnnnnnnnnnnnnnnnnnnnnnnnnnnnnnnnnnnnnnnnnnnnnnnnnnnnnnnnnnnnnnnnnnnnnnnnnnnnnnnnnnnnnnnnnnnnnnnnnnnnnnctcccgaaccaggctcctcctgcttcaacagacccttggggcccctgatgccaccgagaaactcgcactgtcccttggctgccgggcaccccactgagcccctgcccaccccaaagtctgccagcaacaggccctttgcctgggtgagacgggggtcagggtggcccagatgggggtgatggcgaccaaggtgctgcgtccccacccttctgacggcagcctcccctggaggggagtgctcggcccaataaaagctggaatcgg

SEQ ID NO: 368793 - DNA, 893 bp, Homo Sapiens
  misc_feature (57)..(57): n is a, c, g, or t
agcggagcgttggtacgtgctttggtgcagggcctcttctcgagcgctgatttccanggtgctgttccagatgccatatccaaaataaatgagcagacctgtggggcgaggggaaagataagtaaactgaggcccaaagaagttaagtaaatttcccaaagtcacaagacaaaggaggggcagagctgtgatttgaagttggtgctgtttgactccaaaggctgtcagcttctttgggcaaagactgagtcatctctgcattctcagcacctggtgcaatttaagcagaaatatcttgaagatttttcgtatcttcagggagattaggaatgggaatggaatgggaacgccaatgcaggaaggatgagaagagagtgtctgcagatctgataataactgtaaaataacatggccacactgagatacagagggaaggttaagcctccttgaacttacttaaattggtggcagcacgagctttcagcatcatggccagcatgaccaagccatttccctggtgttcccctcagcatgaaacatctgtctacttatttctttgctgagcctgaatggaatattccatctctgaaaaataaactttgtgtttaaattgaaatctttattcctatctggcaaatttggctatatatcctcaacaattggaagggaagtgatgtatctgcctgccatcagctacaaagcactgggacgcccactgtgcctatttattagatttacctgaattccaggtgaatctgatccaagtggctacaaaaaaagatctgaaacttctattaggccagcatctaaattcaagttttgactgaaatgagtaccggcaagtcgggggaagtctaatccaggtatgacaggaatgagtgaacctttttacc

SEQ ID NO: 368794 - DNA, 767 bp, Homo Sapiens
  misc_feature (101)..(152): n is a, c, g, or t
cggacgcccctgcgccccctccccgcgccccggccgagggcggagcgcgctggccctgcagcctccggcccgcccccggcccgccgcctcccccgggacgnnnnnnnnnnnnnnnnnnnnnnnnnnnnnnnnnnnnnnnnnnnnnnnnnnnnagtcaaaagtctattgaaaaagcagagagagaatgcctcggtgtgtaagtggagtgatgaggacctgatctctgggccgtgtgggaacactggctgccatttcatcacagtcaacctggactcacagaatttcaagagcttgtcggttgggtcaagaatgaacctacgcatgacggcgtgctgatcctgggtttctagtcatcctttttaagctgcaaagaagcatttgcagacgttgtctcatgggtaccgcttgccaactttggaggatgtgaagccggtagagaaataaagcatcgcccctctgcgcgcccctccccgtctgctagaatgtttctcatgaacgcttctccagtggttgctctccagtccaaatgggaggcctttggcccgccaggagctgtaggttccccaggtgcttctcggaggctgacgagggcgtggagagcgcgtcggtgagcgcccgggtgcagatgcttatcagcactctgcagcgcgaacggggctgctcggggcaccagccaatgagcgcgccgttacagagggggccccagggccagaagggatgcccacgacccccggggcctggctgtcccaagcccccccgtggccact

SEQ ID NO: 368795 - DNA, 1047 bp, Homo Sapiens
  misc_feature (116)..(126): n is a, c, g, or t
  misc_feature (860)..(860): n is a, c, g, or t
  misc_feature (908)..(908): n is a, c, g, or t
  misc_feature (916)..(916): n is a, c, g, or t
  misc_feature (945)..(945): n is a, c, g, or t
  misc_feature (981)..(981): n is a, c, g, or t
ggtggggggaaaaaattcttacgagggccgcccaaagaggggggcgccgaagaaaatgagaggggcgggcgaggatacgcgtaatacaaaacgttataggccctggaccgctagannnnnnnnnnnaacaaaaggttaccaaaaggaaaacgccaagggtttccaccacagccgcaaaaaaggcggggggactccctttttcatggggggaaataggaacccccatccccaaaagagaggggttggacctctcgttggtaaaaggtccccagggggattggggccatcaagaggcggcttcttcctgggcattctgcctttggtaagaagggggtcctggtcacacaagttttgggggggcactcgcaaggccctctcaggcttgtccttggcctcggagggaaagcaggtcctgaggcaggccctcaccgactccttcacctctgcctccagacccttcatcctggcctcgtactctgccagcgcctccttctggaactgcttttccatctcccgtatctgttccaggcaagccgcctgcttctcctccagcttctcctggtgcctccccaagttctccgtcatctctcctgggccatcttgtctgtggtgactttggtcatgccctggatccgctccagtctctttgtctcaagctttttcttcatctctttggtgtcgctctcagagagacacgcatcagggccatcttctgtgccggctgtgtcaatgctggatagctccagcatttgtggagatttgctaggcaatcgtgcttctccgacgtctccttcagggccttcagctctgccgcctgtttctctctggccagctccatcattttggagatttgctcggcnacgtgctgctccttgcgcttcagaacgcactcgtactgctcctcgccntgcgcagnagctccagctccagcctgtctttcagtcncgcacggcccgtccacccctcagggcccttgcccgngaggtccggcgcttctctcgcggggcaggctcctggggaggccacgtgggacaggccctgagactc

SEQ ID NO: 368796 - DNA, 1313 bp, Homo Sapiens
  misc_feature (103)..(103): n is a, c, g, or t
  misc_feature (171)..(199): n is a, c, g, or t
  misc_feature (423)..(447): n is a, c, g, or t
  misc_feature (874)..(1001): n is a, c, g, or t
  misc_feature (1012)..(1224): n is a, c, g, or t
  misc_feature (1233)..(1267): n is a, c, g, or t
aaggcatcgtgtgcaacctctgtggcaagcgaggacacgcctttgcccagtgtcccaaagcagtgcacaattccgtggcagctcagctaaccggcgtggccgncgactaaacacccgcctgcctgccagggtgaacacacagccagcttatccctcttaagtgccaaaacnnnnnnnnnnnnnnnnnnnnnnnnnnnnngaaggagatctttttaaaacctacaagagacatctctctatgccttcttaaaccgagtttactccatttcagcctgttctgaattgggtgactctgtcacaaataacggactgcgggagaactgtaggcgtgcaggatgtgtttgcccctcccttttaaaattttattttcgtttttctattgggtatttgttttgtttcttgtactttttctctctctccttnnnnnnnnnnnnnnnnnnnnnnnnnataccttttcttcccctggattttcaccctttgggctgccttgctcatctttatgccccagcactaggtacggggcccaacacgtggtaggcactccatcagtgtttgctgaattgaaaacattgttgactgtggcttctatcagagtgtctaccttttgcagctcttcccctccctcatttaatttgctgcttttaatctacgtggtctgagaatttgtgaaaccagtgttgttagaagtgtatataatctgaatcaataagctctgaatggtggccaagggcctctcttatggcacaaagatgcattggaacttcctgaaagctcttttggggggtccaaaacccattttttttaaaaatctggaaatctaaaaaattcccggctggaaaaaaacctaaaaattgggttttgaaccaatttcccnnnnnnnnnnnnnnnnnnnnnnnnnnnnnnnnnnnnnnnnnnnnnnnnnnnnnnnnnnnnnnnnnnnnnnnnnnnnnnnnnnnnnnnnnnnnnnnnnnnnnnnnnnnnnnnnnnnnnnnnnnnnnnnncccgggggggnnnnnnnnnnnnnnnnnnnnnnnnnnnnnnnnnnnnnnnnnnnnnnnnnnnnnnnnnnnnnnnnnnnnnnnnnnnnnnnnnnnnnnnnnnnnnnnnnnnnnnnnnnnnnnnnnnnnnnnnnnnnnnnnnnnnnnnnnnnnnnnnnnnnnnnnnnnnnnnnnnnnnnnnnnnnnnnnnnnnnnnnnnnnnnnnnnnnnnnnnnnnnnnnnnnnntctcttccnnnnnnnnnnnnnnnnnnnnnnnnnnnnnnnnnnngaggggggcccttccgagggggagagaggccccacccctccctcgt

SEQ ID NO: 368797 - DNA, 1259 bp, Homo Sapiens
  misc_feature (139)..(147): n is a, c, g, or t
  misc_feature (207)..(237): n is a, c, g, or t
  misc_feature (245)..(253): n is a, c, g, or t
  misc_feature (378)..(415): n is a, c, g, or t
  misc_feature (535)..(569): n is a, c, g, or t
  misc_feature (648)..(668): n is a, c, g, or t
  misc_feature (720)..(797): n is a, c, g, or t
ccccaaaaagaagtttttggaaacaagccctccgcgtgtaaaccacccggtggaaaaaaaagggcttatatatgggaagaatattatgtgggcaagataggggaagattgttgtgtacccatatataaggggggccatnnnnnnnnngggtttactccccaagcggttcgccctcccacttgggtttcgatttcacagggggaaagnnnnnnnnnnnnnnnnnnnnnnnnnnnnnnnaaactccnnnnnnnnnggtttcgcctgtaaataaggtcataacccaccctctgggaccatcgggggccctaaaaaaggcccttggagcatggcaatttaaaagggcccctaaaaatttggaggccccagggggcctggggnnnnnnnnnnnnnnnnnnnnnnnnnnnnnnnnnnnnnntttttaacaaacctgccaattggcgaatggtttgcccctttttgcccccaaaaattcgttatatactttaaaagttttaatttgccgaaaaaattttgtccacaagttgcccccccaggnnnnnnnnnnnnnnnnnnnnnnnnnnnnnnnnnnngttttcccccccgttgcgggttaaccgggggcaaatgccaagctttaaattaggtttaaataggggccccttttttgcnnnnnnnnnnnnnnnnnnnnnggtggggccccctagggaaacttttaagggaggccccccttttgtccccccnnnnnnnnnnnnnnnnnnnnnnnnnnnnnnnnnnnnnnnnnnnnnnnnnnnnnnnnnnnnnnnnnnnnnnnnnnnnnnaaaaaatcgaatgtttaatgatgaaaggccgtattcattacaacactgtttgtagacatagaaacgtcaagcaggtgtcaaaaatcccactggactttatttacatgcaggctttaaccaactttgctctttgttttagtacaggaaaattcatgaattaaaacttgaaaacacaataaaacaatcacaaaacaaattatcttcatttccggtgtcatcagtgaagcatcagaatgaaagttcaaataaagtttttgcttcccgttgttaaaaacatggtaacacacaacccacctctggaagcactgcgccatgattccttggagcagagaacacagtaggagcacatacacctctaaatccctacttgacaactgagggaaatggcccggtcagctgacttgcccaagggacacccgggcagtcagaggtagggagttttcacctagttctgtggtttcc

SEQ ID NO: 368798 - DNA, 1246 bp, Homo Sapiens
  misc_feature (640)..(640): n is a, c, g, or t
  misc_feature (668)..(668): n is a, c, g, or t
  misc_feature (1107)..(1117): n is a, c, g, or t
cgcctcgccgccccgcctttccccaccggccccccatccatttctagggccgcgcccggagccggacattttcaaatggcggtgagcttaaactgaataccttcggaggacgccggcggcgccctgatctaaagaaacgactcagggactgcggcgcttgcacgtcaacgggaggtgtgagcccaaaggtctggacccagaaatgggacgtcggtcatcagatactgaagaagaaagcagaagcaagagaaaaaagaaacaccgtagacggtcctcctcgagcagttcttcagatagtagaacatacagccgaaagaaaggaggaaggaaatcaagatcaaagtcaagatcttggtccagagatcttcagcctcgttcacattcttatgatagaagacgcaggcatcgatcaagcagtagctcttcttatggctccagaaggaaacgaagacgaagtcgttcaaggggtccagggaaatcctatagagttcacaggtctaggtcaaaaagcagaacaagaaggtccaggtcaagacctcgtctccgttctcatagtcgtagcagtgaaagcgccagtcacagaagaacgcgtactcggtctcgggatagacaacgacgtaagggcagagataaagagaanaagagaccaggagaaggataaacggaanggacacggaattacataacatcaaacgtggggaagccgggacacatcaaaggctggattaaaacatctgccaccaggctgaacaggccaaagccagacctacaacctgcgccttgaaacctggctgcccaaacctgattgaagccttgcaaagccaaagcaaagaaaatgggggaagaatcctaagagcaacaacggaacgaaagaccaaagcccacccctggcataaaacaagttaaaacagatttcccaggaatttggcaccttacttgaaaaggggatttcttttttgttcaggccggaattttttgaatcccagtcaaaaagaaatccaaaaaaagctccaggggggaaaacctacatggaaagtggaaaaaccaaggcaatctttccaaccatatcggggtaccccctcactccgaccaggcttcggcctgctnnnnnnnnnnnagtaaccgctgaaaaccaccgcaacttgctgtttccccttcctcaggaatttccccccatactgggctatatcccaggtcccccccgaaaacgcttcgacaatttttcccccggggggctccctcttca

SEQ ID NO: 368799 - DNA, 380 bp, Homo Sapiens
ggtcggaattcccgggatgagtttgcatgtagatcaatttaaaatgtccttttgtttacataatttgcataattttaaaagataatgttgccaaactttggaaatgttaatgttcagactgaaaatctccacaacatgtaactttcttcctcgggatcaggggcatggcttataatcccagccaggggttggaactggttccagtgtcaacggccaggtgctcggcttcaagggggaactagcctttggtgaatttttggtacataagtattggtaacaaatatttaagcaaatgctttctatttctctggctggtgcatatctgggcgggcgtaacaaaaaaatagtgtaaacattatttccttaccggggaatgaggg

SEQ ID NO: 368800 - DNA, 1255 bp, Homo Sapiens
  misc_feature (685)..(693): n is a, c, g, or t
tcttctccccgacatcttctccctgacaaaagcatttgttaacgtcctattatttaccttaattacatttttgtaacaaaggagtctgtaactttatttatacttatgaatatatccagggactacttctcattgctgagcagcttttaatacacctctgcttgaggagaaagtctagttcattgctactgccaagagctagttcttgtgttcatatagtaactgcacagggcttatagctgcttcattctgctactttgtaactaggagccattgcatttattaaatgtccctcagtaacgttaagtgctagttgtgattttatacataaaggccagaagctgtctgaggcaatcatgattgattgtatgtatcacttactgaagaatacctgaagtgatcatgtaactacttataagggatatccatttgtttgattacatgggtaaataatttgtcattaaacttgtgtttgaatcatgaattcccttgtttcaaaagacttgcagctaatctaaaaaactggtgatatttaatatgcatgtatgtatctaaacacccacatatatttgtggtttaagtgtgagaaatcttgctaatctatatgccacagaagagcaaaattgtatccaaatttatgccacttaaatttctttaccacgagggatagagcatgcatactggnnnnnnnnncttgatttgcccatataattggtaatggataacttaataaatttgtgtgatataaaagtagtgtatcatgttctactgtttgatcttatcccttcccatttctgcaaaggtactgttagctggaagaaaaacattttggttagctttgtatgacagtagtctttccctttatagtttctctataaaaactggttttaaaatcagtggaaaagggcaggttgaatcaaggtgaatcaatctgaaattgagcacacctgcctgccatcgctgttccttcaactgagtgctgcacatcatgggctctgtctgtgagagaaaaatcccggtgcttggtgtccttgcatgacatggagttttgcatgtagatcaatttaaaatgtacctcttgtttacataatatgcataattttaaaagataatgttgccaaactttggaaaatgttaatgttcagactgtaaatctccactacatgtaactttcttcctctggatcagtggcatggctttataatcccagccagtggtttgaactgttccgtgtggagagaggggatcctctgaa

SEQ ID NO: 368801 - DNA, 1230 bp, Homo Sapiens
  misc_feature (558)..(558): n is a, c, g, or t
  misc_feature (572)..(572): n is a, c, g, or t
  misc_feature (591)..(591): n is a, c, g, or t
  misc_feature (607)..(607): n is a, c, g, or t
  misc_feature (612)..(613): n is a, c, g, or t
  misc_feature (633)..(634): n is a, c, g, or t
  misc_feature (639)..(727): n is a, c, g, or t
  misc_feature (744)..(744): n is a, c, g, or t
  misc_feature (764)..(765): n is a, c, g, or t
  misc_feature (1038)..(1086): n is a, c, g, or t
gtggtaccggtccggaattcccgggatctggggcatgggtgctgtcagggtaccccaggctgctccagggacggtaccccagtgttcaacttggcttggggccccctgcctcatgcccttactccagggctgcttggcctgggcttgagccatggtccagaactcaggtggccccattgccacctaatataagggcctgtctccacagtgggtgagacgcccctgggcactgggctcttcagtcatccagggctatccactccatggcatgagttcccacattcagctgaactctgtctggctctggactggggtccctcctgtgccctttccctgaatcctctctgggtccgagacactgatcctcttcactctctggcttaaggcttgttctcctgacctccttggaggggtgctcaggattgaggacccctgctgttctctggggctgttggtacttggaggtgtgggtgttggcttgcactgagaagtccaaccccttcagtgccctaaaggggtcctttaagagcaggagtgatagggtgggtgggggagtgnccttagaggggtcnttgccctcatcccctgccnctgtctctgagacgtngtccnnagtaaacctgaggtcagcanncctcnnnnnnnnnnnnnnnnnnnnnnnnnnnnnnnnnnnnnnnnnnnnnnnnnnnnnnnnnnnnnnnnnnnnnnnnnnnnnnnnnnnnnnnnnatcaaatgcccatatgnttcctcacttataaagttgnngagctaaggccatggcgtatgcaaagggcatggtgggggtggacataaatgggactttgggagactcagaaccatgagggtgggcacggtggaattgaagggattgaaaaaaacctaccctggcttgaagtacacataatatactaactcccaggttgacaaagcggccacttaaaaatcctcagcaatcccaaccaccctataacaaatttcatttccatggtaaccacaaaaacccacctttggtaaccccaaattgaatatttgtaccannnnnnnnnnnnnnnnnnnnnnnnnnnnnnnnnnnnnnnnnnnnnnnnnaaaaagcgctttttttaacagacttcagaccccttacgagccaccaccaacaccattcgcaccatcctcacgaatcgcatattctccctctgatttatctccgcacccctactcccgcccttctccggggcgcgtccctctctt

SEQ ID NO: 368802 - DNA, 1055 bp, Homo Sapiens
  misc_feature (482)..(604): n is a, c, g, or t
gtggaccggtccggaattcccgggatctcgttccgaacccacagcctcccccgtggctggcgtgattgctgcagcagtggcgcctcctagctcaggacagtggcgactgcccggctgcatgcactccgatgacccacgtgctgccgtcctggtctcatccacagatagctccagcttttgttggtgggagtggtctccggaggcctcccagaaccaagggtagccgggcagctggtttggcccagggcctccttccacattagtagccccagggccagatggagccaaaggtcagctctctgcagcgcgggatgtgctcggtgatggctttgtcccatcataggggggtgtccccccagagacaaagctgcagagcacattccatgccagacgctctggccaggaagctgaggccgggcttgacaggagagcgctggccatgccaggagagaacccacgcacatgcacaccacaacacgctnnnnnnnnnnnnnnnnnnnnnnnnnnnnnnnnnnnnnnnnnnnnnnnnnnnnnnnnnnnnnnnnnnnnnnnnnnnnnnnnnnnnnnnnnnnnnnnnnnnnnnnnnnnnnnnnnnnnnnnnnnntgaaccgcaccgcaccgcatcgtacctcgtcacatctcatcacaccagaccacacctcactgcccacacacggagcaagctgcccgcctcctggagagcacacttcagctgaaacagtaaagcctgatgggtgcaaatggaacctggatgtgtgcacgtgtgtcccaagtagggacggcacaagaggctgcatggggcgtggggggagctgagccaagggtcgctcacttacaaatggctttgggaatggggtttaactaatgctgctggcgggacatcctaaaaccagatgcatcctcaaaggaccagcctactaattattgcccttggtgttgcattaacaaatctgcataaaatacaaggaaaacagcaaatacagtcccagttaggcaggcatgttattcaatgtcaacccctattaccatggaaaaaaatgggagaacagattgtg

SEQ ID NO: 368803 - DNA, 916 bp, Homo Sapiens
atggtcgcacaacaggctggtaccggtccggaattctgcggatgtttctgaggaattatgaagtattgtcctttggacaaatctataactttcttttcctagccaattatactcaaagaactaggggattatagagaggttaggcatattttgttgggtgtcaggagatgctgaacagagggcttgtatatctgtacattgctctttctccactgtgaggtccatcctgccttaatttgggttcctgcagcctcagggcattctagggctctcttagatcctgctggactgagtcccctctagaaaagaagcaggaacaggctaaccaacagcagactgttagaagttggtggagggcactgacaggagtaccagccagctgttcagctaggatcctgggtccccagagctgacagcctcataggaacagacttacagtaactcagtgttgagctggatgcatactaggtgccagtgcattcctttagtgggtgctgccctcccttcctgagttgggggcctgagtgagcacctctgtacagggcacccctctacagagggaggtagctggtatgtttgtcagtggagacttgcttctccacctgccacgaggcgggcatccatccggcagtagactcctagctcagggtgctcctgtgatggctgccttgcaacagagagaggatagcccaggaatggcagctccctcctttctcaccagtttccttcttccgtcctccctaccccaggtgctcagcagggagactccctttctcgctagataatcaggaaggctggggagatgctgggctagacacatcgtagcagtcttgcccgagcttgacccgctcgtgttccagtgcaagacatggactcgtctatactgtgcgtgcgctctgtatggaagagactgggt

SEQ ID NO: 368804 - DNA, 1090 bp, Homo Sapiens
  misc_feature (110)..(110): n is a, c, g, or t
  misc_feature (146)..(182): n is a, c, g, or t
  misc_feature (219)..(219): n is a, c, g, or t
  misc_feature (955)..(955): n is a, c, g, or t
  misc_feature (1048)..(1048): n is a, c, g, or t
cgggcttgtcgtgtcaaaggagccacccccccagggtccaactctggttgctgccctaaacctcctttcaaagtcggcagccccagggctcctgtgagcttaaatgccanctagctttgcagggtggagaaagggggacagggccnnnnnnnnnnnnnnnnnnnnnnnnnnnnnnnnnnnnncgcgccgcgcgtgcgcgcggtggggggaggaggggtngacatcacaaggcagggcccctcccaattctttccccgtgtgtgtggggggacccaggttgcctactgctctagtccaggaccagagacccccaactatatagcaggtaagagtcttgagggtcaccccaagagttttggagaagggtctccgaatacttaggagatgacaaccggaagctctcaaagccccaataggggtcccagcgcccccctagcttcagcttggtttcttccactttccagagaattggagtattgtctcctggagaaccgggtggtcgggatcgtggaccagggaaggggcttttgctggtcggggagcgccaactgggggttcatgggtggaaaaactttcggatcaagacggggtataaggctagaggcgtgtgcagaggaggggaccgacggaacggggacccaactgggtctacgtgggggccggggacgcttgtggacgtccaccaaatagcttggtaatgcagatgagatgtcaagcaagcaggtagatgagttcagtgttctttggctcacgggcaaagttctgagccgagccaagttacgctcccagttcctaggcaccgctcggtgatcgggccttggggagcttgcgacccgaggggcggatccaggtataaggggcagctcgccagctgggtcaagcgcgggggaggccgtgggttgctgtgaaaggaggggcagtgctgcggggcgagggagggggccagccggggcancctctcctctgctccacctccgcaccgcaggatacaaaggggcctgtgtcctcgcagctgccggcacggaagggatcagggcagtgactcttntgagctccctggttttgtcttgcttcctgcggtgcaacctgc

SEQ ID NO: 368805 - DNA, 905 bp, Homo Sapiens
agctcccgggaaaagacttaaatctcccctaaaagcttttctgaaatccacgagatacctgtttccgcaaaacacagggagcaaagcacccaaacttcccataggcctcagtgaatttctgtaaagccctcagccctgcacctggctcagtgaatttctgtctggcttcagcagcagagaacagcttttcagcaatctgctcaggaaagccaataagggaatcaatgtgatccacattgtcggagatgaaacccaggacaaggctgaagagggatttggcggagtaccgaagatttccctctcgggtgtatgtgaagatgaaatgatcagtcttctctttccgtgcagtgtcgtcttccctgttcatgcaaagctccacagaaaagcctttggggaacagtctgaaaggccttggcttctgcaggctactcctgacaccatccagagccagattgaccatgtgcagctgcccattttctcgcatgtagatgggccctgggtccaggtggttttctgagctgaggtagtaagacattgccttggttgcaactgttcgatccctctagtattcactggatgaagcctgtgcccctgcccggggcagcgagcggcagctcctcggtgacggctccctcctcccgcggcccggctgacggggaagggctcagcaccccgggcacaaagctaggaagggtgggacacagtgaaggtgggaggagggagggggctgggggcaaccaggcgccgtgggaacgcgggaccggcgggggcgggagcaaggctgggccgggatcccgggaattccggaccggtaccagcttttggggggttggggggagggtggacagggatctcggtggttataaaagggggggcgggagggcgttattaaagccgcccggtcg

SEQ ID NO: 368806 - DNA, 1088 bp, Homo Sapiens
gggccctaaaaatcgtggaggaccccaaaacaaacagatgccttgtgggaaaattaaaggcaagaaataaggccgcgagttaagcttgcccaactgcaaagcctctaggttggttctgtaccagttgccaggaatttcgtactctaataggagggtccgcagacccagtgggagccgcactgcacctaaggacttcccaaccctggcggagctggaagagttgagctgcggctgctttctcaaacttcctggtcttaggtctagccctagggaaaggctcatttggaaagtcacagtttcgtggggtagaaccgcgctggattgggtgtgaacagagtcatcctctgcaggcagggaagtgtgaagtttggaggggacactgagtgggaggtggtggtttgctgaaatccttctctggtcgtaaggcttgagcgttttgttttttgtttgttcagtgctacagactgcagcttgtggtggccagttagtcggcaagtcgtcagagggtctcgatttggcaggagctatgggatggtattaatacattggcagagcaacccaagggggcagcacatgcagtgaactgccatgcagaactcccgacgggcctcttccccatcccagagtggggaacaacacgccgtcacagacaaggaagtgggtgcccccgtcccctccccgaccccgagacccaggagtgctgggctccgagcaagtctattgcatgctttcctggccaaagctatatggaaagcgggaacagcaggctggggagatgacgctggggggtggggaaggaaagcgtctcgaggtcccttggccccaagtcactgcctccgagctgaggccccgatgacctccatacattctcagctggtgggaggggaagtcgtcaaggccataaaaggcaatgaaaacagtaaacatttggctacgatgtcaccctggggaaagcagggccatctatgagaatgaacaggaacaaggatgaacctacttggctgcgggaggttggccaactgaccgggactgttctacactatgcctcggtggcaaagacctgatgatgtggtcgagctaaaaatgac

SEQ ID NO: 368807 - DNA, 1266 bp, Homo Sapiens
acccctccctataataaaccaaagcaggctggtaccggtccggaattctccggatcgacggcgtcgggaggagtgtccatcaggacagcttcacctccttgaggattaaagcctaacagtactgagctatttgtctgtcaaaatgtctgcaaaattgggaaagtcatcatcactcctaacacaaacttcagaggagtgtaatgggattctgacagagaagatggaagaggaagagcagacctgtgatccagactctagcctccactggagcagcagctacagcccagagaccttccgccagcaattcaggcagtttggctaccaggattcacctgggccccatgaggctctgagccggctctgggaactttgtcatctctggctgaggccggaagtgcacaccaaggagcagatcctggagctgctggtgctggagcagttcctggccatcctcccaaaagagcttcaggcctgggtgcagaagcatcatccagagaatggagaggaaactgtgactatgctggaggatgtggagagagagcttgatggaccaaagcaggtaagaaggatgcctgtggagatgaacccccaggctgagtcaagagcactggcacatcattgggagtaaagctctcaaactgtattcccactcagcacaactggatgtataagggggaaagtacctaatgggtgtcccagcaaatagaaggaggctctacttttttcctcccttttcctgtgtccatgatacttttttgcataatttctttccctgttacttaaatcccccagtttcataccatgatggtagttctccccctgctcagttatttcatggttttgcaacccttttttgaaccagacgcacgtcactaactcctcaacccatcagcacctccctcataaaatccccaagacaatcgtcgctggtgcccccatcccaattttgacggggttcaagcgttattgagaaggacgatacaaccgcaaggaagtcactgcgctacggtctcaactatagttaatgttaaaaactctaattattcctcttctctagtctacctctttctctgcggttgttaaacatgatttatggaaatcgcgagagaacttcgctatttataaactaacggcagtcctatcgatcgcaccagacattatctaccgaaatcgcccctttttccggcgcttccccctccgtcttttcctccgcggccctgcgcggttccacatttatttgtacgtaatattttgtgtttttaataa

SEQ ID NO: 368808 - DNA, 1111 bp, Homo Sapiens
  misc_feature (126)..(126): n is a, c, g, or t
  misc_feature (721)..(730): n is a, c, g, or t
tccgttccaaaattggtttggaccccgaaaagggaagttattcttttaaccctcaaagcctgcccttaacccaaattagtcgcccccaaccccctcaaatgggaaaggaaggataatgaaaggagncggagtttccccaaagctgaagtttaaccaaccacaaaaatccacatttccatatcacctaattagtgaaaaagttttgctgggtgaacaaaaatttttccaaatggttgttttttgtggttgttttaaacttccctctaaaatagaactctgaaattctggggccaaactctgcagaagttaaagtcactgatgttctctggttggctgatacatttttagtactgctgatagaaataaaaatttctttctacccaccagaatttcatgaacttatactataccaaagcagtgatgctttggacagggaatacgcatggtagtactagttccagtaagttttatcaaacgtaaataaataaatagaatcctcacattgctcacagcctccattccatttggtcaaacttctaccaggcccaagccacatttaaattaggctgttcagttttttaatttaatgctcctaataacattgctgtctatatgtacaagtgtgaatgaaaagagtgtgtaatctgtagtcttttccacactgagtacactagcaattagtaaataattaaagagtaagtggtcattttaaaacttgtannnnnnnnnnaaaaaaagcattttctagcactttaaaaaatgggtctgaaaagtgccctattaatgtccaatgctgttccccacccagtcccacccattcaaaacctgctacaaatgctggattgagttcatatcaaataatttagcagtaccaagatttttcaaatggaaacagtgttactgacttcttcatattggataacaaaataagggtaactctggtcatcattaaaaatgacaaaaatctgaggctcaaagaaattatccacacaagagtcataaaggtcactggtgacactgccaggattgactggcgggggccttctcatgccatgactgcccattgtgttctgcccgtcagcacttggccagatcccgagaattccggacc

SEQ ID NO: 368809 - DNA, 525 bp, Homo Sapiens
  misc_feature (399)..(399): n is a, c, g, or t
  misc_feature (429)..(429): n is a, c, g, or t
  misc_feature (445)..(445): n is a, c, g, or t
  misc_feature (455)..(455): n is a, c, g, or t
  misc_feature (467)..(467): n is a, c, g, or t
  misc_feature (493)..(493): n is a, c, g, or t
  misc_feature (502)..(502): n is a, c, g, or t
  misc_feature (507)..(507): n is a, c, g, or t
acttactggaactagtactaccatgcgtattccctgtccaaagcatcactgctttggtatagtataagtccatgaaattctggtgggtagaaagaaatttttatttctatcagcagtactaaaatgtatcagccaaccagagaacatcagtgactttaacttctgcagagtttgccccagaattcagagttctatttagaggaagttaaaacaacaacaaaaaacaaccatttgaaaaatttttgtcaccagcaaaacttttcactaattagtgatatgaaatgtgatttttgtgttgttaaacttcagctttggaaaactcagtctcctttccattatccattccattcccaatttgaagggagttgggggcaggtaatttgggttaaagggcagttnttgaggggttaggaaggtatttactttccnttttcgggggtttccnggacctaggntttgtggaccgnaaggtttttagggaaaaggggaggtnacatttttngggcngattggttaggggttttt

SEQ ID NO: 368810 - DNA, 995 bp, Homo Sapiens
ggtccggaattcccgggatcgggcgtcccccagccgcgcccccagcgggaccgagcgtgacccagctgcggccggccagccatggagactggagcgctgcggcgcccgcaacttctcccgttgctgctgctgctctgcggtgggtgtcccagagcaggcggctgcaacgagacaggcatgttggagaggctgcccctgtgtgggaaggctttcgcagacatgatgggcaaggtggacgtctggaagtggtgcaacctgtccgagttcatcgtgtactatgagagtttcaccaactgcaccgagatggaggccaatgtcgtgggctgctactggcccaaccccctggcccaggcttcatcaccggcatccacaggcagttcttctccaactgcaccgtggacagggtccacttggaggaccccccagacgaggttctcatcccgctgatcgttatacccgtcgttctgactgtcgccatggctggcctggtggtgtggcgcagcaaacgcaccgacacgctgctgtgagggtcccggtgagatggagtgggtcacacctggcaagctggaagaaagttccctggggatgggagagcgggtgggtgctgccaatctccagctactgtggccacaccccacctggtcatgggcagacccctcccttcctgggctgacctgctccctcgaggccagcctgctccctggctgaggctcaggctatccgcccaagctctttgctcattctagggccagtgggaggacacatgtgataaggccagagcttgtgtgctgggcacagaaaatcacctgctgcatcctgtgctccgcaggctggggccggagcctctggcccgcagggtctcctatgcgtggttccttagcccagtatcccagcttagccttagccgcaggctaggccctgggtggactaggacctccttggttgaccctctctgggtcctgcctgggtcctggaccgcccagttctgcctaatc

SEQ ID NO: 368811 - DNA, 1147 bp, Homo Sapiens
gaattctccgatctgactctggccgagctcaggtggttctctcgtggtgggacattgaaatggaccctgaggggaagatcaagtgcaccatggcccccttctgggcacactcagacccagaggagatgcagtggcgggaccactggatgcagtgtgtgtacttcctgccacaagaggagcctgtggtgcagggctcagcgctctatctggtagcccaccacgatgactactgcgtatggtacagcctgcagaggaccagccctgaaaagaatgagagagtccgccagatgcgccccgtgtgtgactgccaggttcacctgctctggaaccggcctcggtttggagagatcaatgaccaggacagaactgatcgatacgtccaggctctgaggaccgtgctgaagccagacagcgtgtgcctgtgtgtcagcgatggcagcctgctctccgtgctggcccatcacctgggggtggagcaggtgtttacagtcgagagttcagcagcttctcacaaactgttgagaaaaatcttcaaggctaaccacttggaagataaaattaacatcatagagaaacggccggaattattaacaaatgagggacctacagggcagaaaggtctctctcctcctgggcgagccgttcttcactaccagcctgctgccgtggcacaacctctacttctggtacgtgcggacccgctgtggaccagcacctgggggccagtgccatggtgatgcccccaggcagcctcgctgcacgctgtgggttgtggaagtcagggacctgtggcggatccggagcccctgtggggactgcgaaaggctttcgacgtgcacatcatggacgacatgaattaaacgtggccctggacttccggggaaaagcaagggaaactgaaccccccccgcctggggggaagtacccatgccgcaaccctctccaagcccctggaaaaatctgaaccttttgacttccaacaacccgggggcccctgacaacctccgtggggggccgagggccatggtggaaacctcaaaaagccccgggcaaaagcccctcgccgggggctttatgtatggggagaactcccgggaacccgcgggagcgccccgcgaaaacggtgccctcccgtgagcccgggaaa

SEQ ID NO: 368812 - DNA, 1808 bp, Homo Sapiens
  misc_feature (216)..(224): n is a, c, g, or t
  misc_feature (337)..(337): n is a, c, g, or t
  misc_feature (1762)..(1762): n is a, c, g, or t
  misc_feature (1793)..(1793): n is a, c, g, or t
aatataaggcgaacggaaggataaggggaggtaggggggagcgagtggcggtgtgcgaaataataggtgcttgcgtgggatctctcgcgaagttacaccggaattaatctctattggagatgggagtggtgagtagagagggtttcggggggcgcgttatgttggtaactgagatggagcgacttgagtggtcccattctggtgatggggatatannnnnnnnncttggcgtgaagagttcgaaaagaggtcgtggggggagtgtaaagggggtttgcaggaagagtgatttatcaaggtggacttgaggggagaagttttgggttgagcgtgatcncttccttttgggccccccctttccttgggactccttctgggaccaaggcagggctggtcccctgcccacacttgcgttctgcgcgaggacaatgggctgaaagtgcgtggcctcggaggtgaacgctgcaggcagctgggtggcttcttcaccgcaggggtgctggccgggcacgggccctggcacagccacaagcccggtgtcgctgttcaccggcaggaagcctgggctgggctctggggctggtgccacactgggcttcagttcaaccactgagaaggcgttttggaggctgatggtctcttcctcctggtacacctggcagatggaagctctgaggtgggcaaggattttccggctgtccatgcctcgctggagggaggtagctcccgcaacacctggatgccctcagccgcgggacggccggctcccggggcactgcgcctggccatgtccaggaggagggtcttgagcctgcgtggcagggccagcttgtggttgcggggggacgctgaacttggctgcggtccacagaacggcggccacacagtacacagaggccttttcagttaccagcctctcctctgccagctcgggagccagaaagaacgagtcataggaaccgttggcagggggtggctggaagagcacagccccgtcctcagcaaccagcacggagtccagacacaggtaggctgggtgctcagggcgtgtctgcagtgcgcggaggcaggccaggcacagggcccacagctcgtactcccggaagggccggcccagctgggacaggaggtcctgcagggacacccactgctccgcggctgcacttcccagctgcctggctccttctggaattctctcatcgtccctgggagtctgggcttcaccgctagcatctcgagggtctgcaggggcctctgctggcccctggctggggtgtgaagtctcgggctgtcctggactgccgggcaccccagggcacctgtccgtgctgcggcctgcacagggaacccgtcccagctggtgttccggctcctgctccggccacagcctgcatttgggctgagccgggaagctagaaaggccatttttcctgtccagaaaggccttcctggggtccggagagaataattccgatatgggcagctggcttttcccgcgggtcagcggcaggcagagggtggcctcggggctgtcggacagcagcctagggaacgtctgcaccttccgcaggcggcttctcctgagggcgtctctgtccagctccccgagggtgcgctcggcatccaggacgaggccggccagcccctcccggctgtggctctcgccatttctcaccggggtggacagcagagccttggttggggaggctctggggccccggctggtctcagactccgggccttcgggggtcggcagaacctncgggtcagtgctggggtccccgggcggcctnctgggcccagcggtt

SEQ ID NO: 368813 - DNA, 925 bp, Homo Sapiens
gggactgttcgcgctgccgtgtttccgggcggggacactcagggcgcgacgcttttctgttacccacagaggcccgccgcggctgcgccatccgcggccatgaagtttcgggccaagatcgtggacggggcctgtctgaaccacttcacacgaatcagtaacatgatagccaagcttgccaaaacctgcaccctccgcatcagccctgataagcttaacttcatcctttgtgacaagctggctaatggaggagtgagcatgtggtgtgagctggaacaggagaacttcttcaacgaatttcaaatggagggtgtctctgcagaaaacaatgagatttatttagagctaacatcggaaaacttatctcgagccttgaagactgcccagaatgccagggctttgaaaatcaaactgactaataaacactttccctgcctcacggtctccgtggagctgttatctatgtcaagcagtagccgcattgtgacccatgacatccccataaaggtgattcctaggaaattgtggaaggacttacaagaaccggtggtcccagatcctgatgttagtatttatttaccagtcttgaagactatgaagagtgttgtggaaaaaatgaaaaacatcagcaatcaccttgttattgaagcaaacctagatggagaattgaatttgaaaatagaaactgaattagtatgtgttacaactcattttaaagatcttggaaatcctcccataagcctcctgaaagcacccatggagaacagaaacgtggaacacatggcctgaaagtgcacataagatatttagggaagctccctacaagtttctttgcttggaacaacaaggtaaattccccccaaagggcctttatgcacaataattggggaataaaacaagaaggggtgccattttttggatcctc

SEQ ID NO: 368814 - DNA, 1676 bp, Homo Sapiens
  misc_feature (1151)..(1177): n is a, c, g, or t
  misc_feature (1197)..(1332): n is a, c, g, or t
  misc_feature (1391)..(1391): n is a, c, g, or t
  misc_feature (1597)..(1636): n is a, c, g, or t
ggggcggccatgaagtttcgggccaagatcgtggacggggcctgtctgaaccacttcacacgaatcagtaacatgatagccaagcttgccaaaacctgcaccctccgcatcagccctgataagcttaacttcatcctttgtgacaagctggctaatggaggagtgagcatgtggtgtgagctggaacaggagaacttcttcaacgaatttcaaatggagggtgtctctgcagaaaacaatgagatttatttagagctaacatcggaaaacttatctcgagccttgaagactgcccagaatgccagggctttgaaaatcaaactgactaataaacactttccctgcctcacggtctccgtggagctgttatctatgtcaagcagtagccgcattgtgacccatgacatccccataaaggtgattcctaggaaattgtggaaggacttacaagaaccggtggtcccagatcctgatgttagtatttatttaccagtcttgaagactatgaagagtgttgtggaaaaaatgaaaaacatcagcaatcaccttgttattgaagcaaacctagatggagaattgaatttgaaaatagaaactgaattagtatgtgttacaactcattttaaagatcttggaaatccctccattagccctctgaaagcacccatgagggacagaaaacgtggaacacatggctgaagtgcacatagatattaggaagctcctacagttttcttgctggacaacaagtaaatccccacaaaggccttatggcaatattgtgaataacaaagatggggcattttgatctgcttcatgaagacgtgtcccttcagtatttcatccctgcgctgtcctagcaccctgtcgctggagttggcatgcagagactttgtcaggatgggagaggccgcagtgtatcggatctgtcgttctggaaagaagacccttctatttagagtagaaacaaacgaaacttctaaggtatcatctgtgttaagtgatgagaccatatttctttgatgtttctgaacatcaaagctgattcagtactggtagatgtgctcattctccctgaaacatacccatcatatttcctattataattacatctcattgtcctgtggaggtggacatgataaacattatcnnnnnnnnnnnnnnnnnnnnnnnnnnnagacggtctcattctgtcannnnnnnnnnnnnnnnnnnnnnnnnnnnnnnnnnnnnnnnnnnnnnnnnnnnnnnnnnnnnnnnnnnnnnnnnnnnnnnnnnnnnnnnnnnnnnnnnnnnnnnnnnnnnnnnnnnnnnnnnnnnnnnnnnnnnnnntcctaagagacaggggtctcactggtgttgtccagggctggtctttgaactcctggggntcaagccaccccggccacccggggccttcccaaagtgcctggggaatacagggcatttaggccatcaacaccccatccctttaacatttataattaatgggccacattaccaaaacttgagaaccctaaagtttgcttttagggattaaaaatggaaaatttgggaaagaacataagccttaaccatgtgaaaaaaatttaaaaannnnnnnnnnnnnnnnnnnnnnnnnnnnnnnnnnnnnnnngggaataaaaaaacccccagcgggggtaaatttttggaac

SEQ ID NO: 368815 - DNA, 944 bp, Homo Sapiens
  misc_feature (134)..(134): n is a, c, g, or t
  misc_feature (142)..(142): n is a, c, g, or t
  misc_feature (158)..(158): n is a, c, g, or t
ccctggacatggttctgatccccggagcttaaaggcagaccttggtccaacccacttcccccaggccaccaccgggaatgaatatgccactcatgcgagacaaagggtaggctcggggggtgggagcggggggnctggaggncggggaccccccgacncccaccaccaaagcccccagccttgagcctcctggggagcctctgggaacggcccttcagggggtccagccagcaggtgagaaacaggccccaatgggcccgagaaaaatagggggccaaggggacctgggattggggtgcagggcacccaccagccaccctgcttcgaggcctgtggtgtgggagacacagagctcgtcctagagcagtggctaacttggggggctttcctgaagctcccgtggggccaggggaaccttagtgtgggaggatataaggagtgtgtggccccccatgcgtttctgaggctgaaggctgttgggctcaggtccaggcagcctgtctgtccttggctgtgggagaaggggaggggtgtgaattccctggggatactggggcagagccctcgaggggtgctgcttgcacctggggccaggatttgggctcaggtggtcagggggaccctcattctatgccccaagcactagcccatcaggccatctgccccaccaagtggcacagaaaaggccgagaaacctccaaaggggttggggcaggcagaggggtccgagggccaggcagatttggctggtggaaaagggggcccagaaaggggccttccccaagggcagggcctgcgttttattttcttctcccctggccacagcactgctggcctggcctcaccaccatctacgcagcaggccaggggtttgggggcaccaataaggtgggtgggaaaagggtgtcttttgcatgcattctgcttggggtaggacagaatcg

SEQ ID NO: 368816 - DNA, 1116 bp, Homo Sapiens
  misc_feature (934)..(934): n is a, c, g, or t
ggtccggaattctccgggatgtccaccatggacaagtttaatgtcaccaaacccatccatgcgctgaataacccgatcatcagccagttcttccccaccctcctgctctggtccttctcggccctgctcccctccattgtctactactctacactgctggagtctcactggaccaagtcgggggaaaaccagatcatgatgaccaaagtctacatattcttgatcttcatggtgctgatcctgccctccctgggtctcaccagtctagattttttcttccggtggctctttgacaaaacttcctcggaggcctccatcaggttggagtgcgtcttcctgcctgaccagggtgccttctttgtgaactatgtcatcgcctcagccttcatcggcaatggcatggagctgctgcggctgccaggtctcatcctctataccttccgcatgatcatggccaagacggctgctgaccgcaggaatgtcaagcagaaccaggccttccagtacgagtttggagccatgtatgcatggatgctgtgtgtcttcactgtcatcgtggcctacagcatcacttgtcccatcatcgcgccatttggcctcatctacatcctgctcaagcacatggtggaccggcacaacctctacttcgtctacctcccagccaagctgatagaaggggatccactttgccgctgtgaaccaggccttggcagcccccatcctgtgcctcttctggctctacttcttttccttcctgcgcctggggtatgaaggccccccgccactctgttcaccttcctggtgctgctgctcaccatcctggtctgcctggctcacacctgctttggatgcttcaagcacctcaaaccctctgaactacaaaacaagaagagcctgcaagtgacaaagggaagtgaggcagaaggccacatgncccccaccgtttacaccctagctggctcgggatttctgaacggcttgggccctcgcagagggacagcactggtcttcccagcagcagcagcagcagaacctatgtgggcatcccaccaaatcaacgggacttcccctggaaaaggggctgggggcaaggccccacgggcatggtggctgctg

SEQ ID NO: 368817 - DNA, 610 bp, Homo Sapiens
  misc_feature (402)..(402): n is a, c, g, or t
cccaccatggaatatgtgtagcagccagctccacaatgatccactctgccgattttgtggcaaaaacaccataaactgatcagtgcatgctttacaattgtgctggagaagtccggacccccagaaattcagccctgtcggccacctcctggtaggacagccactggtaaggctgcttaggcttcctgaaaccaagacagggcccattccctgagatgctaagcccacggcggaacacctggtacatggtccgggcatcatcatagtagtgggtaagtagctgagggccagacccaatcacagatcgccgtgccccgccactgtcctctacttcttctgactgcatcaggaggttgcatggcggctgcaaggcctttggccggtgagtgaaccagtaggcanaggatggcagccagggcacccatactcacgagggtggtggccgagaggctgcggaaaaactgtcccaagtcacctagctcaggcagtcgcagtatcctcaggatctcctgtgtctgcatcttctccagaagtgagaggacaaactctacgaatagccagagggagccccccgacacgaggaagaaggtcagcatggcggtcagcgggg

SEQ ID NO: 368818 - DNA, 1052 bp, Homo Sapiens
  misc_feature (204)..(222): n is a, c, g, or t
  misc_feature (784)..(810): n is a, c, g, or t
cggtccggaattcccgggatcggaccgttcccgggacgtggatcgagagcaggaccacaacgagtgcaacaagcagcgcagccgtcataaatccaaggatcgctactgtgaaaaggatggagaagtgatatcaaaaaaacggaatgaggctggggagtggaacagggatgtttacatccgccaatgagttttgcccgtttgtgnnnnnnnnnnnnnnnnnnngaagtcttgtataactaacagcatccccaaaacaaagtctttggggtctacactgcaatcatatgtgatctgtcttgtaatattttgtattattgctgttgcttgaatagcaatagcatggatagagtattgagatactttttcttttgtaagtgctacataaattggcctggtatggctgcagtcctccggttgcatactggactcttcaaaaactgttttgggtagctgccacttgaacaaaatctgttgccacccaggtgatgttagtgttttaagaaatgtagttgatgtatccaacaagccagaatcagcacagataaaaagtggaatttcttgtttctccagatttttaatacgttaatacgcaggcatctgatttgcatattcattcatggaccactgtttcttgcttgtacctctggctgactaaatttggggacagattcagtcttgccttacacaaaggggatcataaagttagaatctattttctatgtactagtactgtgtactgtatagacagtttgtaaatgttatttctgcaaacaaacaccttctnnnnnnnnnnnnnnnnnnnnnnnnnnnccagtttgatcacactatttttagagtcttaatgccaagtcagcagatttgcctttatgaaataccggggactaggaaatgcccacattcccggaaattttgtaataaccttggcctagacaccctatccctcattcctaggaagaaagtgtggtacatacctggaaaaataaggggggaattgccttgaaccttgaaaaagggttggaaatttcttgaaatggtaatacccctccctttgt

SEQ ID NO: 368819 - DNA, 1214 bp, Homo Sapiens
  misc_feature (854)..(959): n is a, c, g, or t
  misc_feature (1005)..(1005): n is a, c, g, or t
  misc_feature (1061)..(1132): n is a, c, g, or t
tgagccaccgtgcctggccagaagtagagcttctaagaggcaggtgtcaaacccatgccagtcagactctgaaacctgaggtctgaatattttaagctcagctccacaattactgtatttgttctattagatacaactgcagagagaggccaaagctcagagcaggccattggcacggcatctgatcctgcttaactgccctgcagcacagggtggagacacttgggccttgtcaggctaagggactggggtaggatgggtagcagtggaattgaagacaaagaaaacaaatgggcagaagatgggtgggtggaagttcagagggctatcctggcagtgttcactggagcagaagtgtgaggctttctgaatgcctgctgacaccagggtggggcagggctgtgtagtgtgagatgcaccaaattggacgagaagccaaggcaggcttgtgtatggggtaccctggggccctccgcctagtgaagccctatcttctcagcccagcgtcctcgtctcacaagccctcagagccccagcctgctttcctttctgggcctgtgctgcaaccccctcaacatggcccactgggtaaaaattcatgcttcaagactgatccccaagcctgttttgtattatataagtaaagaattttttaaacacttatccccagataatgtgtatttatttataaagtatagcccctgtctgcttgactaatatattaaaaaagtgaccctttttgactctttggtccaagaaactattggtttgcacttttttgtgtagtttgtgtatagcatccctgcaaattcctgtcagaaagtctgatttcagtaacactaaaacttctctcnnnnnnnnnnnnnnnnnnnnnnnnnnnnnnnnnnnnnnnnnnnnnnnnnnnnnnnnnnnnnnnnnnnnnnnnnnnnnnnnnnnnnnnnnnnnnnnnnnnnnnnnnncaaatttgcttaagtgcccccccaccgaactactacataaattaantgaaggatggttttacttaatttgatttttgggaatcattacaccatggtataatnnnnnnnnnnnnnnnnnnnnnnnnnnnnnnnnnnnnnnnnnnnnnnnnnnnnnnnnnnnnnnnnnnnnnnnnggacaacaataaaaactggacaatctaaccttataatggaggaaggaaaaaagaatctgggtacttccaagaaaatttggga

SEQ ID NO: 368820 - DNA, 1171 bp, Homo Sapiens
  misc_feature (49)..(99): n is a, c, g, or t
  misc_feature (801)..(834): n is a, c, g, or t
  misc_feature (892)..(1043): n is a, c, g, or t
  misc_feature (1064)..(1080): n is a, c, g, or t
ataaagatccgggggcttgtctacgattagactgacaaggttgagtgannnnnnnnnnnnnnnnnnnnnnnnnnnnnnnnnnnnnnnnnnnnnnnnnnntagcggggataggtggcttatggcggtgataaagttagagaattggggggaggattgtgataaatgggagcctccgtcgctgctatacaataaagttgtaggaacggcgagcatggtctggtctgagtgtttgagggtcgtggagttggcgggaaggctatggtcccaaggggaatctaagttaagaggggcggaacgaaaagtgcaggatggatgaaaagcagggaataagcctttaggggaagggagaaaggtggatagagaaaaagtgtggcccgtttccgtgtggagacgaggtggttaaagtttgtatgggatcgaagatggcaagggcgtgaacctttggagggtgatccttttttgcccctcaaacgcccccaggtttttacaaacgccaaactgtagggggcggtttcgtggactgggcaggtgaaagggcttttaaagtgcccacattgactcagtgcactaggttagaactttctgtatagacactggccttctcaggcctccctgcatccccaccaagagcaccaggcagtagtcacttgaatgagttgagaggatgttccagactctgaaggagaagagaaaaatggctagggtttttgcctcaaaaaagggcatctgtctacagcataggaagatacctgtagatacaaaaatgactcccgggcagggccaagcgtggtggctcacacnnnnnnnnnnnnnnnnnnnnnnnnnnnnnnnnnntgagaactgattaagctcaggagttcaaaaccagcctgggtaacacagtgagtgcttnnnnnnnnnnnnnnnnnnnnnnnnnnnnnnnnnnnnnnnnnnnnnnnnnnnnnnnnnnnnnnnnnnnnnnnnnnnnnnnnnnnnnnnnnnnnnnnnnnnnnnnnnnnnnnnnnnnnnnnnnnnnnnnnnnnnnnnnnnnnnnnnnnnnnnnntgacacagtaagaccatgccnnnnnnnnnnnnnnnnngactcagaatctataaagcagtgaggcagtggttctagccgggacagagaagcctcgatcccgggaatcccggaccgttgccaggaaaggt

SEQ ID NO: 368821 - DNA, 1044 bp, Homo Sapiens
gggagcagcggactcaggcggttacttctacggggaggctccgtccccacatcttaggggatgaagcgggcgcgaggacggggacgggaatgagcggacagggaaacggagggactagggatagagggctgcatggacacggggagggaggaggacggtcatactgtcagaggcagcggctgaaggtggggcacaggcgcctaggggctgcaggagtatgtacgctgtcaaaggagggggagagggtccggggcggacaacgtaaagcccgtgcgggaggtaaatctgggggttgttcctgcagcccactcgcggggggtcagggtggggaccttcgcgggaagcccataattcgtgcaggccccggcggggcgggagtaggaagctaccgcaagttgccggatgtggcccgagtgcccatgagtcccccaccactagggtcgcgtctcccggggccacgccctgccccgccagcgcccccagcagcgcctcccgagcccaggggccccccggtgtccaccaggatgtggccacgggccgcctcctccagggcggcctctgcgccgccactcccgcgcggggactctcggtggctggaggccgggccccgggtctggggtaggaccagggtcacggagccgtcggcgcgcacggcatcgcccacaccctctggctccgcgtagccctgcagcagaaccaccacagagtaggggtcgccgggcaccagcagaggggatgccccgcacagcggctcggtccgcatgaggctgctcctggcagggagggacgggcttgggcctctgctaggtcttgcctcactcgaagaaagcgcagaaatcgaaaacgcgggtgagagtttgtcctctgcggttcccgtgtacccagatatggcggccgaagcggcgccgcggaggtagctgtagttccggcgccttcaccgtgtgcccgaggaggctgcctggctgggctccagcctcctggcggttctccgctccgcaaccccagcaacttctttgcactgcagaattttgaagcgccattagc

SEQ ID NO: 368822 - DNA, 1140 bp, Homo Sapiens
  misc_feature (946)..(946): n is a, c, g, or t
  misc_feature (978)..(978): n is a, c, g, or t
  misc_feature (1055)..(1055): n is a, c, g, or t
  misc_feature (1057)..(1057): n is a, c, g, or t
  misc_feature (1102)..(1102): n is a, c, g, or t
agcggagggggcggggctgtgggctgctcagaccctgcgccctattcccgcagcggctttggctgggcttcaggagcaacgggtgtatgcgcttcacctgaggcgctacaatgacgcgctgctcatccatgacaccgtccgcgccgtggatgccttggctgcgctgcaggatttctatcacagggagcacgtcactaaaacccagatcctgtgtgccgagcgccggctgctggccctgttcgatgagggaccagcaagaagtgatccagaagttccaagatggaaccctgaaccttctggtggccacgagtgtggcggaggaggggctggacatcccacattgcaatgtggtggtgcgttatgggctcttgaccaatgaaatctccatggtccaggccaggggccgtgcccgggccgatcagagtgtatacgcgtttgtagcaactgaaggtagccgggagctgaagcgggagctgatcaacgaggcgctggagacgctgatggagcaggcagtggctgctgtgcagaaaatggaccaggccgagtaccaggccaagatccgggatctgcagcaggcagccttgaaccaagcgggcggcccaggcagcccagcgggagaaccagcggcagcagttcccagtggagcacgtgcagctactctgcatcaactgcattggtggctgtgggcccatggcagcgaacctgcggaacggtgggagggcacccaccatgtcaatgtgaaccccaacttctcgaactactataatgtctccagggatcctgtggtcatcaacaaagtcttcaaggactggaagcctgggggtgtcatcagctgcaggaactgtggggaggtctggggtctgcagatgatctacaagtcagtgaagctgccagtgctcaaagtccgcagcatgctgctggagacccctcaggggcgggatcaggnccaaaaagtggtcccgcgtgccccttcttcgntgcctgactttgacttcctgcagcattgtgccgaagaacttgtcggacctctccctggactgacacctcatgtgtcnanggcccggttttgggcctttttggggggctgtaaaatatttttatnaaattccagggcccctcctttccggaatcaccaccttg

SEQ ID NO: 368823 - DNA, 1121 bp, Homo Sapiens
  misc_feature (158)..(159): n is a, c, g, or t
  misc_feature (170)..(171): n is a, c, g, or t
  misc_feature (177)..(177): n is a, c, g, or t
  misc_feature (180)..(182): n is a, c, g, or t
  misc_feature (186)..(187): n is a, c, g, or t
  misc_feature (189)..(189): n is a, c, g, or t
  misc_feature (191)..(191): n is a, c, g, or t
  misc_feature (193)..(197): n is a, c, g, or t
  misc_feature (199)..(199): n is a, c, g, or t
  misc_feature (201)..(218): n is a, c, g, or t
  misc_feature (220)..(246): n is a, c, g, or t
aaaaaagaacttgccacttatataaaatttcccccaggtggagagtgttcccacagattaaaagtttttgcacattttgagggggcggtttagggggcccccacagtcccaaaccctaataggggacaccccttaacagaggacccccttgtaacaanntaacctgtggnncccctnaannntttnntntntnnnnngnannnnnnnnnnnnnnnnnncnnnnnnnnnnnnnnnnnnnnnnnnnnnttccccatggcccatatttattattctcaccacaaaggcacaatacacagagctttgagggtccaatacagtcatcgtgacagaacgcaccgcagccttggcacatgatcatggctttcaggctgcacgcacactggagcgagatgctttccaccgtgctgctgtcagtgaacatttgcaaggaaagtgatgcactgtggctcgcaccaaagtttgctttgtggctcagctgcaccacacttccagcaaggcctttgggaaaggtgggagagctagaggaataattaaagctggtggaactcagcttggagtttagaaagcttcccataaaatgcctgcttgatgctgagttgggaggggagagaagaaggctccaagaggctcactgagccccttccctggctctcggggtaatttccagaagggcaagtccaatgacaaaaggggcatccctttccaagtgacccaccagttccaggggactatgcccagtagctttcctgttctcggcatttgccttaagaggacccccccacaaaagtcttctcattcttgacgctgccaacaaaggcatgtggctttggagcccagtcttcccttggagtctgtaccccaccagacatggagtttgtgcttggtcccaacttcccactgggaaaaactggagggatctcagcaggaagaggcatcgggtccgcaggcctggggcgctgaagggttgcagccacattcccagagccaaaaagcttcttcccttggcctgtaacattgctctgatcacccagggcccgacctgtctgctctggaccaaaggagatcacatttggagatgagaaacgaggtttctcgagatcccgggaattccggaccggtcc

SEQ ID NO: 368824 - DNA, 1210 bp, Homo Sapiens
agcggactgattggaagcatcggtttaagggcactggcagaatccttagcttgttctccgcggcagaccaactgctgtatcagtgacagagtggaatggaagtcttagttggtagtctgttatggaaacgctctttactgttattgtagtaccgtggtgacaacatgccattgaaatggaaaacgagctctcctgctatctggaaattcccagttcctgtgcttaaaacatccaggtcaactccactttctccagcatacatatctctcgtggaagaggaagaccaacacatgaaattgtcccttggaggcagcgaaatgggcctctcatcccatttgcagtcttccaaggcaggacctacacgcatctttaccagcaatacccacagttctgtggtgttacagggctttgaccagcttcgacttgaaggattgctttgtgatgtgaccctgatgccaggtgacacagatgatgctttccctgtgcatagagtcatgatggcatctgctagtgattacttcaaggctatgttcacaggtggaatgaaagaacaagatttaatgtgcattaaacttcatggtgtgagcaaagtcggtctaaggaacaattatggatttcatttatactgcaaagctttctcttaaatatggacaaccttcaagacacgctggaagctgccagtttcctacagattctgccagttttggacttctgtaaagtatttctcatatctgggggtcacttttagaacaactgtgtctgaagttggacggattgccaacacctacaaatctaaccgaagtggataaaataacttaacagtttcgtcttgaagaattttcctgcattgctgagcacagggggagttcttgaactccccttttgaacgccttgccttcggggtttcccgaaaaagccttaagcactgtactgaaacttgaacctctttaaggctacccggccggtgggctccccccgggaaaagccctccgaagggacctttgcttgccaaacttaatgaacaaaatcccgaattccactggatgaacccccagggagcccattaattacccggccaaacgggggaatttccttgagaaatgccaaaaaactgggggggaaattgcctttttggaaaaccccccaattaccaaagtgatgcccatttattgccggcccctttattgcagttagaaaagggttttccctt

SEQ ID NO: 368825 - DNA, 1087 bp, Homo Sapiens
  misc_feature (962)..(963): n is a, c, g, or t
  misc_feature (989)..(989): n is a, c, g, or t
ggtccgaattcccgggatacagattgttcccatgaatgtatgctcatactcgactagaaacgatctatgttaaatgactgtgtatatgaattatttcaagtactaccccaaataactttcttattgctctgaaagaagaaaagcaatgtaaatcactatgattattgcacaaacaaccagaattctccaacaattttaagtaatctgatcctcttcttggagaaaattgttacctaatagtttttccttatgaatgttattactactggtataaatcaaatttctataaatttcctacttaagtcttaagaactgggttcttcctttgatgttattcatgttcagaaaggaaacaacactttactcttttaggacaattcctagaatctatagtagtatcaggatatattttgctttaaaatatattttggttattttgaatacagacattggctccaaattctcatctttgcacaatagtatgacttttcactagaacttctcaacatttgggaactttgcaaatatgagcatcatatgtgttaaggctgtatcatttaatgctatgagatacattgttttctccctatgccaaacaggtgaacaaacgtagttgttttttactgatactaaatgttggctacctgtgattttatagtatgcacatgtcagaaaaaggcaagacaaatggcctcttgtactgaatacttcggcaaacttattgggtcttcattttctgacagacaggatttgactcaatatttgtagagcttgcgtagaatggattacatggtagtgatgcactggtaggaaatggtttttagttattgactcaggaattcatctcaggatgaatcttttatgtctttttattgtaaggcatatctgaatttactttataaagatggttttagaaagctttgtctaaaaatctggcctaggaatggtaacttcattttcanntgcccagggggtaaaaaataataggnggggtgtaatggttaaggttaacctattattagggtactatctatgaaagtaattaaataatttttctaaatctggggaaaaccatttataatttgca

SEQ ID NO: 368826 - DNA, 488 bp, Homo Sapiens
  misc_feature (167)..(167): n is a, c, g, or t
ccccacgatgcccctgaaaattctgggaagggtacaaggtccataactaatgcattcccagatcccaagttagggatttagcggggccatataaattacagtttaagcacagatcaaagagatggctgccagcatatccttcaagggtaacctgagttccaagactnttcccactgggctaaatggactccacttgttgcaaattataaatgcttgtcacagaatatgaaaaatatttaaatacattcatagatagtacctaataatatgttaacataaacataacaacacacatattatttttctaccccttggcaactgaaaatgaagttaccattcctaggccaaatttttagacaaagctttctaaaaccatctttataaagtaaattcagatatgcttacaataaaaagacataaaagattcatcctgagatgaattctgagtcaataactaaaaaccatttctaccagtgcatcactaccat

SEQ ID NO: 368827 - DNA, 966 bp, Homo Sapiens
  misc_feature (515)..(516): n is a, c, g, or t
  misc_feature (527)..(529): n is a, c, g, or t
  misc_feature (567)..(567): n is a, c, g, or t
gttgcttaagcagttcccctgcctgtttgaatttaatgagagcattcctggtaaaactgggtgcaacacacatactcctgcctctacggcaccttcctggccaacaacccctgtgagcgagagaagcgcaacatctacaagcggacctgctctgtgtgggcgctccttcgagctggcaataaaaactttcataacttcctctacacacccagctcagacatggtcctgcatcctgtttgtcatgtccgggccctgcacctctggacagctgtttatctgccagcatcatctccatgcacacttggggaagaaaacatggatctttacctttccccagtggcccagagccaggagttctctggccgctctctggacagattacctaaaaccagatccatggatgatcttctttctgcctgtgacacaagcagccccctgactcgtacatccagtgaccctaacctgaataaccactgtcaggaggtcagggtaggcctggagccctggcacagcannatcctggaggnnngatcagaaagacaagctttgtggactctggggtaggangggcctcagcaaactgtaggagaagtgggtcttcctcctcctctgcccagcagccagaaagactacttgagcaataaacctttcaagagtcacaaaaactgttctccaagttacaaactgcttaataccgcagtgcctcgggaaatgaagagcaacacctctgatcctgagatcaaagtcctagaagagactaaggggaccagctccagacccttctgcccaggatgagctgggtaggactttagatggcataggggagccacctgaacattgtcctgaaacagaaagctgtcagtgcactctccaaggtcatttctaaccacgtgtgatggagtttgtaattttcctgagtcttcccagaactctcctacaggtacgccccaacaggcccagccagac

SEQ ID NO: 368828 - DNA, 836 bp, Homo Sapiens
  misc_feature (156)..(190): n is a, c, g, or t
ggtccggaattcccgggatcttggtagaaggagagaaggggagtggaggaagcacgggactggagggaccaaagttccccgatggcggcccaggggtgcgcggcatcgcggctgctccagctgctgctgcagcttctgcttctactgttgctgctnnnnnnnnnnnnnnnnnnnnnnnnnnnnnnnnnnnagggcaccagcgcacacttgcgggacatcttcctgggccgctgcgccgagtaccgcgcactgctgagtcccgagcagcggaacaagaactgcacagccatctgggaagcctttaaagtggcgctggacaaggatccctgctccgtgctgccctcagactatgacctttttattaacttgtccaggcactctattcccagagataagtccctgttctgggaaaatagccacctccttgttaacagctgtgcagacaacacccgtcgttttatgcccctgagcgatgttctgtatggcagggttgcagatttcttgagctggtgtcgacagaaaaatgactctggactcgattaccaatcctgccctacatcagaagactgtgaaaataatcctgtggattccctttggaaaagggcatccatccagtattccaaggatagttctggggtgatccacgtcatgctgaatggttcagagcccaccagagcctatcccatcaaaggttttttttgcagattatgaaaattccaaacctcccgaaagaaaaaaattacccgaaatccagaatctggggttattgcatgaaaattggggggaacccaaggggggaatccttgcggggaaaaggcaccatggaaagtccctgg

SEQ ID NO: 368829 - DNA, 1223 bp, Homo Sapiens
aaatcagaggaggccgcggctcccccggccaggattggaggctcctcgcgcaacctaatgcgggtgtccgggcccgagcgcttcccgcgcagccaggccttgtcggtgcagcagccccgctcctccccaacacgcacacacccggtgttcgcaagtgcggctcaccaagggagatccaagggggcaaaaagttatgtataaatccgagagccactggggaaagagggtcgtggtattgtaagcccagccggtagtgcccattctttttggggttaaaggcaaacctctactctggagccccttcttgcagaggcctctgcataaaaggaaaggcggccaggtgagattctccaacgaccagaccatcgagctggagaagaaattcgagacgcagaaatatctctctccgcccgagaaggaagcgtctggccaagatgctgcagctcagcgagagacaggtcaaaacctggtttcagaatcgacgcgctaaatggaggagactaaaacaggagaaccctcaaagcaataaaaaagaagaactggaaagtttggacagttcctgtgatcagaggcaagatttgcccagtgaacagaataaaggtgcttctttggatagctctcaatgttcgccctcccctgcctcccaggaagaccttgaatcagagatttcagaggattctgatcaggaagtggacattgagggcgataaaagctattttaatgctggatgatgaccactggcattggcatgttcagaaaactggatttaggaataatgttttgctacagaaaatcttcatagaagaactggaaggctatataagaaagggaatcaattctctgggattctgggaaacctaaaaatattttggtgcactggctcaattaacaaacctacatggagaccttaattttgacttaacaaatagtttatgtactgctcttaggttgttttgataaagtgacattatagtgattaaattcttccccctttaaaaaaacagttagtggttttcactatttataaaaaattaattttgaactttttgttaaatttttaagttatagctttaaaggttttaataggaccttcttgaacgacttttctgtaatctgtttatctcccacttaatggaaaggcaaaggggtaccccaaatccagaggtgcctacatttcaggcagccttgggagtatttttaaaaggaaaaacattcttttacta

SEQ ID NO: 368830 - DNA, 1149 bp, Homo Sapiens
  misc_feature (707)..(730): n is a, c, g, or t
  misc_feature (779)..(791): n is a, c, g, or t
attccatggcaaaagaacctttccatgccaaatagtttaagggccatataatatgattataggaacccaggagtttctttctttaacattttgcttttcccctagggcaaagttaaatttaccccagccatatttgtgaattagggaccatagcatttttccacaaaggccagtggttggactttccatgttaaacaatgcctcaaaaaattgccaaaccattatattataaaatccccagtgctaattaaaacaatgaacatttgcctttcctgggtattttacaggtttacttaaaaaactgagcatgtgtatgtttatttgtaaagctcaaatatttaaacttgcagaagttgtgcctacaagcagttgaaagtataaagcaggttttaataaaatgtagtaaaaaatgaacacctaattgcagatacattgcattttctttgaagctaagtttccatagcagtgtagccctctctttcataaatcagctgcattgtcactaaagattgggtattcatccttttactgtctctacttgtaagtggacataacattagaatcctaatagacattctggataagttgtacaaggccattcttggggccaagcaacagtaaatatttgaaaggtaataaagcaaatacctagaaatttttgttttattgaataacaaatggaacaaaacttgttagtatgaatgtgnnnnnnnnnnnnnnnnnnnnnnnnttctttctgcttattcttccaagcaagacttttgagtgaagatactgcnnnnnnnnnnnnngcagtgagatatatttttaataactatttacttaacaataatctatttactaagaaaaatctctcaattcctttccttcactgaatttagtctatctactctgtttcttacgcaactcacattgcatctgtggattttgttcttttgaaaaaatatatctgtacagccttctttgagttaccaaatgcctgaaggtagtaccacaccccctgggcccccatattcttcccattgcataagcatgaggtgtatacaggcaatgcaaggaatagggtgactccagtccaaggataaggaaaataggatgggattttcttgggttgtgagttttcagatgtgcacagtgggtaggcgacac

SEQ ID NO: 368831 - DNA, 448 bp, Homo Sapiens
cagattccatgaaaaacacctccacccaaaaaaacttgggattcgagctcattacttttaatgaatacaagttagagtccaagataaatgacttggcccacagtgaaaacacaagcaggctccataaagagcaatgtgagagccacagcttaacagtagacagttgcaaaaatgtaggtggaagaacatgcccttcaattggcaaaacagaagcaaaagaaaaaaagtgccagtaaatccttgagaaattaaaaaaactgtggtgaagaggattccagcccccttggtaccactgacagcttattcatcagcctgtggtgtgggggactggaacacacaccttagcacactgagctcctcaggccacctccaactacgacagcacccaggtggtccgctggtccgctggtccgccccgatgcagatggacgtcttgtaccggctcgag

SEQ ID NO: 368832 - DNA, 1351 bp, Homo Sapiens
  misc_feature (103)..(161): n is a, c, g, or t
  misc_feature (225)..(247): n is a, c, g, or t
cacgaggggtttgtatgttgttctaaccccggtggggaggtttgggacgaggagggggtacaatgatttaatgatagaatgaacggggggggcgcggtattannnnnnnnnnnnnnnnnnnnnnnnnnnnnnnnnnnnnnnnnnnnnnnnnnnnnnnnnnnatactctagcaagctgggacttctgatcaggggcgaggggcacaagaggataaatatagtagannnnnnnnnnnnnnnnnnnnnnncaatataaacgtctcaacggcgcggggtacggtgcgggcgtcgctgcatcgcgtgggggcgatgggaggggtatatctgcactgcgaaggcgcggctgttgtttatcgatacggataatgcgcacatgaggggggggtagggagaatacacttgtccgcgaaaagagaccgtctttggggggggatcaaggaagcgggttaaaaacgaataaggtaccgtcgtcgggggtgcggatatgccccgtagtcgccgggtgtctaaaaagggttaattgcggcgggggggtagggatccgggcgggaacaagcgcgggatccgccaatggggcgcctcccagcagggtttcgtaagcccggaggcttcgaaccgtgtgccctgggttggggggagttcaaccccgggaaggggggtcgttttttaaccctcccccccgggtgggagggccaccgagcttaccagtttgggtttccagggagaagagtgaaagggccactgtggcctccccatcccctttctccgcatgtcccatggttgctgtgcgcagagaccaggggccttggagggatgagctggagcctgggtggattccatcccattctgatctgcaagatgtgatgcctcaggccctcccactcctctggccactggttatgctttggggctccctcctgcccttgaatgtctgtcaaaggagctgagaaacttctggggatgaaactcagtccccctttgtctctccccttccttctaagtctgcccccgggcaaaggcctactctgcgaacagcaccaatctgcctcagtgcagggcttgtaaacaactcaagtccttccgtgggtgggggccatgggtgccatctgtcctcagggatttggtgagtccagatctcactcctgtctttccacacaggctgctcgactggccccgccaaacagagtcctcggcagttccagggaagtggggctggggtcctcattgaagctcggtggttgggaaggaacaggtgtctcctttgcctttcttcaagctactgatttggagaagctagggcccaactccctctattcgaaaaattccggaccgtgccggcggggtgttgcggc

SEQ ID NO: 368833 - DNA, 479 bp, Homo Sapiens
  misc_feature (354)..(354): n is a, c, g, or t
  misc_feature (379)..(379): n is a, c, g, or t
  misc_feature (421)..(421): n is a, c, g, or t
  misc_feature (458)..(458): n is a, c, g, or t
aaagggatgggagccacagtgcccttcactctctcctggaaaccaactgtaagctggtgggctcaacctgtgggaggttaagaggagtcccttctgggttgactccaagagccaaggagatggcagaccctgggctaggaaccatatggaggtgactttgaggccacagctgtccctaggtgatcacagaacttagctcctttaacaacaggacaatggttttttaccctagatgttcccaccttcagtgctccacgccctccatagaccttcagagaaggtgaaaccaggttatctggggaatctttccagcccgcagttcgccacggccatccctttgctcccagcctggcntccatcagcctccagctttcctttntttcattctgttcctttcaggggaagggcagaagaaacattnggaaagcatcttagttccaattggggaaggccagggntttggagaaggttgttaacat

SEQ ID NO: 368834 - DNA, 1204 bp, Homo Sapiens
  misc_feature (1124)..(1124): n is a, c, g, or t
  misc_feature (1185)..(1185): n is a, c, g, or t
gatccggggggcggggcttaggggcattatgcggcgcttaattgacgggggggcgattaggagagtggacggcggcttggagagtggtggggtgccctccgtccccccacaggggcaaagaatcccagaggaagaatttttctaaaaagtcccaagtttctcaaggaccaaaaacccccttggacggccaagaacctccccccagttttcccttggtgatcccacaacccaaggttcatgatggtgaacaagggtctggtaagagttacagactcacctgtctgtgaggctgatccatgtgccccttcatgcttcttattatgacaaacaccacgtttagaaagcacagcaaaaaaagagtaaaggaagggactaattcccctgtaacagagcaaatgggaagcaggaatgaggccctggcaccaaactgagaagtccaggaatgtgccagcgaggggctcagaacaggcctcagtcaccagccaggtgccctgtgggctgcagcattaaggccagggtgcctgggcagaggtggggtctggacgacaggcagtgcagacagtgtcctggaggagccttcacggtaaccggggacatcagcgaggatggcagaggctgctcactcgaagctgtagccaagaaggctacactgtccctgcgcgtggcagagccttgaaggtggggtggggaggggaagcttcccattagaagatgggaaggctctggttgggtatgccctgggtggaggctgttgtcagggggaagctgggggtgggccacctggcagcgggcatcctatggggttggtttggggagaatatctgactttcttagttggaagcagagctagaaaatagggaagctgcagtcgcttcccagacctgagtcccgccagaggccgcacatgatgtgctttggcctcaaaggttggaggtccaagttttgccatcatagacggtctgcccattgttcatttgtatattcaccctctcagtggtgatccacagctattgctaaaagcaatttcacagacagacaggcctcctgcaccagatggggcacagagaagaccttgagtggcgtgtgcagggggcttaggatatgtcaaacaaaaagctgtgtgnagtctcatctgcctccccttgcttcctgtccgagcccacaagcccagggtcccctcctcangccacaagtgtgtcctgct

SEQ ID NO: 368835 - DNA, 1171 bp, Homo Sapiens
  misc_feature (985)..(1045): n is a, c, g, or t
  misc_feature (1099)..(1113): n is a, c, g, or t
ggcctgggtggcgattcggacgagggaacacgccgcttcccagtctctgtgcgaggcgtgaagcgcggacctttcaacaagggctttattaattctcacgctgcggccctggaaagcgatggaggtggcggctaattgctccctacgggtgaagagacctctgttggatccccgcttcgagggttacaagctctctcttgagccgctgccttgttaccagctggagcttgacgcagctgtggcagaggtaaaacttcgagatgatcaatatacactggaacacatgcatgcttttggaatgtataattacctgcactgtgattcatggtatcaagacagtgtctactatattgatacccttggaagaattatgaatttaacagtaatgctggacactgccttaggaaaaccacgagaggtgtttcgacttcctacagatttgacagcatgtgacaaccgtctttgtgcatctatccatttctcatcttctacctgggttaccttgtcagatggaactggaagattgtatgtcattggaacaggtgaacgtggaaatagcgcttctgaaaaatgggagattatgtttaatgaagaacttggggatccttttattataattcacagtatctcactgctaaatgctgaagaacattctatagctaccctacttcttcgaatagagaaagaggaattggatatgaaaggaagtggtttctatgtttctctggagtgggtcactatcagtaagaaaaatccagataataaaaaatatgaaattattaagcgtgatattctccgtggaaagtcagtgccacattatgctgctattgagcctgatggaaatggcctaatgattgtatcctaaaaggctttcacatttgttcaggctgggcccgaatcttgagaacacatggctggacacccctctccacaacaaactaagaaccctctgctcttcgcgcgcaaagaactgacaccccatatnnnnnnnnnnnnnnnnnnnnnnnnnnnnnnnnnnnnnnnnnnnnnnnnnnnnnnnnnnnnnctaagtgtccttgcgttcactattacccccctattgccccgcctaccaattatnnnnnnnnnnnnnnnataacacgcgacacacttgtccctatatctccacccccatttcccccacaccattaat

SEQ ID NO: 368836 - DNA, 1103 bp, Homo Sapiens
  misc_feature (872)..(880): n is a, c, g, or t
  misc_feature (1030)..(1042): n is a, c, g, or t
cggtccggaattcccgggatgccggaggaaggagcctcagtcccgcagcatccgaggttatgcagaggtacaggtggcttgttacctccactaccacctggcctgctgctcacttgctgggagggaggatgaagcggagtgctgggcaggggctgccaatgttggatgctcacttgctcccaaacaggtttggggtccacagtctcaatgcagaggagagtgggggatgaggaccttctctcatttaacccccacactagccctctgaggccagggtaactgtgccccttttataggtgaggatcagagaggctaagggacttgcactaataacagctagcagggggcagagccgggacagaagcagtgctccatcccaggcgaggctctgcacagaaccatcgagcctgtggtgcttgttcagagagagatgtcctgtggatgaggccagtgccccggattggctgattggaagtatcacgacaacataggcagcagcccatgacggtcattgagcttatctctgggccaggccaagtggttcacacctgtcacctcatttgatccccacagcagcccagtgaagagtcctgttatcttttcggtttgacagatgaggagatggaggccagaagaggatgggccaccggccaaggtcattgtcctgtggagctgggatttaaatcccaaccctgggcccacagagccctgaccttgaaggctccactttcttggggattcaggcactgcccctgccacaccatcctcccccttgatcagacccagggcccccaacacccggagaaaaaactgctggagctaaagcctcttgaggcagggattgcacttgacccggccgtggatggtgaagnnnnnnnnnggggggccctttaagagccactgccccttatcccggaagacccggcggaacaatccgcctccccggggggcccgaattgcttaatacccgcgccgattgccacacggtattctttttcccctccatataaaaacgattggtgtaaaacannnnnnnnnnnnngagagcccgcccgctcttattctaaaaagacacacccggaaaatactcgccccccagaaac

SEQ ID NO: 368837 - DNA, 1189 bp, Homo Sapiens
  misc_feature (349)..(358): n is a, c, g, or t
  misc_feature (512)..(514): n is a, c, g, or t
  misc_feature (519)..(571): n is a, c, g, or t
  misc_feature (579)..(579): n is a, c, g, or t
  misc_feature (601)..(665): n is a, c, g, or t
  misc_feature (709)..(733): n is a, c, g, or t
  misc_feature (907)..(919): n is a, c, g, or t
ggaattcccgggatcttgggttaaaacactttcagccacccagattaattaaagtggagcagtggagcccctggctgggagatggcctccagaggagcagctgcagggcacgttctgggcttagcgacagaggcaagcaagggactggtgtctctggtgagaggtgggtttgatgtatctctgtcctatgctggtctctcttctcctttataaaatcctctgtggtcaactgactactgcgtatcgcagtggaataagactgcacagttgctggtaggtgagtttaaagtcttaatctatgcattcagagaaatatttctatatgctttgtgtaatttataacaaggannnnnnnnnnagctttgttaactgtgaattcacccctcctcctccactgcatatttaaagcatgtgttcacactgtgtgtaaacattcactgaagattttttctttgtgcattgctgactgttcaaacataacaagtattattaaaattaaatattaactgacnnngaacnnnnnnnnnnnnnnnnnnnnnnnnnnnnnnnnnnnnnnnnnnnnnnnnnnnnncacccagngagcaacaaacccacaggcgannnnnnnnnnnnnnnnnnnnnnnnnnnnnnnnnnnnnnnnnnnnnnnnnnnnnnnnnnnnnnnnngagggcggcgggccggaccgccccaaccccacaccgcagagcgnnnnnnnnnnnnnnnnnnnnnnnnnaaattattgtcgaaaccgaagccccccttttacggggccttttctctttcggaaaagcttttctcgcccccgccttcttcctacatgcggggggcgggccaaatgccctctcgtatatctttaattatggcaaacccaccaatcttccttgggccgggcggcgaaaattcgcannnnnnnnnnnnngcaacattattaaccgcgctattgcgatacccgataaacacattctcccgaagagtaaaatgatgtttgcaccaacacacgcccattgcgcccgcggtgacccgcaagaaaatatgttatccgtgcaacgtagaaacccgccgcacaaaagcaaatcccgcggccatagccgagcgcaccacacaaatttgttcctcgcgtaataaataccacgcaataagccgcgggacgccagatatataacgttacccgcggaacacgcacaaaaag

SEQ ID NO: 368838 - DNA, 1088 bp, Homo Sapiens
gaattcccgggattggaccattgccttagtcctctgtgggttggtcttcagccagcattctggtgggagtgactggcattaacaagactggaaatcgggggtcaaagtaaaatatctttgttttgctttcattcacaaagtaatgaagccagctgccaattacatcctcccaacagcactttggtctgtggactgctgtgtgaatattcagaagggaagtaagtattcagggggtaaacaggtctcccagcattctgagtgttccaaaccagtaatccacatgccaattcaaatagaacagccccttgctagatattaccacagataatgacagttacatggtagaactgcccatgccacaaatatttatttggaaaagtagtcattaaatgaacccactgccttaaatgtcttgaatgttgcagtcaagtgtctgtcatgtgttgatatccacacagaattaggccctaatgagagccttagaccctcaaccatgcccccttcgttggcatcacagggccttatttggaagagcgggcaaagaggatggaaatcataaaatatttcatggggaatcgaacctaggggatagtgctccacttctgacgatggagtgaagacacttggcagacttgagccagacacttcacctagtagttcctgaaactgtgagcaccactgcactaagccagtgcggagctgttagggacgggcccagctcctgcaccacggacacaaatggtctggagagggccagcaggccctctgagggttctgggatctgtgcaccttatttgaccacactccaaaattctggtttttatttaaccctttgaatctgctttatgtacataatccaaaatatcaatatctaaatcctgaacctaaatcaataaaatttttaaatcctctacctggaaatgaaagcaatagaatttctaccataagggccaaaaaatgaagacccaatggtttgggggtttaaggttttttaagggaaaataaccggccaattggtttttcatattatacccggggtataaaatttggggggcctttgtagcacctatatagaaacccggtttatg

SEQ ID NO: 368839 - DNA, 1436 bp, Homo Sapiens
  misc_feature (124)..(206): n is a, c, g, or t
  misc_feature (1126)..(1209): n is a, c, g, or t
  misc_feature (1267)..(1267): n is a, c, g, or t
  misc_feature (1354)..(1354): n is a, c, g, or t
  misc_feature (1397)..(1397): n is a, c, g, or t
ggaccggtccggaattcccgggatgcaagaaacggtgccaccaatacacatagtactgtttcatttaatgctctaggcccatattttccaaagttacctgattttatgaatcatctagagtgcnnnnnnnnnnnnnnnnnnnnnnnnnnnnnnnnnnnnnnnnnnnnnnnnnnnnnnnnnnnnnnnnnnnnnnnnnnnnnnnnnnntaaggaccctaaacaattcttataatttgtgagacactgttttctctgtagttgtttaaagggatagggaggggaaatggtaggggattagggttgcaatcacctaggggagctttcttgcatcctccatacctacatacacatcaacaccccaagtgttagcattttttccaacttgattatgcagctttaagagtttatattatttaacctatatttcaaatgtagacttttgtgaatgtaaataattttaagtctatttaaaccatttattgattcagtatttaaatactcatttacatctaatagcacaaattatgcaaatggtactaatttagaaaaattggtttttcctcaaacaattttattcaaatacttcacatgcatcgtttacaactgggtctctatcatcactgaaacaacattgtgagtcctctaacagttccctcctagttatctaaggtagagcatgccttacattgagtagaatgctgtcagtggagattttactacatctcgagaaccacttgttaaacatcagggtttttttcctacatattcataatcaccataaataagtacttcttgtatttctctgttcaataattatttaaaagcctacttaatgatctccaatacttgttatccaaagtcataccctcaggaataattaatcaatatgtctttgccttttttcccctgattttgctaggtgacctttataagacagaaaattgccattacttgtgaccctttcacgacatattgtcttcctgaagagtattttgttcaaaaaggacaaagacaaaaacacaaggtgactctcttttctgaggaatgatatttttggaaaaattttgctttccattctgcatatatggtatatattactatttaatagcatctgtacccaccccctnnnnnnnnnnnnnnnnnnnnnnnnnnnnnnnnnnnnnnnnnnnnnnnnnnnnnnnnnnnnnnnnnnnnnnnnnnnnnnnnnnnnacctcccaaagttttagggttgcaggtatgagccatcgcgcccagccaggcatctgtnacctaggacccaacttgaatttccccaaaggagttaaactgggttcagtattttctcacaaggtgctaggagggaattgtgggctanccataccttctgggtgggtagtgctgaaaaagtacaggctacnttttgaggagttgacgatgtgggtatcattcaaggttgc

SEQ ID NO: 368840 - DNA, 1178 bp, Homo Sapiens
  misc_feature (851)..(851): n is a, c, g, or t
ggattcatgcatcacactggttatgtgagatgtatccagcacagttgggaatcgctgatctaagtaattatgaaagtaagctgttacccacccagaaggggtaaggtcgtgcataggatgacctggggtgggtctcatgtgctgccgtccctgtgaggtgaggggagtacatttcaagagcaaaattagcaaactcttgaatcttcataactgctgttgtggtagatattctgaataccaaaaattaaaagtgaatttaaactgtcagtggaaacacagcagtctgcattttaaaaacttagagctgtccaggcacatagaaaagttaactgtctgaggggaaatagaatgtggttaagtttaaagaatatgcttagtattataaatgttgagtgatgagttgtttaccatttataataaactgttaaatgtatttctgggaacattccatggcagcatattctgggttgttgtttatgtgttccaatgtagacaaattatatttgccttgggaaaaattctaagtaatcaaaattatatttaaatattaaaaaatcacattgaagttcaatttgtgttagctgtattaaatatcttggtcactattgttcttgtaacatttgcttttgacaacacattttgagatctaagaaaggtagtacattaacagtgcattaattaatgttttgttagaaactaaatgttaacaaaaagttttgtgtggaatgtgaaagtgggcaactccccttttgcattataattaacccttttttaaatgtgattccgtccatggaacccaatgatttattatagcccccaccccttttcatttaaaggaaaccttctggacncttaaatacttctgttctcgcctgggcgccaaagggttcccacccaaaaaacatccttctgcggaaaagcggcactccactgttttctccccaaccaaaaccctcgaaaactctctttcccaaacacctcccataacccccgttccaacacaaacaatattaactctccatccctaaataaacacgccctattaattagcgccccccaacaccccgaaatatatatcctaatccacacccaatattccgcgctcctcttcctctccacaccccctatacattcgactccccgctcaatcgcgaccaccccccccatccacgataggg

SEQ ID NO: 368841 - DNA, 925 bp, Homo Sapiens
gagaggccgggcaggccgggcagggaggtgcgggtcggttctgcgtgcgctgccggacgaggctcccgccgccgattgacccgcgctccgcccgtagtcgggccgttctgttccaagagataaccattgggaccttggtagctaatgtccgaagaaagtgactctctgagaaccagcccttctgtggcctcactctctgaaaatgagctgccaccaccacctgagcctccgggctatgtgtgctcactgacagaagacctggtcaccaaagcccgggaagagctgcaggaaaagccggaatggagacttcgagatgtgcaggcccttcgtgacatggtgcggaaggagtaccccaacctgagcacatccctcgacgatgccttcctgctgcgcttcctccgagcccgcaagtttgattacgaccgggccctgcagctcctcgtcaactaccacagctgtagaagaagctggcccgaagtcttcaataacttgaagccatcagccttaaaagatgtccttgcttccgggttcctcaccgtgctgccccacactgaccccaggggctgccatgtcgtctgcatccgcccagacagatggataccaagcaactatccaattactgaaaacatccgagccatatacttgaccttagaaaaactcattcagtctgaagaaacccaggatggtttccccattcggataaaagcagtccatgtggtgaatgaacctcgaatatttaaaggcattttgccatcataaaaccatttctaaaggagaaaatagcaaacagattcttcctccatgggtctgacttgaactctctccacacaaaccttccaagaagcatcctccccaaggagtatgggggcacggctggggagctggacactgcagctggaacgcggtactgctgggttcagaagac

SEQ ID NO: 368842 - DNA, 1225 bp, Homo Sapiens
  misc_feature (399)..(694): n is a, c, g, or t
  misc_feature (741)..(766): n is a, c, g, or t
  misc_feature (951)..(959): n is a, c, g, or t
gggagtgaagggccatactatgtgaaacctgtttccacgacagcagtagaaggagccgaatgatttcttctagagctcatgtagaggaccacgttttgaccaaaacttctcctaaggcatttgactccatctatatttcacaaaagagacttcctttccccaagaattatcatggaatgtcagatgttactttgttaccaacactgttatatttctacattgaaatgcaaagtggaactaggagtttggaatgcattaagagcagacaagcttggtcataatagatccagtgtttttcagattcctttcactgccttaatctttgcaacagggtggaagtttttttcttccctcaaaattttcatggacatgcaatcttatctaaaagcctgcttcagnnnnnnnnnnnnnnnnnnnnnnnnnnnnnnnnnnnnnnnnnnnnnnnnnnnnnnnnnnnnnnnnnnnnnnnnnnnnnnnnnnnnnnnnnnnnnnnnnnnnnnnnnnnnnnnnnnnnnnnnnnnnnnnnnnnnnnnnnnnnnnnnnnnnnnnnnnnnnnnnnnnnnnnnnnnnnnnnnnnnnnnnnnnnnnnnnnnnnnnnnnnnnnnnnnnnnnnnnnnnnnnnnnnnnnnnnnnnnnnnnnnnnnnnnnnnnnnnnnnnnnnnnnnnnnnnnnnnnnnnnnnnnnnnnnnnnnnnaaaataaaaacctgccaccaaattatttctggattctcttcactatnnnnnnnnnnnnnnnnnnnnnnnnnnccatttctgattccactttcaaagtcttggatatattctttgaaaaatgagtagtatggaatattaagattatgttccttatactcagaatactttttatgagctctcttggtttttttgttactattattccttttgaaaaaaagacaaaatatcctaaaaaatgttatagtggttcatgtaannnnnnnnngctgtttaccaatgaactttgcccctgttgtgggttttggggggatccaaaaggattccctaaactggcattttcatttattgggaggccatgaattgctggagggttttgcctttgaatttttcctaccttataagtccatcttggaattgtttcgaaaaaaggggaacttaaccccaaaaaaaccgaacttcgaacccgaaggggacatatgcccttaaatcggggaaccctcccccctttaattttccaaagggttaaacctt

SEQ ID NO: 368843 - DNA, 984 bp, Homo Sapiens
  misc_feature (43)..(43): n is a, c, g, or t
  misc_feature (51)..(51): n is a, c, g, or t
  misc_feature (539)..(562): n is a, c, g, or t
ttgggtcctccaaaaatccccctgtatccaaatcctccacttncagtttanttgccattgtggaaaagggaagtgtgttccgggaagaaccaaagattgaagaggtaaaattggggagaaaagtaaggacttttcccttatgtcccattcaagcacaggtatccctgtcaagcaacacagggctaggaatggtggttgtagggctggccaaactgatgagaggtgattgaaattaccactgctcaggacacagtgtagtcagtcacacagcagggcatcctgccactgggaacttgcaccctataaaatcggagaaatcaaaaaccctgtaactgcctgcctttaggctgtatattcaaaatgtatttcctgttttacctagtcattaatgtatacagatattccctacttaaatgaacagtgagttaacagattttaggattagtattttaccacaaaaatgccattcattgcataactccaactcagggagaacaaataaaactagagaaactcatttctagcccaaaaacaatttnnnnnnnnnnnnnnnnnnnnnnnnttctaacaaacgtcactgataaagcgttcttgagcaaaaacaagataggataaaacttaagaatcccataaggattatacatgctaagattggcttttaaactttgaaaaccttttttaaactgcttaaaaagcagtcccatagacccaggttccataaaattgcaacaatcatattcaaagttattagcaacatgtaaaatacttaaataccattagttatgcaattccatttaaagacattaaaacacttttcacttcaaaaacaatctgaaaattcctatttaggatgtccattatgtttaagcctatgtctatctttctgaggacaatgtcacattctggaaagctaccccttaacaaaggtgatcccgaaatccggaccggtaccagctgtttttgcaattaaattgttggaggtgt

SEQ ID NO: 368844 - DNA, 947 bp, Homo Sapiens
  misc_feature (183)..(249): n is a, c, g, or t
ggtccggaattttccggattgcgattaatggtgccagcaatcaaggaagattctctagttttcatcagggacatagctgtaaagctcatgagtggaggatgctatttccttttccagacctgtgtgcttatgtgcttatataggctgcctctggagactttatattgtgtgtgatgtgtgtgnnnnnnnnnnnnnnnnnnnnnnnnnnnnnnnnnnnnnnnnnnnnnnnnnnnnnnnnnnnnnnnnnnngaaatggccgccactcacttaggctcatgcagcacagactccagttagggtttgcactggcttccttgctgcttgtgcatgaatcttcagctgccctcccatgtcctgtctctaataattgctgaaaactcaaagaggtagataaataagcctccttgggatcaatagcagaaggaactccaaggctgatggtaaagcttcgtaaggatgaggccgaaagggaactggggtctccatggtgataagaggctggggaccaatgagagctgaaggcggagcaggacttgcggggaagactcatgggagttgggagtcatttaactatttgtttgcttcttgaaaatttagacaccagctgtaactacattgcacaggatgtattgatattatcattcttgctgacatattctggaagctttcagccccaccaacactgcccccaccccaggacttctgcagctgagagttcctgtgtcagtagggtctgatatttgtacataggttatacatatatgtgtacatatgtgcctcaatgaacattgcctgtccacctgatcatgggtgtacatagacttcatagagctccacagtcttttgtaaatattgacacaagtaaataagtatataaatatatattactggggatttattttaacatcattctgtgtgatatgaaaaaaataaaatttttgacagac

SEQ ID NO: 368845 - DNA, 1147 bp, Homo Sapiens
  misc_feature (714)..(722): n is a, c, g, or t
ttgcaagggcctcattttttcttactgcccccatccggttcggggaggtggcgggaccttggcggcgcccggagccggcgtggcgctcatcgagggacgcccggcccaagtggtgaaggtgataaagtaaagtgctttcactgtggaggagggctaactgattggaagcccagtgaagacccttgggaacaacatgctaaatggtatccagggtgcaaatatctgttacaacagaagggacaagaatatataaacaatattcatttaactcattcacttgaggagtgtctggtaagaactactgagaaaacaccatcactaactagaagaattgatgataccatcttccaaaatcctatggtacaagaagctatacgaatggggttcagcttcaaggacattaagaaaataatggaggaaaaaattcagatatctggcagcaactataaatcacttgagggtctggcctgcagatctagcgaatgctcacaaagacagtctccccgatgactccagctccgacttccttaccaaaagagattactactgaacaacccctaaggtgctctgcctccacgacaatccttttgccaacctccgtatggcatataaagtatcgctcacccttttctgttcccttgcgcgaccttctaggctactctctcacccaacgtcctcccaaccttgttcacaagctgtccccacgttgctcannnnnnnnnttaccttctctagctctagaaatcttcctacgccctcattccattccttctactgctacgcactgttaatgccgtttcctcactttaccgtgctatcccatgtcctgcccgcgtgacaccgcaacttttacgtaaatcgccgcatcttcacttcccattcaaccatccttttttccaccttattgccccaatcaccggtccaaatggcacacccgtttttcacctagtcccacttcacagcgctcccaaaatttacccgggctttcctcctcggacgcttaaccctgtcccttattttcctcattcctcttccgctgatctacacctcaacttataaatccctttcttctcaccctacctcccttattcccattctctatttataccctcctaacatacatcacgctccgaacattcacccccac

SEQ ID NO: 368846 - DNA, 1292 bp, Homo Sapiens
  misc_feature (60)..(60): n is a, c, g, or t
  misc_feature (691)..(699): n is a, c, g, or t
  misc_feature (1202)..(1202): n is a, c, g, or t
  misc_feature (1239)..(1239): n is a, c, g, or t
  misc_feature (1248)..(1248): n is a, c, g, or t
  misc_feature (1272)..(1272): n is a, c, g, or t
agggatgtcactggagggaagacgaaaaagggtcggagggtagcgacgattatggtacancacacccgcgccaaaggtggaccgcttgtattacaaaaagggaggagggttgaaagagatgggtcacgggaggagacagtcataagggagaaagaggaggtggggcgaattgagagagatgtgaggagcgctccaaaaaagaggaggaggccaatagggagacaggaattcggggattaaggatggctgaagaaaccgcgctaggttttgagaggcatgggcgagtttgcccgcgtagtaaaataaagtgtgacgggtgggaacggtaacgggcgcatgcgtaaaaggggagaagagcgtttacgtatgtgcgagacagcggaaggtagtacgggtggtgaattgatataccatccgaacgatacccccggggaggaaagtagatagaaaagacgcccaaaaaagcggggtggagaatttgttgtatgaaggaggtatggaaggccatgaaggagaccgcacccggccgacggaggagagagtgttcctccagaagaaagccgcccaaagcggaagcagtttttgggtgcggcgcacacgttgtatggagaagggcgcggccggaagctggaaggggtggaggaaggagcaccagcgaggggggactgccggatggacgaaaaaaaaagannnnnnnnnagagaccggagcccgccccgagatgggaggttataaggcgacacgccccgtgcgaataagaggtgggaatagaggtcgcgagtctgtgtgttgtgtttttaatgggtatgacggaggggcgggtattggtggtttaggttgtggggttgaggggttgtaaaatgtactgtttatttctttgttacacaaaggtggtccaagacatcttagtccatctcctatgtccttttggccataagtacacacacaataatggcaagctagattaggagtctagctcagggtcaagtttttccactttaatgactatctctggagctaaagcggcagcaccagcttgttggttctctgcctctgactccgacaacacttcttcctttatttttacaggcttattactggcctcctcctcttcatatgaagactcatcgagctcccattcatcatctatgtccatgtcaaatactctcacatgacgaagatttgagcttaacacacaggancactttttcggaaaaccattcccagcaacatactggnggctttcanacttttccaggaaactccagtggntttctcggaatgcatgggac

SEQ ID NO: 368847 - DNA, 736 bp, Homo Sapiens
  misc_feature (46)..(46): n is a, c, g, or t
  misc_feature (50)..(51): n is a, c, g, or t
  misc_feature (55)..(55): n is a, c, g, or t
tgatatttctcaatctgtgagtaatggactaattgctattaaattngttnngctntacatatgccacaacagaaaaagtcagaagaagcatctacagttgtttagatgcacagttttatgatgatgaaactgtaacagtagttcttaaagacactgtaggacgtgaaggaagagatagactcttggtccagctgcctttgtctttagtatataacagtgaagattctgcagaatatcagttcactgggacttattctacaaggctagatgaacagtgtagtgctattcccacccgtaccatgcattttgagaagcactggagattactggaaagtatgaaagcacagtatgttgctgggaatggttttcgaaaagtgtcctgtgtgttaagctcaaatcttcgtcatgtgagagtatttgaaatggacatagatgatgaatgggagctcgatgagtcttcagatgaagaggaggaggccagtaataagcctgtaaaaataaaggaagaagtgttgtcggagtcagaggcagagaaccaacaagctggtgctgccgctttagctccagagatagtcattaaagtggaaaaacttgaccctgagctagactcctaatctagcttgccattattgtgtgtgtaattatggccaaaaggacataggagatggactaagatgtcttggaccacctttgtgtaacaaagaaataaacagtaaattttattttttcaaaaaaa

SEQ ID NO: 368848 - DNA, 980 bp, Homo Sapiens
  misc_feature (887)..(887): n is a, c, g, or t
  misc_feature (893)..(893): n is a, c, g, or t
  misc_feature (903)..(918): n is a, c, g, or t
  misc_feature (952)..(952): n is a, c, g, or t
gagcgaggcctgggtggcgaattcggcacgagggctcggctcactgagacccggtggtccagacgctgctcctggctggggtggcgctgcagggagaaccgcgagctctcaggggtcggcgggtgacttctttccggaagaaagcgaggaacgcgctctgcggggtgagccggactccccaactccggacgatcagcccaggactgagagccccgaagtccccaaccacaagtaagcggccccagaaggacaagtctaggtcgccgtccagagcgccatggccgcgcccgcccttcgtttgtgccacatcgccttccacgtgcccgccgggcagcccctagcccggaacctgcagcgcctcttcggcttccagcccctggcttcgcgggaggtggacggctggcggcagctagccctgcgcagcggcgacgcggtctttttggtgaacgagggcgcagggtctggagagccgctgtacggcctggatccgcgtcacgccgtgcccagcgccacaaacctgtgcttcgacgtggcggacgccggcgctgcaacccgggagctggcagcgctgggctgcagcgtgcctgtccctcccgttcgcgtgcgggacgcgcagggtgccgccacttacgccgtggtcagctcgcctgccggcatcctcagcctgaccttgctggagcgcgctggctaccgcggacccttcctacccggcttcaggcccgtgtcctctgcgcctggccccgggtgggtcagccgcgtggaccacctgaccttgggctgcacccccggcagctcccccacacttttgcgctgggtccacgactgcctgggcttttggccacttgccgctgagccccaagtgagggatcccgagctgggctcgaagnaaaaanaaagggtttnnnnnnnnnnnnnnnnactggaggctttacaagccttggcaaggcccagnccggggcagccattgttcccccactctt

SEQ ID NO: 368849 - DNA, 1150 bp, Homo Sapiens
  misc_feature (53)..(53): n is a, c, g, or t
  misc_feature (150)..(150): n is a, c, g, or t
  misc_feature (167)..(167): n is a, c, g, or t
  misc_feature (841)..(849): n is a, c, g, or t
tcccataacccatatgggggtccctaaaagccggggggattttttcaactggntgggaagcttgccaaaattcaaaaagagtccccagaacccggaggacgtgggaacccaccaaaccggttttccaacaactgaaaaaaagaagtggcntttttccctcaaccaanccaagttttcctaaagggttcctgggattcccaaaggaggggcccccccttcttttgaagaaaaggtggtggtttcaattcaccccacggcaagaaccagggagtccccaggtcccctaggggtggtacaagatagaaaggttcacaaagtgggggtttcctagaaataaatcaggtgattgccaaagattacatttgaatcttttaaaggataagagctcttcattatcaaaagatttaaaaatacctgcatttaaatttaccccagcgttctgaggttttccattcctattgcctaagaaaaccaaaaaaggatcctcaataaaacaagcaaccaaagcatttgatagaaaaatgtacagtgataagcagaggaaaaacaaacagccgctgcctgagccaaacatacctgtctcataaagaaaaagaacagaaaccgaagagcaattgctatgccatttcaccatgtcccctgtctaagcataaaatcatcctgctttaaatattaggccctctgaatgagttaaaaatctaacccttctcaagatgatcctcaaataaatcagaaatatctcaattttattctgatatactatttccagaattctggtctattttttaacctctaaactaaaatgtgagaatggtaagagagcttgttttaaaatgaggcnnnnnnnnncaagttttcattaaattaaattggtaaaatcttttctatacattttaagtttatgtatatataaactcaaaaatgacagtggaagacatttgaatgctcctaaatgatggtggcagacacccaaacaatttgggtggaactagaagtggcaagaacttagaggccctttcctttcaagcttcccaactccagagaagagtcgaccactgaccacctggctaatcagctgggtgaacttcatcagcagacaccgtaaggaaagagcagctaaccaaacactgaagttaaaatcccgggaatt

SEQ ID NO: 368850 - DNA, 626 bp, Homo Sapiens
  misc_feature (37)..(37): n is a, c, g, or t
  misc_feature (54)..(54): n is a, c, g, or t
  misc_feature (63)..(63): n is a, c, g, or t
  misc_feature (72)..(72): n is a, c, g, or t
cactaaggaagagtctaaactaatggcctactgtgtntgtgtcagtagcccccnggttttaantccatatantacttgaaatgaaattagaaaacactgtactccctccacatatattaaaaatagtacaagcaaactgtatccaaggctttgtactaaccgtctggggacaggactctctctttttagtgaacaagtcactgctagagccttagtgttttgccctcatttttagacctgaaccaagtcgacatctcattaagttcatatattcctttcttctgtcaaacctcttgaaacaagccttctgcccctaaagaactgagagtaatttgtaaaggctttcctctctggaaacagaacagtcgaaagcataaattaggttaagtggcttcattgtcctcaggctaatgcttataacccaaggtttattttccctatgaacagggtgtgcttacgttgataaaatgaaccaaaatcagcttatggaaaagttaaaaatacagtttactgaaagattatgtatcctcacacagagcaatagcaaacaatccaatataaaagtttaaataaatgtcaataattttaaaactaactatattttatatgtatataaagctgacccc

SEQ ID NO: 368851 - DNA, 532 bp, Homo Sapiens
  misc_feature (391)..(391): n is a, c, g, or t
  misc_feature (447)..(447): n is a, c, g, or t
  misc_feature (456)..(456): n is a, c, g, or t
  misc_feature (478)..(478): n is a, c, g, or t
  misc_feature (516)..(516): n is a, c, g, or t
gtaacactatccaaggcagtgacttcagctttatatacatataaaatatagttagttttaaaattattgacatttatttaaacttttagattggattgtttgctattgctctgtgtgaggatacataatctttcagtaaactgtatttttaacttttccataagctgattttggttcattttatcaacgtaagcacaccctgttcatagggaaaataaaccttgggttataagcattagcctgaggacaatgaagccacttaacctaatttatgctttcgactgttctgtttccagagagggaaagcctttacaaattactctcagttctttagggggcagaaggcttgtttcaagagggtttgacaggaggaaagggaatatatggaacnttaatgaggatgtccgactttggggttcagggtcttaaaaatgagggggcaaaacncttaggggntctaggccagtgacttgtttcncctaaaaaggggagagtccccttccccccgacgggttngtaccaaggccttggg

SEQ ID NO: 368852 - DNA, 885 bp, Homo Sapiens
gcgcccaccgaccaccaccacacgaaatagaacaccacccacgccaaacacccctccctcacagtgttggcgtatcaaccaaagtggatggtaccggtccggattctgggatacagacatgccgctccagtgacatttataatgacagaagcagggtaatggtcttgtgtttgacatgatcagttaggatcatagactttccctgactcgtagatattagccttgaattgggggaaaagaagactttgacacattttagttattttaataacagagatttactcttttgaaaaataaaggtatctaatgtctccctaataagtcttctttccttccaactaaatgacctacacggacttttattttcttgatcaaagaggtgtttattaaggacttctggataactatacttttactctatttttaaagatcacaaagtaattttaaatgtgaacaggttcccataccatgaatgctggcctcaccttctctatcatccacattttgaaatgcaaagaaagctcccttgtaagccatacttccttccccactcccatcctaggatacttgcccagtgctcattaggcatttcttattcagatagtccaaatttagggttattatgccttaatttgacacattaactaaatgcccagttttaaaatatatccatcaattcacgctgaaatgtgcttctttgtgctatcaaatggaatagaatacacttattttttaaacaatcccagaatactgtgtgtagacttttgttgtgctcaaataaatgtttacttatcttacaaagctcaaatactggattgtaaccatgtgatgaagttatctatgttgtacctaacattgcaaattaatcaataaatctctgttgtc

SEQ ID NO: 368853 - DNA, 1386 bp, Homo Sapiens
  misc_feature (1080)..(1080): n is a, c, g, or t
ctttggggctggctgtggtgagtcactcagaagtctggctgtgacctggatgggctcaccagagtacgctagtggtagtgggaaaacaggcagagagaaaggagtgtcaggagcactcccagggaggctgttgtagatatttccattcccagaacagtgatctattgtgacagtctcagaacagacaacaagaattacaggtaattttctcattctcttgatatatttttagcaaaacttaaatcatgaatagaaggaaaagatgccattggggaaatagaaaaactcaatcattttataaagcatacaaatcataaggatgactggccaatagcactcccactttggtcttacctaaagttgggtggacaagaataataaaagtcctcattttatatccttccaaaatcagatttaaatgctgccagcatcttaatggaagtctgaaattgattgataggatgtagaaatccaaattcactaaaatagggggccagctacataaagtcctagaaggaaaaagtgcctcgcttttttctgccattatcctaccccctagtcatctggggaattgatctatgaagcttgaagaaggggcatttaacatcagagtggtgcaagggcagtgttgagatgctttaagcagcaccctgagctttagcactatttcaaggggacaagcgcaaccccgggacataaccgcccccaccccacggaataagaaaaccgcatcaaacgaaaccgggccggtaggataccacaccacagctggttatcaatgaaacacaccgccaagaggagccacggtggccacctaccgcagcaacggtggcaccgccctccgacccctcggtctggccaccgccggcgtcgcgtaaccgggaaccgggtctccgctagcgtataagcgccctaagacccgtctccacccgtccacccgtctgggatgcccctcaccgcgtacgcctcccggcaagggtgggaccacccgtcttcgcacgcatgccgccataactcggaaaagaagaatgcgcagcacaactcagccgtaactctatggaccgggcgacctccgagaantcggaaacaacacgcgggcacacgactcgggggacaatctttagaaccctcatgaccccgccccaatatgcgagcgcgcgagactagctcgcctactcaggggtggcaagcggagaataacacagaattgcatataacggcgcgacgactcactaactccaagagcccatcccatagcgttcggtgacgcgcatattgagaggactggacggctcgagggagaggactcactctgtacggtagcacgaccactgttagttcaagcctagaccatgaaagcccgggcgccaggggactgctcccgac

SEQ ID NO: 368854 - DNA, 1124 bp, Homo Sapiens
  misc_feature (112)..(120): n is a, c, g, or t
  misc_feature (202)..(225): n is a, c, g, or t
cgcacagtgctggcggggggtcccctccatttttgccggggtatgcgcgtctcgttttttggggttctctcccgggtgcacttcgtaacaccggtccccgttggagaacctnnnnnnnnncggtgggccctcctgcctgccccggggtctcgtgggcttcgagaacggagagtaccgcgtcccctttagtcgccgttcaccnnnnnnnnnnnnnnnnnnnnnnnnctgcgtggggtgctaccgggagggagcgggggcccccctctttcacctcccaagttgccgggacggaagccatttaacatcttctccctgggcacgcccaaaaggcgggggggtgagtcagggcagattctctggcaagtgggcacacacccatttatttgcaatggatttggctaggggaggcataggttaaactggaatttctctgggccagcgacaacggagctctccctcaggtactgggcagcatgtgagtctgggcaaagagaggtgatttcttttttttcttaagtgcattttactcagccgtggccagtccgttaataagtcaccagaggaaggcaggacctgggaactacatcagcaaaccgcagcaagcaccataaagacaaaagttcttatagaacaaaaagaaaaacttgaacttgacgtgaaagatggaggaagcagttctacctctcttctatcacttttttcagcgcccggtaaaactgtttttttctatccttccttccctctcaaggccctaccttctcagcataattgatcgcagcaagctctttccaactggacactgaagagcagcgaccccttgggcttaccctccccatttcttttcctggttcgcttcagtgccctggaaagttgctcctaatgagaaatcaagaacactgggctgtactaaacgctcattgtctcaaatcctgcagcagttcctttcctaagagacactgtgttgtactgtatttctcttttttcttgtatcttgggacttggagttgtaatactacctgaattaaattaattatcctcggaaattcccggacccggtacccaccctgaattttggccggccgggtgcccctggctggcgtggcgaggtagcggttcgcctggcc

SEQ ID NO: 368855 - DNA, 1786 bp, Homo Sapiens
  misc_feature (1313)..(1313): n is a, c, g, or t
  misc_feature (1320)..(1320): n is a, c, g, or t
  misc_feature (1397)..(1405): n is a, c, g, or t
  misc_feature (1407)..(1407): n is a, c, g, or t
  misc_feature (1575)..(1575): n is a, c, g, or t
  misc_feature (1620)..(1637): n is a, c, g, or t
ggtccggaattcttccgatagacgcggcgtggatccgaggtttccgcacggggggcgaggggcggactggcagccgcgatcgctacactaagccacgttcataacgcatcctactttcgtttgcttcccttcctttctagctgaaatccgcgggttgccacaccgagctgacgctgcgggctccctataagccatgcatactccgctattactgtaccctcgaccacagaaactagctcactgcgatgggtcacccagcgggccatcgccatgagagacggcgactacccctttgaccgcggactgaaaccgcttatcagcggactcttgttctccctggtcacaactgtcaacacgtatctaatcgctaaaccccttgattgagaagggtatatcgcgatcccccgccattgcacagaccctgatcctaatcaacagacagaaactggactacttccccgatgtactgccctaactctttacgcttccctgtgtcatcttcttaattataaataatgggggatgaagataaaagaattacatatgaagattcagaaccatccacaggaatgaattacacgccctccatgcatcaagaagcacaggaggagacagttatgaagctcaaaggtatagatgcaaatgaaccaacagaaggaagtattcttttgaaaagcagtgaaaaaaaagctacaagaaacaccaactgaagcaaatcacgtacaaagactgagacaaatgctggcttgccctccacatggttcactggacagggccataacaaatgttaccatcattgttcttctgtgggctgtagcttggtcaattactggcagtgaatgtcttcctggaggaaacctatttggaattctcatcctattctattgtgccatcattgggggcccacttttggggcttattaagttacctacgttgcctccaatgcctctctcttcctgggaggctggcctgcacggttccctcattccaaaatatccccgtccaccaaccgataaccgtggccccatcaaccaacacagtcggccccctccccccttttgcagaaaggacctagctccttgcgctctcttcctttctcttgggcaattcgctgtcctaggcccccttcgcgatacctcggcgactcccatcctcgcgcctccccctccaccatacatcagttcctaactaaccacccgtgccctattcacctaaaccttacccaaacagaaccccactgtccccccttaacattatatattacacctttcatcccctgtccgtacaacctatattcgctccttccgcccatncattttnccacccacaaaccctataatataacgcccaccccgcgccgttatctccgttatatttcgtatatcccgtatcttttnnnnnnnnntngaataattatgtaacacccgacgtgacccccccagtgtctttttccccccctatatcctctttcctcctggtaacataaccgcttccgtccaacccgcctcaatatcccccgttactactatcccgtcctatccctcgctttttcgttggtttacccccgccgtttantaaatgctgacacccctctatcccttccctttccacgcgtttttnnnnnnnnnnnnnnnnnnatctgacgtttacctcccatattaccgtttctccgtcctccacacaatccgtcccgacattccccttctccaccgccaactgcccccccaccatatactcctatttccccgatttttccctccccctcccttttcgcgaccccgcatcc

SEQ ID NO: 368856 - DNA, 1221 bp, Homo Sapiens
  misc_feature (1165)..(1165): n is a, c, g, or t
  misc_feature (1207)..(1207): n is a, c, g, or t
ccaccggaagctgctgaccatggccttcaatcccctgcctcttggtgtcaccccaaccttcctgcacacctgcacccctgcacccccggctgcctttccaatcatgccctctgcccgcctgtgccactgcacctccccaactcccgctgcgtcccctgggccctcatgcttacaaagccctctttgactcctctcactctcaccacgggctccttgcaaaactttccagagctacagagtcccccagagaccacgatcacgcagggctaggtcaaggggcaacaaagaactccacatttcaagagccccccaggggtccaaggggcctctccagctgagaaccgggaggcgaggctggcatcctaggcaccgaacacagcgtagccggggaaggatgtgttaggtctggactctgaacactgtcacctatgccctggcctggccagaacacagagagccccggtgaggaaggaaagcccgctttaccgtgagaaagcgccctccaacacctatatagccccccacgtaccgctccacagcacacagcatcgcaatcgttgattaccgctagaatacccccaaataatcaacactcccacaccccccaatatatatcacaacacgatcaagctctataacaatgttcaccccccaacacacgacttcaacccatacggactgcttccctaacacactcgacatcctagcacacagtaaagacggctctatctagctctatccgaacacggacagtatgacattacgtcctaatacaacgcctatcccagcaacatattttactcctctatctcaggacaatacagcacccctaggccatcataccgcatcccgctcgttaaatatcacgcaaacatcccccccacctctccatcccgccgggaagtcattcgcgtttgcactcggccaaacattgtactatacgtcgtagccccagacaagttttctgcatacattcgtctacccgccattatttttatacaacaaactacgcactacgacatgaaggtactactacacaaacccaataacctgcattgatttcccccaactcctgcctccacctcacaagacaagaacttgacatgcaatctattcatcgtcgacaatgatccaaccacctatcatagcgcgcgcgcctttaganttatatagcttcttgatagcgtgggtagacctgatattattntacagtctaccctt

SEQ ID NO: 368857 - DNA, 1294 bp, Homo Sapiens
  misc_feature (1218)..(1219): n is a, c, g, or t
ggtgaacaacactacgcagtatgcgccacaagaggtgcgcggcagtgtggggaatgcctctaccgggccgataaaacccgcaaaggtgtggggccaccacctatgcacaagacaattacctgtatataatttcacccgtttttccaatggcggaaccgcgcgaggtgagaagtcctttcccttttttagggcccaaggaaagtcctcccccggggcttggaatgatgccggccatttgcctgcgaatgggcccggggccggtttgattgttgtcccccaagtcccccaagcgggacttgggatgcccagccacgctggcatttttcggataggtttcagggaccctcgggcccgcccaggttccttcaatgcccacgacagctatgcaggggaggtcacccacgcctccattctcgttgtcccagtcgggctcctggcctgcagagaagtcccggtaggcgatgcagatggtgcggaggccatcgcaagccatcggctcgatgatcttcctcaccatgtcgtcccggtcccgaggccgaaagccccggagttcgccattgctgttcaagatgttggtgcactttttcaagaggatctctgaggcccccttgctgaagaggcggaagccaccgtcgggcatgcggatgactgtgctcatggacttgcggaccgagttgaaggtgtacactttgtaaagcttgtcttccgggatctgctcgcgcacgggctggaagtcccgcttcaggtccaagacgaagcccagcagggcgcactccgtcttattgcccacctggcgtgggagggcgccttccttctcaggaggtagtattttggtggtataggcactgttgatggagatggcatggaccaggaggtcgaggatcttaggggtcagggcgctgggggccggaatctctttgtagtgggtgtcccctaggtaggactggaccacggtcatacggatggtggtgagcgtgcccgtcttgtcggagcagatggctgtggcgttgcccatggtctcgcaggcatccaggtggcgcaccaggttgttgtctttcatcattttcttgacagagtaagctaaggagatggtgacagcaagaggcaggccctctggggcagccacgaccagcacagtgacaccaatgatgaagaacttcacgaagtattgtacatagaccggcgtgcactctgccagccatgtccgggccttccacnngacaaacgtctcaatcacaaagtagaggatcaggatgatgacggtgatggcagacatcaccagccctgctttccc

SEQ ID NO: 368858 - DNA, 860 bp, Homo Sapiens
  misc_feature (51)..(332): n is a, c, g, or t
  misc_feature (334)..(346): n is a, c, g, or t
  misc_feature (356)..(364): n is a, c, g, or t
  misc_feature (741)..(741): n is a, c, g, or t
  misc_feature (794)..(794): n is a, c, g, or t
aaattcagaaagccctaaaatttcaaacactgtttgaaagaagaggtgggnnnnnnnnnnnnnnnnnnnnnnnnnnnnnnnnnnnnnnnnnnnnnnnnnnnnnnnnnnnnnnnnnnnnnnnnnnnnnnnnnnnnnnnnnnnnnnnnnnnnnnnnnnnnnnnnnnnnnnnnnnnnnnnnnnnnnnnnnnnnnnnnnnnnnnnnnnnnnnnnnnnnnnnnnnnnnnnnnnnnnnnnnnnnnnnnnnnnnnnnnnnnnnnnnnnnnnnnnnnnnnnnnnnnnnnnnnnnnnnnnnnnnnnnnnnnnnnnnnnnnnnnnnnnnnnnnnnnnnnnnntnnnnnnnnnnnnnggaggtgaannnnnnnnnaagttttgtaacactgtcctactttatttattagaatctaaggctgttacaatcaagtcgttgcagggtttggatcagctgtaagttaggtatgcctaccaaacatccaaaggtagacgtggagacattttaatactacaaaactaggaaaatcagaactcatggccatttcctgccctcctccaacttgttaaaacatgtttattctaaagttcgaatggataaatttgagtataaaggttttgttataaaactgttctttagtgtaaggctgcattgtgggtttgggggaaatgtaaataattttctgtgtaaaacaaattcataggatctgatttgctcagagtattattcaagaatgtattaataaggcattngcccccctgtttgcactcaagggttaatatgtccaaatgaaaattttaagaanggaaaatggaaagaaatttcagggtaccattaaatttggcatatttattttttggggaaaaagatg

SEQ ID NO: 368859 - DNA, 1316 bp, Homo Sapiens
tccgtcccggggtctttgctccggtcgtccgcggttatgttgggcgccagttgttgggatccccagtgtgcggtgcccggggtctgattgtcccgggttcggtcgctgggattgccggggggaatgggtcgttcgccaggaggctatgattccccgagtggcgccgttccagcagtgctgcacgtcttgccggtgattaggcgctctgcgtgtccggagacgctgcagggtgccatcctgaattgggagcccacgcgcggcgcagcgttctgcactccccatgctgagcattcggggatcttgctcagccaggccataggtcagctagccacttgcagtagtaaccattctcagtccctctgtatcaggcagttcttagatctgaggtcccgatggacaatgcctttgaagtgaaggtagctgaggcccgctggctatgtcataggccagtttgaccctcacagtccaaggcaaatgcaggttactgtctagcaactgttccaggttcccggagttgatatactctgtaaggtgcatgcaattgtccttgaggaacacatacacccatgaacctaaggatgttgggatgggagagtctattcatgagctgtacttcttctcagccatgtttgcccggttactgctcaatgtgttcatcttaagagccatcacctgagccagaagctcggtgtcgtacccttgaacacttcagaaaagaagccagaccctattttttcacaggtgaaatcatccagaacgcgtcagtctggaaaaggcacttataagagctcgatacgaagatggccaaactcttcccacctggctgcacatgttccttctcctccaccacctccttcaaactcttgcaagacgctccacacgtggaggaaatcctgcaattgaattccgtttgctccgatccatagtctaaataatcacttttttcttcttttaagaaggaactccacacataaatttttgttgaattttacttctcttctggtttgacactgaggcaggactgagcagccagaggggtgcctgcgcgggcaagaggaggagacggcggcaaagagggagcatagtaaccctcacagctcgttggtggcagcggctccttagcctgcggaggcggtgggagcccctagcgcagaagccggcgactcagctaggctagcggcggcggagaacgaggagactactgccatggccccacagtcggggccgctccccccgcctgtttggcggggccaggaggacgatccgaccagcgaagccaacagggcagctggtagctctgctatcccaagaattcc

SEQ ID NO: 368860 - DNA, 1177 bp, Homo Sapiens
  misc_feature (60)..(90): n is a, c, g, or t
gaggggccccttgggggtgtcttcccccggaggtttttttgtgggagaatacctcccccnnnnnnnnnnnnnnnnnnnnnnnnnnnnnnntcatagaattcttcccttggtagttccaatttcttttgaggggcccattgctgagttcatccccgcggggattttgctgaatcatcccccgttggggggcaaatgtgagtgtcatccccgggtgaacccttccttttggaggggcagtgcggagtctttttggcagattcatgccctgttgagggccggtgcgaagtcatccctgcggagtcatccctgctgaggggcagtgctgagtcatccctgctgagggccagtgctgagtcattcttgcagtcatccctgtgaaggggcagtgctgagtcatccctgctgagtcatccctgttgaggggtggtgctgagtcatccctgctgagtcatccctgctgaggggcagtactaagccatccctgagtcatgtctgttgagcggcagtgctgagtcatccttggtgaggggcagtgctgagtcatccttgctgtgtcatcgctgctaagggacagtgctgagtcatccctgctgagtcatccctgttgaggggcagtgctgagtcatccctgttgaggggcggtgctgagtcatccctgctgaggggcagtactaagccatccctgagtcatgtctgttgagcggcagtgctgagtcatccttgctgaggggcagtgctgagtcatccttgctgtgtcatcactgctaagggacactgctgagtcatccctgcctgagtcatccctgttgagcgggcagtgctgaatcatccctgctgaggggcagtactgagtcatccctgctgaggggcagtactgagtcatctctgcagagtcatgcctgttgaggggcggtgctgagtcatccctgctgagtcatccctgttgaggggcagtactaagccatccctgagtcatccctgttgagcggcagtgctgagtcatccttgctgaggggcagtgctgagtcatccttgctgtgtcatccctgctaagggacagtgctgagtcatctctgcagagtcatgcctgttgaggggcggtgctgagtcatccctgctgagtcatccctgttgagaggcggtgctgagtcatacctgctgaggggcagtacttagc

SEQ ID NO: 368861 - DNA, 1670 bp, Homo Sapiens
  misc_feature (412)..(479): n is a, c, g, or t
gaattccttggatccggaagggaagaacgtcagcctgagaactgagtagctgtactgtgtggcgccttattctaggcacttgttgggcagaatgtcacacctgccgatgaaactcctgcgtaagaagatcgagaagcggaacctcaaattgcggcagcggaacctaaagtttcagggggcctcaaatctgaccctatcggaaactcaaaatggagatgtatctgaagaaacaatgggaagtagaaaggttaaaaaatcaaaacaaaagcccatgaatgtgggcttatcagaaactcaaaatggaggcatgtctcaagaagcagtgggaaatataaaagttacaaagtctccccagaaatccactgtattaaccaatggagaagcagcaatgcagtcttccaattcagaatcnnnnnnnnnnnnnnnnnnnnnnnnnnnnnnnnnnnnnnnnnnnnnnnnnnnnnnnnnnnnnnnnnnnnctgaaaacaaagggaaatctgaagaagaaagtgccgagactactaaagaaacagaaaataatgtggagaagccagataatgatgaagatgacagtgagatgcccagcctgcccctgggactgacaggagcttttgaggatacttcatttgcttctctatgtaatcttgtcaatggaaaacactctgaaaggcaataaaagaaatgggttttacaaacatgactgaaatttcagcataaaagtatcagaacaccttctgggaaggcagggatcttcttgcagctacaaaaaccgtcagtggtaaaaccccagcttttctcatcctgcagctgaactcattgttaagttaaggttcatgcccaggaatggaacaggagtccttattctctcacctactagagaactagccatgcaaacctttggtgttcttaaggagctgatgactcaccacgtgcatacctatggcttgataatgggtggcagtaacagatctgctgaagcacagaaacttggtaatgggatcaacatcattgtggccacaccaggccgtctgctggaccatatgcagaataccccaggatttatgtataaaaacctgcagtgtctggttattgatgaagctgatcgtatcttggatgtggggtttgaagaggaattaaagcaaattattaaacttttgccaacacgtagacagactatgctcttttctgccacccaaactcgaaaagttgaagacctggcaaggatttctctgaaaaaggagccattgtatgttggcgttgatgatgataaagcgaatgcaacagtggatggtcttgaacagggatatgttgtttgtccttctgaaaagagattccttctgctctttacattccttaagaagaaccgaaagaagaagcttatggtcttcttttcatcttgtatgtctgtgaaataccactatgagttgctgaactacattgatttgcccgtcttggccattcatggaaagcaaaaagcaaaataagcgtacaaccacattcttccagttctgcaatgcagaattcgggaacactattgtgtacggatgtggcagcgagaggactagacattcctgaagtcgactggattgttcagtatgacccttcggatgacccctaaggatataatccatcgttgtggggtagaccacccagaggccctaaatggggag

SEQ ID NO: 368862 - DNA, 1018 bp, Homo Sapiens
  misc_feature (438)..(466): n is a, c, g, or t
gggacgcgtttcctgttggccgagctgcgcacgtgcggccggaagggaagtaacgtcagcctgagaactgagtagctgtactgtgtggcgccttattctaggcacttgttgggcagaatgtcacacctgccgatgaaactcctgcgtaagaagatcgagaagcggaacctcaaattgcggcagcggaacctaaagtttcagggggcctcaaatctgaccctatcggaaactcaaaatggagatgtatctgaagaaacaatgggaagtagaaaggttaaaaaatcaaaacaaaagcccatgaatgtgggcttatcagaaactcaaaatggaggcatgtctcaagaagcagtgggaaatataaaagttacaaagtctccccagaaatccactgtattaaccaatggagaagcagcaatgcagtcttccaattcagaatcnnnnnnnnnnnnnnnnnnnnnnnnnnnnntggtgaatgatgctgagcctgatacgaaaaaagcaaaaactgaaaacaaagggaaatctgaagaaagaaagtgccgagactaccaaagaaacagaaaataatgtggagaaagccagataatgatgaagatgagagtgaggtggcccagtctaccccctgggactgacatgaactattcaagatacttccgttagcctatactaagtaatcttgacaatcaaaacactcttgaatgccacctagaaaaaggggtccatagattaaaggaccggaaattttggtagaaaacatattcgagagtaggtcaaagcaaagggagtggaatgtctccatatagttagacctaatttaattacatagcacataaacatacattgtcaacaattacacaaatatgatagattcagattcacttaaaattgattccgagagccacttatctagattcacattgaaacaccggagcgttttttgaggactgcctcgtatttgttttactacttgtcctttaccaccaccttaccacatggtcctccccatgtttttctcacg

SEQ ID NO: 368863 - DNA, 1135 bp, Homo Sapiens
ggtccggaattctccggatgtggatatcccaggaacgtccaagctgctgctggagctgccactggtgatcggcaccattcccttgcacccttttggcagccgttcctccagcgtgggcagccacgccagcttcctgctggactggaggctgggggccttgccggagcggcctgaggctcctcctgagtactcggaggtggtagccgacactgaggaggcagccttggggcagagccccttcccgcttccgcaggaccccgacatgagccttgaaggcccgttcttcgcctacatccaagagttccgctaccgcccgccacccctgtactctgaggaggatccaaacccactcttgggggacatgaggccgcgctgcatgacttgctgaacggcacagggacccctcgaggaacaaggttgcacaccagctttcagccaccatgactgtggggagtggctggaccaagggctgacctccccgactgcatcaaagttgcggaaccaagtctcagagtgaggcgggggcctttcggatatcacatgggacagaggaagaacccggctggaatctgacttacctggaccgctgtccttgtgaggcattgaatgcccagtgcagtatccgagagactgtttaataacctgtcttcccagccaattggtggtgctggaatcccctaggaaccttcagttctgggagaaaacgagcccgaccttgacggttccggcatcacagaacccagaagaagaaccctgcccctgtgaagaggtccgacagggaaccctaaaaaggggtccttgcgggaaagggcattttaactggggcttttggagtacgatatgggactcccccagggcgcccgcatggggggattctgggcccgaaaagggctcgagcctgaagggagctttgggaatccaccccctttaattggtgcaactgggggggctcacaagtggcccgtgccccatacattgggggcccacccccgggaggcttggtgtgggcgcaacgggacccccgcgtacgggcggccctctggcaaaaccagggtgggccacaaaagtcgtgcggcctctctcggcgccggggtcgctgggcgtgacagcctcctcaagctataggaggcgttgt

SEQ ID NO: 368864 - DNA, 1354 bp, Homo Sapiens
  misc_feature (333)..(349): n is a, c, g, or t
  misc_feature (458)..(475): n is a, c, g, or t
atgtattttctcagtatcactgctcaagccagcaaagggagtctaccacacatcatgcagaagaagtaacactgtcctgggacatggggtcggtcttctaatccctagcagggcaaacaaggaactgaaaagaaggagaaaccccagcccaattctatttcccatgactgccccactgcagttcacaggtaatgatgggctagagaaagtgaacaggggatgggctgctgctcactcccagctaggcaccagaccatctccacaaagaatgctagaacagagtgatgctgccaccccttggattcataaataagtagattttgatgggtttgnnnnnnnnnnnnnnnnnctctaaggtaagcggtaagccactagtcttgtgccaaagaagatgctatctcttttctatacctcattcctacctccccatccttgttcctctccgtcccccctccacnnnnnnnnnnnnnnnnnngctaagtatttttctagcaagctggtcaatcttcttttctccctcctggctcagcaggctccctccttttaccaagactgctgggacgttgaactccggtgtctgatcatctcacctactctcctcctaactcccaactgaaatccatctcctctcttcctccccaacatccatctctttcccaacatgcctttgcacctagagcaggtgaagaaagcccatgactaaaactaaagactcagaatgaaacaaaaggtgtgacaagttatttgtggggaaggttttcagatatgttccaagagaaaataaggtaaaacaaccttgttcatcagaccaacagtgctggaaagggctcgagtgattctgtaaagggcaactctccccctttccagggacccacagcccatctttgtgtatctttttaaggccagattgagtatcccactcatatataaaactcggtagggttactagcagttagacaaagactatgaaacggtaggaaaaaagaaaaatcaacctcactgattattcacatattgcattatgagtgctcttttttaaacctaaagaataatttatattatttctgtagaaaatcaaatgaacactgtctactcataaaacctaaaggtcacggcacatgtggtttcactttccatcttgagttagcttcagcacacagagaccccctccaaagggtcagtgcaggagagcaggcagaaggcaggcctctctggcccagtgtgtgtctcctttattgctgtagaaatctcagccttgcatactccatttcctcacgaattggaggccaggcgaactgattttcatgggaggattgagtttttcttcaatttgatatttgaaaacctcgtgcca

SEQ ID NO: 368865 - DNA, 1260 bp, Homo Sapiens
  misc_feature (199)..(212): n is a, c, g, or t
  misc_feature (742)..(751): n is a, c, g, or t
  misc_feature (1241)..(1241): n is a, c, g, or t
tcaaaatttcgacgcgggccccaacttttattggtgtttccaatttgggcggggcaattttgagagaaaaaaaagttctctccctttaaaaaatcccaaccaaggttgccctaaaaatttttcttcgggaataggggatcctttccgcccaagtgagggccctttttagggggaaagtttttcccaatcccgtttgagnnnnnnnnnnnnnntttcgtgttcccaccttggccaaggaggatttcctcaaggcaggcttctttttaaggggatgcttccccgaaacctccccctaaatgcaggccaagcttttccaaagggtttttgaatggggccctttcagtttttccattccataaatgaaccccaattgtttccctttgctgatttctaaatcttttcttaggaaacatttctggcctacactgaaatgaaaagtatcaaatcttctggcagggcatcttacagtactgtcgatagcagccatttttaaggctcagagaatatgtcttcaaaagatattttccccaaatttgagcaaacactgagcatttcaaataaataatggaatgctaatcaggcaaaagtaccaaacccttggttccaggacagtttgctaattactaatacaatgaaacaactaggagcaagtgacacataaaatagcctccctaaagtccaagagtattaaaatattccccacaacaaacaatcttcatttcagaacaattttagcaccacnnnnnnnnnnccacaattttgactgcaacattaacagtgggaatgttacttcgcgcaaagtgctttcccatcaatgctcagtttactttcttgaatgaggtcttctaaattctcagctcagatgcaccctggagtgccagcttgctccttcctgtttgttcctttgaaaatgatctagttagtgcccaaaccgggtgaaggagtgtttcaggtaagaagaagagtttatatataggtgttgatacagatatgtataacaaaatcctcagtttggttgggtctttaaaaaatacctttttagcattgtatgatcacatgcattaaagaaagtaagcatactagttatcgtagcatataagattcataatttaaaatggcacaactaccaaagtcaaacaaaatttttacacactattaaatactggcaacataaccttgggaaaagtttccttttcccataaaggggattgggactgggataaagttccccttaaaacacntaagggatgggttatggac

SEQ ID NO: 368866 - DNA, 1233 bp, Homo Sapiens
acttcccgggatgtgctggggcgagcgggagcgggcgaggatgggcacaggatagaggcagagccacccacgccgccgcggccccacgctgggcgacagagcctccagttccccttcaatgctggcgggtcgccggagctctgatcgccgggaacccttgccgctgctgtcctgcgaccccaagcaggtatagacacgtgtggccgtttacgctgtaggatcctcattcccactggctttgaacattttggggacttacaatgccgccacccgcggacatcgtcaaggtggccatagaatggccgggcgcctaccccaaactcatggaaattgatcagaaaaaaccactgtctgcaataataaaggaagtctgtgatgggtggtctcttgccaaccatgaatattttgcactccagcatgccgatagttcaaacttctatatcacagaaaagaaccgcaatgagataaaaaatggcactatccttcgattaaccacatctccagctcagaacgcccagcagctccatgaacgaatccagtcctcgagtatggatgccaagctggaagccctgaaggacttggccagcctctcccgggatgtcacgtttgcccaggagtttataaacctggacggtatctctctcctcacgcagatggtggagagcggcactgagcgataccagaaattgcagaagatcatgaagccttgctttggagacatgctgttccttcaccctgacggccttcgttgagctgatggaccatggcatagtgtcctgggatacatttttcggtggcgttcattaagaagatagcaagttttgtgaacaagtcagccatagacatctcgatcctgcagcgggccttggccatttttggagtcgatggtggctcaatagccatggacctctaccagaaagtggcgcaggagatcaccatcggccagctcattccacacctgcaagggtcagatcaagaaatccaaacctatactattgcagtgattaatgcgcttttcctgaaggctcctgatgagaggaggcaggagatggcgaatattttggctcagaagcaactgcgttccatcattttaacacatgtcatccgagcccagcgggccatcaacaatgagatggcgcaccagctgtatgttctacaagtgctcacctttaacctcctggaagacaggatgatgaccaaaatggacccccaggaccaggctcagagggacat

SEQ ID NO: 368867 - DNA, 914 bp, Homo Sapiens
  misc_feature (47)..(47): n is a, c, g, or t
  misc_feature (707)..(715): n is a, c, g, or t
ggtccggaattcttgggatggaccagtccaagaaagccaactccccntctgaaaggccacgagaggacagtgcagtatctgcagcatctgggcacagaaaacctgcatttgattttctcctactcagtgtgggtgctgagagacttcccagaagatggcctgaagatatttactgaagatctcccggaagtggagtctctgccacgtgatcgagtcctcggcttcttaatagagaattttaagggtctggctattccttatctggaacacatcatccatgtttgggaggagacaggctctcggttccacaactgcctgatccagctatactgtgagaaggtgcaaggtctgatgaaggagtatctcctgtccttccctgcaggcaaaaccccagtcccagctggagaggaagagggtgagctgggagaataccggcaaaagctcctcatgttcttggagatttccagctactatgatccaggccggctcatctgtgattttccctttgatggcctcttagaagaacgagctctcctgttggggcgcatggggaaacatgaacaagctcttttcatttatgtccacatcttgaaggatacaaggatggctgaggagtactgccacaaaacactatgaccggaaaacaagatgggtaacaaaagatgttgtatcctggtcccctggcttcgggaatgtaccctggtcgnnnnnnnnnggcatttcacttggccctggggggcccaattcaaggcttgggaaactacttgggaagcccaaaaaagcccaaaacccttcccagggcccgcctcctgggcaggggcccctcggaggcttaccacccccaccagggaaaaactggggaaaaccccaccccccaggggggcccctttcaaaaccctttttgttgccccagg

SEQ ID NO: 368868 - DNA, 908 bp, Homo Sapiens
cccttccggccatccgtctatcccacttcccgtcccttctcccctgtcccagctggttccggccttgagcccgagggaccatgattttgaacatgccccttgggttgagacccccagcagacctcccttgatctgagattgggcacatggttctggaagaagatgaagtcaaggatctgggccaccgcctcggtgtccacgttgtcctcaaagacaatgccgtggacgtgggcagcacccaggagccgcagatctgggtgaggaggctgctggggtttgtggtgttgaccccaactgtgagcggctggatctccaggggtaggtccaggaagctctggggggtgaggcgggcacggaactgggcccggggcggccctgagctgctaaacaccacggccaccgtcatgccctgctcgccctgccccggacccagccctgcccaggcaccgaagagcgaggtgagcaacagggccggccccagggccccacccatgtccaccggagggtcccagcagctccttgcagggtcgcgggacgcacctgggggttcaggttgccgggtgcctttgctccgcgtgtccccgccctgcccgcgtaggcaggaaacaggagactcggggcttcccctccccgccgtcggggatcctgggcgaagcccacagagaccggcgcaggcggctggtgcgcagccagggcccagcgccaggtcttgctcgcccagtgccctctctgcctacccttccctttgcgctctggaagcccgggagccgggcacgggccagcatctgcaagatgccactactctggaagcccactccgattctcccaggtcgcaggaaggagagagctaggctggggcaaaggagatggggcagagctggaaggggaagaagcgggactcgcccgct

SEQ ID NO: 368869 - DNA, 1456 bp, Homo Sapiens
  misc_feature (1437)..(1437): n is a, c, g, or t
aaaaaaatggttttacagaatacgaagaccaacacagtctagaggatcatttcaacctttcctacatgccaagctgtgtgatggaaaatagaagagccatagctcttgcaagattagaggaaaagcaagtatttgtcaagagccaaagaaatgtgttcaaataatggagtttcctctgtgtcgcacacagcttttccttcccgtaggtactaagagttctttggtggttagagagatggcctggagctcagggcaggagatgacgctgaagagctacatctactcaggattaccacctgtggttcctaatttcagcattcaactctaattgttcagcctgactaattacaggcaatcagctgcttatatggtcactggttgtcagcacctactgattattccttttccttttctacctactcattaaccccattccatggaaaaacaggtgcttacaggaaaggatagggaggaaaaagaaatgtaaatgaatctattgtttggtaggaaagttgattcactgattatctatggatttcaatgatctgtgctttactcttgctactgtggataaccaaaggtcactgttaacgtatcttttgcttaaaaatgttaatatgcttattatgctttaaaatctagctatttaagggcatgaatggtttaaagcaaatttttacatcatgccattatggccctgaaaaaaagggagattctgccaagggaaagggttttgtttagccccagttaagatttcaatctattctgtgtcagtttatagtttttccaggatgtggaaaatattaaatgaagaaagcatcattttcttcatttaataaagtattacattcccagataaattagtatatacataggagaatggttagtgttaaatactaggttttaattctccgtttaagaaactccttacagatggacttccttgttctccggcaacaaaatgtaagacatgcaaacatgagagagtacaaagatgacagggagaaaaaaaatctcaactctaacaaacctaaggaacaatgagtctctaagagttggagtaagaaaacatggacttgaaaatccagctttatcatgacatgagttggcttaagccagctgatcacatctaaaattcttggcataatttgaacctaaagtaatgagctcacttccccaagatgcaaaaaagtagtctacctgctttatagttacaccctatatataatctgtatatatccatatgtttctatatattgcacttaaatttacaggactgtagtaagacggctgggagtacctcaaagaggcagagaagcagcaggcataaactttcctaaatcaagtaaacagtgtcaggaattccgagtgctggttataggtataccgaaacgcctgatgacccctatctaatttctagttatctacacttatttntttacacacagtctcattt

SEQ ID NO: 368870 - DNA, 1257 bp, Homo Sapiens
  misc_feature (21)..(21): n is a, c, g, or t
ggaggtggagggggcccccanccactccgtcgacagccaccccccttccctcccaatcctatgggccctgctttcaacatgcccccccaggggcctggctacccacccccaggcaacatgaactttcccagccaacccttcaaccagcctctgggtcaaaactttagtcctcccagtgggcagatgatgccgggcccagtggggggatttggtcccatgatctcacccaccatgggacagcctcccagagcagagctgggcccaccttctctgtcccaacgatttgctcagccaggggctccttttggcccttctcctctccagagacctggtcaggggctccccagcctgccgcctaacacaagtccctttcctggtccggaccctggctttcctggccctggtggtgaggatggggggaagcccttgaatccacctgcttctactgcttttccccaggagccccactcaggctccccggctgctgctggtaatgggaaccagcccagtttccccccgaacagcagtgggcggggtgggggcactccagatgccaacagcttggcaccccctggcaaggcaggtgggggctccgggccccagcctcccccaggcttggtgtacccatgtggtgcctggcggagtgaggggaacgatgaccaggatgccattctggggggaggcctcctgccagaaatggttccaccgtgagtgcacaggcatgactgagagcgcctatgggctgctgaccactgaagcttctgccgtctgggcctgcgatctctgcctcaagaccaaggagatccagtctgtctacatccgtgagggcatggggcagctggtggctgctaacgatgggtgacgctggtgaagtggcccagggaagtgcacatgtctctcccctgctcttccagggtgatttttttgatgtttggctcttgggccttgtttccactggctttccatccccatgggggcagaaacagtggcctcctggggaccaaaaaaggaaattgagggtggggcaggcaagaaagaagccctggaattggcttccctggtttttggggaaaacctttaccatggttggagaattcttaaccgaaggaatcccagggaaaaccccaaaggccccctggcctggaaccaaaaagaccccatttttgggtgggcctatattttctggggaagggcccccaccaaaaatcggtgggcctctgcccacaaacaaaacaagagggcgccctctgggaaagt

SEQ ID NO: 368871 - DNA, 843 bp, Homo Sapiens
  misc_feature (644)..(645): n is a, c, g, or t
gggagactgggttgggggaggggttcaggcctgttccccgcggctgcggcagcaccagggccggccgccaccgcctctagaacgcggaggaggtgggtcctgggaagcgggatgtccatcgctccagcttggtggtgaatgctgaggagagtcactgttgctgcagtctgtgccacccggaggaagttgtgtgaggccgggcgggagctcgcggcgctctggggaatcgaaacgcggggtcggtgcgaagactctgctgctgccagaccctttcctattctggccatgcctggaaggaacaaggcgaagtctacctgcagctgccctgacctgcagcccaatggacaggatctgggcgagaacagccgggttgcccgtctaggagcggatgaatctgaggaagagggacggagggggtctctcagtaatgctggggaccctgagatcgtcaagtctcccagcgaccccaagcaataccgatacatcaaattacagaatggcttgcaggcacttctgatttcagacctaagtaatatggaaggtaaaacaggaaatacaacagatgatgaagaagaagaggaggtggaggaagaagaagaaaatgatgatgaacattctgggagctgaaatagaagatggccgtnnattcccctaaaaatcctttgaaataaaaatgtcgggcccgcctccggcccctccagaagctttccaagaaccattcgctttggcgcccggggcccagttagggaaggtgaacaatggggccatagcctggtttccccaagaaaaaaacctgggccatgaaactaaggggcttgggatactcccaccccaataaaaaac

SEQ ID NO: 368872 - DNA, 1057 bp, Homo Sapiens
  misc_feature (674)..(674): n is a, c, g, or t
  misc_feature (957)..(957): n is a, c, g, or t
ggaattcctgcgatccgcgttccggttgcggatggtgagtgtgtcggggggcttggcggcttttctcctcagttttctggagtgctttggaggagaggactatggcagccagggacgccacttcaggcagcctgtcagaggagagcagtgctttggacctgccatcagcgtgtgacataagagattacgtcctgcagggacccagccaagaagccaacagcgaggctttcagttctttggaattccattcttttccttattcttctgatgtggatccagacaccagtaacttaaatatagaacaaaataactcctggaccgctgagaacttctggcttgaccctgctgtgaaaggccagtcagagaaggaagaggatgatggccttcggaaatccctggatagattctatgaaatgtttggccatccacagccaggctctgcaaactcactctctgcatctgtctgcaagtgcctgtctcagaaaatcactcaactaagaggccaggagagccaaaagtatgccctccgcagttttcaaatggcccgggtgatcttcaaccgggacggctgctccgtcttacagaggcattccagggacacccacttctacccactggaggaaggaagtacatctttggatgatgaaaagccaaacccaggactgtcaaaggantatttactcattttcctcttgcagcagaatgtaatgaaagacctgtaactggtgccgggcggtgtgcagggtagtaatggaggtgctgtgccatgaccagcagtgttggtggccacccagatcccctagggtctctggccagctctgtgtgccccatccccaataagtgcttttgagggtaaagggctggccacctggggaccttggtattggagccaagtcagcccctttgggaaagcccgcaagggcctgggaagttcttccgctcctccttgcccaaggnccccttgacttgactggggcttacaagtccaaaagccccagcttcccttggccttcaggaaagggactattcctctgtagggaataaattttatgcgccc

SEQ ID NO: 368873 - DNA, 1094 bp, Homo Sapiens
ggcctgggtggcgaattcggcacgaggagcagctccaaggacgagaggatacagcagacacaacctaatagagagggcgcctgcagccttaacctccacggccttcgatacttatgcaagcctggtgttgctcctgtcctcagagtcatcctgcgctcatgccttttcccgaatgggttcacctctggcagttgccgcttcagtcttggccttagcctcatcttgaagtgggtagctggcgggagagggtggctgcgccccctgctggccctgaggctgcagagttgggagcaggacacctcacctgagtttcattttttttcatgtccaaaccatgcacatactatagtccagaatcaaagcacttttgaaaagtggctgcatggccatcctccagggcccaggaagttgcattccaagggcctgtttacatggcagcagaatccatccccggcagtcagcccatagcttgggaccagtctgtgccctcctgcccagtccagtttactcctcttggttcctgaaggtggccaagtcattgtgttcccacaggcttctctaggctgggggcaggtgtggggctgtggaattccaaagcacaaaaggtgcagaggggattggccttcctgtgcctcaactcaccaaccaccctcctgccttcccagttctgccaggtgctccatgctgggggacaagtaggagactgccaggggcccaaagaaatgggtgagcagtagagtcatctcggggcacttggcagtgtcaagcacctgccccttgcctccttgaccacactgggggtgggtggggccccccagccctttcagagggcaggaaaccttttggggcttgaaccaagccctgaagggaggtggggaatggaacgggaaacaaatctgcgcgggtgggggcgaacttttcaactcgaaaccagggggggaccccggagcccgggaacaccctcccacacttttacttttctcatggaaaacttatatacctccccacattcatgtttcacggggtgacctgtctcccctcttataataccacacacgaacgcatttatatattacacccaacacgccggagat

SEQ ID NO: 368874 - DNA, 1271 bp, Homo Sapiens
ccaacgagttccagttcgtcagcggccgcgagacggccaaggactggattcgcagcatccgccacaaagggaaaagtctgaagacgcttatgtccaaggggatcctgcaggtgcatcctccgatctgcgactgcccgggctgccgaatatcctccccggtgaaccgggggcggctggcagacaagaggacaatcgccctgcctgccgcccggaacctgaagaaggagcgaactcccagcttctctgccagcgatggtgacagcgacgggagtggccccacctgtgggcggcggccaggcttgaagcaggaggatggtccgcacatccgtatcatgaagagaagagtccacacccactgggacgtgaacatctctttccgagaggcgtcctgcagccaggacggcaaccttcccaccctcatatccagcgtccaccgcagccgccacctcgttatgcccgagcatcagagccgctgtgaattccagagaggcagcctggagattggcctgcgacccgccggtgacctgttgggcaagaggctgggccgctccccccgtatcagcagcgactgcttttcagagaagagggcacgaagcgaatcgcctcaagaggagctgctgctgccgcgggagctggggcccagcatggccccggaggaccattaccgccggcttgtgtcagcactgagcgaggccagcacctttgaggaccctcagcgcctctaccacctgggcctccccagccacgatctcctgagggtccggcaggaggtggcggctgcagctctgaggggccccagtggcctggaagcccacctgccctcctccacggcaggtcagcgtcggaagcagggcctggctcagcaccgggagggcgccgccccagctgccgccccgtccttctcggagagggagctgcctcagccgccccccttgctgtcgccgcagaatgcccctcacgtcgccctgggcccccatctcaggccccccttcctgggggtgccctcggctctgtgccagaccccaggctacggcttcctgccccccgcgcaggcggagatgttcgcccggcagcaggagctcctgcggaagcagaacctggcccggctggagctgcccgccgacctcctgcggcagaaagagctggagagcgcgcgcccacagctgctggcgcccgagaccgccctgcgccccaacgacggcgccgaggaactgcagcggcgcggggccccggctggggctgaaccacgggcgcggcgcccactggctggg

SEQ ID NO: 368875 - DNA, 1369 bp, Homo Sapiens
  misc_feature (53)..(191): n is a, c, g, or t
  misc_feature (194)..(207): n is a, c, g, or t
ggggcaacatagtgagacccctgtctcccaaaaattttttttaattagctgtnnnnnnnnnnnnnnnnnnnnnnnnnnnnnnnnnnnnnnnnnnnnnnnnnnnnnnnnnnnnnnnnnnnnnnnnnnnnnnnnnnnnnnnnnnnnnnnnnnnnnnnnnnnnnnnnnnnnnnnnnnnnnnnnnnnnnnnnnnnttnnnnnnnnnnnnnngatctccaagcatagagaagagtctggagggaaacaccaaactcataacagtcttactgcaggcaagtgggataaaggcccagactccatgggtggaagttaaagggcatttccaagttaaggctaagacttgcttttctaactaagagaatgtgctcatgcattgcttgtgtagtagaaactagtttttagaaaagaaagcaaacttaagaaacactgactcctgtggagatgacttggcaccactctcctttcacagagcagagtctgaatagtcttcagagatagggcctgtggggccagattgccatcccctatggaccggaagccaaggatctctctagtgatggtcagagggcccaaatggcagggatacccagtgatgtcaggaggaatagtgcagacagaaggtgctaagcagacaattcaactgccatgttttgccaccccctgtgagcagggattaggtgttcaggccagtatcttgggcatgggggagcctttggccagaagaggtataaagctcagaagtttttcagtctgataactattgatataatttccatagtgtgagggagcggtatgctctacccttgtgtatttaaggcaggacagagaaattgaggatgcccctggggctagatcgatgatatgaccagaaatcaaaaagggaatgcattatttattgctgtgtaacactgttaagagaggaggtagttaagggatggataggcacatagagagggaaggtctcaggagaagggatagaaaggaactatgttcacaagaacaacggcaagacagtgcatatactgcctctacagttaataggaaaaacggaagaagttacccccttaagataggatgtcgctcaagaagtgaccatcccaacattgggtgcgggcacaataaatcagccctaatgtccctaattaaacccagctccatataatggtcattaaacatgacaattagcattgtgggttttaacaccccccatgggtttttgcttaaggaactcatggggaaataacccaggatgggagtcccctttggccaaaccttaggccatggcccacctggtataacccccagaagaaaaagggcaccttccctcactctgggggcaaaaccccccggaaaacattcccagctttcgggc

SEQ ID NO: 368876 - DNA, 892 bp, Homo Sapiens
  misc_feature (822)..(847): n is a, c, g, or t
tttggaagaaataaagccttaaaatatagtttacggaattcccagaaaactttttccttcccttcactacatccctcaggaataaggcaattgaagtggataacagtttgaatcttacttcaaagtgtagctacaaagtaagaaaaagcactgggccaggagtcagaatatcccaggttataatcttgattctttcatgaaacagctttgtgacactgaaggaatctactaaattctttagatttaaattgttcttgtctgtaaagctgaaaataagagagaactgggctaatctgtagggttcctttcactccaatttctaccagtctttttctaaatgggatcatctctaacaaaaagttacaatggtgtgtcagaacatcctgtgactgaccctctgtttgctgctttttgatctgatgacagatggcttggagatgtatcaacaacataattgggagtagataagctggccacattgatgaatgactgagaggagactgcaaagaaataatataccgtttcatttgccccttaacacaaagatgaatcagcctgtggatggggtcaattcactgaactagaaaggattgattatatatgcataaagtgcaaaagctataggtctttatagccatatctgctcacacatatattcacttttccatgctagttattcaggatagaaggtgcattaaatttataccaattcctagctactggcctagtaactaacaatctacagagttgtaatgcattaataaatataggattatagaagacatttagtatgtgatgttacctttaagtaactctcataannnnnnnnnnnnnnnnnnnnnnnnnngagatggagttttgcttattgcccaggctagagtgcagggcacaa

SEQ ID NO: 368877 - DNA, 1117 bp, Homo Sapiens
  misc_feature (967)..(978): n is a, c, g, or t
ggatgatgatggatcgtgtgatgtcaaatactggcccaaggagcctggcgaatatgctgttcacatcatgtgtgacgacgaagacatcaaggacagcccgtacatggccttcatccacccagccacgggaggctacaaccctgatctggttcgagcatacgggccaggtttggagaaatctggatgcattgtcaacaacctggccgagttcactgtggatcctaaggatgctggaaaagctcccttaaagatattttgctcaggatggggaaaggcaaacgcattgacatcccagatgaagaaccgggatggacggcacatatgcatgctcatacaccccggtgaaggccatcaagcacaccattgctgtggtctggggaggcgtgaacatcccgcacagcccctacagggtcaacatcgggcaaggtagccatcctcagaaggtcaaagtgtttgggccaggtgtggagagaagtggtctgaaggcaaatgaacctacacacttcacggtggactgtactgaggctggggaaggtgatgtcagtgttggcattaagtgtgatgcccgggtgttaagtgaagatgaggaagacgtggattttgacattattcacaatgccaatgatacgttcacagtcaaataatgtgcctcctgctgctggggcgataccactatcaaagttctctttgcatctcaggaaaatcccccccagcccttttcagagtcaaaattgacccctttcccacgatgcccagcaaagtgaaggcagaaaggcccagggctcagcaaaaccagtgtggaaaatgggaaaccgaacccacttcactgtctacaccaaggggggctgggcaaaacccccgctcaacggggcaattcaacaagcccttcttcctggggaatgcaggtgaaggatttggcaaatcttcccaatattatgaacttactctcacccggggtaaataatannnnnnnnnnnnacagggggccaatggcagggtttctgtgggacctttacggggggggcaactcctctccctagaaggccccttttcccgcgggggtgtttctctgccaccccttggtatttgttagaccaactaaacgtctcatgggttg

SEQ ID NO: 368878 - DNA, 1136 bp, Homo Sapiens
  misc_feature (656)..(656): n is a, c, g, or t
cctgccatcagacattgagactgagaaaacctgccccgaatcacattcaccttcagaagactcctttgtgagaagctgagggcctggccctcttcctcttcctggagagaacagccctccaccacccacagacctcgcgggcctcacttagcgtgctcctccctgtccgagaacccgagggtccccatgtggattatccagccagtgtgtggtcctttgaggccccaagcgcaggcctgtgatgaggaccaaagaggtgacttatggtcaggagtactccaaacagctctcagagtaggcatctttcctgggtctctaaagagtcatgctgacctggtgtgcaaattcccttccacccatccctctacctcctctggggatggcttgccgacatgctttagaaactcccctcttgggaatgctcctctgactgagggctccaacagctttaatgaaatcagccgagagggtaaaaaccaacctgttgcatagaatggaggggggaaaaagcacatactcaatagatttttgagtgtggtactctgtatttttgcagcatttattttccaaatgagcagtttagaaatatgtgatgtaaagtacatactgtacgtttgctgaaaattatattaaaagcactattttaattcttaccnccagcgaccccgatccttacccatccccccctcgacccttccgcgccctccctttagcaaagtcccccgcgggcccacacaacccttttcatgagggccaccctctcttttctgtcgggccgcctctttcccgggggcaatgcgtcgctcctctttatcaaaaacgcctcgctccccttacattttggcagtcgcctacgcagcgcggttacccactgtttccagcccgggccgaaacattgcggcaccgccccgtataccttttcgcccgagagcccccttcttctcgtcggccgggcaccatttaccttctggcgacaacacgttcccttaccgcgcggaatatccccggttctcctgtcgggtatactatactcgcgctacgatcgccgttgcttaaacctgccgcttcgtccggttcctttcgccgatgcgcccccctacaccctccccagtgccaaacacttttccgacccctcc

SEQ ID NO: 368879 - DNA, 1259 bp, Homo Sapiens
  misc_feature (129)..(129): n is a, c, g, or t
  misc_feature (601)..(630): n is a, c, g, or t
cgatagtaacgaagtttgccataatagggtattcgggtactgaggtgtgtacagatgggtctaatctgtagtcgggagggtggggggttaaaggatggagaaatccgagatggtattgcagagtagtgngagagcgtagagaaggacgtggtttgaggagaagtatgagacttctggaacgatcgttggttgtatacgaaaggagagtggcgtattgtggataaggtgaccatatgttatcgacgggatgaattcggtagaatggggcctaacgggattaaaggtgattatgtggggagaggggtgtaaataagtgggtggtaggggtaacgcggggtggaggcgatataacaaaagggagaatggacgcgtggggcgaagcgaacacgtattggataggagcgagcgcggatgctattgtctgcaatgggtatgagggggtaagttacggagatggcgataggagggtacggtctgtaaaacactcaagggtgaggggatagtggggagtagtgtggggaaaaagcgaagggacgaggggtgatgttagtgaattatgttggagggtgctgatgtggggtagggaggaagtgaaggtgtnnnnnnnnnnnnnnnnnnnnnnnnnnnnnntgtttattgggcgtgaaaggttagggtgggacgggagcgggttggcgatatagggcgagggtacaacaaaagggggatggggtaaggagccaagcggaagggcttatgtttggccgtagagccaggacgtagggcctcatggctgggagctccttacctggcccatgggtgatgacatttctgggttggaggagccatggagatggccacgttgctcagatgggctgggagggggactctagggccctgagcctggtcttccccactataccatggcctcaggcacagagtctggggtagggacctggcccagggtctgttggtggtgtcagacatcagaggccaccacagagtcagcatccagatgccctggttcaaggggtgggaggagggtctgcaggccaagcaggatcaaggaggaggcctacaggctgagtggagaacaagcttttggagccccccaggcctgcgtctgcgtgggacgcagtaggtaacaggacccagggcacctgcccctcggtgctgcaggggcagtggtgggagtgactatatgcagccacaacagcaggtgggatccctgggggcgccaccgtgtctgcaaggctaaaaagacagatcccgggaattcc

SEQ ID NO: 368880 - DNA, 1030 bp, Homo Sapiens
ggaattcccgggattgcagcaccatagtgacctcacgtgtggaggaattttgtctgaaggtcagaaaagatatttccttgtgtcattagcctgatagaccgctaactagcactgtttctaaagcagaaagcctcctctggggcctccttacaaatccaagctgatcttgcctagctggggcccaggaatgaagacagccatctagaatcttcactgttctgattctctgctgagcagatgctgctgctcctggtcccctgccctctgtacacccaatgtggcctcaaatgccctttgcatcctggctgtgccatatttgcacactaaggagttctgctgcagcagggctggagggctaagtctcacttccccccacctgctatgctcctcgccccacacctatggcaggagtgacttcctgccacagtggagggggaaccagtgaccccgtgctagatggccgctttttccttgcattaggcgaaaccaaaactatatgaacattctccggttcctggccctgggcgacaagaagctgagtccctttaacatcactcaccgcttcacgcacctcttctggtttggggatcttaactaccgtgtggatctgcctacctgggaggcagaaaccatcatccagaaaatcaagcagcagcagtacgcagacctcctgtcccacgaccagctgctcaccagagaggagggagcagaaggtcttcctacacttcgagggagaaagaaatcacgtttgccccaacctaccgttttgagagactgactcgggacaatacgcctaccccagccagaagcgacagggatgaagtacaacttgccctcctggtgtgaccgaagtcctcttggagtcttatcccctggggcaccgggtgggtacagccttatgggcagtaccagcgacatcatgacgagggaccccagccctggtcttttgccccttttgagggtacggagtcactttccacgatttggcctcccaaaaacgggccccccgggaactgtttgtaacccccct

SEQ ID NO: 368881 - DNA, 1823 bp, Homo Sapiens
  misc_feature (45)..(81): n is a, c, g, or t
  misc_feature (297)..(339): n is a, c, g, or t
gatagatcatatagggcgattggagcgctaccgcggtggcggcgnnnnnnnnnnnnnnnnnnnnnnnnnnnnnnnnnnnnnatcaggccaaatcggccgagctcgaattcgtcgagagcgggtggttgtggccactgtgcccggagggaggcggcggtggccagtaatgcctgggaaactcctctggggggacattatggagctggaagcacccttggaggagtccgagagccagaagaaggagaggcaaaagagctttatggatatcgcaatttcggataagggattatggacctnnnnnnnnnnnnnnnnnnnnnnnnnnnnnnnnnnnnnnnnnnngctgaaaacacattacacagtgctggagtgacagaaggaagtcaaggcaccattatgactcggatgagaaatcagaaacaagagaaaatggtgttacagatgacctggatgctcccaaggccaaaaaatctaaaatgaaagagaagctaaatggagacactgaagaaggatttaatagactttcagatgaattctccaaatctcataagtcaagaagaaaagatctaccaaatggagatatagatgaatatgaaaaaaaatcaaagcgagtatcatctttagatacttctactcataaatcaagtgataataaactagaggagaccttaacacgtgaacagaaagaaggagccttctccaattttcctatttctgaagagactataaagcttctgaaaggtcgaggggtaacatatctctttcctattcaagttaagacctttggtcctgtatatgaaggaaaagatttaatagctcaagcacggacaggaacaggaaagacattctcttttgccatccccttaattgaaagactccaaagaaatcaagaaacaattaaaaaaagccgctcaccaaaggtacttgtttaggctcccaacaagggaactggcaaaccaagtagccaaagacttcaaagatataactaggaaactcagcgtggcggtgtttttatggtgcaacatcatatcaaagccaaatttaatcatattcgcaaatggtattgacatccctggttggaacacctgggccgtatcaaagaccatctgcaaaggggcccaattggatcttttctaaactgcgacatgttgtgcttgatgaagtggatcagatgttagatttaggtttcgctgaacaagttgaagatattattcatgaatcctacaaaactgattctgaagacaatcctcagactttacttttttctgcaacttgcccacagtgggtatacaaagttgcaaacaaaatacatgaaatccagatatgaacaggttgaccttgttggaacaacatgactcaaaaggctgcaactactgtggaacatttggccatccagtgtcattggtcctcagaggccagcaagttattggagatgtccttcaagtctacagtgggtctgaagggagggctattattttctgtgagaccaagaagaatgtaaactgcaaatggccatgtaatccacaacattaaaaccagaatgcccagtgtattacatggcggacattggcacaagtcacaaaagagaaattaccctaacaacggtttcaaagcaagagtagtcttaacagtctcggtggcaaccaatgatgggctgacccgaggattggggacacattcctgcaagtttgactgggtgattcaaagtacctcctcctcaggaatgtggaatcctaatattcattcggctctgggacgcacaaggtaagctggagtgacagggattcgcatatgtatatcaccccgagaaagagtcactacgaatg

SEQ ID NO: 368882 - DNA, 1050 bp, Homo Sapiens
  misc_feature (852)..(852): n is a, c, g, or t
  misc_feature (993)..(993): n is a, c, g, or t
ggcctgggtggcgaattcggcacgaggggccactgtgcccggagggaggcggcggtggccagtaatgcctgggaaactcctctggggggacattatggagctggaagcacccttggaggagtccgagagccagaagaaggagaggcaaaagggttgttatgaagatttaaacaagataagctgaaaacacattacacagtgctggagtgacagaaggaagtcaaggcaccattatgactcggatgagaaatcagaaacaagagaaaatggtgttacagatgacctggatgctcccaaggccaaaaaatctaaaatgaaagagaagctaaatggagacactgaagaaggatttaatagactttcagatgaattctccaaatctcataagtcaagaagaaaagatctaccaaatggagatatagatgaatatgaaaaaaaatcaaagcgagtatcatctttagatacttctactcataaatcaagtgataataaactagaggagaccttaacacgtgaacagaaagaaggagccttctccaattttcctatttctgaagagactataaagcttctgaaaggtcgaggggtaacatatctctttcctattcaagttaagacctttggtcctgtatatgaaggaaaagatttaatagctcaagcacggacaggaacaggaaagacattctcttttgccatccccttaattgaaagactccaaagaaatcaagaaacaattaaaaaaagccgctcaccaaaggtacttgttttggctccaacaagggaactggcaaaccaagtagccaaagacttcaaagatataactaggaaaactcagcgtgggcgtgtttttantggtggaacatcatatcaaagccaaaatttgaattttacatattgggtggcatttctctcctctcacagtttaatcatattcgaaatggtatttgacatccttggttggaacaacctggccgtatcaaagaccatcttcanaaatggccgaatgggatcttttctaaactgccaaatgttggggccttgatgaaaagg

SEQ ID NO: 368883 - DNA, 1072 bp, Homo Sapiens
  misc_feature (222)..(262): n is a, c, g, or t
  misc_feature (265)..(265): n is a, c, g, or t
  misc_feature (268)..(268): n is a, c, g, or t
  misc_feature (274)..(274): n is a, c, g, or t
  misc_feature (280)..(281): n is a, c, g, or t
  misc_feature (285)..(285): n is a, c, g, or t
  misc_feature (287)..(288): n is a, c, g, or t
  misc_feature (290)..(292): n is a, c, g, or t
  misc_feature (296)..(296): n is a, c, g, or t
aaaagagaaaaggggttccctctccccaaaagatgtcccccaagggtgggcccggtttttccccaatgcccgagacggtttgaaaaaagggccgggccagaggcccttaagtttaaaaatatcggcctcccctctaggggggcccccttttaccaaaaaaaagtgggtttcgcgaaaacctggggcccccccaagggaattttttaaaagcggcccccccgnnnnnnnnnnnnnnnnnnnnnnnnnnnnnnnnnnnnnnnnnggnggngggggngggggnngggngnngnnngganattctcctcaaacttactgttctttttctcaggtagggaacataagcaacaaactgactttctatataaataaggggcgaggtgacagtgtatgaatgcttttagaaaaaaagcaaatttcattttccatcatgttttgaaggatactggcttaattcagttattattctcactgttggtttacataataaacatataaaatgtattgcaaatacaaattattttcattccaatggagaagaaaattacaggctcaaaaatcaagtttaatatcaaaagaagttacacataaaggtttttacatttccgaaaatctgatagttaaaatatcccgtctggtgttgattgtgatacacttaagtgaacccctgaaaacctttattttgaaattgaagtttttgctcagaaactgggcagaacttttcacattctgacagaagataaaacttaagtctaaaaaatattcgataacttttttctcaaaaacattaagtactttagaatataaagcagaaactcttaccaagcatgtgtacccatcagccacacctcctgtctttgggggaatttggttacttggagctctgtgggtgctatatgaatcctagagacagcaaacttctgctgtacagctaacttacaagggcctgaacccggctgatggcagcaagcctgctacagtccagaagagtgcgacttcttatatttacatatgaacgcatctgtctttccaagagctaactttgtagcattccacatcccaagaattccggacc

SEQ ID NO: 368884 - DNA, 1126 bp, Homo Sapiens
  misc_feature (701)..(715): n is a, c, g, or t
gggtccggaattcccgggatgaacctgccagcagtccatcagtcacagtctcaaatgagtggcatcaaggtggagcccactgaggtgaaggaaggagctgtgagggacacctgcatcctgctgcagaaatgtctgccccccgccttgtcccaccgcagctctatctcacagttggagaagcagaagcaaagcaacctgtcctggaccatgcagcctggtcctctgtttccagagccagaggtctttgtgctctgaaacaaagacagtgaccccattaacccactggcacttactgtgtgccaggcactcagcctgtgttgtctcattgcagcacagagcagccctgggaatggaagcagtgtcatcattcccatttttcaggtgaggcacaggctcagaaaggtcaagaaacttgctcacggtctcacagctggtgagtaggttgtcagactccaaagatgtgtgctgctaaccctgcccaaagggacttcatcctcctccctccttcccaggcagttctcccaaccacccaccaacaggcaacgtaggtgtgattgccttcaaagttttctacttgccttcaagcttgaagcactggagactgagggaagagagcactggaagtggaggaagaaaaaagagctgttccctccaaggttgttcccttgggcctgactcgactggaagaagagggtgtatannnnnnnnnnnnnnnaaatgactttgtgaccatgaaactgagttaatactcttctggctttgcctgttccttcttgtacatcacctacaggaataacccattaatgttttagagggcgagcaacattagcaaatagccttggctcaaggaccatacaatttaaaaaagactgcgtgccctacccccattaaaaatgccgacaggcccttgaccaatccctatctccctaagggaataacccaccttgcgccactttttttctcacatcctcaaccgtctttttattccttatccaaaaggcgctataccacccgtttacacgaactattcctcctgactctacgcacccccgataatacacacaacaaaaggcgctttacgctgtcgctgtccaacggatccaccctaccgcgcgaaaacgaaccc

SEQ ID NO: 368885 - DNA, 855 bp, Homo Sapiens
  misc_feature (591)..(591): n is a, c, g, or t
  misc_feature (655)..(663): n is a, c, g, or t
ggggaccacttctctgggacacattgccttctgttttctccagcatgcgcttgctccagctcctgttcagggccagccctgccaccctgctcctggttctctgcctgcagttgggggccaacaaagctcaggacaacactcggaagatcataataaagaattttgacattcccaagtcagtacgtccaaatgacgaagtcactgcagtgcttgcagttcaaacagaattgaaagaatgcatggtggttaaaacttacctcattagcagcatccctctacaaggtgcatttaactataagtatactgcctgcctatgtgacgacaatccaaaaaccttctactgggacttttacaccaacagaactgtgcaaattgcagccgtcgttgatgttattcgggaattaggcatctgccctgatgatgctgctgtaatccccatcaaaaacaaccggttttatactattgaaatcctaaaggtagaataatggaagccctgtctgtttgccacacccaggtgatttcctctaaagaaacttggctggaatttctgctgtggtctataaaataaacttcttaacatgcttctcccgngaaaacaagcgacgccgcgctaacacataggcacgagaccccgaacaccccaagcgacacaatnnnnnnnnnacgcatacgagaagcaaacagaaaactttggtcggacccctctcggcccccaaaaaaactttctttaaaaccaattccgttttgggccgccccggcccccacctaaggaaaggggaaacagggcccattaacggtgttccacaagaaaaaaccctgggctaatgaaccaagggcgtttgaatttctcccccc

SEQ ID NO: 368886 - DNA, 566 bp, Homo Sapiens; identical to SEQ ID NO: 178127
  misc_feature (49)..(163): n is a, c, g, or t
  misc_feature (171)..(205): n is a, c, g, or t
  misc_feature (275)..(287): n is a, c, g, or t
  misc_feature (319)..(423): n is a, c, g, or t

SEQ ID NO: 368887 - DNA, 883 bp, Homo Sapiens
  misc_feature (632)..(737): n is a, c, g, or t
  misc_feature (745)..(748): n is a, c, g, or t
  misc_feature (750)..(751): n is a, c, g, or t
  misc_feature (795)..(807): n is a, c, g, or t
agtgatactatcccaatacactgctggagaaatcagaatttggagaaataagttgtccaaggcaagaagatagtaaattataagtacaagtgtaatatggacagtatctaacttgaaaagatttcaggcgaaaagaatctggggtttgccagtcagttgctcaaaaggtcaatgaaaaccaaatagtgaagctatcagagaagctaataaattatagactgcttgaaccagttgtgtccagattaagggagataatagctttcccaccctactttgtgcaggtcatacctccccaaagtgtttacctaatccagtaggttcacaaactcttggtcattatagtatatgcctaaaatgtatgcacttaggaatgctaaaaatttaaatatggtctaaagcaaataaaagcaaagaggaaaaactttggacatcgtaaagactagaatagtcttttaaaaagaaagccagtatattggtttgaaatatagagatgtgtcccaatttcaagtattttaattgcaccttaatgaaattatctattttctatagattttagtactattgaatgtattactttactgttacctgaatttattataaagtgtttttgaataaataattctaaaagcatnnnnnnnnnnnnnnnnnnnnnnnnnnnnnnnnnnnnnnnnnnnnnnnnnnnnnnnnnnnnnnnnnnnnnnnnnnnnnnnnnnnnnnnnnnnnnnnnnnnnnnnnnngaaacacnnnncnntgggggggcccccccggcccccaaaaaatttttaaaaccctttnnnnnnnnnnnnncccccaagggaaagggaaccggggtttattggtttcctaaaggaaccgggccaaggcaaaggggttggattccccc

SEQ ID NO: 368888 - DNA, 750 bp, Homo Sapiens; identical to SEQ ID NO: 6953
  misc_feature (568)..(568): n is a, c, g, or t
  misc_feature (595)..(595): n is a, c, g, or t
  misc_feature (597)..(666): n is a, c, g, or t

SEQ ID NO: 368889 - DNA, 1111 bp, Homo Sapiens
  misc_feature (869)..(924): n is a, c, g, or t
  misc_feature (997)..(1052): n is a, c, g, or t
gctgggtggcgaattcggcacgagggcgctgcctggcgcgcgggcggctggaggcacggcgctgggcggcgccgaggccctggggccgccggagccagcgggagccagtccccgtcttcgcccctcgccccccaccgtgtcgccggccttggtccctgcggcgcggacgtccggcgcgggagagaaaggtcccgaagatggcatattcataaagacatcttctgatgattgtgaacatctttacctctgggtgccaggccgggccagtgacttcgtgttgagctgaaggaacttgtctaccgcttccctgaaaacctttctttcctaattcatgagccagcaagatgcggtcgctgcactttcagagcgccttctcgtagctgcgtacaaaggccaaacagagaatgtggttcagctcatcaacaagggcgccagggtagcggttaccaagcatggccggactcccctgcatcttgctgccaagtaagggccatcttcctgtggtccagatcttgctgaaggctggctgcgaccttgatgtccaggatgatggggaccagaccgccttgcaccgggccacagtggtggggaacacggagatcatcgcggcgctcatccacggaaggggtgtgccctgggacagacaagacaaggatgggaataccgccttgcatgaagcatcctggcatggtttcagccagtcagccaagctgctcgctaaagcaggagcccacgtggcttgccaagaacaaggcgggggaaaaccagctctggcccctgccctgccccaaacagccacttcccagagcacgcggcgtcctccctgctgggcccgcgtccccccgcctgaccctcaaaacaagtgccgnnnnnnnnnnnnnnnnnnnnnnnnnnnnnnnnnnnnnnnnnnnnnnnnnnnnnnnntctccggccgctctccgcccggtcccccggcttcgtcgcccgccacctcatctgggccggatgcgccctaccnnnnnnnnnnnnnnnnnnnnnnnnnnnnnnnnnnnnnnnnnnnnnnnnnnnnnnnntaacgccgctccgttccaccgccccctgcctctcccacgtcgccccattctcttttccc

SEQ ID NO: 368890 - DNA, 371 bp, Homo Sapiens
gggggtaaaaggagagattgccatacttagactcactgtgagtctccccggccatttcacgaggagaccacagtgctgccaccagtgcctaaacaggtggctggcattcgagacttcctcctgttccctgggtcagaggatagcggtttccatcataaaccaagatgatgagttcagcctttatccctcgtggttccgctagatgtaacttataggagttaacatttgaggactttgttctgcatcagatcttactatttgaatgtttactgttggattttgggcatcttattactgttactcaaaaacattgactctgcatcaagaaagaaacaagaaagcaataaaacaagaaataattcatgctcacg

SEQ ID NO: 368891 - DNA, 745 bp, Homo Sapiens; identical to SEQ ID NO: 97918
  misc_feature (343)..(347): n is a, c, g, or t
  misc_feature (349)..(350): n is a, c, g, or t
  misc_feature (354)..(402): n is a, c, g, or t
  misc_feature (405)..(485): n is a, c, g, or t
  misc_feature (488)..(489): n is a, c, g, or t
  misc_feature (494)..(588): n is a, c, g, or t

SEQ ID NO: 368892 - DNA, 820 bp, Homo Sapiens
  misc_feature (587)..(594): n is a, c, g, or t
  misc_feature (596)..(630): n is a, c, g, or t
  misc_feature (632)..(645): n is a, c, g, or t
  misc_feature (648)..(649): n is a, c, g, or t
  misc_feature (651)..(660): n is a, c, g, or t
  misc_feature (662)..(672): n is a, c, g, or t
ggtacttgtctaaaacttgatgatactgtctatctgagggacatagccttgtcactcccacagctgccgcgggagctgccatcgtcacatacaaatgcaaaggtggcagaggtgctgagcagccttctgggaggtgaaggacacttctcaaaggatgtgcacttgccacacaattatcatattgattttgaaatcagaatggacactaacaggaatcaagtgctaccactttctgatgtggatacaacttctgctacagatattcaaagagtagctgtgctatgtgtttccagatctgcttattgtttgggttcaagccaccccagaggattccttgctatgaaaatgcggcatttgaatgcaatgggttttcatgtgatcttggtcaataactgggagatggacaaactagagatggaagatgcagtcacatttttgaagactaaaatctattcagtagaagctcttcctgttgctgctgtaaatgtgcaaagcacacaataaagtgaaaatcaaccttttcatattaggagacatgcatttgtaaaaattaataaagatgacaagtcagttgtcaatggaattgnnnnnnnncnnnnnnnnnnnnnnnnnnnnnnnnnnnnnnnnnnncnnnnnnnnnnnnnnttnncnnnnnnnnnncnnnnnnnnnnnaaaaacatgttcggccgcctccgcccctcaaaaagttttcaaaaacccattctttgggggcggcgggcccaaaaaggaaagggaacagggccaatagttgttccccaggaaaaccctgggccaggaccaagggttggggattcccccc

SEQ ID NO: 368893 - DNA, 656 bp, Homo Sapiens
  misc_feature (506)..(506): n is a, c, g, or t
ggcgaactgtccctcagtgaagttcgggaatgtcttaaacttgaccaggatcataaaaggtgttttgcacactataaacaagtaaagaaacttaataagctgattgagtcagctgaagagctcatcagagatggcagatacacagatgctaccagcaaatatgaatctgtcatgaaaacagagccaagcattgctgaatatacagttcgttcaaaggagaggatttgccactgcttttctaaggacgagaagcctgttgaagctattagggtttgttctgaagttttacagatggaacctgacaatgtgaatgccctgaaagatcgagcagaggcctatttgatagaggaaatgtatgatgaagctattcaggattatgaaactgctcaggaacacaatgaaaatgatcagcagattcgagaaggtctagagaaagcacaaagattattgaaacagtcgcagaaacgagattattataaaatcttgggagtaaaaagaaatgccanaaagcaagaaattattaaagcataccgaaaattagcactgcagtggcacccagataacttccagagtgaagaagaaagaaaaagctgagaaaaagtcattgattagcaactgctaaagaagtgctctctgaccagaaatgagaaaagagg

SEQ ID NO: 368894 - DNA, 655 bp, Homo Sapiens
tcagctgggcgattcactgggggcctatggaggtcgctgtagacttggggtgcagcacgggcggggcaaggggacgcgaggttgcccttggccccaggggagaggggcccctgggaggccgtgtggaggatttgtctgcagcgattaggactctgctgatgaatgatttggatgcctttgggcaatagccctctggaacaagacaattcatgtgagataagaaagaagagcccacaagaccaaggatgtattctcagtttacagaccactgaccagaggccactccagggtgtcaggactaagagaagtcacaaaacagcagatttcccaagagcagcggaaaatgatccagtcacaggacctaagtgtgaaacaggctacctcatcatggaccccaataggtcagactttgacgggccgtgacaataaccaggtaaatcgtctgaggcaacagcagaccatggctatgacgccactccaagcaggatggtcgggcccggaggactgaacatggcctcagcagtcacctcggcagttgccatgccaggaaagacgccccacagcccactggagagacagaagaatctgtgtgaatcttctttacctggcctgaggcatcaattcaggcacaggcagaacactggccagggaaact

SEQ ID NO: 368895 - DNA, 1058 bp, Homo Sapiens
  misc_feature (77)..(77): n is a, c, g, or t
  misc_feature (200)..(241): n is a, c, g, or t
  misc_feature (389)..(397): n is a, c, g, or t
  misc_feature (601)..(637): n is a, c, g, or t
  misc_feature (641)..(754): n is a, c, g, or t
  misc_feature (893)..(893): n is a, c, g, or t
ggagagagcgctcttaattatggggggttgccaaacccaattatgtggcaaaataggtttccccaaggccgcggggnggtgtaattttagattatccgaaaactccctccgtggagcgccccctcttggaataaggacccccagtgaaaggcccttccgggaacctccccttctgggattgtgtttcaagaggccgttcnnnnnnnnnnnnnnnnnnnnnnnnnnnnnnnnnnnnnnnnnntatcccaagcccccttgtccatgtccccgggattttccttgagaaaaccaggctaaggccccatgttccacctttccctacttgggccccgcgccccccaaacggaatgttctaggaaagcttttttaggggccgagggcggccgccnnnnnnnnngggagggaggggaagggggggtccctatttttatgggtctttgttgttgtggtttttaaatcaacaggtaacctaagacaagcattaatttgctagaccttcagccactcttctttagcaaggccaaaggtcatgtgtgccttacactgtaactttactgtcttcattgaatagtcacattcagagctgatcaggaatatgaannnnnnnnnnnnnnnnnnnnnnnnnnnnnnnnnnnnnaagnnnnnnnnnnnnnnnnnnnnnnnnnnnnnnnnnnnnnnnnnnnnnnnnnnnnnnnnnnnnnnnnnnnnnnnnnnnnnnnnnnnnnnnnnnnnnnnnnnnnnnnnnnnnnnnnnncggaacatgcattttaacagtccattgcttcctacctgtctctgtgatcagcctgtgcacttttccagcacggtgctcctcatctagggcagctggggctgcgagttttggcaagaaaaacttgtattccatcatgganagaaggttaaatttgtgtaagcaaatagactccagttcactgccaggtctagaagcctcatccactggcccgcgtgttcctctctgcatgccattttattctccagtgtccctctgccatgctatgtatgaaccccacttaagtttctttttcttcttccttttt

SEQ ID NO: 368896 - DNA, 654 bp, Homo Sapiens
  misc_feature (101)..(270): n is a, c, g, or t
  misc_feature (406)..(544): n is a, c, g, or t
  misc_feature (551)..(610): n is a, c, g, or t
ggacctgccgctctatcctgagccaagcataccttgcagtgacacccaaagtgctggaattacatgggtgagctaccgtgtccagcctcaatttaaaaatnnnnnnnnnnnnnnnnnnnnnnnnnnnnnnnnnnnnnnnnnnnnnnnnnnnnnnnnnnnnnnnnnnnnnnnnnnnnnnnnnnnnnnnnnnnnnnnnnnnnnnnnnnnnnnnnnnnnnnnnnnnnnnnnnnnnnnnnnnnnnnnnnnnnnnnnnnnnnnnnnnnnnnnnnncccacaccactacctcactgatgccataatgtttaaccatgcctttcacttaaagaattacaggaaataagccaggtgtgtggctcgtgcctgtaatcccaaagtgctcccaaagttgcaggcgtgagccacctcnnnnnnnnnnnnnnnnnnnnnnnnnnnnnnnnnnnnnnnnnnnnnnnnnnnnnnnnnnnnnnnnnnnnnnnnnnnnnnnnnnnnnnnnnnnnnnnnnnnnnnnnnnnnnnnnnnnnnnnnnnnnnnnnnnnnnnnnnnnagaatgnnnnnnnnnnnnnnnnnnnnnnnnnnnnnnnnnnnnnnnnnnnnnnnnnnnnnnnnnnnntacaatagatattggggaagttggggccctaatggggagggtct

SEQ ID NO: 368897 - DNA, 699 bp, Homo Sapiens; identical to SEQ ID NO: 2868

SEQ ID NO: 368898 - DNA, 776 bp, Homo Sapiens
  misc_feature (566)..(584): n is a, c, g, or t
aaccctagcgatgacgtaagtacgtacgaacatagcagcacatactctgcagtcaccaccagattcttagtggtgttggcagttccattaggccggggaaaagggctcagcgctcccgatgcgggattcattcgtgtgatgggagagtttccaggtcccagagttaagtctgacacattctcccgtccactgctgctgtccacatgctggtggttttgaagaggtcctgaactagagccggggacagttgtggactgattcccgtgactgtgcgttccacttccagataatttgggcttcttgaccccacaacagcctgctgccaacttgggctcgagtggaggaacacaacgtctttttcccatcctgattcagtgctcaaggtctggaatgctgcagaacctgaaagcagaaagtttgtattgccagaggaacagctacaacagaggaggggagctattttgtctctggaatgaattttcttccttccgattccattccttcttcctgtaccttttctcctggcccagctctttgctacaataaatgctgaatgaatcaaaaannnnnnnnnnnnnnnnnnnaaaaaacatggtcggccggcctcggcccctcgagaaagcttttctaggaccattttcgtttgggggccgcggggccccaggtagggtaaaggtggaacatggggtccattagcgtggttttccctaagggaagaaatccctggggccatgggaacttaggggccctttgggaatttccttcccccccaaatt

SEQ ID NO: 368899 - DNA, 896 bp, Homo Sapiens
gtcgcaagacctgagcatggcggccaccaggtgcctgcgctggggcctgagccgagccggagtctggctgctcccaccgcccgcacggtgcccacgccgggcgctgcacaagcagaaagacggcactgagttcaagagcacctacagcctggacaagctctaccccgaatctcagggctcgaacaccgcctggagggtcccgaatggtgcaaagcaagccgacagtgacatccctccagatcgcttgacaatatcttattgtcggagtagtggtcctggggggcagaatgtgaacaaagtgaattccaaggcagaagtcaggttccatttggcaactgccgagtggatcgcggagcccgtgcggcagaagatagccatcacgcataaaaacaagatcaacaggttaggagagttgatcctcacctctgagagcagccgctatcagttccggaatctggcagattgcctgcagaaaattcgagacatgatcactgaggccagccagacaccgaaggagccaacaaaagaagatgttaaacttcatagaatcaggatagaaaacatgaatcgggaaaggctgagacaaaagagaattcattctgctgtaaagacaagcaggagggtcgacatggactgaaatcaccctctgcagctgggagggctcttctgggcgtccgggcagctgcagctgagaggactttcacaccataaggagatttctgtttttctttttggctgttaatgcttgtctataacattggagccatcacaagaatgttcatttggaatgaaggctgcaggcactggttgcagacgtctttataggcagtcaccatgttgtcaaaccttaataatgcacctcatgtattagtcacaataaaaatcagaactcaaaa

SEQ ID NO: 368900 - DNA, 819 bp, Homo Sapiens
  misc_feature (797)..(797): n is a, c, g, or t
ggggggagggagagccatcaccttgataatgggatgaatggaaggaggcttaggactttccactcctgggctgagagaggaagagctgcaacggaattaggaagaccaagacacagatcacccggggcttacttagcctacagatgtcctacgggaacgtgggctggcccagcatagggctagcaaatttgacttggatgattgtttttgctcaaggcaaccagaggaaacttgcatacagagacagatatactgggagaaatgactttgaaaacctggctctaaggtgggatcactaagggatggggcagtctctgcccaaacataaagagaactctggggagcctgagccacaaaaatgttcctttattttatgtaaaccctcaagggttatagactgccatgctagacaagcttgtccatgtaatattcccatgtttttaccctgcccctgccttgattagactcctagcacctggctagtttctaacatgttttgtgcagcacagtttttaataaatgcttgttacattccccgaaaccacaaagcacgaaaatatatccttggcgggccgccctcggcccctcgaaaagtcttttcagaaccattttctttgggcgcgcggggcccccgtagggtaacgggaacatgggccattagcgttggttcctaaagggaaattccggggaccaggaaccaaggagcttggggaacttccctccacccatataacaaaacgccccccggggcgggcaccgccccagagcgggtttctgtgagaaccaaaattccccanaagggggtgggttctccgggta

SEQ ID NO: 368901 - DNA, 550 bp, Homo Sapiens; identical to SEQ ID NO: 2915
  misc_feature (442)..(451): n is a, c, g, or t

SEQ ID NO: 368902 - DNA, 815 bp, Homo Sapiens
gggattcttcccctctctacaaccctctctcctcagcgcttcttctttcttggtttgatcctgactgctgtcatggcgtgccctctggagaaggccctggatgtgatggtgtccaccttccacaagtactcgggcaaagagggtgacaagttcaagctcaacaagtcagaactaaaggagctgctgacccgggagctgcccagcttcttggggaaaaggacagatgaagctgctttccagaagctgatgagcaacttggacagcaacagggacaacgaggtggacttccaagagtactgtgtcttcctgtcctgcatcgccatgatgtgtaacgaattctttgaaggcttcccagataagcagcccaggaaagaaatgaaaactcctctgatgtggttggggggtctgccagctggggccctccctgtctccagggggcactattttctttccaccctggctccttcagacgcgtgcttgatgctgagcaagtccactagacattcgtgtaagtttaacacgcagtcgagcgccactcaatgaaaaagcaggccgggccgctcgcccctccaaaacctttccacaccacttcgttgccggctgggcccatgaggtaggcccacatggtccatagccgatccgtgaagacccggatcgcggtgtggctgactcgccacaagacaaccgcccgtgggacggaggagtggatgatgcaagagaggtcccggactaccaaagtccgcgcgcaacgcacgcgcgctgatcggccctcgcctaactgccacccccggcctcgagcccctagatgccattag

SEQ ID NO: 368903 - DNA, 320 bp, Homo Sapiens
  misc_feature (239)..(239): n is a, c, g, or t
  misc_feature (283)..(283): n is a, c, g, or t
gtgaagacatatcaaatcacaaagtcattgtcattagagtgtacttgattactgggcatccttgtaatataatttcataccactgacacattatacttgtaagagaacatctttcccagagtgcctcagaccttattgctttaaaatataataatgttttcattacttttattatttgaatgatttagtaaagttgactgaatctggtatagactttgggagtatgtgtgtgaagtttntatcaaactgtaatatttgtgaatggaatgccttgcaatatgantgttaatataatgtgtaaagggagattaaaaagtttg

SEQ ID NO: 368904 - DNA, 833 bp, Homo Sapiens; identical to SEQ ID NO: 178142
  misc_feature (777)..(777): n is a, c, g, or t
  misc_feature (779)..(779): n is a, c, g, or t
  misc_feature (795)..(795): n is a, c, g, or t

SEQ ID NO: 368905 - DNA, 1568 bp, Homo Sapiens
  misc_feature (1193)..(1193): n is a, c, g, or t
tatcacaagctttcagtctcttagtatttgcctcacaatgctcctagcgtgcaggatcgatcagtgcctttaatgttaattggagtgtttctacagactcaagcaatgatatgagtatagttcgatgtgccaatcagtaatggcttcagtgaggaaaatgtcatatcctagacccatcacttcctaggtgtttccagacagtttgccatcatcactcccttggggtgcgagttacaaagtctactgggctcagaacgtgcaattgaggcatccttcatctacatgtgttgctagtgcctatcatcgaggtgatggcacgagggaccatcagcttcccatgctaatacaagatcccatggctatcagaaccccagggcttcggacgctcagggctattccctgggtgcctcagatcggggtggacaacatccgtcagatccgggagaccatgggcagctgcttcacagtctcctaactcagaacgggagaggagagaacacgtcttacaggatggaagagaaaagtgatttcatgctagaaaaattggaaactaaaagtgtgtagctaggttatttcggagtgttatttatcttcccacttgctctctgtttgtatttttgttttgtttttgattcttgagactgtgaggacttggttgacttctctgcccttaaagtaaatattagtgaaattggttccatcagagataacctcgagttcttggtgtagaaattatgtgaataaagttgctcccttagaaaaaaagaaaatccccccagcatcggccaactcgcagcgcgctcagacctgaaaccacccaccccgcctgtctcccccctgttcttgccccccccgctcgcgggatcttagggaggaccgctccacaccccaccccttctgccgccacccgccccgcagtgagcgtagcctcgcccgccgggcccataacccagccctcctaacggcgcatcgccgaggtgtgaggcactgttgctgttgggcgcgtgcgccccccggcgccaattcaagatgaacgaagggctagattcacaatgagaacagcgcgcctggtgacagggagacgccccccttccgcgctcggcgcgttgctgttgcgccctagagtgtttacctagccgacggtgcgccggcgccgactattatgctgtgccgagccttcttacgcctggttnatggcaccagccaatgtgtaaaagggacggagagcggacgccaggacacgctcggccgcgagggtcaacacgtccggataatcaccatcatccctctctatgtccgcaagcacactggcgtcagacatacagagccttcctacgacacttaatatggcgcggcgagccgcacgccccctcgctctgtcaccccgcgccgcttatgtcggccgcgcccgctcccgcccgcgcggcgatactgcaacccgagctcacatctggccagggcactttgtaggcgaccacatcgctcctctccccgcgcgccgtggtggagaccactgatcgcgcgccctcagcaacggaacgagcgccgcgtggcacgtcgtcgccgcc

SEQ ID NO: 368906 - DNA, 960 bp, Homo Sapiens; identical to SEQ ID NO: 2949
  misc_feature (406)..(406): n is a, c, g, or t
  misc_feature (408)..(408): n is a, c, g, or t
  misc_feature (437)..(451): n is a, c, g, or t
  misc_feature (478)..(478): n is a, c, g, or t
  misc_feature (508)..(517): n is a, c, g, or t

SEQ ID NO: 368907 - DNA, 692 bp, Homo Sapiens; identical to SEQ ID NO: 2962
  misc_feature (498)..(498): n is a, c, g, or t
  misc_feature (500)..(500): n is a, c, g, or t
  misc_feature (502)..(502): n is a, c, g, or t
  misc_feature (507)..(507): n is a, c, g, or t
  misc_feature (515)..(515): n is a, c, g, or t
  misc_feature (517)..(521): n is a, c, g, or t

SEQ ID NO: 368908 - DNA, 726 bp, Homo Sapiens
gggactcgctgcctcggcagcgcgctgctcttctaagatggctgccgctaccggtgcggtggcagcctcggccgcctcgggtcaggcggaaggtaaaaagatcaccgatctgcgggtcatcgatctgaagtccgagctgaagcggcggaacttagacatcaccggagtcaagaccgtgctcatctcccgactcaagcaggctattgaagaggaaggaggcgatccagataatattgaattaactgtttcaactgatactccaaacaagaaaccaactaaaggcaaaggtaaaaaacatgaagcagatgagttgagtggagatgcttctgtggaagatgatgcttttatcaaggactgtgaattggagaatcaagaggcacatgagcaagatggaaatgatgaactaaaggactctgaagaatttggtgaaaatgaagaagaaaatgtgcattccaaggagttactctctgcagaagaaaacaagagagctcatgaattaatagaggcagaaggaatagaagatatagaaaaagaggacatcgaaagtcaggaaattgaagctcaagaaggtgaagatgatacctttctaacagcccaagatggtgacggaagaagaaaatgagaaagattctgaagcaagtaagccaaaagatgggcaggacgccattgcacagagcccggagaaggaaagcaaggattatgagatgaatgcgaaccataaagatg

SEQ ID NO: 368909 - DNA, 209 bp, Homo Sapiens
ggtcagattctttgcctcattgattatggcaccaggaagtctgaaggtttccacattcgatgatgtcaacctaaaccagcagccatcccgcttgtccctcttaggcatttcaggcttcctttgggatttcaggtgtcccatgatcttgatgtgctgctaggctggagcacacactggccattactgaacacagccatattagggaaagc

SEQ ID NO: 368910 - DNA, 1121 bp, Homo Sapiens
  misc_feature (128)..(128): n is a, c, g, or t
  misc_feature (904)..(904): n is a, c, g, or t
  misc_feature (947)..(947): n is a, c, g, or t
aaaattgataagcgaagatttcgtgcgcctggcgggggaccgccgcggtgtgcgtacagggaggtcccaagcaaggagggcccgcttccggaagcgccgcactgtgggcggacgtttggtccgggganaggggtagcgtgtgacccagcgagggggttcttttgtaacgaggggagaagatgcccaaggcgccgaggtcaaggagccacgggttcgcgctgaggaaggccagctatggaccccggtggccgtttacctctgtgggcgcgggttgccccagacgaaattgttcggggaaagctttttgaaggggcggaggcgggccgacaggtagcgcggtcgaccgccgggcgcctcgcccgagttaaggggcttttctattggccacagaaaggcacgacctaatcatgcggagtctaaaagcgtggatcttgagagtacagcttcacatcagagcctctgcagccatggacagcggtgacactgtaaaacagtgtccaggagagggtgagcccaggcaaagcttatacaaagaagcctgcagtagacaatataaaccaaacagcataaaaaatgccatacgctatcgcttccaaataaaagctaaatattacagaaacctcacagtgttggaaaaagcaagtttaatttaaaatatagtcactccttccctatcagggtgagccattttttgtctgaatttcctccatgtctcagtgctgcctggcagggcctatgggagagttcatctcaaaagaggtcaacagcaaatgctacagatctgtgtgggaaatgtggctcatcaacattgctaaagctataaccctcattctttagcctggctttccccacttcccactcctccccgaacgcccttccacatctactcccttcaagtgacaanctgtacttctacctgaattcaaacattaatatgatatactcangtcaaaagatgagcattcatagtgaacaggtttgaagtgagggctcactgccaagtgacccccagccaaccaaaagttaggggttttgcatttccccttttccccccagcaaaatcttaattgaaaaaacttaaagaatggaaatgggggcccctgaatggggggacaaaaggg

SEQ ID NO: 368911 - DNA, 825 bp, Homo Sapiens; identical to SEQ ID NO: 97859
  misc_feature (499)..(499): n is a, c, g, or t
  misc_feature (578)..(593): n is a, c, g, or t

SEQ ID NO: 368912 - DNA, 797 bp, Homo Sapiens; identical to SEQ ID NO: 3514
  misc_feature (86)..(86): n is a, c, g, or t

SEQ ID NO: 368913 - DNA, 1042 bp, Homo Sapiens
  misc_feature (57)..(127): n is a, c, g, or t
  misc_feature (135)..(135): n is a, c, g, or t
  misc_feature (139)..(277): n is a, c, g, or t
  misc_feature (279)..(280): n is a, c, g, or t
ggggggaaaacacccctttttttggccggggtttttttgaaaaaacatgttgccccnnnnnnnnnnnnnnnnnnnnnnnnnnnnnnnnnnnnnnnnnnnnnnnnnnnnnnnnnnnnnnnnnnnnnnnccaacaanttgnnnnnnnnnnnnnnnnnnnnnnnnnnnnnnnnnnnnnnnnnnnnnnnnnnnnnnnnnnnnnnnnnnnnnnnnnnnnnnnnnnnnnnnnnnnnnnnnnnnnnnnnnnnnnnnnnnnnnnnnnnnnnnnnnnnnnnnnnnnanngaaaccacaagcccagtttatttatcaatgatgtcagtactcaaagtggtccagttaaaatctacttcctcttgaaaaacaaaaatacactgaaggaagatgcaaagagctaaaagtggtatcatgattccacagcagtgattgtaagacagtgagccacagggaaatgggaaaacgtgaaaagaaacaagtatcaggaccaaattagagaagatatgagtagggccatcactagaggtgaaaatggagaaacctaagaaaaccagtgttggcatgaattatgcaagtggaaaatacatctgtagagggacgagatagaaggacctagatctaactccaagtgcttgattggagaagagagggagaaagagaatttatagaattaaatgtatagaagcctaaaaaataagattatcagcctagtcatgtaaagtctagaagttcctttatttgctcatcacctttcctttttctataagactattaagcagaaggtcagtaacagaaaatttaccctttcctctcctctcttggtttaaattttataaggaatctgaagaggctatggatcagttggcattacagtgggaagagcttattgaagcaaggttgacaataggtcttgtcattctgctccctgaaaatgcccttcgacaactgtgtcaggcagaaagcacacacaaagtgctcaggatggaacttgtaccccatggcactgatacaacggccagtgatgggctgcccacacccatggcagagccc

SEQ ID NO: 368914 - DNA, 1342 bp, Homo Sapiens
atcaggccaaatcggccgagctcgaattcgtcgagagcggggaggtccggtccgtctcctagtgtccggaatcggctgtcagcctccctggctgttagtaccttctttcccggagtcctggtccacgagttggatttactgctgtcgcgggtgggcctcacgccattccctgtccctcggccccctgagtgagtccggtctcccggcgaaagtgagcgaggtttgcccggagcgcgcacgaggggaaaatgcctaaaaaaaagactggtgcgaggaagaaggctgagaaccgccgagaacgtgaaaaacaactaagagcatcaagaagcactatagatttagctaaacatccatgtaatgcctcaatggaatgtgacaagtgtcagaggcggcagaagaatagagcattttgctacttttgtaattctgtacagaagttaccaatttgtgcacagtgtgggaaaacaaagtgcatgatgaagtcttcagactgtgtcataaagcatgctggtgtatacagtactggccttgcaatggtgggtgcaatatgtgacttctgtgaagcttgggtttgccatggtaggaaatgtctcagtacacatgcttgtgcctgccctcttaccgatgctgagtgtgttgaatgtgaacgaggcgtgtgggaccatggaggcagaatattcagttgttctttttgccataactttctctgtgaagatgatcaatttgagcatcaagccagctgccaggttttagaggcagaaacatttaaatgtgtttcatgcaatcggcttggtcagcactcatgtctccgttgtaaggcttgtttctgtgatgatcatacaaggagcaaagtgtttaagcaagaaaaaggaaaacagcctccttgtcctaaatgtgggcatgaaactcaggagactaaggaccttagcatgtcaacacgctccctgaaatttggcaggcagactggaggtgaagagggagatggagcttctgggtatgatgcttattggaagaacctttcatctgataagtatggtgataccagctaccacgatgaggaggaggatgagtatgaagcaaaggatgatgaagaggaagaagatgaaggcagaaaggattcagatactgagtcatcagatttgtttactaatttgaaatttaggaagggacctatgctaagtggctattgctcacctatggagggaaccaggaagaaacttagggggagcctgcgctctgggttggcccggttgtggttggagaaaggaagccaggggagttgaaattggttgtgttgcctctttggatagaaattttgtggggggtggggtttgggtttcat

SEQ ID NO: 368915 - DNA, 1004 bp, Homo Sapiens
  misc_feature (529)..(529): n is a, c, g, or t
ggtggtctggggtggggaggctgctgctgtgaccttaggggtagggttggggatcaagggaggctttgtcaagggagagtgaccatgttgctccctacatccatgcaataggacccagcctgcacctcctaggcctacactggggaaagcctgacagaaatcagtacctcctaacggggtctgccaggttcaccaaggcatgggcacagaggaatatgacagttttgaggcaggcaggaagggcccagcctgcagggtaagacattcattctttgagttaaaggccatattcacttgatgatttctacacacactagaattgtgagagtgtccttgaaggagatcacaaagtaacctggtgactgtggcacagggtccgtggattccatctctcccaggcactgagggcgcagaggcgaaggagcaagccctgcatattggcagggctgtgaccatcgcacttagatcagaccccccgacctgtgttgggatgtgagggatgccctcctgccccacccatccacatggnttctgggcagctctgttttattcctgtgccttccctgatggatgagtattaagacagcatgtctggtttttaaacagacattttgggagcttgcacatcctgatgagcagggactcactgtggtggccttagggaattacacgctcactttggtggttctctatgctcggaagcctctgagagtggccttggcagcttaagatggcagaggctttggagtcttcttaggactgtaagtgcccattgaggatgcatttgagttttggaaagtaggcccaagtcaaatctgatggatggattcaagaacatggactaatctgcgttgtcatttttaatcaaaatgtaatggagattgatcatctggtggggttcacaaacttttcatgagagctgtgagttctttttttgagatgcacttttgcacttgttacccactgcactccagcctgggtgacagagtgagattccgtctcaa

SEQ ID NO: 368916 - DNA, 916 bp, Homo Sapiens
  misc_feature (156)..(183): n is a, c, g, or t
  misc_feature (186)..(190): n is a, c, g, or t
  misc_feature (193)..(196): n is a, c, g, or t
  misc_feature (198)..(230): n is a, c, g, or t
  misc_feature (232)..(247): n is a, c, g, or t
  misc_feature (657)..(685): n is a, c, g, or t
  misc_feature (765)..(814): n is a, c, g, or t
gggggggattcccaagcccctttttcttggtccccgggtttttctgggggaacccattttggccaccgtttccctttcccctttggggggccccgcgccccaaacgaaatggtttatgaaaactttttgagggggcgggagggggccgccaagggnnnnnnnnnnnnnnnnnnnnnnnnnnnnggnnnnnttnnnntnnnnnnnnnnnnnnnnnnnnnnnnnnnnnnnnntnnnnnnnnnnnnnnnnaagcttctcaaaacactttttaattctccatttttatcagcctcaccaacaataccccatattggtaaatcatctatgtacatctggtaccagtaatgattgttttatggcatatacaaatgcatctctcttttctttatctaaatcaatttcacagtaagtggctggcatcacatcatcttgaaaatttaatatccagaccactaaattccaattcaaccccttgaagtgcttctcccagagtttcatggtaatgactgatacttttgttttgaccccacacagaatggaagtgaaaagtacttatatgtttcttgacgattatggtagggcccaacagtattcatccataagacaacttcctctttatcttgatacgtgtgttcgtgctcgtccgcccgggtccgggnnnnnnnnnnnnnnnnnnnnnnnnnnnnnggcgcccgccgccacgccaagagcgccaggcagcggcctcatcctccgcgcccctccggcccggagccggctcaccgacnnnnnnnnnnnnnnnnnnnnnnnnnnnnnnnnnnnnnnnnnnnnnnnnnnattcgcatccacggggcgcggacagacgcacggggcccggcccagccgctgcctcctctgccgccgccgtcgccgtcaccgcccgctcctgagcctcccgct

SEQ ID NO: 368917 - DNA, 382 bp, Homo Sapiens
  misc_feature (84)..(134): n is a, c, g, or t
  misc_feature (218)..(246): n is a, c, g, or t
agcgggtgacggcgacggcggcggcagaggaggcagcggctgggccgggccccgtgcgtctgtccgcgccccgtggatgcgaannnnnnnnnnnnnnnnnnnnnnnnnnnnnnnnnnnnnnnnnnnnnnnnnnngtcggtgagcctggctcctgggcctggaggggcgcggaggatgaggccgctgcctggcgctcttggctgtggcggcggccgccnnnnnnnnnnnnnnnnnnnnnnnnnnnnncccggacccgggcggacgagcacgaacacacgtatcaagataaagaggaagttgtcttatggatgaatactgttgggccctaccataatcgtcaagaaacatataagtacttttcacttccattctgtgtggggtc

SEQ ID NO: 368918 - DNA, 607 bp, Homo Sapiens
  misc_feature (163)..(163): n is a, c, g, or t
agttcgacggagactctcgcgtgtctcgcgagagtccaagttaaagaacatggcgacgtctaatctgttaaagaataaaggttctcttcagtttgaagacaaatgggattttatgcgcccgactgttttgaagcttttacgccaggaatctgttacaaaacangcagtggtttgatctgttcggatgtgcatgcagtctgtctttgggatgataaaggcccagcaaaaattcatcaggctttaaaagaagatattcttgagtttattaagcaggcacaggcacgagtactgagccatcaagatgatacggctttgctaaaagcatatatcgttgaatggcgaaagttctttacacaatgtgatattttaccaaaacctttttgtcaactagagattactttaatgggtaaacagggcagcaataaaaaatcaaatgtggaagacagtatggttcgaaagcttatgcttgatacatggaatgagtcaatcttttcaaacataaaaaacagactccaagatagtgcaatgaagctggtacatgctgagagatggggagaagcttttgattctcagctggttatcggagtaagagagtctccgtcgaact

SEQ ID NO: 368919 - DNA, 491 bp, Homo Sapiens; identical to SEQ ID NO: 178169

SEQ ID NO: 368920 - DNA, 311 bp, Homo Sapiens
tacagataaatttgtttttaataaaggagttaattttctttcaatcctatataaaacaatagcaattaaaaacttcatttctgaaagtaaaatatttacatatgaacaagtaactgtgcaaaatttacatgaaaaatggaaagacagggatttcctaaaagacaaaataaaaggtgtaacagttctcaggtgttgataaaaaatactgatcagcgttcagttcacacgcgctcgaattaaagtctaatgtgagaattcacacggagaaagccagagtatttacagtcataaaagtactatcaatagacaat

SEQ ID NO: 368921 - DNA, 377 bp, Homo Sapiens; identical to SEQ ID NO: 4147

SEQ ID NO: 368922 - DNA, 1408 bp, Homo Sapiens
  misc_feature (28)..(28): n is a, c, g, or t
  misc_feature (57)..(57): n is a, c, g, or t
  misc_feature (75)..(75): n is a, c, g, or t
  misc_feature (77)..(77): n is a, c, g, or t
  misc_feature (82)..(82): n is a, c, g, or t
  misc_feature (487)..(602): n is a, c, g, or t
  misc_feature (864)..(874): n is a, c, g, or t
  misc_feature (1235)..(1235): n is a, c, g, or t
gtgagccaccatgcctggcctgcttggncatattttatagtgtgttaattacaaatngtcttcatatgccagaantntaagngccaagtgttatccactttttagatgggaattgcagaagctgcatccaaaagtatgctttgaggtatatatagtgaaacagagcctttctgaagagaattatatcaaactaattacaacccaagaaataatagtatgaagcggatgctgtttggaggacaggaaaatttatcaggaaaattacataatccctctgattccactatccagagatagccattattattaatatttggtatgtacatccttatattatttttttcttatgcatgattttgtatatatggttatttttctttccataaaaatggtattaaactgtatatactgttttgtagcctacatatttcatatagaagtatattgttaacattttccatgtcaataaatattcttctatggcttnnnnnnnnnnnnnnnnnnnnnnnnnnnnnnnnnnnnnnnnnnnnnnnnnnnnnnnnnnnnnnnnnnnnnnnnnnnnnnnnnnnnnnnnnnnnnnnnnnnnnnnnnnnnnnnnnnnntaaccgggcggccaccatcgccccccaaaaaaagtcccaaaacctctccctttcggggcgcggcgcccccaaaaccgacgagagaacttctccttaccttcccctcctaaccggccgcccccggcacacacatctcacgtcgggttctctccttccacaaaaacaaaacccgcctcggcgggcccccccgacttcccctttccatccaactacctcaaatcggagcgtccccacggttatccctcactgcggggctctgttnnnnnnnnnnnggcgatgcctcagggcggcggcgatcgcaaatgcaaaaatttctccccaccgcccccccgtttgtaactcccttgttgcaaaaaacgcggggggggtgcgaagcaaatcgcggtaaaaaatagctgattgtcgcgggggtaactggtgcacaccaccccatggtccccgccgggagggcatccatgcaagaagccacccccccgactttgtccgccccggcgcacgcgactgtcaggagagcggaccttcccgcccctctgcttgacgagagagatatacatcttcttgccgcccgcgtgagaccaacaacaaccgcgcgagccccaaacaacaacgagtgccgtttcccttcgtattggntgcatccgccgctatttagaatctatcacgacctagcgggcgcgacgatcccccctcgccaaattaggtgcgcgtcgcgtacgatattaccaaccatagacccttattgtctccccgattatagcccgcctcctctttatcgcggataacaagagtgcgcacattgcgccctc

SEQ ID NO: 368923 - DNA, 885 bp, Homo Sapiens
  misc_feature (430)..(688): n is a, c, g, or t
  misc_feature (692)..(755): n is a, c, g, or t
  misc_feature (811)..(822): n is a, c, g, or t
aaacggttccttaaaaggccataagggacttgccctcactcccctacagcaaatgacggcatgggcaaagaggggcaacagacccaccctgaagacactcctcatctggttgacttggcagggttaagggaaaaagatgtgatgactaggagctgagagcttagtggttctgccagagctgcagagtctttgttggcctcagggtgggacctctcacatctctgtcagcttttcacagacaccaacctgttatgattcatttcacctgtcctgagcactagcaagaaaaattcgctgtagcttgtgatgtattattctggatttctcaactcattcatttgttcattcattcactataccattactgtctattataaggggggcacaatggtaggtgctgggaataaaaacgatgtttaacgtttcaaannnnnnnnnnnnnnnnnnnnnnnnnnnnnnnnnnnnnnnnnnnnnnnnnnnnnnnnnnnnnnnnnnnnnnnnnnnnnnnnnnnnnnnnnnnnnnnnnnnnnnnnnnnnnnnnnnnnnnnnnnnnnnnnnnnnnnnnnnnnnnnnnnnnnnnnnnnnnnnnnnnnnnnnnnnnnnnnnnnnnnnnnnnnnnnnnnnnnnnnnnnnnnnnnnnnnnnnnnnnnnnnnnnnnnnnnnnnnnnnnnnnnnnnnnnnnnnnnnnaatnnnnnnnnnnnnnnnnnnnnnnnnnnnnnnnnnnnnnnnnnnnnnnnnnnnnnnnnnnnnnnnncaccccctctctttcctatcaatttccatccccctttttcccgtttcctcgttttnnnnnnnnnnnnaatccaaagctttccgtcggcacacaagccgcgtgcttctcacccccagctcgggggtgcccc

SEQ ID NO: 368924 - DNA, 839 bp, Homo Sapiens
  misc_feature (475)..(485): n is a, c, g, or t
  misc_feature (487)..(489): n is a, c, g, or t
  misc_feature (491)..(494): n is a, c, g, or t
  misc_feature (496)..(501): n is a, c, g, or t
  misc_feature (504)..(504): n is a, c, g, or t
  misc_feature (506)..(507): n is a, c, g, or t
  misc_feature (509)..(521): n is a, c, g, or t
  misc_feature (524)..(545): n is a, c, g, or t
  misc_feature (548)..(548): n is a, c, g, or t
  misc_feature (639)..(639): n is a, c, g, or t
  misc_feature (646)..(646): n is a, c, g, or t
  misc_feature (665)..(673): n is a, c, g, or t
ggattacaaatattacattaaactaaagctcacaactgttactatgcatcaggaattaacagtcatttctcatttgtgttattctcctatttgataacatatagtgactatctctttatgggttaaatatcagtttcttggccagaattcaagatctgcccctaactaatcctacttctcccagtacccttacagcactcctaccctactagtaactctgatatctcatagtcctcagatttatcaagcaaacgaaactgaatgagcactactataaggtaccacaaactacaaaaggagacagttttgcccttgttgctttcagttaaattattgtgctattttttgcttaatttctaggtttttttagcgtgtttatcatggtctccgtaggtaaagtgggcagaaatctttttctacttaacatttcctgtaagtgctgtttgtttgaataaagttaatgtgtgaggttaannnnnnnnnnngnnngnnnntnnnnnngtnanngnnnnnnnnnnnnnggnnnnnnnnnnnnnnnnnnnnnnagngggaaagaagaaggagaaggtggggggagagaaggatagagctttaaggtagcggagcgttggttttttgggagaaaaaagaggggagagntggggtntgttttggggcggcgccgnnnnnnnnnacacaaaaatatattttctcacaccccctttctgtgggggcgcgcgccggcccgccccgcaccagagaagagaaaaagtgggcccattacctatggtgtcgtcccccagaagaaaaaacccggcgcgggaccacaagaaagcacgcgggtcccgtcctaccccaca

SEQ ID NO: 368925 - DNA, 1092 bp, Homo Sapiens
  misc_feature (172)..(182): n is a, c, g, or t
  misc_feature (990)..(990): n is a, c, g, or t
tacttccacagtgccaaatacatacttcacctcaggaaacctatgaccttccagcaacaatcttgttggcctgtctccacaaagtcctctaaagatgatcaatatatgcttcaaatcaactttctgcactatgcagagaagccactactagtatttttttattcttcgtttnnnnnnnnnnncacactctcttgataaaccacaatctctagcttaaatgagcttggaaatcacaaaaggaaataaaaagctgccatatagctactagtatttttgtctgtctgtatttttgtaaattaaggtaaaagataaattaaatgttcctagcttaaattaggtcaaatcagaaggaataaagcagattatatagcaaacacttgctcctgacacctgcagtttctaaaagcattaggaatatttttattaaattcagagaaagcataattgcgaacaaatacatgactttctccccaaaggccactttgtgataaagtacatacatatagtgttcatggtttctttaaagtgctagattgtctctggcttgagaatcatctattgctttaaaaggtctttcagcacaaccccagcactgttgtcaggtaacgctggaaaaggtgtaaatgtgggcaaaacatctgagatgggtttcagaagaagatgcccgggccaaccaggtccaagtccagctgggttaataagaggtacagctgccgagcgaggagccaaaaacggatttacatctgttcttctaccagacctggattctgctgtatctttaaaactttctggtgcatttgtatctctttttcttcttcctggtgaatccagaggtttcatatcatgaacagaaagctttggtggtggaatggatggatgagattctgtttctagaaatttaacaaaaagttctgaaaaagaactattaaccacagattgctgatttggtctcaaggtgtgttgggaacactttttgatcctcctccagcnacccagtcatccacctggtaacaccaccctgatcgtcatgaaacaactgttaccatctcctcccttatgcagcccggatgtctccccattaaccgtaacact

SEQ ID NO: 368926 - DNA, 778 bp, Homo Sapiens
tttttgagattaatgcatttattccaagtaattaacacattaaaaataaagttaaacttgtccaagccaactcataaattctttaatctttttaacaaaatatacaaccccaaacatcgtactatggttgaaattaattgggaaaggaggaggtagaggaaaggatacatatgggtttgtggaacagggaatgagttcaatctcaagacaagtttcagagatcttctaccccttcacaacacaaatggctgctaaacaatttaatacaaagtgttattggatcacaatacaatgaacaaaggccatttcaaaaataaaagtgatctcaaaagcatatctgctcctggcaatgaaccatgaataagccttaccgatttgtcgtcttctaaaagtaagcctgccagatattcttccatgtttatttccaaacaggtttgtgggttagcaggacaatgcatctcaagaaaggcaacagagtaagggaagtacaggagttgacatgccaataaggggtgtaaacagtaaacaaaagagctactcacgctgcatttcaaacaatgttaaggcaggcccatccaaatggaagcctaagagatgaacaattcttccaagttttccatttcagcaagctttctggtgtttttcccagagatgcatcaactgcccaggaaattgggtaggaatacaacacagcaactggagaggtcagctgcctccatcctcccccacatttcagaaatggcagagtcaaagccaaaatacaatcaaagcacactat

SEQ ID NO: 368927 - DNA, 378 bp, Homo Sapiens; identical to SEQ ID NO: 178181

SEQ ID NO: 368928 - DNA, 1032 bp, Homo Sapiens
  misc_feature (846)..(846): n is a, c, g, or t
ctcattacagaaaatttggaaactataaatttagaaacgtatcacccatacgtccaacatcgaaagaaaaccagtgttatgactttgtcccatttgaagactaattgggagtccatctctctattggcactgggttcgattgcccctggctaatagagttcaattagttctatccctgggtttcctttcttagctatggggtggaagataggagggggagatctacaatttgaatatgtgttacttaataaggctaggctggccatcagttgcttatttcagatgtgtcactaaattttccttctagatggtccttgagcaaaacttaataattactgttttttatttccactgcctttataaaatcaaaattttctccttttgataaaaactgttgaatactattgatgtagagaatgtgtatatgtgtatatttgcattgattaaattattggaaaacttccaaaaaaggagctctgacccaaatataaaaacatgtgtggccgccctcggctcctccgagaagcctttctaggaccatctcgtttggccgtgcggggcccccgcaaggtaacgtgaacctgggtcctagcctggttccctaaggaaaccccctggttcaatgactagggcgcttggcattctccacccatataaaataccgcgccccttgtggtgcaacccgcacccgtctctggacacaaaccccccaggattgtgaggttccccgcaggcgccttttacctcggggattctccacccccccagggaggttccatacgccgcagccctgcggattttcctccaattcaccggtactcctgtgcccgggggacaatttgcatngcgcaggtagcgcggcgggggacagcttccatgtgagagccgactccctggccccgatatgtgtgccaacttctttcccccacacaggggtgatgtgggttggaaaacccttgaaaattcggcgccgaccgcggctctctctaatcgacccccttggtatcagcctctcgtgacgcgccagtacac

SEQ ID NO: 368929 - DNA, 273 bp, Homo Sapiens
gtcttttagccttaccaccttttaaaaaatttgttattctccagaaacagtaaataggtgagtaggggtggtgcaagtgaattcgttttcatttagaagcccctctgtacagataatcaaaattcaaagttgaaagaatcaaaagcagccacagttatgtaggtctgatttgaatgtcataattgcagtgacaggacattgccaccaactctatcctactaccatcaatgttgtgtttattccgtcaataaaaaagacttgcttccaggaaaa

SEQ ID NO: 368930 - DNA, 409 bp, Homo Sapiens
acacagtactgagtccccatcaaggagacatttaacagaaactcctactgacatccattggttccttggggattactgacaatgtaacaaatcaagacagcaacttccctggctgtgaccaccaactgtggaaaacagcagcttgatagctcaatgctgtgatggagccgtccggaaaacgactcctcaacaatgaaccaaaaagagaagtggtgatctgtacacaaacgccaggacgtgacaagaaccaggtgcaggagtccactggctttcccagctctcctgggttgaggacagacggctgaactggctgtgtatttggagatgggccccaccgccccttttcaactgtacggctcaggctgcttaaccataagcaactccatgggctggggtgggggcatctaca

SEQ ID NO: 368931 - DNA, 851 bp, Homo Sapiens; identical to SEQ ID NO: 178189
  misc_feature (795)..(795): n is a, c, g, or t
  misc_feature (797)..(797): n is a, c, g, or t

SEQ ID NO: 368932 - DNA, 336 bp, Homo Sapiens
tgatctaacatccggttatgcgagtccgggtaggggcagcgtaggattacgataacacacccaccaggaggaagctggttccctggagtttgtgccgttggaagaagaaccaaaaggtcttcctcaggccaatgatgagggacaggcccgtcaggaacagcagctgtaggggagggaggggagcatgaagcaaacccaccagccccctgaggagtgggggacttaaggcctggagccaggcggctgggctgggaccaggatgtgctaactgttcaagaccatctgatcgagggccatccagcagtgtggcagaatcccagagccttgatcagtctt

SEQ ID NO: 368933 - DNA, 254 bp, Homo Sapiens
ggtagaagataaagctcaagaattagcaagactggaaggagaagtccgttcactcctaaaggatataagccagaaagttgctgtgtatagcacatgcttgtaacagaggagaataaaaaatggctgaggtgaccaaggtaaaacaactacattttaaaaactgacttaatgctcttcaaaataaaacatcacctatttaatgtttttaatcacattttgtatggagttaaataaagtacagtgcttttgtatat

SEQ ID NO: 368934 - DNA, 1280 bp, Homo Sapiens; identical to SEQ ID NO: 262185
  misc_feature (452)..(454): n is a, c, g, or t
  misc_feature (457)..(458): n is a, c, g, or t
  misc_feature (460)..(460): n is a, c, g, or t
  misc_feature (467)..(574): n is a, c, g, or t
  misc_feature (576)..(576): n is a, c, g, or t
  misc_feature (592)..(592): n is a, c, g, or t
  misc_feature (639)..(641): n is a, c, g, or t
  misc_feature (656)..(670): n is a, c, g, or t
  misc_feature (709)..(718): n is a, c, g, or t
  misc_feature (721)..(729): n is a, c, g, or t
  misc_feature (822)..(822): n is a, c, g, or t
  misc_feature (971)..(971): n is a, c, g, or t
  misc_feature (1020)..(1020): n is a, c, g, or t
  misc_feature (1023)..(1023): n is a, c, g, or t
  misc_feature (1158)..(1158): n is a, c, g, or t
  misc_feature (1252)..(1252): n is a, c, g, or t

SEQ ID NO: 368935 - DNA, 221 bp, Homo Sapiens; identical to SEQ ID NO: 5014

SEQ ID NO: 368936 - DNA, 1349 bp, Homo Sapiens
  misc_feature (135)..(181): n is a, c, g, or t
  misc_feature (183)..(198): n is a, c, g, or t
  misc_feature (1212)..(1238): n is a, c, g, or t
ccgggaattttctcttagggaaaaccagggttatgggcccactgtttcccttttaccctttgggggggccgcggcggccaaaaaggaaatggttttagaaaaatttttccaagggcccgaggcggcccgacaagnnnnnnnnnnnnnnnnnnnnnnnnnnnnnnnnnnnnnnnnnnnnnnngnnnnnnnnnnnnnnnnttttacaggtacacaatttaatatttattatatgcattttatatacattatttttcaacagctgtatgtttgctatgtggtacaatcttaaaaatttgctgattcatagtttgtaaaacaaaaaccttacaaaactcatcaaaactcggcaaactgatcaggaaaagtttctcgggaaggactaggaaaaaatactttattgtcttaatccatggcattacacaaacaaaatctttagttacaccataaaattaagcacatctaaaaaaataaaacagggataactagtcaaaacacagcagatttctgtatcctgattcaactatttttgtatcctatttgtaatgcaaataaaactttactccaaatatttttaaacaagttagttttgtttggaatcatggtaaaccaagatatatatcttagggggaaccaccttggtttgtaatttaaactataaaatactccatttttagtctattttagactattcaaaggagtttccaaaatagatatacaggttccctttagcacattaataaaaggatataaagaccaacaaaaagtgaaataaataataggccattagcaagatggataatccttgataaataaacttgtaaatacagtaagatgtacaaaatatcacatagtgataggatgccaagattagtttttttctttaagagttcatttggagtactaaaccccactgtttcattttaatacacttaatagtccttggtttatgaagacatttatgtgatgatgaaagttatttagcatctttatggaaggacttagctgagctgtattaggcaaaagaaggaaagaaagtggttacagggcaacgggtcagtgagatctctgtgttttagggttgtataatgcagaaaaacttcaatacaatcttgagcactgttgtgacaggctaaatatataaaaagacttataaaaactagaattttatccaaacattttgtgcaactaatgctaaaatattttaagttaaannnnnnnnnnnnnnnnnnnnnnnnnnnaaagcaaaataagtttaaaagggaatctgtggcattcaaccgataaacagaagatcactaagagatgaaaaaaagctactcttggagctcacttcccccaacaagagcacc

SEQ ID NO: 368937 - DNA, 812 bp, Homo Sapiens; identical to SEQ ID NO: 5029
  misc_feature (91)..(124): n is a, c, g, or t
  misc_feature (655)..(655): n is a, c, g, or t

SEQ ID NO: 368938 - DNA, 349 bp, Homo Sapiens
ggattcaaattaatgtaagtatgttgttcaagactttgaagcattgaacaatgttctcgatgaattttatttaattactggacattttggtaatatttgaatgttattaagttaaacacttagagttgagtatattccaggggagaaaagtgaatgaaatgactcataataagaaagcttgctcccttgggacagttaccttcctggtgtcattgccatcctgggttgacaagctgagagtagaggatacaagtgatgtgaataaaatggaaattgcattgagttaatgaaacagacacttttagatcaagaaaacacttcaacagcctttttagaaattggcacactc

SEQ ID NO: 368939 - DNA, 997 bp, Homo Sapiens
  misc_feature (707)..(732): n is a, c, g, or t
  misc_feature (886)..(902): n is a, c, g, or t
ggggcaaagcatgctggtctcaggcggtctccgctcaacgatccttcctcaaagcatggttgctgagtacccagagttgcgaggagttttttaactgatttagccaggtggcaatcatgagtgaatggatgaagaaaggccccttagaatggcaagattacatttacaaagaggtccgagtgacagccagtgagaagaatgagtataaaggatgggttttaactacagacccagtctctgccaatattgtccttgtgaacttccttgaagatggcagcatgtctgtgaccggaattatgggacatgctgtgcagactgttgaaactatgaatgaaggggaccatagagtgagggagaagctgatgcatttgttcacgtctggagactgcaaagcatacagcccagaggatctggaagagagaaagaacagcctaaagaaatggcttgagaagaaccacatccccatcactgaacagggagacgctccaaggactctctgtgtggctggggtcctgactatagacccaccatatggtccagaaaattgcagcagctctaatgagattattctgtcgcgtgttcaggatcttattgaaggacatcttacagcttcccaatgagaggccaggaagtgtgaacatacctgatagaaaaaagactatattttatcccctcataaaatgttttaaatgtaaatgtacatgacnnnnnnnnnnnnnnnnnnnnnnnnnnactaattcttggatgtgtcggtaaaactcagaggagtgggttataagtgctatttccttggggaaattaatgaacttagggcaagtataagcatccccatggcttaagattaggcgcagggacatcggaactcgggttgggtcttactttaacnnnnnnnnnnnnnnnnngagattggaagtctcgctctgttgccagggttgaagtgccatggggcaatcttcaggtcgtgcaccttccggcccccaggttcaaccgaatcccg

SEQ ID NO: 368940 - DNA, 323 bp, Homo Sapiens; identical to SEQ ID NO: 5059

SEQ ID NO: 368941 - DNA, 654 bp, Homo Sapiens
  misc_feature (14)..(14): n is a, c, g, or t
  misc_feature (36)..(36): n is a, c, g, or t
  misc_feature (41)..(41): n is a, c, g, or t
  misc_feature (53)..(53): n is a, c, g, or t
  misc_feature (114)..(114): n is a, c, g, or t
  misc_feature (122)..(122): n is a, c, g, or t
  misc_feature (230)..(230): n is a, c, g, or t
cctcttcataggcnttgtgaaaggctggccagagtntaccnaacaaagcctgncatcgggctcaacagcttcagggaccatctgcatgggaccatctgcatagtcctctcctcntaacgggnaaacacctccagatttgccatataaaaaaagcaccctggtgctgaaaatgaacccctttcttgaacatcaaagctgtctccccacagccttgggcagccagggtgccntcttagtggatgtgctgggtccaccctgagccctgacatgtggtggcagcattgccagttggtctgtgtgtctgtgtagcagggacgatttcccagaaagcaattttccttttgaaatacgtaattgttgagactaggcagtttcaaagtcagctgcatatagtagcaagtacaggactgtcttgtttttggtgtccttggaggtgctggggtgagggtttcagtgggatcatttactctcacatgttgtctgccttctgcttctgtggacactgctttgtacttaattcagacagactgtgaatacaccttttttataaatacctttcaaattcttggtaagatataattttgatagctgattgcagattttctgtatttgtcagattaataaagactgcatgaatgcaaaaaccaaaccaac

SEQ ID NO: 368942 - DNA, 720 bp, Homo Sapiens
  misc_feature (572)..(572): n is a, c, g, or t
ggggcagtagcgtcacgcggaggcggagcgaggactcggggacagttaccacctatttgcaattcaaggagaatataagacagagaagaaagctgtgaatgaatttcatttgattagcaatagattggacactctactgatcttgcctctctacaacctctcttccacctgacctctaaatgttgaagtgtttcaggaattgtcttagaccttcttccttatctacacttcctctccaacatgaatcttgatggctctgcacaagatcctgaaaagagggaatattcttctgtgtgtgtgggcagagaagatgacattaaaaaatctgaaagaatgacagctgttgtccatgatagagaagtggtcattttctaccacaagggagaatatcatgctatggatattcgctgttaccactcaggaggacctttacatttgggagatatagaggattttgatggacgaccgtgtatagtttgcccctggcattaaatacaaaattactttgggcaacaggagaaggtctgtaccagtctattaaaccctaaagatccatcagcaaaacccaagtnggtgctccaaagggaaataagcaaggattcacacagtgacagtagacaacggaaatatttatgtgactctttctaataaccctttttagtgtgactctgatttttatgccactggagacttccaagtattaggaagtcttcctgataa

SEQ ID NO: 368943 - DNA, 886 bp, Homo Sapiens
agcggagtagcgtcacgcggaggcggagcgaggactcgtgggacagtcaccacctatttgcgaattcacaggagaatataagacacgagaagcaaagctgtgaatgaatttcactttgatctcagcaatagattggacactctactgatcttgcctctctacaacctctcttccacctgacctctaaatgttgaagtgtgtcaggaattgtcattagaccttcttccttatctacacttcctctccaatatggaattctcttccccaagctgttggcgatgtctagattcatttgcattgtctgggcatttcaggctcagctgtcatctcagtgaccagtttttatctgagcatgaagtcttgagtggctctgcacaagatcctgaaaaagagggaatattcttctgtgtgtgtgggcagagaagatgacattaaaaaatctgaaacgaatgtactagctgttgtccatgatagagaagtggtcattttctaccacaagggacgcaatatcatgctatggatattcgctgttaccactcaggaggacctttacatttgggagatactagaggatttcgatggacgaccgtagtatagtctgccccctgtgcataaataacaaaattactttggcaacaggagaaggtctgtaccagtctataaaccctaaagatccatcagaaaaacccaagttggtgctccaaaggaactaaagcaaaaggattcacacagtgacagtagacaacggaaatattttatgtgactctttctaatgaaccttttaagtgtgactcctgaattttatgccactggagacttcacagtaattaaaagttcttcctggtaaaaatttttgaaatggaactggtgtgtatgcttgaaaaca

SEQ ID NO: 368944 - DNA, 369 bp, Homo Sapiens; identical to SEQ ID NO: 178220

SEQ ID NO: 368945 - DNA, 1338 bp, Homo Sapiens
ggtgcatgtagtgctggcacttacttaataactattcatgatattgttaataacttgttataggattgtattcccaattacagtctctaagattgtaattgatattatctgagaggtagtgtgacaactttcttttgttgttacattaagccgaaaacataatactaatagacaactaacagtttgcttatcaggcacatcaactaaggcacctccccccatgctaagtttctcctggatatatggaagttgattgtttcccagtttaaaaacttgaactaatatctcctaagaaaatctgagtccatattgtttttattttacttagctagaatctcatagcatgctaaagtcatatccttatccccactaaaaataactatgtctatgtgagaggaatatagtatgtgggagctgtattaaatactattacaggtgttacagaatctttaaataaatggacatggaccaactttccatctagtagtgtacgatctatatagtgcatgtcagtagcacaaaatgcagtcttagcattagcctgtctaatctgaatagtttactcaaaagtacttctttgtgttaagtattcagccactgtttttagatctagttaataggttctatttaatttgctacaacatttactgaatggtggagtgaaaaaactgatgcatactgggaaatatctaccattttttaaagataatgttaattaggaaaagaacacttttaaggaatttatagcagtgatgaaatgaattcagttatatcagatacaccaaactgttgatggtatttaaatgtgacttcaagttagtatttctgtatatattattgattactggtttgtttttagatatgtaagtctgttctaatctacagttcacatatcgacagttactctggtaataatagaatgttagtgatgatcacttggtggatgttgattaagtgcctgtgttttgtttcctcctctggataccaaataggtgtatgctacttttttggtgaacttatttcttggaagatttggctatgctattcagggtttttattcttatgtttttcttctaaatttaagtagcatcctgctgctaccatattaaagctaaaatttaacttttgctgaagaatcagctaattcaggtaatccaaatatttgtggaaaaacatctggataatttattgaacacattagtattgtgttagacagctttgatcattcccatttcataggtttttattgtggaatagtcaacttaatatagattcactttcaatttgcatgtataaagtaatactcaataaaatttttttcatttatttttcaaaaaa

SEQ ID NO: 368946 - DNA, 1414 bp, Homo Sapiens
  misc_feature (110)..(124): n is a, c, g, or t
  misc_feature (135)..(267): n is a, c, g, or t
  misc_feature (642)..(664): n is a, c, g, or t
gggggattccaacccttttccttggccgggttttcttgggaaacagtttggccccgtttcccttccctttggggcccgcgccccaaaaaaaggttttgaaaaattttttnnnnnnnnnnnnnnnccagccaaggnnnnnnnnnnnnnnnnnnnnnnnnnnnnnnnnnnnnnnnnnnnnnnnnnnnnnnnnnnnnnnnnnnnnnnnnnnnnnnnnnnnnnnnnnnnnnnnnnnnnnnnnnnnnnnnnnnnnnnnnnnnnnnnnnnnnncagctttccaacccagctcatggagctttattcagacgggagtgacaacatcctgcttcgttcttgctgcccttgaaggggcaggccctactgagccatattccctagaaacccaatgccgaaggcccatgttatgacctcccactttattcaagtcgccgtaggactacggctggggccttcctagaagccccctctcagaacctgttctcacgccacccaccacctcccgttgtcaggcccagggaggacccatgaatgacaacaaatcatgtagggatattccctggactgggaatcccctgccagcttctaggacatatcatctgacacaggtagaagctgacatcgtgtcatattcttctgcctcacgtnnnnnnnnnnnnnnnnnnnnnnngcatacgcactcttaggcttatcgtaggaatggaagtgatgtggcagagctgaccagcgtggcacgtgttcaccactccactgagagatccactgaaggaatgagcttgcacaaggggccgtacagtcatggactgccaacaagttgcctccaatgtcccaactatactgaccgtctacttctatggacgtgagccacaggcctgatccacgggcgtagtatactatggatgctgattcttccagtttgatcccaagatacaagatttttccatgaattctgagagccccataggtcttacccattgttaggccaagtctctcgatagagagttcgactttgtctcaaccagtctataggctacttgagacatgggaggagacagaagtcagacgcaacaccttggtccttgtgtcacagaactgtcagagggacgagaaagaacaaccgtgaggggccatcgatttgcataatcgccagtggcagacaaagtcccttggacagttaccgttttgatgctcgtatcttaagttcctatatggtgacaccacaaggccttgtagcccccaaacacataagaggtaaagaaagggggaaacatggtgattaggaactagcacgtaccattagcaaatatcgcctgtggtaagaccacaaggcaataagtctacaacgtggccggaaaaagtgtgggaagggcttaccacattttaagcccacacaattatctatgtgagctactcccacact

SEQ ID NO: 368947 - DNA, 856 bp, Homo Sapiens
ggcggtcagacttcatcaatataggtgggtttgatctggacatcaaaggctggggcggagaggatgtgcacctttatcgcaagtatctccacagcaacctcatagtggtacggacgcctgtgcgaggactcttccacctctggcatgagaagcgctgcatggacgagctgacccccgagcagtacaagatgtgcatgcagtccaaggccatgaacgaggcatcccacggccagctgggcatgctggtgttcaggcacgagatagaggctcaccttcgcaaacagaaacagaagacaagtagcaaaaaaacatgaactcccagagaaggattgtgggagacactttttctttccttttgcaatgactgaaagtggctgcaacagagaaaagacttccataaaggacgacaaaagaattggactgatgggtcagagatgagaaagcctccgatttctctctgttgggctttttacaacagaaatcaaaatctccgctttgcctgcaaaagtaacccagttgcaccctgtgaagtgtctgacaagaggcagaatgcttgtgagattataagcctaatggtgtggaggttttgatggtgtttacaatacactgagacctgttgttttgtgtgctcattgaaatattcatgatttaagagcagttttgtaaaaaaattcattagcatgaaaggcgaagcatattttctcctcatatggaatgaagccctatccagctagggcttcttagtttttctagggaattggcctaaaaatattcaagaaaaggccaagggaaaaggggagtaaaaggggcctttattttatggataacctaaagttgaagttaccattttaaagtt

SEQ ID NO: 368948 - DNA, 1056 bp, Homo Sapiens
  misc_feature (20)..(20): n is a, c, g, or t
  misc_feature (90)..(90): n is a, c, g, or t
  misc_feature (180)..(180): n is a, c, g, or t
  misc_feature (266)..(266): n is a, c, g, or t
  misc_feature (310)..(310): n is a, c, g, or t
  misc_feature (349)..(349): n is a, c, g, or t
  misc_feature (356)..(356): n is a, c, g, or t
  misc_feature (389)..(389): n is a, c, g, or t
  misc_feature (393)..(393): n is a, c, g, or t
  misc_feature (400)..(408): n is a, c, g, or t
  misc_feature (416)..(416): n is a, c, g, or t
  misc_feature (419)..(420): n is a, c, g, or t
  misc_feature (484)..(518): n is a, c, g, or t
  misc_feature (525)..(528): n is a, c, g, or t
  misc_feature (541)..(543): n is a, c, g, or t
  misc_feature (549)..(560): n is a, c, g, or t
  misc_feature (584)..(635): n is a, c, g, or t
  misc_feature (643)..(651): n is a, c, g, or t
  misc_feature (668)..(731): n is a, c, g, or t
  misc_feature (808)..(852): n is a, c, g, or t
  misc_feature (859)..(859): n is a, c, g, or t
  misc_feature (888)..(905): n is a, c, g, or t
tgagatttgccctcgtcttngctcgtgccctgcccgcgcgccggcgtccgtcggccgcgcggcgtgttcggtcgagtggggggggcgcgngaggcagtgatgcttatgtccctttctcctcttgagggcgaggacacataagggtgggaagcggtccctctccttctccctaaacccacnacagacagggggtggcgcgggcacgaacggcagcgaccgagcgtgtttttctctgtttttcccagcagccggaggccagccacgcncattctccccctctccacccgcacgcggtgggtgtgggggaggntaataataaaaataaactatctcttcccttggcctcgtngcacagngatccaaaacacagaaaaacgcgcctccggcgnggtnttctccnnnnnnnnncctatganggnngggcgccgggcgccgccccgctggccgttgtttaaactacctccccgccccccggtggtaaaannnnnnnnnnnnnnnnnnnnnnnnnnnnnnnnnnntgcgcgnnnncccgttcgtaggnnngctggnnnnnnnnnnnnagggggggaaaaaggaggcagaannnnnnnnnnnnnnnnnnnnnnnnnnnnnnnnnnnnnnnnnnnnnnnnnnnnaccccccnnnnnnnnnattaagaaatctcgcannnnnnnnnnnnnnnnnnnnnnnnnnnnnnnnnnnnnnnnnnnnnnnnnnnnnnnnnnnnnnnntggccgtgggtggcggggccccttttagttccagctactcaagagaggctggggccaggagaatgccatgaacctgnnnnnnnnnnnnnnnnnnnnnnnnnnnnnnnnnnnnnnnnnnnnnccatgcnctggcgtgacagagtgagactctgtctcnnnnnnnnnnnnnnnnnngattgatttcgtcaaactgttatcaaatggttggccctctagccaactcaggaaggcgccatcctcttcccattatctccccttcctccaattctcctcctccccttggctccctagccttggaggtaaacactaatattagtgcactgtt

SEQ ID NO: 368949 - DNA, 712 bp, Homo Sapiens
  misc_feature (556)..(556): n is a, c, g, or t
ttaccatgaagatgttaaaatcggtttttaaaggtgatgtaaatagtgatttccttaatgaaaaatacatattttgtattgttctaatgcaacagaaaagccttttaatctctttggttcctgtatattccatgtataagtgtaaatataatcagacaggtttaaaagttgtgcatgtatgtatacagttgcaagtctggacaaatgtatagaataaaccttttatttaagttgtgattacctgctgcatgaaaagtgcatgggggaccctgtgcatctgtgcatttggcaaaatgtcttaacaaatcagatcagatgttcatcctaacatgacagtattccatttctggacatgacgtctgtggtttaagctttgtgaaagaatgtgctttgattcgaagggtcttaaagaattttttttaatcgtcaaccacttttaaacataaagaattcacacaactactttcatgaattttttaatcccattgcaaacattattcccaagagtatcccagtattagcaatactggaatataggcacattaccatttcatangtaagaattctggtgtttacacaaccaaatttgatgcgatctgctcagtaatataatttgccatttttattagaaatttaatttcttcatgtgatgtcatgaaactgtacatactgcagtgtgaatttttctgttttgttttatgatcttttagtg

SEQ ID NO: 368950 - DNA, 1402 bp, Homo Sapiens
  misc_feature (1086)..(1146): n is a, c, g, or t
  misc_feature (1192)..(1217): n is a, c, g, or t
aagaaagtgagccatccgagaaaattcagaaattcaccaaggacgtgagccatgaaatcatacaacatgaggttaaaagttcaaaaaactctgcatctagtgaaaaagggaaaaccaaagatcgagattattcagtgttggaaaaggagaaccctgaaaagaggaagaacagcactcagccagagaaagagagtaatttggaccgtctgaatgaacaaggaaattttaaaagtctgtctcaatcttccaaagaggctagaacgtcagataaacatgattccactcgtgcttcctcaaataaagacttcactcccaatagagacaaaaaaactggactatgacaccagagagtattcaagttccaaacgtagagatgaaaagaatgaattaacaagacgaaaagactctccttctcggaataaagattctgcatctggacagaaaaataaaccaagggaagagagagatttgcctaaaaaaggaacaggagattccaaaaaaagtaattctagtccctcaagagacagaaaacctcatgatcacaaagccacttatgatactaaacggccaaatgaagagacaaaatctgtagataaaaatccttgtaaggatcgtgagaagcatgtattagaagcaaggaacaataaagagtcaagtggcaataaactactttatatacttaacccaccagagacacaggttaaaaaagagcaaattactgggcaaattgacaagagtactgtcaagcctaaaccccagttaagtcattcctctagactttcctctgacttaactagagaaactgatgaagctgcttttgaaccagactataatgaaagtgacagtgaaagtaatgtttctgtaaaagaagaggaatcttcaggaaacatttctaaggacctgaaagataaaatagtggagaaagcgaaagagagcctggacacagcagcagttgtccaggtgggcataagcaggaatcagagccacagcagccccagcgtcagccccagcagaagccacagtccttctggaagccagacccgaagccacagtagcagtgccagctcagcagaaagtcaggacagnnnnnnnnnnnnnnnnnnnnnnnnnnnnnnnnnnnnnnnnnnnnnnnnnnnnnnnnnnnnncataagaaacatgcaggcactgaagtggaattggaaaaaagccgannnnnnnnnnnnnnnnnnnnnnnnnnaaacatggcggcccgccctcgggcccctcgaaaaagctttcctagaacccattccttttgggcggccgcggggcccccagaaagggtaaagggggaaccctggggtccaaaaaatctgggtttccccctaggggagaaaaccccgggggccccctgggaacctaaggggggcttttggggaattt

SEQ ID NO: 368951 - DNA, 1286 bp, Homo Sapiens
  misc_feature (204)..(220): n is a, c, g, or t
ggcccacccccattatataagggctattttagatgcttttaacctccccaacaaataatttgccaagtgtccaatgagaacttatcatgttggtgtgttaggtaaatcgggcaaatatgatagtgtcttacattgggccttgattttaagttgttatatttgtacaatcgagtattttagaaattacatgaaacatgaaacagnnnnnnnnnnnnnnnnnaaactgggcatctggtttctaaaaatttatttgaaacaatctagaattttcttggtgcaaagtgtatcatgtggaatatcctcatatttttaccatattttaagaactttaagacgattaattgtaaataatttatttgattggtgcagttctaatccctaaatcataatcttaaaatcaggaatgtgtggagaacagagccatgtcatatcactttgctcttaccattccttttgatcagcctcaattcagcctcattgtgtagtatgttttttctttctatgaaaaacaacagaaagcatttcattttatttgcctatgttcaaatatgtttaataatgaccaaagtgcattctgagttttttcaaggaatgtaatactggagctttaagaacatacttagtttctcatgtgaaaacttaggctttgtctgatgtttttccttcctctattgtctaatgttgaggttgtttttaggaattatgttttataaactttttcaatataaggtacatgcctatacagaacttaacattttgcacagaatatatcaaatatattttgagaaaaaaagtacggcatgagttctgttaggaataaaagatgaaactattgtatctcacaaaaaatcttatttcagaatggaaatatttttgagaaaagtagctgagtatactggtttaagaaaatgcttgtttttagattgaggttaacttagaagttgggagttggatttatttaagtacagtatacctctcaacagtttataaataatatgttgaattatgtcagtgtgggcagcagtagaatactaaaaggaaaatgtcatgttaagcaatttcagaacattaactgaactattttcaaagcagaaaaattgacattgctgcctttaagaataccatgaatgtaagaaattgaaagaaattgtaaaatatcacataatatagaaatggcagttcaaagagaattgtggcagatgttgtgtgtgaactgttgtttctttgccacatgtgttgtatttgaaagttttacagtaagtttaaaataaaacattctgtgactg

SEQ ID NO: 368952 - DNA, 581 bp, Homo Sapiens
atccaatttaaaaaatccttagcccccccctatatccatattaccctaggataataaatagtaaaaaatccaagttacattccatatgaaactttccataaaaagaaatcaaatcccagttttatgaaattttatagtacaattactttcctagtgggtcttttcttaggtcacagtatttataattccatttacatctttataatttttaaaattagaaaacaaaaggatgtcaatagaaatctaaattttcacttgcaaaactcccttcagtttccaggccagtaacacatggtgatgtcgacttgtcctccagacatggacggctaccaaagatccccagttcacggagcatgcaggcctctactcattaggaacgctttttggtttggctcacgtttcaagaaattgtggagcatgtccatgccgtccagagatcccccaggtttcaggattaggtttctgtatttcattccaacctccggattcattatcccttcttttttaaaacagctgtaaaacatatccatggaaaatacttcactccaaagatatccataatattggccatcgtatccccc

SEQ ID NO: 368953 - DNA, 528 bp, Homo Sapiens
  misc_feature (513)..(513): n is a, c, g, or t
cagagctccaagaaaatatttaccagaagaatgtgatgattcatttatcagtccagaaatcccaagtacaaaacttcaagatacaagaaggatcaaattatatcatatatatgattcaatttaaaaattcttagccctcttatatcatattatctagattataatagtaaaaaatcaagttacattcatatgaaactttcataaaaagaaatcaaatccagttttatgaaattttatagtacaattactttctagtgggtcttttcttaggtcacagtatttataattccatttacatctttataatttttaaaattagaaaacaaaaggatgtcaatagaaatctaaattttcacttgcaaaactcccttcagtttccaggccagtaacacatggtgatgtcgacttgtcctccagacatggacggctaccaaagatccccagttcacggagcatgcaggcctctactcattaggaacgctttttggtttggctcacgtttcaagaaattgngagcatgtccatgcc

SEQ ID NO: 368954 - DNA, 470 bp, Homo Sapiens
  misc_feature (28)..(28): n is a, c, g, or t
  misc_feature (37)..(37): n is a, c, g, or t
accccgtttcctcctttttaaaactgcnacatccatnaacagggccttcaatgtcgaaacaatgaattttaaatccataaaatgccactcctgaaggtgcaaggattgagctcagagctgctctgttgtggcaaaacccaaagtgctgtgatgtgtggctgtgaaaagccctggagcgggtccctgtgagcgcccgcctctgtctcctgcttccccactgaacgcctgctgaatgtgccgctgaactcagctgtgcctgctttcagccctcctgtgaggggcggtcccagtgcacagatgtttttcaagttcctcagtttgtactgaaattagggattcatcagggcaggaagcaggcaggcctctcagaagggagaggaggcctccaaatctattgagtccccacagtttgctcaagcccaggcaaatttctgtgattaaaatgaattcatcagttcctccaaaaaaaa

SEQ ID NO: 368955 - DNA, 664 bp, Homo Sapiens
  misc_feature (43)..(79): n is a, c, g, or t
  misc_feature (588)..(600): n is a, c, g, or t
ttagactcactataggggaatggagctcctcgcggggcggcgnnnnnnnnnnnnnnnnnnnnnnnnnnnnnnnnnnnnnatcaggccaaatcggccgagctcgaattcgtcgagagcggaacgccgaggcgcttctgcatctgtgggccgagcattcttcaggtcatctgaaccttctgagaaaacatggtcaacgtcttgaaaggagtgcttatagaatgtgatcctgccatgaagcagtttctgctgtacttggatgagtccaatgccctggggaagaagttcatcattcaagacattgatgacactcacgtctttgtaatagcagaattggttaatgtcctccaggagcgagtgggtgaattaatggaccaaaatgctttttcccttacccagaaatgaaaatactcaatatggaccatttaggaattataagcagcaactgtgaaagacttgccactcaatatcttaggtgactgattagacatagagggttgttttaggagcatgccacgggaaagactgagggatcatgatcatttgttcagaaaaaaagcccctgaactgattttgttaccatagaatttnnnnnnnnnnnnngctttaacagttggctgtaatttggcttttattatcctttattaaaatacaaatgtcaatgcta

SEQ ID NO: 368956 - DNA, 1135 bp, Homo Sapiens
  misc_feature (198)..(210): n is a, c, g, or t
  misc_feature (334)..(358): n is a, c, g, or t
  misc_feature (514)..(585): n is a, c, g, or t
  misc_feature (994)..(1007): n is a, c, g, or t
cccaacggcggccggagttattttaatgccggacagggggtgagccaaaggggtgtgtgaaaagtccgcttgggcgaattttcagggtttgcgtccatgtaccctgttggtggggagggggtttaccacagtttcggggggaggagacgctaaaaggagaatatcaaaccacgttctcttggaaaaaagtggtccaannnnnnnnnnnnntataatttggggatagggagcctcgctttttggaattcccggggtgaaaaggatccaaggaaaggggccttaagagactcccaatttgggttttgtttcacaggcccttcgggtttggcccgcnnnnnnnnnnnnnnnnnnnnnnnnnaattcaaagccccttgtcacaattcccagggttttccttgggaacgcggtaagggcccaggggcacctttgccttatgtggcccggcccgcccaaacgaaatgttttggaaaattttttgggggccgaaggcgggccgacaaatttttgtgtttannnnnnnnnnnnnnnnnnnnnnnnnnnnnnnnnnnnnnnnnnnnnnnnnnnnnnnnnnnnnnnnnnnnnnnnaggataagtaaaattattgcatttaatgtcattttcatgaaatgaaaatcatcaaattccttaatgttgtatcaaacgtaaacaataccagttcaaattagagggaatgtatgtcaacaccaacttttgacaaaaataagaaagctaaagccctacaatttatctaatttaggtcaggcaaccatggaaacaaaagaatattaaaattatttattttatcattatgcacattgaaggaaatcataacagacagtacagttcttttccaccataaaattatatacacccatttatttagctagaaacactagcttgagaggtactgatatattccatttgtgatactttctgtacagcaaacaaatgtcttatatttggagcatgttgaagaaaacattgtctcaagtcnnnnnnnnnnnnnngagtctcaatcactaagagttcaaggtactttgggagaatcgtggtgtcctggatggcctgatcaatgtattaagatcaagcagtatgtcttcttaaaatactcttaaatccatacaaatgttgcttg

SEQ ID NO: 368957 - DNA, 907 bp, Homo Sapiens
  misc_feature (612)..(630): n is a, c, g, or t
  misc_feature (639)..(677): n is a, c, g, or t
  misc_feature (724)..(796): n is a, c, g, or t
gcctgggtggcgaattcggcacgagggaagcatggaggtccatggcaagcccaaggctagcccgagttgttcgtcgcccacccgggattcctcaggagtcccagtgtccaaggagctgctgacggcgggaagcgacggccgcggaggtatatgggacaggttgctcatcaactcccaacctaagtccagaaagacctccactcttcaaacagttcggatagagaggagtcccttattggaccaggtacagacatttctcccacagatggcacgggcaaatgaaaagctaagaaaagaaatggcagctgcaccacctggtcgtttcaatattgaaaacattgatgggcctcatagtaaagttatacaaatggatgtggctttgtttgagatgaatcagtcggattcaaaagaagtggacagttcagaagagagttcacaagacagttcagagaacagttcagaatcagaagacgaagatgacagcatcccatctgaagtcaccatagataacattaagcttcccaattctgaaggtggaaaaggcaagattgaagttttggacagtccagcaagtaaaaaaaagaaatagtcaaataaattatctgaaaagannnnnnnnnnnnnnnnnnnctcgaggcnnnnnnnnnnnnnnnnnnnnnnnnnnnnnnnnnnnnnnncatggtcatagctgtttcctgacccacctttcttgtacaaagtggtnnnnnnnnnnnnnnnnnnnnnnnnnnnnnnnnnnnnnnnnnnnnnnnnnnnnnnnnnnnnnnnnnnnnnnnnntgcagtacccggggaattttacccgccctaatgaggcgggcttttttttggggatcccaaagaatcttccttgaaaaccttttttttctgcgaaaaatcctggtggcttgc

SEQ ID NO: 368958 - DNA, 240 bp, Homo Sapiens; identical to SEQ ID NO: 6105

SEQ ID NO: 368959 - DNA, 1005 bp, Homo Sapiens; identical to SEQ ID NO: 178235

SEQ ID NO: 368960 - DNA, 1137 bp, Homo Sapiens
  misc_feature (291)..(291): n is a, c, g, or t
cttaaatatggtttaatactcttctccatttctgtacatcacaacaccaagattttgctgcttagtatctctctgcagaggctatagagaatgcaaaggctacggttttcaccccctcttatatgtgtttgtatgtgtaagggtaatacatatcaatatatattgatacacacatcaatatataatgcaatatatatcaccgaagagaacacatggattaaagaaatacaaaaatttggcatcatttccaaacttaaatagtaaaaataaaaactacaaaaggagctgcantaccctaaatgtatcatgtgaaacaacaagcatattcaaaaatgtaaatttacatccaatttctctggtcttgtcatatcacatcagacccatttacaatggcaaaaccctaaggtactgctgtgaagagagcatgtttgctcgctcttgggtgttctgcaaacaaatagcagagcccaaagcaaaaaagcctgttccggtgaagtctcccacgttggtgaacaccaaataatggactcttctcacagggggttgagacatcaggttacacattgacagacagtatttggacctcagagtacagtgtgagaaccagaaactttacatttaagacatactcccttcattcaagtgaaacaggattattggaacgataggcaggtctgtaacctgggaacaaggagctggttcagaccaataaagctacgagtgactgaatcaagtcagtaaagaacagcagtcaggcactaaagtgttaaaagtacccaatttgaaaaccaaatgcaccccactaccctagtcagtgtggaggtgataccaattgacttttaaaacctttggtccttcaaagtccatttggtatacttttttccatcgctaccactgggcacgtactatacactttgttcaactgtcaccaccctgggcacgccatgaccttgcatatcagctgggttcaagtctgacttacagcccagctgtgaagcataagcttcagggtttcaggccaacttttggatccaacatggtcttaaatccatggtgccagaagctgtgtcccatcccttcccacccgcccctaatttctcatgtgagaagtgcttgtaagtcccaccatttgaaaca

SEQ ID NO: 368961 - DNA, 778 bp, Homo Sapiens; identical to SEQ ID NO: 6137
  misc_feature (623)..(640): n is a, c, g, or t

SEQ ID NO: 368962 - DNA, 751 bp, Homo Sapiens
  misc_feature (497)..(498): n is a, c, g, or t
  misc_feature (500)..(626): n is a, c, g, or t
  misc_feature (639)..(679): n is a, c, g, or t
gggggcagagccgcaggtcagtcgtgaagagggagctctattgccaccatgagtttctccggcaagtaccaactgcagagccaggaaaactttgaagccttcatgaaggcaatcggtctgccggaagagctcatccagaaggggaaggatatcaagggggtgtcggaaatcgtgcagaatgggaagcacttcaagttcaccatcaccgctgggtccaaagtgatccaaaacgaattcacggtgggggaggaatgtgagctggagacaatgacaggggagaaagtcaagacagtggttcagttggaaggtgacaataaactggtgacagctttcaaaaacatcaagtctgtgaccgaactcaacggcgacataatcaccaataccatgacattgggtgacattgtcttcaagagaatcagcaagagaatttaaacaagtctgcatttcatattattttagtgtgtaaaattaatgtaataaagtgaactttgttttannannnnnnnnnnnnnnnnnnnnnnnnnnnnnnnnnnnnnnnnnnnnnnnnnnnnnnnnnnnnnnnnnnnnnnnnnnnnnnnnnnnnnnnnnnnnnnnnnnnnnnnnnnnnnnnnnnnnnnnnnnnnnnnaaattttgtccgnnnnnnnnnnnnnnnnnnnnnnnnnnnnnnnnnnnnnnnnnggggcccgggcccccccagggggaaagggaaaatgggcccaatgttttttttcccaagaaaaaacgcgggcc

SEQ ID NO: 368963 - DNA, 837 bp, Homo Sapiens
  misc_feature (789)..(789): n is a, c, g, or t
  misc_feature (819)..(819): n is a, c, g, or t
gggtaatgggagcccagtcaatgggagttctcagcagggaacctcaaatccttccctaggttcaaatattccaagtcttcagaattcattaaatggatcttctgctggcagaaagcacagctgagtacaagctaactggagtaactttgctgttttgctgcttgttgcatgcacacaggaatggaaagcgagctccttttccccttccccagcgccgtttgaccgtctcgcaagatacaccagcagcctgcttactactagacgcaatccaaaaggcctttgaaaatacagtgtatattttttgtactagtcagtttattggcactatttgaaacttttgaaatataaacggagaggctttctgttgagacattgtcgccaaaacaattttttgaaatgttcctgaaactaatttggggttaaagattaaaagggttgttaccattcttatctgagtagttgggaggaggggaataccactttagttcatttggaaaatatagacatatttcttttgctttcttaaaacagcttaaaatgatgaacttttataattttaatttgaagattgaataaatattttttataaagattgttttgagtgctgatttgtttactttttgtagatttgctttatccatgatattcagtacaactctgtcatttctttgtaatatttaaaaaatattagtaaaggagtgaattaataaagtagtaatagtaaaatgaaaggaacttgactgtacagtttgtagcccgggttaaggcatttgggtattgtttcctttnaccaatttggggaccaaggtggggaacccnttttttattaaggttttt

SEQ ID NO: 368964 - DNA, 795 bp, Homo Sapiens
  misc_feature (401)..(585): n is a, c, g, or t
gggcctacgctaaaaaccactgagtggagtatttagtacacaggaagtcggccagagaaacatttctcatatttgaaggccggaaagagggacatttctgacaccggaagtcagtgagaggactctttcccacacaggaagtcagctagagagccgtctcccctctctggagccgagagaggccggtttcccccaccgtagcccacctgggaggaattttccagagatcactgtctgatgaccctgtcttggaattggagccatgcaagttacactgaccacgtttgggttgggatattgaggaggttatggttaaaagcatacgatgggagatcatattgtacttgcgagtgagacccggctggaggaatgttttaattcttcggaaataccaagtggtnnnnnnnnnnnnnnnnnnnnnnnnnnnnnnnnnnnnnnnnnnnnnnnnnnnnnnnnnnnnnnnnnnnnnnnnnnnnnnnnnnnnnnnnnnnnnnnnnnnnnnnnnnnnnnnnnnnnnnnnnnnnnnnnnnnnnnnnnnnnnnnnnnnnnnnnnnnnnnnnnnnnnnnnnnnnnnnnnnnnnnnnnttgaagatggagactatccacgggggcattgatcttggggtctccccccttcctgaatacttggaagtccctcggcagactctttggattacctccagcaatgggggagcctccccccctgttttgaaagcccgggcagggtttggggctcttccctggtacctgtggggactctgggattttcccataagggggggaattgggatcccc

SEQ ID NO: 368965 - DNA, 496 bp, Homo Sapiens; identical to SEQ ID NO: 6164

SEQ ID NO: 368966 - DNA, 537 bp, Homo Sapiens
  misc_feature (50)..(50): n is a, c, g, or t
  misc_feature (294)..(406): n is a, c, g, or t
  misc_feature (414)..(427): n is a, c, g, or t
atatggattaaatgatgaaaaacaagtaatctaccctcagagccatgtanttgagaatgcttcaatcatattttcctatgtacttttttttataaacttagttttagactatgttgtaaaaatgggaaggttgtaaactatgttgtaaaaataggaaatgtggcttaaaatatatacattatattgtttcaggattttgtcagtgtttaaagaaccaatgttcatctttgtatttatatacatgatttaaattttgtctaaaattttaaataaaactgcagtgatttatccttnnnnnnnnnnnnnnnnnnnnnnnnnnnnnnnnnnnnnnnnnnnnnnnnnnnnnnnnnnnnnnnnnnnnnnnnnnnnnnnnnnnnnnnnnnnnnnnnnnnnnnnnnnnnnnnnnttggcggnnnnnnnnnnnnnnaaaaaatttttaaaacctttttttgggggccgggcccccaaaaggaaaggaaaagggccttaattttttccaaagaaaatcggggcaagaaaaagggttggatttccccc

SEQ ID NO: 368967 - DNA, 871 bp, Homo Sapiens
gggtactgtagggatccctcctgcacatcagtgggtgcatgtgggaactcttctttagggcttcggtggtaatcatctgggggccctgggtttcttgtctaccagataaaccaaaactgggaaggccaagtacagtctctgtggtgcgtattgacgaccccatggagattttgaaaagtgttatttctcttgtccacaggcactttcaagaactttgggatgtaaaaatgaaatgaaacctttacccatgaccaacagtaacaatcattgttttaataatatatacaagctccataactccttttggtgctaatgattccgctatttcacagaccaaacgttttagtacattaatgtccttaaatgtgttatatagaaataaaaaaatgggggaagtccatgaatcagcactctttctcaaagtctcattactacctttttaaaggtggatttttgggaaaagagaatacttttccttttatgttcccctctgaatctctaccactttcttgtctctccagccctttatgtaaatgaaaacgtttgcaaaatgaaaaaaataaacaaatggttgatgacattctaatataaaaacttagctctaacacattttgagtagtatgaggaaacagaccagatatgaccaaaatactgtggattaatggactgtagtgcagggctcctagcagagcacagtccttgatagtaggtcacatcttttacttcctggtactctccatcttggacagaccaaggcttaggatttgtagattttttagtatgataagtgagaatatcacataataaatatctccttaccatctttatatctcgatgtaactttaaaaatttgctctggaacctatgactt

SEQ ID NO: 368968 - DNA, 414 bp, Homo Sapiens
taccacgtcctgttccaaaagccaggtaattgctatagagccagcaccccaggaaatatcctgtgggtggccagccctggtatagaggtgtccctgtccttcatgagtgaagttacttgccctgattaggtgcctggaaggtattggctccctgttttggtgtggactcatggcaagctggtgtttaagaggtcaggaggcctgctgatctttcaaaggacacccatgatgtctactcatagaaagggcaagtaacgtgttcattttggtcttgaatgtccaaactcaagggttggattttggccaattgaaatcagacatatgcgatcttgggtttttgcatggaaattaatgtaatgcttataaatgaaaaatgaaaacatttcaaccatctaagtcaaacacaaaaataat

SEQ ID NO: 368969 - DNA, 975 bp, Homo Sapiens
ggacagattttctggaggtatgacaatagtatttttttatgctcagattaaaaatcagcttttcacctctccagtttttccaagtgatactcccagttctagagcaatctacagctgtttatgtgaggtgcccaacacccattcatctcaagtgcttcagtctttggtttatttcatgcactgtgccttcaaaatgaaatttttaaaagggactttaaatgaagttgaatagtagtttttaaaagtcaatttgtaatttatgtgaaatctaactgtaatgaggtcctttctgttttttatatgtaaacagatctactaatcctgtataaaagttattttacgatgtttgtctttctttgtgttttgtctcataatcttttttcagatgcaatatgccggaaaaagttataggtccagtttgaaaattatttagtttttctgcctatgctagtggaaaaatagtaccaggatcagaatacagggtatcacctatggaatgtttctgtatttatgaattgactcaaaagaaagctttgtttctgaaatcgcattatgtagtagccacagttttctgtttgtagctcagctagattgttatatatgttccaatcatttccacaataacaaccacaaaactggtcattgaaaggtttttatgtacgcattttaaacttgttccgttaaaaatttggtccctttttccacggtgaggccccagttagaataatgtgtcccggcacttttaggcacagcaaggatgaattcaatatccccttttcacttagcaacaatgtgttacttctaccctaataggaattgggaaagcaaagttgtatgagaaacagactctgctgataaagtactcatagtccagaccagagaaatataaatggaaataggttatatttcaatagtgattggttcatctaaaagtctctgctgtaaaggaaataaagcatagaggtttgagcatgg

SEQ ID NO: 368970 - DNA, 440 bp, Homo Sapiens
aaaaggaagtgtgtggagagaaaccagaacccttcagggtgggtcagaggacgccatcccacagtggattcgtgttcgtttgcaggtggaagcagtgaatttttaggacccactgattaaaaacaaacattcccaagtgtctctgagagatgctgtttatttgttaattaaaaagcttttttctctgtcttttaaattatggctttcatgtaataaggatatttttagtgaaaaattgttttcctttcaaattacagaccttttaaaaaaacttaatttgagcgagtaccttttcatttgacacttttcctgtttctaaccttaggaaaccagaatagcgtttggcagacacgacgttttcagtttacctttgacacctgccccactcccattttgctttgtgatgtcttcatttaacaataaattatctgaaaaaacaa

SEQ ID NO: 368971 - DNA, 464 bp, Homo Sapiens; identical to SEQ ID NO: 263382

SEQ ID NO: 368972 - DNA, 467 bp, Homo Sapiens
ggaccttacattgagggtgtgggagaaagggtgtcatagttctgaaaataggcagtagcatgaagcaccagacctgtctcattccttattagatgtctatctcaaataacagagtttgaaaaaatattggttttacccattggatatttcccatgcctgactcgggaaaataacattttctgacttttttctattttcttgccctgcacagaccctacctggtacaattttctatttcttagctcaaagtgtctatacaatgggttgcctggtatgtcagctgccctcactcttgtgtaatagaaatatattgcccaggctggggacgtggaggagacgaactggattcctccctcctcctgttgccaggcctctctgcattggcactttatcctttcagtgtttctggctgtgttgggttcatttgtgagactgatgtaacaataaagtgaaatcttcccctctga

SEQ ID NO: 368973 - DNA, 1231 bp, Homo Sapiens
  misc_feature (83)..(95): n is a, c, g, or t
  misc_feature (160)..(169): n is a, c, g, or t
  misc_feature (218)..(281): n is a, c, g, or t
  misc_feature (1126)..(1134): n is a, c, g, or t
  misc_feature (1169)..(1187): n is a, c, g, or t
gtctatgtcgtgacgtgcttgaagcgagactggtcagatattggcgcggcagtgtgtgaaacatagcggattacagtatgtcnnnnnnnnnnnnnatgatggtgttcatatcggtgcgggtggtgataggagggggaaaggtgaagtatataaataggcnnnnnnnnnnttataatcgctcgttcgatcgttgttggggggtagggggagatatatannnnnnnnnnnnnnnnnnnnnnnnnnnnnnnnnnnnnnnnnnnnnnnnnnnnnnnnnnnnnnnngctgttgtagatgaattgcttgggggggatggttattgtatcagggagggataaagaggggggagttatagatacggataactagggtacggggggtcggattttatacagttctaggcgataaatggtcgtggaggggcgggaaacgaaggggttgatttagggggaaggttcgtctcggccggcgggaataaattgggaaggccttgaaatgggcggggggcctcctccgggccagtttattttggtggcaatagggggcaaaagtgagggttggacaagggggaattttttggccaagagccttcaggtttttttaggagaaaggtgggactccaggccaagccattgccccattgcagcctggcatgaaatctttgccttttagtggggatcactcctgcccgagtcctggctgtggtggggactctgcaagttgctaacccagcgtccatttctctttcctccgtactaacagaaccccggtgcctctgcccagttccaatagcgggcagacgagagccatgtcctgggctcccttgcagcccggggtgtgcagctgtggcgtggaggtgggtggtgctgggagagacttgcagggaagctcctgtgaaggggactcagctgccacatgcaggacccttcccctttgccttcttcctgcctggaacatggatgtgatggctggtgctgggacagctgtcctgagagcgtgaggaaagggtcacaccctaaggacagtggagcagaacacaggaaggaccctgggcctttgctgacgcagaacgcgggaaggaccctgggcctttgctgacataccagccccagactacttaaattcagcnnnnnnnnnaatgtgagaaaataaatgcacccctctctggtttnnnnnnnnnnnnnnnnnnnctcgagactagttctctccctcgtgccgaattcgccacccaggc

SEQ ID NO: 368974 - DNA, 1156 bp, Homo Sapiens
gctgggtggcgatttcggcacgagggctggagacctacaaactgaagtgcaaggcactgcaggaggagaaccgcgacctgcgcaaagccagcgttaccatccaagccagggctgagcaggaagaagaattcattagtaacactttattcaagaaaattcaggctttgcagaaggagaaagaaacccttgctgtaaattatgagaaagaagaagaattcctcactaatgagctctccagaaaattgatgcagttgcagcatgagaaagccgaactagaacagcatcttgaacaagagcagtaatttcaggtcaacaaactgatgaagaaaattaaaaaactggagaatgacaccatttctaagcaacttacattagaacagttgagacgggagaagattgaccttgaaaatacattggaacaagaacaagaagcactagttaatcgcctctggaaaaaggatggataagcttgaagctgaaaagcgaatcctgcaggaaaaattagaccagcccgtctctgctccaccatcgcctagagatatccccatggagattgattctccagaaaatatgatgcgtcacatcaggtttttaaagaatgaagtggaacggctgaagaagcaactgagagctgctcagttacagcattcagagaaaatggcaccagtatctggaggaggaacgtcacatgagagaagagaacttgaggctccagaggaagctgcagagggagatggagagaagagaagccctctgtcgacagctctccgagagtgagtccagcttagaaatggacgacgaaaggtattttaatcgagatgtctgcacaaggattaagacctcgcactgtgtccagcccgatcccttacacaccttctccgagttcaagcaggcctatatcacctggtctatcatatgcaagtcacacggttggtttcacgccaccaacttcactgactagagctggaatgtcttattacaattccccgggtcttcacgtgcagcacatgggaacatcccatggtatcacaaggccttcaccacggagaagcaacagtcctgacaaattcaaacggcccacgccgcctccatctcccaacacacagaccccagtccagccacctccacattctctctccactcccgggtaccgagc

SEQ ID NO: 368975 - DNA, 380 bp, Homo Sapiens
ggggaggcagtgtgtttccgcccagagctggagtctcccagctgccagccgaccccgaacccgcactcccgccaaccgcgctttttgtgggcggtcggaaaccacagcctccgttggatatgttcggtgcatgttataaacaaccacttaaaccctccggatctgagccgcccgcagaggaatgcacaatgacgccacggcacgcaggatgtgatgtcaccgagatgcagaggatactcagtcaaccaacatttactgagcatctacttcgtgccgtatgtacgaagctagcaaatatgtacagcaccagtactgattgcagggagcactgtagaagaggaatgaaggccaaacaattaaaagcggaggcggggaggtct

SEQ ID NO: 368976 - DNA, 1359 bp, Homo Sapiens
  misc_feature (1293)..(1293): n is a, c, g, or t
agcggagcttgtggcggcgaagccatcggtgttcgctgatgtccagtctatggagtcagttggtaccggtggcggcgcggaggcagaaggcggtgtccgagtaggggcctctgcaccaccaggatgttaccgggcttggccgccgccgcggcccacagatgtagctggtcctccctgtgccggctccgtctgcgatgcagggcggcggcctgtaatcccagcgaccaccaggagtggcagaatttagtgacatttggaagcttttcaaacgtggttccctgtagtcatccatatattggtaccctgagtcaagtaaagttgtactccacaaatgttcagaaagaaggacagggatcacaaacactcagagtggaaaaagtaccatcatttgaaacagcagaaggtataggcgcagaactcaaagctccacttaagcaagaacctctccaagtaagagttaaagcagtccttaagaaaagggagtatggatcaaagtacactcagaataatttcatcactggagtcagagcgataaatgagttctgcctcaaatccagtgatctagaacaacttcgaaaaatcagacgacgaagtccccatgaagatactgagtcttttactgtatacttgagatcagatgtggaagcaaaatctttggaagtttggggaagccctgaagctcttgccagagagaaaaaattgcgtaaggaagcagaaatagaatacagagaaaggctatttagaaaccaaaaaatattaagagaatacagagatttcttgggaaataccaagccacgctccagaacagcatcagtgttttttaagggaccaggaaaagtggtgatggttgcaactttgcatcaatggattaaactgcttctttaaatttcttgcctggatttataccggttcagcaagtatgttctcagaagctatacactcattatctgatacttgtaatcagggtttactagcattgggcatcagtaagtctgttcaaacaccagatcccttctcatccgtacggattttccaaatatgcgctatattttcttcgctaattaggggtgttgggattttcatgatgggtgcaggaatatcttggtaccatgggagtcatgggattgcttcatcctcaaccaatagaatcccttctatgggcatattgtattttagcaggatcattagtatctgaaggagcaacacttcttgttgctgtaaatgaacttcgtaggaatgctcgggctaaaggaatgtcattttacaagtatgtaatgggaaagtcgtgatccnagtacaaatgtgatattatttgggggtaccgctggcagtcttggggagtttttattaggcgccact

SEQ ID NO: 368977 - DNA, 982 bp, Homo Sapiens
  misc_feature (769)..(781): n is a, c, g, or t
  misc_feature (857)..(857): n is a, c, g, or t
  misc_feature (934)..(934): n is a, c, g, or t
ggcacgagcgcccaagtgggaatcaaggactttagacctaacaaagtctccgaaactagtaggactactaccacatctttatcccctgagctgatccgcttcacagcttcctcctcgtctgggatggtgcccaaattgccagctggcaaaatgaataaccgtgatctcaaaccccagcctgatatagtcttgcttccgttgcccactgcctatgagctagacagcaccaaactgaagagcccactaattacctcccccatgttccgtaatgtgcccacagcaaaccccacggagccgggaatcagacgggttccggggggcctcagaggtgatccgggagtcgagcagcacaacagggatggtcgtcggcattgtggctgctgccgccctctgcatcttgatcctcctgtacgccatgtacaagtacaggaacagggacgaggggtcctatcaagtggacgagacgcggaactacatcagcaactccgcccagagcaaccgcacgctcatgaaggagaagcagcagagctcgaagagcggccacaagaaacagaaaaacaaggacagggagtattacgtgtaaacatgccgaacactgcctcacacgccgagttttttcaccagttattttctaatccaacgccctattgaaattctttgggaacgggtggaagatccttccaccagaattgtgtcaaaaaacctggcttgggaaaacttattgaaaaaatgggggggtaattattaaaacccaaacggaacttccttnnnnnnnnnnnnnaaaaaaacccccgggtattttttctataaagggggaacaaacaacacgcgcagctcaccaaccaagggggggaaantggcgacattccttcctgccccccgctaaaaaagagccctctcaaggcccccccctaccggtcatttgtcgcccggncaccaaaaagaggtgtgtctccccccaaaaagcgggagggatatcgct

SEQ ID NO: 368978 - DNA, 612 bp, Homo Sapiens
  misc_feature (553)..(553): n is a, c, g, or t
cattctagcatcttcaagaaatgcagcgcttcaggaaatgcacgcaacaaaaatacctactcctatagtaggagtcaagaggacatcctcacctcataaagaagagagtcccaggaaaaccaaaacagaagaggatgaaacaagtgaagatgctaactgtcttgctttgagtggacatgataaaacagaagcaaaggaacaacttgatacagagacaagtacaactcaatcagaaactattcagacagcggcttctctgttggcctctcagaaaacatccagtacagacctttctgatatccctgctctccctgcaaatcctattcctgttatcaagaattcaataaaactgagattgaatcggtaaaaacaacctcaggggtccataaacaatatctgccaactcaacctgttgtcttcaaatgctaaaaaaggagaatggagggtacaagactagacatgactgaaatggatttgggttttttggtgacctcccttactgggctaatcagcacttgatcggaagtccaggttagtatgtgaagccaggagngtactattattattgtgttagcaacagttgcattaactatttcaaaaattactgccttt

SEQ ID NO: 368979 - DNA, 869 bp, Homo Sapiens
  misc_feature (396)..(417): n is a, c, g, or t
  misc_feature (581)..(581): n is a, c, g, or t
  misc_feature (607)..(716): n is a, c, g, or t
cggcatgatcttcgtgccgctctctttctacattttctaggtgtacccattaggctgtaaacgtatttcaagttgaacaatacgaaatttcagcatagctgtgcatcatcattttttctccatatcttgtattcacaccttaagaatttgttactagttgaaatgataagccagcaaacataatctaatctttgtgactgtttgcatagattggagggcaagtacaatgtaaatggaacgtatatagagaaaggataggttaaaaggtagcttatagcttgcttaccttttactacacagttggaatttaagaactgattcttataagaacaccagttgaacaatgagttgcttttttccctctgatgtagtgtgtatgggcgtgtatatacatannnnnnnnnnnnnnnnnnnnnnaatgggaggagggaggatgccagagacatttaaaggttgtactctgccaatgtgatagttttaagtacttgagggggtggagaagaaccacatgcatcttctacacaaatatggggaaatatcatatcattataagaatgtatatacagtattaagcaattacnagattttgggccaggcatggtggtgnnnnnnnnnnnnnnnnnnnnnnnnnnnnnnnnnnnnnnnnnnnnnnnnnnnnnnnnnnnnnnnnnnnnnnnnnnnnnnnnnnnnnnnnnnnnnnnnnnnnnnnnnnnnnnttggctgggccgtggtgggcttaccccctgaagtccccagcacctttggaaggcccgaggttgtcaaaatccaccaagatcagggaattccgagaacccgcccttaaccaacctggggggaaattccatttcctacttaaaaattaaaaaaac

SEQ ID NO: 368980 - DNA, 1172 bp, Homo Sapiens
  misc_feature (399)..(399): n is a, c, g, or t
  misc_feature (425)..(437): n is a, c, g, or t
  misc_feature (637)..(808): n is a, c, g, or t
  misc_feature (1004)..(1004): n is a, c, g, or t
  misc_feature (1124)..(1124): n is a, c, g, or t
  misc_feature (1144)..(1144): n is a, c, g, or t
tggggggggagaggaaactcccggctcttgttttgttgccacagggatttgtgtgggacaaaaaattgtttttgtgcttaccgcgttctaaacaccccttgcgggtgtgttttcctctccgccccgcgttttttcggaagtaaagtggtgttttttagggagacaagggctttattccctccccgccccccctttctccccaggggtggggggttttaaccgccgggccccaaattttgggagcagggtttcttttacgcgccccccggtttattttcacatgggcgcaaattgtctttatcgagaggaatttcaattcgggcgcggggggcccttttgggtgtgttcgccgcccccctcctttccccggtttcgcccgccctccgcgttttggtccgntatttcttgtggggcccctcccggcnnnnnnnnnnnnngtgggcggcactggccgcgcgcgttccttcggctgggggtgttttctttgggcccgcgtttggtcgggtccccctttttttccttcccgcggtccgccccccctgtttttccttttcgccctgtttttctgcccgggcggggttctcccccgggtgtttttcttcccggggggctccccccccgttttctttggtctgcnnnnnnnnnnnnnnnnnnnnnnnnnnnnnnnnnnnnnnnnnnnnnnnnnnnnnnnnnnnnnnnnnnnnnnnnnnnnnnnnnnnnnnnnnnnnnnnnnnnnnnnnnnnnnnnnnnnnnnnnnnnnnnnnnnnnnnnnnnnnnnnnnnnnnnnnnnnnnnnnnnnnnnnnnnnngcacaggtaattttattctctcctgtgggtgttgacagtgctcattgattgaaatttgaaacgttcagaaatcccatacctgaagatggtcacatattctttacatcatgattcagtaactattcaacagttatgtctactaaatacagtgaacaaaacagtataaatgtttacaccattcccctgtgaacagggncttttgtgcacaatagtaacaaatgggaattaatggcataccatggatatcaataagggaagaggaccttctctttaaataaactattctgtttattaaataaactctggatttttttanggtacacatttacagggccnggattccaataaaaagggggactttata

SEQ ID NO: 368981 - DNA, 853 bp, Homo Sapiens
  misc_feature (714)..(726): n is a, c, g, or t
  misc_feature (825)..(825): n is a, c, g, or t
ggggattacagacacgagccacctcacctagcctgatgagatttttaaaaaatattttctctgtacttttcattctcttttaatgaggaccaatgtacagttgaaataactggaacaaattatttttggtgtgtgtgacaattctgtttttaatgctatttgaacaagtgggccattagccagatttgtctttttgttgtaaaacaaaatttgactaattttacatgtttataaatcttatgctctcactggttgtttttatttaaattacaattttatctgtttcctgacattgtctcctatatatttctattattaattgcaaaaacatagaaatggaaattttgctatcaacaataaaatttttttaatgtctcccatttcccgttcctattcaccttacctccagccttcctccctcccgtttacaatttccccccatacctcaccccccgaatgcttatagaccccacgcccttcgtttatttcgccctcccttgcctccgtccccatatttcataacccatcctccttttttttcccgtcctttctctcccccctctttccccacgttttacatcctttccatcatctttttcttcggggccccggtctgttcccgctttatttggcgaccttcgaccgtggcctcccctgtgtttttttcccaagaaaattatccagccctaccctaccattgcgtgttgttgtttnnnnnnnnnnnnntaaaaaaataccccctcccttgcgtacccatacagccgtgtttctccccacatcacactgttgcgctgcctgttttcccaggtaattttttccgtccgnttgtccctcccataccgtgctgtgtgcc

SEQ ID NO: 368982 - DNA, 834 bp, Homo Sapiens
agcggggtcctcccgtaggaaccggcggactcggttggcgttgtggggcagggggtggtggagcaagatggcggctcatctgtcctacggccgagtgaacctaaacgtgttgcgcgaggcggtgcgtcgcgagctgcgcgagttcctggacaagtgcgcaggaagcaaggcaatagtttgggatgaatacctaactggaccctttggcctgattgcacagtattcactattgaaggaacatgaagtggaaaaaatgttcacacttaaaggaaatcgtttgccggcagctgatgtgaagaatataattttttttgtcagacccaggctagagttgatggatataatcgctgaaaacgtgctcagtgaagatagacgaggcccaacgagagattttcatattctgtttgtgccacgccgtagcctgttgtgcgaacagcggttgaaggatctgggtgtcttgggatcctttattcacagggaggagtacagcttagatctcattccattcgatggggatctcttatccatggaatcagagggtgcattcaaagagtgctacctggagggtgaccagacgagccctgtaccacgcagccaaggggctgatgaccctgcaagctctgtatggaacgatcccccagatctttgggaaaggagaatgcgctcgggtgagaaccggctgctttgtggtgggaaaaggagggcccttcacaccccaaaagggagggaggaaacggaaagctccttacaaacaaattcaggtgatccttaattatttatgaatactgtactcatgaatttgcctactgattaaaatgcacttataaccctcca

SEQ ID NO: 368983 - DNA, 422 bp, Homo Sapiens
  misc_feature (106)..(114): n is a, c, g, or t
cctgcatgcctctacattaatagaaggcatggctcctgctgcaaccgctgtgaatgctgctgagaacctccctctatggggatggctattttatttttgagaaggnnnnnnnnngtcatgtatatatacacataaaggcatatagctatatataaagagataagggtgtttatgaaatgagaaaattattggacaattcagactttactaaagcacagttagacccaaggcctatgctgaggtctaaacctctgaaaaaagtatagtatcgagtacccgttccctcccagaggtgggagtaactgctggtagtgccttctttggttgtgttgctcagtgtgtaagtgtttgtttccaggatattttctttttaaatgtctttcttatatgggttttaaaaaaaagtaataaaagcctgttgc

SEQ ID NO: 368984 - DNA, 1099 bp, Homo Sapiens
  misc_feature (925)..(940): n is a, c, g, or t
  misc_feature (1009)..(1009): n is a, c, g, or t
gactaccacctaagcaatatagcatgcttaggcattttgatcatatcactaaggactaccatgatcacatagctgaaatatcagctaagcttgtagcgataatggatagcttatttgacaagctgttatctaagtatgaagtgaaggctcctgttccttctgcctgtttcaggaatatttgtaagcaaatgacaaaaatgcacgaagctatatttgatctccttccagaagaacaaacacagatgttatttttaagaattaatgcaagttataaactccacttgaaaaagcaattatctcacttaaatgtgataaatgatggaggacctcaaaatgggttggtcacagcagatgtagctttttacactggaaatcttcaagccttaaaaggccttaaagatttggacctaaatatggccgaaatttgggagcagaagaggtgatgtcatcctggaaaactgggtagttcatctgaccatgggatgtgtttgttatgaagaaaatctggatgcctgtgattcgagaattgaacctgaaacccaaagtgaactggggtgggggaagggaaaaaggaaagtatcaagtgttgggaaactgggattcagtgggatctacaaggaatgtcatttttgtgcatcctacagtgaggagtaactgatcaggtgtctataacatttttcattctctctggaaacagactcaggtttctttggaccaaatccaaaagaacacatagctgtaacacagctgtagttgactagaatgctctgtatactttatattaaaaaatgctttgcatttcttccagtgcaatgaaattcatatggtgtcccaccttatttaatgatgggaccaatttaaaatcttaatccacttctggaaaaaaggttttctctaataaagtaaaagctggtttgaaaaaaannnnnnnnnnnnnnnnaccaaatcttttctattaaaaaaataaacccttcttttttgaattggctttgggaaaaacacacacccnacccagaacgcgcggcgtccgccagcaaatcgcacaagccgccatcaacgggggcccctatacacgctccacagcgacacggaaaagaag

SEQ ID NO: 368985 - DNA, 1331 bp, Homo Sapiens
ggggaggtagggacggtactgtcccaggtatattcgaaagtccataatggttcagaaatactgttttcctatttccaagacctagtgattacacttcctttcgagttaaggaaacataaactaatagatgtaatctcgatgtatagggaactgttgaaagatttatcaaaagaagcccaagaggtatttaaagccattcagtctctcaagaccacagaggtgctacgtaatcttcaggaccttttacaattcattttccaactaatagaagataacattaaacagctgaaagagatgaaatttacttatcttattaattatatccaagatgagatcaacacaatcttcagtgattatatcccatatgtttttaaattgttgaaagaaaacctatgccttaatcttcataagttcaatgaatttattcaaaacgagcttcaggaagcttctcaagagttacagcagatccatcaatacattatggcccttcgtgaagaatattttgatccaagtatagttggctggacagtgaaatattatgaacttgaagaaaagatagtcagtctgatcaagaacctgttagttgctcttaaggacttccattctgaatatattgtcagtgcctctaactttacttcccaactctcaagtcaagttgagcaatttctgcacagaaatattcaggaatatcttagcatccttaccgatccagatggaaaagggaaagagaagattgcagagctttctgccactgctcaggaaataattaaaagccaggccattgcgacgaagaaaataatttctgattaccaccagcagtttagatataaactgcaagatttttcagaccaactctctgattactatgaaaaatttattgctgaatccaaaagattgattgacctgtccattcaaaactaccacacatttctgatatacatcacggagttactgaaaaagctgcaatcaaccacagtcattgaacccctacatgaagcttgctccaggagaacttactatcatcctctaattttttaaaagaaatcttcatttattcttcttttccaattgaactttcacatagcacagaaaaaattcaaactgcctatattgataaaaccatacagtgagccagccttgcagtaggcagtagactataagcagaagcacatatgaactggacctgcaccaaagctggcaccaggggctcggaaggtctctgaactcagaaggatggcattttttgcaagttaaagaaaatcaggatctgagttattttgctaaacttgggggaagaggaacaaataaatggagtctttattgtgtatcat

SEQ ID NO: 368986 - DNA, 597 bp, Homo Sapiens
  misc_feature (36)..(36): n is a, c, g, or t
  misc_feature (43)..(43): n is a, c, g, or t
  misc_feature (48)..(48): n is a, c, g, or t
  misc_feature (86)..(86): n is a, c, g, or t
  misc_feature (128)..(128): n is a, c, g, or t
  misc_feature (134)..(134): n is a, c, g, or t
  misc_feature (144)..(144): n is a, c, g, or t
aaattcggtcccgttaaagaaccaacggccaacaancaaatgnggaanttcagcccgggactccccaatccttgtaaaaacattcncccatctgaagaataagatgtcccccagcatctcccaatagnatgatnatcgaaaganaaacctgaaggcagaagcctagtctaatggaccagatgagtagttgtgatagttcatccagattcccaaaagttcatcatcttcaagtagtgaggatagttctagtgactcagaagatgaagattgcaaatcctctacttctgatacagggaattgtgtctcaggacatcctaccatgacacagtacaggattccctgatatagatgccagtcataatagatttcgagacaacagtggccttctgatgaatactttaagaaatgatttgcagctgagtgaatcaggaagtgacagtgatgactgaagaaatatttagctataaataaaaatttatacagcatgtataatttattttgtattaacaataaaaattcctaagactgagggaaatatgtcttaacttttgatgataaaagaaattaaatttgattcagaaattccaaaacccccac

SEQ ID NO: 368987 - DNA, 825 bp, Homo Sapiens
agacagacacagaaaacatcaacagaaaactcctggtacctaagcaccgatctgccttggagaacctgattctgagactccagcaggatgtcttatcaacagcagcagtgcaagcagccctgccagccacctcctgtgtgccccacgccaaagtgcccagagccatgtccacccccgaagtgccctgagccctgcccaccaccaaagtgtccacagccctgcccacctcagcagtgccagcaaaaatgtcctcctgtgacaccttccccaccctgccagccaaagtgtccacccaagagcaagtaacagcttcagaattcatcaggagcatgaaaggataaggataattggctcaccttgttccacagcttcacctgcatcttctcatcaaagcctaccatggatacacagttagcttctttcctcttagccagtgatctgcccatgatgatccctgatagcaaaaggtttcctttctgaggctgccatattgccactgtccaggtggagactgagaaaggaagtcctcagcagtgtcagttcccagagctttggaagaaggaccagcagctctgtgcctgggaaccatcaaaaaatgctgttgatgttttctgtgtctgtctgtcacctgggcatgggcttctaacacctgtgcaattgtcacttttctttcactccctgaaaaaaatatctttgcctacgtccacactctcatcgaccacctccgtccccattttataacttagcactacccccccgtacacaatatatgtcggataacaaccccagtgcctaatgtgcccactgcaaacctctcaccatcag

SEQ ID NO: 368988 - DNA, 614 bp, Homo Sapiens
gaacagtatttggtccctgcaaacctttggaccaagtgtttacctctggggagggagcaagttcttattcctctggctgtcatcccacagtggtctcttccctgtccttgaagggtggcagcttgagacaatcaaaagaaagaaggtcttccaattgtagcacaattaggagacaaaggtatgaaaaggacaaaccagcacaccctaggcagatcctgcctgagcttcactggcccccgctgggaccttctctctcacagtcctctccacagtcattggccaagcacgctagagccccaggtattcagccaggaacacagcgagaatgcggcacaagttgtgcaccgtgggtgggtggagattgacctcggtgtccgcagtgggtgtgccagacagcagggaagtggcgtggagatgagatggagcactgtggtacccctactgcggaggacacgggctgtggtcgtcttccacagagccaaagggctccccgggttggaagtacatcacttcctggggatgagactgcagcaggttcaaaccggtgcagacgcttctcaatgctcctcagccgattgaaccagcggaccgtgcgagggaagtggctgtaaaaa

SEQ ID NO: 368989 - DNA, 198 bp, Homo Sapiens; identical to SEQ ID NO: 178285

SEQ ID NO: 368990 - DNA, 1652 bp, Homo Sapiens
gggtggtggatctcaatccggttgttcagggggccggggtcttctttaggaaacgattaaaaggccgcggggtcccctaccttagtagggccccgcgtcgtccaaagggaatgtgtttagagaaactatttgaagggtgcgaagccgggcccccaggctattgcggggatagtgggttgtggcggagtccgaggtgagatctttattgacttaatgtaattttttggcatacaaattacttaagtatatttacaattcttacataatgtacattttagaagataatgtactttgctccatttacaatgacaaactactgtaaaactacattcatgaattagatacaaatcctctacatactaataaaaagtaaatggactgttggttatacattctttaaaatataccttttcacaggtagcaagaaatagtacatgtaataagtctttatgactggaatgatccagaaatatcacaaagcatgagtaaacacatatataaaagtagctcatcatttccaaaagttaacctttagcctttgtgtaaaataaatggtgccaacaatctttataatgtagcaagctttccctgtttaatatccaaaaaatggagggtggggaggttgaagaaaaataagaaaagttagcaaataagatagtgaaaagaccaatgcagagaaaagtttatgtaatcaaatcttgctttgtctccacattatcacattttaagtggataaatttatgtaaacagaaaaagatgtccacaaaaccatatctgtagatgtcatttggaagcatcaagaaattgataagtatgtggtgaattaaaattacttttataatgttttgctttcattaatgtttgttattgcaaaaatgtaagatttcctacaattttgtcttcaaatcccaatctagcccttcaaacttttatccaggttctccagaaatatttggagtcttttgttatcaaagcacaaggaaagctggcattcattatcagacttcgctgctttacaatgatttcaaatcattttcatgatacaaataaagtgcctctgactggtggtcagtcagacctgggtaatggtgccaattctgccaccagctagcaaatcaagtgaccctgctctgtaaaacaaaaggagcaccctaggatcaaaaaagtagacaactttggagcttagattaagatctcagaaatcctaccatgagaatccagtgagataaagccaatgccaagtacactgtaagtagcaaaacagtatacaaagggatgcttctatattttcaccttgtttcattacactcattttaattgtgaggagccctgaatccaaaaagggtagtgacgactagtccagtgctccttccaccgtatcatgcggttctaaagtcattctggacatacaatctacaaaaatacatcatttttccagctcatgtccatggtgcaaagtgatattatacacaagtgttatctgacaatataagaatgatctgggaatgtctgttcaaaacggtagtaaatttagtcttaaacacaatttcatttactgcgaccatacttaacatgcataaaatatttttaaaatacaaacttaaattggccagattctgaatggatcccgagaatccggaccggtaccagca

SEQ ID NO: 368991 - DNA, 288 bp, Homo Sapiens
gggagaaggtgttatatgagccattggcttgcctttccctttctggctgctctggaggctcttctggggaaagtcccttgccctgataatgtcctggcagctctcttggggtatttgatggttttaggtcagtttgctgaatgacaactggccaaatgattattttgctgagaacagtccgaacaactatgttaaactggggtctaaggtagttgatcacaactgtttgggttggcataagtcctcaaaaaacagaggcaggcacagggcatacatcccgtctagaga

SEQ ID NO: 368992 - DNA, 374 bp, Homo Sapiens
  misc_feature (21)..(21): n is a, c, g, or t
  misc_feature (51)..(51): n is a, c, g, or t
agggtaggtacccagaagacnccagaaactccttatccgtggcactgttgnagcttccctctgcccctggcctggaaagactcccagaatcccagtgtggtgcctgtggaaggagcactggactaaaggcttcagtggctgcgtgtcccaggacaggtcatgcccctcttctggcccagcccatttatctataccatgaggtaactgaagtaaggagagcagtgaatgtcaaactgtgtttcttagagccataagccccacatattatccctgaacaagggcagctcctgctttatatatttgatacgtaggggttccatgagagattttgggttttaaaggaatggttttactgcattaaagaaaaaaaatgc

SEQ ID NO: 368993 - DNA, 1216 bp, Homo Sapiens
  misc_feature (157)..(214): n is a, c, g, or t
ctacctttaccaacggaaattaggtttccccagaaggcatcaacagtggctgctgagtgcttgtgcataccgactcctgagaggcagtgatttactaccaaatgtcactgctttgagacccatgggaaggttggcctccaaagaggaggccatgatnnnnnnnnnnnnnnnnnnnnnnnnnnnnnnnnnnnnnnnnnnnnnnnnnnnnnnnnnntgtgttttgtcactttttaagatcgaaattcccaaaatagctatcgttggtattcaaataaggtttaagatttagtctctgaacctcttcaaaacaccccaaactaaggtgggaatacaagaggtgacccgctgccctccagcacgtccagcccgcatggggtccctgcatagaaatgtgaacccctgccactgaggaagatgaaggtagaccctgtgtctggaggtgctggagggcagcgggtcacctcttgtattcccaccttagtttggggtgttttgaagaggttcagagactaaatcttaaaccttatttgaataccaacgatagctattttgggaatttcgatcttaaaaagtgacaaaacacatttcccattttcatttttcagctgaattttagtaacttatttttgatgttttaattttatcatggcctcctctttggaggccaaccttcccatgggtctcaaaagcagtgacatttggtagtaaatcactgcctctcaggagtcggtatgcacaagcactcagcagccactgttgatgccttctagggaaaccctaatttccgttggtaaaggtaggggcctcggaactgttccggatctgctgtagaacttcaccgtgtggaatggtgacagccacacaccgttgaccagtttagaagaggttgcattcaataaaactcttagcttgagcttatgcaatgattggttaagattttggcattgtaagaattaggagatgatcatagaaatatatgtaaagtattcaattttcaatcattttcaaattactgttataaattgtttttgctgagttgtaatacttttgagatacaatgtattccttgtactgaaagaatgaaaaaggactttttcagcatttgaggtaagttctttaacgtttcattaaaaacattttttacaaatattttgtacatgcacttgcagtattgaggttaatcattttaataaattcggaaattaaaacaaaaaaa

SEQ ID NO: 368994 - DNA, 364 bp, Homo Sapiens; identical to SEQ ID NO: 13311

SEQ ID NO: 368995 - DNA, 1198 bp, Homo Sapiens
  misc_feature (671)..(723): n is a, c, g, or t
  misc_feature (790)..(798): n is a, c, g, or t
ggggcttgttatagtcacttataagtatctgggtctaagtaatttccttagatgtttctaaagaaacattttcagctttgctcccattatgattccaataaggaacgctttcctagtgcaattttaggagtaaagtttgaagagataaaaatagccaaagataggagacgtctgaattttgaatgataaacagtgatgttttaaaaaagctgttgttcttcaggaggcatttgcctaggatattgctggattataccccattggaggcttttaattttatttgtatgaattttccaggatttcattaaaaattattattgtattttttaccttaatgaaagattttgggttcaaatatctttctatattaaaagctgattgagtctgtacatatgtaaattatgcctagtggaggttctgttgactttcttccccactgtggaagaggccagttttgcctccatttgcacattcatttcagttatttctgatccataaatataacatttacaaaattcttcccttgagctggtggaaatgcctcaccagtttcctctttaatgaatcaaataaaatctttaactgatgttaaaaaaaattgattgaaactcagatggaatggaaatgtacaaaaatgacaccattctaggaatttgctagacaaaatgtannnnnnnnnnnnnnnnnnnnnnnnnnnnnnnnnnnnnnnnnnnnnnnnnnnnngaacgcagtacatttggccacatgtagtttatgtttccttttcatgggagggataaaatttaaagcnnnnnnnnnctttgaatacagtccttccttttctatgccttttaaggcttctagatgctattcagcctttttacagcaggtgcaactctatttttcaaggtatcttagaagataacactaggccattgaagcctttcaaaaatatatttttatgcaaattgacacgagtgcagtatactaatgcaaattaattttggtgtttagcttttattgctcatttataacccaagaaatggtacagaccacagtaagtgggattaggtaacaactacaacatggaaaaacagtgtctaagatcacgtactgctaatttaggttacaaaactcaaggctgtaacctttatatgaaagtacttaagcttgaaagttcataatagtttggtatcacctcattagtatagtacagtgg

SEQ ID NO: 368996 - DNA, 1175 bp, Homo Sapiens
  misc_feature (46)..(141): n is a, c, g, or t
gtatttttagtagagacagggtttcaccatgttggtcaggcgggtnnnnnnnnnnnnnnnnnnnnnnnnnnnnnnnnnnnnnnnnnnnnnnnnnnnnnnnnnnnnnnnnnnnnnnnnnnnnnnnnnnnnnnnnnnnnnnnnaaagtcaagcaatggggaagaaaaacaagattatatagtaatcagtttcatgacaccaaaagtcatatagtcataggcttttttcatctttcatatcgttgcctaaattcatttgctacagtgcagggaaccaaaacttgttcatctcatgattccctacatctgacataaggaaagtaaaggtgctcagaaaaatggtgccagctcaaaaaagttgccaaaagttggggcctgcaatttaatggctaaaccataaagagccttaaatgccttggaattaagaaatgatcctccaaaaccttttagaatttccaaaatcttccaatattactgaaactgtcggaatatatgggtcttgaaattcagaagatgatagtcactcttcccatatttataggctattaaggcaagggatatcttaaacatcatattactttatttagatttctactactccaattattaatgttatgtatttctcattgttttacttcttcatggtattatgaagactatatagatgattcaaccaagcctgcaaatctccctcttgtggaattccactggacccaatctgttttccatttccattgcaatactactaaagccatacaatatcaagcaccctccctctaggcccagggactatcacagaagaagcaggcatgtaagattttaaggactggtttcgaggggtcgagtgtaggaaaacagccctgttgcattgtaagagtgatgtcatcttgaagagcagctggcatgatgactgctgtttgactcctgcataccaagatattctgcagcaatgtctttaaacagtgccggtagtacagataacccctcataaagatgcttatctaacctccccagtgttcaggtgtttcacaagaaagtctgagatatgactagctacacgttttgccaaaaatgcttgttatataaagggtacttttgggagggtgagtgccgccatttagtggctgctagaaacattgcttctgtttgtaagttcctattaaatgtttctttctgag

SEQ ID NO: 368997 - DNA, 961 bp, Homo Sapiens
  misc_feature (516)..(516): n is a, c, g, or t
aaagggaatggaaataataactatgtatcttcttttcatgtaatttggtcacagaataaggtattcaagttaagtctaatccaagtcttagagatctttaagtatcctaaaatagcagcctaagtagtcatcatgtaaagaagttgactttcaggaatgtcagcattgacctctccttgccactgttactcagctaaacataacttgccattcttaaaaataaaaaagctcccacccagaaactctagtgatactcagttttgacctcttactgcttccatgtgggacttcttttcagcttttaaccattggaattttctacctgctatgttcctctctggaaaatatcaatttggaaatgctgcctttcaaatcaatgccatgatcatccatattgttgagtttgttgttggtgttccagaagtgtccccattttacaactttatgcacacacctggcaaatcattaacatgagcattcaacagtactgggatgggtggggtgggggtagggggnctcaccaacagaactggccagttgacattgcctgaaaaggcaccacctttaagggccagttgtggggttggtaagcacagttatgaaaatttctatctagcctccgttttgaatggttttaagaaattttgtatatggaggatggaaatgcttatatatttattgaaaatccttttatttgaaattaaaattattttggtatataattgtttgatatttggggagggtttttggagggggagataatgtcactgataaataaaaagctgttgattttgcaaaaaagtactgctagtgactgataaggatgcctttgttttgtacctgaaccaaatccttggttttacctttccttaatccaaaatatttaggcatctgaacatttttcaccaggattttcattatataccggggatttttaatttggtgccaatactttacaatt

SEQ ID NO: 368998 - DNA, 743 bp, Homo Sapiens
  misc_feature (675)..(695): n is a, c, g, or t
tgggtggcgaattcggcacgagggagagacaaaagaaggtccagctattttgtctggaaaattccttagcgatctcattgcccaccagaaaggacagatagagaagcagccaccgtttgagatctacttatgctttggggaagaatggccagatgggaaaccattggaaaggaaactcatcttggttcaggtcattccagtagtggctcggatgatctacgagatgttttctggtgatttcacacgatcctttgatagtggcagtgtccgcctgcagatctcaaccccagacatcaaggataacatcgttgctcagctgaagcagctgtaccgcatccttcaaacccaggagagctggcagcccatgcagcccacccccagcatgcaactgccccctgccctgcctccccagtaattgtgaatgccatcttcttccttctctttttttataatattgtacatatggatttttttattgtttagatttaaccagcttttaaatctctcttttctctaacagtgttagaagtttgtgattcctccaaatatgcctagatttaaagctgatttaatttatgggaacaatccaccttcagactttgcttctctttttcaaatctcctaccgccaccatgatataccatactacccaagacatttgcccctgggaagcgnnnnnnnnnnnnnnnnnnnnntcgagacctcccctctccaaggggcaccctttaaaccatgccgtctaa

SEQ ID NO: 368999 - DNA, 1281 bp, Homo Sapiens
gtcctgaaattggtcatgtagcttttctgcgaaatagtattgaatctgaatactttcacaaaataatactgaaaggtaaaccctaaatcttgccagactgcattagtattttggcattgaaacttgtgcaatatctgtgtaatgtagaatgtggggtgtgcatgcagatgtctggtactggagtaagctgaaggtatgtgcagtatttaagaaaatgtacattctaattaattcacttataaaaccatttacatattgtgtatatgtttttattttcaaatgataaactctagacatatattttgcaaaatgagcttgggtttaaaaagtgctttgtgccaaaaatatcatacctaatttttatagtgctttactatcagaatttatattgtttattatatcttttaaaagcagtaagcagttttcatctgacagcgtagataaaagaggagtataggaatttgaatgctagagcatctcccaggtgagccttattgcagatctttttgatatagtcacccataagcatggtgagctcctgctctcataaggtcagccaaagccccttaagaaggtacacagcacatctgcagtcatttcagaggtcctgtgaagtgtggtgatgcatctaacaccttttgctgctcactgaaaaaccagctttgaacttacaagattacactaaccatttttaaagtgcacaaaaatattattattagtcttaactaaaattacatattttataatgccctgcaactctaaaccatccttttgtttacacatttttgtatggtattttaagattatcaatcacttcaacatttctataaccttgtttgtatagcactttctcaagagctgtcaagtcccacatacagaatcatttcttttacaaaaaaatgtaatatgtaatcatgtgaaaaaacataaattttgtcacttgggacagtagcttcccagcctaagataattgcgtgaactctgttaaaactgattatcacctcatcaatggctttatttttaacctataaataacccctttcaatatacctggtttttacagcattgcaaaatctgtaaaaataacttttattggaaaatgtcatgaagtcatttttcattatttgtactaaacaatgttttatgtactccttttgtgttttatcttttgtttttccatctgtactcccctcatcctcctaatgttgagaaaatcaaatttcctgggtgtgtccttgttaagtgatcaaaagtaaatgttctctttgccattttagatgg

SEQ ID NO: 369000 - DNA, 1255 bp, Homo Sapiens
cctttagaatgccctggaaatatatttaagtggtaatgaaaaatagtaatcatagtaaaacgcaacaagaagaaaaccaacccaaaccagtgaagttttttagaacctttagaagggtggtctttattcaggttttactgtaatggtaaggattgactcaagagacagtattagtaaatttattgtgtatggatcaaaagtgaataatgtatgaatgagagctgtaagaaggatttttattttgttataatttagttaccattttcagtgttatttcaaaggttctttgaagaattttggggcagggcatcagattagagttttaaaatttgagtattttggatatcagtgttcctcatgaagatatacatggatattcaattttgatggcttccagatttgtaagattgtatgttgtatataccattctattaagaaacatgtccactgtgctttcaaacatagataaagcatgataaagattattatttaagatatacttgtatttatacctcagatattcttttgggttttgtacctcaaggcttttttcttcttattgtaaatacactttacgtgaatacagtctaagtgaagaaaataaataaaaggaagaggtttataacttgctctatatctgtacagattataatcaataagtgcactattattaaaatgtttaaagtaagggaaaagtctgggctgccttccttaatattgcatctcactcccacccttaaaaccacagattgcaaagcatagcattttagcatcaactaccaatcaaaagagcggatttgctgaaggaaaaatcggactgcaaatcattccaaggcccaaactgcaactggagccaccccactccccaaacaggaaaccctggtgaaggttccaggaagcacggagattctctccaacaaaggtccagctaggaaacgacgctgagaggatgacgacaacgtgcaacagcagaaagatgcttgcaagcagagtcagggtcaccagtgaatgccacaaaagttctctttcccactgtttaatttgacaagagaagaatttgaaggatatgaacattttcaagaactctgctgaggtcacttagagcgccatcacaacttatttgtgtgactaattgcctagattgtaagctctttgagggcagggcttgtctcttacacatctttataatcccctgcagcggctttcagtattttgtacttgtaggcacctaataaatttattatttgctatactg

SEQ ID NO: 369001 - DNA, 1087 bp, Homo Sapiens
  misc_feature (818)..(820): n is a, c, g, or t
  misc_feature (822)..(822): n is a, c, g, or t
  misc_feature (824)..(827): n is a, c, g, or t
  misc_feature (829)..(855): n is a, c, g, or t
aaaaaactacggctaggtacgaggcctgggtgtgcgaattcggcacgaggccgagccctgccaaccatggtgaacttgggtctgtcccgggtggacgacgccgtggctgccaagcacccgggactcggggagtatgccgcatgccagtcacacgccttcatgaagggcgttttcaccttcgtcacaggcaccggcatggcctttggcttgcagatgttcattcagaggaagtttccataccctttgcagtggagcctcctagtggccgtggttgcaggctctgtggtcagctacggggtgacgagagtggagtcggagaaatgcaacaacctctggctcttcctggagaccgggcagctccccaaagacaggagcacagatcagagaagctaggagagctccagcaggggcacagaggattgggggcaggaggagtctggaacacagccttcatgccccctgaccccaggccgaccctccccacaccctagggtaccccagtcgtatcctctgtccgcatgtgtggccaggcctgacaaacacctgcagatggctgctgccccaacctgggacctgcccaggaggttggagcagaaagggctctccctggggtggtgtttctcctctagggtattgggatgcatgttctgcactgccagcagagagggtgtgtctgggggccaccacctatgggacacggggtcgaaggggcctgtacactctgtcatttcctttctagcccctgcatctccaacaagtccaaggtgacagctggtgctaggggcgtggggttaataaatggcttatccttctctccnnnanannnnannnnnnnnnnnnnnnnnnnnnnnnnnncctcaaggccttctatgtcggggggcggaaaaagagggaatgaaatggcacatgggccatacctggtttcctgacccagtctttcttgaaccaaggggtaaaaatttgccggggtctccctatagggggggcccgtatttaatttccaaaaagccagggttaaccctccattaatgaaaacgggtttgcaaaaccccgggggaaatttacccccccctaaagggaggcgggc

SEQ ID NO: 369002 - DNA, 472 bp, Homo Sapiens
ggcatgagtattgtagatatttatattttgtgagatattaacttgtttaagaaaaatccgattggattactatggaaaaagcaacttgcctgttctgtttctttgcatactttgtgacctaacagttttaacagacattctattatatgaatacagtttttttgatactattagattaacttgaagtttaataccaaatattatgctaagagtagaaaagctttctgctgacccctgatttcttagaaatatcccacataatccagcttatcccttttctgtatatgtttattcaggtttacctgatgtctcaaaatgaaaccaaattaagcctttttaaaggctgatgtgccatttgtattaagttatctttgtcattttaaagacatgaattccccaagcctaattcctacttaaggaagagagacaatttagtccttactttagaaaataaatacttaagcataattgt

SEQ ID NO: 369003 - DNA, 771 bp, Homo Sapiens; identical to SEQ ID NO: 178312
  misc_feature (533)..(614): n is a, c, g, or t

SEQ ID NO: 369004 - DNA, 1075 bp, Homo Sapiens
gcgcgcacaggacacgcaggcacctaatcttatgcctcccccttttttggatgatgctgatgggaaccctcatccatcaagatatcaaagattaggttctgcccgtgaaaattgcatgcaggagcatcttatgccttataagggagcaacttccccaggactgaatcaagttttaagtcaagcacgcgaaccacgagatcagcccactggacagcatgattcaaagactacaacaggagcaagacctgagacgttctggtgaagcaggtatcagtaataccagccgcttaagtagaggctccataagttctacctcagaggttcattcaccaccaaacgtaggactaagacgtagtggacaaattgaaggtgtacggcaaatgcacagacaacgcaccaagaagtgaaatagccacagagcgggatctggtagcttggagtcgaagggtggtaatacccgagctatcagctggtgtagccagtaggcaagaagaatggagaactgcaaagggagaagaagaaataaagacttacaggtcagaagagaaaagaaaacacttaactgttccaaaagagaaaaaaatacccactgtctcaaagaatcatgctcatgagcatttcctggatcttggagaatccaaaaagcaacagacaaatcaacacaattatcgtacaagatctgcattggaagaactccagacctccagattgtgcaactaacataaaatgagctgcttgagagattgtaaataagatgaactattgattaatttgagtacccacagagtgctgtgtcttgacgacttaaaaatgaaaaagcaggattgccttttgagtagcttgcagtctagtggggagacaagcaggcaaacagtcacaacacagcaaaagtgaccttggagcatagtgggacttttggagtaggagtgctgcatttgactgagggaatcatggatacttcgcaggagaagtgaaatttgagctcagacttgaaaactgaggaggacataccagggacaggaggagacacaaaactccaagaaagaaggaaaaaagagaagccagaagcagcggc

SEQ ID NO: 369005 - DNA, 772 bp, Homo Sapiens
  misc_feature (23)..(23): n is a, c, g, or t
  misc_feature (29)..(29): n is a, c, g, or t
  misc_feature (112)..(112): n is a, c, g, or t
  misc_feature (114)..(114): n is a, c, g, or t
  misc_feature (427)..(428): n is a, c, g, or t
  misc_feature (544)..(544): n is a, c, g, or t
  misc_feature (557)..(570): n is a, c, g, or t
  misc_feature (701)..(725): n is a, c, g, or t
aaaccccggaggcggaagggttncagtgnagccaaagatcgcacccactgcactcccatcccgggcaaacagtagatgaactccgtctcaaaaaataaataaaatagaagtnancccttgtaactgtatttacccatgataatataatctgcacggtaagaattccttttacagacattctttatcaagaggtcggcccttctttttcaggcacataagccaaatgcaggcctgtgtgtagctgtgtgttttttctgtggttgccgcatttattccacctccagctggaccccccactgcaaatagagaacagcggtgggggatgggggttaaaaagtagagaacctcctttctgttaaactaatttcacgtgacagtgcatgtatttattcaataaaacctttatgttagctcaaaacacccagcnnacccctatcccattccccaccccaactcccctttctccactccatttccaacctccctaaataataaccaatctccccccattcctctctccctatccctatccaccactcctaantttttgccggggnnnnnnnnnnnnnntcaaaaacttttttcaaacctttttcttgttgccgcccgggcccccctcacggggacaggcaaccgcgggccaccccccgtttcccccaaaaaaatcctccggccacacaaataaagggcgcgtgggattnnnnnnnnnnnnnnnnnnnnnnnnngcggggccaccccggaccgttttttggaaaccaactccaggaacggg

SEQ ID NO: 369006 - DNA, 825 bp, Homo Sapiens
  misc_feature (417)..(464): n is a, c, g, or t
gggggccccagtgctgccagcccacccgcagcaagcggcggaaatacgtcttccagtgcacggacggctcctcgtttgtagaagaggtggagagacacttagagtgcggctgcctcgcgtgttcctaagcccctgcccgcctgcctgccacctctcggactccagcttgatggagttgggacagccatgtgggaccccctggtgattcagcatgaaggaaatgaagctggagaggaaggtaaagaagaagagaatattaagtatattgtaaaataaacaaaaaatagaacttatttttattatggaaagtgactattttcatcttttattatataaatatattacaccatctgcgtatatgtaccatatagtgagttatttttaccaagttttgtgctgcgcatttgctgcgtcttnnnnnnnnnnnnnnnnnnnnnnnnnnnnnnnnnnnnnnnnnnnnnnnngctttccctatccacaaacccaataccacaccgaccatgccggccgccctcggaccctcgaaaaacctttctaaaccattccgtttggccccggggctccccctaagtaaattgaacatggctcctaacctgctttccttaggaacaaccgggccaatggacaagggggcttcggattccccaccccataaaaaaacgcccccgcggggcaacccgagcctgttttgacaccaaattccaaaatggaaattcttgcaacgcccctttatgtggcgaccctatcaacaagggaaacccccaagcccagggttcgcaatatcaaaatctatcgctccccggcatctggcatactgaattccga

SEQ ID NO: 369007 - DNA, 491 bp, Homo Sapiens
gggttagaacctgttctcttgtatctgaatctgattgcaattactattgtactgatagactcccagcccattgcaagtctccagatatcttagctgtgtagtgattcttgaaattctttttaagaaaaattgagtagaaagaaataaaccctttgtaaatgaggcttggcttttgtgaaagatcatccgcaggctatgttaaaaggattttagctcactaaaagtgtaataatggaaatgtggaaaatatcgtaggtaaaggaaactacctcatgctctgaaggttttgtagaagcacaattaaacatctaaaatggctttgttacaccagagccgatctggtgtgaagaactctatatttgtatgttgagagggcatggaataattgtattttgctggcaatagacacattctttattatttgcagattcctcatcaaatctgtaattatgcacagttttctgttatcaataaaacaaaagaatcccaaa

SEQ ID NO: 369008 - DNA, 495 bp, Homo Sapiens
  misc_feature (24)..(24): n is a, c, g, or t
  misc_feature (64)..(64): n is a, c, g, or t
ccaaaaaggccaagcaaatttaangaaatgggggcttaaccatgcctccattgggaagtctagncctttggagccaggtacagtaagaaaaattagcctctgattcattaagtttgccacatgacttattttgatattttggatacattaactcacttaggagaattcagaaaagaatgggtgattaaagttcattacagctgaataaatgtgtctaaaacagactcttgtattctgaaagtacagtctacaactgataaaaccttatgattcttttctcccccattatgcccctatatatatcaagatttgggtactttattttagtagaaaatatatatcttttacatatgtatgtatttataaatgcatagatatatgtataaaaatttgtaagcgttagcggcattaattcaccaatgcatttggacaacttgatgtaactgactttattttatgtgactataataaaaagcataattttctcaaaaaaaa
